United States Patent Application Publication US 2024/0327476 A1 - sequence listing, part 57

SEQ ID NO: 108503 - DNA, 393 bp, synthetic construct
  misc_feature 1..393: note = Description of Artificial Sequence: Synthetic coding sequence
  source 1..393: mol_type = other DNA
atggaaggagccgcccttctcaaaatctttgtggtttgcatctgggttcagcagaaccatcccggctggaccgtggccgggcaattccaggagaaaaaaaggttcactgaagaggtcatagaatactttcagaagaaggtgagccccgtacacctgaagattcttcttacatccgacgaagcatggaagaggttcgttcgcgttgctgagctgcccagggaagaagctgacgcgctttatgaggccctgaaaaatttgacaccatacgtggcaattgaagacaaggacatgcaacagaaggagcagcagttccgcgagtggttcctcaaggtgtcttccaatcagatggaggattccggagtccaccggaaggctagttgtcactgcaaatag

SEQ ID NO: 108504 - DNA, 384 bp, synthetic construct
  misc_feature 1..384: note = Description of Artificial Sequence: Synthetic coding sequence
  source 1..384: mol_type = other DNA
atgggtagctgggtgcagcttatcacaagtgtcggggtgcagcagaatcaccctggctggaccgtcgcaggccagttccaggagaaaaagcgtttcaccgaagaagtgatagaatatttccagaagaaagtttctccggtgcacttgaaaatcttactgacctcagacgaggcctggaagcgattcgttagggtggccgagctgccaagagaggaggctgacgctctgtacgaagctctgaagaacttaaccccctatgtggcgattgaagataaagacatgcaacagaaagaacagcaatttcgggagtggttcctaaaggtgtcatctaaccagatggaagactcaggtgtgcacagaaaggcctcgtgccattgcaaatag

SEQ ID NO: 108505 - DNA, 198 bp, synthetic construct
  misc_feature 1..198: note = Description of Artificial Sequence: Synthetic coding sequence
  source 1..198: mol_type = other DNA
atgggtagttgggtccagctgatcacatctgttggggtgcagcagaatcacccaggatggacggtggcaggacaattccaggagaagaagcgatttaccgaggaagtgatagaatacttccaaaagaaggtgtcacctgtgcacctgaagatcctgctgacgagtgatgaagcctggaagcggttcgtgcgagtgtag

SEQ ID NO: 108506 - DNA, 384 bp, synthetic construct
  misc_feature 1..384: note = Description of Artificial Sequence: Synthetic coding sequence
  source 1..384: mol_type = other DNA
atggggtcttgggtgcagctcatcaccagcgttggggtgcagcaaaaccatcccggctggactgtagctgggcagttccaggagaaaaaaagattcactgaggaggtgattgaatactttcaaaaaaaagtgtccccagtacacctaaagattttgttaacatcagacgaagcttggaagagattcgtgagggtagcggagctaccgcgcgaggaggccgacgctctctatgaagcattgaagaacctgacaccctatgtcgctatcgaggacaaagatatgcagcaaaaagagcagcagttccgcgagtggttcctcaaggtctcttcaaatcaaatggaggattccggagtgcatcgcaaggcgagctgccactgcaaatag

SEQ ID NO: 108507 - DNA, 183 bp, synthetic construct
  misc_feature 1..183: note = Description of Artificial Sequence: Synthetic coding sequence
  source 1..183: mol_type = other DNA
atggggagttgggtgcaactcattacaagtgtgggcgtgcaacagaatcatcctggatggactgtcgccggccagttccaggagaaaaagcgctttacagaggaggtgatagagtatttccaaaagaaggttagccccgtgcacctcaagatacttctgacttccgatgaggcttggaaatag

SEQ ID NO: 108508 - DNA, 219 bp, synthetic construct
  misc_feature 1..219: note = Description of Artificial Sequence: Synthetic coding sequence
  source 1..219: mol_type = other DNA
atgggttcatgggtgcagctgattacttcagtgggggtccagcagaatcacccagggtggaccgtggctggtcagtttcaagagaagaagagatttacagaggaggtgatcgaatattttcaaaagaaggtgtcacctgtacacttgaagatccttctgacatctgacgaggcctggaagcgcttcgttagggtggccgagttgccccgcgaagagtag

SEQ ID NO: 108509 - DNA, 213 bp, synthetic construct
  misc_feature 1..213: note = Description of Artificial Sequence: Synthetic coding sequence
  source 1..213: mol_type = other DNA
atgggcagctgggttcagctcatcaccagtgtgggtgtgcagcagaaccaccctggctggactgttgctggacagtttcaggagaagaagagatttacagaagaggtcatcgagtactttcagaaaaaggtgagtcctgtacacctgaaaatcttattgacaagtgatgaggcttggaaacgatttgtccgtgtggcagaactgcctcgatag

SEQ ID NO: 108510 - DNA, 1302 bp, synthetic construct
  misc_feature 1..1302: note = Description of Artificial Sequence: Synthetic coding sequence
  source 1..1302: mol_type = other DNA
atgccatgcggcaagcaaggcaacctccaggtgcctggctctaaggtgctacctggcctgggagaggggtgtaaggaaatgtggcttcggaaggttatatacggcggagaagtgtggggcaaatcccccgagcccgaattcccaagtcttgtcaacttatgccagtcctggaagattaacaatctgatgtccaccgtgcactctgatgaggcaggtatgctgtcctactttctgttcgaggaactaatgagatgtgataaagactccatgcccgatggcaacctgtctgaggaagaaaagctgtttctctcttactttccgctgcataaattcgagctcgaacagaatatcaaggagctgaataccttggccgatcaagtcgacaccacacatgagttactgacgaagacttccctcgtcgccagttccagtggcgccgtttccggcgtgatgaacatactgggcttagccctggcccctgtgacagcaggtggctcactcatgttatcagctacagggactggattaggcgccgcagctgcaataaccaacatagtgactaatgtcctggaaaatcgctcaaacagtgccgcccgcgataaggcctctcgtctgggaccccttacaacatcccacgaagcatttggtggaattaactggagcgagattgaggctgctggcttctgcgttaataaatgtgtgaaagctatccagggcatcaaagacctgcacgcataccaaatggctaagtcaaatagtggatttatggccatggtgaagaacttcgtggcgaagcgacatatcccgttctggaccgccaggggcgtgcagagggcatttgaaggcacgaccctagcaatgactaatggggcctgggttatgggagcggccggagcagggtttttgcttatgaaggacatgtcctcattcctccaatcatggaaacacttggaggacggtgccagaacagagacagcagaagaacttcgggctcttgctaagaaactggaacaagagctcgatcgtctcactcagcaccacagacatcttcctcagaaagctagccagacttgctcttccagtcgcggccgggcagtgcgagggtcacgcgtggtgaaacctgagggttcaaggtcacctcttccttggcccgtcgtggaacaccaacctagactgggccctggcgtcgccttacgcacccctaagagaaccgtctcagcgcctagaatgttgggccatcaacccgccccccccgctccagctcggaagggacgccaagcacccgggcgacatcgacagtag

SEQ ID NO: 108511 - DNA, 1032 bp, synthetic construct
  misc_feature 1..1032: note = Description of Artificial Sequence: Synthetic coding sequence
  source 1..1032: mol_type = other DNA
atggataatcaagcggaacgcgagagcgaggccggggtgggccttcaacgggatgaggacgacgcacccctgtgtgaggatgtggaacttcaggatggagacctgagtccggaggagaaaatttttctgagagagttccctcgcctcaaggaagatctgaagggaaacatcgataaactgcgcgccctggctgacgacatcgataaaacccacaagaagtttacaaaagctaatatggtggctacctctactgcggtgattagcggcgtcatgtcgctccttggcctcgcactggctccggcaacgggcgggggctctctgttactcagtactgctggccaaggactcgccactgccgccggagtcacttccatagtgagtggcaccctggagcgaagcaaaaacaaagaggcacaggctcgggctgaggacatcttaccaacgtacgaccaggaggacagggaggacgaagaagaaaaagctgactatgttaccgctgccggtaaaataatttacaacttgcgaaacaccctgaaatatgctaagaagaatgtgagagccttctggaagcttcgcgccaaccctcgtctcgcaaatgcaactaagagactcctgacaacaggtcaggtgtctagccgctctcgggtgcaggttcagaaagccttcgcaggcaccacgcttgctatgaccaagaatgcccgtgtactgggcggcgtgatgagtgctttttcactcggatacgaccttgctacactgagcaaggaatggaagcacctcaaggagggggctcgcacgaagtttgccgaggaattgagggccaaagctctggagttggaaaggaagctgacagaactgacacagctgtataagtcactgcaacagaaagtcagaagtagggcacgcggcgttggcaaagacctgacaggtacttgcgagacagaggcttattggaaagaactccgagaacacgtctggatgtggctctggctctgtgtgtgcctatgtgtgtgcgtatacgtgcagttcacatag

SEQ ID NO: 108512 - DNA, 540 bp, synthetic construct
  misc_feature 1..540: note = Description of Artificial Sequence: Synthetic coding sequence
  source 1..540: mol_type = other DNA
atgtttaaagttattcagcgctcagtgggaccagccagtctcagtctcctgacttttaaggtttacgccgcaccgaagaaagattcccctcccaagaatagcgtaaaggtcgacgagctcagtctttacagtgtacccgaaggccagtccaagtatgtcgaagaggctcggtcccagctggaagagtctatctctcaattgcggcattattgtgaaccatacaccacgtggtgccagacagcaatgacaatctccaaaatgcatttattgttttttcctaggctcggagtcatcggatttgccggtttaatagggctgctactggcgcgcgggtcaaaaataaagaaattagtatacccgcctgggtttatgggtttagctgcttctttgtactacccccagcaggcgatagtgttcgctcaggtgtccggagagcgcctatacgattggggcctgaggggctacatagtgatcgaagatttgtggaaggaaaacttccagaagccgggcaatgtgaagaactcgcccggtacaaagtag

SEQ ID NO: 108513 - DNA, 597 bp, synthetic construct
  misc_feature 1..597: note = Description of Artificial Sequence: Synthetic coding sequence
  source 1..597: mol_type = other DNA
atgtttaaggtgattcagagatcagtgggtccagccagcctgtccctgcttaccttcaaggtatatgccgcccctaagaaggatagccctcctaaaaactcagtaaaggtcgacgaactgtcactatactctgtgcccgaaggccagagcaaatatgtagaggaagccagaagccagctcgaagaatctatttctcagctgaggcactactgtgaaccctatacgacatggtgccaggaaacttattcccagactaagcccaagatgcagagcctcgtccagtggggccttgattcctatgattatctgcagaacgcccctcctggcttctttccaagattgggcgtgatcggatttgccggactcatagggctactactagcacgcggttctaagataaaaaaactggtctatcccccaggattcatgggccttgccgccagcctttattaccctcagcaagcaattgtcttcgcccaggtgagcggggaaagactctatgactgggggttgcgtggatatatcgtcatcgaagacctgtggaaggaaaacttccaaaaacccggaaacgtgaaaaatagtccaggaactaaatag

SEQ ID NO: 108514 - DNA, 537 bp, synthetic construct
  misc_feature 1..537: note = Description of Artificial Sequence: Synthetic coding sequence
  source 1..537: mol_type = other DNA
gtctacgcagcgcctaagaaagatagccctcccaagaacagtgtcaaggtcgacgagttgagtctgtattccgtgcccgagggtcagtccaaatacgtggaggaagcccgctcccagctcgaagagagcatatcccagctgagacattattgcgaaccttataccacatggtgtcaggaaacgtactctcagactaagcctaaaatgcaatcactggtccaatgggggctagattcctacgattatctgcaaaatgcacctccagggttctttcctcggctgggtgtaattggtttcgcagggctcattggattgttgctggcacggggttccaagatcaaaaagctcgtttatcctccaggattcatgggattggccgcctcactttactatccccagcaagctattgtcttcgcccaagttagcggtgagcggctctacgactggggacttaggggctatatagtgatcgaagacctttggaaagagaacttccagaagcccggcaatgtgaagaacagtcctggcaccaaatag

SEQ ID NO: 108515 - DNA, 1332 bp, synthetic construct
  misc_feature 1..1332: note = Description of Artificial Sequence: Synthetic coding sequence
  source 1..1332: mol_type = other DNA
atggaccggctcggaccttttagcaatgacccttcggataaacctccttgccgaggctgctcctcctacctcatggaaccgtatatcaaatgcgccgaatgcggtcccccgccgttttttctgtgcctccagtgcttcaccagaggttttgaatataaaaaacatcaaagtgatcacacctacgaaattatgacctcggacttcccggtcctggaccccagttggacggctcaggaggagatggcgcttctggaggcagttatggattgcggattcgggaattggcaagacgtagccaaccagatgtgcactaaaacaaaagaagagtgcgagaaacattacatgaagcacttcatcaataatccactctttgcctcaacactgttgaacctgaagcaggcagaggaagcaaagactgctgacacagcgataccattccattctacggatgatcctccccgcccaacgtttgacagccttttgagccgggatatggccggttacatgcccgcccgtgccgatttcatagaggagtttgacaactatgctgagtgggacctgagggacattgatttcgtggaggatgactcggacatcctgcacgctctgaaaatggccgttgtggatatttatcactctagactcaaagaaaggcagaggcggaagaagatcattagggaccacgggctaattaaccttcggaagttccagctcatggaaaggagatatcctaaggaagtacaggatctttacgagactatgcgccgatttgctcggattgtcggacctgtggagcacgacaaattcatcgagtcacacgccctggagtttgagctgagaagggaaattaagagattgcaggagtatcgaacagccggcattaccaatttttgtagcgccaggacatatgatcacttgaagaaaacccgcgaagaggaaagactcaagcgcactatgctgagtgaggtcctccaatacatccaagactccagcgcatgtcagcaatggcttcggcggcaggcggatatcgactctggcctgagtccatcgattcctatggcctccaattctgggagaaggagcgcacctcctctcaatctgacaggattgcccggaaccgaaaagcttaatgaaaaggagaaggagctgtgtcagatggtgagattagttccaggcgcttatcttgaatataaatcagcgctccttaacgaatgtaataagcagggcggccttcgcctggctcaggctcgggcccttattaaaattgatgtgaacaaaacccgaaagatctacgacttcttgatccgggaaggttacatcaccaagggttag

SEQ ID NO: 108516 - DNA, 978 bp, synthetic construct
  misc_feature 1..978: note = Description of Artificial Sequence: Synthetic coding sequence
  source 1..978: mol_type = other DNA
atggtaccacgcgaagcacctgagagcgcacaatgtttgtgccctagcctgactattcctaacgccaaggacgtgctgaggaaacggcacaaacgaaggagcaggcagcaccagcggttcatggcccgaaaagcactcctccaggaacagggcctgctgtctatgcctcctgagcccggctccagtcctctaccaactccttttggcgcagccacagcaacagaagccgcctcctcaggcaagcagtgcctccgcgctggaagtggctctgctccctgcagtcggcgaccagccccagggaaagcgtctggcccattaccctctaagtgcgtagccattgactgtgaaatggtgggtaccggcccccgcggtcgagtcagtgagcttgcgcgatgcagtatagtgtcctatcacggcaacgtcctttacgataagtatataaggcccgagatgccaattgctgactataggacccgatggagtggcattacccgacaacacatgcgaaaagcagtaccctttcaggtggcccagaaggagatcctgaaacttttgaaaggcaaagtggtcgttggacacgccctgcacaatgacttccaggcactcaagtacgtacaccctcgatcccagaccagggacactacgtatgtccccaacttcctcagtgagcctggtctgcacacacgcgcccgcgtctctctcaaggatctggctctccagctgctgcataagaagattcaagttggccaacacgggcattcctcggttgaggacgctactacagccatggagctgtatcggctcgtggaggtgcagtgggagcaacaggaggctagaagtttgtggacctgccccgaagacagggaacccgacagctctaccgacatggaacaatatatggaagaccaatattggccagatgatcttgcacacggtagtcgcggcggcgcccgtgaagcgcaagatcgacgtaactag

SEQ ID NO: 108517 - DNA, 984 bp, synthetic construct
  misc_feature 1..984: note = Description of Artificial Sequence: Synthetic coding sequence
  source 1..984: mol_type = other DNA
atggtgccacgcgaggcccctgaatctgctcaatgtctgtgtcccagcctgaccatcccaaacgcgaaagatgttcttcgaaagagacacaaaaggaggtctaggcagcatcagagatttatggcccgtaaggcacttttgcaggagcagggcctcttgagtatgcctccagagcccggctcatctccattgccaacccccttcggcgctgccaccgccaccgaggcagcttcttctgggaagcagtgcctgcgggctggcagtgggagtgccccttgctcaagaagaccagcccctgggaaggcttctgggccactgcctagtaagtgcgtggcaattgactgtgagatggtagggacagggccacgcggccgggtgtcagaactggcgcgctgctctatcgtttcttatcatgggaacgttctgtacgataaatacatcagacctgaaatgcccattgccgattataggacacggtggagtggcattacacgacagcacatgcgtaaagcggtgcctttccaagttgcccagaaggaaattctgaagctgctaaaagggaaggttgtcgtgggccacgctcttcacaacgattttcaggcgttgaagtacgttcaccccaggagtcagacccgcgacaccacctatgttcctaattttctctctgagccagggctgcatacccgggcccgcgtctccttgaaggacctcgccttgcagctcctgcacaagaagattcaggtaggccagcatggtcactcctctgtggaagatgccacaaccgctatggaattatatagactcgttgaggtgcagtgggaacagcaagaagccaggagcctgtggacatgccccgaagatagagaacccgacagtagtactgacatggagcaatatatggaggaccagtccactcagtactgggcactgaagcagaagagtgagaaacaggatagcgggctcaactccggcgctttcgtgtag

SEQ ID NO: 108518 - DNA, 1515 bp, synthetic construct
  misc_feature 1..1515: note = Description of Artificial Sequence: Synthetic coding sequence
  source 1..1515: mol_type = other DNA
atgcccactgttgaggaactgtaccgcaactacggtattctcgccgatgcaacagagcaggtgggtcagcataaggatgcgtaccaggtgatcctcgacggggtcaagggcggcaccaaagaaaagagactggccgcccagttcatacctaagttcttcaaacacttcccagaacttgccgacagcgctattaatgcccagctcgatctgtgcgaggacgaagatgtgtcaattagaaggcaagcgatcaaagaactgccccaatttgctacgggcgaaaaccttcctagagttgcagatatcttaactcagcttttgcagactgatgactctgcggaatttaatctggtcaataacgctcttctctccatcttcaagatggatgcaaaaggtacactggggggccttttttcccagattttgcagggtgaagatatcgtgagagagcgagctatcaagtttctgagcaccaagttgaaaaccctccccgatgaggttctgactaaggaggtggaggagttgatattgactgagtcgaagaaggtcctggaggacgtgacaggagaggagttcgttttgttcatgaagatcttgtcgggtctgaagtctctgcaaacagtgagcgggcgtcagcagctggtggaactagtggctgaacaggctgatctggagcagaccttcaatccatccgatccagactgcgtggacaggcttctccagtgtaccagacaagcagtgcccttgttttcgaaaaacgttcatagcacccggtttgtgacctacttttgtgagcaggtcctgcctaatctgggaacactgaccacgcccgtggaggggctggacatacagctcgaggtgctgaagctgctggctgagatgagctctttttgtggggatatggaaaagttggaaacaaatttacgaaagctgtttgataaactgctggagtatatgccattgcccccggaggaggcggaaaacggcgagaacgctggtaatgaagagcctaagttgcagttttcttatgtggaatgcctgttatatagctttcaccagttaggacggaaacttcccgacttcctgactgccaagctcaacgcagaaaagctgaaagactttaaaattcgcctgcagtactttgctaggggcctgcaggtttacatcagacagctgagactcgccctgcagggaaagactggcgaggccctcaagaccgaagaaaataagatcaaggtggttgcacttaagatcactaacaacattaatgtgcttatcaaagatctgttccacataccaccatcctacaagtccaccgtgaccctgtcctggaaacccgttcagaaagtggaaattgggcagaagcgagcctccgaagatacaactagtggcagcccccccaagaagtcatccgccggcccaaagcgcgacgctagacagatttacaacccacccagcgggaagtatagcagtaatctgggcaatttcaattacgagaggagccttcagggaaagtag

SEQ ID NO: 108519 - DNA, 1353 bp, synthetic construct
  misc_feature 1..1353: note = Description of Artificial Sequence: Synthetic coding sequence
  source 1..1353: mol_type = other DNA
atgccaaccgtggaggaactctatagaaattacggaatcctggccgatgccacagagcaggtgggacagatcaggagacaagccataaaagagctgccacagtttgcgacaggggagaatctgcccagggttgctgatatactgacccagttactgcaaactgatgatagcgcggaatttaatttggtcaacaatgccctcctgtctatctttaaaatggatgctaaaggcaccctcggaggactgtttagccagattctacagggagaagatatagtgagggagcgtgccattaagtttctcagcacaaaattaaaaacactcccggatgaagttctaaccaaggaagttgaggaattaatcttgactgagtccaaaaaggttcttgaagatgtaacgggcgaggagttcgtccttttcatgaaaatactttccgggttgaagtccctccagacagtcagtggaagacagcagctggtggagctcgtcgcagaacaggccgatctcgaacagacgtttaacccctctgatccagattgcgtggatcgactgctacagtgcacccgacaggctgtgcctctgttctctaagaatgttcactcaacgagattcgtgacatatttttgcgagcaagtcctgccgaatctcggaactctcacaaccccagtggaaggcctggatatacaactggaggtacttaagctcctggctgagatgagctccttttgcggcgatatggagaagcttgagactaatcttaggaagctttttgataagctgctggaatacatgcctctgcctcccgaggaggctgagaacggagaaaatgcaggcaacgaggaacccaaactgcagtttagctacgttgaatgtttgctgtattcgtttcaccaacttgggaggaagctgccggacttcctgactgccaaactgaacgctgaaaaactcaaagacttcaagattcgcttacagtacttcgctcgcggcctgcaagtgtacattcgccagctgcgcctagccttacaagggaaaacaggggaggctctcaaaaccgaagaaaataaaatcaaagtagtggcactgaagattaccaacaacattaatgttctcattaaagatctctttcacatccccccgtcatataagtccacagtcacgctgtcgtggaaacctgtgcagaaagtcgagatcggccagaaacgagcaagcgaagacactacttctggcagtcctcctaagaagtcttccgctgggcccaagcgggacgctcgtcagatttacaatcctccctctggcaaatactccagcaatctggggaattttaactacgaacgctccctgcagggcaagtag

SEQ ID NO: 108520 - DNA, 1575 bp, synthetic construct
  misc_feature 1..1575: note = Description of Artificial Sequence: Synthetic coding sequence
  source 1..1575: mol_type = other DNA
atgcccacggtggaggagctttatcgtaactacggtattctggctgatgctacagagcaggttggtcagcataaggatgcataccaggttatcctggacggggtgaagggtggaactaaggagaagaggctcgctgcccaattcattcccaaattcttcaagcatttcccggaattagctgactccgctataaatgctcaacttgacttgtgtgaagatgaggatgtctcaattcgaagacaggccatcaaggagctaccccagtttgctacgggcgagaatctaccgcgcgtcgctgacatcctgactcagcttcttcaaactgacgactccgcagaatttaacctggttaacaatgctttactctccattttcaaaatggatgccaaaggtactctgggggggctctttagtcagatcctgcagggcgaggatatagtgcgcgagcgggcaattaagttcctctcgactaaactgaaaacactgccagatgaggtgctgaccaaagaggtcgaggaactcattctgacggaatcaaaaaaggtgcttgaagatgtgactggagaagaatttgttctttttatgaaaatactgtcgggtttgaaaagccttcagacagtgtcagggaggcagcaactggtggagctggtagcagagcaagctgacctagagcagacatttaacccctccgacccagactgcgtggatcggctgttacagtgtactagacaggcagtgccgctgttttctaagaacgttcacagcacgcgctttgttacttacttctgcgagcaagtcctccctaatttgggaactctcactacacccgtagaagggttagacattcagctagaagttcttaagttgcttgctgagatgtcaagtttttgcggtgatatggagaaactggagacaaacctgagaaagctctttgataagttactggagtatatgcccctgcccccagaagaagcggaaaacggcgagaatgccgggaacgaagagcctaagctacagtttagctacgtggaatgtcttctttactctttccaccaactcggtaggaagctccccgatttccttacagccaaactaaacgccgagaaactcaaggatttcaaaattagactgcagtatttcgctcgtgggcttcaagtgtacatcaggcagttacggctggccctgcaggggaaaacaggcgaagcgctcaagactgaggagaataagattaaagtggtagcactgaaaatcaccaataatatcaatgtcctgatcaaagaccttttccacattccaccctcatacaagtctacagtgacgctcagttggaagcctgttcagaaggttgaaatcgggcagaagcgcgcttcagaggatacaacctcaggctcacctcctaagaagtcttccgcaggacctaagcgcgatgccaggcagatctacaatccaccgtctgggaagtactcgtcgaacctcggcaatttcaattacgagcaacggggggcgttccgaggatcgcggggtggcagaggttggggaaccagaggtaaccgatcacgggggcgcctgtattag

SEQ ID NO: 108521 - DNA, 1533 bp, synthetic construct
  misc_feature 1..1533: note = Description of Artificial Sequence: Synthetic coding sequence
  source 1..1533: mol_type = other DNA
atgccaaccgtggaggaactgtaccgaaattacgggattctggccgatgccacagagcaggtgggtcagcataaggatgcctaccaggttatcctggatggggtgaagggaggaactaaagaaaagcgtctcgcagcccaatttatccctaagttttttaagcacttcccagaactagctgactctgccataaatgcccagttggacctctgtgaggacgaggacgtttcaatccgccgccaggccatcaaagagctgcctcagtttgccaccggagagaacctgccccgggtggctgacatcttgactcagctccttcagacagacgattctgccgagttcaacctggtgaataacgcgcttctctctattttcaagatggacgctaaaggtacccttggggggctctttagccaaattttgcagggcgaggacattgtccgggaaagggcgattaagttcctgtccaccaaacttaagacgcttccggacgaggtgctcacaaaagaagtggaggagctgatcctgacggagtcaaagaaagtgctggaggatgtgactggcgaagagttcgtcttattcatgaaaattttatccgggcttaaaagccttcagacagtcagcggtcgccagcagctggtggaactagttgctgaacaagccgacctagagcagacttttaatcctagcgatcctgactgtgtggaccggctactgcagtgtacgcgtcaggctgtacccctttttagtaagaacgtccactcgacccgctttgtgacctacttttgcgagcaggtgcttcccaacctaggcactctgaccacccccgtggaaggactggatatccagttggaggtcctgaagttgctagctgagatgtcctccttctgcggagacatggagaaactggaaaccaacttgcgaaagctctttgataagctcctggagtatatgcctctgcctcctgaggaggccgagaatggagagaacgcaggcaacgaagagccaaagctgcaattcagctatgtcgaatgtctgctctatagcttccaccaactgggacgcaaactgcccgatttcctcacagctaaactgaacgccgagaagctcaaagatttcaaaattcggctgcagtacttcgcccgcggactccaggtctatatcagacagctcaggctggccctgcaaggaaagactggtgaggctctcaagaccgaggagaacaagatcaaggtcgtggccctgaaaatcacaaacaatattaatgtgctaattaaggacctgttccacatcccacctagctataagtccactgtgactctgtcctggaagcctgtgcagaaggtcgagataggacagaaacgggcctccgaagacacaaccagtggatcacctcccaaaaaatccagcgctggcccaaaaagagacgcaaggcagatctataatccaccctccggaaaatacagttcaaatctgggcaacttcaactacggagagcgattccgtctgggtactaggaacatgagagattag

SEQ ID NO: 108522 - DNA, 1089 bp, synthetic construct
  misc_feature 1..1089: note = Description of Artificial Sequence: Synthetic coding sequence
  source 1..1089: mol_type = other DNA
atgcaggcagagcgcggagccagaggggggcggggacgtcggcccggccgggggcgacctggtggagacaggcacagtgagcgacctggtgcagcagccgcggttgctcggggggggggcgggggcgggggcggtgacggcggagggaggagaggaagaggacgaggacgtggcttcagaggcgccaggggaggacggggcggagggggggccccgagagggagtaggcgagagcctggtggttggggtgcaggggcgtccgcccccgtagaggacgatagcgacgccgagacctacggtgaagaaaacgatgagcagggaaattactcaaagaggaagatcgtgtcaaattgggatcgataccaagacattgagaaagaagtgaacaacgagagtggagaatcacagaggggcaccgacttttctgtcctactgtcttccgccggagactcattctctcagttccgctttgcggaggaaaaggaatgggatagtgaggccagttgtcctaaacagaacagcgcgttttatgttgactctgagttgcttgtgcgtgcgcttcaagagttaccactttgtcttagattgaacgtcgcagcagagctcgtccagggcactgtcccccttgaagttccccaagttaagcctaagagaacggacgacggcaaaggacttggtatgcagctgaagggacccctaggacccgggggcagaggaccgatattcgagctgaaatcagttgcggctgggtgccccgtattactgggcaaggacaatccttcccctggtcctagtagggattcccagaagcccactagcccccttcaaagcgccggtgatcatttagaggaggagctggacctgctcttaaatttggacgcgccaatcaaggaaggcgataatatccttccagatcagacaagtcaggacttgaaatccaaagaggatggggaagtggtgcaggaagaagaggtgtgcgcaaagccaagcgtgacagaggagaaaaacatggaacccgaacaaccttctacgtcaaagaacgtgacggaggaggagctagaggactggttagactcaatgatctcctag

SEQ ID NO: 108523 - DNA, 4125 bp, synthetic construct
  misc_feature 1..4125: note = Description of Artificial Sequence: Synthetic coding sequence
  source 1..4125: mol_type = other DNA
atgagtagttcctttttcaacccttcgtttgcattcagctcacattttgatcccgacggcgccccattatccgaactgagctggccctcatcccttgccgtcgtggctgtgtccttcagtggtctctttgccgtaatcgtgcttatgctggcctgcttgtgctgtaagaagggcggaatcggattcaaagaattcgagaacgccgaaggtgacgaatacgcagcggacttagcccagggatctcctgctaccgctgcccagaacggccctgacgtgtacgtgttgcccctgaccgaggtcagcctgcctatggctaagcagcccggtcggagcgtgcagcttttaaagagcactgatgttggacgccacagtttgctgtacctgaaggagataggccggggctggttcggcaaagtgtttttgggcgaagtgaactccggtatttcatccgcccaggtggtggtcaaggaactccaggcttccgcctccgttcaggagcagatgcagtttctcgaagaggttcagccgtatcgcgccttaaagcactcaaacctcttgcaatgtcttgcccagtgcgctgaggtgactccatacctgctggtaatggagttctgccctctcggtgacctgaagggatacctgcggtcttgccgagttgctgaatcaatggctcccgaccctagaacccttcagcgtatggcttgtgaggtggcatgtggcgtgctacacctacacaggaataatttcgtccacagcgatctcgctctgagaaactgcttgttaacagcggatcttactgtcaaaataggcgattacggcctagcccactgtaaataccgcgaggactattttgtgactgccgatcagctctgggtgcctctgaggtggatcgcgcccgagctggtggacgaagtacatagtaaccttttggtggtcgaccagacaaaatctgggaacgtatggtccttaggagttacaatttgggagctcttcgagttgggtacacagccctatcctcaacattctgatcagcaggtgctggcctacacagtcagggaacaacagcttaaactccccaagccacagctgcaacttactctctccgatcgttggtatgaggttatgcaattctgttggctgcagccagagcaaaggccaacagcggaggaagtgcacctcctgctctcctacctatgcgctaagggcgccaccgaggcagaggaggaatttgaacgtagatggcgcagtctgcggcccgggggaggaggggtggggccagggccaggtgcggcagggcccatgctgggaggcgtggtggaactggctgccgcttctagttttccacttctggaacagtttgccggtgatggttttcatgcggatggagacgacgtgctgacagtgactgagacctctcgcggacttaactttgagtataagtgggaagcaggccgtggcgcagaggctttccccgctactctgtcccccggtcgcaccgctaggctgcaagagttatgcgccccggatggcgcacctcccggagtggttcccgtcttgagtgcccacagtccctccttgggctctgagtattttattcggctagaagaggccgcccctgcagcgggccatgaccctgactgcgcaggctgcgcaccctcccccccggcgacggcggaccaggatgacgactctgatggcagcaccgctgcgtccctggcaatggagcctctcttgggccatggaccacccgtggatgtcccttgggggcgtggtgaccactatccccgccggtctctggctcgggatcccctctgtccaagtcggtcaccaagcccctcagcaggtcctctgtcactggcagaaggcggcgccgaggatgcagattggggagtcgctgcgttctgccctgcatttttcgaagatcctctcgggacctcacctctcggatcttcaggggctcctcccctgccacttaccggggaggacgaactcgaagaagtaggggcacgccgcgcagcccagcgtggccactggcgatccaacgtcagtgctaacaataactcgggatctcgatgccctgaatcctgggaccctgtctctgctggaggacatgcagaaggatgtcctagcccgaagcagactccacgggcttcccccgaacctggttatcccggcgagcctttgcttggactgcaagccgcctcagcccaggagccaggttgttgccctggactgccgcacttgtgcagcgctcagggcttagcgcccgctccatgcctcgtcaccccaagctggacagagactgcatcttcaggcggagaccaccctcaggcagagcctaagctggccaccgaagccgaaggcaccactggaccacggttgcccctgccctccgtgccctctcccagtcaagagggagcccccctccccagcgaagaagcttctgcccctgacgcccctgacgctttaccagattccccaacacccgctacgggaggtgaggtctccgccatcaagctggcctctgccctgaatggatcctcctcgtctcccgaagtcgaggccccatcctccgaagacgaggatacagccgaggcaaccagtggaatttttaccgatacttccagtgacggcctgcaggcgcgaaggcccgacgttgtccccgcattcaggtctctccagaaacaggtggggactccagactctttggacagccttgacattccatccagcgctagcgatggcgggtatgaggtgttcagcccatcggcaacaggcccaagcgggggacagcctcgggccctagacagtggctatgataccgagaattacgagagtcctgagttcgtcctaaaggaggcccaggagggatgcgagccccaggctttcgctgaacttgcttccgaaggcgaaggccccgggccggagacccggctcagcacatccctgagtggattgaatgaaaagaacccctatcgcgatagcgcgtatttctctgatttagaagcagaggctgaagctactagtgggcccgagaagaaatgtggcggcgaccgcgccccagggccagaactcggactgccttccacaggacagcctagtgagcaggtttgcttgagaccaggtgtgagcggggaggctcaaggttctggacccggcgaggtgctgccccccctgctacagctggaaggcagtagtccagaaccgtcaacctgtccctctggcctggttcctgagccacccgagccacaagggccagccaaggtgcggccaggaccatctccaagttgctcgcagtttttcctgctgacacctgtgcctcttcggtcagaagggaattcctctgagtttcaggggccgcccggcctgctgagcggccctgcacctcagaagaggatgggtggccccggcactcctagggctcctttaaggctggccctccccggcttgccggccgcgttagagggtaggccagaagaggaggaagaagactccgaggatagcgacgaatccgacgaagagctgaggtgttatagcgtgcaggagccctcggaagatagtgaggaagaggcgcctgctgtgccggttgtggtcgccgaatcgcagtcagctcgaaatctgagatctctacttaagatgccaagtctattgtcagagaccttttgcgaggacctcgagcggaaaaagaaggccgtgtccttcttcgatgatgtcacggtgtatctgttcgatcaggaaagccctaccagagagctcggtgagccctttccaggggccaaggagagtccccccacattcttacgaggcagccccgggtccccatcggctccaaaccggccccagcaagccgatggttcaccgaatggctccactgcggaagagggcggggggttcgcatgggacgatgactttcccctgatgactgcgaaggctgcttttgctatggctttggatcccgcggcgcccgcgccagccgcgcccacgcccacccctgctcctttttctaggttcacggtgagccctgcccctacaagcagattttccatcacccacgtcagcgatagtgatgcagaatccaaaaggggccccgaagccggcgccggtggcgagtccaaagaagcttag

SEQ ID NO: 108524 - DNA, 2640 bp, synthetic construct
  misc_feature 1..2640: note = Description of Artificial Sequence: Synthetic coding sequence
  source 1..2640: mol_type = other DNA
atgagtagctccttctttaatccatccttcgctttttcttctcactttgaccctgacggagcgcccttgtctgaactgtcttggccttcttccttagcagtggtggcagtttccttctccggactcttcgcggtcatcgtgctgatgctggcctgcctgtgttgcaagaaaggcgggataggtttcaaagaatttgagaatgccgagggagatgagtatgcagcggatctggcacaaggctctccggccactgccgcacagaacggtcctgatgtgtacgtactccccctgactgaggtctcgcttccaatggcgaaacagcccggccggtccgtccaattattaaaatccaccgatgtgggcagacacagcctcttatacctcaaagaaatcgggagaggttggttcggcaaagtttttctgggggaagtgaactccgggataagtagtgcacaggtcgtggtgaaagagctgcaggcctccgcatcagtgcaggaacaaatgcagtttctggaagaggtccaaccttacagagctttaaaacattcaaacctgctgcagtgcctggcccagtgtgctgaagtgaccccttatctcctcgtgatggagttttgcccactgggagatctgaaaggatatctgcgaagctgccgggtagctgaaagcatggctccagacccccggaccttacagaggatggcttgtgaggtagcttgtggcgtgctgcatttgcatcgaaacaatttcgtgcattccgatctggcactgcgcaactgccttttgactgcagatctcacggtaaagattggagattacggattagcccactgcaagtatagggaggattactttgtgaccgctgaccagctgtgggtgcccttgcgttggatagctcccgagttggtagatgaggtccactctaacctccttgtagtggaccagacaaagagtggaaacgtctggtctcttggagtgacaatttgggagctgtttgaactgggaactcagccttacccgcaacattcagatcagcaggtgctcgcttataccgtgcgcgaacagcagcttaagctgccaaagccgcagctgcagcttacactgtcagatcggtggtacgaggtgatgcagttctgctggctccagcctgagcaacggcctactgctgaggaggtccacctgctcttgtcttacctgtgcgcgaaaggagctactgaagccgaggaggagtttgagcggagatggcgctcactaagacctggtggggggggcgtaggcccaggccctggcgccgctggacctatgttagggggggttgtggaactggcggccgcatcttccttcccattgctggaacagttcgcaggcgacggcttccacgccgatggggacgacgtgcttacagaactctgtgcacccgacggcgcgccgcctggcgttgttccagtgcttagtgctcacagtcctagtctcggcagtgaatactttattcggctggaggaagctgcacccgctgcagggcatgaccccgattgcgccgggtgtgccccgagccctccagctactgccgatcaggatgatgattcggatggctcgaccgctgcatctcttgcaatggaacctctcttggggcacggtccaccagttgatgtcccctgggggcgcggagatcactatccgcgaagatcactggccagagatcctttgtgtccatctcggtcccccagcccctcagcgggccctctgagtcttgcagagggcggcgccgaagacgccgactggggagtagccgccttctgccccgcctttttcgaggatcctcttggcaccagcccattgggctcctccggcgctcccccactccccttgaccggggaagacgagcttgaagaggtgggcgcccggcgagccgcacagagaggccattggcgatctaatgtttcggccaataataactccggatcgcgctgccctgaaagttgggatcccgtcagcgctggggggcatgccgagggatgcccatcccctaagcagacaccccgggcgagtccagagcctggctaccctggggagcccctgctgggtctacaggccgcctctgcacaggagcccggttgttgcccgggacttcctcacctgtgctccgctcaggggctggcccccgcaccttgtttagtcacacccagctggacggaaacagcatcaagcggaggcgatcatccgcaggccgaacccaaactggcaacagaagccgaaggcactacaggcccccgtctgccgctgccctcagtcccatcgccgtctcaggaaggggccccgttaccatccgaagaggccagcgctccagacgcccctgacgctctgcctgatagtcccacgccggcgacgggcggggaagtgtctgccataaagctggcatccgcactcaacgggagttcctctagcccagaagtagaggccccctcatccgaagatgaagatactgctgaagcgacttctggcatcttcactgacacttcatccgatggactgcaggcccgcagacctgatgtggtgccggccttccgaagtctgcagaaacagtggccacagcgggaagagagtttaccaagactgtgcctattattgcgtcctagaggatag

SEQ ID NO: 108525 - DNA, 3984 bp, synthetic construct
  misc_feature 1..3984: note = Description of Artificial Sequence: Synthetic coding sequence
  source 1..3984: mol_type = other DNA
taacaccaggtgaaagtgcaaggatgctggggtcgctggcgatggcaggagtttgagaacgctgagggtgacgaatatgccgcggacctagcacagggcagcccagccacggccgctcagaacggtcctgatgtgtatgtgctcccgcttaccgaggtgtcacttcccatggccaagcagcccggccggagcgtccagctactgaagagtacagatgtcggtagacactcactgttatacctgaaagagattggccggggatggttcggtaaggttttcctcggagaagtgaattcggggatcagtagcgcgcaggtcgtggtgaaagagctccaggcgtcagccagtgtacaagaacagatgcagtttctggaagaagttcagccctatagggccctgaagcactccaatctcctgcagtgcctcgcccagtgtgcagaagtaactccgtacctcctggtgatggaattctgcccactcggagatcttaaagggtacttgcggtcttgtcgggtggcagaatcaatggctcccgaccctcggacactgcagcgcatggcgtgcgaggtagcttgtggggtcttacacttgcaccgaaataattttgtgcattccgacctggctctccgcaattgtctccttacagccgacctgaccgtaaaaataggcgactatggcctggcgcattgtaagtacagagaagactatttcgttaccgctgaccagctgtgggtgcccctaaggtggatcgcacccgagctcgtggacgaggtacatagcaatcttcttgtggtggaccagaccaaaagtggcaacgtttggtcgctgggggtgactatttgggaactgttcgagttgggcacacagccctatccacagcacagcgatcagcaagtcctcgcgtacacggtgcgcgagcagcagctgaagttgcccaaaccccagttgcagttaacactgtccgaccggtggtacgaggtgatgcagttttgttggttgcaacccgaacagcgacccaccgcagaggaggtccacctgcttttaagctatctatgcgctaagggagctaccgaagcagaggaagagtttgagagacggtggaggtctctacgccctgggggaggaggtgttggacccggacctggcgctgctggaccaatgctgggaggggtggtggagctggccgccgcctccagcttccctctgctggagcagtttgccggggacggattccacgccgacggcgatgatgtgttgaccgtaacggagacgtccagaggtctgaactttgaatacaaatgggaggccggccgtggggctgaagcctttcctgccacactgtcacctggacgcaccgcgcgattgcaggagctctgtgcccctgatggcgcgcctcctggcgtggtgccagtcctctcagctcactctccaagcctgggctctgaatacttcatccgactcgaggaagctgcgcccgctgctggtcacgatcccgattgcgccggatgtgcaccaagcccgcccgccaccgcagatcaggacgacgactcagatggctctaccgccgcctcgttggcgatggagcctctattgggtcacggtccgcccgtggatgtaccctggggacgtggagatcattacccaaggcgttcactggctcgggatcctttatgtccgtctcggtcaccttctccgtcagccggaccactgagtttggcagaggggggcgccgaagatgcagactggggggttgcagctttctgccccgccttttttgaagaccccttagggacatcaccactcggttcatccggcgccccaccgttacccctcacaggggaagatgagctggaagaggttggagcacgtagggccgctcaacgcgggcactggcggtcaaatgtgagcgctaacaacaattccggatctcgttgtcccgaatcttgggatccagtctcggcgggcggacatgctgaaggctgccctagcccaaagcagaccccaagggcctccccagaacctggctaccctggcgagcctttgctggggttacaggccgccagcgcccaggaaccaggttgttgccccggactgccccacttgtgcagtgcacagggactcgcaccagccccatgcttggtcacgccatcttggaccgagaccgcatcctctggaggggatcatccccaggcagagccaaagctcgctactgaagcagaagggactacagggccacgcctacctctcccaagtgtgccgtccccttctcaggagggagcccctctgccttcggaggaagcatcagctccagatgcgccagatgcgctgccagacagccctactcctgctaccggtggggaggtttcggctatcaaattagcaagcgccttgaatggcagttcatctagtccagaggtggaggccccatcctccgaggacgaggacactgccgaggccacaagtggtatcttcacagacacctcttcggatggtctccaggctaggcggccagatgtggtgccagcctttagaagccttcaaaaacaggtgggcacccccgattctttagactctctcgacatccccagttcagcatctgatggtgggtacgaggtgttctcaccatcagcaactggcccatcaggcggccagcctcgagcgctggactcaggttacgataccgaaaactacgagtctccggaatttgttcttaaggaagcacaggaagggtgcgaaccacaggcatttgcagagttggcctctgaaggggaaggccctggacctgaaacacgtttaagcacctctctatcaggattaaatgaaaagaacccctacagagacagcgcatactttagcgatctggaagcagaggcagaagccaccagtggccctgagaaaaagtgtgggggggaccgcgcccctggcccggagctcggccttccctcgaccggacagccctccgagcaggtgtgcctgaggccaggcgtgtccggagaagcccaaggcagcgggccaggcgaagtgctgcctcctctactacagctggagggcagctcaccagaaccatccacttgcccttcaggtctggtgcccgagccacctgagcctcaggggccagcaaaggtccgccctggaccaagtccctcatgttcccagtttttcctgctgacacctgtccccctcagatcagagggcaattccagcgagttccaagggcccccaggcctactttctggaccagcaccgcagaagagaatgggagggcctggaacaccccgcgcaccgctcagattagctctgcctgggctccctgcggcgttggagggcagacccgaagaggaggaggaagactcagaggattctgacgaatcagacgaggaactacggtgttattctgtacaggagccctcagaagacagtgaggaggaagccccagctgtcccagttgtggttgctgaaagccagtccgcaaggaacttgcgcagccttttgaaaatgcctagcctgctgtccgaaaccttctgcgaagacctggaacggaagaagaaagccgtgtccttcttcgatgacgtgacagtgtatctgttcgatcaagagtctcctacacgggagctcggcgaaccgtttcccggcgcaaaagagtcccctccaaccttcctgcggggaagtccaggttcaccatccgcccccaatcggccacagcaggccgatggtagtccaaacgggagcacggctgaggaaggggggggctttgcttgggatgatgacttccccctaatgacagcgaaggcggctttcgctatggctttggatcctgcggctcctgctcccgcagcgccgacccctacaccggcgcccttctcccgcttcacagtttcccctgctccaacgtcaaggttctccattacccatgtttccgatagcgacgctgagagtaaacgtggccctgaggcaggggcaggtggcgaatctaaagaggcgtag

SEQ ID NO: 108526 - DNA, 417 bp, synthetic construct
  misc_feature 1..417: note = Description of Artificial Sequence: Synthetic coding sequence
  source 1..417: mol_type = other DNA
atggaggaggaggccgagactgaagagcagcagagattctcctaccaacagcggctcaaagcagctgtgcactatacagtgggttgcctttgtgaggaagttgccctcgataaggagatgcaatttagcaaacagacgatcgcagccatttccgaactgacttttagacaatgcgagaattttgcaaaggacctagagatgttcgctagacacgccaagagaaccaccattaacacagaggacgtgaagctcctggcacgcagaagtaactccctactgaagtatattactgacaagagcgaggagattgcgcagatcaacttggaaaggaaggcgcaaaagaagaaaaaaagcgaagacgggtccaagaattcccgacagccggcggaagcgggcgttgtggaatctgagaattag

SEQ ID NO: 108527 - DNA, 495 bp, synthetic construct
  misc_feature 1..495: note = Description of Artificial Sequence: Synthetic coding sequence
  source 1..495: mol_type = other DNA
atggaggaggaagccgaaacagaagaacaacaaaggttcagctaccagcagcgtctgaaggcagcggtacactataccgtgggatgtctttgcgaggaggtggccttggataaggaaatgcagttcagcaagcagacgatcgcagccatatccgaactgacctttcggcagtgcgaaaatttcgccaaggatctggagatgtttgcaaggcacgcaaagagaacaacaatcaacaccgaggacgtgaaacttctggcccggcgatctaacagtctccatatgcaggaagccgccggtatccggaagtcctctttactgaccttcctggcctggtggttcgagtggacgagtcaggccagcgccggaccactcatcggggaagaggcccgggaagtggctaggagacaggagggagctccccctcaacagtccgcccgaagagaccgcatgccttgcagaaattttttctggaaaacattttcaagttgtaagtag

SEQ ID NO: 108528 - DNA, 234 bp, synthetic construct
  misc_feature 1..234: note = Description of Artificial Sequence: Synthetic coding sequence
  source 1..234: mol_type = other DNA
atggaagaagaggctgagacagaggagcagcagagatttagttatcagcagcggcttaaagccgctgtacattacactgtcgggtgcctctgcgaggaggtggcattggacaaagagatgcagttcagcaagcagaccattgcggccatctcagaattgacattcaggcagtgcgagaacttcgcaaaagacctggaaatgtttgcttcaatttgccgcaagaggcaggagtag

SEQ ID NO: 108529 - DNA, 921 bp, synthetic construct
  misc_feature 1..921: note = Description of Artificial Sequence: Synthetic coding sequence
  source 1..921: mol_type = other DNA
atgtcaaacgtcaatctgagcgttagcgacttttggagagttatgatgagagtttgttggctcgtcaggcaggacagcaggcaccagcgcatccggctgccacatctcgaagcagtagtgattggacgtggccctgagacaaagattaccgataaaaaatgtagtcgacagcaggtccaactcaaggcggagtgtaataaggggtatgtcaaggtaaaacaagttggagtcaacccaacctccattgacagcgtggtcatcgggaaggaccaggaagtgaaactgcagcccgggcaggtactgcacatggttaacgaactatacccgtacatcgttgagtttgaagaggaagctaagaaccccgggttagagacacatcgcaaacggaagcggagtggcaattctgatagcattgagagagacgccgcacaggaagcggaggccggcacaggtttagagccaggttctaacagcggccagtgttctgtgcctcttaagaaaggaaaagacgcgccgataaaaaaagaaagcttgggacactggagccagggtctgaaaatcagtatgcaagaccccaaaatgcaggtatacaaagatgaacaagtcgtagtcattaaagacaaataccctaaggcaaggtaccactggctggtgctcccctggacatcaatatctagcctgaaagctgtcgctcgcgaacacctagaactgttgaaacatatgcataccgtcggagagaaagtgattgtcgacttcgctggttcaagcaaactccgatttagactggggtatcatgccatcccaagcatgagccatgtacacctccacgtcattagccaggacttcgattcaccttgtttgaagaacaagaaacattggaattccttcaataccgagtacttcctggaatctcaagagtag

SEQ ID NO: 108530 - DNA, 1014 bp, synthetic construct
  misc_feature 1..1014: note = Description of Artificial Sequence: Synthetic coding sequence
  source 1..1014: mol_type = other DNA
atgtccaacgttaacttgtcagtgagtgatttctggcgcgtgatgatgcgtgtgtgttggctagtcagacaggattcacgacaccaaaggatccgactcccccatttagaggctgttgtgatcgggcgtgggcctgagacaaagataacagataaaaaatgctctcggcaacaggtccagctgaaggcagaatgtaataagggttacgttaaggttaaacaggtcggcgtgaacccaacctcaattgattcagtggttatcggcaaggatcaggaagtgaagcttcagccgggccaggttttacacatggtgaacgagttgtacccatacattgtcgagttcgaggaagaggctaagaacccgggactcgaaacgcatcgcaaaagaaagagaagtgggaattctgacagcattgagcgggacgccgcccaagaggctgaggccggcaccggcctggagccagggtccaattccggacagtgctccgtccccttgaaaaagggtaaagacgcccccatcaaaaaaaaggtgtacaaggacgaacaggtggtggtgatcaaagacaaataccccaaggcacggtaccattggctagttctgccttggacgtctatctcaagtctcaaagcagtggctagggagcacctggagcttctgaagcatatgcacacggtgggagaaaaggttattgttgatttcgccgggagtagcaaactccgcttccgactgggataccacgccatcccctcaatgtcccacgtgcacctccacgtgataagtcaagactttgactccccttgtttgaaaaataagaaacactggaattcattcaacactgagtactttctggaatcccaagcagtaatcgagatggtgcaggaggccgggcgggttaccgttcgcgacggcatgcctgagctgctgaaactccctctccgatgccatgagtgccagcagctactcccaagtatcccacagctgaaggaacatctgcggaaacactggactcaatag

SEQ ID NO: 108531 - DNA, 1029 bp, synthetic construct
  misc_feature 1..1029: note = Description of Artificial Sequence: Synthetic coding sequence
  source 1..1029: mol_type = other DNA
atgatgcgggtgtgttggctggttaggcaggatagccggcatcagagaatccgcttaccccacctcgaagccgtggtaattggtcgtgggccagaaactaagataacggacaaaaagtgttctcggcagcaagtgcagctgaaggcggagtgtaataagggctacgtcaaagtgaagcaggtgggggtaaatccgactagcattgattccgtggtgataggaaaggatcaggaggtgaaactgcagcccggtcaggttctgcatatggtaaatgagctctatccatatatcgtcgagttcgaagaggaggctaagaatcctggcctggagacccacaggaagaggaagaggagcgggaattcagacagcattgagagagacgcagcacaggaagccgaagctgggactggactggaaccaggctctaattccggacagtgtagtgttcctctcaagaaagggaaagatgcccctatcaaaaaggaatcactgggccactggagccagggtctgaagatctctatgcaggatcctaagatgcaggtctacaaggacgagcaggtggttgtgatcaaggacaagtacccaaaagctcgttaccactggctggtgctgccctggacttccataagctcgttaaaagccgtggcccgggagcacttagagctgcttaagcacatgcacaccgttggagaaaaagtaatcgttgacttcgccgggtcgtcaaaactgaggtttcgcctcggctatcacgccattcccagtatgtcacacgtgcatctacatgtgatcagccaagatttcgattccccttgtctcaaaaacaagaaacattggaactcatttaataccgagtattttctcgagagccaggctgtcatcgaaatggttcaggaggccggaagagtaactgtccgcgacgggatgccagagctcctaaaattgccattgcgctgccatgaatgtcagcagctactcccaagtatcccacagctgaaggagcatctccggaaacattggacgcagtag

SEQ ID NO: 108532 - DNA, 1071 bp, synthetic construct
  misc_feature 1..1071: note = Description of Artificial Sequence: Synthetic coding sequence
  source 1..1071: mol_type = other DNA
atgtctaacgtcaacctgtccgtatctgatttttggagagttatgatgagggtgtgttggctcgtccgacaggactcacggcaccaacggatcaggctgccccacctggaagccgtggtgattggcagaggtcctgaaaccaagattacggacaagaaatgcagtcggcagcaggtacagcttaaggccgaatgcaacaaaggatacgtaaaggtgaaacaggtgggcgtcaatcccacttctattgactcagtggtgattggtaaggaccaggaagtgaagctgcagcccggacaggtcctgcatatggttaatgaactgtacccctatatcgtagaatttgaggaagaagctaaaaatccaggattagaaacccacagaaaacggaagagatccggaaactcagactccatcgaacgcgatgcagcccaagaggccgaggccggaacaggattggaaccgggctccaacagcggacagtgctcagttccattaaaaaagggtaaggatgcccccattaaaaaggagtctcttggacactggtcccaagggctgaagatatctatgcaggacccaaagatgcaggtgtataaagacgagcaggtggttgtcataaaagataagtaccccaaggctcgttaccactggttagtccttccctggacttcaatatctagcctgaaagcggtcgcacgggagcatctcgagctgctgaagcatatgcacactgtcggcgaaaaagtgatcgtggactttgcagggtctagcaagctgcgctttagattaggttaccatgcaattccgtcaatgtcccatgtgcatttgcacgtcattagccaagattttgactcgccatgcctgaagaacaagaagcactggaacagcttcaacacagaatacttcctggagtcccaggcagttatcgaaatggttcaggaagcaggccgagtgacggtgcgggatgggatgcctgagcttctcaaattgcccctgcgatgccatgaatgccaacagctgctgccttccatcccacaattgaaagagcacctaagaaagcattggacacagtag

SEQ ID NO: 108533 - DNA, 921 bp, synthetic construct
  misc_feature 1..921: note = Description of Artificial Sequence: Synthetic coding sequence
  source 1..921: mol_type = other DNA
atgagcaacgtgaacttgagcgtgtccgacttctggcgcgtgatgatgcgggtatgttggcttgtgcggcaggacagtcggcaccaaagaattcggctacctcacctcgaggcagtcgtgatcggccgaggaccggaaaccaagatcaccgacaaaaagtgctctaggcagcaagtccagctgaaagctgagtgcaacaaaggttatgtcaaggtgaaacaggtgggtgtaaatcctaccagcatcgactcagtcgttatcggaaaggaccaggaagtgaaactccagcctggtcaggtgctccacatggtcaacgaactgtatccctatatagtggagttcgaggaggaggccaaaaatcccggtttagagacacaccggaagagaaagcgcagtggcaacagcgactcaattgagagggatgcagctcaggaagcagaggccggtaccggactcgagccagggtctaacagcggacaatgctcagtacctttgaagaaaggcaaggatgccccaatcaaaaaggaaagtctcggccactggtcccaaggattgaagatctcaatgcaggatccgaagatgcaggtgtataaagatgagcaggtggtggtcattaaagataagtacccgaaggcccggtatcactggctggtcctgccttggacgtctatttcctcacttaaagccgtggcccgtgaacacctcgagctcctcaagcacatgcataccgtgggcgagaaagttattgtggattttgctggttcatcaaaactccgctttcgcctcggctaccacgccatccctagcatgtcacatgtccacctacacgttatcagccaggacttcgatagtccctgtctgaagaataaaaagcactggaactcttttaatacagaatattttctggagtctcaagaatag

SEQ ID NO: 108534 - DNA, 855 bp, synthetic construct
  misc_feature 1..855: note = Description of Artificial Sequence: Synthetic coding sequence
  source 1..855: mol_type = other DNA
atgtcgaacgtgaatctgagtgttagcgatttctggcgtgtaatgatgcgggtgtgctggctcgtgaggcaagactcaagacaccaacgaataaggctgccacatcttgaagcagtggtgattggcagaggccccgaaacaaagatcaccgataaaaagtgttcgcgacagcaggtccagctgaaagccgagtgtaacaaaggatatgtcaaggtgaagcaagtcggcgtgaatcccacttcaatagacagcgtagtgatcgggaaggaccaggaggtcaagttacagcctgggcaagtgctgcacatggaatcactcggacactggtcgcagggcttgaagatatccatgcaggaccccaagatgcaagtttataaagatgagcaagttgtcgtgatcaaagataagtaccctaaggctagataccattggctggtcctaccttggactagcatcagtagcctgaaggccgtcgcacgggagcatctagagctcctcaaacacatgcacaccgttggtgaaaaggtgatcgtagacttcgccggcagctccaaacttcgctttaggcttggataccatgcaatcccttcaatgtcacacgtgcacctccacgtcataagtcaagactttgactcaccctgcctgaagaacaaaaagcactggaattcctttaatacggagtacttcctggagagtcaggctgtgatcgagatggtgcaggaagcgggacgggttacagtccgggacggcatgcctgagctgttaaagctgcccttaagatgtcatgaatgccagcagcttttacccagcatcccgcagctcaaagaacatcttcgtaagcattggacccagtag

SEQ ID NO: 108535 - DNA, 579 bp, synthetic construct
  misc_feature 1..579: note = Description of Artificial Sequence: Synthetic coding sequence
  source 1..579: mol_type = other DNA
atgatgcgggtgtgttggctggttcgccaggattccagacaccagaggatccgacttccgcatctggaggccgttgttatcggccgcggtccagagacaaaaattactgacaaaaaatgctcccgccagcaagtacagctgaaggccgagtgtaataaggggtacgtcaaagtgaagcaggtcggcgtgaaccccacatctatcgattccgtcgtgattgggaaggatcaagaggtcaaactgcagcccggccaggttctccacatggtgaatgagctctacccttatatcgtggagtttgaggaggaggcgaagaacccggggctggagacccaccgcaagcgtaaacggtctggaaatagtgacagcatcgaacgagacgccgctcaggaggccgaggctggtacagggctggaacctggaagtaactccgggcagtgcagtgtcccccttaaaaaaggcaaggacgctcccatcaagaaggagtcccttggccactggagccagggtctgaagatcagtatgcaggacccaaaaatgcagccctgcacaagctcatgtgaccagccgggattttag

SEQ ID NO: 108536 - DNA, 1029 bp, synthetic construct
  misc_feature 1..1029: note = Description of Artificial Sequence: Synthetic coding sequence
  source 1..1029: mol_type = other DNA
atgatgcgcgtgtgctggctggtgcggcaggacagcagacatcaacgcattcgactccctcacctggaggccgtggtgattggccgaggaccggagaccaaaataacagacaagaagtgctctcggcagcaagtccaactgaaggcagaatgcaataaggggtatgtgaaggtgaaacaggtcggtgttaacccaacgtcaattgactctgtggtcataggaaaggaccaagaggttaaattacaacccggtcaggttctccacatggtgaacgagctgtatccttatattgttgaattcgaagaggaggcgaaaaatcccggcctggagacgcaccgcaagagaaaacggtcagggaactcagactccatcgagagagatgccgctcaggaagccgaggccgggacaggcctggagcctggctctaactctgggcagtgtagcgtacctctcaagaagggtaaggacgcaccaattaagaaggagagcttgggccactggagccagggtctgaaaatcagtatgcaggatcctaaaatgcaggtgtacaaagacgaacaagttgtggttatcaaggacaagtaccctaaggctcgctaccattggctggtgttgccgtggacctccatcagctctttaaaagccgtggcccgcgagcacctggaattactgaagcacatgcacacagtgggcgaaaaggtaattgtggatttcgccggatcctctaaactcaggttccggctggggtatcacgccataccgtccatgtcacacgtacatctgcacgttatctcccaggattttgacagcccctgtctaaagaataagaaacactggaacagcttcaatacagagtattttctcgaatctcaggccgtgatcgagatggtacaagaggctggaagggtgaccgtgagagatggtatgcctgagctgctaaagctgccacttcggtgtcatgagtgccagcaattgctcccctccatccctcagctgaaagagcacttgcgaaaacattggactcagtag

SEQ ID NO: 108537 - DNA, 909 bp, synthetic construct
  misc_feature 1..909: note = Description of Artificial Sequence: Synthetic coding sequence
  source 1..909: mol_type = other DNA
atgagcaatgtgaatttaagcgtcagcgatttttggagagtgatgatgcgagtctgctggctcgtgagacaagactcacggcatcagcgaatacgccttcctcatctggaagcagtggtaatcggaagagggccagagaccaagattaccgacaagaagtgtagccggcagcaggaattcgaggaggaagccaagaatccgggcttggaaacccacagaaagcgcaagcggtctgggaattcagatagtatagaaagagacgcagctcaggaggcagaggcgggtaccggattggagcctggctccaactcgggacaatgtagcgtcccactgaagaaaggcaaggatgctcctatcaaaaaggaaagtcttggccattggtcccagggactgaagatatctatgcaggatcccaagatgcaggtatacaaagatgaacaagtggtggtgattaaagataaatacccgaaagctcggtatcactggctcgtgctcccctggaccagcatttcaagtctaaaggccgtggcacgcgaacatttggaactcctgaagcacatgcatacggtcggagagaaagttattgtagatttcgcgggtagtagtaaactacgttttcggctcggctaccacgcaatcccctctatgagccatgtccacctgcatgtaatctcgcaggactttgatagcccgtgcttgaaaaacaagaagcactggaatagctttaacactgaatactttctggaatctcaggcagtaatcgagatggtgcaggaagctggtagggtgaccgtccgtgacggtatgcccgagctgctcaaattgccattgcggtgccacgagtgtcagcagctcctgccatctattccacaacttaaggaacatcttcggaagcattggactcaatag

SEQ ID NO: 108538 - DNA, 1029 bp, synthetic construct
  misc_feature 1..1029: note = Description of Artificial Sequence: Synthetic coding sequence
  source 1..1029: mol_type = other DNA
atgatgcgggtgtgctggttggtgagacaagacagccgacaccaacggattcgcttgccgcatctcgaagccgtcgttatcgggcggggcccagaaactaagattaccgacaagaagtgcagcaggcagcaggttcaactgaaagcagagtgcaacaaaggatacgtaaaagtgaagcaggtgggagttaacccaaccagtatcgactcggttgtgatcgggaaggaccaggaggtgaagctgcaacccggccaggtgctgcacatggtgaatgagctctatccatacatagtggaattcgaagaggaagctaagaaccccggactggagacacacaggaagcggaagcgcagcggcaatagcgattccatcgaacgggacgctgcccaggaagcggaggccggaactggtttggagccagggtcaaactccggccagtgttccgtgcccctgaagaaaggcaaagacgcccctatcaaaaaggagagccttggacactggtctcaagggttgaaaatcagtatgcaggacccaaagatgcaggtctacaaggatgaacaggtggtcgtgattaaggataaataccccaaggcgcgctatcactggctggtgctcccttggacttctatctcatcactgaaagctgtggctcgagagcatttggagctcctgaagcacatgcacactgtgggcgaaaaagtcattgtggattttgcaggatcctccaagctacggtttcggctgggatatcacgccattccttccatgagtcacgtgcacctgcacgtcatatcccaggacttcgactcaccttgcctgaagaataagaagcattggaacagttttaatacggaatacttcctggagagccaggcagtgatagagatggtgcaggaagctgggagggttacagttcgcgatggcatgccagaactgcttaagttgccactgcggtgccatgagtgtcagcagctgctgccctccattcctcaactgaaggagcacctaagaaagcattggacgcaatag

SEQ ID NO: 108539 - DNA, 687 bp, synthetic construct
  misc_feature 1..687: note = Description of Artificial Sequence: Synthetic coding sequence
  source 1..687: mol_type = other DNA
atgtatatcatcgcgcaatgtgtgggcgctattgtcgcaacagctattctctccggaatcaccagctccttgactggcaatagtctcggaaggaatgaccttgcggacggcgtcaactccggccagggcctgggaatcgagattattggcaccctgcagctggttctctgtgtgttggctacaaccgatcggagacgcagggatctgggcgggtctgcacccctggctattggtctcagcgtggccctgggacacttgctagccatcgactataccggatgtgggatcaacccagccaggtcgttcggctcagcagttattacgcataatttcagcaatcattggattttctgggttggaccatttattggtggtgccctggcggttcttatttatgatttcattctcgcgccacggtcttctgatctgacggaccgggtcaaggtatggactagcggccaagtggaggaatacgacctggatgcagatgatattaatagccgtagtttcttgggcacaaaaatctatcagtttacacactcactagaagtggtggaggaggtgaaagaacgcgatccccctgcttctcgtccaagtgaacatgatggcaggtgcgctcgcaaatcaccactggctcctaagctactcactgatagtcccgctcaggttcccgggatactcccctag

SEQ ID NO: 108540 - DNA, 810 bp, synthetic construct
  misc_feature 1..810: note = Description of Artificial Sequence: Synthetic coding sequence
  source 1..810: mol_type = other DNA
atggcatctgagtttaagaagaagttgttctggcgcgctgtggtcgctgagttcttagctaccaccctgtttgtatttatctcaatcggaagcgcactagggtttaagtaccctgtcggcaataaccaaaccgcggtccaggataatgtgaaggtttccttagctttcgggctcagcatagcaactctcgctcagtctgtggggcatatttctggtgctcacttgaacccagctgtgaccctgggcttactgctgtcttgccaaatctctattttccgtgctttaatgtacattattgcccagtgtgttggggctattgtcgccaccgcaatcctctcaggcatcaccagtagcctaaccggaaacagcctcggacgcaatgacctcgccgatggggtgaacagtggtcagggcctgggtattgagattatcgggacactgcagttggtgttgtgcgtgctagcaaccacagacagaagacgcagggacttgggcggcagtgcgccacttgccataggtcttagcgtcgcgctggggcacctattggccatcgactatactggatgcggaattaatcccgcccgcagtttcggctctgcagtaatcacccacaatttcagtaaccactggatcttctgggtggggcccttcatagggggcgctctggcggtgctgatatatgactttatccttgcacctagatcaagcgacttaacggatagagtgaaggtttggacatcaggtcaggtagaagagtatgacctggatgctgacgacatcaactcccgcgtggaaatgaaacccaagtag

SEQ ID NO: 108541 - DNA, 657 bp, synthetic construct
  misc_feature 1..657: note = Description of Artificial Sequence: Synthetic coding sequence
  source 1..657: mol_type = other DNA
atgttttggacctttggatatgaggcggtttctccggccggtcctagccacttattcgcttctctattactgggtgtactgttaacgatcacgttcatgccaggggccagacccttgcccctggtgttggtcccacagaacacactggcctggatgcagctagatgcaaaggcacccgcccaccctcgcccactgcaactgctaggacgagtggggccaggttctcggcaacttgccgacggagtgaactctggtcagggcctcggaattgaaatcatcggcacattgcagctggtgctgtgcgtattggcaacgacagacagacgaagacgggacctgggcggctctgctccgctggccataggcctgtctgtagcccttgggcaccttttggctatcgattataccgggtgcggaatcaaccctgcgagatcatttgggagtgctgtgatcacccacaatttttccaaccattggattttttgggtcggaccgttcatcggtggtgcacttgcagttctgatctacgatttcatcctcgccccccgatcaagcgacctgaccgatagggtcaaggtgtggacttctggtcaggtagaggaatacgatttggacgccgatgacatcaacagtagggtggagatgaaaccgaaatag

SEQ ID NO: 108542 - DNA, 465 bp, synthetic construct
  misc_feature 1..465: note = Description of Artificial Sequence: Synthetic coding sequence
  source 1..465: mol_type = other DNA
atgcagtccggcatgggctggaatgtcctcgacttctggctcgccgatggcgtgaattctgggcagggattgggaatcgagataattggcacactgcagctagtgctctgtgtacttgcaaccactgatcggcgtcgccgcgacctgggagggtctgcccccctggcaattggcctatctgttgctctcggccacttgctggccatcgactacacgggctgtggaattaatcctgctagatcgtttggctctgctgttattacccataatttctcaaatcactggatcttttgggtgggccccttcatcgggggggcccttgcagtcttaatatacgacttcattctggccccacggtcttccgacctcacagaccgagtgaaagtttggacaagcgggcaggtggaagaatatgatttggacgcagacgacatcaacagcagagtcgagatgaaaccgaagtag

SEQ ID NO: 108543 - DNA, 765 bp, synthetic construct
  misc_feature 1..765: note = Description of Artificial Sequence: Synthetic coding sequence
  source 1..765: mol_type = other DNA
atggcttccgaattcaaaaaaaaacttttttggcgcgccgtcgtggctgaatttctcgccactacgctgttcgtattcatcagtattggctcagcactcgggttcaaatatccggtaggcaataaccagacagcagtccaggacaatgttaaggtatctctcgccttcgggctttccatcgctaccctcgcccaatctgttggccatatatcaggagctcatctgaatcctgcagtgacactaggactgctgctgtcttgccagatctcaattgtggccacagcaatcctttctggcattacaagctctctgacggggaactccttgggccggaacgatttggcggacggtgtaaacagtggccaaggactcgggatagagattattggaactctgcaacttgtgctctgcgtgctcgccacaaccgacagacggcggagagacctggggggatctgcccctctggcaattgggctctcggtcgctctcggacacctcttggctattgactacacaggttgtggcattaacccagcccggtccttcgggagtgcggtaataacacataacttctcaaatcactggatcttttgggtgggccccttcatcgggggagcattggccgtcctgatctacgacttcatcctcgctccaaggtcttcggacctcaccgatagggtgaaggtctggacttccgggcaagttgaggagtacgacctagacgccgatgatattaactcccgtgtcgaaatgaaaccaaaatag

SEQ ID NO: 108544 - DNA, 990 bp, synthetic construct
  misc_feature 1..990: note = Description of Artificial Sequence: Synthetic coding sequence
  source 1..990: mol_type = other DNA
atgtgtcaggtgggctgctttctcaaaactccccggttccccatctgggtggtgtgctctgagtctcatttttctatcctcttctctctgcaaccgggattactgcgcgactggagaaccgagaggctctttgatctgtactattatgacgggctggcaaaccagcaagagcagataagacttacaatcgataccactcaaacaatatccgaagacaccgataacgacttggtgccccccctcgagctatgcatcagaactaacataggctccgccctgggtttcaaatatcccgtcgggaataaccaaaccgctgttcaagataacgttaaggtaagcctggcctttgggctgtctatcgcgacgctggctcaatctgtgggccatatttccggagctcacttaaatcctgccgtaacactgggacttctgctgtcctgtcaaatctctattttccgcgctctgatgtacatcatagcacagtgtgtgggcgcgatcgtcgcgaccgctatcctgtccggaatcaccagctcgctgaccggtaattctttgggtcggaatgaccttgccgacggagtgaactccggtcaggggttaggtatcgaaattatcggcacactccagctcgtcctatgtgtgctggcaaccacagaccggcgacgaagagatctggggggatccgctccactcgccatcggactcagcgttgcactgggacacttgctggccattgactatactgggtgcgggataaaccctgcgcgctctttcggaagcgcagtgattacccacaatttcagcaatcactggatattctgggtggggccgtttattgggggggctcttgccgtgctgatctacgactttattttggcgccccggtcatctgatctaaccgatcgagttaaggtttggaccagcggccaggtcgaagaatacgatctcgatgcggacgacatcaattcaagggtcgagatgaagcccaaatag

SEQ ID NO: 108545 - DNA, 561 bp, synthetic construct
  misc_feature 1..561: note = Description of Artificial Sequence: Synthetic coding sequence
  source 1..561: mol_type = other DNA
atgcctggcgccaggccgctacccttggtcttagttccacagaatactctggcctggatgcagttagatgctaaggctcctgcacatcctcgccctcttcagctgttaggccgggttggtccaggatccaggcagctagccgacggcgtcaattcaggacagggtctgggcatcgagatcattggtacactgcagctggtcttatgcgtcctcgccactactgatcggcgccgcagggatctcgggggctctgccccactggcaatcggcttgagtgtggccctcggacatctgctggctattgactacacaggctgtgggattaatcccgccagatcttttggatcagcagttattacacacaacttctccaaccactggattttctgggtggggcccttcataggaggcgccctcgcagtgctgatatatgattttatcctggccccccgctctagtgacctgacggatcgagtcaaggtgtggacgtcaggtcaggttgaggaatacgacctcgatgctgacgacatcaacagtagagtagaaatgaaaccaaagtag

SEQ ID NO: 108546 - DNA, 816 bp, synthetic construct
  misc_feature 1..816: note = Description of Artificial Sequence: Synthetic coding sequence
  source 1..816: mol_type = other DNA
atgagtcccctgctcggactgaggtctgagttgcaagatacttgcacatctctaggattaatgctgtcagtggtgttgctcatggggttggctagagtggtggccaggcagcagctccacaggccagtggctcacgcatttgttttggagttcctggcaacatttcagctgtgctgttgcactcacgagctgcaactcctcagtgagcagcacccagcgcaccccacttggacattgactctagtgtatttcttttcactggtccatggtctgaccctcgtcgggacgtcttcaaacccttgcggcgtcatgatgcagatgatgctggggggcatgtcccctgaaacgggggcagtgcgcctgctagcgcagctagtgtcagcgctttgtagccgctattgcacgagtgctctctggtcactcggactgacacaatatcatgtgagcgaacgctctttcgcgtgtaaaaacccaataagagtggatctgctcaaggctgtgatcaccgaagcagtatgcagcttcctattccattctgccttgctgcatttccaggaggtcaggacaaagttgcgcatccatctgcttgcggcactcattacatttctggtgtacgcaggagggtccctcaccggcgcagtttttaacccagccttagctcttagcctccacttcatgtgctttgacgaagcgttcccccagtttttcattgtgtattggctggctccctctctgggcatcctgctgatgatactaatgtttagtttttttctgccgtggctgcataataatcacacaatcaataagaaagagtag

SEQ ID NO: 108547 - DNA, 888 bp, synthetic construct
  misc_feature 1..888: note = Description of Artificial Sequence: Synthetic coding sequence
  source 1..888: mol_type = other DNA
atggcgggattaaatgtgagcctgtcattttttttcgcgacgtttgcgctttgcgaagccgcacggagggcgtccaaagccttacttccagtaggtgcctatgaggttttcgcccgcgaggcaatgcgcacacttgtagagctggggccctgggccggggattttggtccagatctgctcctcaccttgctgtttctactgttcctggctcacggtgtaaccctggacggtgcctcggctaaccccacagtgtctctgcaggaattcttaatggctgaacagagcttacctggcacattgctcaagcttgcggcccagggtctgggaatgcaagctgcatgtacgctgatgcgtctctgctgggcttgggagctgagcgacttgcacctactgcagtctcttatggctcagtcatgttcttctgcactaaggacaagcgtccctcatggggccctcgtggaagccgcttgtgcgttctgtttccacctcaccttgctgcatcttagacacagtccccccgcgtatagcggaccagcagtggctctgttggtaaccgttaccgcttacactgccggccccttcactagcgctttcttcaatccggctctggctgcgtctgtgacattcgcctgctctggacacactctcctcgagtacgtgcaagtttattggctggggccactgaccggtatggtcctcgccgtactgctgcaccaggggaggcttccacatctgttccagcggaaccttttttatggccagaaaaacaagtaccgggcaccgagagggaagccggcacccgctagtggcgatactcagacacccgcaaagggaagctctgtccgcgagccggggcggtcaggcgtggaaggcccgcatagcagctag

SEQ ID NO: 108548 - DNA, 798 bp, synthetic construct
  misc_feature 1..798: note = Description of Artificial Sequence: Synthetic coding sequence
  source 1..798: mol_type = other DNA
aaccaacccgcacccgcattgtctccgcaggttagctgtaggcatagttccagcggaggtcccggccgctggcaggaatttttgatggccgaacagtctctgcctggcactcttctgaaacttgcggcccagggacttggaatgcaggcagcttgtaccctcatgaggctgtgttgggcgtgggagctgtccgacctccacctactgcaatctctgatggcgcagagctgtagtagtgccttaaggacctcagtccctcacggggcattggtggaggccgcctgtgccttctgttttcatctcaccctacttcatctgaggcatagccctcctgcttactccggccctgctgtcgctctgctggtcactgtcaccgcttataccgccggaccctttaccagcgcctttttcaacccagccctagcagctagtgtcacattcgcctgttcaggacacaccctactcgaatatgttcaagtgtactggctgggtcctctgactgaggagcagcatggagaagtgatggaaccccccctcggtcccaggtccggggactccggtccctggcttcagaggccacgatggagcccccacctgctgctgcacctgctaagtgatacccgtttgcacctaaccgaggtgcctgaaggccagctcggcagctacggtatcctggaggcctttttctcattctgttggctgtatacgggcgaggtgtcaggtgccatgcctcagcccccccttggaggcaaagatcgctcctggggttcactgaggcacctggccttgcggtggtag

SEQ ID NO: 108549 - DNA, 924 bp, synthetic construct
  misc_feature 1..924: note = Description of Artificial Sequence: Synthetic coding sequence
  source 1..924: mol_type = other DNA
atggcagggctgaacgtcagtctctctttttttttcgcaacctttgcgctgtgtgaagcagcacgcagagcctccaaagccctcctacccgtgggcgcatacgaagttttcgccagagaggccgtaggagccgtgcagctgggaccctgctgcctggaaatgcgtactctggtggaactgggtccctgggccggagattttggccccgacctgctgctgacccttcttttcctcctgttcctggcccacggcgtgaccctggatggagcatccgctaacccgaccgtgagcctccaggaattcctgatggctgagcagtccctgcctgggactctgctcaagctcgccgcccaggggttgggcatgcaggcagcttgtactcttatgaggctttgctgggcctgggaactttcagacttgcatctactgcagagcttgatggctcagagctgtagtagcgccctgcggacgagcgtcccacatggagccctagtggaggctgcgtgcgctttctgcttccacttgaccctattgcacttaagacatagtccacctgcttactccggacctgctgtagctctgctggttacagttactgcctacaccgcaggcccctttacatcagccttcttcaaccccgccctcgccgcctcggtcacctttgcctgcagcgggcacaccctgctggagtacgtccaggtttattggcttggtcccttgaccggcatggtcttagccgttctcctccatcaggggcggctgccccacttattccagcgaaacctgttctatggtcaaaagaataagtaccgcgccccccgcgggaagcccgcccccgcttctggagatacccagacccctgctaagggtagctcagtacgagagcccgggcggagcggagtcgaggggccgcatagctcctag

SEQ ID NO: 108550 - DNA, 816 bp, synthetic construct
  misc_feature 1..816: note = Description of Artificial Sequence: Synthetic coding sequence
  source 1..816: mol_type = other DNA
atgtgggagttgcgctccatagccttcagtcgggccgtcttcgccgagttcctggctaccttactgttcgtctttttcggtctgggttcggcactcaactggccccaggctctgccttctgtgttacagattgccatggcctttggactgggaattggcacgctcgtgcaggctctggggcacatctcgggcgcccacatcaaccctgcagtcacagtggcatgtctggtcgggtgtcatgtgtccgttctgcgggccgccttttacgtggccgctcaactgctgggagctgtcgccggagcggccctgcttcatgagatcacccccgctgacattcgcggcgacttggctgtgaatgcacttagcaactcaacaacagcaggccaggccgtgacagtagaactgtttcttacactgcagctggttctgtgtatcttcgcgagcactgacgagagacggggcgagaacccagggacacctgcactgagcattgggtttagcgtggcactgggtcaccttctggggatccattacaccgggtgcagtatgaacccagcgagaagcttagcacctgcggttgttaccggtaagttcgatgaccactgggtcttctggattggtccgctggtgggagcaatcctgggatctctgctatacaattatgtcctcttccctcccgccaaaagtctttccgagcggctggccgtcctgaaaggactcgaacccgatactgattgggaggagcgagaggtgagacggcgtcaaagcgtggagctgcactcacctcagtctttgcctaggggtacaaaggcatag

SEQ ID NO: 108551 - DNA, 879 bp, synthetic construct
  misc_feature 1..879: note = Description of Artificial Sequence: Synthetic coding sequence
  source 1..879: mol_type = other DNA
atggggaggcaaaaagagctggtctccaggtgcggagagatgcttcacattaggtatagattgttacgccaggcattggccgagtgtctgggcacacttatcctcgtgatgttcggatgcggttccgtggctcaggtagtattgtcccggggcacgcatgggggatttttgactattaaccttgcctttggcttcgctgttaccctgggaatcctgattgcaggacaggtgagcggggcgcacctgaaccctgccgtcacttttgccatgtgctttctggccagggaaccgtggattaaactaccaatctacacacttgctcagacactgggtgctttcttgggcgccggaattgtcttcggcttgtattacgacgccatttggcactttgccgataatcaactctttgtttccggtcccaacggcactgccggcatttttgcaacatacccttccggccacctcgatatgatcaacggattttttgaccagtttattggcacagcaagccttattgtttgtgtactggcaattgtggatccatataacaaccccgtacctaggggcctcgaagcatttacggtgggtctggtcgtccttgtaattggcacctccatggggtttaactcagggtacgctgtgaatcccgctcgggatttcgggcctagattgtttacagcccttgccgggtggggttcagccgtctttacaactggtcaacactggtggtgggtgcccatagtgtctccactcctcggaagcatcgcgggcgtgttcgtatatcagctgatgatcggatgtcacttagaacagcctccaccttctaatgaggaggaaaatgttaagctcgcacatgtgaagcacaaggagcagatttag

SEQ ID NO: 108552 - DNA, 840 bp, synthetic construct
  misc_feature 1..840: note = Description of Artificial Sequence: Synthetic coding sequence
  source 1..840: mol_type = other DNA
atgggcagacagaaggaactcgtctcacgctgtggggagatgctgcacatcaggtatcgcctactcaggcaggctttagccgaatgccttggaacccttatcttggtgatgtttgggtgcggctccgtcgcccaggtagtgctgagtcgggggacccacggaggctttctcaccattaacctcgcatttggatttgccgtcaccctcggaatcctgattgctgggcaagtgtctggagcgcacctgaacccagcggtaacatttgccatgtgtttcctggccagagaaccatggatcaaactcccaatttacacactggcacaaacactcggcgcgtttcttggtgccggtatcgtcttcgggctctactacgatgccatttggcattttgccgacaaccagctcttcgtgagcggtcccaacggtacagctggtatttttgcgacatatccatcgggtcacctggatatgataaacggattcttcgaccaggatcggcccgcattggtcgtgggggctcaccgcgtaccaactcccggacttcattgtggctgcctgcgagtccctgctgatgatcgcctgccacccggagcggcaccgacactccagaggggacgggagtgtgaggctggtccatgtgaagcacagggtgccgatctctccggccagggatccccactgcgatgccctggcctggaacacccgctgacagtacagggccccctcccccgcagtccactgcatgatcctccgttccaagccaaagaactgccaatctaccctcacccaactacagcaccttccggcttccctttggacttagcccagattgcaccttag

SEQ ID NO: 108553 - DNA, 972 bp, synthetic construct
  misc_feature 1..972: note = Description of Artificial Sequence: Synthetic coding sequence
  source 1..972: mol_type = other DNA
atgtctgatcggccgaccgccaggcgctggggcaagtgtggtcccttgtgtacccgtgaaaatattatggtcgcatttaagggcgtttggacccaggctttctggaaggccgttacggccgagttcctggctatgcttatcttcgttctgttgagcctgggatctaccattaattggggggggaccgagaagcctctcccagtcgacatggtcttaatcagcctgtgctttgggctgagtatcgccaccatggttcaatgcttcgggcacattagtggcggccatatcaatcctgccgttacagtcgctatggtgtgcacacggaaaataagtatagccaagtccgtgttctatatcgctgcgcagtgtctgggggctattatcggggccgggattctgtatctcgttactccccccagtgtggttgggggactgggtgtgactatggtacacggcaacctgaccgccggccacggcctcttggttgagctgataatcacattccaactcgtgtttactatttttgccagctgtgactccaaaaggacggacgtgaccgggtcaattgccttggcaatcggcttttctgtggctattggccacctgtttgccataaactataccggggcctccatgaacccggctcgcagtttcggccctgctgtaattatgggaaactgggagaatcactggatctactgggttggcccgatcattggagcagtgctggctggaggcctgtacgagtacgtgttttgtcctgatgtggagtttaagaggagattcaaagaagcattcagcaaagccgcccagcagaccaaaggaagctacatggaggtcgaagacaatagaagtcaagtagagacagatgatctcatacttaagcctggcgtcgttcacgtgatcgacgtggaccgcggagaggagaagaaagggaaggatcagtccggagaggtcttaagttccgtgtag

SEQ ID NO: 108554 - DNA, 660 bp, synthetic construct
  misc_feature 1..660: note = Description of Artificial Sequence: Synthetic coding sequence
  source 1..660: mol_type = other DNA
tgcaccttggcaggcgaggggatgagtgaccgccctacggccagacgatggggcaaatgcggcccattgtgtactagagaaaacatcatggttgccttcaagggagtatggacgcaggccttttggaaggctgtgaccgccgagttcctggccatgctcatctttgtactgctaagcctgggatctacaatcaactggggcggtaccgagaaacccctgcccgtagacatggtgctgataagtctgtgctttggactgtccatcgctacaatggttcagtgcttcggacatatctccggaggacacattaaccccgcggtcacagtagccatggtatgcacccgcaaaatctccattgcaaagtctgtattttatattgccgcacagtgcgtgggccctatcatcggagcagtgctggccggcggattatatgaatacgtgttctgccccgatgtggagttcaaacgccgcttcaaggaggcttttagtaaggcggcccagcagacaaagggaagctacatggaggtagaggataatcggtcgcaggttgagaccgatgacctcatcctgaagccaggtgtggtgcacgtgatagacgtcgaccgtggtgaagagaagaaaggaaaggaccaaagtggtgaggttttgtcaagcgtgtag

SEQ ID NO: 108555 - DNA, 912 bp, synthetic construct
  misc_feature 1..912: note = Description of Artificial Sequence: Synthetic coding sequence
  source 1..912: mol_type = other DNA
atgtccgaccgccctactgccaggcggtggggcaagtgtggtcctctgtgcactagggaaaatatcatggtagcattcaaaggagtatggacccaggcattttggaaagctgtcacggccgaattcttggcaatgctaatcttcgtcctgcttagcctgggatcaactataaactggggcgggaccgagaagcctttaccagtggacatggtcctcatctctctgtgctttgggctctctatagcaaccatggtttgtaccagaaagatttccattgccaagtcagtattctatattgccgcccaatgcctcggtgctatcattggagctggaattctctacctcgtcactcccccctccgtggtgggcgggctcggcgtgaccatggtgcacggaaatctaaccgctggacatggactgctggtcgagcttatcattactttccagctcgtgtttactatattcgcttcatgtgactcgaaaagaactgacgtcaccggatccattgcattggcaattggcttctccgttgccatcgggcacctttttgccatcaactatacgggagcttccatgaatccagccaggtcatttgggcctgcggtgattatgggcaactgggaaaaccattggatttactgggtgggacctatcattggagcagtcctagccgggggtctttacgaatatgtgttctgtcctgatgttgagtttaagcgacggtttaaagaagcctttagcaaagccgcacaacaaaccaagggatcatacatggaggtggaggacaatcggtctcaggtggagacagatgatcttattctgaagcccggggtcgtgcacgtgattgacgtcgatcgcggggaagaaaaaaagggtaaagaccagtccggcgaagtgctgagcagcgtctag

SEQ ID NO: 108556 - DNA, 849 bp, synthetic construct
  misc_feature 1..849: note = Description of Artificial Sequence: Synthetic coding sequence
  source 1..849: mol_type = other DNA
atggacgcagtggagcctgggggccggggttgggcctctatgttagcctgcagactctggaaggcaatctcaagagccctgttcgccgagttccttgccacgggattatacgtatttttcggggtcggttccgtcatgcgttggccaactgctctgccttccgtcctgcagattgccatcacttttaatttagtcacagccatggctgtccaagtgacctggaaagcctctggcgcccacgctaacccagctgtcactctggcctttctagtcggctctcatatttcccttccccgtgccgtcgcttatgtcgctgcccaactcgtgggagccacagtgggagctgctctgttatacggcgtcatgccaggtgatataagagagactctaggcattaatgttgtgcggaattcagtgagcaccggacaggccgtggccgtcgagctccttctcaccctccagcttgtattgtgtgtcttcgcctccactgatagtagacaaaccagtgggagccctgccacaatgattggaatctcggtcgcccttggacacctcatcgggatacattttaccggatgttcaatgaacccagctcgctcattcggcccggctatcatcatcgggaaatttactgtacactgggtgttctgggtgggtccacttatgggagcactcttggcatccttaatttacaatttcgtgttgttccccgatactaagacactggctcaaagactggcaattttgacgggtaccgtggaggttggaaccggggccggcgctggggctgaacccttaaaaaaggagagtcagcccgggtctggcgccgttgagatggagagcgtgtag

SEQ ID NO: 108557 - DNA, 1029 bp, synthetic construct
  misc_feature 1..1029: note = Description of Artificial Sequence: Synthetic coding sequence
  source 1..1029: mol_type = other DNA
atggtgcaggcctcaggtcatcggcggagcactcggggcagtaagatggtatcctggagcgtcatcgccaagattcaggaaatcctccaacgcaagatggtgcgcgagttcctcgccgaattcatgagcacctacgtgatgatggtatttggcctagggagtgtcgctcatatggttttaaacaaaaaatacggatcatacctgggcgtaaacttgggattcgggttcggcgttactatgggagtacacgttgctggccgtatcagcggcgcgcacatgaatgctgccgtgacgtttgcaaattgcgctcttggcagggtcccatggaggaaatttcccgtgtacgtcctcggccaattcctcggatctttcctggccgccgctacaatttactcactgttttacaccgctattcttcatttcagcggaggccagctaatggtgacagggccggtggcgactgccggaatctttgcaacttacctgccagaccatatgacattgtggagggggtttctgaacgaagcatggctaaccgggatgctgcagttgtgtctatttgctattacagaccaggagaacaaccctgcactgccaggcactgaagccctggttattgggattctggtggtgatcattggggtgagcttgggcatgaatacagggtacgcaatcaatcccagccgagatctacccccccggatcttcacatttatcgctggatgggggaagcaggtgttctccaatggggaaaattggtggtgggtgcccgttgttgcacccctgttgggagcctacctgggcgggattatctatttggttttcataggaagcacaatccccagagagcccttaaagctggaagacagcgtggcttacgaggatcatggaattacggtgctgccaaaaatgggttcccatgaaccaaccatttccccactcactccagtctcggtctcgcctgccaacagatcaagcgtccaccccgctcccccccttcacgagagcatggcactggaacacttttag

SEQ ID NO: 108558 - DNA, 651 bp, synthetic construct
  misc_feature 1..651: note = Description of Artificial Sequence: Synthetic coding sequence
  source 1..651: mol_type = other DNA
atggtcctgaataagaaatatgggagctaccttggcgtgaacttgggatttggctttggcgtgactatgggggtgcacgtagccgggcggatctccggggctcatatgaatgccgccgttaccttcgcaaattgtgccctgggcagagtcccctggagaaaattccctgtgtatgtgctgggccagttcttagggagctttttggcggctgccactatttactcccttttttacactgcaattttgcacttctcaggggggcaacttatggttaccgggcctgtggcaacagctgggatcttcgcgacttacctccctgatcacatgaccctgtggcggggttttctgaacgaagcctggttgacgggcatgctccagctttgtctgttcgccatcactgaccaggaaaataaccccgcgctcccaggcaccgaggctctagttatcggcatactcgtagtcattattggagtttcgctcgggatgaacacaggttacgcgatcaacccctctagagacctgcccccaagaattttcaccttcatcgctggatggggtaagcaggtattccgatggcaccatctgccgggcctccattggctacatcatccgactggggctcctgaaatcggtggcttctgtggcgtgtag

SEQ ID NO: 108559 - DNA, 582 bp, synthetic construct
  misc_feature 1..582: note = Description of Artificial Sequence: Synthetic coding sequence
  source 1..582: mol_type = other DNA
atgggctgggctacgtttactgaccagggggaagaggggctcgaacccagtgggccttggaaaacatctcacactagagcgcacatgaatgccgctgtgacctttgccaactgcgccctgggaagggttccatggcgtaagttccctgtctatgtgctgggacagtttctgggctcctttttggctgctgcaacaatctactccctgttctacaccgctatactacatttttccgggggccaactgatggtgaccggacccgtggctacagcaggcatcttcgccacctacctgccagatcatatgaccctctggcgcggctttctaaacgaagcttggctcacagggatgctgcagttgtgccttttcgctataactgatcaggaaaacaaccctgccctgccaggaacagaagcacttgtgatcgggatcctcgtggtcatcatcggcgtctcattgggcatgaatacaggctatgcaattaatccttccagggatctgccacccaggattttcaccttcattgcgggctggggaaaacaggtttttagatactgtccgtgtcccgggcctttcctttag

SEQ ID NO: 108560 - DNA, 771 bp, synthetic construct
  misc_feature 1..771: note = Description of Artificial Sequence: Synthetic coding sequence
  source 1..771: mol_type = other DNA
atgggttcgggccactgtttacggtcaactagggggtccaaaatggtttcatggtccgttatcgccaagatccaagagattctgcagagaaagatggtgagggagtttctggctgagttcatgagtacctacgtgatgatggtgttcggtttgggctccgttgctcacatggttttaaacaagaagtatggcagctatttgggggtaaacctggggtttggttttggggtcaccatgggcgtccacgtggcgggcaggatttcaggcgcccatatgaatgccgcagtaacattcgctaactgtgcccttgggcgggtgccttggcgcaaattcccagtgtacgttctggggcagtttctcggctcctttctggctgccgctacaatctacagtctgttttacactgccattctgcacttcagcggcggccagctcatggtgactgggcccgtggccactgcagggatcttcgctacatacctccctgatcatatgacactctggagaggatttcttaatgaggcttggttaactggcatgctgcagctgtgcttgtttgcaattaccgaccaggagaataatcctgctctgccaggaacagaggccctggtcattgggatcctcgtggtaattattggcgtttcactcggaatgaataccggctacgccatcaaccccagtcgggatctgccacctaggatcttcacattcatagctggttggggtaagcaagtcttccgttattgtccatgccccggaccctttttatag

SEQ ID NO: 108561 - DNA, 1026 bp, synthetic construct
  misc_feature 1..1026: note = Description of Artificial Sequence: Synthetic coding sequence
  source 1..1026: mol_type = other DNA
atggggagcgggcactgccttcggagtaccagaggcagtaaaatggtgagttggtcagttatcgccaaaatccaggagattttgcagcggaagatggtcagagaatttctagctgagttcatgtccacttatgtcatgatggtttttgggttaggctccgtggctcatatggtgttaaataaaaagtacggtagttatcttggcgttaacctcgggttcggcttcggcgtgacgatgggggttcacgtggctgggcgcattagcggcgcacacatgaatgccgccgtcacatttgccaattgcgcccttggtcgtgttccatggaggaagtttcctgtgtacgtcctaggacaattcctgggatcttttctcgccgcagccaccatctattctctcttttacaccgctatattacatttctctgggggacagctgatggtgaccggcccggtggcgactgctggcatctttgccacatatctgccagatcacatgaccctctggcgcggcttcctgaacgaggcttggctcacaggaatgctgcagctttgtctctttgctattaccgaccaagagaacaatcccgcactgcccggaacagaagcattggtcattgggatacttgtcgtgattataggagtgagcttaggcatgaatacaggctatgcaatcaacccctcgcgagacttgccacccagaatttttacctttatcgccggctgggggaagcaggttttctctaacggagaaaattggtggtgggtccccgtggtggcccccttattgggagcgtatcttggcggcattatttacctggtgttcatcggtagcactattccgagagaacccttaaaactggaagattccgtcgcatatgaggaccacggtataacagtgcttcccaaaatgggcagtcacgaaccgaccatcagccccctcactccagtatccgtgtctcctgccaacagaagtagcgtgcatcctgccccacctctgcatgagagtatggctctagagcacttctag

SEQ ID NO: 108562 - DNA, 513 bp, synthetic construct
  misc_feature 1..513: note = Description of Artificial Sequence: Synthetic coding sequence
  source 1..513: mol_type = other DNA
atgaacgccgctgtcacctttgccaactgtgccctgggaagggtcccgtggcgcaagttccccgtctatgtgctgggacagttccttgggtcgtttctcgctgcagccacgatttactctctgttctataccgcaatcctccactttagcggcggtcagctcatggttaccgggccggtggccaccgccggtatcttcgccacataccttccagatcacatgaccctgtggcgaggcttcctgaatgaggcctggctaactggcatgctacagctatgcctgtttgccataacagaccaggaaaataatccagctctgcccggaactgaagcactggtgattggaattcttgtggtaatcataggcgtctccctcgggatgaatacaggctacgccataaacccttcgcgcgacctccctcccaggatctttacgttcatcgcaggctgggggaagcaggtcttctcgaatggagaaaattggtggtgggttcccgtggtggcacccttgtag

SEQ ID NO: 108563 - DNA, 426 bp, synthetic construct
  misc_feature 1..426: note = Description of Artificial Sequence: Synthetic coding sequence
  source 1..426: mol_type = other DNA
ctattctatactgctatcctgcacttttcaggcggacagcttatggtgacaggacccgtggccactgccgggatcttcgcgacctacctgcctgatcatatgaccttgtggcggggttttctgaatgaggcctggctcaccggaatgctgcagctgtgcctttttgctataacagatcaggagaataatccggcgttacccggcacagaagccctggtgataggaattttagttgtcataatcggcgtgtctctggggatgaacacaggatacgccatcaacccaagtagagatctccctccccgtatattcacgttcatagcaggctgggggaagcaggtattccgctggcatcatctccctggcctccactggctgcaccaccccacaggcgctccggagataggcgggttttgtggtgtgtag

SEQ ID NO: 108564 - DNA, 498 bp, synthetic construct
  misc_feature 1..498: note = Description of Artificial Sequence: Synthetic coding sequence
  source 1..498: mol_type = other DNA
atgaacgcagccgtaaccttcgcaaactgcgccctgggacgggtcccatggagaaaattcccagtctacgtactgggccagtttctgggtagctttcttgcggctgctaccatatactctttgttttataccgcaatcttacatttttctggcggccaattgatggtgactgggccagtagccactgctggcatttttgccacctacctccccgaccacatgacactatggagagggttcctgaacgaggcctggttaactggtatgctacagctgtgcctcttcgccataaccgatcaagagaataaccctgcccttccaggaacggaagctctggtgatcggaatcttggttgtgataatcggagtctcattgggaatgaacaccggatacgccatcaacccatcacgcgatctcccacctaggatctttaccttcatcgcgggttgggggaagcaggtgtttcgttattgcccatgccctgggcccttcctgtag

SEQ ID NO: 108565 - DNA, 774 bp, synthetic construct
  misc_feature 1..774: note = Description of Artificial Sequence: Synthetic coding sequence
  source 1..774: mol_type = other DNA
atggttcaagcgtctggccataggcgatccacacggggatctaaaatggtatcatggagtgtgatcgctaagatccaggaaatacttcagaggaaaatggttcgcgagttcctggcggagtttatgagcacatatgtaatgatggtctttggtctcgggtcagtggcccatatggtcttaaacaaaaagtacggatcatacctgggagtcaacctcggctttggctttggagtgacaatgggcgtgcacgtggctggtcgcatcagtggcgcccacatgaatgcggccgtcacgtttgccaactgtgccctggggagagtgccgtggaggaagtttcctgtatacgtgcttgggcagttcctgggttcctttttagcagcagccacaatctacagcttgttctacaccgcgatcctgcacttcagtggggggcagttgatggtaacagggcccgttgcgaccgcaggtatttttgccacctacttacctgaccatatgactctttggaggggcttcttgaacgaggcttggttgaccgggatgctgcaactgtgtttattcgccatcactgaccaagaaaacaatcctgcgctgcccggcactgaagccctcgtgattggtatcctcgtggttatcatcggagtgtctctgggcatgaatacgggctacgcaatcaacccctcaagggacttgcccccacggatcttcaccttcatcgccggctgggggaaacaagtattccgatactgcccttgcccgggtcccttcctttag

SEQ ID NO: 108566 - DNA, 426 bp, synthetic construct
  misc_feature 1..426: note = Description of Artificial Sequence: Synthetic coding sequence
  source 1..426: mol_type = other DNA
atgaacgctgctgtgaccttcgctaattgtgctctgggccgggtgccttggagaaagttcccagtatatgtgttggggcaattcctggggtcctttctggccgccgcaacaatctactcactattttatagtgtggccgacagggatgcccctgcagtgtcgctgcggcaccacgggcccggggagcagccctctaccgcccggaacaggggcgctggcgaccgccaccctagaggccaccatcgcggcgttccatggcatgagcatagaatttgtcaccagccagtgcccggacccgcacctccacacctgcaccttcattgctggctggggcagacaggcctgcaggtactgccgttacctcgccctattcccctgtccttttccgtgggtcctctttgtgtggagggttggggcgtcatgtag

SEQ ID NO: 108567 - DNA, 1602 bp, synthetic construct
  misc_feature 1..1602: note = Description of Artificial Sequence: Synthetic coding sequence
  source 1..1602: mol_type = other DNA
atggggtcccgttgccttaatccgcctcctccagctcattccgacacaaccgggaaggactcatttggaaacatccgtggggctgaaaccggtcaaggtgcttcagcttgttctgtcacatctgctcgggtaacttgtggggcgggatccgaaccccattcacatcgaaatccgggcatctccgctcaggtgggtttggcacccagctatggtgcagctaggggccgacgacggccactcgccctacaacaatccccccaagaaagacgacacgtcggctggaattctacgcgcggtctgctgcccgcaagcctgcccggcactgctagcagtcagagcgctagcgccactgcctcagcggctttgcccctcaaagttacaggcccgctggcccgaaatccaactcctccctggactgccgcagcagctctcgctacacgtggccagagacccgagaagggcctattccccggcccagcccccttttcacttggaaaaaggaagcggggccgcggcaggacctgggaacggaggcgccgggtctccattgaaacttcgacatgcttccggcccgggtgtgagcgactaggtgcggctgctggagccaatctgtctcagctggcgtcctcacagaggccactcagagagcgttgggtgctctacactatcattatggctgcagctggcgcgccggatggtatggaagagcccggcatggatactgaggctgaaaccgttgcaactgaagctcccgccaggcctgtcaattgcttggaagccgaagccgccgctggcgccgcggccgaggatagcggagctgcgagggggtccctgcagccagccccagctcaacctccaggcgatccagcagctcaagcctccgtttctaatggcgaagatgccgggggcggtgcagggagagagctcgttgacctgaagataatctggaataaaaccaagcatgacgtcaaattcccattagactctactggatccgagctgaaacagaagattcacagtatcacaggcctgccacctgctatgcagaaagtgatgtacaaggggctcgtgccagaggacaaaacactgagggaaatcaaagtaacctcgggcgccaagatcatggtggtaggatctaccatcaatgatgtcctggccgttaacacacccaaagacgctgctcagcaggatgcaaaggccgaggagaataagaaggaacctctctgccgccaaaagcagcatcgcaaagtactcgacaaagggaagccagaggatgtgatgcccagtgttaagggagctcaggaaagattgccaactgtccctctaagtggcatgtacaacaaaagcggcggcaaagtccgcttgacattcaagttggaacaagaccaactctggatcggaacgaaggagaggactgaaaagttacctatgggatccatcaagaacgttgttagcgaaccgatagaaggccatgaagattaccatatgatggccttccaactcggacccaccgaggcctcctactattgggtgtattgggtgcctacccagtatgttgatgctataaaggacacagtactgggcaaatggcagtacttttag

SEQ ID NO: 108568 - DNA, 9198 bp, synthetic construct
  misc_feature 1..9198: note = Description of Artificial Sequence: Synthetic coding sequence
  source 1..9198: mol_type = other DNA
atggaagagaaacagcaaatcattctggccaatcaggacggcggcactgtggcgggcgcagctcccacatttttcgtcattctcaagcagcccggcaacggcaagactgatcagggaatattagtcacgaaccaggacgcctgcgcccttgctagcagtgtgtcctctcccgttaagagcaagggcaagatctgcctacccgccgactgcacagttggcggcattacagttaccctcgataacaatagcatgtggaatgagttctaccatagaagcacagaaatgatccttaccaaacaggggcgccggatgttcccttactgtaggtattggattacaggtctcgacagtaacctgaagtatatcctggttatggacatcagtccagtcgacaatcaccgctataaatggaacgggaggtggtgggagccttcagggaaggcagagccccacgtgcttggcagggtgttcatccaccccgagtccccatccacaggacactattggatgcaccaacctgtgagtttttacaagctgaaactgacaaacaataccctggaccaggagggacacattatcctgcatagcatgcaccgatacttacctcgcctgcacctagtgccagctgagaaggctgtggaagtaatccagctcaacggccctggagttcacaccttcacattcccacagaccgagtttttcgccgtgactgcgtaccaaaatattcaaatcacccagttgaagattgactataatccctttgcaaagggattcagggacgacgggctgaacaataaaccccagcgagacggcaaacagaagaacagttcagatcaggagggaaacaacatctcctcctcttctggccacagggtgaggctaactgagggacaaggctccgagatacagcccggagatctcgatccccttagccgaggacatgaaaccagcgggaaaggtcttgaaaagaccagcctgaatattaaacgcgacttcctcgggttcatggacactgactctgccttgtccgaagtgccacaattaaagcaagaaatcagcgaatgcctaattgcatccagcttcgaggatgattcacgggtagcttctcctctcgaccagaacggatcttttaacgttgtgatcaaagaagagcctctggacgattatgattatgagctgggcgagtgtccagagggagtaacagttaagcaggaggagactgacgaagagacggacgtatacagcaatagtgatgacgatccaatcttggaaaaacagctgaagagacacaataaggtcgataaccctgaagccgaccaccttagttccaagtggctccccagcagccccagtggagtcgcgaaggcaaagatgtttaagctcgatactgggaaaatgccagtggtgtaccttgagccatgcgcggtgacgaggtccacagttaagatctccgaactgccggataacatgttgtctaccagccggaaagataagtcttccatgcttgcagagttggaatatttgcccacttacatcgagaactccaacgagactgccttctgcctggggaaagaaagtgagaacggcctgcgtaaacattcacccgaccttagggtggtccagaaatatcctctgctaaaggagccacaatggaaataccctgacatctctgattccatttcaactgagcgcatcctcgacgattccaaggattccgttggagacagcctgtccggcaaggaagatctggggagaaaacgcactacaatgctcaagattgctacagcggcgaaagttgtgaatgcgaatcaaaatgcatcccctaatgtgccgggcaaacggggcagaccgcgtaaacttaagttatgcaaagctgggcgacctccaaagaacaccggaaaatctttgattagcacgaagaacactcctgtgagtccagggtctacatttccagacgtaaaaccagacttagaggatgttgacggagtgctttttgtttctttcgaaagcaaagaagcgctcgatatacatgctgttgatggtaccaccgaggaatccagtagcttgcaggcttcaaccacaaacgactcaggttatcgggctagaatttcacagctggagaaagaattaattgaggacctcaagaccttgcggcataagcaagtcatccatccagggctgcaggaggtgggtttgaagctaaactccgttgatcctaccatgtccattgatctgaaatacctgggagttcagcttccattagcccccgccacgagttttcctttctggaacttgactggtaccaatccagcatctcccgacgccggttttccattcgtttcccggaccggcaagactaacgattttactaagattaagggctggcgaggcaaatttcactctgccagcgccagcagaaatgagggcgggaattccgagagctcgctgaagaaccgctccgccttttgctcagacaaactagacgagtatctggaaaacgaggggaagctcatggaaacctcaatggggttcagtagtaatgcaccgacctcgcccgtagtgtaccagctgcccacaaaatccacaagttacgtccggaccctggattccgttttgaaaaagcagtctactatctccccaagcactagctactccttaaagccccattcagtgcccccggtctcaagaaaagccaagtcacagaataggcaggctacgttctcaggccgtactaaaagttcatataagtcaatattgccatacccagttagtcctaaacagaaatactcacacgtgatcctcggcgacaaggtgactaaaaacagcagcggaattattagcgagaatcaggccaacaatttcgttgtaccgacgctggatgagaatatatttcctaagcagatttcacttagacaggcacagcagcagcagcaacagcagcaggggtctcggcctcccggcctctccaagagccaggtaaagctgatggatctggaggattgcgccttatgggagggtaagccacgaacctacatcaccgaggaacgggcggatgtgagcttaaccacattgttaactgctcaggcatccctgaaaaccaagccaatacacaccattatccgcaagagagcaccaccatgcaataacgacttctgccgactggggtgtgtatgcagctcactggcacttgaaaagaggcaacctgcacattgcaggcgccccgactgtatgttcgggtgcacgtgcctgaaacggaaagtggtgttagtaaagggcggcagtaaaactaagcattttcaacgaaaggccgcccaccgcgacccggtgttttatgacacccttggcgaagaggctcgggaagaagaagaaggcatccgcgaggaagaggagcaactaaaggagaaaaagaagaggaagaagttggaatatacaatctgcgagacggagcccgaacagccggtgcgacattaccccttgtgggttaaggtggagggcgaggtggaccccgagccagtgtacataccgaccccatctgtaattgagcccatgaagccactgctgctgcctcagcccgaagtactaagccctaccgttaaagggaagctcctcacgggaataaagtccccaaggtcatacacaccaaagccaaatcctgtgatccgggaagaagacaaggaccctgtatatctctacttcgagtccatgatgacctgcgcacgggtgcgggtttatgagcgtaaaaaagaggatcagagacagccatcatccagctcgtccccgtccccaagtttccagcagcagacttcttgccatagttccccggagaatcacaacaatgcgaaagagccagatagcgagcaacagccgctaaagcagctcacttgtgacctggaggacgattccgacaaattgcaggaaaagagttggaaatcgtcttgcaacgagggcgagtcatcatctacctcttatatgcaccagcgatcccctggcggcccgaccaagctgattgagatcatttcagactgcaactgggaagaggatcggaacaagatcctctccatcctatctcagcacattaactcaaatatgcctcaaagcctcaaagtcggatcgtttataatcgaacttgcgtcccagcgcaaaagccgcggcgaaaagaacccaccagtgtatagcagcagggtgaaaatatctatgcctagttgtcaggatcaggacgacatggccgaaaagagtggaagcgaaacgccagacggacccttaagccccggcaagatggaggatatctcaccggttcagacagatgcactcgactccgtgcgggagcggctccatggcggtaagggccttccattctacgccgggttgtcccccgctggaaaactggttgcgtacaaacgtaaaccctcatcgtccacctccggtttgattcaggtcgcaagtaacgctaaagtagctgctagtcggaaaccaaggaccctgctaccatccacatccaactccaaaatggcatccagctcaggtacggctaccaataggcccgggaagaacctgaaggcctttgtgcccgccaagagacccatcgcggctcggccatcccccggtggtgtgtttactcagtttgtgatgtcaaaagtgggtgctttacaacagaagataccaggtgtgagcactccccagactctagcgggtacacagaagttctctatccgaccaagcccagtgatggtggtgacccccgtcgtttctagcgagcccgtacaagtttgcagccccgtcacagctgccgtaaccactaccacacctcaggtttttctggaaaacactacagctgtgacccccatgacagcaatctcagacgtcgagactaaggagactacttactcctctggagccacaactactggtgtcgttgaagtgagcgagaccaacacgtccacttccgtgacatccactcagtccacagctaccgtgaacctgacaaagactacaggcattaccacacccgtcgcttctgtcgcgtttcctaaatcgctggttgccagtccgagcacgattactctgcccgtcgcatcgaccgccagtacatctctggtggtggtgaccgctgctgcctcctcatctatggtcacaaccccaacaagttcacttggttccgtcccaattatcctttctggcatcaatgggtcccctcctgtatcccagcgacctgagaatgccgcccagatcccagttgctaccccgcaagtgtcacccaataccgttaaacgcgctggcccccgtctactcctgatccctgtccagcaagggagtcctactctgcgacccgtgagcaacacacagttgcaaggccacagaatggtcctgcagccagtgcgtagcccctccggtatgaatctgttcaggcaccccaacggccagatagtgcagctgctaccactgcatcagctgcgggggagcaatacccagccaaatctgcagccagttatgttccggaaccccggcagtgtgatgggcattcggctccccgctccaagtaaacccagcgaaacccctccaagctctactagttccagcgccttctctgtgatgaatcccgtcatacaagccgtgggttcctcgtccgccgttaacgtcatcacccaggcgcccagcctgctgtccagcggtgcgagctttgtcagtcaagcgggcaccctcaccttacgaataagccctcccgaaccccagagttttgcgtccaagacaggctccgaaacaaagatcacatatagcagcggcgggcagcctgtcgggactgcgagcctgattcccctccagagcgggagctttgcactgctccagctgcctggtcagaagcctgtgccatcttcgattctgcaacacgtggcaagtctgcagatgaagcgggagtcacagaatcccgaccaaaaagatgagaccaactcaataaaaagggaacaggagaccaaaaaggtattacagtcagaaggagaggccgtagacccggaggccaatgttattaagcagaactcgggggctgctacatcagaggagaccttgaacgacagcttagaagaccgtggcgatcatttggacgaagagtgcttacccgaggagggctgtgctaccgtgaaaccctcagagcattcctgcattaccggctcccataccgaccaagattataaggacgtgaatgaggagtatggggcacggaaccggaaaagctccaaggaaaaagttgctgtgctcgaggtgagaacaatcagcgagaaagcttctaataagaccgtacaaaacctgagcaaagtgcagcaccaaaagttgggtgacgttaaggtagagcaacagaagggatttgataacccggaagaaaacagctctgaatttccggtgacgttcaaggaagagtcaaagtttgagctttcagggtctaaggtgatggagcagcagagcaaccttcaacccgaggcaaaggagaaggagtgcggagactcactcgagaaggatagggaacgttggaggaaacatctgaagggccctttaacccggaagtgtgtgggagcttcccaggagtgtaagaaggaggctgatgaacagctcatcaaagagacgaagacctgtcaggaaaacagtgacgttttccaacaggagcaggggatttcagacctgttgggaaaatcaggcatcactgaggatgcccgtgtgcttaagaccgagtgcgattcctggagtcggatcagcaatcccagtgcattctcgattgtgccacgacgggcagccaagtcatcacgaggaaacggccacttccaagggcatctgctgctcccaggtgaacagatccaacctaagcaagagaagaagggcggacgtagtagcgccgacttcaccgtgctggacctggaggaggatgacgaggatgacaatgagaagaccgatgactccatcgatgagatcgtcgatgtagtgagtgattatcaatccgaagaggttgatgacgtcgagaagaataattgtgtggagtatatcgaggatgacgaggaacacgttgacatcgagacagtggaggaactctctgaggaaataaacgtggcccacctgaagactaccgcagcccacactcaaagctttaagcaacccagctgcacacatatatcggcggacgaaaaggctgctgagaggtctcggaaagctccaccaataccactgaaactcaagccagattattggagtgacaaactccagaaggaagccgaggcatttgcttactacagacgcacacatactgccaacgaacgcagaagacggggagagatgagggatttgtttgaaaagctgaaaataacattgggtctcctgcatagttccaaggtgtctaaatccctcatattgacgcgggcgttttccgagattcaaggactgaccgatcaggcggacaaacttattgggcaaaagaacctgctgacacgcaagcggaatatcctaattcggaaggtgtctagcctgtcaggtaagaccgaagaggtggttctgaaaaaactggagtacatctacgccaagcagcaagctctggaggcgcagaaacgtaagaagaaaatgggaagcgatgagttcgacatctcgccgcgcattagcaagcagcaggaaggcagcagcgcctcgtctgtggaccttggtcagatgttcataaataatcgacgcggcaagcccctcatcctgtctcggaaaaaggaccaggccaccgaaaatacatcccctcttaacaccccacatacatccgccaacttggtcatgacaccccagggccagctgctgactctgaaagggcccctctttagtggacccgtcgtggctgtctcgcccgatctgctcgagtccgacctgaaaccccaagtcgccgggagcgccgtggccctgcccgaaaatgacgacttgtttatgatgcctagaattgtcaacgttacaagcctggctacagagggcggcttggtggacatgggaggtagtaagtacccgcatgaagtgcccgacagtaaaccctctgatcacttgaaagatacggtgcgcaacgaggacaacagtctggaggataaggggagaatcagctcacgtggcaaccgggacggccgagtgaccctcggccctacacaggtcttcctcgccaataaagacagcggatatcctcagattgtagacgttagtaatatgcagaaggcacaagagtttttaccaaaaaaaattagtggtgatatgaggggcatccagtacaaatggaaggagtctgaatctcgcggtgaacgggttaagagcaaggattccagtttccataagctgaagatgaaagatttaaaagacagctcaatcgagatggaattacggaaagtgaccagcgccatagaggaggcggcgcttgactcctctgagctccttaccaacatggaggatgaggacgacaccgacgagaccctgacatccttgctgaatgaaattgccttcctgaatcagcaacttaatgatgatagtgttgggcttgccgagctgccctcaagcatggatacagagttccctggcgatgcccgccgagcctttatttccaaagtgccacctggctcccgtgcaacgttccaggtggaacatttgggcacgggcctgaaggagctacctgatgtccagggggagagcgactctattagccctttgctcttgcacctggaggacgatgattttagcgaaaacgagaagcagctagccgagcccgcctctgagcccgatgtgctaaagattgtgattgacagtgaaattaaggatagcctcctaagcaataaaaaggcaattgacggaggcaagaacacatcaggcctcccggccgagcccgagtccgtcagcagcccaccgactctccacatgaaaaccggactggaaaatagcaattccactgatactctgtggaggcctatgcccaagctagccccactcggactgaaagtagccaatccaagcagcgatgccgacggccaatcactgaaagtgatgccatgcctggcgcccattgccgccaaggtgggatctgtgggacataaaatgaatcttacagggaacgatcaagaggggcgagagtctaaagtaatgcctacactcgcgcccgtggtggctaagttagggaactccggagcgtctccatcatcggcgggcaaatag

SEQ ID NO: 108569 - DNA, 888 bp, synthetic construct
  misc_feature 1..888: note = Description of Artificial Sequence: Synthetic coding sequence
  source 1..888: mol_type = other DNA
atgcagcccgaaggagcagaaaaaggtaagagcttcaaacaaagactggtgctgaaatccagtctggctaaagagacgctgtccgagttcttgggcacctttattctgattgtgttgggctgtggctgcgttgcccaggccatcttatcacggggacgcttcgggggggttattaccataaacgtcggctttagtatggccgtggcaatggcaatttacgtggctggcggggtttcagggggtcatatcaacccagcggtatctttagctatgtgcctgttcgggagaatgaagtggtttaaactgccattctacgtcggtgcgcaatttcttggagcattcgtgggcgccgctaccgtattcggaatctattatgatggtctgatgtcctttgccggtgggaaattactgatagtgggtgagaatgccaccgcgcacattttcgccacatatcctgcaccgtacctgtctttagctaatgcatttgccgatcaggtggttgctactatgatcctgctcattatcgttttcgctatttttgacagtagaaacctgggggcacctcgcggcctggaacctattgctatcgggctgctcatcatagttattgcttcaagccttggtcttaacagtggctgcgccatgaacccagcccgcgatctcagcccgcggctatttactgcgctggcaggttggggcttcgaggtgttccgcgcaggcaataacttctggtggattccagtggtgggacccctcgttggtgctgtgatcggcgggcttatctacgtgttggttatcgagatccaccatcccgagcctgatagcgtcttcaaaaccgagcaaagcgaagacaaacctgagaaatatgagctgtctgtgattatgtag

SEQ ID NO: 108570 - DNA, 1992 bp, synthetic construct
  misc_feature 1..1992: note = Description of Artificial Sequence: Synthetic coding sequence
  source 1..1992: mol_type = other DNA
atgggccggtatcgtataagggtagcgactggcgcatggctgttttcaggcagttacaatcgggttcaactctggctggtgggtacccgtggggaagccgaacttgagcttcagcttaggcctgcccgcggcgaggaagaagaattcgaccatgatgtggccgaggatctgggcttgctgcaatttgttcgtctgcgaaaacaccactggctggttgacgacgcttggttttgtgacagaataactgtccaaggaccaggcgcatgcgcagaagtagcttttccatgctataggtgggtgcagggggaggacatcttgagccttcctgagggcaccgcaagactgcccggcgacaacgcactggatatgttccaaaaacaccgagagaaagaactgaaagaccgacagcaaatctactgctgggctacctggaaggaaggcctgccgctgaccatcgctgcagatagaaaagacgatcttccgccgaacatgcggttccacgaggagaaacggctcgattttgaatggactctaaaggctggggcattggaaatggcgctcaagagagtttatactctgctgtcgagttggaactgtcttgaagacttcgaccagatattctggggacagaagtcagccctggcggaaaaagttcgacagtgctggcaggacgatgaactattctcttaccagttccttaatggcgcaaatcctatgctgctgagacgcagcacctctctgccctcacgcctggtgctccccagtggaatggaggagttgcaggcacagctggaaaaggagctccagaacggctccttatttgaagccgatttcatccttttagacggtattccagccaatgtcattcgtggagagaaacagtacctcgccgcacccctcgtcatgctcaagatggaacccaacggaaagctgcagccaatggtgattcaaatccagccaccgaatccatccagccctacccctaccctgtttcttccctcagacccacctctggcttggctgctggcgaaatcttgggtcagaaactccgatttccagttgcacgaaattcagtaccatctgttgaatactcacttggtagccgaagtgatcgctgtcgcaaccatgcggtgcttgccagggctgcatccgatatttaagtttctaatcccacatatccgatacactatggaaatcaacacccgggcccgaacgcagttgatcagcgacggcggcatattcgataaagctgtgagcaccgggggggggggacacgtacagctcttacgccgggctgctgcccagttaacctattgttctctctgtccacccgacgacttggccgaccgagggctattaggcttacccggagcattgtacgcgcacgatgcactccgcctttgggaaattattgctcgctacgtcgaaggaattgtccacctgttctaccagagggatgatattgtgaaaggcgaccccgaattgcaggcatggtgccgcgagatcaccgaagtgggcctctgccaagcccaagacaggggatttcctgtgtccttccaaagtcagtcacagctgtgtcacttccttaccatgtgtgtgtttacgtgcaccgcccagcatgccgccattaaccagggtcagctggactggtacgcctgggtcccgaacgcaccatgcacaatgagaatgccacctcccacgaccaaggaggatgttacaatggctactgttatggggagcttacccgatgttcggcaggcatgtttgcagatggctatcagctggcacttgagtaggcgccagccggacatggtccccctcggacatcacaaggagaagtatttctccggtcccaagccaaaggcagtgttgaatcagttccggaccgaccttgagaaactggagaaagagatcaccgcccggaacgaacagttggattggccctatgagtacctgaagccctcctgcatcgaaaattcagtcacaatctag

SEQ ID NO: 108571 - DNA, 2106 bp, synthetic construct
  misc_feature 1..2106: note = Description of Artificial Sequence: Synthetic coding sequence
  source 1..2106: mol_type = other DNA
atggcaacctacaaggttcgggtcgctactgggactgatctgctctctggcacccgtgatagcatttcactgacaatcgttgggacccagggcgagagccataagcagttactcaaccactttggtcgtgacttcgcgaccggagctgtaggacaatacaccgttcagtgccctcaagacctcggagagctgatcataattcgcttacataaggaaagatacgcatttttccccaaggacccctggtactgcaattatgttcagatctgcgcacctaacgggaggatctatcacttccctgcttatcaatggatggatgggtatgaaacgctggcccttcgggaagcgactgggaaaacaacagccgacgactctttgcccgtgctactggagcaccgtaaggaggagatacgggccaaacaggatttctatcattggcgagtatttttacccgggttaccaagttacgtgcatatcccctcataccgcccccctgtacggcgacatagaaatccaaatcgcccggaatggaatgggtacatccctgggttccctatcctcattaatttcaaagctacaaaatttctcaatttgaatctgaggtacagctttctgaagaccgctagtttttttgtgcgtctaggcccgatggcactcgctttcaaggtgcggggattacttgactgtaagcattcctggaagcgcctgaaggatattaggaagatcttcccgggcaagaagagtgtggtttccgagtatgtggccgaacactgggccgaagatacattttttggatatcaatacctgaacggggtgaatcctggcctcatcagaaggtgtacgagaattcccgataagttcccagtgactgacgacatggtggccccgttcctgggcgaagggacctgtctgcaggctgagctagagaaggggaacatctatttggccgactaccgcattatggaaggcattcccacagtggaacttagcggccgaaaacaacatcattgtgcccccctgtgtcttctgcacttcggaccagaaggtaagatgatgccgatcgccatccagctatcccagacccctggccccgactgtccaatttttcttccctccgatagtgaatgggattggctgctcgctaaaacctgggtgcgctatgctgagttttacagtcacgaagccatcgcacacctgctggagacacatctgattgccgaggctttctgtctcgcactgctgaggaatctgcccatgtgccatcctctgtacaaacttctcatcccacataccagatacacagtgcagatcaacagtatcggaagagcagtcctgctcaacgaaggcgggttatccgccaaagggatgagtctgggcgtggaaggctttgccggtgtgatggtgagagccctgtcggagctaacttacgactcactgtatttgccgaacgactttgtggaaaggggagtacaggacctccctgggtactattaccgcgatgatagcctcgccgtctggaatgccctagagaagtatgtcactgagattataacttattactatccctctgacgctgctgtcgagggtgaccccgaactgcaatcctgggtgcaggagatcttcaaggagtgtctgcttggtagggaaagcagcgggtttcctaggtgcctcagaacagttcctgagctaattcgatacgtcacaattgtgatatacacttgcagcgcgaagcatgcggctgtcaacaccggacagatggaattcacagcatggatgcctaattttccggcttcaatgaggaacccgcccattcagaccaagggtctgaccactctagaaactttcatggatactctgccagatgtcaaaacaacatgtatcacacttcttgttttatggactctgtcccgagaaccagacgaccgacgcccattggggcacttcccagacatccacttcgtggaagaagcccccagacgatcaatagaggcattccgacagaggctgaaccagattagtcacgacataagacagcggaataagtgcctgcccataccgtactactacttggacccggtgctaatcgaaaattccatatcaatatag

SEQ ID NO: 108572 - DNA, 1989 bp, synthetic construct
  misc_feature 1..1989: note = Description of Artificial Sequence: Synthetic coding sequence
  source 1..1989: mol_type = other DNA
atgggtctctaccgcatccgggtttccaccggagctagcctatacgcaggctcgaataatcaggtgcagttgtggttagtcgggcagcatggcgaggccgcgcttggcaaaaggctctggcctgcaagaggtaaagaaacagaactaaaagtagaagttcctgagtacctcgggcctctgttgtttgtgaaactgagaaaacgccatctactgaaggatgacgcgtggttctgtaactggatttctgtccaaggacctggagctggcgacgaagtcaggttcccctgttaccgctgggtggagggcaatggggtacttagcttgccagagggcaccggacgcactgtcggtgaagatcctcaggggctgttccagaaacaccgtgaggaagagctcgaagaacgaaggaaactgtacaggtggggaaattggaaggatggactaatccttaatatggccggcgccaagctgtatgatctgcccgtcgacgaaaggtttcttgaggataaaagagtggatttcgaggtgtccctcgccaagggtctggccgatctggcgattaaagactcactgaacgtccttacctgctggaaggacctcgatgactttaatagaatcttttggtgcggacagtcaaaactggcagagcgtgttcgcgacagctggaaagaagatgccttatttggctaccagttcctcaatggtgccaaccccgtcgtgctgcgtagatccgcccatctccccgcaaggttggtcttcccgcccggcatggaagagctccaggctcaactggaaaaggaactggaggggggaactcttttcgaagctgatttttcactcttggacggaattaaggcaaatgttattctgtgctcacagcaacacttagccgcaccactggtgatgctaaaattgcagcccgacgggaagctgctgcctatggttatccaactccagctcccgcggactggtagccctcctccacccctgttccttccaacagaccctccaatggcctggctccttgccaaatgctgggtgcgaagctccgattttcagcttcacgaacttcaatcccaccttctgcgtggacacctgatggcggaggttatcgtggtagcaaccatgcgctgtctgccctccatacacccgatcttcaaactcatcataccccacctgagatacacccttgaaatcaacgttcgggcgcggaccggcctggtgagcgacatggggatttttgaccagatcatgtccacgggcgggggggggcacgttcagctgcttaagcaggctggagcgtttctcacgtactcgtccttttgcccaccagatgacctggctgatcgcggcctgctgggggttaagtcttctttttatgctcaagacgctctccggctgtgggaaataatctaccggtatgttgaagggatcgtgtctctgcattacaaaaccgacgtggcagtgaaagatgaccccgagttgcaaacttggtgcagagaaatcacggagattggtcttcagggcgcacaggatcggggctttccagtttcgctacaggcacgggaccaagtgtgccatttcgtgacgatgtgcattttcacatgtaccggccagcacgctagtgtacacctgggccagctcgactggtacagttgggtgccgaatgctccctgcactatgagactgcccccaccaaccaccaaggacgctacacttgagaccgttatggctacgttgcctaatttccatcaggcctcgcttcagatgtctatcacctggcagttgggaagaaggcagcccgtaatggttgcagttggccaacacgaggaagaatacttctctggtcccgagcccaaagctgtgctgaagaagtttagagaagaactcgcggcactcgacaaggagatcgaaatcaggaacgctaagctcgatatgccatacgagtatctcaggccttccgtggttgagaatagtgtcgcaatctag

SEQ ID NO: 108573 - DNA, 2055 bp, synthetic construct
  misc_feature 1..2055: note = Description of Artificial Sequence: Synthetic coding sequence
  source 1..2055: mol_type = other DNA
atgctcaaaaggaacgaaagtcagtggttggcgcagcgccgacggtcagagacgtctctcagtaaaatgggactgtatcggatcagggtttcaaccggtgccagcctatatgctggaagcaacaatcaggtgcaactttggcttgttgggcagcatggagaggcagccttggggaagcggctctggccagcacgcggcaaggaaactgagctcaaagttgaagtgcctgaatacctcgggccattactgtttgtgaagctgcgcaagcgccacctgctaaaggacgacgcttggttttgtaactggatctcagtgcaggggcccggcgcgggggatgaagtgcgattcccttgttaccgatgggtggagggcaacggggttctgagcctaccagaaggtacaggccggactgtgggagaagatccacagggtctgttccagaagcatagggaggaggaactcgaagaaagacggaaactataccggtggggcaattggaaagacgggctgatcctgaatatggcgggagcaaaactgtacgatctgcctgtggatgagagatttctcgaggataaacgagtggacttcgaagtgtctctcgccaaaggtctcgctgatctggccatcaaggattctcttaacgtattaacttgctggaaggaccttgatgatttcaatcgaatcttctggtgcggtcagtccaagctagccgaacgcgttagagatagttggaaggaagacgccctttttggatatcagttcctgaacggggccaatccagttgtgttgcggagaagtgctcatctgccagccaggctggttttcccccccggcatggaagagctgcaggcacaattggagaaagaactggagggaggcactctgttcgaggcggacttttcattgctagacgggatcaaagcgaacgttatcttatgtagccagcagcacttagccgcccccctggtgatgctgaagctgcagcctgacggaaaattactacccatggtaattcaattgcagctcccgcggacaggctctcctcctccccctctctttctcccgaccgaccccccaatggcctggctcctggccaaatgttgggtaagaagcagcgatttccagctgcacgaactgcagagccatctgctccgcggccaccttatggccgaagtgattgtggtcgccacaatgcgttgcctcccgtccatccaccctatctttaagctcattataccacatttaaggtataccctcgaaattaatgtacgggctagaactggactcgtgagtgatatgggtatattcgaccaaatcatgagtacaggtgggggggggcatgtccagcttctgaaacaggctggagccttcttgacctatagcagcttctgcccacccgatgacttagcagataggggactgctgggtgtgaagtccagtttctatgcccaggacgccctgagactatgggagataatttacaggtatgttgagggcatcgtttccctacattacaaaactgacgtggccgtcaaggatgatcctgagctgcagacttggtgtagagagatcaccgagattggcctccaaggagctcaggaccgtggtttcccagtttctttgcaggctcgggatcaggtgtgccatttcgtgaccatgtgcattttcacctgcaccgggcaacatgcttccgtccacctgggtcagctagattggtattcatgggtacccaacgccccctgcacaatgaggttaccgcctccaactacgaaggatgccacgctggaaaccgtgatggccaccttgcctaactttcaccaggcctccctgcaaatgagtatcacctggcagctgggcagacggcagcctgttatggtggccgttggccagcatgaggaagaatatttctctggtccggagcccaaagcagtcctcaagaagtttcgcgaggaattggccgctcttgacaaagaaatcgaaatcaggaacgctaagctggacatgccatacgagtacctacgacccagcgtagttgagaattccgttgcaatttag

SEQ ID NO: 108574 - DNA, 1989 bp, synthetic construct
  misc_feature 1..1989: note = Description of Artificial Sequence: Synthetic coding sequence
  source 1..1989: mol_type = other DNA
atgggactgtacaggatacgggtatcaaccggagcaagtctttatgctggcagtaataatcaggtgcagctgtggctcgtgggccagcacggcgaagccgccctggggaaaagactgtggccggctaggggcaaggagaccgagctgaaagtagaggtgccggagtacctgggacccctgttgtttgtgaaactaaggaagcgccatctactgaaagacgatgcgtggttctgcaattggataagcgtgcaaggccccggcgctggggatgaggtcagattcccgtgctatcgctgggtggaaggaaacggagtcttatccttgcctgagggaactgggaggacagttggggaggatccacaggggcttttccaaaagcacagagaggaagaattggaggagaggagaaaactctaccgatggggaaactggaaggatggtcttatcctgaacatggcaggcgccaagctgtacgacctaccagtcgacgagcgattcctcgaggacaaaagagtggatttcgaggtatccctcgctaaaggcctcgccgacttagccattaaggacagtctaaacgtgttgacctgctggaaagacctcgacgatttcaaccgcattttttggtgcggacagagcaagttggcggagcgggtcagggacagttggaaggaggatgctcttttcggctaccagttcctgaacggggctaaccccgttgtgcttaggagaagcgcgcacctacccgcccggttagtgtttccacccggcatggaagagctgcaggcccagctggagaaggaactcgagggggggacattgtttgaagcagatttttccttactggacggaatcaaggctaatgtaatactttgctcccagcagcacctcgcagccccacttgtcatgttgaagctgcaacccgacggcaaacttctgccaatggtcatccagttgcaattgcctagaacggggtccccaccccctcccctattccttccgaccgacccccctatggcatggctgctcgctaagtgttgggttcgaagctccgattttcagctccatgaactgcagtctcatttactcagaggccacttgatggccgaagtgatagtggtggcaaccatgagatgcctccccagcatccacccaatctttaagctgattatccctcaccttcgctacactctcgaaatcaatgtacgcgcccggactggtttggtgtccgacatgggaatctttgatcagatcatgagcactggtgggggcgggcatgtgcaacttcttaagcaggctggggcattcctgacatattccagtttttgtccgccggatgatctggcagaccgaggccttttgggcgtgaagagtagcttctatgctcaggatgctttgcgtctgtgggagattatctaccgctacgtggaagggatagttagcttacactacaaaacagatgtggccgtaaaggacgacccagaactccaaacctggtgcagggagatcactgaaattggacttcagggcgcccaagaccgggggttccccgtgtctctgcaggccagggaccaagtttgtcactttgtaactatgtgcattttcacctgcacaggccaacacgccagtgtgcacctgggacagctcgattggtactcatgggttcccaacgccccttgtactatgcgtctccctccccctaccactaaagacgctactctggagaccgtgatggctaccctgcccaactttcaccaggcttcgctccagatgagcattacctggcagcttgggagacgccagccggtcatggtagcagtgggtcaacatgaagaggagtatttcagtggccccgagcccaaggccgtcctcaaaaagtttagggaggagctcgcagcactggataaagagatcgagatcaggaatgcaaaactagacatgccatatgagtatctacggcctagcgtggtggagaattctgttgccatatag

SEQ ID NO: 108575 - DNA, 486 bp, synthetic construct
  misc_feature 1..486: note = Description of Artificial Sequence: Synthetic coding sequence
  source 1..486: mol_type = other DNA
atggaccaggagaccgtgggtaacgtcgtgctcctggccatagtcaccctcatttcagtggtgcagaacggcttctttgctcataaggtcgaacacgagtcaagaacccaaaacgggcgctctttccagaggacgggtactctcgcattcgagagagtttatacggccaaccagaattgtgtcgatgcctacccaactttcttagccgtactgtggtcagccggtctgttatgctcacaggtccccgccgcctttgctggactgatgtacctgttcgtgcggcaaaaatacttcgtgggatatctgggagagagaacgcagtctactccggggtatatcttcggcaagaggatcatcctattccttttccttatgtccgttgctggcatcttcaattattacctgatattcttcttcggcagcgatttcgagaactacataaagactatctctaccacaattagtccacttctgctcatcccatag

SEQ ID NO: 108576 - DNA, 2532 bp, synthetic construct
  misc_feature 1..2532: note = Description of Artificial Sequence: Synthetic coding sequence
  source 1..2532: mol_type = other DNA
atgccccggggtgcatttagaccctgtctgccagcactttatttcgcctttctaacctgtcccactcctgagcaaagaatgagcgggactcaggcgccggacatccacctgggcgagccagctcgcgggacaggctgcgtgagaggcaagcaaacaagtatccgggtgcaggattgcgggagacgcgaagaggcgagagcggcaagcagagagttacggagagagaaagctcaggaacacccaagggagtcctgggctcatccccagccctaccccgcaccacagccattggcgcttcggccagagacccaaccttgtcccgcatgccgctccagtccccccggcaggttattgttgcgtccagctctccccggccatccctttttactgcctatcatggccgtgtacaggctctgtgtgaccaccggcccttacctgcgagccggaacgttggataatatatccgtcactctggtgggcacatgtggcgaatcacccaagcagaggctcgatcgcatgggccgcgacttcgcacccggtagcgtccagaaatataaagtacgctgcaccgccgagctgggcgagctgttgctgctgcgcgtgcacaaagagaggtacgcattctttcgaaaagacagctggtactgttctaggatatgcgtcaccgagcccgatggttccgtgagtcacttcccctgttatcaatggatcgagggctactgcacagtggaactgcgaccaggaaccgcacgaacaatctgtcaggacagcctgccacttctgcttgaccatcgaacgagggagctgcgagctagacaggaatgttaccgctggaaaatatatgccccaggttttccttgcatggtcgacgttaattcttttcaggagatggaatctgacaaaaagtttgcactgaccaaaaccaccacatgtgttgaccagggggacagttcagggaatagatatctccccggtttccccatgaaaattgacattccttcactgatgtatatggaaccaaatgttcggtactcagctaccaaaaccatctcactactgtttaacgctatccctgcttccttaggcatgaagctccggggattgctggatcgcaagggctcctggaaaaaacttgatgacatgcaaaacatcttttggtgtcataagacgttcactaccaagtatgtgaccgagcactggtgtgaggaccactttttcggttaccagtatcttaatggtgtcaaccccgtgatgctgcactgcatctctagcctaccctcaaagctcccggttacaaacgacatggtggcacctcttctggggcaagacacttgcttacagaccgaactcgagcgcggaaatatctttctcgctgactactggattctcgctgaggcccctactcactgcctgaatggtaggcagcaatatgtggccgcaccactttgtttactatggctgagcccgcagggggcgctggtgccactcgccatccagttatctcagacccccggccctgatagccctatcttcttacctaccgactctgaatgggactggctgctggccaaaacctgggtgcgcaatagcgaattccttgtccacgagaacaacactcacttcctctgtactcatcttctgtgcgaggcattcgcgatggccactttgcggcagctgcccctatgccaccctatctacaagttgcttctgccgcacaccagatatacactgcaggtaaacactattgcccgcgctacactgctgaacccagagggcctggtcgaccaggttacaagtatcggtagacaggggctgatctatctgatgtccaccggactcgcacacttcacgtacactaacttttgcctcccagacagccttagagcaagaggggtcttagccataccaaactatcattatcgagacgacggacttaaaatttgggctgcaattgagtcatttgtcagcgagatcgtagggtactactatccatcggacgcctctgtacagcaggacagcgagttacaagcctggacgggtgagatctttgcgcaagcctttttagggagagaaagctcaggcttcccatcgagactgtgcacccccggcgaaatggtgaaatttctcacagcgatcattttcaattgcagtgcccagcacgccgcggtcaattccggccagcacgactttggcgcttggatgccaaacgccccttcctccatgagacagccccccccccaaacaaagggaacgacaacgttgaagacctatctcgataccctgccagaggttaatattagctgtaataacctgctcttgttttggctggtgtcacaggaacctaaggatcaacggccccttggtacatacccagatgaacacttcacggaggaagctccaagacgctccatagccgcattccagtcccgtctggcacagatctcacgcgatattcaggaaaggaaccaaggactggccctgccctatacatacctggatcccccactcatcgagaattccgtctcaatctag

SEQ ID NO: 108577 - DNA, 2604 bp, synthetic construct
  misc_feature 1..2604: note = Description of Artificial Sequence: Synthetic coding sequence
  source 1..2604: mol_type = other DNA
atggggagaaatcggagctggggtacactcggttccggcagaacgtctacacctggtcaccaatcaggccccctgacaagaagacgagccgtcagtcagctgtacagacgatacttgctgttctccatctcagctagcgacccttctcttaggagcggtactcaggctcccgatatccacctgggggagccagcccggggcacggggtgcgtgagggggaaacagactagcattagggttcaagactgtggcagacgtgaggaggcacgggccgcctcccgagaactccgcagagagaaagctcaagaacatcccagggaaagctgggcccacccacagccataccctgctccacagccactcgcattacggcctgaaactcagccttgtcctgcatgtagaagttctccaccaggcagactcctgttgaggcccgccctccccggacaccctttcctcttgccgataatggccgtttaccggctatgcgtgacaaccgggccttatctccgggctggcaccctggacaacatttccgtgacgctggtcgggacatgtggcgagtctccaaagcagcgacttgacaggatggggagagatttcgcaccaggatctgtccagaagtataaagtgcgctgcaccgctgagctcggcgagttgttgctcctgagagtgcataaggagcgctacgccttcttccgcaaagattcatggtactgcagtcgcatttgcgtgacagaacccgatggcagcgtgtcgcacttcccttgctaccaatggatagaagggtactgtacggttgagctgcgacccgggaccgctcgaacaatttgtcaagattcgctgcccctgctgctcgaccacagaactcgagaacttagggctagacaggagtgctataggtggaagatttacgcacctggtttcccatgtatggtggatgtgaacagttttcaagagatggaatcagacaagaaatttgctttaactaagacgactacttgtgttgatcaaggtgatagttcggggaatcgctacctgccagggttccctatgaagatagatatcccatccctgatgtatatggagcccaacgtacggtattccgcaacgaaaaccataagtctcctcttcaacgcaatcccagccagcctcggcatgaaacttcgggggctgctggacagaaaaggatcctggaagaagctcgacgacatgcagaacattttctggtgtcacaaaacattcacaacaaaatacgttactgagcactggtgcgaagaccacttttttggttaccaatacctcaatggcgtcaatcctgtgatgttgcactgcatttcctctctgccttccaaattacctgtaacgaacgacatggtcgcgcctctcctgggacaggacacgtgcctccagacagagctcgaacggggtaacattttcctggctgattactggattctggctgaggcccctacacactgcttgaatgggaggcagcagtacgtcgccgcaccgctctgtctgctctggctgagtcctcagggagccttggtgcccctcgccattcagctctctcagactccaggccccgacagccctatcttcctgcccacggattctgagtgggactggctactggctaagacgtgggttagaaattccgaatttcttgtgcacgaaaataacacacatttcctctgtacacacctactatgtgaagcattcgccatggcgacacttcgacagcttccactgtgtcacccaatatataagttactgctccctcatactcggtatacattgcaggtcaatacaattgccagagcaaccctcctgaatcccgagggactcgtggaccaggtcacctctatcggccggcaagggctgatctatctaatgtccaccggcctcgcacacttcacatatacaaatttttgcttacccgacagtttaagagcccggggagtgctggctataccaaactatcattaccgggacgacggactgaaaatctgggctgccatcgaaagctttgtgagcgagatcgtcggatactactatccgtcagatgccagcgttcaacaggacagtgagctccaagcctggaccggagaaatcttcgcccaggcattcctcgggcgcgagtcaagtggttttccctccaggctgtgcacccccggggagatggttaaatttttaactgcaattatattcaactgtagcgcacagcatgctgctgtgaattctggccagcacgatttcggtgcgtggatgcctaatgccccctcgagcatgagacagcctccacctcagactaagggcacaactacactgaaaacgtacctagataccctgcctgaggtaaacatctcatgcaataacctgttacttttctggttagtgtctcaggagcccaaagatcaacgaccccttggaacctacccagacgagcacttcacagaggaagctccgcgacgcagtatagctgctttccagtctcgtttagcacagatatctagagacattcaggaacgaaaccaggggctagcactcccttacacctatctcgaccctcccctcatagaaaattcagtgtccatctag

SEQ ID NO: 108578 - DNA, 2136 bp, synthetic construct
  misc_feature 1..2136: note = Description of Artificial Sequence: Synthetic coding sequence
  source 1..2136: mol_type = other DNA
atggccgtataccgcttgtgtgtgaccacaggcccatatctgagagcaggcacactggacaatatcagtgtgacactcgtcggcacatgtggggagtccccaaagcagcgcttagaccggatggggcgggattttgcacctggcagtgtgcagaaatacaaggttcgttgcaccgcagaactgggggaattgctgttgctgagagtgcataaagaacgttacgccttttttagaaaagatagctggtactgtagccgcatttgtgtgactgagcctgatggcagcgtgtctcatttcccttgctatcaatggatcgaaggctactgtacagtggagcttcggcctggtacagccagaacaatatgccaggacagcctgccattattgttagatcacagaacccgggagttgagagcccgtcaagagtgctatcgttggaagatttacgctcctggcttcccctgtatggttgacgtgaacagttttcaggaaatggaatcagacaagaagtttgctttgacaaagacaactacatgtgttgatcagggtgattccagcgggaatagatatttgcccggattcccaatgaaaatcgatatccctagcctgatgtatatggagcccaatgtgcgctattccgctacaaagactatttctctgctgttcaatgctatccccgcgagtctcgggatgaaactgcgcggtctcttggatcggaagggcagctggaaaaagttagatgacatgcagaacatcttctggtgccacaagactttcacaacaaagtacgttactgagcactggtgtgaagatcacttctttgggtaccagtatctgaatggcgttaaccctgtgatgctgcactgtatctctagccttccgagtaagttgcctgttacaaacgatatggtagctcctttgttaggacaggatacctgcctccagaccgagctggaaaggggcaatattttcctggccgactattggatcttggcggaggctcctacccattgtttaaatgggcggcaacagtatgttgcggcccctctgtgcctgctctggctcagccctcagggcgccttagtacctctcgccatccagctgagccagacgcctgggcccgattcgcctatctttcttcctaccgattccgagtgggactggctgctagctaagacctgggtccgaaattcagaatttctcgtccacgaaaataatactcacttcctttgcactcatctgctctgcgaagcattcgctatggccactctcaggcagcttcccctctgtcacccaatttacaaactgttactgccccacacccgctatacgttgcaggtcaatactattgccagggcaacacttctgaacccagaaggacttgtcgaccaagtgacgtccatcggtagacaaggcctgatttacctaatgagcacaggattggcccactttacatatacgaacttctgcctcccggacagcctgcgtgcacggggggttttggcaatccctaactaccactacagagatgacggcctcaagatatgggccgcaattgagagttttgtatccgaaattgtgggatactactacccaagcgacgcttccgtgcagcaggattcagaactgcaggcttggactggggaaatttttgctcaagctttcttgggtcgtgaatctagtggtttcccttcccgattatgcactcctggggagatggtgaagttcctgactgccattatattcaattgcagtgcacagcacgccgcagtgaactcaggacagcacgatttcggtgcctggatgcctaatgccccctcaagcatgaggcagccccctccccagacgaaaggcacgactactctgaagacatacctcgacacacttcccgaagtgaacatttcctgtaacaacctgcttctgttctggctggtgtcgcaggagcctaaagatcagcgaccactgggaacttatccagacgagcacttcactgaggaagctccacgcaggagtattgctgcctttcagtcccggttagcccagatctcccgcgatatacaggagagaaaccaaggtctagcgctgccgtatacctacctggaccctcccctgatagagaacagcgtgagcatttag

SEQ ID NO: 108579 - DNA, 759 bp, synthetic construct
  misc_feature 1..759: note = Description of Artificial Sequence: Synthetic coding sequence
  source 1..759: mol_type = other DNA
atggaacctcagtcaatgaaggggcagaagagaccatttggggggccttggcgtcttaaggtcctgggagggcctccctggcttaggcggaccctcccaaagctgggcagaccgaaggaagcacctgtggcacgcatgtctactcagagcacacatccactgaaacccgaggccccaaggctccccccagggatccccgagtctccgtcttgccaacggaggcacacccttcccgcaagcgagtttaggtgcttgacacccgaggatgccgtgtccgcattcgagattgaacgcgaggccttcatctcagttctgggagtgtgtcctctctaccttgatgaaattcggcactttttaacattgtgtccagagctgtcgttaggatggttcgaggaagggtgcctcgtggcatttatcattggcagcctgtgggataaagagcggcttatgcaagagtccctcacactgcatcggagcggagggcacatagcacatttgcacgtgttagctgtacacagagcttttcggcagcaggggcgcggtccaatattgctgtggcggtacttgcatcacctgggttcacagcctgcagtcaggcgggcggctctaatgtgcgaagatgcgctggtaccattctatgaaaggttcagtttccatgctgtcgggccatgcgctattaccgtagggtcactgaccttcatggaactgcactgctccctgaggggccacccatttctgcgacggaatagtggttgttag

SEQ ID NO: 108580 - DNA, 624 bp, synthetic construct
  misc_feature 1..624: note = Description of Artificial Sequence: Synthetic coding sequence
  source 1..624: mol_type = other DNA
atgagcacccagagtacacacccactcaaacctgaggcccctagactaccgccagggatcccagaatcaccatcctgtcagcggcggcacacactgcccgccagcgagttcaggtgcctgacgcctgaggacgcagtgtcagcttttgagatcgagagggaagcattcatctccgtgctcggagtttgtccactctacctggatgaaatccgacactttctcactttgtgccctgaactgagtctgggctggttcgaggaaggatgcttagtggcattcataataggttctttatgggataaagagcgtcttatgcaggaatccctcaccctgcacaggtctggtgggcacattgcccacctgcacgtgttagctgtgcatagggccttccgccaacagggtaggggacctatcctgctctggcggtacctgcaccacctcggctcccagcctgccgtgaggagagcagccctgatgtgtgaagacgcactggtccccttctacgaacgcttctcctttcacgccgtgggaccatgcgccataaccgtgggaagcctgaccttcatggaactgcactgctctctaagaggccacccctttttacgacgtaactctggttgttag

SEQ ID NO: 108581 - DNA, 1536 bp, synthetic construct
  misc_feature 1..1536: note = Description of Artificial Sequence: Synthetic coding sequence
  source 1..1536: mol_type = other DNA
atggtgcttctggctgccgctgtttgcacaaaagcagggaaggctatcgttagtagacagtttgttgaaatgacacggacacgtattgaaggactgctggctgccttccccaaattgatgaataccgggaagcaacacacctttgtggagaccgaaagtgtacggtacgtttatcagcctatggaaaaactgtatatggtgctaattactaccaaaaactctaatattttggaagatctggaaaccttacggctgttcagtagagtcataccagagtactgtcgtgccctcgaagagaatgagattagcgaacactgtttcgatctgatatttgccttcgacgaaattgtggctttgggatatcgggagaatgtgaacctggcccagattagaacttttacagaaatggacagtcatgaggaaaaggtcttccgcgccgtgcgagaaactcaggaacgcgaggccaaggccgagatgaggcgcaaagcaaaagagctgcagcaggcgagaagggacgcagagcgtcagggtaaaaaagcaccagggtttggcggatttggctcatccgcggtctctggggggtccacagctgctatgattactgagaccataattgagacagataagcccaaggtggcacccgcacctgcacgaccttctgggcctagtaaagccctgaagctaggggcgaaaggtaaggaggtggacaatttcgtagataaactcaaatctgagggagagaccatcatgagtagcagtatgggcaaacggacatctgaagccacgaagatgcacgctccacctattaatatggagtccgtccacatgaagattgaagaaaaaatcacactcacttgtggacgcgacggcggactccagaacatggagctgcacggcatgatcatgctgcgaatttccgacgataaatacggacggatcaggctccatgtggaaaatgaggataagaaaggcgttcagttacaaacccaccctaacgttgacaagaagctcttcactgcggagagcctgattggcttaaaaaaccctgagaagagcttccccgtgaactccgacgtgggtgttctcaagtggcggctgcaaaccactgaagaatcatttatccccctgactatcaattgctggccctcagaaagtgggaatggatgcgatgtgaacattgagtatgaactccaggaagacaacctggaacttaatgatgtagttattacaatccccctgccatcaggagtgggggccccagtaatcggggaaattgatggcgaatatcgtcatgactcacgccgtaacaccctggagtggtgtctgcctgtcatcgacgccaaaaacaagtcagggagcctcgagtttagtatagcaggacagccgaacgacttctttccggtgcaggtttcattcgtgagcaaaaaaaactattgtaatattcaggttaccaaagtgacccaggtcgacggaaactcgcccgttagatttagtaccgagaccactttccttgtcgataaatatgaaatactgtag

SEQ ID NO: 108582 - DNA, 1659 bp, synthetic construct
  misc_feature 1..1659: note = Description of Artificial Sequence: Synthetic coding sequence
  source 1..1659: mol_type = other DNA
atggccgagtgcaatctggtcgcaatcttgattagtagcattgacaaccctcttgacaagaatttggataacgggggcaatagctgtctggactttcggcctctaaattctttctcccaaccacaggtgctgctggctgctgcagtatgcaccaaggccgggaaggccatcgtatccagacagttcgtggagatgacccggacccgaatagagggactgctagccgcattccctaaactaatgaataccgggaaacaacacacattcgtggaaacagagtctgtgaggtatgtgtaccagccgatggagaaattgtacatggttctcatcactactaagaacagtaacattctagaggatctggaaacactgcgccttttctcacgggtcatacctgaatactgcagggctctggaggaaaatgagattagcgaacactgcttcgacctaatctttgcatttgatgaaatcgtagcactgggctacagagaaaacgtgaatctggcacagattcggacatttacggaaatggactctcacgaggaaaaggtttttagggctgttcgagagacacaggaacgggaggccaaggccgaaatgcggcgtaaagccaaggagctgcagcaagcacgacgggacgctgaaagacagggcaaaaaggcccccggatttggtggcttcggctcgagcgcggtttcaggtggttccactgctgctatgattaccgagaccattatcgaaacagataaacctaaggttgcgcctgcccctgccaggccatccggtccctctaaagctctgaagctcggtgccaaggggaaggaggtcgataactttgttgataaacttaagtcggagggcgaaacaatcatgtcttcaagcatggggaaacggaccagcgaggctactaaaatgcatgcaccaccaattaatatggagtctgtgcatatgaagattgaggagaagatcaccctgacctgtggaagggatggcggcctgcagaacatggagctgcatgggatgattatgctacggataagcgacgataagtatgggcgcatccgactgcacgtggaaaatgaagataagaaaggggtgcagctgcagacccatcctaatgtagataaaaagctgttcaccgctgaaagtctgattgggttgaaaaacccagaaaaatcctttccagttaattctgacgttggcgtgctaaagtggcgcctccaaacgacagaggaatctttcatccccctgaccattaactgctggccttccgaatctggcaacggctgcgatgttaatatcgaatacgagctacaggaggacaatctggagttaaatgacgtagtcatcacaatccccctcccttctggcgtaggcgctccagtgattggggagatcgacggagagtacaggcatgacagtcgaaggaacacattggagtggtgtctgccggttatagacgccaagaataagtcgggcagtctggaattttctatcgccgggcagcctaacgactttttccctgtgcaggtgtctttcgtcagcaagaaaaattattgtaatatccaggtcaccaaggtgacccaggtggacggcaattctcccgtgcgcttcagtaccgaaacaacatttctagtggataaatatgagatcttatag

SEQ ID NO: 108583 - DNA, 1272 bp, synthetic construct
  misc_feature 1..1272: note = Description of Artificial Sequence: Synthetic coding sequence
  source 1..1272: mol_type = other DNA
atgattccagagtactgccgggcactggaggagaacgagatctccgagcattgctttgacctgatcttcgcgttcgatgagattgtggccctcggatatagagaaaacgtcaacctcgcccagattcgcacctttacagagatggattcccatgaggaaaaagtgtttcgcgcagtgcgcgagacacaggagcgagaagccaaggccgagatgagacgaaaggcgaaggaactgcagcaggctcgccgggatgccgaaaggcagggaaagaaagcccccggctttgggggcttcggctcatctgctgtctccggcggctctaccgcagcaatgatcaccgaaaccatcatcgaaaccgataaacccaaagtggcgccagcccctgcaagacccagcggaccttctaaagctctgaaattgggagctaaggggaaggaagtagataactttgtcgacaagctgaagtccgagggagaaaccattatgagcagtagcatgggtaaacgcacctctgaagcgaccaaaatgcatgcacctccaattaacatggagtccgtccacatgaagatagaggagaaaatcacccttacatgtgggagagatggcggattgcagaacatggagctgcacggcatgataatgcttagaatctccgatgacaagtatggacggatcaggctgcacgtggagaatgaagataagaagggcgtgcagttgcagacacatccaaacgtcgacaagaaacttttcaccgcggaaagtctcatagggctgaagaatcccgagaagagtttccctgtcaattccgatgtgggcgttttgaaatggagactgcagacaactgaagaaagcttcatacccctgacgatcaactgctggccatctgagagcggcaacggatgtgacgtaaatatcgagtacgagctgcaggaggataaccttgagctgaacgatgtggtgattaccattccactgccttctggggtgggcgcacctgtcatcggcgaaatcgatggggagtatagacacgactctaggcggaacaccctggagtggtgtttgccagttattgacgccaaaaacaaaagcggatccttagagttctctatcgccggacagcctaatgacttctttcccgtgcaggtttcattcgttagcaagaagaactactgtaatatccaggtgactaaggtgacacaggtggacggcaattctcccgtcaggttctctaccgaaaccacgtttttggtggataagtacgagattctctag

SEQ ID NO: 108584 - DNA, 570 bp, synthetic construct
  misc_feature 1..570: note = Description of Artificial Sequence: Synthetic coding sequence
  source 1..570: mol_type = other DNA
atggtcttgctggctgccgccgtgtgcacaaaggcaggcaaagccatcgtgagtcggcaattcgtggagatgactcggactaggatagagggactattggcagccttccctaaactcatgaatacaggcaagcagcacaccttcgtcgagaccgagagtgtacgatatgtgtaccagcctatggagaagctgtatatggtgttaatcactacaaaaaattctaatatcttagaagacctggagacacttcgtctcttctcaagagtaatacccgaatattgtcgggctctggaggagaacgagatcagcgagcattgtttcgatctcatctttgcgtttgatgagattgtggccctaggttatcgcgaaaacgtcaaccttgctcagatccggacatttacggagatggacagccacgaggaaaaagtgttccgagctgtgcgggaaacccaggagcgggaagccaaagccgagatgcggagaaaggccaaggagctgcaacaggcacagagcgtgggcatcacaggaatgtctcaccacgcccagctgttactgtattttaatccttag

SEQ ID NO: 108585 - DNA, 2223 bp, synthetic construct
  misc_feature 1..2223: note = Description of Artificial Sequence: Synthetic coding sequence
  source 1..2223: mol_type = other DNA
atgaccgtgaagctggatttcgaagagtgcctgaaagacagtcccaggtttcgcgcttccatcgaactcgtcgaagctgaagtgagtgagttagaaactagacttgagaaactcctgaaacttggcacaggtcttcttgaatctggccgtcactatctggccgcatctcgcgctttcgtggtcgggatttgtgacttagctcgccttgggcctccggaacccatgatggcagagtgtctcgaaaaatttacagtaagtctgaaccacaagcttgattcccatgcagaattgctcgacgcaacacagcatacgctacagcagcagatccagactttagtaaaggagggtctgaggggatttcgggaggctcgccgggatttttggcgcggggcggagtccctcgaggctgcactgacccataatgctgaggtgcccagacggcgcgcccaagaagctgaggaagccggggccgcccttaggaccgctcgggccgggtataggggcagagcactggactatgccctccagataaatgtgattgaggataagaggaagttcgacatcatggagtttgttctgaggttggttgaggctcaagccacacacttccagcagggccatgaggagctatcccgactgtcccagtacaggaaggaactaggcgctcagctccatcagttagtgctcaattctgcacgggagaagcgcgacatggagcagcgccacgtgctcctgaaacagaaagagctgggcggggaggaacctgagccttctttacgtgaaggaccaggagggctggtaatggaaggccaccttttcaaacgcgcttcgaatgcattcaagacctggtccagaagatggttcacgattcagtccaaccagctcgtctatcagaagaagtataaagaccctgtaactgtagtagttgacgatctccggctgtgtacagtgaaactatgcccagactctgaacgcaggttttgctttgaagtggtcagtacttcgaagagctgcctgctccaagccgactctgagaggctgctccaactatgggtgtcagcggtgcagagcagtatcgcaagcgctttttcccaggccaggctggatgattccccaagaggtcctggtcagggatccggccacctggccatcggcagcgctgcgaccttgggatctggcggcatggcacggggccgggagcctggaggcgtgggacacgtggtggcccaagtccagtccgtcgacggtaacgcacagtgctgcgactgtcgcgagcctgcgcccgaatgggcaagcataaatctcggcgtgaccctgtgcatccaatgctctggtattcacaggtctcttggggtacacttctccaaagtaaggtctcttacccttgactcttgggagcccgagttagtgaaattgatgtgcgaactcggtaatgtcataatcaatcaaatctatgaggctagggttgaggccatggccgtcaagaagcctggaccctcctgttccagacaagaaaaagaagcctggattcatgcgaaatatgtcgagaagaagtttctcaccaagcttcccgaaattcgcggacggcgaggagggcggggcagaccccgaggccaaccaccagtgccaccaaaacccagcatccggcccagacctgggagtcttagatccaagcctgaaccccctagcgaagatttgggtagcctgcatcccggagcattgctctttcgtgcgtcaggtcatcccccttcactcccgacgatggctgacgctctggcacatggcgctgatgttaactgggtgaacgggggccaggataatgcaaccccgctcattcaggccactgccgcaaactcgcttctggcctgcgagtttctcctgcaaaacggggctaatgtgaaccaagcagacagcgccggccggggacctttacaccacgccactatccttgggcacaccggactcgcctgcctctttctcaaaagaggcgccgatcttggcgctcgagatagcgagggcagggacccactgactattgctatggagacagctaatgcggatatcgtcacccttcttcgtctcgcaaagatgagagaagcagaagccgcacagggtcaggctggagatgagacatatctggacattttccgagatttctcccttatggcgtcggatgacccagaaaagctgagcagaaggtctcacgatctacacaccctctag

SEQ ID NO: 108586 - DNA, 2337 bp, synthetic construct
  misc_feature 1..2337: note = Description of Artificial Sequence: Synthetic coding sequence
  source 1..2337: mol_type = other DNA
atgaagatgacggtagattttgaggagtgcctaaaggatagtccacgattcagagcggctctagaggaggttgagggagatgtagcagagctggagttgaaactggacaaactggtcaagctgtgcatcgcaatgatcgacacaggtaaagccttttgtgtggccaacaagcagtttatgaatggtattagggatttggctcagtatagctccaatgatgctgttgtagaaacgagcctcactaagttcagcgactcgctccaggagatgatcaacttccacactatcttattcgaccagacccaacgttcgattaaggcacagctgcaaaattttgttaaggaagatctccgcaagttcaaggacgcaaagaaacagtttgagaaggttagcgaggaaaaggagaatgctttggtgaaaaacgcgcaggtccaacgcaataagcagcacgaagtggaggaggcaactaacattcttaccgccacacgcaagtgctttcgtcacattgctctagactatgtcctccagattaacgttcttcaatctaagcggcggtcagaaatcctgaagtccatgctaagttttatgtatgctcacttggccttctttcatcagggatacgacttattttccgaactcggaccctatatgaaggatctgggagcccagctggacagactcgtcgttgacgccgccaaagagaaacgcgagatggaacagaagcattccaccatccaacaaaaggattttagctcagatgactccaaactggaatataacgtagatgcagcaaatggtattgtcatggaaggctacttattcaaaagggcttctaacgcgtttaagacttggaaccgcaggtggttcagcatccagaacaatcagttagtgtatcagaaaaaatttaaagacaatccgactgtcgttgtagaggacctcaggctgtgtaccgtgaaacactgcgaggatattgaacgcaggttctgttttgaggtcgtgagtcctactaaaagttgtatgctgcaggccgattccgagaaactgaggcaggcctggattaaggccgtgcaaacctcaattgcaacagcctatcgggaaaagggtgacgagtccgagaagctcgacaagaaatcctccccgagcaccggcagcctggacagtggaaatgagtcaaaagagaagcttctcaagggtgaatccgcactgcagcgggttcagtgtattcccgggaatgcctcgtgttgtgattgtggccttgccgatccgcgctgggcttccatcaacctggggataacgctgtgtattgaatgctccggaatccacaggagcctgggtgtccacttcagtaaggtgagaagcctgaccctggatacttgggaacctgagctgcttaagctcatgtgcgaacttggaaatgatgtcattaaccgcgtgtatgaggctaatgtcgaaaagatgggaatcaaaaagccacaacctggacagcgacaggagaaggaggcctacataagggctaaatacgttgagcgtaaatttgtcgataaatacagcatctcgttgtctccacccgagcaacagaaaaagttcgtcagtaaaagctcagaagagaaacggcttagcattagtaaatttggcccaggcgaccaggtgagagcctctgctcagtcctctgtacgtagcaacgatagtggcatccagcaatctagtgatgacggtagggagtcactcccttcgaccgtgtccgctaactcattatacgagccagagggcgagagacaggactctagcatgttcctcgattcaaaacacctcaacccaggcctgcaattgtatagggcgagttatgagaaaaatctacctaagatggcagaggccctcgcacatggggcagatgtgaattgggccaattctgaggagaacaaggccacccccctgattcaggcagttctcggggggagcctcgtcacatgcgaattccttctgcaaaacggggctaacgtgaatcagcgcgatgtccagggaaggggtcctctgcatcatgccactgtattagggcataccgggcaggtatgcctatttctgaagagaggagccaaccaacacgcgaccgatgaagagggcaaagatcccttgtcaatcgctgttgaagcagccaacgctgacattgtgacccttctgaggttggcgcgtatgaatgaagaaatgagagaatcagaaggattgtacggccaacctggggacgagacataccaggatatcttccgggatttttctcagatggcgtctaacaatccggagaaactcaaccggtttcaacaggacagtcaaaagttttag

SEQ ID NO: 108587 - DNA, 3618 bp, synthetic construct
  misc_feature 1..3618: note = Description of Artificial Sequence: Synthetic coding sequence
  source 1..3618: mol_type = other DNA
atgactaaaaaagaagaaccgccccccagccgggtccccagggccgtgcgtgtcgcctcccttctttctgagggcgaagaactgagcggagatgatcaaggagatgaagaagaagatgaccatgcgtatgaaggtgtacctaatggggggtggcacacaagtagtctctccttgtctctgccctccactattgctgctcctcatcctatggatggccctcctggcgggagcacaccagtgactcccgtgattaaggctgggtggctggacaagaacccgccacagggatcatacatttaccagaagcgctgggtgcggttggatacagaccacctgaggtacttcgattcaaacaaggacgcctatagcaaacgatttatctcagtggcctgcatatcccacgtcgctgctatcggagatcagaaatttgaggttatcacaaataacagaacttttgccttccgagcggaatctgatgttgaacgcaaagaatggatgcaggccctgcagcaggcaatggccgagcagcgcgcaagggccaggctttctagcgcctacctgctaggggtgccgggtagcgaacagcctgatagagcagggtcgctagagctgcgagggttcaagaacaagctatatgttgccgtggtgggggataaggtgcagttgtacaaaaacctagaggaataccacctgggcattgggatcactttcatcgacatgtcagttggaaatgttaaagaagtagacagacggagttttgacctgactactccttacaggatattcagtttttccgcagatagcgagctcgaaaaggagcagtggcttgaagcaatgcaaggtgctattgcggaggcactgagcacgagcgaggtggccgagcggatttgggctgccgcccccaacagattttgtgctgattgtggagccccccagcccgattgggcctctattaatttatgtgtggtaatttgtaagagatgtgccggcgaacaccggggcttgggcgcgggcgtatcaaaggttagaagtctgaaaatggatagaaaggtgtggacggaaaccctcattgagctgtttctgcagctgggcaacggcgcaggcaaccgattctgggcagccaacgttccaccctccgaggctttacagccttcaagctccccatctacacggaggtgtcatcttgaggcaaaatacagggaagggaagtatagacgataccacccactgttcggcaaccaggaggagctggacaaggctctctgcgcagccgtcaccactacagacctcgctgagactcaggctctgctggggtgtggcgccggaatcaactgcttctcaggcgatccggaagctccaacacccctcgccctggcagaacaggccggtcagaccctgcagatggaattccttcgaaacaatagaaccacagaagtgcccaggcttgattccatgaaaccattggagaaacactattcagtcgttctgcccaccgtttctcatagtggatttttatataaaactgcttcagcaggaaaactgctacaagatagacgtgctagagaggaatttagccggcgctggtgtgttctgggtgacggggtgctatcctactttgaaaacgaacgtgcagtcactcctaatggggagattcgggcttccgagatcgtctgtctcgccgtccctccacccgatacccatggctttgagcacacctttgaggtgtatactgagggtgagcggctctacttgttcggtctcgaatctgctgaacaggctcacgaatgggtgaaatgcatcgccaaagcatttgttccccccctggcggaagacctgctggcgagggattttgagagactgggcagactcccgtataaggccggcttgtccctgcaacgggctcaggaagggtggtttagtctaagtgggagcgaactccgcgccgtgttccccgagggcccatgtgaagaacccctgcaactgcgcaagctgcaagagttatccatacagggcgacagcgaaaaccaagtcctggtcctggtggagcgccgacggaccctttatatccagggcgaacgtcgtttagactttatgggctggctgggggcaatacagaaggctgcggccagcatgggcgatacactgtctgaacagcagctcggtgacagcgatatcccagttattgtctaccggtgtgtcgattatatcacgcaatgcgggctaacctctgaaggaatctacaggaagtgcgggcagacctccaaaacacagaggctcctggagagcttacgacaagatgctcgttcagtgcacctgaaggaaggcgagcagcatgtcgacgatgtgagctctgctttaaagaggttccttagggacctgcctgacgggctctttacccgcgcacagcggttgacttggctggaggctagcgaaattgaggatgaggaggaaaaagtgagccgctatcgagagctgctcgtcagactgccgccggtgaaccgcgcaacggttaaagccctgatatcccacttgtactgcgtccagtgtttctcagatactaaccagatgaacgtgcacaacttagccatagtgttcggtcccacactgttccagacagacgggcaagactataaggctggacgggtggtggaagacctgatcaaccactatgtggtggtgttttctgttgatgaggaagaactccgaaagcagcgggaagaaattacggcaatcgtcaagatgagagtagctggaaccgctagcggtacgcagcatgccggcgacttcatctgcacagtgtacttagaggaaaaaaaggcggaaacagaacagcatattaaagtaccggcaagcatgacggcagaagaactcaccctagaaatactggatcggaggaatgttgggatcagggaaaaagattattggacatgctttgaggtgaacgaaagagaggaggccgagcgccctttgcatttcgctgaaaaggtgctgccaatcctacacggccttggtacagatagccaccttgtcgtcaaaaagcatcaggccatggaagccatgttgttgtacctagccagtcgagtgggggacacaaaacatgggatgatgaagttcagagaggatcgctcactcctcggtctgggtcttcctagcggcggatttcatgatcggtattttatcctgaattcatcttgtctccgcctctataaagaggtgagaagtcagagaccctggtccggcgcccctgaaacttctcataggcccgagaaggaatggccaattaaatccttgaaggtttacctgggtgtaaaaaaaaaactgagacccccgacgtgctgggggtttacagtggtccacgagactgagaaacacgaaaagcagcagtggtatctgtgttgtgacacacaaatggagctgcgcgaatggttcgccacatttctctttgtgcagcacgacggccttgtgtggcctagtgagccgtctcgggtcagcagggcagtgcccgaggtaagactaggctccgtgagcctgatcccacttcgaggctcagagaacgaaatgagacggagtgtggctgcatttaccgccgatccactctccctgctgaggaacgtatag

SEQ ID NO: 108588 - DNA, 1884 bp, synthetic construct
  misc_feature 1..1884: note = Description of Artificial Sequence: Synthetic coding sequence
  source 1..1884: mol_type = other DNA
aaatgttgggccgtatgggtgggggcagtctggactgaaggtgcttggcagccacgggtcggagttatttgcggtttaaaaggtcgcatgaccctttccggcagcaggggccaggaggaaccccctccatcacgcgtgcccagagccgtgagagtggcttcactactcagcgaaggcgaggagttaagcggggatgatcagggagacgaggaggaggacgaccatgcctacgagggcgttcccaatggcggctggcatacctcttcactgtccctgtctctgccatcaactatcgccgccccccacccaatggatggaccccccggcggctccactcctgtgactccagttataaaagctggctggctggacaaaaacccaccacagggcagctacatatatcagaaaagatgggtgcgcctagatactgaccatctccggtattttgatagtaacaaagacgcctacagtaagagattcatctccgtggcctgcatcagtcacgtagctgctattggggatcaaaaattcgaggtgatcactaacaacaggacatttgccttcagggccgaaagcgatgtcgagcgcaaggagtggatgcaggcactccagcaggcaatggccgaacagagagcccgcgctaggctttcttctgcttacttgctgggagtgccgggcagtgaacagcctgaccgagcaggctccttagaactgcggggattcaaaaacaaactgtacgtggctgtagtcggcgacaaagtgcagctctataagaatttggaagagtatcacctgggaattggcatcacctttatcgacatgagcgtggggaatgtgaaggaagttgataggcgctctttcgatctgactaccccctatagaattttttctttttccgccgactccgagctggaaaaggagcagtggctggaagcaatgcagggtgctatcgccgaagccctgtccacctcggaagtcgctgagcgcatttgggctgcagccccaaatcgcttctgcgccgattgtggtgccccacaaccagactgggcaagtatcaacctatgcgtcgtgatttgcaagagatgtgcaggggagcaccgtggcctgggtgccggggttagcaaggtgcggagtttaaaaatggatagaaaagtctggacagaaaccctgatcgagctgttcctgcagctgggtaacggtgccggaaatcgattctgggctgcaaatgtacccccgtctgaggcactacagccatcttcatccccgagcacgagacggtgccacctcgaagcgaagtacagggagggcaaatatagacgatatcatccgctgtttggcaaccaagaggaattagataaagcattgtgcgctgctgtgacaactacggacctcgctgagacacaggctttgctgggatgcggagccggaattaactgtttctccggagatccggaggcccctacacccctggcactggcggagcaagccggccagaccctgcagatggaattccttagaaacaatagaactaccgaagttccccgtctagatagtatgaagccgctggaaaagcactattctgtggtccttcctacagttagccacagcggcttcttgtataagaccgcttctgcgggaaagctcctccaggataggcgcgcccgcgaggaattcagcaggagatggtgtgttctgggtgatggagtgttaagctatttcgagaacgaacgcgccgtcactcccaacggagagattcgggccagcgaaatagtgtgcctggccgtcccaccccccgatacacacggcttcgaacacacattcgaagtatataccgaaggcgagcgcctgtacctttgggccggcgagtgcggggccggatcttag

SEQ ID NO: 108589 - DNA, 4320 bp, synthetic construct
  misc_feature 1..4320: note = Description of Artificial Sequence: Synthetic coding sequence
  source 1..4320: mol_type = other DNA
atggccgaggccggcgacgctgctttgagcgtggcggagtggttgagagcgcttcaccttgaacagtatactggcctctttgaacagcacggactcgtgtgggctactgaatgtcagggcctatccgacacccggctcatggacatgggcatgttgctgcccgggcatagacggcggatcctggcaggactgcttagagcccatacctcacctgcgcccgcccccagacccactccacgccccgtccctatgaagagacacatttttcggtcacctcccgtaccggcgacccctcctgaacccttgccaacaactacagaagatgagggacttccagctgctcctccaataccccctagacgctcatgcttacccccaacttgcttcactacgcccagtacggccgcacctgatccagtgcttccacccctgcctgctaagagacacctcgccgaactaagcgtcccccctgtgcctccaagaactgggcctccacgcctcctggtctccttacctacaaaggaagaggagagtctcctcccctctctgtctagccctccacaaccccagagtgaagaacctcttagtactttgccccaaggtcccccacaacctccttctccacccccctgtccgcctgaaatcccgccaaagcctgtccgcctctttccggagttcgatgacagcgactatgatgaagtgcccgaggagggtccaggtgctcctgctcgcgtgatgaccaaaaaggaagagcctcctccaagccgtgttcctcgggccgtgcgtgtagcgtcacttctttctgaaggtgaggagctgagtggcgatgatcagggcgatgaagaggaggatgaccatgcatacgagggagttcccaacggaggctggcatacgagtagcctgtcacttagcctgcccagcacaatagcagcaccacaccctatggacgggccaccaggcggcagcactcccgtgacaccggtgatcaaggcgggctggctggacaaaaacccgcctcaaggatcttatatttatcagaagcgatgggtaagattggatactgaccacctgcgctactttgattcaaataaggacgcctacagcaaaaggttcattagcgtggcctgtatctctcatgtggccgctatcggagatcagaagtttgaggtgatcacgaacaacaggacctttgcgtttcgcgccgagagcgacgttgagcgcaaggagtggatgcaggcactccagcaggccatggcagaacagcgggcgcgcgcgaggcttagtagtgcttacttactcggggtcccaggatccgagcagcccgatagggcagggagcttggaactgcgaggattcaagaataaactttacgtagccgtggtgggggataaagtacagttgtataagaatctggaggaatatcacctcggcatcggtattacattcatcgacatgtccgttggcaacgttaaggaggttgacagacgctccttcgaccttaccaccccctatcggatcttctccttctccgcggattcggagctagagaaggagcagtggttggaggcaatgcagggggcgattgctgaggccttgtccacgtccgaagtcgcggagaggatctgggccgcagcccctaatcgattttgcgccgattgtggcgccccccagcctgactgggcctccataaacctatgcgttgtcatctgcaagcgttgcgccggagaacaccgaggacttggggctggtgtgagcaaagtcagaagtctgaagatggaccgaaaagtttggaccgagacattgatcgaactttttctgcagcttggaaacggggctggcaatagattctgggccgcaaatgtgccgccttccgaggcattgcagccatcttcatcaccgagcacgcgtaggtgccatctggaagcaaaataccgcgaggggaaatacagaagataccatccattgtttggcaaccaagaggagctggataaggccctatgcgccgccgtgaccacgacagacctcgccgagactcaggcactgctaggatgcggggcagggattaattgcttttctggggatcccgaggccccaacccctttggcactcgcagagcaggccggacaaaccctccagatggagttcctgcgaaacaatcgaactacggaggttccccgtctagattcaatgaagcccttggaaaaacattattccgtggtgttacccaccgtttcgcactctggctttttgtacaaaacagcctccgctggaaagttactccaggaccgccgggcccgggaagagtttagcaggcgctggtgcgtgcttggtgacggggtgcttagctactttgaaaatgagcgggcggttacacctaatggcgaaattcgggctagtgaaatcgtgtgcttggcggtccccccacccgatacccatggttttgaacacaccttcgaagtgtacacagaaggcgagcgcctctatctatttggcctggagtcggccgagcaggctcacgaatgggtcaagtgtatcgcaaaggcttttgtgcctcccttggccgaggaccttctcgcaagggatttcgagcggctcgggcgattgccatataaagccggcttgagcttgcagagggctcaggaggggtggttcagcctgtcaggtagtgagttacgagccgtcttcccggaaggtccttgtgaggagcccctccaattacgtaaacttcaggagctctctatacagggggatagtgaaaatcaggtcctggtgcttgtggaaaggaggcggaccttgtacattcagggcgagagacggctggattttatgggttggctgggagcaatccagaaggccgccgcttccatgggggataccctgagcgagcagcaactcggcgatagcgatatccctgtaatagtgtacagatgtgtcgactatatcactcagtgtggccttacatctgaaggcatctatcgcaagtgtgggcagacatcaaagacccagagactgctggagtcattgagacaagatgcaaggtcagtgcatctcaaagaaggcgaacagcacgtggatgacgtgagttcagccctcaagcggtttttgcgggacctgccggacgggttgttcactcgcgcacagcggcttacctggctcgaggcctctgaaatcgaagatgaagaggagaaagtatcccgttaccgggagcttctggtgcggcttcctcccgtgaaccgagccactgtgaaagctctgatatcccacctgtattgtgtacaatgttttagcgacaccaaccagatgaatgtccacaacctggccatcgttttcggtcctactctgtttcagacagacggccaagattacaaggcaggacgggtcgtcgaggatttaatcaatcattacgtagttgtattttccgtggacgaagaagaacttagaaaacagagggaggagattaccgccattgtgaagatgagagtggccggtacagctagcggcactcagcacgccggcgactttatctgcaccgtgtaccttgaagagaagaaggccgaaactgaacaacacatcaaggtacccgcctcaatgactgctgaggagcttacactggagatcctggaccgcaggaacgtgggaattagagagaaagactactggacatgcttcgaggttaacgagcgagaggaggctgaacggcctctccactttgccgagaaagtactcccaatcttgcacggcctgggcacagacagccaccttgttgtcaagaaacaccaagccatggaggctatgctactgtatttagcttcgagagtcggagacacgaaacacgggatgatgaaattccgcgaggatagaagtctgcttggcctgggactacccagcggtggctttcacgaccgatatttcatcttgaattcctcatgtctgcggctgtacaaggaagtccggtcacaccgaccggaaaaagagtggcctattaaatcactgaaggtctacctgggcgtgaagaagaaactccgtcctcccacctgctggggcttcactgtggtgcacgagacagagaagcacgagaagcagcagtggtatctgtgctgcgacacccagatggaactcagagaatggtttgccacctttctcttcgtgcaacacgacgggttggtgtggcctagtgagccttcgagggttagcagagcagtgccagaagtgcgacttggtagtgtatctctgattccgctgagggggagcgagaatgaaatgagaagatctgtggccgcgttcaccgctgacccgctgagcttgctccgcaatgtatag

SEQ ID NO: 108590 - DNA, 3633 bp, synthetic construct
  misc_feature 1..3633: note = Description of Artificial Sequence: Synthetic coding sequence
  source 1..3633: mol_type = other DNA
atgacactgtcagggagcaggggacaggaagagccgcccccttcacgggtgccaagggccgtacgcgtggcttctttactgtccgaaggagaagaactgtccggagatgaccagggagacgaggaggaggacgatcacgcatatgaaggggtgcccaacggtggatggcataccagctcgcttagtctctcactgccctcgacgatcgctgcaccacacccgatggacggacctcctggtggtagtactcctgtgacacccgtgatcaaggcaggctggctggacaaaaatcccccccagggttcctacatataccagaaacgttgggtgcgattggatacggaccacttacggtactttgattctaataaggatgcctacagcaagcggttcatttcagtcgcctgtatctcacatgtggctgccattggtgatcaaaagtttgaggtaatcactaacaatagaaccttcgcgtttagagccgagtctgacgtggagaggaaggagtggatgcaggccctgcagcaggccatggcggagcagcgagccagggcccggctgagttcggcctacttgctgggcgtgcccggttctgaacagccggatcgtgctggctcgctggagctgcgtggcttcaagaataaattatatgtggcggtagtaggtgataaagttcagctctataaaaatctggaggagtaccacctgggaattggaataactttcatcgacatgtctgttgggaatgtgaaagaagtagatcggcgatcctttgatctgaccacaccctatcgaatcttcagtttctctgcagacagtgaactggagaaagagcagtggctcgaggcaatgcagggggccatcgcggaagctctctccacctctgaagtggcagaaagaatctgggcagcggcacctaatcggttctgtgctgactgcggagcgccacagccggactgggcctccatcaacctgtgtgtggtgatttgcaaacgctgtgccggcgagcacagaggcctgggggccggggtaagcaaggttagaagtcttaaaatggaccgaaaggtgtggactgaaacccttatagaactgttcctgcagttgggtaatggagccggcaatcgattttgggccgcaaatgtgccacccagcgaggcgctccaaccttcatcttcaccttccactaggagatgccacctcgaagccaaatatcgcgaaggcaaataccggcgctaccatcctctgtttggtaaccaggaagagcttgacaaggcactgtgcgcagcagtgaccaccaccgatcttgccgagactcaagcactgctcggatgcggggctgggatcaattgtttcagtggggacccagaagctccgacccctctggccctggcggagcaagccggacagactctgcagatggagttcctgcggaataacagaacgactgaggtcccaagactggactctatgaaacccttggaaaagcactattccgttgttctgccaaccgtgtctcactctggattcctctataagaccgccagcgccggtaagctgttgcaggaccggcgggcccgagaggaattcagcaggcgctggtgtgtgctgggcgacggggtcctaagctattttgaaaatgaaagggccgtcacccccaacggagaaataagagcaagcgaaatcgtctgtcttgcagttcccccacctgatacacacggattcgagcacacatttgaagtgtatacggaaggtgagaggctgtacctcttcggcctcgagagtgctgaacaagctcacgagtgggtgaaatgcatagcaaaagctttcgtgccgcccctggctgaggaccttttagccagggactttgaaagactggggaggctgccatacaaggccggcctatctctgcagcgggcgcaggagggctggttctcgctgtccggttcagaactccgggcagtgttccctgaagggccttgtgaagaaccactccagttgcgcaagctgcaggagcttagcattcaaggtgactctgaaaaccaggtcctcgtcctagtagaacggagacgcaccctctatattcagggggagaggaggcttgattttatgggctggctcggggcgatacagaaagctgccgcgtcaatgggcgacactctcagcgaacagcagctcggcgatagcgatattcccgtgatcgtgtaccgatgcgtagactatattactcagtgcggactgactagcgaaggcatctacagaaaatgcggccaaacgagcaagacgcagcgcctgctcgagtctctgaggcaggacgcgagaagcgtgcatctcaaagagggagaacaacatgtggacgacgtgtccagcgctttgaagcgattcctacgggatctgccagacgggctcttcacgagggcccaaagactgacttggctggaggctagcgagatcgaggacgaggaggaaaaagtgtcccggtatcgggaattgttggtgaggctgcctcccgtgaaccgagccacagttaaagctttaatatcccacctgtactgcgtccagtgcttctcagatacaaatcagatgaatgtccataacctcgccattgtattcggccctacactttttcaaacagatggacaagactacaaggccggccgtgtggttgaagaccttatcaatcattacgtggtggtgttttctgtggacgaagaggagctgaggaagcagcgcgaggagattaccgcaattgtgaagatgcgggttgcaggtacagcatctggcacacagcacgctggggatttcatttgcacagtgtacctggaggagaagaaggccgaaaccgaacagcacatcaaagttcctgctagcatgacggccgaagaactcacacttgagatcttagatcgccgtaacgtcggaattagagagaaggactattggacctgcttcgaagtcaacgaacgcgaagaggccgagaggccccttcatttcgccgagaaggtcctgccaatcttacatgggctggggacagatagccacctggtggtgaagaagcatcaggcaatggaggctatgctgctctacctggcgtcacgcgttggcgacactaagcacggtatgatgaagttccgggaggatcgctcattactagggctgggactcccatccggtggatttcatgaccggtacttcatcctcaatagcagctgtctgagattgtacaaagaggtgcggagccagcggccgtggtcgggcgccccggagacatctcatagacccgaaaaggaatggccaatcaagtctctaaaagtgtatctgggcgtgaaaaaaaagctgcggccgccgacttgttggggctttacagtggtgcacgagacagagaaacatgaaaagcaacagtggtatctgtgctgtgacacccagatggaactgcgggaatggtttgccacatttctgttcgtgcagcacgatggtctcgtatggcctagcgaacctagtagggtcagtcgcgccgtgccagaggtgcgccttggtagcgtcagcctcatcccacttagggggtctgagaatgaaatgagaaggagcgtggcggcctttactgccgaccccctatcgcttctacgcaatgtttag

SEQ ID NO: 108591 - DNA, 4353 bp, synthetic construct
  misc_feature 1..4353: note = Description of Artificial Sequence: Synthetic coding sequence
  source 1..4353: mol_type = other DNA
atggccgaagcgggcgatgctgctctgtccgttgccgagtggctgcgggctctgcatctggagcagtacacgggcctgtttgaacaacacggcttagtgtgggcgacggaatgtcaaggactgtccgacacacggcttatggatatgggcatgctcttaccagggcatcggcgtcggatacttgctgggctgctaagggcccatacctctccggcccccgctcccaggccaacaccaagacctgttccaatgaagaggcatatcttcagatcaccgccagtgcctgcaacaccccccgagcccctgcccacaacgactgaggacgagggcttgccagctgcaccacctatccccccacgtcgaagttgtttgccccccacatgcttcactacgcctagcacagcagcccctgaccccgtactccctccactgcccgcaaagcgccaccttgctgaactttcagtgccaccagttcccccccggacgggccccccccgactgctggtgagtttacccactaaggaggaggaaagtttgctcccgtcactgtccagtcccccccagccccagagtgaggaacccctctccactttgccccagggacctccccagccccccagtccgcccccatgcccccccgagataccacccaagcccgtgaggctgttccccgaattcgacgatagtgattacgacgaggtcccagaagagggcccaggcgcccccgcacgagtgatgaccaaaaaggaggagccacctcccagtcgagtgcccagggccgttagagtcgctagcttattaagcgagggagaagagttgtcaggggatgaccagggagatgaggaggaagatgatcatgcttatgaaggggttcccaatggcgggtggcatacttcgagtctatctttgtctcttccatctactatagcagcaccacatccaatggacgggccacccggaggctccaccccagtgacaccggtgattaaagccgggtggttagataagaatccccctcaggggagctacatttaccaaaaacgatgggttaggctcgacactgatcacttacgatatttcgatagcaacaaagacgcctatagtaagaggttcatctccgttgcttgtatctcccacgtcgccgcaatcggtgaccagaaatttgaagttattactaacaatcggactttcgcatttagagcagagagtgacgtagagagaaaagagtggatgcaggctctgcagcaagctatggctgagcaaagggcccgagccagactgtctagcgcctacttgctgggtgtcccaggctctgagcagcccgatagggcgggctcactagaactgaggggatttaaaaataagctttacgttgcagtcgtgggagacaaggtgcagctgtataaaaacctggaggagtatcacttagggattggcataacgttcatcgatatgtctgttgggaacgtaaaagaggtagatcgcaggagcttcgacttaacaacaccctacaggatctttagcttcagtgcggattccgagctcgagaaggagcagtggctggaggcaatgcagggagccattgcagaggctctgtccacttcagaggtggctgaaagaatttgggctgctgcacctaataggttctgtgctgattgtggggctccgcagccagactgggcctccatcaatctgtgtgtggtaatttgtaaaaggtgcgccggtgagcatcggggtctgggagctggtgtgtccaaggtccgttctttgaaaatggatcgcaaggtgtggacagaaacattaatcgaattgtttctacaattggggaatggcgctggaaatagattctgggctgccaatgtgccacctagcgaagcgctacagccctcttctagcccaagtacgaggcgctgtcatcttgaggctaaataccgggagggcaaatacaggagataccaccctttatttgggaaccaggaagagctcgataaagccctatgcgctgcagtcaccactaccgatctcgccgagacacaggctctattgggctgtggcgccggcattaattgtttttccggtgatccagaagcgccgacccccctcgccttagcagaacaggcaggccagacccttcaaatggagttcttacggaataatagaaccacggaagtacccaggctggacagcatgaaaccactggagaaacattacagtgtggtacttccaacggtttcccactccggcttcctctacaaaaccgcttccgccgggaaattgctccaggatagaagggccagggaagaattcagtcggcgctggtgtgtgctaggtgatggggtcttgtcctactttgagaatgagagagccgtcactcccaatggcgagattagagctagtgagattgtgtgtctggctgttcctccgcccgatacccacgggtttgaacatacctttgaggtgtatacagagggagagaggctgtacctgttcggactagaatcagcagagcaggcgcacgagtgggtgaaatgcattgccaaagccttcgtgcctcctctggccgaggacctgctggctcgtgacttcgaacggctcggaaggcttccctataaagctggtctgtccttgcagcgggcccaggagggctggttttccttgtcaggatcagagttaagagcagtctttcctgagggaccctgtgaggaacctctccagctacgcaaactgcaggagctgtccattcagggagactcagaaaaccaagtactggtgctggtcgagcgtcgccggacactgtatattcagggcgaaagacggctcgattttatgggttggctaggagcgatccagaaggcggcagccagcatgggggacactctgagtgagcagcagctgggggactccgatattccagtaatcgtgtataggtgcgtagattatatcacgcagtgcggactcacctccgagggaatttacaggaagtgcggtcagaccagcaaaacccagcgattgctggaatcactcaggcaggatgcacgaagtgttcacctcaaagaaggcgagcagcatgtggatgacgtgagcagtgctctgaagcgatttcttagagatctccctgatggtctgtttaccagggctcagaggttaacctggctcgaggccagtgaaatcgaggatgaggaggaaaaagtctcccgatatcgggaactgctggtcagactccctccagtgaaccgtgccacagtgaaggctctgataagccacttgtattgtgtccagtgctttagcgacactaatcaaatgaacgtccacaatttggccattgtatttggccccaccctgtttcaaactgacggccaggactataaggccggaagggtagttgaagatctgatcaatcattatgtggtggttttctctgtggacgaggaggaactcagaaagcagcgagaggaaatcaccgcaatcgtgaaaatgcgcgtggccggcactgctagcgggacccaacatgccggcgactttatctgtacagtttatttggaagaaaaaaaagcggaaaccgagcagcatataaaggttcctgcctcaatgactgcagaggagttaaccctggaaatcctggaccggcgcaacgtcggcatccgggagaaagactactggacatgcttcgaggtgaacgaacgggaagaagccgagagaccactgcactttgctgagaaggtgttgccgattctccatgggctgggcacagacagccatctggttgtcaagaaacaccaagcaatggaagcaatgctcctttacctcgctagccgtgtaggcgacaccaaacacggcatgatgaaatttcgtgaagacaggagcctgttgggccttggacttccctccggaggtttccacgaccgatacttcatactcaattcctcgtgcctcagactgtataaagaagtccggtctcagaggccgtggtccggcgcccctgaaactagccatcggccagagaaagagtggccaattaagagcttaaaggtgtacctgggagtcaaaaaaaagctgcgacctccaacctgttgggggttcaccgtggtgcatgaaacagaaaagcatgaaaaacagcagtggtacctgtgctgtgacacccagatggagctgagggaatggtttgcaacatttttgtttgttcagcacgatggcctggtctggcctagcgagccgagtagggtgtctagagccgtccctgaggtacggctcgggagcgtgagtcttatcccgctccgaggctcagagaacgaaatgagaagaagtgtggcagcttttacagcggatccactgtccctgctccgaaatgtttag

SEQ ID NO: 108592 - DNA, 3402 bp, synthetic construct
  misc_feature 1..3402: note = Description of Artificial Sequence: Synthetic coding sequence
  source 1..3402: mol_type = other DNA
atgacaaagaaagaagagcctcctcccagtcgagttccaagagccgtacgggtagcctccctcctgtctgagggtgaagagctgtccggtgatgaccagggggacgaagaagaggatgaccacgcatacgaaggagtacccaacggagggtggcacacaagctctctgtccttatctctacccagcacaattgcagctccacacccaatggacgggccgccgggagggagtacgcccgtgacacccgtgattaaggctggttggctagacaaaaaccccccgcagggaagctacatttatcaaaagagatgggtgagattggacaccgaccaccttcgttactttgatagcaataaagatgcctatagcaagaggtttatttccgtcgcctgcataagccatgttgctgccattggagaccagaagttcgaggttattaccaacaacagaacattcgcattcagagcagagtccgatgtcgaacgtaaggagtggatgcaggccctgcagcaagcgatggccgaacagcgtgcaagggcgagactcagtagtgcgtacctgttaggggtcccggggagcgaacaacccgaccgtgccggtagtctggaactaagggggtttaaaaacaaactgtacgtagcagtggtcggcgataaagttcaactctacaaaaacctagaggaatatcacctgggcattggaatcacattcattgacatgtccgttggtaacgtgaaggaagtggatagacgtagttttgacctgactaccccgtatcggatctttagtttttccgcagatagtgagctggagaaggaacagtggctggaggccatgcagggagctatcgcggaagctcttagcacctccgaagtcgccgagcgcatttgggccgcagctccaaatcgtttttgcgccgactgtggcgcaccacagcctgattgggcctctattaacctatgcgtggtgatctgcaagcgctgcgccggcgagcatagaggacttggagctggcgtgtccaaggtgcgttctcttaaaatggatcgtaaagtgtggactgaaaccctcattgaagcactgtgcgcagcagtcaccactaccgaccttgcagagacgcaggctttgctcggatgcggcgctggcatcaattgtttcagtggtgaccccgaagcccctacaccattggcactcgcagagcaagccggtcagacactgcaaatggagttcttgcgaaataatcgcactacggaggtgccccgattagactccatgaagccccttgaaaagcactattcagtggttctgccaactgtgagtcacagtggctttctatataagaccgctagtgctggaaaactgcttcaggatagacgggcacgggaggaattttcccgccgctggtgcgtgcttggagatggggtcttgagttacttcgaaaacgagcgtgccgtgactccaaacggagaaatcagagccagcgagatcgtttgcttagccgtgcccccacccgatacgcatggcttcgagcacacattcgaggtatacaccgaaggagagcgactgtacttatttggcctggagagcgctgagcaggcacacgagtgggtcaaatgtatagccaaggccttcgtgccccctctggccgaggatctgctggctcgggacttcgaacgtttaggccgactcccctataaagccggattgagtttacagagagcacaggaaggctggtttagcctgtcgggcagcgaacttcgcgcagtgttccccgagggaccatgcgaggaacccctgcagctgcgtaaactgcaggagttgtcaatacagggagactcagagaaccaggtactcgtcctggtggagaggcggcgcactctgtacatccagggggaaagaaggcttgacttcatgggttggctgggcgccatccagaaagcagccgcctctatgggcgacactctcagcgaacagcagctgggagatagcgacatacctgtgatcgtgtatagatgtgtcgactatatcactcagtgtggcctgacatctgagggtatctatagaaagtgtggccagacatccaagacacaaagattgctggaatccctgagacaggacgcccgctcagtgcacttaaaagagggcgagcagcacgttgatgacgtcagttccgcactgaagcgatttttgcgggatctcccggacggactgtttaccagggcccagagactcacttggctggaggcatccgagattgaagacgaggaagaaaaagtgagccggtatcgggaactcctggtcagactgccaccggttaatagggctactgtgaaggctcttatttctcatctgtattgcgtccaatgcttctctgatactaaccagatgaatgtccataaccttgccatcgtcttcgggcccaccttgttccagaccgatggacaggattacaaggccggccgcgtggtggaggatctgattaatcactacgttgtcgtgttctctgtggatgaggaggaactcaggaagcaaagggaagaaatcaccgcgatcgtgaaaatgagggttgcaggaaccgcttctggtactcagcatgccggcgacttcatctgcactgtctatctcgaggaaaagaaggcggagaccgagcagcatatcaaagtgcccgcttcaatgaccgccgaagaactgactctggagatcctggaccgacgcaacgttggaataagagagaaggattactggacctgcttcgaagttaatgaacgtgaggaggcagaaagacctttgcattttgccgagaaagtgctgcccatacttcacggtttgggtacagacagtcacctggttgtgaaaaaacatcaggccatggaagctatgctgctgtatcttgcctcccgcgttggagatactaagcatggcatgatgaagtttagggaagatcgcagcctgcttgggctgggtctgccgtctggcggatttcacgaccgctacttcatcctcaacagcagctgtctacgcctctacaaagaagtgcgcagccatagacccgagaaggagtggccaatcaagtctctcaaggtctatctgggcgttaagaaaaaactcagacccccaacatgctggggcttcaccgttgtccacgaaacagaaaaacacgaaaagcagcagtggtatctttgctgtgacacacagatggaactgagagagtggtttgctacatttttgttcgtccagcacgacggattagtgtggccaagcgagccatcgagggtgagtcgcgcagtgccggaggtgaggctcggaagtgtgagcctaattccactgcgcggaagtgaaaacgaaatgcggcggagcgtcgccgccttcactgccgaccccctctccctgttgaggaatgtctag

SEQ ID NO: 108593 - DNA, 4320 bp, synthetic construct
  misc_feature 1..4320: note = Description of Artificial Sequence: Synthetic coding sequence
  source 1..4320: mol_type = other DNA
atggctgaagctggcgacgcagcactgtccgtcgcagaatggctgcgtgctctgcaccttgagcagtacacaggattgtttgagcaacatgggttagtgtgggctactgagtgccaggggttgtccgacacacgcttgatggatatgggaatgctgctgcccgggcatagacgccgcatcctggccggcctgctgcgcgctcatacttctccagccccagcacctcgccctacacctcggcccgtacctatgaagaggcacatcttcaggtctccccctgtgcctgccactcctcccgagccactgccaacaactaccgaggacgaaggccttcctgcagcccctcctattcctcctcggagaagttgtctccccccaacttgctttaccacacctagcacagctgccccggacccagtgctccctcccctgcctgctaaaaggcacctggctgagctatctgtgcctccagtccctccccgcacggggcctccgcgcctcctggtcagcctgccaacaaaggaggaagagtcgctcctgccgagtctctctagcccaccgcagccccagtcagaggagccactgtctactctgccccagggcccaccccaaccgcctagcccaccgccatgtccaccggaaatcccccctaagcccgtacgcctcttcccagagtttgatgatagtgattacgacgaagtccctgaggaggggccaggcgcccctgccagagtgatgacgaaaaaagaagagccgccaccgagtcgcgtaccccgtgctgtgagggtggcctctctgttgtccgagggcgaggaactctccggtgatgatcagggagacgaagaagaggacgatcatgcgtatgagggggtcccaaatggcggttggcacacgagctccctttccctgtccctcccatccaccatcgccgcgccccatccaatggacggaccccccgggggatcgacaccagtgactccagtgattaaagcaggatggctagacaagaatcccccccagggatcttacatctatcagaaaaggtgggtcagattagatacagaccatttgcgctacttcgattccaacaaggatgcatattcaaagagattcatctccgtcgcctgcatcagccacgtggccgctatcggtgaccaaaaatttgaagtcatcacaaataatcgcacctttgcattccgcgccgagagcgatgtggaaaggaaagaatggatgcaggctctccaacaggctatggcagagcagcgagctagggccaggctgtcttcagcctatctactaggcgtccccgggtctgagcaacccgatagagccgggagtctcgaactgcgtggcttcaagaacaagttgtacgtcgcggtagtgggcgacaaagtgcaactttacaagaatctcgaggaataccacctgggaattggaatcacgttcatcgatatgagtgtgggcaacgtgaaggaggtggatagacgctcttttgatctgaccaccccttatcggatcttttcatttagcgctgatagcgaactggagaaggaacagtggctggaagccatgcagggcgctatcgctgaggcacttagtacaagcgaggtcgccgaacgaatctgggccgccgctcctaaccggttttgtgctgactgtggcgctccacagcccgactgggccagtatcaacctgtgcgttgtgatctgcaagaggtgcgcgggggagcacagaggattaggggcgggtgttagtaaagttcgctcactgaaaatggatcggaaggtttggacagaaaccctgatcgagcttttcctccagttgggcaatggggcggggaaccgtttctgggcagctaatgtgcctccctccgaggcgctgcaaccctcgtccagcccgtccacccggcgctgtcatctcgaggctaagtaccgggaggggaagtacagaaggtaccatcctctgttcggcaatcaagaggaattagacaaggcactgtgcgctgcagtgacaacaacagacctcgcggagacccaggccttactgggctgcggcgccggaatcaattgtttcagtggggacccagaggcccccactcccctcgccctggccgagcaggccggacaaactttgcagatggaattcctgcggaacaaccgaactacagaagttcctcgtctcgactccatgaaacctctcgagaaacactactccgtggtgctgcctacagtttctcactctggattcctgtataagaccgctagcgccggaaagttactgcaggacaggcgggcgcgcgaagaattcagccggcgttggtgcgtgcttggagatggagtactctcttatttcgaaaacgaaagggccgtgactcctaacggagaaatccgggcgagtgaaattgtgtgtcttgccgtgccacccccagacacacacgggttcgagcacactttcgaagtctatacagaaggggagagactgtaccttttcggactggagtcggccgagcaggcacatgaatgggtaaagtgcatcgcaaaagccttcgtgccacctctggcagaagatttactagcccgcgacttcgagaggctcggtaggctcccttataaagccgggctgtcgctccaacgagctcaggaggggtggttctccctgtctggatctgagcttcgggctgtgttccctgagggcccttgcgaagagccgctgcaattacgcaagttgcaagaactgagtatccagggagattcggagaaccaggtgctggtcctagttgaacggcgcaggacgctgtacattcaaggggagaggcgcctggatttcatgggctggctgggggctatccagaaggcagcagcctccatgggagatacattatcagagcagcagctgggcgactcggatatacctgtgattgtctatagatgcgtcgattatataacccagtgcggcttgacatcagaagggatctaccgcaaatgcggccagaccagcaagactcagagactgctggagtccctcagacaggacgcccggagcgtgcacctcaaagaaggagagcagcatgtcgacgacgtcagttccgcactcaagaggttcctcagagatttacctgatggtttgttcacccgcgctcagcggctgacttggttagaggccagcgaaatagaagatgaagaagaaaaggtttcacggtatagggaactgttggttcggttgcctcccgtaaatagggccaccgtgaaggccttgatctctcacctatactgtgtgcagtgcttcagcgatacaaatcaaatgaacgtgcacaatctggccattgtattcggccccactcttttccagactgacggccaggattacaaagccggcagggtcgtcgaggatctgatcaaccattacgtggttgtgttctctgtggatgaggaggaacttaggaaacaaagagaagagataaccgcaatcgttaaaatgcgagttgctggaacagctagcggaacccagcacgcaggcgactttatctgcacagtgtatcttgaggaaaagaaggccgagacagagcagcatatcaaggttcccgcttccatgaccgccgaagaacttaccctcgagatcttggacagacgcaacgttgggattagagaaaaagactattggacatgctttgaggtgaacgagcgggaggaggcggagcggcctcttcattttgccgaaaaggtcttgcctatcttgcatggattaggcactgacagtcacctggtagttaaaaagcatcaagctatggaagccatgctgctatatctcgcctccagggtgggcgacacaaagcacggtatgatgaaatttagggaggacagaagcctgctggggttgggactgcccagtggcggattccatgacaggtacttcattcttaacagctcgtgcttgaggctgtataaggaggtcagatcacaccgccctgaaaaggaatggcctattaaatccctgaaggtgtatctgggggtcaaaaagaagctgcgccccccaacatgttggggttttacagtggtccacgaaaccgaaaaacacgaaaaacagcagtggtacctgtgctgtgacacacaaatggaattgcgggagtggtttgcaacttttctgttcgtccaacacgacgggcttgtgtggccaagtgagcctagccgagtctctcgcgctgtgcctgaagtgcggctgggctccgtgtcccttatccccttacggggttccgagaacgagatgcgccgatccgttgccgcctttaccgccgaccctctgtctcttctcagaaatgtgtag

SEQ ID NO: 108594 - DNA, 5115 bp, synthetic construct
  misc_feature 1..5115: note = Description of Artificial Sequence: Synthetic coding sequence
  source 1..5115: mol_type = other DNA
atgtcaagcgtatccgaggtcaacgtagatataaaggattttttgatgtcgataaacctggaacagtaccttctacactttcatgaatcgggctttactactgtcaaagactgtgccgcaattaatgacagcctgttgcaaaagataggtatctcccccactggccatcgtcgccgcatcttgaagcagctgcagatcattctgagcaagatgcaggacattcctatttatgcaaacgtgcacaagacaaagaagaatgacgacccttcaaaagactaccacgtgccgtcctccgaccaaaatatttgcatcgagttgagtaatagtggaagcgtccagactagttctccacctcaattggagacggtcaggaagaaccttgaggattcagacgcttctgtggagagaagccagtacccacagagtgacgacaagctgagtcctcccaagagagatttcccaacagccgaagagccgcacttgaacctcgggtccttaaatgattctttgttcggcagcgacaacataaaaatcgagtctctcattacaaaaaaaactgtagaccatacagttgaggagcagcagacggagaaggtcaaattgataacagagaacctttctaagttaccgaacgccgatagtgagtgcttgagctttgtgggatgtagcacaagcgggaccaacagcggcaatggaactaatggtctcctggaaggatctccaccaagcccatttttcaagttccagggtgagatgatcgtcaatgacctgtacgtgccttcatctccaatcctggcaccagtgagatcacgctctaaactcgtctcccggcccagcagaagcttcctattacggcacagacccgttcctgagatccccggctccaccaagggtgtctccggctcgtactttcgtgaacgccggaacgtcgccacgtcgacggagaagtctgtagcatggcagaactccaacgaggaaaacagtagcagcattttcccgtacggtgaaacctttctgttccaaaggcttgaaaattccaaaaagagaagcatcaagaacgaattcctgacccagggagaggctctaaaaggggaggcagctaccgcaaccaactcattcatcatcaagtcttctatctacgacaaccggaaagagaagatttcagaggataaggtcgaagatatttggatccccagagaggacaaaaacaattttcttattgacactgcttctgagtcagagtattcgacagtggaggaatgttttcagagtctgagaaggaaaaactctaaagcaagtaaatccagaactcagaaggccctgatcttggacagcgtcaacaggcactcttacccgctcagttccacttcgggcaatgcagattcgagtgcagtatcatcccaggctatctctccctatgcctgcttttatggtgcctccgctaaaaaggttaagtctggatggctggacaagttgtcacctcaaggaaaacggatgtttcaaaagcgctgggtgaaattcgacggtctgtctatttcctactataacaatgagaaggaaatgtactccaaggggatcataccactttccgctatcagcaccgtccgagtacagggcgataataagtttgaggtggtaacgactcaacgcaccttcgtgtttagggtggaaaaagaggaggaacggaatgattggatttccatcctcctgaacgcgctaaagagccagtcgcttacaagtcagagccaagctgttgtcacccccgaaaaatgtggctatcttgaactgcgtggctacaaagccaagatcttcaccgtcttatccggcaatagcgtgtggctgtgcaaaaacgagcaagatttcaagagcggattagggatcactattatacctatgaatgtggcaaatgtaaagcaagtcgatcgtacggtgaaacagtccttcgagattatcactccttaccggtcgttttcctttactgcggagacagaaaaagagaagcaggactggatagaggctgtgcagcagtccatcgcagaaacgctttctgactacgaggtggctgaaaagatttggtttaacgagagcaaccgttcttgtgcggattgcaaggcccctgacccagattgggctagtatcaacctctgcgtcgtcatttgcaagaagtgtgccggccagcacagaagcttggggcccaaggacagtaaggtaagaagtctgaagatggacgctagcatttggtcaaatgaattgatcgagctgttcattgtaatcggtaacaagagagctaatgatttttgggccggcaacctccagaaagacgaagagctacatatggatagccccgtggagaaacggaaaaattttattacacagaagtataaggagggtaagtttcgcaaaacactcctggccagcttaaccaaagaggaactgaacaaagccctgtgtgccgcggtggtgaaaccagacgtgctggagacaatggcactgctgttcagtggagcagacgtgatgtgtgccaccggggacccagtgcacagtacaccttacctgctggcaaagaaggctgggcagagtttacagatggagtttttgtatcacaacaagttctctgactttccgcaacacgacattcactcagaaggggtcctttcccaggaatcaagccagagcacattcttgtgtgacttcttgtaccaggcgccatctgccgccagtaagctgagttcagaaaaaaagttgttagaggaaacaaacaagaagtggtgtgtgcttgagggaggcttcctctcttactatgagaacgacaaatcaaccaccccaaatgggaccattaacatcaatgaggtcatttgtttggcgatccacaaagaggatttttatctgaatactgggccaatttttatcttcgaaatttaccttcctagcgagcgggtctttctttttggagcagagacctcccaggctcagcggaagtggaccgaagctattgcgaaacattttgtccctctgttcgccgagaatctgactgaggccgactatgatcttatcggacaattgttctacaaggactgccacgctcttgaccagtggaggaagggatggttcgctatggataagagcagcctccatttctgcctgcagatgcaggaagtccaaggggatcggatgcacctgcgaagacttcaggaacttactatcagcacaatggttcaaaatggagagaaactggacgtcctcttactagttgagaaaggtcgcacactgtacatccatgggcataccaagttagactttaccgtgtggcacaccgctatcgaaaaagctgcaggtaccgacggcaacgccctgcaggaccagcaattatctaagaacgatgtgcctatcatcgtgaactcctgtatcgcgtttgtcactcagtatgggctgggttgcaaatacatataccagaagaatggggatcctctgcatatttcagagttgctggagagtttcaagaaggatgcaaggagctttaaattaagggcaggcaagcaccagcttgaggatgtgactgcagtactgaagtcttttctcagtgatatcgatgacgccttgctgacaaaggagctttatccctattggatctcagcactagatacccaggacgataaggaacggatcaagaagtacggggcctttatccgaagcctccctggtgttaacagagccacacttgcggcaatcattgaacacctatatagagtgcagaagtgctccgagataaatcatatgaacgcgcacaatctggccttagtcttctccagctgcttatttcagactaaggggcagacatctgaagaggtgaatgttatcgaagatcttattaataactacgtggaaatttttgaagtgaaagaggaccaggtgaaacagatggatattgaaaattcttttatcaccaagtggaaagacacccaggtgagtcaagctggtgacctgctgatcgaggtatacgttgagaggaaggagcccgactgctccattatcatcagaatatcccccgtcatggaagccgaggagctgacaaatgacattcttgccatcaagaatatcatccccactaagggcgacatctgggccactttcgaagtgattgagaatgaggagttggagagaccactgcattacaaggagaacgtcctcgagcaagtgttgcggtggtcttcactggctgagccaggctcggcctacctggtggtaaaaaggtttcttacagccgataccatcaaacattgttccgatcgcagcacactgggttctattaaggaaggaattctgaagatcaaagaggagccgtccaaaatactttccggcaacaagttccaggatagatatttcgtcttaagagacggatttctgttcctgtacaaagatgttaaaagtagcaagcatgataagatgttctcgctgagtagtatgaagttttacaggggcgtgaagaaaaagatgaaaccgccgaccagctgggggctgaccgcttactccgaaaaacatcattggcacctttgctgtgatagttctagaacccagactgagtggatgacaagcatatttatcgcgcagcatgaatatgatatctggcctccagctggtaaagaacgcaaacgatcaatcacaaagaaccccaaaattggtggcctgcccctgatccctattcagcacgagggcaacgccacactcgcccgcaagaacatagagagcgctcgcgccgagctggagagactacgactgagcgaaaaatgcgacaaggaaagcgtcgactcgtctttgaaggaacgggctagcatggtagcccactgtttggagcacaaagatgataagcttcgcaacaggcctcgcaagcaccggagttttaattgtttggaagatactgaacctgaggcgcccctggggcaacccaagggtcacaagggcttgaaaactttgcgtaaaacggaggatagaaattccaaggccaccctcgactccgaccataagctgccctcccgggtcatcgaggagctcaatgtagttcttcagaggagtagaacccttccaaaagagctacaggacgaacaaatacttaagtag

SEQ ID NO: 108595 - DNA, 144 bp, synthetic construct
  misc_feature 1..144: note = Description of Artificial Sequence: Synthetic coding sequence
  source 1..144: mol_type = other DNA
atgagcagcgtcagcgaagtgaatgtggatattaaagatttcctgatgtccatcaacctcgaacagtatctgcttcactttcacgagagcgggtttactacggtgaaggactgcgcagctatcaacgactcactgctgcagtag

SEQ ID NO: 108596 - DNA, 3399 bp, synthetic construct
  misc_feature 1..3399: note = Description of Artificial Sequence: Synthetic coding sequence
  source 1..3399: mol_type = other DNA
atgcgaagtagcgcctcacggctgagtagctttagcagcagagattccctgtggaacaggatgcctgaccagataagcgtctcagagtttattgctgagaccaccgaggattacaattcccccactacctcatcctttactaccaggctgcataactgcagaaacacagtgacacttctggaggaagcattagaccaggatcgaaccgccctccaaaaggtgaaaaaatctgttaaggcaatatacaacagcggtcaggaccacgtgcagaatgaggaaaactatgcccaggttctggataaattcggctcgaactttttgtcacgagacaatcccgacctaggtaccgctttcgtcaagtttagtactctgaccaaagaactcagtacactgctcaaaaacctgttacagggattgtcgcacaacgttatatttacccttgactctctgcttaagggagacctgaagggggtgaagggggatttaaagaagccttttgacaaggcctggaaagactacgaaaccaagtttaccaaaatcgaaaaggagaagcgagaacacgcgaagcagcatgggatgattcgtacagagataacaggtgccgaaatcgctgaggaaatggaaaaggagagacgactttttcagcttcagatgtgcgagtacctaattaaggtgaatgaaattaaaaccaaaaagggcgtggacctgctccagaacctgattaagtattatcacgcacagtgcaactttttccaagacggattgaaaactgcggacaagctgaagcagtacattgagaagcttgccgcagacctgtacaatattaaacagacccaggatgaggaaaaaaagcagctgaccgccctgcgcgaccttatcaagtccagccttcagcttgatcagaaggaggcccggcaggatagtcagtcacgacaaggcgggtattcaatgcatcagctacaaggcaataaggagtacggaagcgaaaagaaagggtatctgctgaagaagagtgatggtatacggaaggtgtggcagcgcagaaaatgttctgtgaaaaatggaattctgaccataagccatgccacttccaacaggcagccggctaagctgaacctcttgacatgccaagtaaaaccaaatgctgaagacaaaaaaagctttgatttgattagccataatagaacctatcactttcaggctgaagacgagcaggattatgtggcctggatctccgttctgacaaactccaaggaagaagctctgactatggctttccgaggggagcagtctgcaggcgaaaatagtctggaagacctcacaaaagccattatcgaggatgtgcagcgcctccccggcaacgatatctgttgcgactgtgggagctcagagcctacatggctgtccaccaacctggggattttaacatgcatcgagtgctcgggcatccacagggaaatgggcgttcatatctcccgaatccagagcttagaactcgacaagctgggaacctctgagctgctgttggcgaaaaacgttgggaataactcttttaacgatatcatggaggccaaccttccttccccctcccccaagccgaccccttcatccgacatgaccgtgaggaaggaatacatcacagctaagtacgtagaccacagattcagccgtaaaacctgttcaacctcctctgccaaattgaacgagctgcttgaggcaattaagtcgcgggaccttctggccctgattcaggtctatgccgagggagtggagctgatggaacctttgctggagcctggacaagagctaggcgagactgccctccatttggctgtgcgaacagctgaccagacttcactccacctcgtcgactttctcgtacagaactgcggcaatctggacaaacaaaccgcccttggaaatacagtcctgcactactgtagcatgtacagcaagcctgagtgcctcaagcttttgctgcgtagcaaaccaactgtggacattgtgaatcaggctggggaaactgcgctcgacatcgctaaaagactgaaagcaactcagtgcgaggatctgttatctcaggctaaatctggcaaatttaaccctcacgtgcacgtggaatatgaatggaatttgaggcaagaggaaattgacgagagtgacgatgacctcgacgataaaccctcacccatcaaaaaggaacgcagtcccagacctcagagcttttgccatagttcaagtatctccccccaggacaagttagcactgccagggttctctaccccccgcgacaaacagaggctctcatacggggcatttacaaaccagatttttgtctcaaccagcacagatagccctacttctcctacaacggaggccccacccttacctccacggaatgcggggaaaggacccacaggtccaccgtctacactgcccctgagcacacaaaccagcagcggtagttctaccctgtcgaagaagcgccctccaccacctccacccggccataagcgcaccctgagtgatcctcccagccctctgccgcatggaccgcccaataaaggagccgttccatggggcaatgacggcgggccatcctcctctagcaagactactaacaagtttgaggggcttagccagcagtcgagtacctctagtgccaagacagccctggggccaagggtactgccaaaactcccgcaaaaggtcgctctgcggaagactgaccaccttagcctggacaaggcaacaatccccccagaaatttttcagaagtcaagccagctggccgaactgccccagaagcccccaccaggtgatcttccaccaaagcccacagagctcgcgccaaagccccaaatcggcgatctaccgcccaaacccggtgagctgcccccgaaacctcaactgggcgacctgcctccgaaaccacagctgtctgatctaccccccaaacctcagatgaaagatctgcctcccaagccccagctgggggatctcctggccaaaagccaaaccggcgacgtaagtccaaaggctcagcagcctagtgaggtgaccctcaaaagtcatccacttgacctgtctcccaatgtacagagccgggacgccatccagaagcaagcgtcggaggacagtaacgatctaacacccaccctcccagagactccagtccctctaccgcggaagattaacaccggaaagaataaagtccgtagggtcaagacaatctacgactgccaggccgacaatgatgacgaactaacttttattgaaggtgaagtaattattgtgactggcgaggaagatcaagagtggtggattggccacatcgagggacagcctgaaagaaagggcgtgtttcctgtctcattcgtgcatattttgagcgattag

SEQ ID NO: 108597 - DNA, 3390 bp, synthetic construct
  misc_feature 1..3390: note = Description of Artificial Sequence: Synthetic coding sequence
  source 1..3390: mol_type = other DNA
atgcgctcttcggcttccaggttaagctctttttcatcacgtgacagtttatggaatcgaatgcccgatcagatttcagtgtccgagtttatcgcagagactaccgaggattacaattctccaacaacctccagctttaccaccaggcttcacaattgtagaaacaccgtcactctgttagaagaggccttagaccaggaccggaccgccctgcagaaggttaagaaaagcgtcaaggcaatttacaactccggccaggaccacgtccagaatgaggagaactacgcccaggtgttggataagttcgggagtaattttctgtcaagggacaatccagatctcggcacggccttcgtaaagttcagcacattgaccaaggaactgagtacgcttctgaagaacttactgcagggcctgagtcataatgttatcttcaccctggacagcctgctgaagggagatctgaagggagtcaagggggatttgaagaaacctttcgacaaagcttggaaagactacgagactaagttcacaaaaattgagaaagagaaacgggaacacgcaaaacagcacggaatgatacgaacagagatcacaggtgccgagattgccgaggaaatggaaaaggaacgaagactattccaattgcagatgtgcgagtaccttattaaagtaaacgagattaaaaccaaaaaaggagtcgacctgctgcaaaacctgatcaagtactatcatgcacagtgcaacttctttcaagacggactgaagacagctgacaagcttaaacagtacattgagaagctggccgcggacctctacaatattaagcagacccaggacgaagaaaagaaacagctcactgccttaagggaccttataaagagcagcctacaacttgaccagaaagaagacagccagtcccggcagggaggatacagtatgcatcaattacaggggaacaaagagtacgggagtgagaagaaaggctatctcctgaaaaagtctgatggcattcgcaaagtctggcagcgtaggaaatgctcagtgaagaacggtattctcacaatttcacacgccacgtctaacagacagcccgcgaaactgaacctgctgacatgccaggtcaagcctaacgcggaagacaaaaaatccttcgacttaatctcccacaataggacgtaccacttccaagctgaggatgagcaagactacgttgcttggatttcagtgcttaccaatagcaaagaggaggctctcacaatggcgtttcggggtgagcagtctgctggagagaactccttggaagaccttactaaagccataattgaggacgtgcaacgtttaccaggaaacgacatatgttgcgactgtggttccagtgaacccacgtggctatctacgaatcttgggatactcacttgtatcgaatgttctgggattcacagagaaatgggagtccatatctctcggatacaaagcttggaactcgataaactcgggacttcagagttactgctggcaaagaacgttggaaataactctttcaacgacattatggaggctaatctaccatcaccaagtccaaagccaacccccagctctgatatgactgtgaggaaggagtacattactgcaaaatacgttgaccatagattctctagaaaaacttgttcgacaagctcagccaagcttaacgaactcctggaggcaatcaagtcacgggatctgttagcacttatccaggtatacgccgagggcgtggagctgatggagcctctgttggaaccaggccaagagctaggggaaactgctctccacctggcagtaaggaccgctgaccagacttctttgcatcttgtggattttctggtgcagaattgcgggaatctagacaaacagaccgctcttgggaatacggtactacattattgttcaatgtatagcaaacctgagtgcctgaaactcttgctccgctctaaaccgaccgtggatatcgtcaaccaggccggagaaaccgctctcgacattgccaaacggctcaaagcaacacagtgtgaggatcttctctctcaagccaagtccggcaagtttaacccacatgtgcacgtcgaatacgagtggaacctgaggcaggaggaaattgatgaatcagatgacgaccttgacgataagccaagccccattaagaaggagcgctctccaaggccacagagcttctgccatagtagcagcatttccccccaggacaagttagctctgcctggtttttcgactcctagagataaacagcgcctgtcctatggcgcgttcaccaaccagatatttgtgagtacatccaccgactccccaacatcacctaccaccgaagcaccccccctcccccctcgaaatgccgggaaggggcccaccgggccccccagcaccctgccactgtctacccagacgagttctggatcctctaccctgagcaaaaagcggccacctccacctccccccggacacaagcgaactctctcagatcctcctagccccctcccacatggtccacctaacaagggagcagttccctggggtaacgatggcggaccctctagcagctctaagacaaccaataagttcgagggtctatcccagcagagcagtacatcttctgctaagacggcattgggcccccgcgtcctccctaagctcccacagaaggtggctctcaggaaaacagatcacctaagtctggacaaggcaaccattcccccagaaattttccagaaaagctcgcaattagcagagctcccccaaaaaccgcctccaggtgacctgccacccaaacccaccgagcttgctcctaagccccagatcggcgacctgccacctaaacctggcgagctgcctcctaaacctcagcttggtgacttgcctcctaagccccagctatcggacctgcctcccaaaccacagatgaaggatttgcccccaaagccccaacttggcgatcttctggctaagtcacaaacaggagacgtgtctcccaaggctcagcagccttccgaagtgaccctcaagagtcatcctcttgacctctcacctaacgtgcagtcacgagacgcgattcagaaacaggcctctgaggacagcaacgacctgactcctacactgccagagaccccagtacccctgcccaggaagatcaatacggggaaaaacaaagtgaggagagtcaaaacaatctacgattgccaggccgataatgacgatgaactcacctttatagagggggaggtcatcatagttactggtgaggaagaccaggagtggtggatcgggcacatcgaaggtcaaccggagcgcaagggcgttttccctgtgtcgtttgtccacatcctatccgattag

SEQ ID NO: 108598 - DNA, 3390 bp, synthetic construct
  misc_feature 1..3390: note = Description of Artificial Sequence: Synthetic coding sequence
  source 1..3390: mol_type = other DNA
atgcggtcctccgcatctcgactttcgtcatttagcagccgcgactcgctatggaatcggatgcccgaccagatctctgtgtctgagtttatcgctgagacaaccgaggattacaactcaccaaccacttctagctttactaccaggcttcacaactgtcgaaatacggtgacactgctggaagaagccctggatcaggatagaacagcattgcagaaggtcaaaaagtctgtcaaggccatctacaactcggggcaggatcatgtgcagaatgaagagaactatgctcaggtcctcgacaaatttggttcaaattttcttagcagagacaatcccgaccttgggaccgccttcgtgaaattttctacactgaccaaggagttgtccaccttactcaagaaccttttacagggattgtcacacaacgtcatttttactttagactccttattaaaaggtgacctgaagggcgtgaagggcgatctaaagaaaccattcgacaaggcatggaaagattacgaaacaaaattcacgaagatcgaaaaagagaagcgtgagcatgctaagcaacacggcatgatccgcacagagatcaccggagcagagatcgccgaagagatggagaaagaacgccgactcttccaactccagatgtgcgagtaccttattaaggtcaatgagatcaagactaagaagggcgtggacctacttcagaacctgataaaatactaccacgcccagtgcaatttcttccaggatgggcttaagaccgcagataaactgaagcagtacatagagaagcttgcagccgacctttacaacataaagcagactcaggatgaggagaagaaacaactgactgcccttagggatttaatcaagtcctccttgcagctggaccagaaggaggactcccaatctcgtcaaggaggctatagtatgcaccagttgcagggcaacaaagagtatggttctgaaaagaagggttacctgctgaaaaagagcgatggcatccgtaaggtgtggcagaggagaaaatgctcggtgaagaacggtatactcaccatatcgcacgctaccagtaacaggcaacctgccaagttgaatcttcttacatgtcaggtcaaacctaatgctgaggataagaaaagtttcgatcttatttcccacaacagaacataccactttcaagctgaggatgaacaagactatgtggcttggatcagcgtccttacgaacagcaaggaggaggccctcacgatggcctttaggggagagcagtccgctggtgaaaattcactggaggatctgacgaaagccatcattgaggacgttcagagattaccaggcaacgatatatgctgtgattgtggctcctcagagcccacatggctgtccacaaacctgggtatcttgacttgcatcgaatgtagtggcatacatagggagatgggggtacacatctctagaatccaatccttggagttggacaagcttggtacatctgagctgcttttagcaaagaatgtgggcaataactctttcaacgacattatggaagccaaccttccctctccttccccgaaaccaacaccctcttctgatatgactgttaggaaagagtacatcaccgcgaagtatgttgaccacagattctcccgcaaaacatgtagtacgtcctccgccaaactgaacgagctcctggaagcaatcaaatcacgagatctgctagccctgatccaggtgtatgcggagggtgtagagctcatggagcccctgcttgaacccggccaggagctaggcgaaacggcactgcacctggccgtgagaaccgctgaccaaacgtcactgcaccttgttgattttctagtccaaaactgtggtaatctggacaagcagaccgctcttggtaatactgtgctccactattgttccatgtattccaagcccgaatgtctgaagctgcttctgaggagtaaaccaacagtcgacattgtgaaccaagctggggaaacagccctggatatcgcaaagaggctcaaggcgacacagtgcgaagacctgttaagccaagcaaagtccggaaaattcaatcctcacgtccatgtcgagtacgaatggaatctgcgccaggaagaaatcgacgaatctgacgacgatctggatgataaaccctccccaattaagaaggaacgtagtcctcgacctcagtccttctgtcactcaagctctatttcaccacaggacaaattagcactgccaggcttcagcactcctcgggacaagcagcgcctgtcttacggagccttcactaatcaaatctttgtgtctacgagcactgattctcctacctcccccacaaccgaggcaccccctctcccacctaggaatgcagggaaggggccaaccgggccccctagcacattgccactgtcaacccagacctcatccgggtctagcactctatccaaaaagcgccctcctcctcctcctccaggtcataaaagaaccttatctgaccctccttcaccactacctcatggcccgccaaataaaggagctgtgccttggggtaacgatggggggccaagttcaagctctaaaactaccaacaagttcgagggactgtcgcaacaatcatcaacttcatccgctaaaaccgccctggggccccgtgtactgcccaagttgcctcagaaagtcgcactgcgcaaaactgaccatctgagtcttgacaaggccactattccacctgaaatttttcagaagtcaagccaactggccgagctaccccaaaaaccaccaccaggagatctaccacccaagcccacggagctggcacccaagccacagataggggatttacctccaaagccgggcgaactgcctcccaaaccacaactaggcgatctacctcccaaacctcagttgtcagacctcccccctaaaccacagatgaaggacctgccgccaaagcctcagcttggagacttgttggcaaagtctcaaactggtgatgtaagccctaaggctcaacagccttccgaggtcaccctaaagtcgcaccccctggacttgtcccctaatgtacagtcgagggatgcaatccagaaacaggcatcggaagactctaacgacttaacgcctacgttaccagaaacgcccgtccccctgccgagaaagatcaatacaggcaaaaataaggtcagaagggtgaagacaatctacgactgtcaggcagataacgatgatgagctgacatttattgagggggaggtcatcattgtgaccggagaggaagatcaggagtggtggatcggtcatattgagggccagcccgaacgtaagggcgtgttccccgtaagctttgttcacatactttctgactag

SEQ ID NO: 108599 - DNA, 1065 bp, synthetic construct
  misc_feature 1..1065: note = Description of Artificial Sequence: Synthetic coding sequence
  source 1..1065: mol_type = other DNA
atgtctttgcgggggtcactgtcccggctactccagaccagagtgcattcaattctgaaaaagtctgtccatagtgtggcagttataggtgcaccctttagccaggggcaaaaacgaaaaggggtagaacatggaccggctgccattcgcgaggcaggactgatgaaacgactatcatctttaggatgtcacctcaaggatttcggggatctctcattcacccctgtgccaaaagatgatctgtacaataatctgatagtaaatcctaggtccgtaggcctggcaaaccaggaactggcggaggtagttagccgagccgtctctgacgggtacagttgcgtaactctgggaggggatcactcactggccattggaactatctcaggccacgcacgccattgccccgacctctgtgtggtctgggtggatgcgcatgcagacattaacacccctttgaccacctcttctggcaatctgcatggtcagccggtttcctttttattaagagagttgcaggacaaggtccctcagcttccagggttcagctggatcaagccttgtatcagctctgcgtcaatcgtatacattggactgcgggacgtcgaccctcccgaacattttattctaaagaactatgatatccagtacttcagtatgcgcgatattgatcgactcggtatccagaaggtcatggagagaacgtttgacctactgatcgggaagcgtcaacggccgatccacttgagttttgatatcgacgcgtttgatccaactctggctcccgccaccggcacaccagttgtgggaggcctaacatatagagagggtatgtatatcgccgaggagattcacaatacaggcctgttgtctgctctcgacttagtcgaagtgaatccccagctcgcaacgagcgaagaggaggctaagacaacagctaacctggccgtggacgttatcgcaagctctttcggacagactcgcgaagggggccatatcgtatacgaccagcttccaaccccatcttctcctgacgagtctgagaaccaggcaagagttcgaatatag

SEQ ID NO: 108600 - DNA, 207 bp, synthetic construct
  misc_feature 1..207: note = Description of Artificial Sequence: Synthetic coding sequence
  source 1..207: mol_type = other DNA
atgaagctgaatgaaaaattttccgagggttggcggaaacccaatgcctcctggaagtcaagttgcagcaagaacagctcggatcgcgataaactctctcttccacataagaagctggagaggggctcgtggagggtgtggcagcctcggagcaccctgtgtcgtaccctggacaagactgaggaagagcgagcaaaaagagaatag

SEQ ID NO: 108601 - DNA, 429 bp, synthetic construct
  misc_feature 1..429: note = Description of Artificial Sequence: Synthetic coding sequence
  source 1..429: mol_type = other DNA
atgaaactgaatgaaaagttctccgaggggtggaggaaacccaatgcgagctggaaaagctcttgctctaaaaacagctctgacagagacaaactttctttgccacacaagaaactggagcgaggctcctggagagtgtggcagcctcggtctacattatgcaggaccctggataaaaccgaagaagagagggccaaacgcgaagaattggaacgcatcctggaggagaataatcgtaaaatcgccgaggcccaggctaagctggctgaggagcagctgaggattgtcgaagagcagcgaaaaatccacgaggagagaatgaagctcgagcaggagagacaacgccagcaaaaagaggagcagaaaatcatattgggcaagggcaagtctagacccaaattgtcattctctctcaagacccaagattag

SEQ ID NO: 108602 - DNA, 822 bp, synthetic construct
  misc_feature 1..822: note = Description of Artificial Sequence: Synthetic coding sequence
  source 1..822: mol_type = other DNA
atggggcgcagtaggtctcgctctagttcgcgcagcaagcacacaaagtcttctaagcataacaaaaagagaagtaggtcaagatcccggagcagagataaagagagagtaaggaagcggtctaaaagccgggagtcaaaacgcaataggcggcgcgagagcagatcacggagtcgttcaacaaacacagcagtgtccagaagggagcgggaccgcgagcgagcgagttctcctcccgaccgcatcgatatttttggtaggaccgtatccaagcggagctctctggatgaaaagcagaaaagggaggaagaggagaagaaggctgagtttgagcgtcagaggaaaatcagacagcaggagattgaggaaaagctgatcgaggaagagaccgcacgcagggtggaagagctggtggctaagcgggtagaggaggagctggaaaagcggaaggacgaaattgagcgcgaggttctgcgtcgagtcgaggaagcgaaacgcatcatggagaaacagttgctcgaagagctagaacgacagagacaggcggagctggccgctcaaaaggcccgtgaagaagaggaacgggctaaacgtgaggaactggagagaatactggaggagaacaataggaaaatagctgaggcacaagccaagctcgcagaagaacagcttagaatagtggaagagcagagaaaaatccacgaagagagaatgaagcttgagcaggagagacagagacaacaaaaggaggaacagaagatcatcctgggcaaggggaagtctcgccccaagctgtctttttctctcaagacacaggactag

SEQ ID NO: 108603 - DNA, 672 bp, synthetic construct
  misc_feature 1..672: note = Description of Artificial Sequence: Synthetic coding sequence
  source 1..672: mol_type = other DNA
atggggcgttcaaggtcaaggagtagtagcagatctaaacatacgaagagctctaaacacaacaaaaagcgtgcatccagcccgcccgatcgcatcgatatcttcggtaggactgtatcaaagaggtcaagtcttgatgagaagcagaagcgcgaagaagaagagaagaaggccgagttcgaacggcaacgcaagatacggcagcaagagattgaagagaagctgattgaggaagaaacagccaggagggtagaagagttagtggccaaaagggttgaagaggagctggaaaaacgtaaagacgaaattgagcgggaggtgttaaggcgagttgaagaagctaaaaggatcatggagaaacagctgctggaagaactagagcggcagcggcaggcagagctcgctgcccaaaaagcgcgagaggtgactctgggacggctggaaagtcgagatagcccttggcagaacttccagtgttgggtcttgcccccagcccagttcaggaagcgctggaacacagattatctcattcctttctcttccaagctgaacatcgccgcgaaagttaatttcctagcatattctgaggttctgacggacaacctcaaggttggtagtttttacaagacatattctagaattctctttgatttgatggaactggccatctag

SEQ ID NO: 108604 - DNA, 495 bp, synthetic construct
  misc_feature 1..495: note = Description of Artificial Sequence: Synthetic coding sequence
  source 1..495: mol_type = other DNA
atgcctgatactatgctcccagcctgtttcctcggcctgttagccttttctagcgcttgctactttcagaattgtccacgtggggggaaaagagctatgtctgacttggaactgcggcagtgcctgccatgcggcccaggaggtaaggggagatgctttggaccaagcatctgctgcgctgatgagcttggatgctttgtggggaccgccgaggccctgaggtgccaggaagagaattacttgcccagcccctgccagtctgggcagaaggcatgtggatccggaggaagatgcgcagcctttggcgtatgttgcaacgatgagagctgcgtcactgagcctgagtgtcgcgagggctttcaccgaagagccagggcttctgataggtctaacgctacgcagctggacggaccggctggagcgctccttcttcgcttggtacaacttgctggtgcgccagagccattcgaacctgcccagcccgatgcatactag

SEQ ID NO: 108605 - DNA, 1257 bp, synthetic construct
  misc_feature 1..1257: note = Description of Artificial Sequence: Synthetic coding sequence
  source 1..1257: mol_type = other DNA
atgcgtctatccgcaggacccgacgccggaccaagcggcaacagttccccttggtggcctctggcaaccggggccgggaacacttccagggaagccgaggctctgggcgaaggcaacggaccccccagagacgtcagaaacgaagagctcgccaagctcgagatcgcagtgctggctgttacattcgccgtggccgtgctaggcaactcaagcgtcttattggctcttcatcggactcccaggaaaactagccgaatgcacttgttcattcgccacctgtctttagctgacttagcagtcgcttttttccaggtgctgcctcagatgtgctgggacattacatacaggtttaggggaccggactggctgtgcagggtcgttaagcaccttcaggtgtttgggatgttcgcatcagcatacatgctggtagtgatgaccgccgatagatatatcgctgtctgccaccccctgaaaacacttcagcagcctgcgcgaaggagccggctgatgatcgccgcagcctgggttctttctttcgtgttgtcaacaccccagtactttgtcttctccatgattgaggtgaataacgtgacaaaggcccgcgactgctgggccacgtttatccagccttggggcagccgcgcatacgtcacgtggatgaccggtggaatctttgtggctcccgtggtgattcttggtacatgttatggcttcatttgctacaatatttggtgcaatgtacgggggaagaccgcttcgcgacagtctaaaggtgcagagcaggccggagttgccttccaaaaaggcttcctactggcgccctgcgtttcttctgtgaagagcatcagccgggccaagattcgtactgtgaagatgaccttcgtgatcgtgacagcctacatagtctgttgggctcctttttttataatacagatgtggtcagtgtgggaccctatgtctgtctggacggaatcagagaatcctacaattaccatcaccgcgctgctgggttccctcaatagctgttgtaatccatggatttacatgttctttagcggacatttgctccaggattgcgttcagtcatttccatgctgtcagaacatgaaggagaagtttaataaggaggatacagactccatgtcacgcaggcaaacattctatagcaacaatcgctcccctactaatagcaccggcatgtggaaggacagccctaagtctagtaaaagtatcaagtttattccggtctccacatag

SEQ ID NO: 108606 - DNA, 1275 bp, synthetic construct
  misc_feature 1..1275: note = Description of Artificial Sequence: Synthetic coding sequence
  source 1..1275: mol_type = other DNA
atggattctggccccctgtgggacgcgaaccccacaccgaggggtacactgtccgccccgaatgcgactactccatggctgggacgggacgaagagctcgctaaagtcgagatcggggtcctggcaaccgtgttggtcctggccaccggaggcaatttggctgtactcctgaccttgggacaactgggtagaaagcggtcacggatgcatctgtttgtgttgcacttggcattgactgatctagccgttgcactattccaagtgctaccccagctgctctgggacattacttaccggttccaggggcccgacctgctgtgcagagcagtcaaatatttgcaggtgcttagtatgtttgctagtacgtacatgcttctggcaatgaccttggaccggtacctggccgtgtgccacccgctcagatctttgcagcagcccgggcagagcacatacttattaattgccgcgccttggttactggcagccatattcagtctaccacaggttttcatattctccctgagggaagttattcaggggagtggggtcctcgattgttgggctgacttcggattcccatgggggccacgggcctaccttacctggacaaccctggcaatctttgttttgcccgttaccatgttgactgcttgttatagtctcatttgccacgaaatctgtaagaacctgaaagttaaaacccaggcttggcgagtgggcggaggggggtggcggacatgggacaggcccagcccgtccacgttagccgccactacgcgggggttgccgtcccgagtgagttccattaatactatctctcgcgctaagatcaggactgtgaaaatgaccttcgttattgtattagcctatattgcctgttgggctccttttttctctgttcaaatgtggtcagtgtgggacaaaaatgcgccagacgaggactcaacgaacgttgcgttcacaatctccatgctgttggggaatttaaacagttgttgcaacccatggatctacatgggttttaacagtcatctgttgcccaggccccttcgtcacctagcatgttgcggtggtcctcagcctaggatgaggcggaggttgtctgatggtagtttgagctctcgccatacaaccctcctcacaagatcatcatgtcctgcaactttaagcctgtcgctcagcttaacacttagcggcagaccccgtccagaggaatcacctagagacctagaactggccgacggcgagggcaccgccgaaactattattttctag

SEQ ID NO: 108607 - DNA, 1116 bp, synthetic construct
  misc_feature 1..1116: note = Description of Artificial Sequence: Synthetic coding sequence
  source 1..1116: mol_type = other DNA
atgttgatggcttccaccacatctgccgtaccgggacacccttctctgccttctctccccagtaacagttcacaagaacgacccctagacacacgcgatccactgctagcgagggccgaactagccctgctatccattgtttttgtggctgtcgctctcagtaatggactcgtgttggctgcccttgcccggcgcggcaggagaggccactgggctcctatacatgtatttatcggtcatctctgcttggccgatttggccgtggcactttttcaggtcctgccccaactcgcctggaaagctacggacaggttccgcgggcccgatgctctctgtcgggcagtcaaataccttcaaatggtgggtatgtatgccagctcatacatgattctggccatgactttggataggcaccgggctatttgtcgacctatgctcgcctatcgacacggttccggggcgcactggaaccgccctgtactggtggcgtgggcattcagcttgttgctgagtctacctcagctctttattttcgctcagcgcaatgttgaaggcggtagcggcgtgacggactgctgggcgtgctttgcggagccatggggacgacgaacttatgttacatggatcgcgcttatggtctttgttgcgcctactctggggattgccgcgtgccaagtactcatcttccgggagattcatgcctccctggtgccaggtccatccgagaggccaggcggcaggcgccggggacgtaggaccgggagtccaggcgaaggcgctcatgtcagcgccgccgtggctaagacggtgcgcatgaccctggtaatcgtggttgtatatgtcctatgttgggctccattctttctggtgcaactgtgggctgcctgggatcctgaagcgccactcgaaggtgcaccctttgtgctccttatgctgttagcatccctgaattcgtgcaccaacccctggatatatgcctccttcagtagctccgttagttctgagcttcggagtctcttgtgctgcgcccgcggacggacaccaccctcactcgggccacaggacgaatcctgtactacagcttcgtcatccttagcaaaagacacgtccagttag

SEQ ID NO: 108608 - DNA, 1116 bp, synthetic construct
  misc_feature 1..1116: note = Description of Artificial Sequence: Synthetic coding sequence
  source 1..1116: mol_type = other DNA
atgctgatggctagtacaacatccgccgttcccggccacccttctctgcctagtctaccatcgaattcatcacaagagcgtccactggacacccgcgaccccctgttagccagagccgagttggctctcctgtccattgtgttcgtggccgtggctctgtccaacggcctcgtgctggcagccctggcacggcgcggtaggcggggacattgggctccgatacacgtttttatcggccatctctgcctggctgatttagccgtggctcttttccaggtcctgccgcagttggcttggaaggctacagacagatttagaggtcctgatgccttgtgtcgcgctgtgaaatacctgcagatggtaggaatgtatgcctccagctatatgatattagcgatgacgctcgatcgacatcgcgctatctgccggcctatgctcgcttatcgccacgggagtggcgcacattggaatcggccagtgttggttgcctgggccttctcactcctcctatcacttccacagcttttcatttttgctcagaggaacgtcgaaggcggttccggggtgaccgattgctgggcttgctttgcggagccctggggtcggcgcacgtacgtcacatggatcgcgctgatggtgtttgtggcaccaaccctggggatcgccgcatgtcaagtcctgatttttcgcgagatccacgcaagtctcgtgcccgggcccagtgagcggcccggcggtcggagacgtggcagacggacgggtagtcctggggaaggcgcccacgtgtctgctgcagtggctaaaacagttcggatgacattggtcatcgtcgtggtttatgtcttgtgctgggctccattcttcctcgtccagctgtgggcggcttgggaccccgaagcgccccttgagggcgccccctttgtgctcctgatgctgcttgcgagtctgaactcttgtaccaatccctggatttatgcttcattctcctccagcgtgtcaagcgagcttcgcagcctcctttgttgcgcgagaggcagaacgccccccagcctgggccctcaagacgaaagctgtactactgccagttctagcctggccaaagacacctcatcttag

SEQ ID NO: 108609 - DNA, 930 bp, synthetic construct
  misc_feature 1..930: note = Description of Artificial Sequence: Synthetic coding sequence
  source 1..930: mol_type = other DNA
atgctcatggcatccacaacaagcgctgtgcccggccatccttctttgcccagcctgcccagcaattcaagtcaggaaagacccctggacacgcgggacccccttctggcgagggcagaactcgcattactctctattgtgttcgtcgcggttgcattgtcgaatggtcttgtgctggcagctcttgcgagaagggggcgcagaggtcactgggctccaatccacgtgtttattggccatctttgcctggccgacctggctgtggcgctgttccaagtgctccctcaactggcatggaaagctaccgataggtttagaggaccggacgccctgtgtcgcgctgtcaaatacctccagatggtaggtatgtacgccagctcatacatgatcctggcaatgactctggatcgtcacagagcgatttgcaggccgatgctcgcttaccggcacggtagtggcgctcattggaatcgccctgttctcgtcgcctgggctttctccctactgttatcgctgccccaactctttatttttgcccagcgtaatgtagaaggcggctcaggcgtgactgattgttgggcctgctttgctgagccctgggggcggcggacatatgttacttggattgcactgatggttttcgtggctcccacactcgggatcgccgcctgtcaggtgttgatcttccgcgagattcacgcatctctcgtccctggccccagcgagcggccggggggtagacgtcgggggaggaggaccggatctccaggcgaaggcgctcacgtaagtgccgccgtcgcaaaaactgtgcgaatgaccctggtcatcgtggttgtttacgttctttgttgggcaccattttttctggtccagctatgggcggcctgggacccggaagcacctctggaagggggatgttctaggggatag

SEQ ID NO: 108610 - DNA, 1005 bp, synthetic construct
  misc_feature 1..1005: note = Description of Artificial Sequence: Synthetic coding sequence
  source 1..1005: mol_type = other DNA
atgggcagaagatcttccgatacggaagaggagtcccgcagcaagcgaaagaagaagcaccgccgaagaagctcctctagcagtagctccgacagccggacctactcccggaaaaaggggggtcgtaagtcacgatctaagtctaggagctggtctcgggatcttcaaccccggtctcactcctacgacaggcggaggcggcacagatcctccagctcaagttcctatggaagcaggaggaagagaagtaggagccgatctagagggaggggtaagagctatagagtgcagcggtcaaggtccaagagccggacgcggcggtcgagatcgaggccacgacttaggtcacattcccggtctagtgagcgatccagtcaccggagaacgaggagccgttctagggaccgggagcgacgcaaggggagggacaaggagaagagggagaaggagaaagataagggcaaggataaggagctgcacaacattaagcgcggtgagagcggaaacataaaggccggcctggaacatctgccacctgccgagcaggccaaggcccgcctgcagcttgtcctagaggccgccgctaaagcggacgaagccctaaaagctaaagagaggaatgaagaagaagcgaagaggaggaaagaggaagaccaagcaactctcgtggaacaggtgaaaagagtgaaggagatcgaggctattgagtcggactcattcgtgcagcaaaccttcagatctagcaaggaagtgaagaaatctgtagagccttccgaggtgaaacaggcaactagcaccagcgggccggcatcagccgtcgccgaccccccatccaccgagaaagaaatcgatcccactagcatacctactgccattaaataccaagacgataactccctggcacatccgaatctgttcattgagaaggccgacgctgaggaaaaatggtttaagcgactgatcgcgctgcggcaggagcggctcatggggagcccagtggcttag

SEQ ID NO: 108611 - DNA, 831 bp, synthetic construct
  misc_feature 1..831: note = Description of Artificial Sequence: Synthetic coding sequence
  source 1..831: mol_type = other DNA
atgggaagaagatcttccgacacagaagaggagtcccgctcaaagcggaaaaaaaaacaccgacggaggagctcaagcagctcatctagtgactcacgaacatactcaaggaaaaagggcggacggaaaagtcgctccaagtctaggtcctggagcagagacctgcagcctaggtctcactcttacgacaggcgtcggaggcacagatcgagttcttccagcagttatggctctcgaagaaaacgctctcgaagtcgcagcagaggacgcggcaaaagttatcgcgtccaacgcagccggagcaagagccggacgcgcagagaatccgggaacatcaaggccgggctggagcacctgccccctgcagaacaggctaaggctaggctgcagcttgtgcttgaagcagcagccaaagcagatgaggcattaaaggcgaaggaacgaaacgaggaggaggccaaacgtagaaaagaagaggatcaggcaaccctggtcgaacaggtaaagcgcgttaaagagattgaagccatcgagtcagactcctttgtgcagcaaacctttagatcttcgaaagaagtgaagaaatccgttgagccatctgaagttaagcaagccacttctacctcaggtccagcttccgcagtcgccgaccctcccagcacagagaaagagattgacccaacttctatccctacagcaataaaatatcaggatgataacagcctagcccatccaaacctgttcattgagaaagccgatgctgaggagaagtggttcaagagactgatcgcattgagacaagagagactgatgggcagtccagtcgcctag

SEQ ID NO: 108612 - DNA, 831 bp, synthetic construct
  misc_feature 1..831: note = Description of Artificial Sequence: Synthetic coding sequence
  source 1..831: mol_type = other DNA
atggggaggcggagcagtgacaccgaggaagaatcacggtctaaacgaaagaaaaaacacagacggcggagctcttcttcatcctcctcagattcccgaacttatagcaggaagaaaggaggccgcaaatctaggtctaagtctcgcagctggagccgcgatctgcagccccgtagtcactcctacgaccggcggcggaggcaccggtcttccagtagttctagttacggcagtcggagaaaacgatctcgcagcaggtcccgagggagagggaagagttatagggtccaacgatcccggagtaaatcacgcacacggcgggagagtggaaatattaaagcaggtttagagcacttacctcccgcagagcaggccaaggctcgcttgcagctggtgctggaagccgctgccaaggctgacgaagctctcaaggcaaaagagaggaatgaggaagaagccaagcgtcgtaaggaggaagaccaggccactctggtagaacaagtgaagcgggtgaaggagattgaggccatcgagagtgatagctttgtgcagcagacattccgcagctccaaggaggtgaagaagagcgtagaacccagcgaagtgaagcaggctacctccaccagcggtcctgcttctgccgtagccgatcccccctccacagaaaaagaaattgatccaaccagtattccaaccgctataaagtaccaggacgacaacagtctggctcatccaaatttgttcattgaaaaagcagacgctgaggagaaatggtttaaacgcctgatcgcactgaggcaggaaaggcttatggggtcccccgtggcctag

SEQ ID NO: 108613 - DNA, 612 bp, synthetic construct
  misc_feature 1..612: note = Description of Artificial Sequence: Synthetic coding sequence
  source 1..612: mol_type = other DNA
atggggagaagatcctccgatacggaggaagagtccaggagtaaaagaaagaaaaaacaccggcgtcgaagctcttcaagctcgtctagtgacagccggacctacagtaggaagaagggcggcagaaagagtcgctcaaagagccggagttggtcccgagacctacagcctaggtcccactcctatgaccggcggcgccgacatcggtctagttcttcatcttcctacggatccaggagaaagagaagtcgcagccgatcaaggggccgaggtaaaagctatagggtccagcggtcccgtagtaagtccaggacgagacgctcaaggtcaaggcctcggctgagatcccatagtcggagctctgagagatcatcccaccggcggaccaggtcaaggtcccgcgacagggagcggcggaaaggcagagataaggaaaagcgggagaaggagaaggacaagggcaaggacaaagagctgcacaacataaagcgtggagagagcggtaacatcaaggccgggctggaacacctacctcccgctgagcaggccaaagcaaggttgcagctcgtcttggaagccgccgctaaggcagatgaagccctcaaagcctag

SEQ ID NO: 108614 - DNA, 585 bp, synthetic construct
  misc_feature 1..585: note = Description of Artificial Sequence: Synthetic coding sequence
  source 1..585: mol_type = other DNA
atgggtcggagaagctcggacaccgaggaggaaagcagatcaaagaggaagaaaaagcaccgacgtagaagcagctcgtcatctagctccgactcgaggacttactcccgcaagaaagggggcagaaagtccagaagcaagtcccgcagctggtcacgtgatctccagccgcgctcacacagctacgatcggaggcggaggcatagaagctccagctcttcctcttacggaagcaggcgcaagcgctccagaagtcggagccgggggcgagggaagagttaccgggtccagaggagccggtcgaaatctagaacccgtcgcagccggtcacggccccgtttgaggtcacacagccgcagcagcgagaggtctagccatagaaggacccgttctaggagccgggatagagaacgacgcaagggccgtgacaaagagaagagagagaaggagaaagacaaagggaaggacaaggagcttcacaacatcaagcggggtgagtccggtaacatcaaagcaggcttagagcacctgccgccagccgagcaggcaaaggcaagactgcaactggtccttgaggccgcttag

SEQ ID NO: 108615 - DNA, 1005 bp, synthetic construct
  misc_feature 1..1005: note = Description of Artificial Sequence: Synthetic coding sequence
  source 1..1005: mol_type = other DNA
atgggtcggcgctcctctgatactgaggaagaatcccgctccaagcgcaagaaaaagcatcgccgccgatcttccagctcctcttcgtcagactccaggacctacagccgcaaaaagggaggtcggaagtcccgttcgaagtctcgctcgtggtctcgggacctacaacccagatcacacagctatgacaggaggcgtaggcatagatctagtagttcatcatcctacggctctcgtaggaagagaagtaggtctaggtctagaggaagggggaagagctacagagttcaacgtagtcgatcgaaaagccgaacccggcggagtcgttcgagaccaagactccggagccactcccgtagtagcgagagaagcagtcataggagaacaagaagccgctccagggatagagaacgtcgcaaaggtagggataaggagaagcgagaaaaggagaaggataaaggcaaagacaaagagctccacaacatcaagagaggcgaatccggcaacatcaaggccggtttagagcatcttccccccgcggaacaggccaaggcgcggttacagctggttttggaggcggcggccaaagccgacgaggccctgaaagctaaggaaagaaatgaagaagaagccaaacgcaggaaggaggaagaccaggcaacgctcgtagaacaagtgaagagggtcaaagaaattgaagccatcgaaagcgactcttttgttcagcagacctttaggtctagcaaggaggtgaaaaagtcagtcgagcctagcgaggtcaaacaggctacgtctacgtccggacctgcctcggctgtcgccgatcctccgtcaacggagaaggagattgaccccacttcgatccccaccgcaattaagtatcaggatgacaattccctcgcccatcccaacctctttatcgagaaggcagacgcagaagaaaaatggttcaaacgcctgatcgccctgagacaggaacggctgatggggtccccagtggcctag

SEQ ID NO: 108616 - DNA, 498 bp, synthetic construct
  misc_feature 1..498: note = Description of Artificial Sequence: Synthetic coding sequence
  source 1..498: mol_type = other DNA
atggggcggcgcagctcggacactgaggaggaatctagatcgaagcggaagaaaaaacaccgcaggcgatcctcgtcctcatcatcttccgatagccgcacctacagtcggaaaaagggtgggcgcaaatctagatccaagtcccgcagctggtcaagggatctgcagccaaggtctcactcatacgaccgacgaagacggcaccggtcctcaagttcctctagctatgggtctaggcggaaaagaagcagaagcaggtcccggggaaggggtaagtcttacagggtgcagagaagtcggtccaaatcccgaactcgccggtcccggagtagaccccggctacggtcccacagccggagctctgagcgcagttcccatcgcaggacacggtcgagaagtcgggatagggagcgacggaagggtcgagacaaagaaaagagagaaaaagaaaaagacaaaggcaaagacaaggagcttcacaacatcaaacgtggctag

SEQ ID NO: 108617 - DNA, 948 bp, synthetic construct
  misc_feature 1..948: note = Description of Artificial Sequence: Synthetic coding sequence
  source 1..948: mol_type = other DNA
atgaggaacaggatggcgcctgaaaatccacagccagacccgttcattaaccggaattactcaaatatgaaagttattccgcctcaagatcctgcgtctcctagctttacactgctgtctaagctcgaatgcagtggcactgtgtccgcatactgctctctgaatcttccaggtagtacagacccacctacctcagcgtctcgagttgcagcgaccacagccattagacggcgccataaggaacgcacttcattcacgcaccagcagtacgaagagctggaagcacttttcagccaaacaatgttccctgatcgcaatttgcaggagaaactggcactgaggctcgatctacctgaatccacagtcaaagtatggttccggaaccgcaggtttaaactgaagaagcaacagcagcagcagtcagcaaaacaacgaaaccagatcttgccttcaaagaaaaatgtccctacatctccgaggacatctccctcaccctatgccttctcaccggtcatctccgatttttattcttctcttccatcacaacctctagacccctctaactgggcctggaatagtacctttacggagtcttcaacctccgactttcagatgcaggacacacagtgggaaaggctagttgcctctgtgcccgcgctgtacagcgacgcctacgacatcttccaaattatcgagctgtacaatttgcctgacgagaacgaaattagttctagcagctttcactgcctctaccagtacttaagtcccactaagtatcaggtgggtggccagggttccagcctcagtattttcgccggacccgcggtgggtctgagcccagctcagacatggcccaatatgacttcgcaagctttcgaggcgtacagtctgacagattcgctggagttccagaagacatctaatatggttgacttaggcttcctctag

SEQ ID NO: 108618 - DNA, 4701 bp, synthetic construct
  misc_feature 1..4701: note = Description of Artificial Sequence: Synthetic coding sequence
  source 1..4701: mol_type = other DNA
atgactgccgacaaggacaaagataaggataaagagaaggaccgggacagggatagagaccgcgagcgcgagaaaagggataaagcccgggaaagcgaaaactccaggccacgacgctcgtgtaccctcgaagggggggcgaaaaattatgctgaatcagaccattccgaggacgaggacaatgataacaattctgccacagccgaggaaagtaccaagaagaacaagaagaagcctccaaagaagaagtcccggtacgagaggacagacacgggtgaaatcacatcttatattactgaggatgatgtggtatatagacctggggactgtgtctatatcgagagccgccgtccaaatacgccttactttatttgttccatccaggatttcaagctggtgcataatagccaggcctgctgtaggagtcctactccagcactctgcgatccaccggcctgctccctccccgtagcttctcagccccctcagcacctcagcgaggcgggtcgtggacccgtggggagcaagcgagatcatctgctcatgaacgtcaaatggtactacaggcaatccgaagtcccggacagtgtctaccaacatttggtgcaggatagacacaatgagaacgacagcgggagggaactcgtgatcacagatccggtaattaaaaacagggaactcttcatttccgactatgtggatacttatcacgctgccgccctcagagggaaatgcaacataagtcacttttcggacatcttcgctgcacgagagttcaaggctcgcgtcgattcctttttctatatcctcgggtacaatcctgaaaccaggcggctgaactcaacccagggtgagatccgggtcggacccagtcaccaggccaaactgcccgacctgcagccttttccctctccagacggcgacacagtcacgcagcacgaagagctggtctggatgcctggtgtgaacgactgcgatctcttgatgtatttgcgggccgctcgttcaatggcggcttttgcgggaatgtgcgatggcggttctacagaggacggctgtgtagccgctagcagagacgacactaccctgaacgcattgaacaccttgcacgaatccggctatgacgcaggtaaggccctgcagcggttggtgaagaagcccgtccctaaattaatagaaaaatgctggacagaggacgaggtaaagcgatttgttaaaggacttcggcagtatggtaaaaattttttccggataaggaaggaactgcttcccaacaaagagaccggcgaactcatcactttttactattactggaagaagacccccgaagctgccagtagtcgcgctcaccggcgtcacagaagacaggcagtgtttcggcgcattaagacacggaccgcttccacccctgtcaacacacccagtcggccgccctcttcagagtttttagacctgagctccgccagcgaggatgattttgactccgaggactccgagcaggaattaaaagggtacgcctgcaggcactgttttacaacaacatccaaagactggcaccacggagggagggagaacattctgctctgtaccgactgcaggatccacttcaagaaatacggggaactcccccccatcgaaaaaccagtggacccacccccttttatgtttaaaccagtgaaggaggaggacgatggtctgagcgggaaacactctatgcgaacaagaagatcacggggctctatgtcaactctgcggtccgggagaaagaagcagcctgcatcccccgacggcaggaccagtccaattaacgaagacatcaggagctccggaaggaactctccatctgcagcctccacttcatcaaacgactcaaaggctgagactgtaaaaaaatcggccaagaaagtcaaggaggaggcgtcctctcctctgaagagcaataaacgtcagagagaaaaggtggcaagcgatactgaggaggcagaccgcacatcatcaaaaaagaccaagactcaggaaatttcaaggcctaattccccgtcagagggagagggggagtcaagcgatagtcgctccgtgaacgacgagggaagctctgaccctaaggatatagaccaggataatcgctccaccagcccaagtatcccaagtccacaggacaacgagagtgatagcgatagctctgcccagcaacaaatgctgcaggcccagccgcccgctctgcaagcaccaacaggcgtgaccccggccccttcatccgcccctcctggcacaccacagctccccactcccggacccactccttctgcaacggccgtacccccgcaggggagtcctaccgctagccaggccccaaatcagccacaggcgcccacagccccggtccctcacacccatattcagcaggcccccgcgttgcatccacagcgccccccctccccccacccgccccctcacccttctccccaccctcctttgcagccactcaccgggtccgcaggccaaccttccgctcctagccacgcgcaaccaccccttcacgggcagggccctcccggccctcacagtctgcaagccggaccactgctccagcatccgggcccccctcagccctttggcttacccccacaggcaagccagggccaggccccactcgggacctcaccagctgcagcttaccctcatacgagcctccagttgcctgcaagtcaatctgcccttcaaagtcaacagccccctcgggaacagccacttcctcccgctcctttggcaatgccccatataaagcctcccccaacaacccccatccctcagctccctgccccacaggcgcacaagcaccccccgcaccttagcggcccctccccattcagcatgaatgcaaacctgccgcctccaccagccctcaagccactgtcgagcctttctacacaccacccaccttccgctcacccgccccctctgcagctaatgccgcagtcccaaccgttacccagttcccccgcacaaccgcccgggctaacgcagagccaaaaccttccacccccacccgccagccaccctccaactggacttcatcaggtggcacctcagccccctttcgctcagcaccccttcgtgcccggaggacctcctccgattacacccccgacgtgtccctctacctctacacctccagctgggcctggaacgtctgcccagcccccttgcagtggagcagcggcgtccggggggagtatcgccggagggtccagttgtcctctgcctacagtgcagattaaggaggaggcactggatgacgccgaggaaccagagtctcctccacctcctcccagatcaccgtctccagagcccacagtcgttgataccccttcacacgcctcacagtccgcccgtttttataagcatctggatcgaggatacaactcctgtgctcggactgatctgtattttatgccgcttgctgggagcaaattagcaaaaaagcgggaagaggccatcgaaaaggccaaacgcgaagctgaacagaaggcccgggaggaaagggagcgcgagaaagagaaagagaaggaaagggagcgcgagcgcgagcgagagagagaggctgaaagggctgccaaggccagttcatcagcccatgagggaaggctcagtgatcctcagctgtcaggacctggccacatgcgaccttcttttgaacctccacccactactatagcggcggtgcctccttacattggcccagacacacccgcactgcgtaccctgtctgaatacgctcgcccacacgtgatgtcaccgacgaataggaatcaccccttctacatgcctctcaacccaacagatcctctcctcgcttatcatatgcccggcctctataacgttgacccaaccatcagagagcgagaactgagagagcgtgaaatacgggaacgagaaattcgtgaacgcgagctcagagaaagaatgaagccaggatttgaggtgaagccgcccgagttggaccctctacatcccgctgctaatccgatggaacactttgcacggcatagtgctcttacgatacccccaacagctggaccgcacccttttgcatccttccaccctggcctgaaccctctggagcgcgagcgcctggccctggccggcccacagcttaggcctgagatgtcgtatccggaccgcctcgcggcggaacggatccacgcggaacggatggcctccttgactagcgatccattggcacgtctgcaaatgttcaacgtgacgccccatcatcaccagcatagccacatccactctcatctgcatctgcaccagcaggatcctctgcatcagggctcagctggccctgtgcacccattggtcgatcccctgactgccggcccacacctggcacgctttccataccctccaggaaccctgcctaacccacttcttggacagccgccacatgagcacgagatgctgcgccaccccgtttttggaactccttatccaagggatttaccaggggctattcctccgccgatgtccgctgcccaccagctgcaagccatgcacgcccaaagcgctgaactacagaggttagccatggaacagcagtggctccacggtcatccacacatgcatggcggacacctgccctcgcaagaggattactactcccgcctgaagaaagaaggggacaagcagctatag

SEQ ID NO: 108619 - DNA, 3897 bp, synthetic construct
  misc_feature 1..3897: note = Description of Artificial Sequence: Synthetic coding sequence
  source 1..3897: mol_type = other DNA
atggacgatcccttctcgccgtgtagaagactgaactcaactcagggcgaaatcagggttggcccgtcccaccaggctaagcttcccgatctgcagccatttccaagtccagatggggatacggttacacagcacgaggaactcgtgtggatgcctggggtcaacgactgcgacctcttaatgtacttgcgcgcagctcgttccatggccgcctttgcagggatgtgtgatggaggttccacggaagatggctgcgtggctgcgtctcgcgatgataccacacttaacgccctcaatacgttgcacgaatcaggctacgacgcgggcaaagcgctgcagcggttggtaaagaagcctgtgccaaaactaattgaaaagtgttggaccgaagacgaggtgaagcgctttgttaagggactgagacaatacggaaagaacttcttcagaatcagaaaggagctgttgcccaacaaagagaccggagagcttatcactttctactactattggaagaagactcctgaagccgcatcatctcgagcacacagaaggcaccggcggcaagccgtgtttcgtagaattaagacccgaaccgcttcaacccccgtaaatacgccatcccgccccccatcaagcgagtttctcgatttatccagtgcctccgaagatgacttcgactccgaggacagcgagcaggagctgaaaggatacgcatgcagacactgttttaccacaacctctaaggattggcaccacggaggccgggagaatatcctgctctgcacggattgtcgaatccattttaaaaagtatggagaattgccccctattgagaaacccgtggatccaccccctttcatgttcaaacccgtcaaggaagaggatgacggcctttcaggcaaacatagcatgaggaccaggaggagccgcggctcaatgagcaccctgcggtctggccggaaaaaacaacccgctagtccagatggaagaacaagccctatcaacgaggacatacgatcttccggccgcaacagtccctccgccgcgagcaccagcagcaacgatagcaaggcggaaaccgtgaagaagtcagctaagaaagtcaaggaggaggccagctcccccctcaaatctaacaaacgccagcgggaaaaggtcgcaagtgacacagaggaggcggataggacctcctcaaaaaagacgaagactcaggagatttctcggcccaactctccatctgagggagagggcgaatcatccgactctcgtagcgtgaacgatgagggttcatcggatccaaaagatattgatcaagacaatagaagtacatcacctagcatacccagcccccaagacaacgaaagtgactcagacagctctgctcagcagcagatgttgcaggcacagccaccagctttacaggcccccacaggtgtgacacccgccccctcatccgcaccccctgggaccccccagctgcccacccccgggcccacacccagtgcgacagcagtgcccccccagggaagccctactgcatcacaggccccaaatcagccccaggcgcctactgcaccagtcccccatacacacatccaacaagcccctgccctgcatccgcagcggcctccttcacctcatccacccccccacccatcccctcaccccccgctccaaccactgactggcagtgctggccagcctagcgcacccagccacgcccagccccctctacacggacaaggcccccccggcccccatagcctccaggctgggcctctgttgcaacatccaggcccccctcagccgtttgggcttccgccacaggcgtcacagggccaagctcccctgggaaccagccctgctgccgcgtatccccatacctccttgcagctgccagcatcccagtccgcactgcaaagccagcaaccgcctcgtgaacaaccactgccccccgccccccttgccatgccccacataaagccgcccccaacgactccaatcccgcagctcccagcgccacaagcacataaacaccccccgcacttgtctggtcccagtcctttttctatgaacgccaacttacctccccccccagccctcaaacccctgtcctccctatcaacccatcatccaccttcggcccatcctccccctctccagctcatgccgcaatcccaacccctgccttctagcccggcccagccacccggcctgacacagagccagaacttgcctcctcctcccgccagccatcccccaacgggcctgcatcaggttgcaccgcagccaccattcgcacagcaccctttcgtacccggcggcccgccaccaattaccccccctacatgcccttccacttccacgccaccggcgggtcccgggacctccgcccaaccaccctgttcaggtgctgcagcctctgggggatccattgcagggggctcaagttgcccactgcctacagttcaaatcaaagaagaggccttagacgacgcagaggaaccagaatcaccacccccacctccaagaagcccatctcccgagcccacagtggtggacacaccctcccacgcctctcaatcggcccggttctacaagcaccttgataggggctataatagctgtgcaaggacggacctgtactttatgcccctggctggatcaaaacttgcaaagaaacgggaagaggcaattgaaaaggctaagcgtgaggctgagcaaaaggcaagagaggagcgtgaaagagagaaggagaaggaaaaagagagagagcgagagcgggagcgggagagagaagccgaacgcgctgccaaggcaagcagctcagcccacgagggtcggttatctgaccctcaactctccggacccgggcatatgaggccttccttcgagccacctccaacaaccatcgccgcagtccctccctacatcggcccagacacaccagccctgcggactctatcagaatacgctagaccccacgtcatgagcccaacgaacagaaaccaccccttttacatgcccttgaatcctaccgaccctctgcttgcttaccacatgcctggcctttacaatgtggacccgacgattcgcgagagagaactgagggagcgcgaaatccgtgaacgagaaatccgagagcgagaactgagagaacgtatgaagcctgggttcgaggttaaaccgcctgaactagatccacttcatcccgccgcaaacccaatggagcatttcgctcggcactctgcactgactattcctccaacagctgggccacatccttttgccagctttcaccctggactgaacccattagagagggaaaggctggcactggctgggccacaactgcggcctgagatgagctatccagatagactggcggcagagcgcatacacgccgagaggatggcttcactcacatcggatcctctcgccagactgcagatgttcaatgtgacacctcaccaccaccagcatagtcacatccactcacacctgcatttgcaccagcaggatccactgcatcagggtagtgccggacctgtgcacccgctggtggatcctctgacggcaggtccccatcttgcgagatttccataccctcccggtacactacctaatcccctgctgggtcagcccccgcacgagcacgagatgcttcgtcacccagtcttcggaactccctatcccagagacctcccgggagccatccctcctcccatgtccgccgcacatcagttgcaagcaatgcatgcacagagcgctgaactgcagcgccttgccatggagcagcagtggctccatggccacccccatatgcacggcggccatctgccatcccaggaagactattacagcagactcaagaaagaaggggataagcagttgtag

SEQ ID NO: 108620 - DNA, 4701 bp, synthetic construct
  misc_feature 1..4701: note = Description of Artificial Sequence: Synthetic coding sequence
  source 1..4701: mol_type = other DNA
atgactgccgataaagataaggacaaagacaaggagaaggatcgggaccgagatagggatcgcgaaagagaaaaaagggacaaagcgcgcgagagcgaaaattcaagaccaagacggtcctgcacgctggaaggaggcgcaaagaactatgctgagagcgatcacagcgaggatgaggataatgacaacaatagcgcaactgcggaggagtcgaccaaaaaaaacaagaagaagccacccaaaaaaaaaagccgctatgagcgaacggacacaggagaaatcactagttatatcactgaagatgacgtggtttaccgcccgggtgactgcgtctatatagagtctcgtaggcctaataccccttactttatttgctctatacaggactttaagctggtccacaattcacaggcatgctgccgctcccccacacccgcgctgtgcgatccaccagcctgcagcctgcctgtggcctcccagccccctcagcatcttagcgaggctggaagggggcccgtcggatctaagcgcgatcacctgctgatgaacgtcaaatggtattatcgacagtctgaggtcccggactccgtttatcaacatcttgtgcaggatagacacaatgaaaacgattctggccgcgaattggtgatcacagacccagttataaagaaccgagagctcttcatcagcgactatgtcgacacatatcacgcagctgccctgaggggcaaatgcaacatttcacacttttccgatatcttcgcagctcgggaattcaaggcccgtgttgattcctttttctacatcctaggctacaatccagagacacggcgcctgaactcaacacagggcgagatcagagtcggtccgtcccatcaggccaagctgcccgacctgcaacctttcccttcacctgacggcgatactgtgactcaacacgaagaactggtctggatgccaggcgttaacgactgtgacctgctaatgtatttacgcgctgctcgcagtatggcggcttttgcagggatgtgcgacggagggtctaccgaggacggatgcgtggccgcctctcgtgatgatacgacattgaatgcccttaacacccttcacgaatcagggtatgatgccgggaaagcattgcagagactggtgaagaaacctgtgcctaagctgatcgagaagtgctggaccgaggacgaggtcaagcggtttgtgaaaggactgaggcaatacggtaaaaatttctttcgaataagaaaagagctgcttcctaacaaagagacaggagaactgattactttctattattattggaagaaaaccccagaggccgcgtcatctcgggctcaccgacgccacaggcgccaggccgtctttaggcgcatcaagacaaggacagcatcaacccctgttaatacgccctctcgaccaccatcttcagagttccttgacttgagctccgcttccgaagacgactttgattctgaggatagtgagcaggaactcaaaggttacgcctgtcgacattgcttcaccaccacatcaaaggattggcatcatggaggccgcgagaacattctgctgtgtaccgattgtcgcatccactttaaaaaatacggagagcttccaccgatcgaaaaaccagttgaccctccaccttttatgttcaaacccgttaaggaggaagacgacgggctctccggtaaacactctatgaggaccaggcggtcacgcggcagcatgagtaccctccgatctggaagaaagaagcagccagcttcccctgatgggaggacttcgcctataaatgaggatatcagatcctccggccgaaacagccccagcgcagcaagcacaagcagcaatgattcaaaggcagaaacggtgaaaaaaagcgccaagaaagtgaaggaagaggcctccagcccactgaaaagcaataaaagacagcgtgaaaaagtagcttcagacacagaggaggctgatcgcactagttctaagaagacgaagacacaagagatctctaggccaaactccccatccgaaggcgaaggcgaatcatctgacagccggagcgtaaacgatgaagggtcgtcagaccccaaggatattgaccaagacaacaggtccaccagcccttcgatacctagccctcaggacaacgaaagcgattccgattcatctgctcagcaacaaatgcttcaggcccagccacccgccctccaggcccccactggagtcacccccgcaccgagcagcgcccctcccggaactcctcagcttcctacaccaggacctactccgtcagcaaccgccgttcctcctcagggttctccaacagccagccaggcacccaatcagcctcaggctcccaccgctcccgtgcctcacacgcatatccagcaggccccagcactgcatcctcaacgccctccctcccctcacccaccaccccatccaagtccacatccgcccttacagcccctgacagggtctgccgggcagccaagtgcccccagtcatgcccaaccacctttacatggacaaggcccccctggcccccatagcttgcaagctgggcctctgctgcagcaccctggccctccccagcccttcggcctccccccccaggccagccagggccaggctcccctcggaacttctcccgctgcggcctacccccacacttctctgcagctccccgccagccaaagtgctctacaatcccagcagccacctagagaacagccgctgcccccagctccacttgccatgcctcatattaagccccctcccaccacccccattccccaactgcccgcaccgcaggcccacaaacatcctccacacctgagcggcccatcccctttcagtatgaatgcaaacctcccccctcctcccgcgctgaaacctctgagctcgctcagcacccaccacccaccttccgctcatccgccccccctgcagctgatgccccagtcccagcccttgcccagttcacccgctcagcctccaggcctgacacagtctcagaatctgccaccgcccccagcaagtcatccccccacagggttacatcaggtcgcgccacagccccctttcgcccaacatccttttgtgcccggtgggccgcccccaataacccctccgacgtgcccgagcacaagcacaccccctgcaggtcccggaactagcgcccaacccccctgtagtggggctgcggcaagtggcggctcaattgctggcgggagttcgtgcccccttccaaccgtacagatcaaggaagaagccctggacgacgccgaagagccagaatccccaccacccccgcccagaagcccttcaccagaacccaccgtagtggacacaccatctcacgcctcccaaagcgcccgtttctacaagcatctggaccggggatacaactcctgcgctcgtacagatctgtacttcatgccacttgctggcagcaaactggccaagaagcgcgaggaggcaattgagaaagccaaacgcgaggccgagcagaaagctcgcgaagaaagggagcgagagaaagagaaagagaaagaaagagagcgtgagcgggaacgcgagcgcgaagccgagcgcgcggccaaagcctccagcagtgcgcatgaaggtcggctgagcgaccctcaactcagtggaccaggccacatgagaccatccttcgagccaccccccacgacaatcgcagccgtcccaccatatataggaccagacacacccgccctgcgaaccttatcggagtatgctcggcctcatgtgatgtctcctaccaacagaaaccacccgttttacatgcccctgaacccgacagacccattactggcttatcatatgcctggcctctataatgttgatccgaccatccgcgagagagaattgagggaacgcgaaatcagagaacgcgagattagagagagggagttgagggagcggatgaagcctggatttgaagtgaaaccccccgagctggacccactccacccagcggctaaccccatggagcacttcgccaggcactctgcactcaccatcccgcctaccgccggaccgcaccccttcgcgtcattccacccgggcctgaatccactggaaagggaaagattggccctggccgggccgcaattgaggcctgagatgtcctatcctgaccgattggccgctgaaagaatccatgcagagaggatggccagcctcactagcgatcctctggcgcgcctgcagatgttcaacgtcactccacatcaccaccagcacagccacattcacagccatctgcacttgcatcagcaggaccccctgcaccagggttctgcgggccctgtgcatccattagtagaccccctgacagccggtcctcatctcgctcggttcccctacccaccaggcacgctgcccaatccgctgttaggacagccaccgcacgaacacgaaatgttacgccatcctgtgttcggtacaccctacccacgggatctgcctggagctattccaccaccgatgtcagctgctcaccaattgcaagccatgcacgcgcaatctgctgaactccagcggctggctatggagcagcaatggctgcacggccatccacacatgcacggggggcaccttccaagccaggaggactattattccagactgaaaaaggagggggataagcagctgtag

SEQ ID NO: 108621 - DNA, 3039 bp, synthetic construct
  misc_feature 1..3039: note = Description of Artificial Sequence: Synthetic coding sequence
  source 1..3039: mol_type = other DNA
atgttcaaacccgtgaaagaggaggatgacgggctgtctgggaagcattcaatgcggactcgtaggtccaggggatccatgtccacgcttcgctccgggcggaagaaacagcccgcgagtccagacggcagaacttcccccattaacgaggatatccggagttcgggcaggaattccccatccgccgccagtacttcctctaatgattccaaggctgaaacagtcaaaaaatcagccaaaaaggtgaaggaagaagcatcatcacctctaaaaagcaataagagacaaagagagaaggtggccagtgacaccgaggaggccgaccggacaagctcaaaaaagacaaagacccaggaaattagccgacctaactctccaagcgaaggggagggggagagctcggacagtcgatcggtaaatgacgaaggatcgagcgatccaaaggacatagaccaggacaatagaagcacctctccttccattccaagcccgcaggataacgaatccgacagtgactcaagcgcccaacagcagatgctgcaggcacaacctcccgccctccaggcacctacgggcgtcacccccgctccttctagtgccccacctggtactccacagctgcctacaccaggccccacaccaagcgccaccgccgtgccacctcaggggagtccaaccgcatctcaagcccctaatcagcctcaggcaccaacagcccctgttccccacactcacatacagcaggcaccagccctgcatccacagcgacccccaagcccgcacccaccaccccacccatccccccatcctccgctgcaaccacttacggggagcgcaggtcaaccctcggccccaagccatgcccagcctccattgcacgggcagggaccccctggacctcacagtcttcaagccggtcctctgctgcaacatccgggccccccccagccatttggcctaccacctcaggcaagccagggacaggctcccctgggcacctctcctgcagccgcctatccccatacctccctccagctacccgcatcccagagcgctctgcaaagtcagcagccaccacgcgagcagccgctgccacctgcacctcttgcaatgccccatataaagcctccccctaccacgccaattcctcagctcccagctcctcaagctcacaaacaccctccgcatttgtctggccctagtcctttttccatgaatgcgaaccttccccccccgcccgcgctcaaaccacttagttccctaagcactcaccaccccccaagtgctcaccctcctccactgcagttgatgccccagtctcaacccctgcctagtagccccgctcagccccccgggctcacccagtctcagaatttgcctcctcctcccgcgagtcatcccccaactggcctgcatcaggtggccccacagccaccatttgcgcaacatccgttcgttcccggcggacctcctcctataacaccccctacctgcccctctacaagcactccccccgccggccctgggacgtctgctcaacccccttgttcaggcgcagcagcatccggggggagcatcgcaggcgggagctcttgcccactgccaaccgtgcagataaaagaggaagctctagacgacgccgaagaaccagagtccccacctccccctccccgctcaccatctccagaacccactgtggtcgacaccccttcccacgcttcacagagcgcacgtttctataaacaccttgaccgcggctacaacagctgtgcacgaactgatctctatttcatgccgctggccggcagcaaattggctaagaagagagaggaggccattgagaaggcaaagcgtgaagccgagcagaaggccagggaggaacgcgaacgtgaaaaggagaaagaaaaagaacgtgaaagggagagggagcgcgaacgtgaggccgagagggctgcaaaggcctcttctagcgcgcatgaagggagactgtccgatccacagctgtccggcccagggcacatgcgtccatcctttgagccccccccgaccaccatcgccgccgtacctccctatatcgggcctgacacacctgcgctccgtaccctgtcagagtacgctcggcctcacgtgatgagccccaccaatcgcaaccaccccttttacatgccccttaatccaactgatccactcctggcttaccatatgccggggctgtataacgttgatcccacaatcagggaacgcgagttgcgggaaagggaaatcagagaaagggagataagggaacgggagctgagagaaagaatgaaacccggcttcgaagtgaaacctccggagttggaccccctgcaccctgctgcaaacccaatggagcacttcgcacgccattctgccctaacgatcccccctaccgcaggccctcaccccttcgcttcatttcatcctggtctgaatcccctagaacgagagcggctggcccttgctggtccacagcttaggcccgagatgagctaccccgaccgcctcgcagcagaacggatccacgccgaacgaatggctagtctcacaagtgatccactggcacgcctccagatgttcaacgtgacaccccaccaccatcagcactctcacattcactcccacttgcatctgcaccagcaggacccgcttcaccagggatctgccgggcctgtgcaccctctggtggacccccttaccgctggaccgcatctggctcggttcccatatccacctggcactttaccaaacccactcctcggacagcctccacacgaacacgaaatgctgcgccaccctgttttcggcactccatatccgcgagatctgcctggagctatccctcctccgatgtctgctgcccatcaattacaggctatgcacgcccagagtgctgagctgcagagacttgccatggaacagcagtggctccacggccacccccatatgcatggagggcacctccccagccaggaagactactactcccggcttaagaaggaaggcgacaagcaactatag

SEQ ID NO: 108622 - DNA, 1953 bp, synthetic construct
  misc_feature 1..1953: note = Description of Artificial Sequence: Synthetic coding sequence
  source 1..1953: mol_type = other DNA
atggcatccggtgaacatagcccagggtccggcgctgcacgcaggcccttgcattccgcgcaggcggtcgatgtggcctccgccagtaactttcgggccttcgagctgctgcacctgcacctagatttacgggcagaattcggcccaccaggacctggagcaggcagccggggactgtccggcaccgccgttctcgatctcaggtgtctcgagccagagggcgccgccgagctgagactggattctcacccctgtctggaagtcacagccgccgcactcagaagggagcgccccggctccgaggagccccctgcagagcccgttagcttttatacgcaaccattttcgcactacggccaggccctgtgcgtatcgttcccacagccatgtcgggccgcagagaggctgcaggtactcctaacttaccgcgtgggagagggtcctggggtgtgctggttggcaccggaacaaactgcagggaaaaagaaaccttttgtttacactcagggacaggccgttctgaatcgcgccttcttcccctgttttgatactcctgcagtaaaatataaatactccgcgctgattgaagtccctgacggctttacagcggtgatgtcggctagtacctgggaaaagcggggccccaataagtttttctttcaaatgtgccagcccattccttcatacctaattgcacttgcaataggggatctcgtgagcgccgaagtaggccctcggtctcgggtatgggcagagccatgcctgattgacgccgcgaaggaggaatataatggcgtgatcgaagagttcctggctacaggcgagaaactgttcggaccatatgtgtggggaagatatgacttattgttcatgcctccttcatttccgtttggaggcatggaaaatccctgcctgacctttgtcactccctgcttgctcgctggggatcggtcactggccgacgttattatccacgaaatttctcattcctggtttggcaacctcgtcactaatgccaactggggtgagttctggctgaacgagggtttcactatgtatgcccagaggcgcatcagcacaattctgttcggggcggcctacacctgccttgaggccgccacaggcagagcacttctgcggcagcacatggacatcaccggagaggagaaccccctgaacaaactgagagtgaagatcgagcccggagttgacccagacgacacctacaatgagaccccctacgaaaagggattctgcttcgtgtcctacctggcccatctggtaggggatcaggatcagttcgattcctttctcaaagcctacgttcacgaattcaagttccggtcgatcctcgcagacgacttccttgacttttatctggagtactttcccgaactcaaaaagaagagagtggacattattcccggattcgaattcgaccgttggttaaacactccaggctggcctccctatcttcccgatctgtcccctggggattcccttatgaagcccgcagaggagctggcccaattgtgggccgccgaggaattagacatgaaagccattgaggctgtggctatctcaccctggaaaacctaccagcttgtatactttcttgacaagatccttcagaaatcaccactcccacccggcaatgtgaagaagttgggtgatacctatcctagtatcagcaacgccaggaacgcagagttgcggttgaggtggggtcagatagtgttgaagaatgaccatcaggaggacttttggaaggtaaaagagttccttcacaaccaggggaagcaaaaatacacactgcctctatatcatgcaatgatgggaggctctgaggtggcccaaacacttgcaaaagagacatttgccagcacagcttcacagctgcactcaaacgtagttaactacgtacagcagatagtggctcctaagggttcctag

SEQ ID NO: 108623 - DNA, 1836 bp, synthetic construct
  misc_feature 1..1836: note = Description of Artificial Sequence: Synthetic coding sequence
  source 1..1836: mol_type = other DNA
atggcctctggcgagcactcaccggggtcgggggcagcaagaaggccactccactccgctcaggccgtggacgtcgcttccgcgtccaacttccgagcctttgagctgttgcaccttcacctcgacctgcgggccgagtttggcccaccgggccctggcgcgggctctaggggactatccggtaccgcggtgcttgacctacgatgcctggagcctgaaggtgctgctgagctgcggctcgacagtcacccttgcctcgaagtcactgcagcagccctgcgtcgagagcggccagggtccgaggagccccccgccgagcctgtgagcttctatacacagcccttttcccactacggacaggccttgtgtgtgtcttttcctcagccctgtagagccgctgaaagactccaggtgctcttgacctatagagtgggggaagggccaggcgtttgctggctcgcccccgagcaaactgccggtaagaaaaagccgttcgtgtacacacaaggtcaggccgtccttaacagagctttctttccctgttttgataccccagccgttaagtataaatactccgcattgatagaggtgcccgatggcttcactgcagttatgagtgcttctacctgggagaagaggggacctaacaagttcttttttcagatgtgccagccaataccttcctatcttatcgctttggctattggagacctcgtctcagctgaggtaggcccccggtacgatctgctatttatgccacccagcttcccgttcgggggcatggaaaacccttgcctcacattcgttactccttgcctgctggcaggggatcggagcttggctgatgtgatcatccatgagatctcacattcctggtttggtaacctggtgaccaatgcaaactggggtgaattctggctcaacgagggctttacaatgtacgcccagcgaagaatttctactattctgtttggagctgcctatacgtgtctggaggctgcgaccgggagagcacttcttcgccagcacatggatattaccggcgaggagaaccctttaaacaagctgagggtgaagatagaacctggcgtggatcccgatgatacatacaatgaaaccccttacgaaaaaggcttctgtttcgtgagttacctcgcccacttggtgggagatcaggatcagtttgatagtttcctgaaagcctacgtgcatgagttcaaattccgatccattctggcagacgacttcctggatttctacttggaatattttccagagctgaagaagaaacgggtagatattatcccgggctttgagtttgataggtggcttaacacacctggatggcccccttaccttccagacctgagtccgggcgattctctcatgaagccggcggaagagctagctcagctgtgggcagccgaggagctagacatgaaggccatcgaagcagtagctatcagtccctggaagacatatcagttggtatattttctggataaaatcctccagaagagcccactccctccgggaaatgtgaaaaaactgggagacacatatccttctattagcaatgcacgcaacgccgagcttagactccggtggggtcagattgttctgaaaaatgaccaccaggaagacttctggaaggtgaaagaattcctccacaatcaaggcaagcagaagtacactctgccactataccatgccatgatggggggttcagaagtggcccagactctcgcaaaggagacgttcgctagtactgcatcccagttacattctaacgtggtcaattacgtccagcagatcgtcgcacccaagggctcatag

SEQ ID NO: 108624 - DNA, 1035 bp, synthetic construct
  misc_feature 1..1035: note = Description of Artificial Sequence: Synthetic coding sequence
  source 1..1035: mol_type = other DNA
atgacttgttgctcctgtacctcactctccgccctcctcgatttttgggcggaagtctgctggctcgcgcccgagcaaacagccggaaaaaagaaaccttttgtatacacccaaggacaggccgtgcttaaccgggcattcttcccgtgcttcgatacacctgccgtgaagtataagtattcagccttaattgaggtacctgacggatttaccgcagttatgtctgcctcaacatgggaaaaacgaggtcccaataaattcttttttcagatgtgccagcccattccttcatatctcattgccctggcgatcggggatttggtttcagcggaggtgggacctcgatccagggtgtgggctgaaccatgcctgattgatgccgccaaggaggagtacaacggggtgattgaggagttcctagccactggcgagaagttatttggtccatacgtgtggggacggtatgatctgctgttcatgcctccctcctttcccttcggcgggatggagaacccctgcctgacttttgtaaccccttgtctgcttgccggtgacaggtctttggcagacgtaattattcacgaaatctcccactcttggttcggcaatttggtgacaaacgccaattggggcgagttctggctgaatgaaggctttacaatgtatgctcagaggcggatcagcactattctcttcggagcggcgtatacctgtctagaggccgcgaccggtcgagcactcctgagacagcatatggacatcaccggcgaggaaaacccccttaataagttacgcgtgaagatcgagccaggcgtggatccagacgacacgtacaacgagaccccatatgaaaagggcttctgcttcgtctcttacttggcccaccttgtgggagatcaggatcagttcgacagtttcctaaaagcttatgttcacgaatttaagtttagatcaatcctggctgatgacttcctggacttctacctcgagtatttccctgagctgaaaaaaaaaagggttgatatcattccatag

SEQ ID NO: 108625 - DNA, 507 bp, synthetic construct
  misc_feature 1..507: note = Description of Artificial Sequence: Synthetic coding sequence
  source 1..507: mol_type = other DNA
ctgatcgatgccgcaaaggaggaatataacggtgtgatcgaagagttcctggccactggagagaagctgtttggcccatacgtgtgggggagatacgatttactctttatgcccccttcatttcccttcgggggcatggagaacccatgcctaacattcgtgacaccatgccttttggcaggggacagatccttagcagacgtgattattcatgaaatctctcattcatggtttggcaacctagttaccaatgcaaactggggggagttctggctcaacgaaggctttactatgtacgctcagagacggatctcaaccatcctgtttggcgtggacccggatgacacctataacgaaaccccctatgagaaggggttttgcttcgtgtcttacctggcgcatcttgtgggggaccaagatcagttcgactctttcctgaaggcatacgtgcacgagtttaagtttcgttccatcctggctgacgacttcctggacttttatctgtag

SEQ ID NO: 108626 - DNA, 1485 bp, synthetic construct
  misc_feature 1..1485: note = Description of Artificial Sequence: Synthetic coding sequence
  source 1..1485: mol_type = other DNA
atgagtgccacaagaagcgcgtacatggaagaagagggtgtgttccacttccacatggagcatcccgtgcctgcttatctggtggctctggttgccggcgacctcaagccggctgatatcggcccaaggtcccgcgtctgggctgaaccttgcctgctgccaacggctaccagcaaactttctggcgccgttgaacagtggttatcggccgcagagcgattgtacggtccatacatgtggggtaggtatgacatcgtgtttctgcctcccagttttcccattgtggcgatggaaaacccttgtctgacttttataatctcctctatcctcgaatccgacgaatttctggtgatagatgtcattcatgaagtggcacacagttggtttgggaacgcagtcactaacgccacttgggaagaaatgtggctgagtgaggggctcgctacttacgctcagcggcgcattacgactgagacatatggggctgccttcacgtgcctagagaccgcgttccgactggatgcgctgcatcgacagatgaaactcctcggcgaggattctccggtcagcaagctccaggtgaaactagaaccgggcgtgaaccccagccacttaatgaatctttttacttatgaaaagggctattgtttcgtatattacctgtcccagctgtgcggggacccgcaacggtttgacgattttctgagagcatacgtcgaaaagtacaaattcactagcgtagtggctcaggatttgctcgattcattcctcagttttttcccagaactgaaagagcagagtgtggattgccgggccggccttgaattcgagaggtggctgaatgctacaggaccgccgctggctgaacctgatcttagccaggggtctagcctcactcgccctgttgaggccttattccagctttggacagctgaacccttggatcaggctgccgcctccgccagtgctattgatatttccaaatggagaacctttcagaccgcactattccttgaccgactgctggatggctccccgctccctcaggaggtcgtcatgtccctgtcaaaatgttactcatcactgctggattccatgaatgcagaaattaggataaggtggctgcagattgtggtaaggaacgattattaccccgatctccacagagttaggaggttcctcgaatctcagatgagcagaatgtatacaatccccctttatgaggacttatgcacaggagctttgaagagcttcgccctggaggtcttttatcagacacaagggcggctgcatcccaatctaagaagggcaattcagcagatactgagccagggactgggcagctctaccgagcccgcgtccgagccatccacagagttggggaaggcagaggctgacactgacagcgatgctcaggcgctgttgctcggggacgaagccccttcaagcgcgatctcattgcgcgatgtcaacgtgtccgcatag

SEQ ID NO: 108627 - DNA, 1236 bp, synthetic construct
  misc_feature 1..1236: note = Description of Artificial Sequence: Synthetic coding sequence
  source 1..1236: mol_type = other DNA
atggaggtcaacccgcccaagcaggagcacctcctggctctcaaggtgatgcggctgacaaagcccaccctcttcacgaatatccccgtgacatgtgaggagaaagacctgccaggtgacctgtttaaccagctgatgagggatgacccctccaccgtgaacggtgccgaggtcctgatgcttggggagatgctgacactccctcagaattttggaaatatcttcttgggcgagacgttctcctcctatatatccgtgcacaacgactcaaatcaggtggttaaggatattctggtaaaggcagatctgcagacatcgagccagagacttaacctcagtgcctcgaatgccgctgtggctgaactgaagccagactgctgtatcgacgacgtgatccatcacgaggtaaaggaaattggaacccatatcctcgtgtgcgctgtgtcctacacaacacaggccggcgagaagatgtatttccggaagttctttaaattccaggtcctgaagccactggacgtgaagaccaaattttataacgctgagaccgatgaggtgtttctggaagctcagatccagaatatgacaacctctcccatgtttatggagaaggtgagcttagagccaagcattatgtacaacgtcaccgagctcaatagtgtctcccaggccggcgagtgtgtcagtacttttggttcccgggcatacctgcagccaatggacacccgccaatacttgtattgccttaagccgaagaacgagttcgccgagaaggctggtatcataaaaggcgttacggtaattggtaaattagatatcgtctggaaaactaacttaggcgaacgtggtagactgcaaacctcccagctgcagaggatggccccaggctatggcgacgtgcggctctccctggaagctatccctgacaccgtgaacttggaagaaccattccacatcacttgtaaaattaccaattgctccgaacggaccatggacctagttttggagatgtgcaacaccaatagcatacattggtgcggaattagcggtaggcaactggggaaactgcacccgagctcgagcctctgcctggccctgacattattgtctagtgtgcagggtttgcaatccataagtgggctccggctcaccgatactttcctcaaacggacctacgagtacgatgatattgctcaggtgtgtgtggtcagttccgctataaaagtagagtcttag

SEQ ID NO: 108628 - DNA, 1365 bp, synthetic construct
  misc_feature 1..1365: note = Description of Artificial Sequence: Synthetic coding sequence
  source 1..1365: mol_type = other DNA
atgcacgtcggccatctgcggagtaccatcataggggagtctatctctaggcttttcgagtttgccggctatgacgtgctccggctcaaccacgttggcgactggggcacacaattcggaatgttgatcgctcacttgcaggataagttcccagactatctgacagtgtccccacccattggagatctccaggtgttttataaagagagcaagaagagattcgatacagaggaagagtttaaaaaacgcgcttatcagtgtgtggttttactccagggcaagaaccccgacataaccaaagcatggaaattgatctgcgatgtttcaaggcaggagctgaataaaatatatgatgccctggacgtctccctgatcgagcgtggagaatctttctatcaagatcggatgaatgatattgttaaagaatttgaagatcgaggattcgtgcaggtggacgatggccggaagattgtcttcgttcctggatgttcgatacctctcacaattgtgaagtctgatggcggctatacctacgatacgtccgatctagccgccattaagcagaggctgttcgaggagaaggccgacatgattatctacgtggtggacaacggccagtcagtacactttcaaaccattttcgctgccgctcagatgatcggctggtatgatcctaaagtgacccgcgtctttcacgcaggcttcggcgtggtgcttggcgaagacaagaaaaaattcaagacccgctccggagagaccgtgaggctgatggatcttctgggagaaggtctcaagcgttccatggacaagttgaaggagaaagagagagataaagtgttgaccgcagaagagctcaacgctgctcagacgtccgttgcttatgggtgcatcaagtatgccgatctgtctcataaccgtctgaacgactacattttcagcttcgacaaaatgctggatgatagaggaaataccgcggcctacctgctgtacgcttttaccaggataagatcaatagccaggctggctaacatcgatgaggagatgctgcagaaagcagcgagagaaactaagatcctgcttgaccatgagaaggaatggaagctggggagatgcatcctgcggtttcccgaaatcctgcagaagatattagatgacctctttcttcacaccctctgcgattatatctacgagctggcgacagcattcaccgaattttacgatagctgctactgtgtagaaaaggatagacagaccggtaagatcctcaaggtgaatatgtggcggatgctcttatgtgaggccgtggccgccgttatggcaaaagggtttgatatcctaggcataaagccagtgcagcgcatgtag

SEQ ID NO: 108629 - DNA, 618 bp, synthetic construct
  misc_feature 1..618: note = Description of Artificial Sequence: Synthetic coding sequence
  source 1..618: mol_type = other DNA
ttccagagcgtggagtcctctacccgcaagttagatcacatcaatatctgctcaagcaacttccccaagaggagtttcgcactcgttacccaggcgggggttcaatggcacaacctggactctcttcagtcccccccccccgggttcaagcggtttccatgcctaagtctcccatcctcttgggactgcagagaagtcgctgacttccagctgagcgtggactcattacttgagaaggataacgatcattccagacccgatattcaggtgcaagctaagagactggcagaaaagctccgctgtgatacggtggtctcagaaatcagtaccggacagcggaccgttaactttaaaataaatagggagttactgaccaaaaccgtgctgcagcaggtgattgaagacggcagcaaatatggtctgaagtccgagctattctctggactgccgcagaagaagattgtggtggagtttagctcccccaacgtggcgaagaagtttcacgtcggccatttgcggtccaccatcatcggtaacttcatagctaacctgaaagaagctctcggacatcaggtgatacggataaactatctgggcgattggggcatgcagttctag

SEQ ID NO: 108630 - DNA, 1737 bp, synthetic construct
  misc_feature 1..1737: note = Description of Artificial Sequence: Synthetic coding sequence
  source 1..1737: mol_type = other DNA
atggcttgtggtttcaggcgagccatagcttgccagttgtccagagtcctgaacctccccccggagaacctcattaccagcatcagcgcggtccccatctcgcagaaagaggaagtcgccgactttcagttatctgtggattccctgctggagaaggacaatgaccattctcgtccagatatacaggtgcaggcgaaacgcctcgccgaaaagcttcggtgcgacaccgtggtgtccgagatctctacgggccagaggacggtaaattttaagatcaatcgcgagctcttaactaaaaccgtgctgcagcaagtgattgaggacggttcaaaatacggcctcaagtctgaactgttttctggcttgccacagaaaaagatcgtcgtggaatttagctcacctaatgttgcaaagaagttccatgtggggcacttgagaagcacaatcattggtaacttcatagctaacctgaaggaagcacttggacaccaggtcatcagaataaattacctgggggactgggggatgcagttcggccttctcggcacaggctttcagctgttcggctacgaagaaaagctgcagtccaatccactgcagcatctgttcgaggtttacgttcaagtaaacaaggaggccgcagatgacaagagtgtcgccaaggcagcccaagagttctttcaaaggctggagctgggtgacgtgcaggcccttagcctttggcaaaaatttcgggaccttagcatcgaagaatatatacgtgtttacaagcgattaggcgtgtactttgacgaatattcaggggaaagcttttacagagaaaagtcccaggaagtactcaaactgctagagtcaaagggactgctgttaaagacaattaaaggaacggccgtagtggacctgagcggcaacggggatccgtcctctatctgtacggtgatgcggtctgacggcacctctttgtacgccactagggatttggccgcggcaattgatcggatggacaaatataacttcgacaccatgatctatgtcaccgataagggtcagaaaaagcatttccaacaggtttttcaaatgctgaagataatgggctatgactgggcggagcgttgccagcatgttccgttcggagtggtgcagggtatgaaaacacgtcgcggggatgtgacttttttggaggatgtgttgaatgaaatccaactgcgaatgttgcagaacatggcttccatcaaaaccacgaaggagctgaaaaacccccaggagactgctgagcgggtgggattagccgccttaatcattcaggattttaagggtctcctgttgagcgactataaattctcatgggatcgggtgtttcagagtcggggtgatacgggtgtcttcctacagtatacccacgccaggttacactctctggaagagacgttcggctgcggctatctgaacgatttcaatacggcatgtctacaagagccccagtccgtgagcattttacagcatctccttaggtttgatgaggttttatacaagagcagccaggacttccagccgcgccatatcgttagttaccttcttactctgagtcacctggcggcagtggcacataaaactttgcagattaaggacagtccaccagaggttgccggcgccaggctccatctgttcaaagcggtcaggagcgtgcttgccaatggcatgaagctgctcgggataacaccagtctgtaggatgtag

SEQ ID NO: 108631 - DNA, 621 bp, synthetic construct
  misc_feature 1..621: note = Description of Artificial Sequence: Synthetic coding sequence
  source 1..621: mol_type = other DNA
taatttcagagtgtcgaaagctcaactaggaagctggaccacataaacatctgcagctctaacttcccaaaacgctccttcgccctggtgacacaggcaggtgtccagtggcataatctggattccttgcagtcgccacctccaggatttaagcggtttccttgcctgtctttaccaagctcttgggactgcagggaggttgccgatttccagctgtctgtggacagcttgttagaaaaagataacgatcactctaggcccgatattcaggtgcaggcaaaacggctggcagagaaactgagatgtgacaccgtcgtgagtgaaatcagcacaggccagcggaccgtcaactttaagatcaacagagagttactgactaagaccgtgttgcagcaggtcatagaggatgggtccaagtatggcctgaagtctgaactcttcagcgggctgccacaaaaaaaaatcgtggtggaattctctagccctaatgtggcaaaaaagttccatgtcggccacctgcgatctaccataataggcaactttatagccaatcttaaggaagccctggggcatcaggttatcaggattaactatttgggtgattggggcatgcagttttag

SEQ ID NO: 108632 - DNA, 1482 bp, synthetic construct
  misc_feature 1..1482: note = Description of Artificial Sequence: Synthetic coding sequence
  source 1..1482: mol_type = other DNA
atgagtgtggatatgaatagccagggatccgatagtaacgaagaggattatgatccaaactgcgaggaggaggaggaggaagaggaggacgatccaggtgacatagaagattattatgtaggcgtggcttctgatgtggaacaacaaggcgccgacgccttcgacccagaagagtatcagtttacatgcctcacatacaaggagtcagaaggagccctgaacgagcacatgacaagcctggcatctgtgctcaaagtgagccacagcgttgccaagttgatactggtgaattttcattggcaggtctcggagatccttgatcggtacaaatccaacagcgcacagctcctcgtagaagcccgggtacagccaaatccatccaaacatgtgccaactagtcatcccccccaccattgcgccgtgtgtatgcaatttgtgagaaaggagaacttattgtcccttgcctgccagcatcagttctgtcggagttgttgggaacagcattgctcagtactggtgaaggacggtgttggcgtgggcgtctcatgcatggctcaggactgtcccctgaggacgccggaagatttcgttttcccactacttcccaacgaggagctgcgggagaagtatcggagatacttgtttcgcgactacgtggagtcccactaccagctgcagctatgcccaggtgcagactgtcccatggtaatcagggtgcaggaacctagagccagacgggtacagtgtaatcgctgtaatgaggtgttttgcttcaagtgcagacaaatgtaccacgcgcctacagattgcgctacgataaggaaatggctgacaaaatgcgccgacgattccgagacagcaaactatatttccgcccacactaaggattgccccaaatgtaacatttgtattgaaaaaaacgggggctgtaatcatatgcagtgtagcaaatgcaagcacgatttttgctggatgtgtcttggggactggaagacccacggctccgaatactatgagtgtagccgatacaaagagaaccccgatatcgtaaatcaatcccagcaagcgcaggcaagggaagccttgaagaagtaccttttctattttgagcggtgggagaaccataacaagtcactacagttggaagcccagacataccagcggattcacgagaaaattcaagaaagggtaatgaataatctggggacatggattgactggcagtacctgcagaacgcagctaagctcctcgccaagtgcaggtacacccttcaatacacttatccatatgcctattacatggagagtggaccgcgaaagaaactctttgaataccagcaagcccagcttgaagccgaaatcgaaaatctcagctggaaggttgagcgcgccgattcctacgacagaggcgacctggagaaccaaatgcacattgcggagcagcggcggcgaacgctgctgaaagacttccacgatacctag

SEQ ID NO: 108633 - DNA, 954 bp, synthetic construct
  misc_feature 1..954: note = Description of Artificial Sequence: Synthetic coding sequence
  source 1..954: mol_type = other DNA
ggcataacaggcgtgagttgtatggcccaggactgtccacttcgcactcctgaggactttgtttttccccttctgcctaatgaggagctgcgggagaagtatcgaagatacctgttcagagattatgtggagtcgcactaccagctgcagctgtgtcctggcgccgactgtccaatggtgataagggtccaggagccccgtgctcggagggtgcaatgcaaccgttgcaacgaagtgttttgcttcaaatgtcgccagatgtatcacgcgccaactgattgtgccacaatcagaaagtggctgaccaaatgcgctgacgactctgagactgcaaactatattagcgcgcatacaaaggactgccccaaatgtaatatatgtattgagaaaaatgggggatgcaatcatatgcagtgcagcaaatgtaagcacgacttttgctggatgtgcctaggggactggaagacccatggatcagagtactacgaatgtagccgctacaaagagaatccagacatcgttaaccaaagccagcaggctcaggcacgagaggctcttaagaaatatctcttttatttcgaaagatgggaaaaccacaataagagcctccagctcgaagctcaaacatatcagcggattcatgagaaaatacaggagagggtcatgaacaacctaggaacctggatcgattggcaatatctccagaatgcagcaaaactattggcaaagtgtcggtacacgctgcaatacacctacccctatgcatactatatggagagcggccccaggaagaagttgttcgagtaccaacaggcccagttggaagctgagattgaaaatctgtcttggaaagtcgagagagccgactcttatgataggggcgacctggagaaccagatgcacatcgccgaacaaagacgccggacccttctgaaggattttcatgacacatag

SEQ ID NO: 108634 - DNA, 1233 bp, synthetic construct
  misc_feature 1..1233: note = Description of Artificial Sequence: Synthetic coding sequence
  source 1..1233: mol_type = other DNA
agtgtagatatgaacagtcagggatcagattcgaacgaggaagattacgaccctaattgtgaagaagaggaggaagaagaggaagacgatcccggcgatatagaagattattacgtgggagtcgcctccgatgtggaacagcagggggctgacgccttcgatcctgaagagtatcagttcacatgtttgacctataaagaatcagagggggccctgaacgaacatatgacctcacttgcgagcgtgttaaaagtgtcacactccgttgctaagcttatcctggttaactttcactggcaagttagcgagatcctggatcggtacaaatccaactcggctcagttactggttgaggcgcgcgtccagcctaacccatcaaagcacgtacccacatcgcaccccccacatcattgtgctgtgtgcatgcaattcgtaaggaaggagaatctgctgtcactcgcttgccagcaccagttttgtcggagttgttgggagcagcattgtagcgtcctcgtgaaggatggtgttggcgttggtgtgtcttgtatggcccaagactgcccgctgcggactcccgaagactttgtatttcctcttctccctaatgaagagctgcgggagaagtataggcggtatctcttccgcgactatgtggaatctcattaccaattacagctgtgtccaggagctgactgccccatggtgatcagagtccaggaaccccgggcaaggcgagtccagtgcaaccggtgtaacgaggtattctgctttaagtgtcggcagatgtaccacgccccaacagactgtgccaccatccgtaagtggctgactaaatgcgctgacgacagtgagacagcaaattacatttctgcccacacgaaagattgcccgaaatgtaatatctgtatcgaaaagaatggtggctgcaaccatatgcagtgtagcaaatgtaaacacgacttctgttggatgtgcctcggtgactggaaaacacacggttctgagtactacgaatgtagcaggtataaggagaacccagatatcgtgaatcagtcacaacaggctcaggcccgggaggccctgaaaaaatatctgttttacttcgagcgattagaaaacctgtcgtggaaggttgagcgcgccgacagctacgatcggggagacctcgaaaaccaaatgcacattgcagaacagcgcaggaggacattgctgaaagactttcatgatacctag

SEQ ID NO: 108635 - DNA, 1482 bp, synthetic construct
  misc_feature 1..1482: note = Description of Artificial Sequence: Synthetic coding sequence
  source 1..1482: mol_type = other DNA
atgtcggtcgatatgaatagccagggaagtgacagcaacgaggaagactatgatccaaactgtgaagaagaggaagaggaggaggaggacgaccccggagatattgaggactactatgtcggggtggccagcgatgtggaacagcagggggcagatgctttcgaccccgaggaatatcaattcacttgcctaacctataaggagtctgagggggccttgaacgagcacatgacctcactggcgagcgtgctcaaggtgtctcactcagtggccaagttaattttagtgaatttccattggcaagtcagcgagatcctcgatagatacaagagtaattcggcccaactgctggtggaggctcgggttcagccaaatccgtccaaacacgtgccaacctctcatccaccccatcactgtgctgtctgtatgcaattcgtaaggaaggaaaacctgctgtcactggcttgccagcatcagttttgtagaagctgttgggaacagcactgctcagtgcttgtcaaagacggtgtcggggttggcgtctcctgtatggcacaggactgtccactacgtactcctgaggatttcgttttcccattactgcccaatgaagagctccgggagaaatataggcggtatctgtttcgggattatgtggaaagccactaccagctacaactgtgccccggtgccgactgccctatggtgatcagagtgcaggagccgagagctcgccgggtacagtgtaaccggtgtaacgaagtcttctgcttcaaatgcagacagatgtatcatgctcccactgattgcgccacaatccggaagtggctaacaaagtgtgctgacgatagtgagactgccaattatatctccgctcatactaaggactgcccaaagtgtaacatttgcattgaaaagaatggcggctgtaaccatatgcagtgttctaaatgcaaacatgatttctgctggatgtgtctcggagactggaaaacacacggctccgaatattacgaatgcagtcgctacaaggagaatccagatatagtcaaccaatcacaacaagctcaggcccgggaggcactgaagaaatacctcttttattttgagagatgggaaaatcacaataaaagtctgcagctggaggcacaaacctaccagcgcatacacgagaagattcaggagcgtgttatgaataacctgggaacgtggattgattggcaatacttgcaaaatgctgccaaattgctcgccaagtgccgatacactctgcagtatacctacccatacgcctattacatggagagcggtccccgaaagaagctctttgaatatcagcaggcccagctggaagcggaaatagagaacttgtcttggaaggtggaacgcgcagattcctatgatagaggcgacctggaaaatcaaatgcatatcgccgaacagcgcaggcgcactctcttaaaggacttccatgatacctag

SEQ ID NO: 108636 - DNA, 1584 bp, synthetic construct
  misc_feature 1..1584: note = Description of Artificial Sequence: Synthetic coding sequence
  source 1..1584: mol_type = other DNA
ctcaggcgggcggccagcggtcccctcgcaccgtctctcccccctcccaggcctccccgtaggcaccagcccagcaatgccaaccgcagatcctgggggggagcggccgcccgcggtgcaggggccagacctgcttccgggcatcagcctgaacctgaacgagagcccggtccccgccgtcccagaccactccctgccagcgcatccgtccgacgcgctccagctagaagagcgatggattcggacgagggctacaactatgagttcgtgaacgaggtaatccaaaacccagcgaccattactcgcattctcctgagccacttcaattgggataaggaaaaactcatggagcggtattttgatgggaatctggagaaactattcgcggaatgtcatgttatcaatccatccaagaaaagccgcactcgccagatgaacacccgcagcagcgcccaggacatgccctgccagatctgctacttaaattatccaaatagttactttacaggactggaatgtgggcacaaattctgcatgcagtgttggtccgaatacttgaccacaaagataatggaggaggggatgggccagacaatttcctgccccgcgcacggctgcgatatcttggtggacgacaacaccgtgatgcgcctgatcactgactcgaaggtgaagctgaagtaccaacaccttattaccaactcttttgtggagtgcaatcggctattgaagtggtgcccagcaccagactgccatcatgttgttaaagtacagtatcccgatgccaagcccgtgcgctgtaaatgcgggcgccagttctgctttaattgtggcgagaattggcacgatccagtgaaatgcaagtggctgaagaagtggattaagaagtgtgacgacgattcagaaacttccaactggattgcagccaacaccaaagagtgtcccaagtgtcatgttaccatagagaaggacggcggctgcaatcacatggtttgcaggaatcagaactgcaaggcagagttctgctgggtctgtctaggaccttgggagccacatggatcagcttggtacaattgtaatcggtacaacgaggatgacgcgaaagccgcccgcgatgctcaggaacggtcgcgcgccgctctgcaacggtatctcttctattgcaaccggtacatgaatcacatgcagagccttcgattcgagcataaactgtacgcgcaggtgaagcagaagatggaggagatgcagcaacacaatatgagctggattgaggtgcaattcttgaaaaaagccgtcgacgtgttgtgccagtgccgggcgactctgatgtatacatatgttttcgccttctacttgaagaaaaacaatcaatctataattttcgagaacaaccaggctgatctggaaaacgcaaccgaagtcctatccggctacctggaacgggacatttctcaagatagtctgcaggacattaagcaaaaggtacaagacaagtataggtattgcgagtcacggcgtcgggtgttactccagcatgttcatgaaggctacgaaaaggacttgtgggaatatatcgaagattag

SEQ ID NO: 108637 - DNA, 1674 bp, synthetic construct
  misc_feature 1..1674: note = Description of Artificial Sequence: Synthetic coding sequence
  source 1..1674: mol_type = other DNA
atggatagtgacgagggttacaactacgaatttgacgaggatgaggagtgcagcgaggaggactctggcgccgaggaggaagaggacgaagacgacgacgagcccgatgacgatacgctggatttgggagaagtagaattggtggagcccggtttaggggtgggcggcgaacgagatggcctgctctgtggcgaaactggaggggggggagggagtgccctgggccccggcgggggtggaggggggggaggcggcggcgggggagggggtcctggccatgagcaggaggaggactacaggtacgaggttctgacagccgaacagattctgcaacatatggtggagtgtatacgcgaagtcaacgaggttatccagaaccccgctaccatcacccgaatcctcttatcccattttaattgggataaagagaaactcatggagagatactttgacgggaaccttgagaagttgtttgcagaatgtcacgtgataaatcctagtaaaaaatccagaacccgtcagatgaacacgcgctccagcgcacaggatatgccttgtcaaatttgttaccttaactacccaaactcatactttaccgggctcgagtgcggacataagttctgtatgcagtgctggtctgagtatctcactaccaaaataatggaggagggaatgggccaaactatctcgtgtcccgcccacggctgtgatatccttgtggacgataatacggtgatgcggctgatcacagattctaaggtcaagctcaaataccagcaccttatcaccaactcctttgtggagtgcaaccgcctattgaagtggtgccccgcaccagattgccatcacgtcgtgaaggtgcaataccctgacgcaaaaccagttagatgtaagtgcggacgacaattttgttttaattgtggagagaattggcacgaccccgtgaaatgtaaatggctgaaaaaatggataaaaaagtgcgatgatgacagcgaaacttccaactggatcgctgctaacacaaaggagtgtccgaaatgccacgttacaattgaaaaggacggaggctgtaatcacatggtgtgccgcaatcaaaattgcaaagccgagttctgttgggtctgcctgggaccgtgggaaccccatggatccgcatggtacaattgtaatcgctacaacgaagatgatgcaaaggccgctagggacgcacaggagagaagccgggccgccctccagcggtacttattctactgtaatcgttacatgaaccatatgcagtctctaaggtttgagcataagttatacgcgcaggtgaagcagaaaatggaagaaatgcagcaacataatatgtcatggattgaggtccagttcctgaagaaagctgtggatgtgttatgtcagtgcagagccaccctgatgtacacgtatgtcttcgctttttatctgaaaaaaaacaaccagagtattatcttcgagaataaccaggcagacctagagaatgcgacggaagttctttcgggctacctggaaagggacattagtcaggattccttacaggacataaaacaaaaggtgcaggataagtaccggtactgcgaaagtcggagaagagtgttgcttcaacacgtacatgaggggtacgagaaggatttgtgggagtatattgaagactag

SEQ ID NO: 108638 - DNA, 1689 bp, synthetic construct
  misc_feature 1..1689: note = Description of Artificial Sequence: Synthetic coding sequence
  source 1..1689: mol_type = other DNA
atgtcaaaccagtaccaggaggagggatgttccgagcgccccgagtgcaagagcaagagccctacactgcttagctcatactgtattgacagcatcctggggagacggtctccttgcaagatgcggctcctgggagctgcacagtcccttcccgccccacttacatctagggctgacccggagaaagcagtacaggggagccccaagagttcatctgcccctttcgaagctgaactccaccttcccccgaaattgcggaggctctatggtccaggaggaggcaggctcttgcagggagcagctgcggccgcggccgctgctgctgcagcagctgctgctgcggctaccgcaacagctggcccgagaggagaagccccccctccaccaccccctaccgcccgccctggcgagcggcctgatggcgcaggcgctgctgcagccgcggcggcggctgctgccgcagcatgggacacacttaagatctctcaggccccacaggtctctattagccggtccaagtcataccgagagaacggcgcaccattcgttcctccaccaccggccctggacgaactcgggggaccaggaggcgtgactcatccagaggagcggctgggcgttgccggcggacctggatctgccccagctgctggtgggggaaccggaacagaggatgacgaagaggagctcctggaggacgaggaagacgaggatgaagaggaagagttgctggaagacgatgaagaggagctattggaagatgacgcccgcgccctactcaaagagccgcgtcgctgtcctgtggctgcaaccggcgccgttgccgctgctgcagccgcggctgtggctacggaggggggggagctcagccccaaggaagagctgctgctgcatcccgaagatgctgaaggtaaggatggggaggatagtgtgtgtttatctgcggggtcagactcagaagagggattgctcaagagaaagcagaggcgctaccggaccacctttacctcctatcagttggaggagttagagcgagccttccagaagacccactatccagacgtcttcacacgcgaggagctggccatgcggcttgatctaacagaagcgagagtgcaggtgtggtttcaaaatcggagagcaaagtggaggaaacgcgagaaggctggagcccagacccaccctcccggtctgccctttccagggcccctctcagccacacacccccttagtccctatctagacgcctcaccttttcctccccaccatccagctctcgatagtgcgtggacggcggccgctgcagctgccgccgctgcatttccgtccctaccaccacccccgggatccgcttccctgcccccctcgggtgcacccctgggattaagtactttcctgggagccgctgtctttagacaccccgcatttatttcgcctgccttcggaaggctctttagtaccatggcccccttgacgtctgcttctactgccgcggctctactgcgacaacctacccctgccgtcgagggcgccgtagcctccggagccttggccgacccagctacagccgccgccgaccgtagggcttcttccattgcggcgttgagactcaaagctaaggaacacgctgcgcagctcactcagctaaacattttaccggggaccagcacaggcaaggaggtctgctag

SEQ ID NO: 108639 - DNA, 1032 bp, synthetic construct
  misc_feature 1..1032: note = Description of Artificial Sequence: Synthetic coding sequence
  source 1..1032: mol_type = other DNA
atgggtgggcctcgcggggcaggatgggttgcagccgggctgctgctgggcgctggtgcctgctactgtatctacagacttaccagaggccggagacggggagacagggagctggggattcgcagcagtaagtcagctggcgcccttgaggagggcaccagcgagggtcagctgtgtggacgcagtgcgcggccacaaacagggggcacttgggagagccaatggtcaaagacatcccagcccgaggatcttaccgatggaagttacgacgacgtgctgaatgccgagcagttgcaaaagctactgtacctgctcgaaagcacggaggaccccgttataatagagcgcgccttaattactctggggaataacgcagccttctctgttaaccaggcgatcatacgcgaactaggtggcatccccatcgtggctaacaagatcaatcacagtaatcagtcaatcaaagagaaggcactgaacgctctgaacaacctctccgtgaatgtcgagaatcagattaagatcaaaatttacatctcccaggtgtgtgaggatgtcttttcaggaccccttaactctgccgtacagctggctggcctgacgctattgacaaacatgactgtcaccaacgaccatcagcatatgctgcactcatatattaccgatctgtttcaggtcctgctcaccggcaatggaaatactaaagtgcaagtgttaaagctactgctgaacctgtcggaaaatcctgcgatgaccgaaggattgctccgcgcccaggtggacagtagtttcctttccctgtacgacagtcacgttgctaaggaaatcctgctccgagttctgaccctattccagaatatcaaaaactgcctcaagatcgagggccatctggccgtgcagccgacatttacagaaggcagccttttttttctgttacatggtgaggaatgcgcccagaaaatccgtgcactggttgaccaccatgacgccgaagtcaaggaaaaagtcgtgaccatcatccccaaaatctag

SEQ ID NO: 108640 - DNA, 855 bp, synthetic construct
  misc_feature 1..855: note = Description of Artificial Sequence: Synthetic coding sequence
  source 1..855: mol_type = other DNA
atgggaggaccccggggagcaggctgggtggccgcaggcctgcttctgggggccggagcttgctattgtatttacagactgactcgtggcaggaggaggggcgaccgtgaattggggatacgctcctctaaaagtgctgaggaccttacagacgggtcttatgatgatgtgctgaatgcagagcagctgcagaagttgctatacctactggaatctacggaggatcccgtgatcatagaaagagctctaattacgctggggaacaacgcagcattttcggtaaatcaggccattatcagagagctgggaggcattcccatcgttgcaaacaaaatcaatcactctaaccagagtattaaagagaaggccttgaatgccctcaataatctttcagtcaacgtggaaaaccagattaagataaaaatatatataagtcaggtatgcgaggacgtcttctcaggcccactgaactccgccgttcagttggccggtctgactctgctcacaaacatgactgtaacaaacgatcaccagcatatgctccactcttacatcaccgatttgttccaggttctccttaccggaaatgggaataccaaagtcgactcgtccttcttgtcgctatacgatagccatgtggcaaaggagatacttttgagggtgttaaccctatttcagaacattaaaaattgcctaaaaattgaaggccatctggccgtgcagccaacgttcacagaaggtagccttttctttctactccatggtgaggagtgcgcccagaagattcgagccctcgtcgatcaccacgacgcggaagtcaaggaaaaggtggttacaattataccaaagatttag

SEQ ID NO: 108641 - DNA, 855 bp, synthetic construct
  misc_feature 1..855: note = Description of Artificial Sequence: Synthetic coding sequence
  source 1..855: mol_type = other DNA
atggggggtcctaggggcgccggctgggttgccgccggactgctcttgggagccggggcgtgctactgtatatacaggctgacccggggacgaagaagaggggaccgggagctgggtatccggagctcgaagtctgcgggtgctttggaagaaggcaccagcgaaggacagttgtgcggcaggtccgcccgtcctcagactggcggcacctgggaatctcagtggtctaagacctctcagccggaggatcttactgatggtagttacgatgacgttctcaacgctgagcagctccaaaagctcctgtatctcctggaatctacggaggaccccgtcataattgaacgagccctgatcacgctgggcaacaacgctgcattctccgttaaccaagccatcattcgcgagttaggagggattcctatcgtcgctaacaagataaaccactctaaccagtccatcaaggaaaaggctttgaacgcgcttaataatttatcagtcaacgtggagaaccagattaagattaaggtgcaggtcctgaaattgctgctgaatctgtccgaaaaccctgccatgactgaaggactgcttcgagcccaggtagactcttcctttttatccctctatgattcccacgtcgctaaggagattctgctacgcgtgctgaccttgtttcaaaatatcaaaaattgcctcaaaattgaaggccaccttgccgtgcaacctaccttcaccgaaggatctttgttctttctcctgcacggcgaagaatgtgcccagaaaattagagccctggttgatcaccacgacgccgaagtgaaggagaaggtggttaccattatccctaagatctag

SEQ ID NO: 108642 - DNA, 927 bp, synthetic construct
  misc_feature 1..927: note = Description of Artificial Sequence: Synthetic coding sequence
  source 1..927: mol_type = other DNA
atgggaggcccaaggggcgcgggttgggttgctgcggggctactcctcggtgctggagcatgttactgcatctaccggcttacgcgcggcagacggaggggtgacagagagttgggaatccggtccagcaagtccgcggaagatctgactgacggttcctatgacgacgtgttaaacgccgagcagctgcagaagctgctttaccttttggagtctactgaggacccggtcatcatcgagagagctctgataaccttggggaacaacgctgctttttctgtgaaccaggcgattattagagaactcgggggcatccccattgtcgctaacaagattaaccattcaaaccagtccatcaaagagaaggcactgaacgcacttaataacttgagcgtgaatgttgagaaccaaattaaaattaagatctacatctcacaggtgtgtgaggatgtgttctcaggaccccttaacagcgctgtgcagctcgcgggcctcacactgctgaccaacatgaccgtcactaatgatcatcagcacatgctccatagctacattaccgacctcttccaggtactcctgaccgggaatgggaacactaaggtccaggtgcttaaattgctgctgaatttgtctgagaaccccgctatgaccgagggactgctgagggctcaggtcgatagttcctttttgagcctttacgactcccatgtggccaaggagattctcctcagagtgctgacattgtttcagaacattaaaaattgcctaaagatcgaggggcacctagcagtgcagcctacgtttactgaggggtccctgtttttcctactgcacggtgaggagtgtgcccaaaagatccgagctctcgtcgatcatcacgacgcagaggtgaaggagaaggtcgtgacgatcatccccaaaatctag

SEQ ID NO: 108643 - DNA, 750 bp, synthetic construct
  misc_feature 1..750: note = Description of Artificial Sequence: Synthetic coding sequence
  source 1..750: mol_type = other DNA
atgggaggaccccggggcgctggttgggtggcagctgggctgctcttgggagcaggtgcttgctactgcatctacaggctgaccagagggaggcgtagaggcgacagagagttgggcataaggagcagcaaatctgcggaagaccttacagacggctcctacgacgatgtgctaaacgctgaacagcttcaaaaactgttgtatctcctcgagtccaccgaagatcccgtaataatagaaagggccttgatcactcttggtaacaatgcagccttctccgtcaatcaagcaatcatacgggagttgggaggcattccgatcgtagctaataaaatcaatcacagtaaccagtcgatcaaggaaaaggctctaaacgccctgaacaatttatccgttaatgtggagaaccagatcaagattaaggtgcaagtcctcaaattgctgctgaacctgtctgaaaatcccgcgatgacggagggtttgttgagggcccaagttgattcaagtttcctctctctgtacgacagccacgtagccaaggagatactcctgagagtattgacgctgttccagaacattaaaaactgtctgaagatcgaaggtcacttggccgtgcagcctacttttactgaaggctccctgttcttcttactccatggggaggaatgtgcacagaaaatccgggcacttgtggatcaccacgacgctgaggtaaaagaaaaagtggtgaccatcatccccaagatctag

SEQ ID NO: 108644 - DNA, 678 bp, synthetic construct
  misc_feature 1..678: note = Description of Artificial Sequence: Synthetic coding sequence
  source 1..678: mol_type = other DNA
atgggaggcccgcgcggtgcaggctgggttgccgcgggcctgctgctcggagctggtgcctgctattgtatatatcgactgacacgtggacgccgacgtggcgatagagagttagggatcaggtcctctaagtccgcagaagacctgaccgacgggtcttacgacgacgtgcttaacgctgagcaattgcagaagttgctgtatttgctcgaatcaaccgaagaccctgtaattatagaaagagctctcatcacgttgggaaacaacgcagctttctccgtaaaccaagctatcattcgcgaactcgggggaattccaatcgtagctaataagattaatcactccaaccagtccatcaaggaaaaagcactgaatgcactgaacaatctctctgtcaatgtcgagaatcagattaaaatcaaggtggactcttctttcctgagcctgtacgatagtcatgtggctaaggaaatactactcagagtgctgaccctatttcagaatataaagaactgcctgaaaattgaaggccacctcgccgtacagccaacattcactgagggctctctcttctttctgctgcacggggaagagtgcgcccagaaaatccgcgcactggtggaccaccacgacgctgaggtgaaggaaaaggtggtgaccatcatccccaaaatatag

SEQ ID NO: 108645 - DNA, 1362 bp, synthetic construct
  misc_feature 1..1362: note = Description of Artificial Sequence: Synthetic coding sequence
  source 1..1362: mol_type = other DNA
atgggacggacgagggaggctgggtgtgtagctgccggagtggtgatcggtgcgggagcatgttattgtgtgtaccgactcgcctggggccgagatgaaaacgaaaaaatttgggacgaagatgaagagtctacggacacatccgaaataggagttgagactgtgaagggagccaaaaccaatgccggggctggcagtggggccaaactccaaggagactctgaagtgaagcccgaggtctctctcgggttggaggactgcccgggcgtgaaagagaaggcgcacagtggtagtcatagtgggggaggactcgaggcaaaggccaaggctttgttcaataccctgaaggagcaggcctccgcaaaagctgggaagggcgcccgggtgggtaccatcagcggcaatcggactttagccccaagcctcccatgtcctggcggaagaggtggagggtgccacccaactaggtcagggagcagagccggaggccgcgcttcaggtaaatccaagggtaaggcccgctctaaaagcacccgcgcacccgcgacgacatggccggttagaagaggtaaattcaatttcccgtacaagatagacgacattctgtccgctcccgacctgcagaaagttttgaacatcttagaacgtaccaatgacccattcatccaggaggtcgcgctggtcacactaggaaataacgcggcttattcatttaatcagaacgcaattcgggagctcggaggcgtgccgatcattgccaagttaattaagaccaaagacccaattatccgggaaaaaacatacaatgctctgaataatctgagcgtgaacgccgagaatcagggaaagattaagacgtatatatcccaggtctgcgacgataccatggtgtgcagactggactccgcggtccagatggcaggtctgagactcctcaccaacatgacggtgaccaatcattaccagcatcttctgtcatactcctttccagacttctttgcccttctgttcctgggcaaccacttcaccaaaatccagattatgaagctcattatcaactttaccgaaaatcctgccatgacgagagaactggtgagctgcaaagtccctagtgaactgatcagcctcttcaataaggagtgggatcgtgagatacttctgaacatcctcactctgtttgaaaatatcaatgacaatataaaaaatgagggcctggcctcctcacggaaggagttctctaggtcatccttattcttcctattcaaggaatccggggtctgcgtgaagaaaattaaggcactggctaatcacaatgatttggtggtgaaggtgaaggtcttaaaggtcctgaccaagctctag

SEQ ID NO: 108646 - DNA, 477 bp, synthetic construct
  misc_feature 1..477: note = Description of Artificial Sequence: Synthetic coding sequence
  source 1..477: mol_type = other DNA
atggtatgtcgactcgacagcgcagttcagatggccggactgaggctcctgaccaatatgactgttacaaaccactaccagcacctgctttcatactcattcccagacttctttgcgctgttattcctgggcaatcactttactaagattcagatcatgaaactcattatcaacttcactgagaatccagccatgacgagagagctggtctcttgcaaagttcccagtgagctgatttccctatttaacaaagaatgggacagggagatactgttgaacattcttacattgttcgagaacatcaacgacaacatcaagaatgaaggcctggcctcgtccaggaaggaattctcccggagtagccttttttttttatttaaggagagcggggtgtgcgtaaaaaagatcaaagcgttggccaaccataacgacttagttgttaaagtgaaagtgttgaaagttctcacaaaactgtag

SEQ ID NO: 108647 - DNA, 1899 bp, synthetic construct
  misc_feature 1..1899: note = Description of Artificial Sequence: Synthetic coding sequence
  source 1..1899: mol_type = other DNA
atgagccgggttcgtgatgctggttgcgttgccgcagggatcgttatcggggccggagcctggtattgtgtgtataaatacacccgagggagggatcagaccaagaaacggatggctaaaccgaaaaacagggccgtagctgggactggagcccgcgcacgggctggactgcgcgccggattcactatcgatttggggtcagggtttagtccaccaactccagtaagagcagaagccgaggatcgcgcacaggacgaagcgtcagccctggatactgtgggcgctgaagcggtggccccagcggcatcgtctgctgaggcgcagagtggggctggaagtcaggcgcaggaggccgatggagcaggggtcgggcccaaggccgagtcagttgtgggggctgcaatggcctcagctattgctccacctcctggggtcactgaagcactgggagctgcagaagctccagctatggcaggcgcccccaaggtggccgaagctccaagggaagctgagacctcccgtgccgctgtgcccccaggtacagtggttcccaccgaagcagccgctccaaccgaagtcaccgagggcccaggggtcgcagcaccaaccaaagtcgccgaggctcctggcgtggcgagccccaccgaggccgcagaagcccctgtgccagcaactcccaccggagcagcagccccgaccggagccgctgagagccctgggacctcaggaagtccccgaacagcagtggtgccgggtactagcgctgccaaaaaggccacaccaggagcccacactggagctattcctaaagccactagcgctacaggcgcggttcccaaaggaggcggtaagggggttacgagatccaggaatggagggaagggcaaaggtaaaaaaagcaaggttgaagtggatgaactcggtatgggcttccggcccggagacggagccgctgccgctgcagctgcctcagctaacggtggtcaggcttttctcgcggaggtaccggacagtgaagagggtgagtcgggttggactgacacagagagtgattccgattccgagcctgagactcagagacgtggtcgaggccgcaggccggtggccatgcagaaaagacctttcccctacgaaatcgacgaaatactgggagtgagagatctccggaaggtgctggctctgctccagaagagtgatgaccccttcattcagcaggtcgccctcttaacactgtcgaataacgccaactactcctgcaaccaagagactattcgcaagctcggcggcctacccattatcgccaatatgattaacaaaacagatccacacataaaggaaaaggctctcatggcgatgaacaacctttctgagaactacgagaaccaaggacgcctacaggtctacatgaacaaggttatggatgatattatggcatcgaatcttaactcggccgtgcaggtggttgggctcaagtttctcactaacatgactatcaccaacgattaccagcaccttctcgtcaattcaatcgccaatttttttcgactgttatctcagggcggcggcaagattaaagtcgaaattctgaaaattcttagcaattttgcggagaacccagacatgctaaagaagctgctcagtactcaggtgcccgctagctttagctccttatataacagttatgttgaatccgagattttgatcaacgccctaaccctgtttgaaatcatatacgataatctccgggctgaggtgttcaattaccgggaattcaataaggggtccctcttctacctctgtactaccagcggggtgtgcgtaaaaaagatcagggcactcgcgaatcaccacgacctgctggtgaaggtgaaggtgatcaagcttgtgaacaaattttag

SEQ ID NO: 108648 - DNA, 1899 bp, synthetic construct
  misc_feature 1..1899: note = Description of Artificial Sequence: Synthetic coding sequence
  source 1..1899: mol_type = other DNA
atgtcacgggtcagggatgcaggatgcgtggccgctggtattgttattggcgccggagcctggtactgcgtttacaagtatacaaggggacgcgaccagacaaagaaaagaatggcgaagcctaagaacagggctgtggcaggcaccggtgcccgcgctagggctggcctgcgcgcaggtttcacaattgacctgggcagtggcttctcgccccccacccctgtgagagctgaggcggaggacagggctcaagatgaagcttcggcgctcgacacagtgggcgcagaggccgttgcacctgctgctagttcagcagaagctcagagcggggccggttcacaggcccaggaggctgacggagccggagtgggccctaaggctgagtccgtcgtcggcgctgccatggcatctgcaattgcccccccgcctggcgtgactgaagccctgggggcggccgaagcacccgcaatggcaggtgccccaaaagtagccgaggctccccgggaggctgagaccagccgggcagccgtgccacccggaacagtggtcccaactgaggctgcagcccccacagaggtgacagagggacccggcgttgccgcccctaccaaggtggcagaagcacctggagtagccagtcctaccgaagccgctgaggcacccgtgccggctacccccaccggtgcagccgcacctacaggtgctgcagaatcacccggaacttctggttcacccaggaccgctgtcgtaccaggaacaagcgcagctaaaaaagccacccctggggcacacaccggagccatccctaaggctacttccgcaactggagccgtacctaagggcggaggaaagggtgtgacacgaagccgcaatggcgggaaagggaaaggtaagaagtccaaggtggaagtggacgaattgggcatgggattccgcccaggcgatggagcagccgctgccgctgcagcctcggcaaatgggggccaagcctttctggcagaagttcctgactccgaggagggagaaagcggttggacagatactgaaagcgatagcgacagtgaaccagaaacacagaggagaggccgggggaggcggcccgtagcaatgcaaaagcggccattcccctacgagattgacgagatcctcggagtgcgcgacttgcgcaaggtactcgctctactgcagaaaagcgacgaccccttcatccaacaggtggcgctcctgaccctctcaaacaacgcgaactactcatgcaatcaggaaacaatcagaaagttggggggtttaccaataatcgccaacatgataaataagaccgatccacacatcaaggagaaagccttaatggcaatgaataacctaagtgagaactatgagaaccagggccgcctccaggtttacatgaataaggtgatggacgacattatggctagcaaccttaattccgcagttcaggtagtaggattaaagttcctcactaacatgacgatcactaacgactaccaacatctcctggtgaactctattgccaacttctttcggctccttagccaagggggcggcaagatcaaagtagaaatcctcaagattctcagcaattttgcagagaatcccgatatgctcaagaagctcctgtccactcaggttcctgcatcattctcttccctctacaatagttatgttgaatctgaaatccttatcaacgctctgacactgttcgaaatcatttatgacaacttgcgagctgaagtgtttaactatcgtgagttcaacaaagggagccttttttatctgtgcacaacttctggggtctgtgttaagaagattcgtgcgctcgcaaaccatcacgacttgctggtgaaggtcaaggtgatcaaattagtgaacaagttctag

SEQ ID NO: 108649 - DNA, 1899 bp, synthetic construct
  misc_feature 1..1899: note = Description of Artificial Sequence: Synthetic coding sequence
  source 1..1899: mol_type = other DNA
atgtccagggtcagggatgcagggtgtgtggcggccgggatcgttatcggagccggtgcctggtattgtgtatacaagtacactcgcggccgcgaccaaacgaaaaagcgaatggctaagcctaagaatcgcgccgtggctggaacgggcgcacgggctcgcgcgggactgcgcgcgggattcacaatagacttaggcagcggtttctctccccccacacccgtaagagctgaggctgaggaccgggcacaggacgaggctagcgccctggacactgtgggagccgaggctgtcgcacccgctgccagctctgccgaagctcaatcaggagctggcagtcaagcccaagaagcagacggcgccggagtgggccccaaggccgaaagcgttgtcggggccgctatggcctccgcaatcgccccacccccaggggtgacagaggctctaggtgcagccgaggctccagctatggcaggcgctcccaaggtcgccgaggccccccgggaagctgagacgtcgagggccgccgtccccccagggaccgtggtgccaactgaggcagccgctcctaccgaagtcacagaggggccaggcgtggctgcgccgacgaaggtcgctgaagcacctggagtggcctcccctacggaagcagctgaggcacctgtgccagcgacacccacaggagctgctgcaccaacaggtgcggcagaatcgcctggaacatcaggaagcccaaggactgctgtggtccccggaacgagcgctgccaagaaggccactcctggagctcatactggtgctattccaaaagctaccagcgctactggggccgttcctaaaggcggcgggaagggggtcacacggtctcggaatggaggcaaagggaagggtaaaaagtcgaaggttgaggtggatgagttgggcatgggctttaggccaggagatggcgctgccgccgcagcagccgcctccgccaacggtggccaagccttcctggccgaagtacctgacagtgaggaaggggaatccggctggacggatacggaaagcgactcggatagcgaacctgaaacccaacgacgagggaggggcagacgacccgtggccatgcaaaagaggcctttcccgtacgaaatagacgaaattttgggtgtccgggacctacgcaaggtgctagccctgctacagaagtccgatgacccatttatccagcaggttgcattgctgactctgtcaaacaatgccaattattcctgcaatcaggagacgattcgcaagcttggtggtctgcctattatcgcaaatatgatcaataaaaccgacccgcacattaaggagaaagcactgatggcaatgaacaacctttcagagaactatgagaaccaggggcgactacaggtgtatatgaataaggtcatggacgacatcatggcaagtaatctgaactctgccgttcaagtggtgggcctgaagttcctaactaatatgactatcactaatgattaccagcacttgctggtgaattcaatagctaattttttccggttgctgtcacagggagggggaaagatcaaggtcgagattctcaagatcctctctaactttgcggaaaacccagacatgctcaagaaactcctgagcacccaagtgcctgccagtttctcatcgctgtataacagttacgtggagagtgaaatcctgatcaatgccttaacgctgtttgagataatatatgataaccttcgcgccgaagtcttcaactaccgtgaattcaataaaggcagccttttttatctgtgcacgacgtctggcgtttgtgtaaaaaaaatccgggctctggccaaccatcacgatctgctggttaaagtgaaagtgattaagcttgttaataaattctag

SEQ ID NO: 108650 - DNA, 504 bp, synthetic construct
  misc_feature 1..504: note = Description of Artificial Sequence: Synthetic coding sequence
  source 1..504: mol_type = other DNA
atgtctagggtgcgcgacgccggttgcgtagccgccggaattgtgattggcgcgggcgcttggtattgcgtgtataaatacaccaggggcagggaccaaactaaaaagagaatggcaaagcctaagaaccgagctgtagctggaacaggcgcacgtgcccgagcaggcctgagagcgggcttcactatcgaccttggttcgggttttagcccacccacacccgtcagagctgaagctgaagatcgggcccaggatgaggcgtcagcgttggataccgtgggggcggaggcggttgcgccagccgcgtcgagcgcggaggcgcagagcggtgcagggagccaagcgcaggaagctgacggcgccggcgtgggcccaaaagcagagtcggttgtgggagcagctatggcttccgcgatcgctcctcccccaggtgtgacggaggccctgggagccgctgaggctcccgccatggccggtgccccaaaggtggcagaggcaccttag

SEQ ID NO: 108651 - DNA, 189 bp, synthetic construct
  misc_feature 1..189: note = Description of Artificial Sequence: Synthetic coding sequence
  source 1..189: mol_type = other DNA
atgtcacgcgtgagagacgctgggtgtgttgctgcaggtatcgtcattggtgctggtgcctggtactgcgtgtacaagtacacaagagggcgagaccagaccaagaagagaatggctaagccaaagaatcgggccgttgccgggaccggagcccgcgcccgcgctggtctgagggctggctttacatag

SEQ ID NO: 108652 - DNA, 498 bp, synthetic construct
  misc_feature 1..498: note = Description of Artificial Sequence: Synthetic coding sequence
  source 1..498: mol_type = other DNA
atgagccgggtccgcgacgcaggctgcgttgcggctggaatcgtaataggagctggcgcctggtattgcgtatataagtatacacgcggccgtgatcaaactaagaaaaggatggcaaagcccaagaacagggcggtcgcaggcactggagccagagcccgagctggtcttcgtgctgggtttacaattgatctcgggagtggtttctctccacccacacctgtaagagctgaagctgaggaccgcgcccaagatgaagccagcgccctggatacagtgggtgcggaggccgttgcccctgcggcatcctccgcagaggctcagtcaggcgcaggtagccaggcacaggaagctgacggggctggagtgggccccaaagccgaatcagtcgtcggggctgctatggcttccgcaatcgctccaccgcccggcgtgaccgaggcactgggcgccgcagaggcacctgccatggccggggccccaaaggttgccgagtag

SEQ ID NO: 108653 - DNA, 318 bp, synthetic construct
  misc_feature 1..318: note = Description of Artificial Sequence: Synthetic coding sequence
  source 1..318: mol_type = other DNA
atgtcaagggtccgggacgccggctgtgtcgcggctggcatcgtgatcggggctggagcctggtactgtgtgtacaaatacacacgggggagagatcagaccaagaaacgaatggcgaagcccaagaatcgcgccgtggccggcactggcgcccgcgcacgtgctggccttcgggccgggtttacaatagacctgggtagcggtttctccccccctacacccgttagggctgaagctgaagatagagcccaggatgaagccagcgcactcgataccgtgggtgctgaagcggtggcccccgctgctagctctgcatag

SEQ ID NO: 108654 - DNA, 282 bp, synthetic construct
  misc_feature 1..282: note = Description of Artificial Sequence: Synthetic coding sequence
  source 1..282: mol_type = other DNA
atgtccagagtccgcgacgctggatgcgtggctgccggaatcgtgatcggagcaggcgcatggtattgcgtgtataagtacaccagagggcgcgaccagacaaagaaacgaatggctaagcccaagaatagagccgtggccggaaccggagccagggcacgcgccggcctgagagccggcttcaccatcgacctaggtagcgggttttctcctcccacaccagtgagagccgaagccgaagaccgggctcaggatgaggccagtgcactggacaccgtgtag

SEQ ID NO: 108655 - DNA, 1140 bp, synthetic construct
  misc_feature 1..1140: note = Description of Artificial Sequence: Synthetic coding sequence
  source 1..1140: mol_type = other DNA
atgggctacgctagaaaggttggatgggttaccgctggcctagtcataggcgctggtgcgtgttattgtatatataggctgacgcgcggacgaaaacagaacaaggagaaaatggccgagggtgggagtggagacgtggacgacgcgggcgactgttccggcgcaagatataacgattggagcgacgacgacgacgatagcaacgagtcaaaatcgatcgtgtggtacccaccttgggcgaggattggaacagaggcaggaactcgcgctagggctcgtgcacgtgcacgggccacccgggcccgccgggccgtacagaaacgggccagtcccaacagcgatgacaccgtgctctctccacaggagcttcagaaggtgctgtgtctcgtcgaaatgtctgagaaaccctacatcctcgaagctgccctcatcgcattggggaataacgccgcctatgctttcaacagggacatcattagagacctgggcggactcccaatcgtcgccaagattctgaacacacgcgatccaatagtcaaggaaaaggctctgattgttctcaacaacctaagtgtcaacgccgagaaccagcgtaggctgaaggtgtacatgaatcaagtctgcgacgataccatcacatcaaggctcaattcatcagtccagttggcagggctcagactgctcaccaacatgacagtcactaacgaatatcagcacatgttagccaattcaattagcgacttttttaggctgtttagcgcgggaaacgaggaaactaaactgcaggtcttaaagcttttgctaaatctggctgaaaacccggcgatgacccgggagctgctccgtgcacaggtgcctagttctttgggaagcttatttaataaaaaagagaacaaggaggttattttgaagctgctggttatctttgaaaatataaacgacaactttaagtgggaagagaatgaaccaactcagaatcagtttggcgaaggctcacttttcttctttctcaaggagtttcaagtttgtgcggataaggtgctgggtatcgaatctcaccacgattttttagtcaaagtgaaagtgggtaagttcatggctaagctggctgaacacatgttccctaaatcgcaggagtag

SEQ ID NO: 108656 - DNA, 1140 bp, synthetic construct
  misc_feature 1..1140: note = Description of Artificial Sequence: Synthetic coding sequence
  source 1..1140: mol_type = other DNA
atgggatatgcaagaaaggtgggttgggtcaccgccggcctggttatcggtgctggggcatgctactgtatttaccggctaactcgcgggagaaagcagaacaaggagaaaatggcagagggaggtagtggagatgtggatgatgccggggattgcagtggggctcgctataacgactggtccgatgacgacgacgattccaacgaatctaagtccatcgtgtggtatcccccttgggccagaatcggtaccgaagctggaacaagggctagagcgagggcccgcgctagggctacgagggcccgaagggctgtccagaaacgtgcaagcccaaacagcgatgatactgtcctgagcccccaggagctgcaaaaagtcctgtgtctggtcgaaatgtctgagaagccatatatattggaagctgcattgattgcgctcggcaacaacgctgcctacgcgttcaaccgagacattattcgagatctaggcggcctccctatcgtggcgaagatattgaacacaagggacccgattgtcaaggaaaaagcactgatagttctgaacaatctgagcgtgaacgccgagaatcagagacgcctcaaggtgtacatgaatcaggtctgtgatgacacaatcacaagcagattgaatagtagtgttcagctcgcaggattgcgccttttgacaaacatgaccgtgaccaacgaataccagcatatgctcgcgaactcgatatccgacttctttagacttttttcggctggtaatgaggagacaaaactgcaggtgctgaagttgctgcttaacctggctgaaaatccagccatgaccagggaattactgagagctcaggtacctagtagtcttggcagtctctttaataaaaaggaaaataaggaggtcattctaaaactgctggtcatcttcgaaaacatcaacgataattttaagtgggaagagaatgaacccacccagaaccagttcggggaaggctccctattcttttttctgaaagagttccaagtttgtgcagataaagtccttgggatagagtcgcaccacgattttctggtgaaggtgaaggttggaaagttcatggctaagctggccgagcacatgttccctaaaagccaagaatag

SEQ ID NO: 108657 - DNA, 2889 bp, synthetic construct
  misc_feature 1..2889: note = Description of Artificial Sequence: Synthetic coding sequence
  source 1..2889: mol_type = other DNA
atggaagattgcaacgtccatagtgcagcgtccattctggctagcgtgaaggagcaggaagccagatttgaacggctcacaagagccctggagcaagagcggcggcatgtggccctgcagctggagagggctcagcagccagggatggtttccgggggcatgggttctggacaacctcttccgatggcatggcagcagttagtgctgcaagaacagagccccggatcacaagcaagcctggccaccatgcctgaagcccccgacgtccttgaagagactgtcacagtggaggaggacccaggaacccccaccagccacgtgtccatcgttacctctgaggatggtactaccaggagaacggagaccaaagtcacaaagaccgtgaagactgtcaccacacgcacagttcgccaggtcccagtagggccagacgggctcccactgctggacggcgggcccccactcggaccgtttgccgatggcgctctcgaccgacacttcctcctgcgtggtggcgggccagtcgctactctgtcacgcgcctatctgtctagtggcggaggctttcccgaggggccggaaccaagggattctccatcatacgggtcactttctcggggcttgggaatgcggccgccacgtgctggacccttggggccaggtccaggggatggctgcttcaccttgcccggacaccgagaggcctttcccgtcggtcccgaaccgggcccccctggcggtcgtagtctgccagagcgtttccaggccgagccatatggccttgaagacgacacccgttcacttgctgcagacgatgaaggagggcccgaactcgaaccagactatggtactgccacacgccgaagaccagagtgcgggcggggactccacacgcgcgcctacgaagacaccgcggacgatgggggggaactcgctgacgagcgacccgcctttcctatggtcactgccccacttgcacagccagagcggggtagtatgggctcactcgatagactcgtccgccgcagcccttctgtcgattctgcccggaaagaaccccggtggcgcgatcccgagctcccagaggtgctggctatgctgcggcatccggtcgaccctgtcaaagccaacgccgccgcctacttgcagcatttgtgcttcgagaacgagggggtgaagcgtcgtgtgcgacagctgcgcggacttcccctgctggtcgccctgctggatcatcctagggcagaggtgcgtcggcgggcctgcggggccctgcggaacctctcatatggtcgcgacaccgacaacaaagccgctatcagggattgcggaggggtgcccgcgctcgtgcgcctgctgcgcgcagcgcgcgataacgaagtccgcgagctcgtgacggggaccttgtggaacttatcatcatacgagcccctgaagatggtcatcatcgaccatggcctgcagaccctaacacacgaagtaattgtgccacatagtgggtgggaacgtgaacccaacgaagattctaaacctcgagacgctgagtggacaaccgtgtttaaaaacacatcaggctgtctccggaacgtttcctctgacggcgctgaagcacggcgccgcttgcgggagtgcgagggattggtggacgctcttctgcacgccctccaatccgctgtgggaagaaaggacactgacaataagtctgtagaaaactgtgtttgcattatgcggaacctgtcttatcacgttcataaggaagtcccaggtgctgaccgttatcaggaggctgaaccgggacctctagggagtgcagttggaagccagagaaggcgccgcgacgatgcctcttgtttcggaggaaaaaaggcgaaagaggaatggttccatcagggcaaaaaggacggtgaaatggatcggaacttcgataccctcgatttgccaaaacggactgaagctgcgaaagggttcgagctcctataccagccagaagtcgtgcggttatacttgtctctgttgacagaaagtcggaacttcaacaccctggaggccgcagctggcgccctacaaaatctttccgctgggaactggatgtgggccacatatattcgtgccacagtgaggaaagaacggggactgcctgtgctcgttgaactactccagagcgagaccgacaaagtggtccgcgccgtggctattgcactgcgaaatctcagtctcgacaggcggaacaaagacctcatagggagctatgccatggcagagcttgtaagaaatgtgcgcaatgcccaggcacctccacggcccggagcttgcttagaagaggacacagttgtggctgtcttgaataccatccatgagatagtttcagactcactggacaacgctcgatcccttctccaagcgaggggagtaccggcactcgttgccctggtcgcctcttcacaaagtgtcagggaagctaaggctgcctcacatgtgctgcaaaccgtgtggagttataaagagcttcgtggaactttacagaaagacggctggacaaaagcccggttccagtctgctgccgccacagcgaaggggcctaaaggggccctctccccaggggggttcgatgacagcactctccccctggtggacaagagtctcgagggcgagaagacggggtcccgcgatgtcatcccaatggatgctcttgggcctgatgggtatagcaccgtggaccggcgggagagacgacccaggggcgccagtagcgccggagaggcctccgagaaagaaccactgaagcttgaccctagccgcaaggccccccctccaggccccagccggcctgccgtccgactggtggacgccgtcggcgatgcaaaacctcagcccgtagactcttgggtctag

SEQ ID NO: 108658 - DNA, 2700 bp, synthetic construct
  misc_feature 1..2700: note = Description of Artificial Sequence: Synthetic coding sequence
  source 1..2700: mol_type = other DNA
atgcccgccgagttgcgacaggaacaaagccccgggagccaggcttcccttgccactatgccggaggcacccgacgtgctggaggagacagttaccgttgaggaggacccaggtacaccaacgagccacgtgagcatcgtcacctctgaggatggaaccacaagaaggaccgagactaaggtcaccaagacggttaagactgtcaccacacggaccgttcgccaagtacctgtggggcccgatggactgccattgttggatggtggcccgcccttgggacctttcgcggatggggctctcgaccgacacttcctgcttaggggcgggggcccggtggccacactgagtcgcgcttatctgtcatctggtggcgggttcccagagggccccgagcctcgagactctcctagttatggatctttaagccgtggactcggcatgcgacccccgcgggctgggcccttaggccctggccccggcgatgggtgctttacacttcctggccacagagaggctttcccagtgggtccagagcctgggcctcccggagggaggtcgctgcccgaaagatttcaggcggagccatacggtttggaggacgatacacgatccttggcggccgacgatgagggaggcccagaactcgaacctgactatggcactgctacgaggcggagacccgagtgtgggagaggcctccacacccgtgcatacgaagatactgccgatgacggcggagagctagcagatgaacgacccgcttttcccatggtgaccgctcctctggctcagcctgagcgcgggtcaatggggtcactcgaccgcctcgtgaggagaagtcctagcgtagattccgcaagaaaggagcctagatggcgcgaccccgaactcccagaggtgctggcgatgctgcgccatcccgtcgaccccgtcaaagccaatgctgcggcctatcttcagcacctttgcttcgagaatgaaggtgtgaagcggcgtgtccgacagctgagaggactccctctgctggtagccttactggaccatcccagagccgaggtaagacgtagagcctgcggcgcccttaggaatctctcttatggtcgcgataccgataacaaggccgccatacgggattgtggtggagttcccgccctcgtgagactgttaagggctgccagagacaacgaggtccgggaactggtgacagggaccctgtggaaccttagctcctacgaaccactgaagatggtgattatcgaccacgggctgcagacccttacacatgaggttattgtcccacacagtggttgggagagagagcccaatgaagattcgaaacctcgagacgccgaatggactactgtctttaaaaatacatctgggtgcctcagaaatgtgtcatctgacggcgccgaggcacggcgccgtctgcgggaatgcgaagggctagtcgatgcactgcttcacgccttgcagtcagcagtcgggagaaaggacacagacaacaaaagtgtggagaactgcgtgtgtatcatgcgcaacctttcataccacgtgcataaggaggtcccaggggcagatagatatcaggaggccgagcccgggcctcttggcagtgctgtgggatcccagcgcagaaggagggatgatgcctcctgttttgggggcaagaaggcaaaggaagagtggtttcatcaggggaaaaaggacggtgaaatggacagaaacttcgatacactggatttacctaaacgcacggaggccgccaaggggtttgaactgctgtaccagccggaagttgtgcgtctctacttatccctgctgacagagtcaagaaactttaatacactggaggcggcagctggagcattgcagaacctcagcgctggtaattggatgtgggctacctatatcagagccacggtgcgtaaggagcgaggcctccctgtgttagtggagctgctccaaagtgagactgataaagtggtgcgcgccgtggctattgcgctccgtaacttaagtctagataggagaaacaaagatttaatcggctcctacgcaatggctgagctggtgagaaatgtccgcaatgcccaggcccctcctcggcctggtgcatgtcttgaggaggacacagttgtggcagtgcttaatactattcatgagatcgtatcagatagcctagacaacgcccgctccctacttcaagcccggggagttcctgcccttgtggctctggtcgcctctagccaaagcgtgcgcgaggctaaggcggctagccatgtcctccagactgtgtggtcatataaagaactcagaggaacgctgcagaaagacgggtggactaaggcgcgctttcagtctgcagctgccacagcgaaaggacccaaaggcgctctgagccccggaggcttcgacgactcaacactcccacttgttgataagagcctcgaaggtgagaaaacagggtcacgcgacgttataccgatggatgctctggggccagatgggtatagtacagtagaccgccgggagcgaaggccgagaggggcatcgtcagccggcgaggccagtgaaaaggagccgctcaagttggatccctcccggaaggctcccccacccggaccctcacgacctgcggtacgtctggttgatgcggtgggcgatgctaaaccccagcccgtggattcctgggtatag

SEQ ID NO: 108659 - DNA, 2700 bp, synthetic construct
  misc_feature 1..2700: note = Description of Artificial Sequence: Synthetic coding sequence
  source 1..2700: mol_type = other DNA
atgcccgctgagctcaggcaggagcagagccccgggagccaggcaagtctggctacaatgccagaggccccagatgtgctcgaagaaacggtgacggtcgaggaagatccaggaacgcccacatcccatgtttcaatagtgaccagcgaagatggcaccacaagaaggaccgagaccaaggtgaccaaaacggttaagactgttaccacgcgaaccgtgcgccaagttcctgtcgggcccgacgggctccccctacttgacggcggccccccactcggtccttttgccgacggtgcgctggatagacacttcctgcttagggggggcggcccggtagcgactctctctagggcatacttgtcatcaggcggaggatttcccgaggggcccgaacctagagactcaccctcttatggctctctgagcagaggtttaggcatgagaccgccgcgtgccggaccgttgggaccaggacccggcgatggctgctttacccttccgggccaccgtgaagcgttccccgtgggaccggaacccgggcctccaggcggtagaagcttgccagagagatttcaggctgagccttatgggttagaagacgatacaaggtctctggctgcggatgacgagggaggacctgagcttgagccggactacggcacggctaccaggcgtaggcctgagtgtgggcggggccttcacacaagggcctatgaagatactgccgatgacggaggcgagcttgctgacgagaggcccgcttttccaatggtaactgcccctctcgcacagccggagaggggatcgatggggtcactggacaggctggtacgccgatctccttctgtagacagtgccagaaaagagcctcgctggagggacccagagctgcccgaggttctggcaatgctgagacatccagtggaccctgtcaaggcgaacgcagccgcttatctccagcacctctgttttgaaaacgagggagtgaagcggcgggtacggcagctgagaggtctgcctctcctggttgccttgcttgaccaccctcgcgcagaagtcagacggcgggcatgtggcgctctacgcaacctgtcctatggcagggatactgataacaaagccgcaatcagagactgcggtggcgttcccgcactcgtacggctgttgcgggccgcgagagataatgaagttcgcgagctcgtgactggaacactgtggaatttatcctcttatgagccccttaagatggtgattatagaccacggcctccagaccctcacacatgaggttattgttccacattctggctgggagagggagccgaatgaggacagcaaaccgcgcgatgccgagtggaccacggtgtttaaaaacacatcaggctgtctgcgcaatgtttcgtcagatggcgcagaggcacggagaagactcagggagtgtgagggtctggtcgacgccctgttgcatgccctacagtctgcagtcggtagaaaagataccgacaataaaagtgtcgagaactgtgtgtgcattatgcgtaatctgtcatatcacgttcacaaggaggtgccaggtgctgacagatatcaagaggcagagccaggtcccctggggtctgctgtgggctcacagcggcggcggagagacgatgcttcatgtttcggggggaagaaggccaaggaggagtggtttcaccaaggcaaaaaggacggtgagatggatagaaatttcgatacgctggacttgcctaagagaacagaggccgccaagggcttcgagttgctttatcagcccgaagtagtgcgtttgtaccttagtctgctgaccgaatcccgcaactttaatacactagaggctgctgctggcgctctgcagaacttgagtgctggtaattggatgtgggcaacttacatccgggctacggttcgtaaggaacggggtctccccgtacttgtcgagcttctgcagtccgagactgacaaagttgttagggcagtagccattgccctgcgaaatctcagcctggatagacgtaacaaggacctgatcggcagttatgcgatggctgaacttgtgagaaatgtgcgcaacgcacaagctcccccaagacctggcgcctgcctggaagaggacactgttgtggcggttttaaacaccattcacgagatcgtttctgactccctcgacaatgcacgatcactcctacaggctaggggggttccagctctggtggcgcttgtagcctcctcccagagtgtacgtgaggccaaggccgctagccatgtgcttcagacagtctggtcatacaaggaactccgtggtaccctgcaaaaggacggctggactaaagcgcgatttcagtcggcagctgctaccgcaaaggggcccaagggcgcgctaagtcccggggggtttgatgatagcacactccctctcgtcgataagtctctcgagggtgagaaaacaggcagccgagacgttattccgatggatgccctggggcctgacgggtattctacagtggaccgcagagagcggcgtccacgcggcgcctccagtgcaggtgaagctagcgaaaaggaaccgctcaagctggacccttcccgaaaggcacccccacctggaccctccaggcccgccgttcgcctggtggacgccgtgggagatgcgaagcctcaacccgtggacagctgggtgtag

SEQ ID NO: 108660 - DNA, 2871 bp, synthetic construct
  misc_feature 1..2871: note = Description of Artificial Sequence: Synthetic coding sequence
  source 1..2871: mol_type = other DNA
atggaagactgcaacgtgcactctgcagcctcaattctagcaagcgtcaaggagcaagaggctagattcgaaaggctgactcgtgcactggagcaggagaggcgccacgtggccctacaactggagcgggctcaacagcccggcatggtgagtggcggcatgggttctgggcagccccttccgatggcgtggcaacagctggtgttacaggaacagagtcctggatctcaggcgtctctggcgactatgcccgaagcaccggatgtgctggaagagacagtgaccgtcgaggaggaccccggtacgcccacttcgcacgtgtctattgtgacatctgaagacggaactaccagaaggaccgagactaaggtgacaaaaaccgtaaagaccgtaacaactagaaccgtgcggcaggtccctgtgggacctgatgggctccctcttttagacggagggcctcccctcggacccttcgcagacggggcattagacagacattttttgttgagaggagggggacctgtggctactctgtcccgagcctacctgagctcaggaggcggatttcccgaggggccggagcctcgggactctccaagctatggttccctttctcggggtttagggatgcgacccccaagggctggccccttagggcccggccctggtgatggttgctttacccttccagggcaccgggaggcattccccgttgggcccgagcccggcccacctggaggccggtccctgcctgagcgtttccaggcagaaccctatggactcgaggatgacacccgcagcctggcagcagatgatgagggagggcctgagttggaacctgactatggcaccgcaacccgacgccgtcccgaatgcggacggggactacacactagggcttacgaggacactgctgacgacgggggagagcttgctgacgaacgacctgccttccctatggtgaccgccccactggctcagcccgagagggggtccatgggcagcttggatagactcgtgcgacgcagcccgtctgtggatagcgcccggaaggagccacgttggcgggatcccgaactccccgaggtcctcgccatgctgagacaccccgttgatcccgtgaaagcgaatgctgcagcatacttacagcacttgtgttttgaaaatgagggagtgaaaaggagagtgagacaattacgtgggctccctcttctcgtggcactgttggaccacccacgagctgaggtgcgtcgcagagcgtgtggggctctccgaaatctgagctatgggcgagataccgataacaaggcggcaatccgagattgtggcggcgtgcccgctctggtgaggctgcttagagccgccagagacaatgaagtgcgagaattagtaaccggtaccctttggaatctctcctcctatgagcccctcaaaatggtaatcatcgaccacggcctccagaccctcacacacgaagttatcgtgcctcacagcggctgggagagagaacccaatgaagactccaaaccacgcgacgcagagtggaccactgtttttaagaatacttcagggtgcttgaggaatgtttcatctgatggggcagaagccaggcgaagattaagagagtgcgaggggcttgtcgacgccttacttcatgcccttcaatcagcggtaggaaggaaagacaccgataataagagcgtggagaactgcgtctgtattatgaggaacttaagctatcacgtgcacaaggaagtccccggtgctgacaggtatcaagaagctgagccggggccactcggatccgcggtgggctcacagaggcgccgcagagacgatgcgtcatgtttcggaggaaagaaggcgaaaggaaagaaagatggggaaatggatagaaactttgatactttggatctccctaagcgtactgaagcagcgaagggttttgagctcctctatcagcctgaggtcgttcggttgtatcttagcttactgactgaatctcgtaacttcaatactcttgaagcagccgctggagctctccagaacttaagtgccggcaactggatgtgggcgacctacattagagctacagtgcggaaggagaggggcctccccgtcttggtggaacttctacagagtgagactgataaggttgttagagcagtggctattgctctgaggaaccttagccttgaccgccggaataaggatcttataggctcctatgcaatggcagagctggtacggaacgtgcgcaacgcgcaggctccgccgcggccaggagcatgtttagaagaggatacagtggttgccgtgcttaatacgatacatgagatcgtgtccgattcactggataacgcgcgctcactgctccaggcccggggtgtgccggctctggtagccctggtcgcttccagccagagtgtgcgagaagccaaagcagccagtcatgtcctgcaaacagtatggtcctacaaagagctgcgcggcactctgcagaaagatggctggactaaggctagattccaatctgcagccgctaccgctaagggaccaaagggcgcactcagccctggcgggtttgacgattctaccttgccccttgttgataagtctctggaaggcgaaaaaaccggctctcgagacgtaatcccaatggatgccctgggcccagatgggtatagtaccgtcgataggcgggagcgacgtcctaggggcgcttcatcagctggcgaagctagtgagaaagaaccactgaagcttgacccttctaggaaagccccacctcctggaccatcgaggccagccgtgcggctcgtggacgctgtcggggacgcgaaaccccaacctgtcgattcttgggtctag

SEQ ID NO: 108661 - DNA, 2682 bp, synthetic construct
  misc_feature 1..2682: note = Description of Artificial Sequence: Synthetic coding sequence
  source 1..2682: mol_type = other DNA
atgccggccgagctccgacaggaacaatctccagggtctcaggcttccttggccaccatgcccgaagccccggatgtgctggaagaaacagtcaccgtcgaagaagatcctggaaccccgacgtctcatgtctcaatcgtgacatccgaggatggcactacaaggagaacggagaccaaggtcactaagaccgttaagacggtgacaactagaaccgtgaggcaagtgccagtgggcccggacgggctgcctctcttggacggcgggccgcccctcgggccgttcgctgacggagccctggaccgccatttccttctaagggggggcgggccagtggctacactctccagggcgtatttgagcagcggaggcgggtttccggagggacctgaacctcgtgatagcccatcttacgggtcactgtcacgcggcttgggcatgcgtccccctagagctgggcccctcggtccgggacctggtgacgggtgcttcaccctacccgggcatcgggaggcattccccgtggggcccgagcccggccctcccggaggccgatcacttccagaacgcttccaagccgagccctatgggctggaggatgacacgcggtccttggctgccgatgacgagggagggcctgagcttgagccggactatggaaccgccacaaggaggagacccgaatgtggacgggggttgcacactcgcgcctatgaggatacagctgacgatggaggcgagcttgctgacgagaggcctgcttttcccatggtcactgcacctctggcccaacccgaacgcggtagtatgggcagcctggatagattagtccgaaggtcacccagtgtggattccgcaaggaaagaaccaagatggagggaccctgaactccctgaagtgttagcaatgttgaggcaccctgtcgatcccgtgaaggcaaacgccgcagcgtaccttcagcatctttgttttgagaacgagggcgtcaagcgccgagtacgccagctccgaggactcccactgctagtggccctgctcgaccatcctcgagccgaggttaggcggcgcgcttgcggcgccctacggaatctgtcatatggacgcgacaccgataataaggcagctattcgagactgcggcggcgttccagcattagtgaggctcctgagagctgctcgcgacaatgaggtacgggaacttgttactggcacactttggaaccttagctcatatgaacctcttaagatggtcataatagatcatggtctccagactttaactcacgaggtgatcgtcccccattccggctgggaaagggaacccaatgaagattctaaaccccgcgatgctgagtggaccactgtatttaagaacacttctggctgtcttcgaaacgtgtcttccgacggtgccgaggcacgccgacgactcagggagtgtgagggcctcgtggacgccctgctgcacgcccttcaatccgcagtcggccgaaaagataccgataacaaaagcgtagagaattgcgtatgtattatgcgaaacctttcataccacgtccacaaggaggtgccaggtgctgataggtatcaagaggccgaacctggaccactcggctccgctgttggaagccagaggagacggcgagacgatgcgtcctgcttcggcggtaagaaagccaagggcaagaaagacggcgagatggatcgaaacttcgatacattggacttacccaagcggaccgaagccgccaagggctttgagctcctgtaccagccagaggtggtgaggctctacctctccctgttaactgagtctcgaaactttaataccctggaggcagccgctggggccctgcaaaatttgtctgccggcaattggatgtgggctacgtatattagagctacggtgcgaaaagagcgaggacttcctgtgttagttgagctattgcaatctgaaaccgacaaggtagtgcgagctgtggcgattgcgcttcgaaatttaagcttggaccgtaggaacaaagacctcatcggatcgtatgccatggctgagctagtgcgcaatgtgcgaaacgcacaggcgccaccacgccccggtgcctgtcttgaggaggacaccgtcgtggcagtgttaaacacaattcacgaaatagtgtccgactccctcgacaacgcgagatctctgcttcaagctcgcggggtgcccgcattggtggccctcgtggcaagctctcagtctgtgcgggaagctaaggctgcttcccacgtgctgcagaccgtctggtcatacaaggaattgcgcggaactcttcaaaaggatggatggacgaaggctcgctttcagtctgccgctgccaccgccaagggacccaagggagcgttgtcacctggcggcttcgacgacagtaccctcccactggtggataagtcactagagggtgaaaaaactggaagtcgggatgtgattccaatggatgccctgggtcctgatggatacagtactgttgaccgacgagaacgcaggcctcggggcgcgagtagcgccggggaggccagcgaaaaagagccgctcaaactggatccctcccggaaagcacccccccctggcccatctagaccagcagtacgccttgtggacgctgtaggagacgctaagccccagccagtggactcttgggtgtag

SEQ ID NO: 108662 - DNA, 1131 bp, synthetic construct
  misc_feature 1..1131: note = Description of Artificial Sequence: Synthetic coding sequence
  source 1..1131: mol_type = other DNA
atggagagttatgatattatcgccaatcagccagtggtcatcgataatggctccggcgtaattaaagctgggtttgctggcgatcaaatacctaaatactgtttccccaactacgtgggacggcctaagcatatgcgcgtcatggcaggcgctctcgagggcgacctttttatcgggccaaaggctgaggagcacaggggtctgctgacaattcgttacccaatggaacacggagttgttagagattggaatgacatggagagaatctggcagtacgtctattcaaaagatcagctacagactttttcagaggagcatcccgtgctgctcactgaagccccattgaacccatccaagaatagggagaaagccgccgaggtcttttttgaaacttttaacgtgccagctcttttcatttccatgcaggccgtcttaagcctctacgctaccggaagaactaccggagtcgtcttggatagcggagacggtgtgacccatgccgtgccaatctacgagggctttgcgatgcctcactcaatcatgagggttgacatcgcaggacgagacgtgtccagatacctgcgtctcctattgagaaaggagggagtggattttcacacatctgccgaatttgaggtggtgcgtaccatcaaggagcgagcatgctacttaagtatcaaccctcagaaggatgaggcgcttgaaacagagaaggtccaatacaccctccccgacggaagcaccctcgacgtcggtccagccaggttcagagcgcccgagttgctttttcagcctgacctggtgggagacgaaagtgaagggttacacgaggtggtagctttcgccatccacaagagtgatatggacctgcgccgcaccttattcgcgaatatcgtgttatctgggggatccacgcttttcaagggctttggggatcgcctgttgtctgaagtgaagaaactcgccccaaaagacataaaaataaagattagcgcccctcaagagaggctatatagtacgtggattggtgggtctatccttgcttctcttgacacgtttaagaagatgtgggtctctaaaaaagagtatgaggaggatggctcacgcgccatccacaggaagactttttag

SEQ ID NO: 108663 - DNA, 1167 bp, synthetic construct
  misc_feature 1..1167: note = Description of Artificial Sequence: Synthetic coding sequence
  source 1..1167: mol_type = other DNA
atgtccaaagttttcaaaaaaacatcctccaatggaaagctttccatttatttaggcaagagagattttgtggatcatgtggacacagtcgagcctatcgatggtgttgtgttggtggatcctgagtaccttaagtgccggaagctgttcgtaatgcttacatgcgcatttcgatatggaagagacgacctcgaagttattggtctgaccttccggaaggatctttacgttcaaaccctgcaagttgtgccagcagagagctcttccccccagggccccctcaccgtgcttcaggaaaggcttctgcacaagctaggtgacaatgcatatccttttacactgcagatggtgaccaacctgccttgcagcgtgactttacagccggggcccgaggatgctggcaaaccttgcggcatcgactttgaagtgaaatcattctgtgccgagaatccagaggaaacagtgtccaaaagggattacgtgaggttagtggtgcgcaaggtacagtttgctcctccagaggcaggaccaggtccgagtgcgcagacaatcaggcgtttcctcctgagcgcacagccgctgcagctacaggcttggatggaccgggaggtacactatcatggagagcccatctccgttaacgtcagcattaacaactgtacaaacaaggtcatcaagaagataaaaatatccgtggatcagatcacagatgtggtcctctatagcttagataaatataccaagaccgtgttcattcaggagtttactgaaaccgtggccgccaactccagcttcagtcagagcttcgccgtgacaccgattctggcggccagttgccagaagagaggtctcgcacttgatggcaaactgaagcacgaggataccaatctagcctcctccacaattataagacccggcatggataaagaacttctggggatcctcgtctcgtacaaggtgcgtgtcaatctgatggtttcgtgtggcgggatattaggagacctgaccgccagcgacgtgggggtggaacttcctctcgtcctcattcatcccaagccgagtcacgaagccgcttctagcgaggacatcgtgatcgaggagtttacccggaagggggaggaagagagccagaaagctgttgaagccgagggcgatgagggatcttag

SEQ ID NO: 108664 - DNA, 1167 bp, synthetic construct
  misc_feature 1..1167: note = Description of Artificial Sequence: Synthetic coding sequence
  source 1..1167: mol_type = other DNA
atgagtaaggtgttcaaaaagacgtcatccaacggcaaactttctatctacctggggaagcgtgattttgtcgaccacgtcgacaccgtggaacccatcgacggcgttgtattggttgatcccgaatatctgaagtgccggaagctttttgtcatgttgacttgtgcttttaggtacgggagggatgacctggaggtgattggactcactttcagaaaggatttgtacgtgcagaccctccaagtggttcccgccgaatcttccagcccgcagggcccccttacagtgctccaggagcgactgctgcataagctaggggataacgcctatcccttcacactgcagatggtgacgaaccttccatgttccgtcaccctgcaaccagggcccgaggatgccgggaaaccctgtgggatagatttcgaggtgaagtccttttgcgccgagaatccagaagaaacggtcagtaagcgggattacgtgagactggtggtgcgaaaagtccagtttgctccacccgaagcaggccctggaccttcggctcagaccattcgccgattcttactctccgcgcagcctctccagcttcaggcctggatggacagagaagtccattatcacggcgagccaatttcagttaacgtgagtattaataattgtactaacaaggtcataaaaaagatcaagatttctgtagaccagatcactgatgttgttttgtattcccttgacaagtatactaagacggtcttcatccaagaattcacagagacggtggccgccaatagcagttttagtcagtcatttgcggttaccccgattttggcagcatcctgccagaagaggggcctggctctggatgggaaactgaagcatgaagacacaaatctggcctcttcgacaatcatcagacctggcatggacaaagaactcctggggatcctggtgtcatataaagtgcgcgtgaaccttatggtaagctgtgggggaatcctgggtgatctcacagcctccgacgtgggcgtggagttgccattggtgttaatccaccccaagccgagccacgcatccgcttcaagcgaagatattgtgatcgaagagtttaccaggaagggagaagaggagtcacagaaggcggttgaggccgagggtgacgaaggttcttag

SEQ ID NO: 108665 - DNA, 1080 bp, synthetic construct
  misc_feature 1..1080: note = Description of Artificial Sequence: Synthetic coding sequence
  source 1..1080: mol_type = other DNA
atgtcaaaagtctttaaaaagacctcaagcaatggaaagctcagcatctatctgggtaagagagatttcgttgatcacgtggatactgtggaaccaatcgatggggtcgtgctcgtcgacccagagtatctaaagtgcaggaagctgtttgtgatgcttacatgtgcattccgctatgggcgagacgacctggaagtgattgggttgacttttaggaaggatctctatgtacaaaccttgcaagttgtgccggcagagtcatcgtcaccccagggacccctcaccgttctgcaggaacgattacttcacaagctcggagacaacgcctatccttttaccttacaaatggtcaccaacctcccttgctctgttacactgcaacccggtcctgaagatgctggtaaaccctgtggcattgactttgaggtgaaaagtttctgcgccgagaatcccgaagaaactgtcagcaagagggattatgtaagactggtggtgcgcaaggtgcagttcgcaccccccgaggccggtcccggtccaagcgcacagactattaggcgcttcctgctgtccgcccagcctcttcaactccaggcttggatggatagagaagtgcattaccacggggagcccatatccgtaaacgttagcatcaacaattgtacgaacaaggttatcaagaagattaaaattagtgtggaccagattacagacgtggtgctatatagtttagacaagtacacaaagaccgtatttattcaggaatttacagaaaccgtggctgctaactccagctttagccagtcttttgccgtgacgcccatcctagcagcctcatgccagaaaaggggcctggccctggacggcaaattgaagcacgaagacacaaatctcgcgagttctacaatcattagaccaggaatggataaggaattgttaggtattctagtgagctataaggtgcgggtcaacttaatggtctcatgtggaggcatcctgggggatctgactgccagcgacgttggcgtggaattgcccctcgtgctgatacatccaaaacccagccacgaagctgctaggtag

SEQ ID NO: 108666 - DNA, 993 bp, synthetic construct
  misc_feature 1..993: note = Description of Artificial Sequence: Synthetic coding sequence
  source 1..993: mol_type = other DNA
atgggggagaaacctggtaccagagtgtttaaaaagtcatcaccaaactgcaaactcaccgtctatttaggcaaaagagatttcgtggatcaccttgataaggtcgaccccgtcgacggggtcgtgctggttgatccagactatctcaaagaccggaaggtgtttgtgacacttacatgtgcgttccggtatggtcgtgaagatcttgacgtactgggtttgagcttcaggaaagacctgttcattgctacttatcaagcattcccacctgtacccaatccaccaagacctccaactcgcctccaggacaggctgctgagaaagctcgggcagcacgctcatccttttttttttaccattcctcagaacttgccctgcagcgtgactttgcaacctggaccagaggacacaggtaaagcgtgcggagtggacttcgaaatccgggccttttgtgctaagagcctggaggagaaaagtcacaagcgaaattctgtgaggctggtgatccgcaaagtacagttcgcccctgagaaacctgggccgcagcctagcgcggagactacacgccatttcctgatgtccgacaggtcgctgcatctagaggcttccttggacaaggaactgtattaccacggtgagcctcttaacgtgaacgtgcatgtgaccaacaattcaacaaaaacggttaaaaagataaaggtcagtgtgcggcagtatgctgatatctgcttgtttagcaccgctcaatacaagtgcccagtggcacagctggagcaagacgatcagagggaaggaggctgtcagcagggcggcgctggcaaccccggcgtactccagggtcagggcgaggctgggggagtgagccgccgggggtgcctgtgcggcgctgccttttgctcctatgcccctcaggcacctaggccccatccacccccacaaaccccagtctcacgcagcggagatcgatgcccttgcggccaccagccccattag

SEQ ID NO: 108667 - DNA, 1245 bp, synthetic construct
  misc_feature 1..1245: note = Description of Artificial Sequence: Synthetic coding sequence
  source 1..1245: mol_type = other DNA
atggtattaggcaaggtcaagtcactcactattagtttcgactgtcttaatgactctaacgtgcccgtttactcctctggagacaccgtttccggccgcgttaatctagaagtaacgggggaaatccgggttaagagtttaaaaatccacgctagaggccacgctaaagtacgatggaccgaatcgcggaacgcggggagcaacacagcatacacccaaaattatactgaggaagtggagtacttcaaccacaaagatatcctcatcggccatgaacgagacgacgacaacagcgaagaaggttttcacaccattcactccgggcgacacgagtacgccttctcattcgaacttccccaaactcccttggccactagctttgagggtcgccacggttctgtgcgctattgggtgaaggctgaacttcaccgaccctggcttcttccagtaaagctgaagaaagagtttactgtcttcgagcacatcgatataaatactcctagcctgctgagtcctcaggccggaactaaggagaagacattatgttgctggttttgtacttctggcccaattagtttatcagccaagatcgaacggaaggggtacactcccggggaaagcattcaaatttttgccgagatagaaaactgtagtagccgcatggttgtgccaaaagccgccatatatcagacccaggcgttctatgcaaagggcaaaatgaaagaggtcaaacagctagtggcaaacctgagaggggagagcctgtcttcaggcaaaactgagacttggaacgggaagctacttaagattccgccagtgagcccatcaatccttgactgctcaatcattcgcgtggagtacagcctgatggtttacgtggacattccaggggctatggatctgttcctgaacctgcccctggttataggcacgatacccctgcacccgttcggctcccgcacctcatctgtgagctcacagtgctcgatgaacatgaactggctgtcactgtcactaccggagcgcccagaggctcccccctcatatgccgaggtggtgacagaggagcaaagaaggaacaatctggcccctgtctcggcctgcgatgatttcgagcgtgctcttcaaggccctctgtttgcctacatacaagaatttagattccttccacctcctctttattcggagattgacccgaatccagaccagagcgcggacgatcgaccctcgtgtccatcccggtag

SEQ ID NO: 108668 - DNA, 1233 bp, synthetic construct
  misc_feature 1..1233: note = Description of Artificial Sequence: Synthetic coding sequence
  source 1..1233: mol_type = other DNA
atgggagataagggcacacgggtgttcaagaaggcatcaccaaatggaaaactcacggtgtatctcggcaagagggatttcgtggatcacatcgatctagttgacccagttgacggagttgtcctggtcgatcccgagtacctgaaggagagacgtgtgtatgtcactctgacgtgtgctttccgctacggtcgcgaggacttagatgtcctaggtttgacttttcggaaggacctctttgtggccaacgttcagagcttccccccagccccagaagataagaagcccctgacacgcctgcaggagaggttaatcaagaagttgggagaacatgcttacccattcaccttcgaaattccgcctaatctgccctgttctgtgaccttacagcccggaccggaggatactggcaaggcttgtggcgtggactacgaagtgaaggccttttgtgcggaaaacttagaagaaaagattcacaagagaaattcagtccggctggtgatcaggaaggtacagtacgctccagaacgcccgggccctcaacccacagccgagacaaccagacaatttctgatgtcagataaacctttacaccttgaagccagtctggataaggagatctactatcacggcgaacctatctccgtgaacgtccacgtgactaacaacacaaataagacagtcaaaaagattaaaatcagcgtgcgccagtacgccgacatttgtcttttcaacactgctcagtataaatgtccggtggctatggaggaggcagatgatacagtggctccctcatccactttctgcaaggtgtatactctcacgccgtttttggccaacaacagggagaagcgcggcctggccctggacggtaaactcaaacatgaggacaccaatctggcatcttctacccttttacgtgaaggtgccaaccgtgagatcctgggaatcatcgtgtcttacaaggtgaaagtgaaactcgttgtttctagaggcggagatgtggcggtggagctcccctttactctgatgcaccccaagccgaaggaagagcccccccaccgcgaggtgccagaaaacgaaacgccggtggacacgaacctaatcgagttggataccaacgatgatgacattgttttcgaagacttcgcaaggcagcgcctgaaggggatgaaggatgataaggaggaggaagaggatggcactggttcaccccagctgaacaataggtag

SEQ ID NO: 108669 - DNA, 1257 bp, synthetic construct
  misc_feature 1..1257: note = Description of Artificial Sequence: Synthetic coding sequence
  source 1..1257: mol_type = other DNA
atgggagacaagggaacccgggtattcaagaaggcaagcccaaacggaaaactcacagtgtatctgggcaagcgggatttcgtggaccacattgacttggtcgaccccgtggacggtgtcgttctcgtcgatccagagtatctgaaggaaagacgggtctacgtaacattgacttgtgcatttcggtacggacgggaagatctggatgtgctcggcctgacttttcgtaaggacctgtttgtggcaaatgtccagtctttcccccccgctcctgaagataaaaagcccttgacacgtcttcaggagagactgatcaagaaactcggtgagcatgcctacccatttacctttgaaatacctcctaatctgccatgttccgtcacactccaacccggccctgaggatactggtaaggcctgtggagtggattacgaggtgaaggctttctgtgccgagaacctggaagagaaaatccacaagaggaacagcgtccgcctcgtgatcagaaaagttcagtatgcaccagagaggcctggcccccaacccaccgccgagactacacgacagtttctcatgtcagataagcccttgcatcttgaggcctccctggacaaagagatctattatcatggggagcctataagtgttaacgtgcacgtgactaacaatacaaacaaaaccgtgaagaagattaaaatcagtgtgcggcaatacgccgatatctgcctgtttaacaccgctcagtacaagtgtccggtcgctatggaggaagcagacgatacagtggcccctagttccacattttgcaaagtttatacactcacaccctttctagccaacaaccgcgaaaagcgaggcttggcgctcgatggaaagctgaaacatgaagatacaaacttggcaagttcaacactgctccgagagggggcgaatcgcgaaatccttggaattatagtgtcctacaaagtgaaggtcaaactggtggtctcccggggaggacttctgcgcgggctgtgcttttctgacgttgctgtggagttgcccttcactctgatgcatcctaagcctaaggaggaacccccacacagggaggtgcctgagaatgagaccccagtggatactaaccttatcgagctcgatacaaacgatgatgacatagtttttgaggatttcgctcgccagcggctgaaggggatgaaggatgacaaagaagaagaggaagatgggacaggctcgccgcagcttaataatcggtag

SEQ ID NO: 108670 - DNA, 1257 bp, synthetic construct
  misc_feature 1..1257: note = Description of Artificial Sequence: Synthetic coding sequence
  source 1..1257: mol_type = other DNA
atgggggacaaagggaccagagtatttaaaaaagcttccccaaatggcaagctgacagtctacctgggcaagagagactttgttgatcatatcgatctggtcgatccagttgacggcgtggttctggtggatccagagtacctcaaggagcgcagggtctacgtcaccctcacttgtgccttcagatacggccgcgaagatctcgatgtcctaggattaactttcaggaaggatttattcgtggcgaatgtgcaatccttcccaccagcccccgaggataaaaaaccattgactaggctgcaggagcggctaatcaaaaaacttggggagcatgcctatccatttacattcgaaattcctccaaatcttccctgttcagttactctccagccagggcccgaggacaccggaaaagcatgcggtgtggactatgaagtcaaggccttttgcgccgaaaacctggaggagaaaattcataagaggaattctgttcgtctcgtgatacgcaaggtgcaatacgcaccggagcgcccaggccctcagcctacagccgagacaaccagacagttcctgatgtcagacaaacctctccatcttgaagcctctctagacaaggagatctactatcacggagagccaatctccgtgaacgtgcacgtcaccaataatacaaataaaaccgtaaagaagatcaagatcagcgtccgacagtatgccgacatatgtctgttcaataccgcccagtacaaatgcccagtggccatggaggaagccgatgatactgttgctccttccagcacattttgcaaggtgtatactcttaccccttttctggcaaataatagggagaaacgcggcctggctcttgacggtaaactcaagcacgaggacacaaatttggcaagctctacactacttagggagggagcaaatcgcgagatcttaggcatcatagtttcatataaggtgaaagtcaagttggtcgtgtcccgaggcggcctattgggcgacctggctagctctgatgtcgccgttgaactgccttttaccttaatgcatcctaaaccgaaggaggaaccaccacaccgtgaagtgccggaaaatgagaccccagtcgataccaatttaatcgaactggatactaacgacgacgacatagtctttgaagattttgcgagacagcggcttaagggaatgaaggacgataaagaggaggaggaagatggtacaggctcccctcagctgaataatcgctag

SEQ ID NO: 108671 - DNA, 1230 bp, synthetic construct
  misc_feature 1..1230: note = Description of Artificial Sequence: Synthetic coding sequence
  source 1..1230: mol_type = other DNA
atgggggagaagccagggactagagtgtttaagaagtctagcccaaattgcaagctcacagtctacctgggcaaacgcgatttcgttgatcacctggataaagtggaccctgtagacggcgtggtgttggttgatcccgattacctgaaggaccggaaggtctttgtaacgctgacatgtgcattcagatatggacgtgaggatcttgatgtccttggtctttctttcaggaaagacctcttcatcgctacatatcaggccttccctcccgtgcccaacccccctagaccacccacaaggctgcaggaccgcctgttgcggaaactcggacagcacgctcaccctttcttcttcaccatccctcagaacttaccctgctcagtcactctgcagcccggccccgaggatactggcaaagcatgcggagtggatttcgagatccgggcattctgtgccaaatccttggaagagaaaagccacaagcggaattctgtgcggcttgtcattcggaaggttcagtttgcccccgaaaagcccgggccgcagccgtccgcagagaccacgagacatttcctgatgtccgacaggagtctacatctggaggccagccttgacaaggagttgtattaccacggtgagccactgaacgtaaacgttcacgtgactaataatagcacgaagacagtgaagaaaatcaaggtaagcgtccgccagtatgccgacatttgtcttttttcgacagcccagtacaagtgccctgtcgcacagctggagcaagatgaccaggtgagtcccagtagtacgttctgtaaagtgtacacgatcactcctttactttctgataatcgagaaaagcggggtctggccctggatggcaagttgaagcacgaggacaccaacctggctagctctacaatcgtgaaggagggcgctaataaagaggttcttggaatcctggtgtcgtacagagtcaaggtcaagctcgtcgtaagtcgcggaggagatgtcagcgttgagcttccatttgttctgatgcatccaaagcctcacgatcacattcctctgccccgtcctcagtccgcagcccccgagaccgacgtaccggtcgatactaatctgatcgaatttgacaccaactatgctacagatgatgatattgtcttcgaggattttgcgagattacgcctgaaggggatgaaagacgacgattatgacgaccagctgtgctag

SEQ ID NO: 108672 - DNA, 1185 bp, synthetic construct
  misc_feature 1..1185: note = Description of Artificial Sequence: Synthetic coding sequence
  source 1..1185: mol_type = other DNA
atgggggaaaaacccgggaccagagtgtttaaaaagtcaagtcccaactgcaaactcacagtttacctgggcaagcgggacttcgtggaccatttagataaagttgacccagtcgtctttgtaactctgacctgcgcttttcgttatggaagggaagacttagacgtcctaggactttcttttaggaaggatctttttatagctacttaccaggctttccctccggtgcctaatccacctagacctcctacgcgcctacaggacaggctgctgcggaaattgggacagcacgctcaccccttcttcttcactataccacagaacctgccctgctcagtgacgcttcagcccgggccagaagatacgggtaaagcttgtggcgtggacttcgaaatacgtgcgttctgcgctaaaagcctggaggaaaaatcacacaagcgaaatagcgtgcggctagttatcaggaaagtgcagttcgctccggaaaagcccgggccccaaccctcagctgagacgactaggcacttcctaatgagtgaccgcagcctacacctggaggcaagcctggacaaagagctctactaccacggggaaccactcaacgtgaatgtccacgtcactaacaactcaaccaagacagtgaagaagattaaagtcagcgtgagacagtatgcggacatctgcctcttttccacggcccaatataaatgccctgtggctcagctagaacaagatgaccaggtctctccatcctccactttttgcaaagtctataccataacacctctgttgtctgataatagggaaaagcgcggcctggccttagacggaaagcttaaacatgaagacactaatctcgcttcatccaccatcgtgaaagagggtgctaacaaggaggtgctcgggatcttagtgtcttatagggtgaaggtgaagttagttgtgagcaggggtggagatgtgagcgttgagctgcctttcgtgttgatgcatcccaaaccccatgaccacatccctctgcccaggcctcaatctgccgcgccagaaaccgatgttccagttgataccaatttaatagagtttgacacaaactatgctacagacgatgacatcgtattcgaagatttcgccagactgcgcctgaagggcatgaaggatgatgactatgatgaccagctatgctag

SEQ ID NO: 108673 - DNA, 1266 bp, synthetic construct
  misc_feature 1..1266: note = Description of Artificial Sequence: Synthetic coding sequence
  source 1..1266: mol_type = other DNA
atgggggaaaagcccggcaccagagtcttcaaaaaatcctccccaaactgtaaacttactgtttatctgggaaaacgggacttcgtggaccaccttgataaagtcgaccccgtcgacggtgttgtgttagttgatcctgattatttaaaggatagaaaggtgtttgtgaccctgacatgtgcctttcggtacggaagagaggatctggatgtgctggggctgtcttttcgcaaggatctctttatagccacgtatcaagcttttcctcctgtacctaacccgccccggcctccgacacgactgcaggacagactgctgcgaaagctcggccagcatgctcaccctttcttctttacgatccctcagaatctgccgtgttccgtgacactgcaacctggccctgaagacaccggaaaggcatgcggcgtcgattttgagattagagcattctgcgctaaatctctggaggaaaagagtcacaaaagaaacagtgtcaggcttgtgatacggaaggtgcagtttgcgcccgaaaaacctggcccacagccttcagccgaaaccacccgccatttcctgatgtctgatcggagcctacaccttgaggcctccctggacaaggagctgtactaccacggagagccactgaatgttaatgtgcatgtcactaacaactccacaaaaactgttaagaagattaaagtttctgtaagacagtacgctgacatttgcctgttctcaaccgcacagtacaaatgcccggtggctcagttagagcaagacgatcaggtgagtccctcctcaaccttttgtaaagtgtataccataacccccctactttcagacaatagggaaaagagagggctggcgcttgatggtaagctgaaacatgaggacacaaatttggcatctagtacaattgtgaaggagggggccaacaaggaagtgctgggaatcctagtcagctaccgggtgaaggtgaagctggtcgtctcaagaggcggggatgttagtgtcgaactaccatttgtgctgatgcatcccaagccccacgaccatatccctctgcctcgaccccagtcagcccccaccccgactcctcccctgcccgtgcctccagccgcacccgaaacggatgtgccagtcgacactaacctgattgagtttgataccaactacgccacggacgatgacatcgtgtttgaggattttgccaggctgcgcctgaaaggcatgaaggatgatgactatgatgaccagttgtgttag

SEQ ID NO: 108674 - DNA, 1233 bp, synthetic construct
  misc_feature 1..1233: note = Description of Artificial Sequence: Synthetic coding sequence
  source 1..1233: mol_type = other DNA
gctgccaaccgggcgggtggcggacgcgcccaccacggaggcgagacacgggaccaactgacagtgtacctcggtaagcgggattttgtagaccacctggataaagtggatccagttgacggagtagtgctcgtggaccccgactacctgaaggatcggaaggtgtttgtgaccctgacatgtgctttcagatacggcagggaagacctcgatgtgttggggctgtcattccggaaggacctatttatagcgacataccaggctttccctcctgtacctaacccaccacggccgcctacaagattgcaggatcggctgctgaggaaactcggacagcacgcacatccttttttctttaccattcctcaaaacctgccatgcagtgtcaccctgcaaccagggccagaggacaccggcaaagcttgtggcgtcgatttcgagatccgggctttctgtgcaaagtcgctagaagagaagagtcacaaacgcaattccgtgagattagtcattaggaaagtccagttcgcacccgagaagccgggacctcaaccctctgctgagaccacacgccattttctgatgtccgaccgatcattgcatctcgaagcttctctggataaggagctgtactaccatggtgagccgttgaatgtgaatgtccatgtcacaaataacagtacaaagactgtgaagaaaattaaggtgtccgtgagacaatacgctgacatctgcctgttttctaccgcgcagtacaaatgccccgtcgcgcaactggagcaagatgaccaagtgtccccatcctctacattctgcaaagtgtatacgatcaccccccttttgtccgacaatcgtgagaagcgcggcctggcccttgatgggaagctgaaacacgaggataccaacttggccagttccacaatcgtcaaggaaggggcaaataaggaagtactcggcattctcgtgtcctatcgggtgaaggtgaagctggtcgtgtctcgggggggcgatgtttctgtggagttgcccttcgtgctgatgcatcccaagcctcatgaccacattccccttccaagaccccagtccgcggcccccgagactgatgttccggtggacaccaatctgatcgagtttgacacaaattacgctaccgatgatgatatcgtgttcgaggatttcgcccgcctgcggttgaagggcatgaaggacgatgactatgacgatcagctctgctag

SEQ ID NO: 108675 - DNA, 1047 bp, synthetic construct
  misc_feature 1..1047: note = Description of Artificial Sequence: Synthetic coding sequence
  source 1..1047: mol_type = other DNA
atggcagccggggtagccgggtggggggtcgaggctgaggaattcgaggacgcgccagacgtggagcccctagagccgacgctttctaacatcattgaacagcggtcattaaagtggattttcgtggggggtaaggggggggtcggaaagaccacatgcagttgtagcctggccgtccagctgtccaagggaagggaaagcgttctcatcatctccacagatcccgcacataatatatccgatgccttcgatcagaaattctctaaagtacccaccaaggtgaaagggtacgacaaccttttcgcaatggagatagaccctagtctgggagtggccgaattgcctgacgagttcttcgaagaagacaacatgctttcgatgggcaagaaaatgatgcaggaagccatgtccgcctttcctggaatcgatgaggccatgtcttatgcagaagtgatgcgcctggtaaagggcatgaatttcagtgtcgtggtctttgatacagcccccacaggtcatactctcaggctgttgaatttccccacgattgtcgaaagaggcttgggtaggctcatgcagattaaaaaccagatttccccgttcatatcccagatgtgcaatatgctgggcttgggggacatgaacgcggatcaacttgcgagcaagctggaggaaactctccccgtcatccgaagcgtgtcagaacagtttaaagaccctgaacagaccacatttatttgtgtgtgcatcgccgagtttctctctttgtacgagacagagcgactcatccaggagctcgctaagtgtaaaatcgacactcacaacatcattgtaaaccagttggtgttcccggacccagagaagccttgtaagatgtgtgaagcacggcacaagattcaggctaaatacctggaccagatggaggacttatatgaagattttcatattgttaagcttcctctactcccacatgaggtaaggggggcggataaagttaacacattctcagccctgttgcttgagccatacaaaccaccttcagcccagtag

SEQ ID NO: 108676 - DNA, 1047 bp, synthetic construct
  misc_feature 1..1047: note = Description of Artificial Sequence: Synthetic coding sequence
  source 1..1047: mol_type = other DNA
atggcagccggcgtggccggctggggagtggaggccgaagagtttgaagacgcacccgacgtcgaacctctcgaacccacactcagcaatataatcgaacagagaagtctgaaatggattttcgtgggcggcaagggaggtgtcggaaaaaccacctgctcgtgtagtctggccgtgcagctgtccaagggtcgtgaatctgtgctgattatcagtacggacccggcccacaatatatccgacgctttcgaccagaaattttctaaggtacccactaaagtcaaaggatatgataacctgtttgccatggaaatcgatccttctttgggggtggcagaattacccgacgagttcttcgaggaggataacatgctgtccatgggaaagaaaatgatgcaggaagcaatgtctgccttcccagggatcgatgaggcaatgtcctatgctgaagtcatgaggcttgttaagggaatgaactttagtgtcgtcgtcttcgacacagcaccaaccggacacacactgaggctgcttaactttcctacaatagtggagcgaggattgggccgactgatgcagatcaagaaccagatctctcctttcatatctcaaatgtgcaacatgcttggcttgggcgacatgaatgccgatcaattggcttctaaactggaagagacattgcccgttatacgatctgtgtcagaacagttcaaagatcctgagcaaacaacttttatatgcgtgtgtatcgcagagttcctctctctctatgaaactgaacgactcattcaagagctcgcgaaatgtaaaatcgacacacacaacatcatcgttaaccagctggtgtttccggaccctgagaagccttgcaagatgtgcgaagcccgccacaaaattcaagctaaatatcttgatcagatggaagacctctacgaggactttcacatcgtgaaattgccacttctcccacatgaagtgcggggcgcagataaggttaacaccttctccgctttgcttcttgagccttacaagcccccgtccgctcaatag

SEQ ID NO: 108677 - DNA, 1128 bp, synthetic construct
  misc_feature 1..1128: note = Description of Artificial Sequence: Synthetic coding sequence
  source 1..1128: mol_type = other DNA
atggctgccctcagagatgctgaaattcaaaaagatgttcagacctactacgggcaggttctgaagaggagcgccgacctccaaacgaatgggtgcgtcacaacggcaagacctgtgcccaaacacattagagaggcattgcagaacgttcacgaagaggttgccctgagatattacggttgtgggctcgtgattcccgagcacctggaaaactgctggatcctggatctcggcagtggaagtggacgggactgctatgtgctgtcacaactagtgggtgagaagggacacgttacaggaattgacatgacaaaggggcaggttgaagtcgcagaaaaatatctcgactaccacatggagaaatacggattccaggcttcaaatgtcactttcatccacggctacatagagaagctgggagaggcaggcatcaagaatgagtcgcatgatatcgtggtgagcaattgcgtgataaatctcgtgcctgataaacagcaggtgttacaggaggcttaccgggtcctcaaacatgggggggaactgtacttctcagacgtttatacttccctggaactacccgaggaaattagaacacacaaggtgctttggggcgaatgcttgggaggggccctctattggaaggaattggctgtcctggcacagaagattggcttctgtcctccacgattagtaaccgccaacctaatcacaattcagaataaagagctggagcgtgttattggagattgcagatttgtgagtgccaccttccgtctcttcaagcactccaaaacaggacccacaaagagatgccaagtaatttataatgggggcattaccggccacgagaaggagttgatgttcgatgccaatttcacgttcaaggagggcgaaattgtggaagtagatgaggaaaccgccgcaatactgaagaatagtaggtttgcgcaggactttctgatcaggccaattggggagaaactgccaacctctggcgggtgttccgcattggagctgaaggatatcataacagatccgtttaagttagccgaagaatccgactccatgaagagtaggtgcgtacctgatgccgcaggcgggtgttgcgggacaaaaaaatcatgctag

SEQ ID NO: 108678 - DNA, 816 bp, synthetic construct
  misc_feature 1..816: note = Description of Artificial Sequence: Synthetic coding sequence
  source 1..816: mol_type = other DNA
atggggaacggcggaagatcaggcctccaacaaggaaaaggaaatgtggacggtgtcgcggccactcctaccgctgcttccgcctcttgccagtatcggtgtatcgagtgcaaccaggaggcgaaggaactgtaccgcgactacaaccatggcgtgttgaaaattacaatatgtaagtcctgccagaaaccagtggataaatatatagagtatgacccagtcattattctcatcaacgccattctatgcaaggcgcaggcctacaggcacattctcttcaatacacagattaatattcatgggaagttgtgtatcttctgcctactttgcgaagcctatttgaggtggtggcagctgcaggacagtaatcagaacactgccccggatgacctgatcaggtatgctaaagagtgggatttctaccggatgttcgccattgctgccctcgaacagacagcatacttcatagggatcttcacttttctgtgggttgagagaccaatgactgcaaagaaaaaaccaaacttcatactgctgctcaaggctctgctcctgagctcgtatggaaagttgctcctgatacccgccgtgatatgggagcacgattacacgagcgtgtgtctcaagctgataaaagtctttgtcctcacctcaaacttccaggcaattcgcgttacactgaatatcaatagaaagctgtcctttctggccgtcctgtcaggcctcctactggaaagtatcatggtttacttctttcagagcatggagtgggatgtaggcagcgattatgcgatattcaaaagccaagacttctag

SEQ ID NO: 108679 - DNA, 807 bp, synthetic construct
  misc_feature 1..807: note = Description of Artificial Sequence: Synthetic coding sequence
  source 1..807: mol_type = other DNA
tagggacgctccggactgcagcaggggaaaggcaatgtggacggcgttgccgccactcccactgcagcaagcgcttcctgccaatatagatgtatcgagtgcaatcaagaagccaaagagttgtatagggactataatcacggtgtcctgaagatcaccatttgcaagagctgtcagaaacccgttgataaatacatcgagtacgatccggtgattatcctgatcaacgctattctatgcaaagcccaggcttatcgtcatatcctctttaatactcagattaacatccacggcaagctgtgcattttctgtctgctgtgcgaggcatacttacggtggtggcagctacaggactctaatcagaatacagcccccgacgatctcatcaggtatgccaaggaatgggacttttataggatgtttgcgatcgcagctctggaacaaacagcatatttcatcggcattttcacctttttatgggttgaacgcccgatgaccgccaaaaaaaaaccgaatttcatactgctcttgaaggctcttctcctgtcctcttacggcaagctgctgcttatccctgccgttatctgggaacacgactatactagtgtgtgcctgaaactcatcaaggtttttgtcttaaccagcaactttcaagctatccgggtcaccctgaacattaacagaaagctgagcttcctggccgtgcttagtgggttgttgctggaatccatcatggtgtacttcttccagagcatggaatgggacgtcggaagcgactatgctatttttaaatcccaggacttttag

SEQ ID NO: 108680 - DNA, 2547 bp, synthetic construct
  misc_feature 1..2547: note = Description of Artificial Sequence: Synthetic coding sequence
  source 1..2547: mol_type = other DNA
atgaactcttcatctgctaacatcacgtacgccagcaggaaaagacgtaagcccgtgcagaagaccgttaagccaatccctgctgagggcattaagagcaatccaagtaaacggcaccgcgataggctgaacacagagctcgataggctggctagccttttaccattccctcaggacgtgattaataaactcgataagcttagcgtattgcgattgagtgtgagctacttaagagctaaatcatttttcgacgtcgctctcaaatcctcccctacagagcgcaacggcgggcaggacaattgtcgggctgcaaacttccgcgaaggcttaaacttgcaagagggcgaattcctcctccaggctctgaacggttttgttctggtagtcacaactgacgccctggtgttttacgccagttccactatccaagactatttgggattccaacagtctgacgtgattcaccaaagtgtgtacgagctgatacatacggaggatcgggcagagttccagagacagctgcactgggccctgaaccctagccagtgtaccgaatctggtcaaggaattgaagaagctacaggcctccctcagacggtggtatgttacaatccagaccagataccccccgaaaattcccccctaatggagagatgttttatttgccgcctcaggtgcctgctggataatagttccggcttccttgccatgaattttcaggggaagctcaagtatctccacggtcagaaaaagaagggcaaggacggatccattcttccaccacaacttgccctgttcgcgatcgccacaccactccagcctcccagcatccttgagattagaactaaaaactttatctttaggacaaaacacaaacttgatttcacgcccatcggatgcgatgctaaggggagaatcgtgctcggctacaccgaagcggagttgtgtactcgcgggtctggatatcagttcatacatgctgctgatatgttgtactgcgcggagagccacatcagaatgattaaaaccggcgagtccggcatgattgtttttagactcctgaccaagaacaatagatggacatgggtacagagcaatgcccgcctactctataaaaatggtcgccctgactatatcatcgtcacccagcgccctctgactgacgaggaggggactgaacacctgagaaagaggaacaccaagctgccctttatgtttaccaccggggaagctgttctgtacgaggccacgaaccccttccctgccatcatggaccccctgcccctgcggacgaaaaatggtacctctggaaaggactctgccactacctccacattgagcaaggattcgctcaacccctcatcattgctagcggccatgatgcagcaggacgagtctatatatctttaccctgcctcctcaaccagtagtacagctcctttcgagaacaacttcttcaatgaatctatgaacgagtgcaggaactggcaggataacacagccccaatgggcaacgataccattctgaaacacgaacagatcgatcagcctcaagacgtgaattccttcgccggcggacatccagggttgttccaggacagtaagaatagcgatctctactcaatcatgaagaacctcggtatagattttgaagatattaggcacatgcaaaacgagaaattctttcggaacgacttcagcggtgaagtagacttcagggatattgacttgactgacgagatcttgacctacgtgcaggattctttgagcaaatctccctttatcccgtctgactatcaacagcaacagagcctagccctgaacagctcatgtatggttcaggaacatctccatttggagcagcagcagcagcatcaccaaaaacaggtggtggttgaacctcagcaacagctgtgtcagaagatgaagcacatgcaggtgaatgggatgtttgaaaactggaacagtaatcagttcgttccctttaactgccctcagcaggatcctcagcagtacaatgtgtttaccgaccttcacgggatctctcaggaatttccttacaagagtgagatggatagtatgccctatacccagaatttcatatcctgtaatcagcccgttctgcctcagcactcaaaatgcacagagctggattaccctatgggatccttcgaaccttccccatatcctaccacctccagtctcgaggatttcgtgacgtgcctgcagctacctgagaatcagaagcacggcctgaaccctcagtccgccatcataaccccgcaaacgtgctacgccggcgctgtctctatgtaccagtgccagcctgagccacagcacacacatgtgggacagatgcagtataaccccgtgctccctggccaacaggcttttctgaacaagtttcagaatggagttttaaacgagacataccctgccgagctgaataatattaacaacacgcaaacgaccacacacctacagcccctgcaccatccgtctgaagccaggccatttcccgatctgacaagcagtggcttcctctag

SEQ ID NO: 108681 - DNA, 2547 bp, synthetic construct
  misc_feature 1..2547: note = Description of Artificial Sequence: Synthetic coding sequence
  source 1..2547: mol_type = other DNA
atgaattcctcatcagccaacataacctacgcaagcaggaaaaggcggaagcccgttcagaagacggtgaagcctatacctgctgagggtatcaagagcaaccccagtaaaagacatagggaccggttgaatacagagctggatcgtctcgcctctctgctgccatttccacaggatgtcattaacaagttggacaagctgagtgtcctacggctctcggtgagctacttgcgcgccaaatcattctttgacgtggcgctgaagagcagccctaccgagcgtaacggtggacaggacaactgcagagccgcgaacttccgcgaaggtcttaacctgcaagaaggggagttcttactccaggcactgaatggatttgtcctggtggtgactaccgacgctctggtcttctatgcttccagtactatacaggactacctcgggtttcagcagtcagacgtgatacaccagtcagtgtatgagctcattcacaccgaggatagggccgaatttcagcgacagcttcattgggcactcaacccttcacaatgtacagaaagcggccaggggatagaggaagctaccggcctcccgcaaactgtagtgtgctataaccccgatcagattccccctgaaaactcaccactgatggagcgatgctttatttgcaggctgcgatgcctcctcgacaattctagtggatttcttgctatgaactttcagggtaagctgaaatatctccacggccagaaaaagaagggaaaggacggctccatactgcctccgcagctggctctattcgctatcgctacccctttacaacccccatccattttagaaattcgcactaagaactttattttcaggacaaagcataaactggactttactccaattggctgtgacgccaaagggcgaattgtgttgggatataccgaggctgagctctgtacgcggggtagtggttatcagttcattcacgcggctgacatgctgtattgcgctgagtcccatattagaatgatcaaaaccggtgagtccggaatgatcgtctttcggcttctcacaaagaataaccgttggacctgggtgcagagcaacgcgagactgctgtataagaatggacgccccgactacattattgtgacccagaggccactgacagacgaagaggggactgagcacctgcggaagaggaacacaaaactccctttcatgttcacgactggcgaggccgtcctctatgaggcaaccaatccattccctgcaatcatggacccacttccactgagaaccaagaatgggacctctgggaaggactctgccactacaagtaccctgagtaaggattccctgaacccaagcagcctccttgcagccatgatgcagcaggacgaatcaatttatctgtatcccgcaagttcaacttccagcacggccccgtttgagaataactttttcaacgagtcgatgaatgaatgcagaaattggcaggataacactgccccaatgggtaacgataccatcctgaagcatgaacagattgaccagccccaagatgtaaattcctttgctggcggtcaccctggtctctttcaggatagcaagaattcggacctatattccattatgaaaaacttaggaatcgacttcgaggacatacggcacatgcaaaatgagaaattttttcggaatgatttcagcggcgaggtggacttccgtgatattgacctgacagatgaaatcctcacctacgtccaggatagtctcagcaagtctcccttcatacccagcgattatcagcagcaacagtctctggccctaaattccagctgtatggttcaagagcatctgcatcttgagcagcaacaacagcaccaccagaagcaagtcgttgtggagccccaacaacagctatgccagaagatgaaacacatgcaggtgaatggaatgttcgaaaactggaacagcaaccaattcgtgccattcaactgccctcagcaagatccacagcagtacaacgtgtttaccgatctgcacggcatcagccaggagttcccgtataagagcgagatggatagcatgccgtatacgcagaacttcattagttgtaaccagcctgtgctgcctcagcattcgaagtgcaccgaactggactatcccatgggatctttcgagcccagcccttacccaacgacaagtagtctagaggacttcgtgacctgcctgcagctcccagaaaatcagaagcatgggttgaatccacaatcagctatcatcacaccccaaacttgctacgcaggtgctgtatcaatgtatcagtgccagccagagccacaacacacccacgtgggacagatgcagtacaaccccgtgctgccgggccagcaggccttcttaaataagttccaaaacggcgtgctgaacgagacatatcccgccgaattaaacaatattaataacacccagaccacaacacaccttcagcctttgcaccatccttctgaggcaaggcccttcccagatctcacttcctccgggtttctgtag

SEQ ID NO: 108682 - DNA, 993 bp, synthetic construct
  misc_feature 1..993: note = Description of Artificial Sequence: Synthetic coding sequence
  source 1..993: mol_type = other DNA
atggccgacattattgcacggctccgggaagacggcattcagaagcgagttatccaggagggccgaggagaactgcctgactttcaagacggaaccaaggccacttttcactaccggacattgcacagtgacgacgaggggaccgtgctcgacgatagcagagcgagaggaaagccaatggagctgatcattggaaagaaatttaaactgcccgtctgggagaccattgtttgcaccatgagggagggcgagatagcccagttcctttgcgatattaagcatgttgttctgtatcccttggtcgctaaatcactgcgaaatattgcggtcggaaaggatcccttggagggccagcggcattgctgtggcgtggcacagatgagggaacactcttcactggggcatgccgaccttgatgctctccaacaaaaccctcagcctctgatttttcacatggaaatgcttaaggttgagtcccctgggacttatcagcaagacccatgggccatgacagatgaagagaaagctaaagccgttcccctcattcaccaagaggggaatcgtctctaccgggagggtcatgtgaaagaggccgcagctaaatattacgacgcgatagcctgtctgaagaatctgcaaatgaaggagcaacccggatcacctgagtggatccagctcgaccagcagattactcccctgctgttgaattactgccagtgcaagctcgttgtcgaggaatactatgaggtgctggaccactgctcgtctattcttaacaagtacgatgataatgtcaaagcttacttcaaacgtggaaaggctcacgcggcagtgtggaacgcccaggaggcccaggcggacttcgcgaaagtcctggaattagacccagctcttgcccctgtagtaagtcgggagctgcaggcgcttgaagccaggatcaggcagaaggacgaagaggacaaggcccgatttagaggcatctttagccactag

SEQ ID NO: 108683 - DNA, 966 bp, synthetic construct
  misc_feature 1..966: note = Description of Artificial Sequence: Synthetic coding sequence
  source 1..966: mol_type = other DNA
atggatgcagccctcctcctgaatgtggagggtgtcaagaagacgattttacatggcgggactggcgagctcccgaacttcataactggcagccgtgtaatttttcactttagaacaatgaagtgtgacgaggagcgcaccgtcattgatgactcccgccaggtgggacaaccaatgcacatcattattggcaacatgtttaagctcgaggtttgggagatattgcttacaagcatgcgggtgcatgaggtggccgagttctggtgtgatactatcgtggacgctccgtccgactaccagagggaaacttggaatctgtcgaatcacgagaagatgaaggccgtaccggttctgcacggcgagggcaaccggctatttaagctgggccgctatgaggaagctagcagcaagtatcaggaggcaattatttgtctgaggaatttgcaaaccaaagagaagccctgggaagtccagtggctgaagctggaaaaaatgataaataccctgatactgaactactgccaatgccttctgaagaaggaagagtactatgaagtgctcgaacataccagtgacatcctgaggcatcatcctggcatcgtgaaggcttattacgttcgcgcccgagcacatgcagaggtatggaacgaggcagaagcaaaggccgatctgcagaaggtgttagagcttgaaccctccatgcagaaagctgtgcgaagggaacttcgactccttgagaaccgtatggccgaaaagcaggaagaagagcgcctgcgttgtcgtaacatgctcagtcagggggccacacagcctcccgctgagccccccacagagcctccagcgcagtccagcactgagccacccgctgagccccccacagcaccgagcgcagaactttcagctggacctcccgcagagcccgccactgaaccaccaccgagcccaggtcactccctccagcactag

SEQ ID NO: 108684 - DNA, 975 bp, synthetic construct
  misc_feature 1..975: note = Description of Artificial Sequence: Synthetic coding sequence
  source 1..975: mol_type = other DNA
atggacgccgctctgctgcttaatgtcgagggtgtcaagaaaacaattctacacggcggaaccggtgagctgcccaattttataacaggaagccgtcataccggcgtgtatcctatcctgagtaggtcgctgcggcagatggcacagggcaaagacccgacagaatggcacgtgcacacatgtggactagccaatatgtttgcctatcatacactgggttatgaagacctcgacgagctgcagaaggaacctcagcctctcgtgtttgtaatcgaattgctgcaggtggatgccccatccgattatcagcgagagacatggaatctctccaatcacgaaaaaatgaaagcagtacctgtcctccacggagagggaaacaggctgttcaagctgggtcgctatgaggaagcctcctccaaataccaagaggcaattatctgtctaagaaacctgcagacaaaagaaaaaccttgggaggtgcagtggctgaagctggagaaaatgattaacaccctcatcctgaattactgccagtgcctcctgaaaaaagaggagtactatgaagtgctagagcatacgagcgatattctgagacaccaccccgggatcgtaaaggcctattatgtccgggccagggcccatgccgaagtatggaacgaagctgaggctaaagcagatctacagaaagtgttggaactggagccaagcatgcagaaagccgtgaggagggaactgaggctcttggagaacagaatggctgagaagcaggaagaggaacgcttacgctgtcggaatatgttgtcccagggcgccacccaaccccccgctgagccacctacggagccgccagctcagagtagcaccgaacccccagcagaacctcctaccgcgccaagcgcggagctgtctgccggcccacctgctgaacccgccactgagccaccaccttctcctggacattccctgcagcattag

SEQ ID NO: 108685 - DNA, 1155 bp, synthetic construct
  misc_feature 1..1155: note = Description of Artificial Sequence: Synthetic coding sequence
  source 1..1155: mol_type = other DNA
atggatgcagctctcttactgaacgtcgagggcgttaaaaagaccatcttgcatgggggaacaggcgagctgcccaatttcattactggatcccgggtgatttttcacttccgcaccatgaaatgcgacgaggagcgtactgtgattgacgactcccggcaagtgggccagccaatgcacattatcatcggtaacatgtttaagctcgaagtgtgggagatcctgctgacttcaatgcgcgtacatgaggtggctgagttctggtgtgacaccattcacacaggggtgtatcccatactgtcacggtccctgaggcaaatggcacagggtaaggaccccaccgagtggcacgtgcacacatgtgggcttgcaaatatgttcgcctaccatacccttgggtatgaagatcttgatgagctgcagaaagagcctcaacccctggttttcgttatagagctactccaagtcgacgcaccttctgactatcaaagagagacgtggaacttgtccaaccacgagaaaatgaaggctgtacccgttctccatggggagggcaatcggttgttcaagctggggagatatgaagaggcttcctctaaataccaggaagcaattatttgcctgaggaacctgcagacaaaggaaaagccttgggaggttcagtggcttaaacttgaaaagatgatcaataccctgatactcaactattgccagtgcctgctgaagaaggaagagtattacgaggtcttagagcatacctccgatattctgcggcatcatcctggaattgttaaggcctactacgtgcgcgcccgagcacatgctgaggtgtggaatgaggcagaggctaaggcagacctccagaaggtcctggagctcgagcctagtatgcaaaaggccgtcaggcgggagttacggcttctcgaaaatcgaatggccgagaagcaggaggaggagcgcctgcgctgtagaaatatgctgtcccagggcgccacccagccacctgcagaaccacccacagaaccaccggctcagtcgtcgactgagccacccgccgagccccccaccgcccctagcgccgaattgagcgcagggcccccagcagagcccgccaccgaacctccgccctctcctggtcatagtctccagcattag

SEQ ID NO: 108686 - DNA, 981 bp, synthetic construct
  misc_feature 1..981: note = Description of Artificial Sequence: Synthetic coding sequence
  source 1..981: mol_type = other DNA
atggatgcagctctgctgctgaacgtggagggagttaaaaaaactatcctccatggagggacaggtgaacttccaaactttataactggcagccgcgtgatctttcatttccgcacaatgaaatgcgacgaagagagaaccgtcattgacgacagcagacaggtgggtcagcccatgcacatcatcatcggaaacatgttcaaactggaagtgtgggagattttgctgacctctatgagagtgcatgaagtagccgagttctggtgtgataccattcacacaggcgtttacccaatcctgtctcgctcccttaggcagatggcccagggaaaagaccctacagaatggcatgtacacacctgcggcctcgctaatatgttcgcctaccatacactaggttacgaggacctcgacgagcttcagaaggagcctcagccactcgtcttcgttatagagttgctccaggtagatgctccttccgactaccagcgcgaaacatggaatcttagtaaccatgaaaaaatgaaggcagtccctgtcctccacggtgaaggtaatcgcctgtttaagttagggcggtacgaggaggcttccagtaaataccaggaggctatcatttgtctgcggaaccttcagaccaaagaaaagccatgggaagtccagtggctaaagttggagaagatgatcaacacgctgatcctgaattactgtcagtgtctgctgaagaaagaggaatattatgaagtcctggagcatacctcagacatcctgaggcaccatcctggtattgtcaaggcctactatgttagagcccgtgcccatgctgaagtttggaacgaagctgaggctaaggcggaccttcaaaaggtgcttgagcttgaacccagcatgcagaaggctgtgagacgagaacttagactgttggaaaacgcctggcgccgctctcggagacgcagcggctgtgccgccggtacctgctag

SEQ ID NO: 108687 - DNA, 975 bp, synthetic construct
  misc_feature 1..975: note = Description of Artificial Sequence: Synthetic coding sequence
  source 1..975: mol_type = other DNA
atggatgcagcgctgttattaaacgttgaaggggtgaagaagactattcttcatggagggacaggtgaactgcctaatttcatcacgggttcacggcatactggggtataccccatccttagccgtagcttgaggcagatggcacaggggaaggaccctactgagtggcatgttcacacctgtgggctggccaatatgtttgcataccataccctggggtacgaggatcttgacgaactccagaaagaaccccagcctctggtgtttgttattgaactccttcaggtggacgcaccatccgactatcaacgagagacgtggaatctgtccaatcacgaaaagatgaaggctgtaccagtcctgcatggcgagggaaatcggctgttcaaacttggtcggtatgaagaggcatcttccaaatatcaggaggcgataatttgcctgaggaacctgcagactaaagagaaaccttgggaagtccaatggctgaagctggagaagatgattaacaccctgatcctgaactactgccagtgcctcttgaaaaaagaggaatactacgaggtcttagaacataccagtgatatattgaggcaccatcctggaattgtcaaagcatactatgtgcgagcgagagctcacgccgaggtgtggaacgaggctgaggcaaaagcagatcttcagaaggtcctggaactggaacctagtatgcagaaggctgtgcggcgcgagctgcgcttgctcgaaaacaggatggcagagaagcaagaagaggagaggctgcgctgtaggaacatgcttagtcagggagcaacgcagccaccagctgaacccccaacggagccaccggcccagtcaagtacagagcccccagccgaacctcccacggccccaagtgctgagctttcagccggaccccccgctgagcccgcaaccgaaccccccccaagccctggtcattcactgcagcactag

SEQ ID NO: 108688 - DNA, 1251 bp, synthetic construct
  misc_feature 1..1251: note = Description of Artificial Sequence: Synthetic coding sequence
  source 1..1251: mol_type = other DNA
atggccgcaaccactgcgaacccagaaatgacctcagatgttccgtcattgggaccggctatcgcgtctggaaacagtggcccaggcatacagggcggcggagcaattgtacagagggccattaaaaggaggcctggcctagacttcgatgacgacggagaaggaaattctaaattcctgcggtgtgatgacgaccagatgagtaacgataaagagcgctttgctcgatctgacgatgaacagtcatccgccgacaaggagcgtctcgctcgcgagaaccacagcgagattgaacgccggagaagaaataagatgaccgcctacatcactgagctaagcgacatggtgccgacctgctcagctcttgctcggaaaccagataagctgactatcctgaggatggccgtgagccatatgaaatccctgaggggaaccgggaatacatctacggacgggagttacaagccttccttccttactgaccaggagctaaaacaccttattcttgaagccgccgacggtttcctgttcatcgtctcttgtgagactggtagagtggtttacgtgagcgactccgtcactccagttctcaaccagccccaatctgaatggtttggctccaccttgtatgaccaggtgcaccctgatgatgtggataaactgcgggaacagttgtcgactagcgagaatgctctgaccggacggattttggaccttaagaccgggaccgtgaaaaaggagggccagcagagtagcatgagaatgtgcatgggatctcggaggagctttatatgccggatgaggtgtggctcctcctcagtggaccccgtgtccgtgaacaggttgagcttcgtccgaaaccggtgcagaaacggactggggagcgtcaaggacggggagcctcacttcgtcgtggtgcactgcaccggttacataaaggcttggccgccagccggtgttagcctgcccgatgatgacccagaggcagggcaggggagtaaattttgcctcgtggccataggtcgactgcaggtgacctcttcgcctaactgtactgacatgtccaatgtctgccaacctaccgaattcatatccaggcacaatattgaggggatcttcacgttcgttgaccataggtgtgtcgcaacagtgggataccaaccacaagagttgctaggaaagaacatcgtcgagttttgccatccggaggaccaacaactgctgcgcgattcttttcagcaggaactgtag

SEQ ID NO: 108689 - DNA, 2223 bp, synthetic construct
  misc_feature 1..2223: note = Description of Artificial Sequence: Synthetic coding sequence
  source 1..2223: mol_type = other DNA
atgtaccatcattgggtgcagcccttgcccctcgagacactcgatctggaattcaaggtcgaagagcccctctcccggggtttactatctggcgaccaggccggactcaagtatcttctcctcgccttcctgcggctagactttgatgatgacggagagggcaacagtaagtttttgcgttgtgatgatgatcaaatgtccaacgataaggagagattcgctagggagaaccactcagaaattgagagacggcgacggaacaagatgaccgcctatatcaccgagctctccgacatggttccaacgtgtagtgctctggcaagaaaacccgacaagctgaccattctgcggatggccgtgagtcatatgaagagcctgcgagggaccggcaacacaagcaccgatgggtcatacaaaccatcattcttaactgatcaggagctgaagcatctgatcctggaggccgccgatgggttcctcttcattgtctcttgcgagaccgggcgggtggtgtacgtatccgactcagtgactccggtgttaaatcaaccacagagcgagtggtttggtagtactctctatgaccaggtgcatcccgatgatgtggacaaactcagggagcagctgagcacttccgaaaacgctctgaccggcaggatccttgatctcaaaaccggtaccgtaaagaaagaagggcaacagagtagcatgcgaatgtgtatgggatctcgccgcagcttcatctgtaggatgcgatgcggctccagtagcgtcgaccctgtgagcgtgaacaggctatcgtttgtgaggaataggtgtcgaaacggcttaggctccgttaaagatggggagccacacttcgtcgttgtccactgtaccgggtacatcaaagcttggccgcccgctggggtatcacttcctgacgatgaccctgaggctggccaaggaagcaagttttgtctggttgccattgggcggctccaggtgacctcgtcccccaactgcaccgacatgtcgaacgtgtgtcagccaacagagtttatctcccgccataatatcgagggtatcttcacgttcgtggatcaccgatgcgtggccaccgtgggataccagccccaggagctactcgggaaaaatattgtggaattttgtcatcctgaggaccagcagctgttaagagactcatttcaacaggtggtgaagttgaaaggccaggtgctttccgtgatgtttagattccgatcaaaaaatcaggagtggttgtggatgaggacgagctcattcactttccagaacccctatagtgacgaaatcgagtatataatatgcactaatactaacgttaagcccttgacctatcgacaacaacagcagcagaccgaattagatatggttccaggccgcgacgggctagcttcttacaatcacagtcaggtcgtgcagccagttaccactaccggcccagaacattctaaaccactggagaaaagcgatgggcttttcgcccaggaccgggaccctcgctttagtgaaatttaccacaatatcaacgctgatcaatccaagggcatatcctccagcaccgtgcctgccacacagcagctgttctcacagggcaacactttccccccaacccctcgaccagctgaaaactttagaaatagtggtctggctccccccgtgactatcgtgcaaccaagcgcaagtgcaggacagatgctggcccaaatttccaggcacagcaaccctacccaaggcgctactcctacatggacccccacgaccaggagtggcttctccgcccaggtggcaactcaagccaccgccaaaacccgaacttcccagtttggggtgggatcctttcagactccatccagtttctcttctatgtcccttccaggtgctcctacagcctcacccggagccgctgcttacccatcgctaaccaaccggggctctaatttcgctcccgaaacaggccagaccgctggtcagtttcaaaccaggacggccgaaggcgtcggagtttggcctcaatggcaggggcagcagccccatcacagatcatcctcgtccgagcagcacgtgcagcagccacccgcacagcagcccggccaacctgaagtttttcaggagatgctgtcaatgctgggcgatcagtccaactcctacaacaatgaggaattcccagatctaacgatgtttcccccatttagcgaatag

SEQ ID NO: 108690 - DNA, 1251 bp, synthetic construct
  misc_feature 1..1251: note = Description of Artificial Sequence: Synthetic coding sequence
  source 1..1251: mol_type = other DNA
atggctgctacgaccgcaaaccccgagatgaccagcgatgtgccatccctggggcctgcaatcgcctctgggaacagcgggcccggcattcaaggaggcggagccatcgtccagagggccattaaaaggcgacctggtctcgatttcgatgatgatggtgagggaaacagcaaatttctccggtgtgatgacgaccagatgtctaacgacaaggaacggttcgctagatccgacgatgagcagtcttctgccgataaagagcgcctggcgcgagagaaccactcagaaatcgagcgccgccggaggaacaagatgaccgcgtacatcaccgagctaagcgacatggtccctacatgttccgcgttggcacgcaagcccgacaaactcaccatcctcaggatggccgtgtctcatatgaagtctttgcgcggaacaggaaacacttctaccgatggttcttacaaaccaagctttttgaccgaccaggagctgaagcacctcattttagaagcagccgacggcttcttgttcatcgtctcctgcgagacaggccgcgtagtctacgtttctgattctgtaacccccgtgctcaatcagcctcagtccgagtggttcgggtcaactctgtacgaccaagttcaccccgatgacgttgataagcttcgggaacagctttctacatccgaaaacgccctgacagggcggattttggacttaaagaccggcacagtgaagaaggagggtcaacaatcatcaatgaggatgtgtatgggatctaggcgctccttcatttgccggatgaggtgtggatcttcttctgtggatcctgtatcagttaaccgtctctcattcgtaaggaacaggtgcagaaatggcttggggtctgttaaagatggtgagcctcactttgtcgtcgttcactgtactggttatattaaggcttggccaccagcaggagtgtcattgccagacgacgatcctgaggcaggccagggctccaaattttgcctggtggcaatcggccgcctgcaggtgacatcatccccgaactgtacggatatgagtaacgtctgtcagccaaccgaatttatctcgcggcacaacatcgaagggatctttacgttcgttgatcaccgctgcgtagccacagtgggttaccaacctcaagagctgttgggcaaaaatatcgtggagttttgtcaccctgaagaccagcagctactgagggactccttccaacaagaactgtag

SEQ ID NO: 108691 - DNA, 2325 bp, synthetic construct
  misc_feature 1..2325: note = Description of Artificial Sequence: Synthetic coding sequence
  source 1..2325: mol_type = other DNA
atggccgccacgactgcaaatcctgaaatgacctctgatgtgccttcactgggaccggccatagccagcggaaatagcggaccagggatccaagggggcggggcaatcgtgcaacgggccattaaaagaaggcccggcttagattttgatgatgatggagaaggtaactcaaaattcctgagatgtgatgacgatcaaatgtctaatgacaaggaaaggtttgcgcgggaaaaccacagtgagatcgagcgccgtcggaggaataagatgacagcgtatatcactgagttatctgacatggtgcctacctgcagcgcgctggcccgtaagccagataagctcacgatcctgcgaatggccgtctcccatatgaagtccctgcgtggtaccggaaatacaagcaccgacgggtcatataagcccagtttcctgaccgaccaggaactgaaacatctgatcctcgaagcagccgacggattcctgttcatcgtgtcgtgtgagacaggaagagtcgtgtatgtaagtgattctgtcacacccgtgctgaatcaaccccaaagcgagtggttcggaagtacattgtacgaccaggtgcacccggacgatgtcgacaaacttcgcgagcagctctctacctccgaaaacgctttgacagggagaatcctcgacctcaaaactggaactgtcaagaaggagggacagcagtcatccatgcgtatgtgcatggggtctaggcgatctttcatttgtcggatgcggtgcggatcttcatctgtcgatccggttagcgtcaatagactcagtttcgtgcggaataggtgccggaacggcctgggttccgtcaaggatggcgaaccccattttgtggtcgtccattgcacggggtacatcaaggcttggcctccagccggagtatcccttccggacgacgatccggaagccgggcagggctcaaagttttgccttgtggccatcggccgtctgcaggtgacgtcaagccctaattgcactgacatgtctaacgtctgtcaacccacagaattcatctcaaggcataacattgaagggatatttacatttgtggaccatcgctgcgtggcaacggtgggttaccagcctcaggaactcctcggtaagaatattgtggaattctgtcatccagaggaccagcaattgctgcgcgattcttttcaacaggtggtcaaattgaaaggccaggtgttgtctgttatgttcaggtttcgtagtaaaaaccaggagtggctttggatgcgaacgagctcttttacattccagaacccctacagtgatgagatcgaatacattatttgtacaaacacaaacgtgaaaaatagcagtcaagagcccaggcctactcttagcaacactattcagagacctcagttggggccaaccgccaacttgcccctggagatgggctcaggacaactcgctcctcggcagcagcagcagcagacagaactcgacatggtgcccgggcgggacgggctggccagctataatcattcccaggtagtgcagccagtaactacgacaggcccagaacactccaagccacttgaaaagtcagatggtctcttcgcccaggacagagaccctagattctctgaaatctatcacaacatcaatgctgaccagagcaaaggtatctcctcgtccaccgtgcccgccacacaacagctgttcagtcaggggaatacatttccacccacgccaaggccagcagagaacttcagaaacagcgggctggcccctcctgttactattgtccagccatcagcttccgcaggacagatgctggcgcagatctcaaggcacagcaaccctacccagggcgcgacacccacctggacccctacaactagatctggtttttcagcccagcaggtcgcaactcaggccacagccaaaacacgcactagccagttcggggtcggctcattccagacgccatcgtccttctcctccatgtctctacccggcgcccccactgcctctccaggcgctgccgcgtatccaagccttactaaccgcggttctaactttgctcctgaaacagggcagaccgcaggccagtttcagaccaggactgccgaaggtgtaggagtctggccccagtggcaaggccagcagcctcaccaccggtctagctcttcagagcagcacgttcagcagccacctgcgcagcaacccggccaaccagaagtctttcaggagatgctgtcgatgctcggtgaccagagcaattcttacaacaatgaagaattcccggatctcaccatgtttccccccttctcagagtag

SEQ ID NO: 108692 - DNA, 2328 bp, synthetic construct
  misc_feature 1..2328: note = Description of Artificial Sequence: Synthetic coding sequence
  source 1..2328: mol_type = other DNA
atgacatctgacgtaccctcactgggacctgcaattgcatcgggcaatagtggtcccggtatacagggtggtggcgccattgtgcagcgcgccattaagagacggcccgggctggactttgatgacgacggcgaaggcaacagcaagttcctgcggtgcgatgacgatcagatgagcaatgataaggagaggtttgcacgctctgatgacgaacagagcagcgctgacaaagagaggttagccagggagaatcactccgagatcgagcgacggaggcgaaataaaatgacggcgtacatcacagagctttctgacatggtgccaacctgcagtgccctggcacgaaaacccgataagctcacaatactgcgtatggccgtcagccatatgaaatcactcaggggcactggtaacaccagtacagacggatcatataagccttcttttctgaccgatcaggaactaaaacacttaatactagaagctgctgacggattcctgtttatcgtaagctgtgagactggtcgggtcgtctatgtaagcgattccgttactccagtgctgaatcaaccgcagtctgagtggttcggttccaccctgtacgatcaggtccacccggacgacgtcgacaagctgcgcgaacagctgtctacgtccgaaaacgcactgaccggacggattttagacctgaaaacagggacggtgaaaaaagaggggcagcaatcgtccatgaggatgtgtatgggatccagacggagttttatctgccggatgcgatgcggatccagttctgttgacccggtgtcagtcaacaggctctcctttgtgaggaaccgttgtcggaacggactaggcagtgtaaaggacggagagccccactttgttgtggttcactgtactgggtacatcaaggcttggccgccggcagatgacgaccccgaggccgggcagggctccaagttttgcctggtggccataggacgcttgcaggttacaagcagtcccaactgtacggacatgagtaacgtatgccagccaaccgagttcattagcagacacaatattgaagggatctttactttcgtggaccatcgttgcgtggcgaccgttggctatcagccccaggagttattgggtaagaatatcgtggaattctgtcatccagaggaccaacagctgttgagagacagctttcagcaggtggttaagctcaaagggcaggtactcagcgtcatgttccggtttaggtccaagaatcaagagtggctctggatgcggaccagcagctttacctttcagaacccgtatagcgacgaaatcgagtatattatctgcactaatactaatgtaaagaatagctcccaggaaccacgaccgaccctgtccaacactatccaaagaccccagttagggccaaccgctaacctgccactagaaatgggctcaggccagctggcaccgaggcagcagcagcagcagaccgaactagatatggtgccaggcagggatggtctcgcctcttacaaccactcccaggtagtgcaacctgtaactacaacaggacccgaacactctaagcccctagagaaatctgatggcctctttgcacaggaccgcgaccccaggttcagtgaaatataccataacattaatgcggaccagagcaaaggcatcagctcttcgactgtcccagcgacccaacagctcttctcacagggaaacaccttcccacccacaccccggcctgctgagaacttccgcaactcgggactcgctccccctgtgactatcgtgcaaccatccgccagcgccggtcaaatgctcgcacagatctcacgccacagtaatcctacacaaggcgctacaccaacgtggactccaactacacgatctgggttctccgctcagcaggtagcaacacaggcaaccgcaaagacacgtactagccagttcggcgtgggttccttccaaactccctcttccttttcctccatgtcgctgcctggagctcccacggctagtcccggtgccgccgcctacccatcgctgactaacaggggttcgaatttcgctcccgagacaggccagaccgccggacagtttcaaacacggaccgccgagggggtaggcgtctggccccaatggcaaggacagcagcctcaccaccggtcctcttcctctgagcagcacgtgcagcagcctcccgcacagcagcctggtcagcccgaagtcttccaggagatgctgagcatgttaggcgatcagtctaatagttataataacgaagaattccccgacttgaccatgtttccaccattctcagaatag

SEQ ID NO: 108693 - DNA, 1428 bp, synthetic construct
  misc_feature 1..1428: note = Description of Artificial Sequence: Synthetic coding sequence
  source 1..1428: mol_type = other DNA
atgtccgctaccgccgctgcccgaaagagggggaagcctgccagtggtgcaggagctggagcgggggcaggcaaaaggaggcgcaaagccgacagcgccggggacaggggaaagtccaagggaggtggcaaaatgaatgaggagataagctcagatagtgagtccgaaagtttagccccccggaaaccggaagaggaagaagaggaggagcttgaggagactgcacaagagaaaaagctgaggctggcgaagctctatctcgagcaactgcggcaacaggaggaggaaaaggccgaagccagggcctttgaggaggatcaggtggctggcaggctgaaggaagacgtgcttgaacaacgaggcagattgcagaaactcgtcgcgaaggagattcaggcgcccgcatccgcggatatcagggtgctacggggacatcaactgtccattacgtgtcttgtcgtcacaccggatgacagcgcaatcttctcagccgcaaaggattgctctataatcaaatggagcgtggagtccggtcgcaaactgcacgttattcccagagccaaaaagggagcagaagggaaacctcctggccatagctcacacgtactttgcatggccatttcttccgatgggaagtatctcgcatcaggtgataggtccaaactgatccttatctgggaggcacagtcatgccagcatttgtataccttcacgggtcaccgggacgccgtgagtgggctggctttcagaagggggacacatcagctatactcgacgtctcatgatagatcagttaaggtatggaacgtggctgaaaactcctatgtcgagacgctctttggtcaccaggacgcagtggccgccctagatgcattaagccgggagtgctgcgtgactgcagggggtagggatggcacagtgcgggtttggaaaattccagaggagagtcagctcgtgttttacgggcatcagggatcaatagactgcattcatctgatcaacgaagaacatatggtgtccggagcggacgatggcagcgtcgccctgtggggactgtcaaagaaacgacccctcgccctgcagcgcgaagcccacgggctgcggggcgagcctggcttagaacagccgttctggataagctcagttgcggccctgttaaataccgatctggtcgccacaggatcgcacagcagctgtgtgagactgtggcagtgcggcgagggattcaggcagcttgatctgctttgtgatatcccgctggtaggttttattaactcactcaaattctctagctccggtgatttccttgtcgcaggggtcggccaggagcatagactgggacgttggtggcggattaaagaagctcgcaacagtgtttgtattattccactgcgtagagtgcctgtacctcccgcagcaggtagttag

SEQ ID NO: 108694 - DNA, 2154 bp, synthetic construct
  misc_feature 1..2154: note = Description of Artificial Sequence: Synthetic coding sequence
  source 1..2154: mol_type = other DNA
atggctacccctgccgccgtaaatcctcccgaaatggcatctgatatacctggatcagtcaccttacctgtagctccaatggctgctacaggccaggtgagaatggccggggccatgcccgctagagggggcaagagaaggtctgggatggactttgacgacgaggatggcgaagggcccagtaaattttcaagggaaaaccacagcgagatcgaacgtcgcagaagaaataagatgactcaatacatcaccgagctttcagacatggtgcctacatgttcggccctcgcgagaaagccagataagctaacaatcctgcggatggctgtgagccatatgaagagtatgcggggtaccggcaacaagtcgaccgatggtgcctataagcccagctttctcaccgagcaggagttgaaacacttaatactcgaggctgccgacggatttctgttcgtggtagctgcggagactggaagggtgatttacgtgagtgatagtgtgactcctgtgcttaaccagcctcagagtgagtggtttggatcgaccttatatgaacaggtgcaccctgatgatgtcgaaaagttacgggagcagttgtgcactagtgagaattctatgaccgggaggattctcgatctcaagacagggactgttaagaaagaagggcaacagtccagcatgaggatgtgcatgggctctcgccgcagttttatctgtagaatgcggtgtggcaacgctcccttggaccatctacccctgaatcgcataaccaccatgagaaagcgcttcaggaatgggctgggccctgttaaggaaggagaggctcagtatgcagtggttcattgcactggctatattaaggcctggccccccgccggtatgacaatcccagaggaagacgcagatgtgggccagggcagcaagtactgtctggtcgcgataggtcgactgcaagttacctcctcgcccgtgtgcatggacatgaatggcatgtcagtacccactgaattcctatctcggcacaacagtgacggaattatcacttttgtggatccccggtgtattagcgttatcgggtaccaaccacaagatctactagggaaggacattctcgagttttgccatccggaggatcagagccatttgagagaaagtttccagcaagtggtgaagctgaagggacaggtgttgtctgtcatgtacagattcagaacaaagaacagagagtggatgcttatcaggacctctagttttacgttccagaatccttatagcgatgaaatcgaatatataatctgtaccaacactaacgtgaagcagttgcagcaacaacaggccgaactagaggtgcaccagagggacgggctctcgagctacgatctgagccaggtgccggtgcccaatctgcctgcaggcgtccacgaagcaggtaaaagcgtggagaaggccgacgccatcttctcacaggaacgggacccacgtttcgctgagatgtttgccgggatctcggcctccgaaaaaaagatgatgtcttccgcctccgctgctggcacacagcagatctattctcaggggtccccctttccctcgggccacagcggcaaggctttttcatctagcgtggtgcatgtccccggcgtgaacgacattcaaagctcaagctccactgggcagaatatgagccagatttcacggcagctgaaccagtcccaggtcgcttggacggggtctcgccctccatttccggggcagcagataccttctcagagtagtaagacccagagtagtcctttcggaattggcacgagccacacctacccggccgaccccagcagctattccccacttagcagtccggctacttccagcccctcgggtaacgcatactctagccttgccaatcgaactccgggttttgcagagtcgggccagagcagtggacagttccaggggaggccttcagaagtatggtctcagtggcaatctcagcatcacgggcagcaaagcggagagcagcacagtcaccaacagcccggacagacagaggtgttccaggacatgcttcctatgcctggagacccaacccagggcactggcaactacaatatcgaggatttcgcggaccttggcatgtttccgcctttctcggaatag

SEQ ID NO: 108695 - DNA, 2118 bp, synthetic construct
  misc_feature 1..2118: note = Description of Artificial Sequence: Synthetic coding sequence
  source 1..2118: mol_type = other DNA
atggccagcgacatcccaggaagcgtcacacttccagtggctcctatggcagccacagggcaggtgaggatggctggcgctatgcctgctaggggcgggaagcggaggagcggtatggactttgatgacgaggacggcgaaggccccagtaagttctcacgcgaaaaccactcagaaatcgaacgacggcggcgaaacaagatgacccagtatatcactgaactgtcagatatggttccgacctgcagtgctctcgctcgcaagcctgacaagctgaccatacttcgcatggccgtgtcccacatgaagtcgatgagggggacaggaaataagagtacagacggagcatacaaaccaagttttttgaccgaacaggagctgaagcatctgatcttagaagccgccgatggcttcctttttgtagtagccgccgagactggacgggttatctatgtatccgacagcgttaccccagtcctgaatcagccccagtccgaatggtttggaagcacactgtacgagcaggttcaccccgacgacgtggagaaattacgcgagcagctttgcacctccgagaactcaatgacaggtaggatcctcgacttaaagacggggacagtaaaaaaagagggacaacagagctcgatgcgcatgtgtatgggctctcgccgctcattcatatgtagaatgagatgtgggaatgctcctctagatcacctgccattgaaccgtataacgaccatgcggaagcgcttccgcaacgggttgggacctgtcaaggagggggaggcgcagtatgctgtggtgcattgtacgggatacattaaagcatggccgcccgccggaatgaccatacctgaagaggatgctgacgttgggcaggggagcaaatactgtctggtcgctattggccgacttcaggtgacatctagtcccgtctgtatggacatgaacgggatgtctgtgcccactgagtttctctccaggcacaactccgacgggattatcacgttcgtggacccgaggtgcattagcgtgattggctatcagccacaggatctgctcggcaaggatatcctggagttttgccatcccgaagaccagtcgcaccttagagaatcatttcagcaggttgttaaacttaaggggcaagttttaagtgttatgtatcgattccgaactaagaaccgggagtggatgctgatcaggacctcttcctttaccttccaaaacccttatagcgatgagatcgaatatatcatctgtaccaatacaaacgtgaaacagctgcagcagcagcaagccgagcttgaggtgcaccaacgcgacgggctgtcttcgtacgacctctcccaagtgcctgtgcctaatcttccggcgggagtacatgaggctggtaagagcgttgaaaaagccgacgccatcttcagccaggaacgggaccctagattcgctgagatgtttgcaggtattagcgctagtgagaaaaaaatgatgagcagcgctagtgccgccggtacacagcagatatactcccaaggctcaccctttcctagcgggcacagcgggaaggcattctcatcttcggttgttcatgtacctggcgtcaacgatattcagtcttcttccagcaccgggcaaaacatgtcccagatctctcgccagcttaaccagtcccaggtcgcctggaccgggtcgcggccaccgttccctgggcaacagattcctagccaaagtagcaagacccaatcttccccttttggaatcgggaccagccacacataccctgcagatccttcgagctactccccccttagctctccggccacatctagccccagtggtaatgcatacagttcattggctaacaggacaccagggtttgcagaatccgggcaaagttcgggccagtttcagggacgacctagtgaggtgtggtcacagtggcagagccagcatcacggccaacagtcgggcgaacagcattcccaccagcaacccggccagaccgaggtgtttcaagacatgctccctatgcctggtgatccccgtaatgaatggtggtccccgcacagccgccagcacttccgccaaccaatctcctacgcccggatgtag

SEQ ID NO: 108696 - DNA, 2121 bp, synthetic construct
  misc_feature 1..2121: note = Description of Artificial Sequence: Synthetic coding sequence
  source 1..2121: mol_type = other DNA
atggcctccgatattccaggtagcgtcaccctccccgtcgcaccgatggcggccactgggcaagtacgaatggccggcgcaatgccagcaaggggaggcaagcgcaggagcggcatggacttcgatgatgaggatggggagggcccatccaaattttcacgcgaaaaccattcagaaatcgaacgacgcaggcgcaataagatgacccagtatatcaccgaattgtccgacatggtcccaacttgtagcgccctggctaggaagcccgacaagctcacaatcttgcgcatggccgtgtcgcacatgaagtccatgaggggtacgggaaacaagtccacagacggcgcttataagccctctttccttactgaacaggaactcaagcacctgatccttgaggccgcagatggctttctgtttgtggtcgccgcagagactggaagggtaatttacgtgtctgatagcgtaactcctgtactcaaccagcctcagtctgagtggtttggctcaacactttatgaacaggtgcatccagacgacgtggagaaactacgggagcaactttgcacatcagagaacagcatgacaggacggatcctagacttaaagaccggcacagttaaaaaagagggccagcagagttccatgcgcatgtgtatgggctcccggcgaagttttatctgcaggatgcgctgtgggaacgctccactagatcacctgcccctgaaccgaattactaccatgcgtaagcgattccgcaatgggctcggccctgttaaggagggggaagcacaatatgcggtcgtccactgcacgggatatatcaaggcctggcccccagccggcatgacaattcctgaggaagacgccgatgtcggccaagggtctaagtactgtcttgtggcaattggccggctgcaggtgacaagttctcccgtctgtatggatatgaacggaatgtccgtacccacagaattcctgagcagacataacagtgatgggataatcaccttcgttgatccgcgatgtattagtgtaatcggctaccaaccccaggacttgttaggtaaagatatccttgaattttgtcatccagaagaccaaagccacctgcgtgagagcttccagcaggtagtgaagctgaaaggccaggtcctgagtgtcatgtatcgctttcgcaccaaaaaccgggaatggatgttaatccggacttcttctttcacgttccagaacccttactctgatgagatcgagtatatcatttgcactaatactaatgtgaagcagttgcagcaacagcaggcggaactcgaagtacaccaacgggacggactctcttcatacgacctttcccaagtgccagtgcctaacttgcctgctggggtccatgaggcagggaaatcagtggaaaaggcagacgccatattctcccaggaacgtgacccccggttcgctgagatgttcgctgggattagtgcttctgaaaagaaaatgatgtcctcagccagtgctgctggaactcagcagatatacagccaggggtctcccttcccttccggacactccgggaaagcattcagtagcagcgtggtccatgtgcctggcgtgaatgacatccaatctagcagctcaactggccagaatatgtcacagatcagcaggcagctcaatcagtcacaggtggcctggacaggcagccgccccccatttccaggtcagcagatcccaagtcagagctccaaaactcagagcagcccatttgggattggcacctcccatacttaccctgccgatccatcgtcttatagtccactgtcatctcctgccacatcttcccccagtggcaacgcgtacagtagcctggctaaccggacccctgggtttgcagagtctggccaaagcagtgggcaatttcagggtcggccatcagaggtatggtcacagtggcagagccagcatcacggccagcagtccggcgagcagcacagccatcagcagcctgggcagacagaggtgtttcaggatatgttacctatgcctggagacccaactcagggtactggtaattacaacatcgaggactttgccgacctcggaatgtttcccccgttttccgagtag

SEQ ID NO: 108697 - DNA, 2121 bp, synthetic construct
  misc_feature 1..2121: note = Description of Artificial Sequence: Synthetic coding sequence
  source 1..2121: mol_type = other DNA
atggctagcgatattcctggtagcgttacattgcccgtcgcgcctatggcggccaccgggcaggtgagaatggcaggcgccatgcctgcccgcgggggaaaacgcaggagcgggatggatttcgatgacgaggatggcgaagggcctagtaagttttcccgcgagaatcattccgaaatcgagcgtagaaggcgaaataaaatgactcagtacataacagaactgagcgacatggtgcctacctgcagcgctctggcccggaaaccggacaaattgacaatactgcgcatggcagtcagccatatgaaaagcatgcgggggaccggaaacaaatctactgacggcgcctataaacctagctttctgacagaacaggagctcaagcacctcatcctggaggctgcagatggatttttattcgtagtagccgctgagacagggagggttatttacgtgtcggactcagtgaccccagttttaaaccagcctcaaagcgaatggttcggctccaccctttatgagcaggtacaccctgacgacgtcgaaaagctgagagagcagctatgcacaagtgaaaattccatgactggcagaatcctggaccttaagaccggcaccgtaaagaaggaaggccagcagagttcaatgaggatgtgtatgggctcaagacgatctttcatatgcagaatgcgttgtggaaacgccccacttgatcatctgccactgaaccgtatcaccaccatgagaaaaagattcagaaatggcctgggccccgtcaaagagggagaggcccaatacgcggtcgtgcattgcacaggctatatcaaggcatggccgcccgccggcatgaccattcccgaggaggacgccgatgtgggtcaaggttccaagtattgcctggtagccatcggccgcttgcaggttacttccagccccgtctgtatggatatgaacggtatgagtgtaccaacagagtttctgagcagacataatagtgacggcatcatcacgttcgtggaccctagatgtatcagtgtgatcggctatcaaccccaagaccttctgggaaaagacatccttgagttttgccacccagaggaccagtctcacctgagggaatccttccagcaagtagtgaaactcaagggccaagttctctcggtgatgtatcgctttcgtactaaaaaccgagaatggatgttaatacggacgagctccttcacctttcagaatccatattccgatgagatcgaatatatcatctgcaccaatactaacgtgaaacagctccaacagcagcaggccgaactagaggtccaccagagagatgggctctcgtcttatgatcttagtcaggtacctgtgccaaacctgccggccggcgtgcacgaggctgggaagtccgtggaaaaggccgacgccattttctcccaggaacgcgatccaagatttgctgaaatgtttgcaggtataagcgcatcagaaaagaaaatgatgagctcagcatctgcagctggaacacaacagatctacagccaggggagtccatttccttcaggacactctgggaaagcgttcagctcctctgtggtccatgtacctggggttaatgacatccagagtagttcaagcaccggtcaaaatatgtcacagatttccagacagctaaaccagagccaggtggcctggaccggatctcgccccccgttcccaggacagcaaattccatcacagtccagtaaaacacagtctagtccttttggaatagggacgtcacacacctacccagctgatccttcttcatattccccactgtccagtcccgccacctctagcccctcaggtaatgcttatagttcgttggccaatcggactcctggttttgcggagtcgggccagtcttccggacagttccagggtcgaccatcagaggtgtggagccagtggcagtctcaacatcatggccagcaatccggggagcagcacagccatcaacagcccggacagacggaagtgttccaggatatgctgcctatgccaggcgaccctacccagggcaccggaaattataatatcgaagactttgcagatttgggaatgttcccgccattctcggagtag

SEQ ID NO: 108698 - DNA, 1701 bp, synthetic construct
  misc_feature 1..1701: note = Description of Artificial Sequence: Synthetic coding sequence
  source 1..1701: mol_type = other DNA
atggccactcctgccgctgtaaatcctcccgagatggcgtctgatattcctggctctgtgaccctgccggtcgccccgatggcggccacaggacaggtgcgcatggctggggctatgcccgctcggggtgggaaacgccgatccggcatggacttcgatgacgaggatggcgagggaccaagcaaattctctcgagagaaccatagcgaaattgaacggaggcgcaggaacaaaatgactcagtacataactgagttgtccgatatggtgcctacatgctccgcacttgctcgtaagcccgataagctgaccattctgcgcatggcagtctctcatatgaaatccatgcgtgggactggaaataaaagtaccgatggagcctataaaccaagtttcttaaccgagcaggaacttaaacatctgattctcgaagcagccgatggcttcctgtttgtggtggctgcagaaacaggaagggtgatttacgtctcagactctgttacaccagttctgaatcagccccaatccgaatggtttggttcaactctctacgagcaggtgcatcctgacgatgtggaaaaactgagagaacagttatgcacatctgaaaactccatgacggggcggatcttagatctgaagaccggaacagtcaaaaaagaaggacagcagtcgagcatgagaatgtgcatgggctccaggcgtagctttatctgtcgcatgaggtgtggcaatgctcccttggaccacctgcccttgaatcggattaccactatgcgtaagcgctttaggaacggattggggcccgttaaagagggcgaggcccagtacgcggtcgtgcactgcacgggctacataaaagcttggcctccagcaggtatgacaattccagaggaggacgccgatgtcggtcagggcagtaaatattgtctggtagccatcggtaggttgcaggtaactagcagccccgtgtgcatggatatgaatggcatgtccgtgcctacagaattcctctcacgtcacaattcagatgggattatcacattcgtggatcctaggtgtatctccgtgattggctaccaacctcaggatcttttagggaaagacatcctggagttctgtcaccctgaagaccagagtcacctgagagagagttttcagcaggtcgtaaagctgaaggggcaggtgctcagcgtcatgtacagatttcgtactaagaacagagagtggatgttgatcaggacatcctcctttactttccaaaacccctattctgatgaaatcgagtatataatctgtactaatactaacgtgaagcagctgcagcaacagcaggccgagctggaagtgcaccagagagacgggttatcgagctacgatctctcccaggtgccggtcccaaatctgcccgccggggtgcacgaggctggcaaatccgttgaaaaagctgacgctatcttttcacaagagcgcgatcctcgcttcgccgagatgttcgctggcatctctgccagtgagaagaaaatgatgtcatccgcttccgcagccgggactcagcagatttacagccagggatcaccattcccgtcaggccattctggtaaagcgtttagctcctccgtcgttcacgtaccgggcgtgaatgatattcagagcagctcctcaacgggccagaacatgtcccaaatctccggatcctag

SEQ ID NO: 108699 - DNA, 2160 bp, synthetic construct
  misc_feature 1..2160: note = Description of Artificial Sequence: Synthetic coding sequence
  source 1..2160: mol_type = other DNA
atgcccaggacaatgatccctccgggagaatgcacgtatgcaggacgtaagaggagaaggcctttgcaaaaacagcgcccggctgtgggggccgagaagtccaatcccagtaagcgacaccgggacaggctgaatgccgagctggatcatctggcatccctcctgcctttcccaccggatattatttctaaactggacaaacttagcgtgttgcgcctcagcgtgagctacctgcgtgtgaaatctttttttcaggtggtccaagaacagagcagcagacagcctgccgccggcgcgcctagtccaggagactcatgtcccctggccggatccgcagtacttgaagggcgcctgctcctggaatctctgaacgggttcgcccttgtggtcagcgccgaagggactattttctatgcctccgctactatagtggattacctgggattccatcaaaccgatgtgatgcaccagaacatctacgactacatccatgtggacgatcggcaggacttttgccgccaactgcattgggcaatggacccacctcaggtggtgtttggacagccacctccccttgaaaccggggacgacgccatccttgggcgattgcttagggcccaagaatggggcaccgggacacctactgagtatagcgcctttttgacgcggtgttttatttgccgagtgaggtgtctactcgactcaactagtggatttctcgcacggggaagtcaagcttggcagcttcggctctgctgtccagaaccacttatgacgatgcaattccaaggcaaactaaagtttctgttcggccagaagaaaaaggccccctcaggggcaatgcttccaccaagactctcgctcttttgcattgcagcacccgtcctgctgccttctgctgctgagatgaagatgcgatcagccctgctccgtgccaaaccaagggccgacacggctgcaactgcggacgccaaggtgaaggcaactacaagtctttgcgagagcgaattacacgggaaacctaattactctgctggtcggtccagtcgagaatcaggcgttctcgttcttagggagcagacagatgctgggagatgggcccaggtgcctgcccgtgctccctgcttgtgtctcaggggcggacctgatcttgtcctcgatcccaagggcggatctggcgatagggaggaggagcaacaccggatgctgtcaagagcatctggagtcaccggtaggagagagacaccagggccaacaaagcctcttccatggacggcaggcaagcactccgaagatggcgcgaggccccgactacaaccatctaagaacgacccaccttctctcaggccgatgccgcggggcagctgcctgccatgcccttgtgtccagggcacttttcggaatagtccgatatcacatccacctagcccatctccaagtgcttactcgagtagaacaagtcgcccaatgcgcgacgttggggaggatcaagtgcaccctcccctctgccactttccgcagaggagcttacaacatcagctgccccagccgggggcccagcgctttgccacccggggttatccaatggaggatatgaaactgcagggggttcccatgcccccaggggatttatgtggccctacactcctactggatgtcagcatcaaaatggagaaggactccggatgtgaaggagctgcagacggatgcgtgcccagtcaggtatggctgggagcatccgaccggtcacaccccgccacatttccaacaaggatgcacctgaagacagagccagattcccgccagcaggtgtatatttcccacctgggtcacggggtacgaggcgcccagccgcacggaagggccaccgctggaaggtcacgagagctgacaccgtttcaccctgcccattgtgcttgcctcgagcctactgacggacttccccaaagcgagcctccacatcagctttgtgcccgcggtagaggagaacaatcatgcacctgtagagccgctgaggccgctccagtggttaaacgggagccactggacagcccacagtgggccacccacagtcagggaatggttcctggcatgctcccaaagtcagcactagctacacttgtccccccacaggccagcggctgcacttttctgccttag

SEQ ID NO: 108700 - DNA, 2106 bp, synthetic construct
  misc_feature 1..2106: note = Description of Artificial Sequence: Synthetic coding sequence
  source 1..2106: mol_type = other DNA
atgcctaggacgatgatcccaccgggggaatgcacatatgccggcagaaagagaagacgtcctctgcagaaacagcggccagccgtcggggcagaaaaatcaaaccccagcaaacgacaccgcgatcgtctgaatgctgagttggaccacctagccagcctgcttcccttccctccagatattatcagcaaactggacaagctgtctgtgctgcggctttccgtgtcatatctgagggtgaagagttttttccaggttgtgcaggaacaaagctctcggcagcccgccgccggtgcccccagtccgggagattcgtgtccactcgcgggaagtgcggtattagagggcagactcctgctggagtcactgaatggtttcgctttagtggttagcgccgagggaacgatattttacgcatccgctactatcgtcgactacctaggtttccaccaaacggatgtgatgcatcagaatatttatgattacattcacgtcgatgaccgccaggacttttgcagacagttgcactgggccatggaccctccccaggtggtcttcggtcagccccccccgctggaaaccggggatgacgctattctcggtaggctgcttagggcccaggagtggggcactggcacacctacagaatattcagcctttttgacacgctgcttcatctgtagagtgcgctgcctgttggacagcacgtccggcttcctgaccatgcaattccagggcaaattgaagtttctttttggccagaaaaagaaggcaccttctggagctatgttgcctcctcggctatctctgttttgcattgcagcccccgtactcctcccaagcgctgcggaaatgaagatgaggtccgcgctgttaagggccaaaccaagggcagacaccgctgccacagccgatgcaaaggttaaagcaactacatctctttgtgagtccgagctccacggcaaacccaactatagcgccggccgcagttccagggagagtggcgtcctggtgctgcgtgagcagactgacgcgggccgatgggcacaagtgccggccagagctccttgtttatgccttaggggcggaccagatctggttcttgaccctaaaggaggctcgggtgaccgcgaggaggaacagcatcggatgctcagtcgggcgtctggtgtaacaggtagaagggagacaccaggaccaacgaagccgttgccttggaccgctggcaaacactcggaagacggggcacggcctcgcctccagccgtccaagaacgatccgccctctttgaggcccatgccccgcggcagctgtttgccctgtccttgtgtgcagggaaccttcaggaactcccccatttctcaccctccatccccctccccgagcgcatattccagcaggaccagtcgtcctatgcgcgatgtgggggaagatcaggtacaccctcccctgtgccattttcctcagaggtcgctgcaacatcaactgcctcaacctggcgcgcagaggttcgctactaggggatacccaatggaagacatgaagctgcagggagtgcctatgccgcccggcgatctctgtgggccgactctcctacttgatgtgagtatcaagatggagaaagactctggctgcgaaggcgcggctgacggatgcgtgcctagtcaggtgtggttgggagcttctgatcgctcccaccccgccacattccccacgcgcatgcacctaaaaacagaacctgactcacgtcaacaggtctacattagccacctggggcatggagtgagaggagctcagccccatggacgcgctaccgctggaaggtcccgggaactcaccccctttcaccccgcccattgcgcctgtcttgaaccaactgacggcctgcctcagagtgaacccccgcaccagctatgtgctcgtgggcgaggggagcaaagttgtacctgtagggctgctgaagccgcgccagtcgtcaaacgggaacccttggattccccccagtgggccactcatagccagggtatggtacccgggatgctgcccaaaagtgcccttgctacactggtccccccgcaggccagtggctgtaccttcctaccttag

SEQ ID NO: 108701 - DNA, 2205 bp, synthetic construct
  misc_feature 1..2205: note = Description of Artificial Sequence: Synthetic coding sequence
  source 1..2205: mol_type = other DNA
atgtcagggtttgatgacccgggtattttttattccgacagctttggtggagacgcacaggctgatgaaggacaggcgcgaaaaagccagctccaaaggaggttcaaagagtttcttagacaatatagggtgggcaccgatcgaacgggcttcacgtttaagtaccgcgatgagttgaagagacactacaacctgggagaatactggatagaagtcgaaatggaggatctggcatccttcgacgaggacttggccgattatctgtacaaacaaccagccgagcatctacagttacttgaggaggccgctaaagaggtagccgatgaagtgaccaggccacgaccaagtggtgaggaggtgctgcaagacattcaggtgatgctgaaatcagatgcaagcccctctagcatccgcagtctcaagagtgatatgatgtctcatctcgtgaagattccaggcatcattattgcagctagtgctgtcagggcaaaagccactcggatcagtatccagtgccgctcctgtaggaacacactgaccaatatcgccatgcgccccggcctggaggggtacgcattgcctcggaagtgcaatacagatcaggcaggtcggcctaaatgccctctggacccctacttcattatgcctgataagtgcaaatgtgtggacttccagacgctgaagttgcaggagctcccggatgccgttccccacggagaaatgcctaggcatatgcaactgtactgtgaccggtatctatgcgacaaagtcgttcctggcaaccgggtcacgattatgggaatatatagcattaagaagtttggcctgaccacgagtcgcgggagagaccgagttggagtcggtatcagaagctcatatatccgcgtactcggaatccaggtggacacagatgggtctggtcggtcattcgctggggcggtttctccacaagaggaagaggaattcagacggctggcagcattgcctaatgtgtacgaagtaatcagcaaatcgatcgccccctccatctttggaggaaccgacatgaagaaggcaatcgcttgcctcttgttcgggggtagcagaaagcgcctgcccgatgggttaacgcggaggggcgacattaatctgttgatgctgggtgacccagggacggccaagagtcagctgctaaagtttgtggagaaatgtagtccaattggagtttatacctcagggaaaggctctagtgcagccggactgaccgccagtgttatgcgggacccctccagtcggaacttcattatggagggcggagcgatggtgcttgctgacggcggagtggtgtgtatcgatgaatttgacaagatgcgtgaagatgaccgggtggccattcacgaagctatggaacagcagactatcagcattgccaaagccgggatcaccacaacgcttaactcccggtgctcagtgctagccgctgccaattcagtatttggaaggtgggatgagaccaaaggggaggacaacatagacttcatgcccaccattctctcacggtttgatatgatcttcatcgtcaaagacgagcacaatgaagagagggacgtaatgctcgcgaagcatgttataacattacacgtctctgcgttgacacagactcaagcagtggagggcgaaattgacctggccaagttgaaaaaattcatcgcttactgtcgggttaagtgcgggcccagactgtctgcagaggctgcggagaagctgaagaataggtatataatcatgagaagcggagctcgacagcacgagcgggacagtgaccgtaggagctctatccctatcactgtacggcagctcgaagctattgtccgaatcgcggaagccctgtcaaagatgaaactgcagcctttcgccaccgaagctgacgtggaggaagccctgcgactgttccaggtgtcaacacttgacgcagcactgtcgggaaccttaagcggagtagaaggcttcacttcacaggaggaccaggagatgctgagccggatcgagaaacagctgaagcgccgttttgccatcgggagtcaggtgtctgagcattcaatcatcaaagactttaccaagcagaagtaccctgaacacgccatacacaaagtacttcagctgatgcttcggaggggtgaaattcagcatcgcatgcagaggaaggttttgtacagactgaagtag

SEQ ID NO: 108702 - DNA, 1530 bp, synthetic construct
  misc_feature 1..1530: note = Description of Artificial Sequence: Synthetic coding sequence
  source 1..1530: mol_type = other DNA
atgtctatgggggcccccaggagcttgctgctggccctggccgccggcttggcagtggccaggccacccaacatcgttctgatttttgccgacgacctcggttatggcgacctaggctgttacggccacccctctagcactacgccaaacctggaccagctcgccgccgggggcttgagattcacagatttctacgtcccagtctccctttgtacaccctcccgggctgcattattgactgggagattgcctgtcagaatgggtatgtaccccggagttcttgtgccctcctcacgcggcggtcttccgctcgaggaggttactgtggctgaggtgctcgccgcgaggggatatctgaccggcatggctgggaaatggcacctgggggtggggccagagggcgccttcctacccccacaccaaggctttcatcggttcctaggcattccatacagtcacgatcaggggccttgccagaatctgacctgcttcccccctgccacgccatgcgacggtggatgcgatcaaggactggttcctatccccctgcttgccaacctgtctgtggaagcccaaccaccctggctgccaggcctggaggctcgctacatggcatttgctcacgacttgatggccgatgcccaaagacaggatcgtcctttcttcctctactatgccagtcatcacactcattatccccagtttagcgggcaatctttcgctgaacgtagcggccggggcccttttggggactcgttgatggaactggacgctgcagtcggaactttgatgaccgccatcggagatctgggcttgctcgaagagacgctggtaatcttcaccgcagacaatgggccggagacaatgcggatgtctcggggcggctgctccggtctcctgaggtgtggcaagggcacaacctacgaaggtggcgtccgcgagccagctcttgcgttctggcccgggcacatcgccccaggcgtcactcacgaactggcctcttcactagatctgttacccaccctggcagcccttgcgggggctccactgcctaatgtaacacttgatgggtttgacctatctcccctcctgcttgggactggcaagtctccccgacagtccctgttcttttacccatcctacccagatgaggtcagaggcgtgttcgctgtccgaaccgggaagtataaggcgcacttcttcacacaaggcagtgcccattccgacacgacagccgaccctgcgtgccatgcttccagcagcctgaccgctcacgagcctcccctgctctacgacctctcaaaggaccccggtgagaattacaacttactgggaggtgtggccggggcgaccccggaagtgctccaggccctcaagcagctgcagcttctgaaggcgcaattagacgcggctgtgacttttggcccaagccaggtggctagaggagaggatcccgctctacagatctgctgtcaccccgggtgcaccccaagacctgcgtgttgccactgtcctgacccccatgcctag

SEQ ID NO: 108703 - DNA, 1530 bp, synthetic construct
  misc_feature 1..1530: note = Description of Artificial Sequence: Synthetic coding sequence
  source 1..1530: mol_type = other DNA
atgagcatgggagctccaaggtcattgctgctggctctggctgctggtctggctgtcgctcggccgcccaacatagtgttgatatttgctgatgatctggggtacggggatctgggctgttatgggcatcctagctccacaacacccaacctcgatcagctggctgctggcgggttgcgattcaccgacttttatgtgccggtaagcctgtgcactccgtcacgcgcagctctgctgactgggaggttgcccgtgcggatgggtatgtaccctggagtgctcgttccctcctctcgtggcggacttcctctggaagaggtaaccgtggccgaggtactggcagcaagaggctacctcaccggtatggctggcaagtggcatctcggggttgggcctgagggcgcattcctgcctcctcaccagggcttccacaggtttctcggtatcccgtattctcacgaccaaggcccttgtcagaatctgacatgttttcccccagcaaccccatgcgatggcggttgtgaccaaggcctagttccaattcctttgctagccaacttgtcagtagaagcccagccgccatggttgccagggctggaagccaggtatatggccttcgcacacgaccttatggcagacgcccagcggcaagaccggccgttctttctgtattacgccagccaccacacacactatccacagttttctggccaatcattcgctgaacggagcggccggggtccatttggagatagtcttatggaactggatgcagctgtaggaaccctaatgaccgctatcggggaccttggactgctggaagagactctggtgatttttacggccgataatgggccagagacgatgaggatgagcagaggggggtgctctggtctcctgcgatgtgggaagggtacaacctacgagggtggagtgcgcgaacccgccttggctttctggcccggccacattgcgccaggagttactcacgaactcgcgtcctctctagatctgctccccaccctggcagcactagccggcgccccattgccaaacgtgacattggatggatttgatctgtcccctctgctcttgggcaccggaaaaagccctcgccagagcctctttttctacccttcatatcctgatgaggtgcgtggtgtcttcgctgtgagaacgggcaagtataaggcacacttttttacccagggctccgcccactctgacaccacagccgatcccgcctgccacgccagctcctcccttaccgcacatgagccacctctgctgtatgatctcagtaaggacccaggtgagaattacaacctgttggggggcgttgccggcgctacccctgaagtcttgcaggcattgaaacagttacagctcctgaaggcgcagctggatgctgctgtgaccttcggcccatcacaggtcgctcgcggtgaggacccagccttgcagatctgttgtcaccctggatgtacaccgcggcctgcatgttgccattgtcctgatccccatgcgtag

SEQ ID NO: 108704 - DNA, 1530 bp, synthetic construct
  misc_feature 1..1530: note = Description of Artificial Sequence: Synthetic coding sequence
  source 1..1530: mol_type = other DNA
atgagcatgggcgctccacggtcacttctcctggcactggccgccggcttagccgtcgcacgcccaccgaatatcgtcctgatcttcgctgatgacctgggttacggtgatcttggctgttatggacatcctagttcgacaacccctaacttggatcagcttgccgctgggggtttgcgcttcaccgatttctacgtgcccgtaagcctgtgcacccctagcagggccgcactcctaactggtagactgcctgttaggatgggtatgtaccccggcgtcctcgttccctctagtagaggcgggcttccccttgaagaggtgacagtcgccgaggtgctggcagctcgggggtacctgactggcatggctggaaaatggcacctgggggtaggccctgagggcgcctttcttccaccccatcaaggctttcaccgatttctgggcattccatatagccacgaccagggaccttgccagaacctcacctgctttccccctgccacgccatgtgatggcggctgtgaccagggcctcgtgccaatacccctcctggcaaatctgagtgtggaggcccaacctccttggctcccaggcttggaggccagatacatggccttcgctcatgaccttatggcagacgcccagagacaagatagaccattcttcttgtactatgcctcccatcacacgcattacccccagttttccgggcagtcgtttgcagaacggtcaggccgtgggccttttggggattctttgatggaactggatgctgcggtggggactctgatgaccgcaattggcgacctcggcctgttagaggaaaccctggtcatctttaccgctgacaatggtccggagaccatgcgcatgtcacgaggtggctgttctggactgctgcggtgtggaaaagggaccacatatgaaggaggagtgagagaaccagcattagccttttggcctggtcacatcgctcccggcgtgactcacgagctcgcatctagcctcgatcttttgccaactttggccgcactggcaggggccccgttgcctaacgtgaccttggacggtttcgacctgagtccattactcctggggacaggtaagtcccctcggcagagcttgtttttttatccatcatatccagacgaagtcaggggcgtatttgccgtgcgcactggtaaatataaggctcacttcttcacacagggaagcgctcactctgacactaccgctgacccagcatgccacgcctccagcagtctgaccgcccatgagccacctctgctatatgacctgtcaaaagacccgggcgaaaattacaatcttctggggggggtggccggcgctacgccagaggtgcttcaggctctcaagcagctgcagctgttaaaggcccagctggacgccgccgtaactttcggcccaagccaggtggcaaggggtgaggatcctgccttacagatatgctgccacccaggctgtacaccccgccccgcctgctgccattgccccgatcctcatgcatag

SEQ ID NO: 108705 - DNA, 1272 bp, synthetic construct
  misc_feature 1..1272: note = Description of Artificial Sequence: Synthetic coding sequence
  source 1..1272: mol_type = other DNA
atggggatgtacccgggagtactggttcccagtagtcggggcggcctacctttggaagaggttactgttgccgaagtactcgccgcaagaggctatttgacaggaatggccggaaaatggcatcttggcgttggccccgagggcgccttcttacccccccatcagggctttcacagattcttgggaattccttattcccacgaccagggaccatgccagaacctgacgtgctttccgcccgctactccatgtgatggcggttgtgatcagggcctggtccccattccactgctggccaatcttagcgtggaggcacagccaccttggctacctggcctggaggccagatacatggcctttgcgcatgatcttatggccgacgcgcagcggcaggacaggcccttctttctgtattacgcatcacatcacacccactaccctcagttttcaggtcagagctttgcagagaggtcgggccggggtccgtttggtgactctctgatggaactcgacgcggccgtgggaacactgatgaccgccattggtgacctggggttgttagaggaaacccttgtgatcttcactgctgataatggccccgaaacaatgaggatgtctcgtgggggctgcagtgggctgcttagatgtggaaagggtaccacttatgagggtggtgtgcgcgagcctgctttggccttctggcctgggcacattgcgccaggggtcacacatgagctggccagcagtctcgaccttctgcccactttggccgccctcgcaggcgcccccctacctaacgtcaccctagacggtttcgatctgtctcctctccttcttggaacaggcaagtcaccccgtcagtctcttttcttctatccttcgtatccggacgaggtgagaggggtcttcgccgtccggacaggcaagtataaagcacacttcttcacacagggaagcgctcacagcgatacaactgccgatccagcctgtcatgcctccagttctctgaccgcccacgagccaccgctcctgtacgacctgtccaaggaccctggagaaaactacaaccttcttggcggagttgctggtgcaacgcctgaagtgctgcaggcactgaaacagctgcaactgctgaaagcccagctcgacgcagcagtcacattcggtccatcccaggtggcaaggggagaggaccccgccctgcagatttgctgtcatcccggttgtacaccacgacctgcttgctgccactgtcccgatccacacgcctag

SEQ ID NO: 108706 - DNA, 1524 bp, synthetic construct
  misc_feature 1..1524: note = Description of Artificial Sequence: Synthetic coding sequence
  source 1..1524: mol_type = other DNA
atgggggctcctcgatctctgttgctggctctggccgccggtctcgctgttgcccggccaccgaatatcgtccttatcttcgctgacgacctcgggtacggggacctgggctgttacggccatccaagtagcactacccctaacctagaccagttagctgcgggtggactacggttcacagatttttacgtgccggtgtccctgtgcactccatctagagctgccctgctaacaggaagactaccggttcgcatgggtatgtaccccggagtgctggtgccaagcagcaggggtggtttgccactggaggaagttactgtggcagaggttttggctgccagaggatacctgactggtatggccggcaaatggcatctgggtgtgggccccgagggagcattcctgccgccacatcaaggttttcatcggttcctggggattccttattcccacgaccaaggcccgtgtcaaaatttaacctgttttccacccgcgaccccctgtgatggggggtgtgatcagggactcgtgccaatccctctgctggccaacctatccgtggaagctcaacccccttggctccccggtctggaagctcgctacatggcgttcgcccatgatttgatggctgacgcgcagcgccaggaccgccccttctttctatactacgccagccaccatactcattacccacagtttagcggacagtcctttgcagaacgctccggaagaggacccttcggggattctctcatggagcttgacgctgcggttggaactctgatgacggccataggcgatctaggacttctcgaagaaaccttggttatctttaccgctgacaatgggccagagactatgcgcatgtccaggggtggctgcagcggtctactgagatgtgggaagggaacaacctacgagggtggcgtgcgggaaccagctcttgccttttggcccggacacatcgctcccggagtcactcacgaactggcttcatctctagatctacttcccaccctcgccgccctggccggggctccattgcccaacgtaaccctggatgggtttgatctgtctcctcttctgttaggtaccggaaaatctccccgacaatccctgtttttttacccatcttatcccgacgaagtgagaggggttttcgccgtcagaacagggaagtataaggcgcacttcttcacacagggaagcgcccattccgacaccaccgccgacccagcttgtcatgcatcgtcctcattgactgcacacgaacccccgctcctctatgacctaagcaaagatcccggagagaactacaacctgcttggcggcgtcgctggggccacccctgaggtgctgcaggctctgaagcagctccagctgctgaaggctcagctcgacgccgctgtgactttcggcccaagccaggtggctcgaggtgaggacccagcgctgcaaatctgctgccaccctggctgcacacctcgccccgcctgttgtcattgcccagacccgcacgcctag

SEQ ID NO: 108707 - DNA, 1524 bp, synthetic construct
  misc_feature 1..1524: note = Description of Artificial Sequence: Synthetic coding sequence
  source 1..1524: mol_type = other DNA
atgggcgcccctcgttcactactcctggctctggccgctggactggcagtggcaaggccaccaaacatcgtgttaatatttgccgatgatctggggtatggggacctggggtgttatggccatcccagttctactactccaaatctggatcagctggcggccggcggtctgaggttcaccgacttctatgtgcccgtgagcctgtgtaccccttctagggccgcattgctcaccgggcgcctgcccgtacggatgggaatgtacccaggcgtgctggtcccctcctcccgcggagggctgcctctggaagaagtgaccgtggctgaggtgctggcggcacgcgggtatcttacagggatggcaggcaaatggcacttaggtgtcggacccgagggcgcgttcctaccaccccaccagggattccatagattcctgggaataccttacagccacgatcagggcccatgccagaatctaacctgctttcccccagccactccatgtgatggtggctgcgatcaaggcttggtacctattcctctgttggccaacctctcggtggaggctcagcctccatggctgcccgggcttgaggcacgctatatggcttttgctcacgatttgatggcagacgcccaaaggcaagatcgccctttcttcctgtactatgcaagtcatcacacacactatccccagttctcgggccagtctttcgcggagcgcagtgggcgggggccattcggagattctctcatggagctggatgctgctgttggcacactgatgaccgccataggcgacctgggcctgctcgaggaaacacttgttatcttcactgctgacaacgggcctgagactatgaggatgtcccgcggaggctgttcaggactgctgaggtgcggcaagggcactacctacgaggggggcgttagagagcctgcactggctttttggcctggacatattgctcctggcgtcacccacgagctggcctcctccctcgacctcctccctacattggcagctttggccggagcccctttgcctaacgttactcttgacgggttcgatttaagtcccctgttgctgggcacaggcaaatcaccacggcaaagtctgttcttctatccttcatatcctgatgaggtccgaggcgtgttcgccgtcagaacagggaagtacaaggcacacttttttacgcagggtagtgctcactctgatactaccgcagatccggcatgccatgctagctcctccctgactgcacacgagccacctttattatacgatttaagtaaagatcccggcgagaattacaatctgctaggtggtgtggctggcgctactcctgaggttctgcaggccctgaaacagttgcagctcctaaaagcccagctagacgccgccgtaacattcggccctagtcaggtggccaggggggaggaccctgccctgcagatatgctgtcatccaggctgcacgccaagacccgcgtgctgccactgtcctgaccctcatgcatag

SEQ ID NO: 108708 - DNA, 1782 bp, synthetic construct
  misc_feature 1..1782: note = Description of Artificial Sequence: Synthetic coding sequence
  source 1..1782: mol_type = other DNA
atgcggagcgcggctagaaggggacgcgcagcccccgccgccagggattcactgcctgtactgttgtttctgtgccttctgctaaagacctgtgaacccaagaccgccaatgctttcaaacccaatattcttctgatcatggctgatgacctgggcaccggagatctgggttgctatggcaacaatactctgcggacaccaaacattgaccagcttgccgaggagggagtgcgtctaacccagcatctggcagctgccccgctttgcactcccagccgagctgcgttcctcactggtagacactctttcagaagcggcatggacgcctccaatggttatcgtgcacttcagtggaatgctggttctggcggtttacccgaaaacgaaactacctttgctcgcatactccagcagcatggatatgccactggactgatcggcaagtggcatcagggcgtaaattgtgctagtcgaggcgaccactgccaccaccctttaaaccacggtttcgactacttttatggaatgccattcacactcacaaacgactgcgatccggggagacctccagaggtggacgcagcccttcgtgcacagctctgggggtatacacagttcctagctcttggcattctcaccctggccgctggccaaacctgtggatttttcagtgtttctgcgagagccgtcacaggaatggcaggcgttgggtgtctttttttcatttcctggtatagcagcttcggtttcgtcagacgctggaattgcatccttatgaggaaccacgacgtcacagaacagcccatggtgctcgagaagaccgcctctctgatgctcaaagaggcagtgtcttatatcgaacgtcataaacacggtcccttcctcctgtttctgtcactgctgcacgtgcacattcccctcgtgaccacatctgccttcctaggaaagagtcaacacgggttatatggcgacaatgtggaagagatggattggcttatagggaaggtgctcaatgccatcgaggataacggccttaagaattccacatttacttacttcacgagcgaccatggcggacacctggaggccagggatggacactcgcaactggggggctggaacggaatctacaaggggggtaaggggatgggcggttgggagggagggatcagggttcccggtatctttcactggcctggcgttctgccagccgggcgggtgatcggcgaacctacaagcctgatggatgtatttccaaccgtcgtgcagttggtcggtggggaggtaccgcaggacagagtgattgacggacactcccttgtccctttgctacaaggagcggaggctcgttctgcacacgaatttttatttcactactgcgggcaacacctacatgctgctcgctggcaccaaaaggactccggcagcgtgtggaaagtccactataccactccacagttccatcctgaaggtgctggcgcctgctacggaaggggggtgtgtccctgcagcggagagggtgtgacacatcataggccccctctccttttcgacctgtcccgcgatccttccgaagcacggcccctgacccctgatagtgaacctctgtaccatgccgtcatcgcacgtgtcggggccgctgtgtccgaacataggcagacgctgagtccagtcccccaacagtttagtatgtccaatattctgtggaaaccctggctgcaaccatgctgcggacactttcccttctgctcttgccacgaggatggcgacggtacaccgtag

SEQ ID NO: 108709 - DNA, 1770 bp, synthetic construct
  misc_feature 1..1770: note = Description of Artificial Sequence: Synthetic coding sequence
  source 1..1770: mol_type = other DNA
atgcttcatctgcaccacagctgcctgtgtttccgttcctggttacctgccatgctggctgttctgttgtctcttgcacccagcgcaagcagcgacatctccgcctcccgccctaacatcctgctcctcatggccgacgatctggggattggtgatataggttgctacggcaacaacacgatgcggacacccaatatagaccgcctggccgaagacggcgtgaaacttactcagcatatctcagccgccagtctctgtacaccttccagggccgccttcctcacggggaggtaccccgtgaggtccggcatggtctcttccatcggctatcgggtccttcaatggactggcgcctccggcggcctccctaccaacgagacgaccttcgccaagatacttaaagagaaaggttacgctaccggcttgataggtaaatggcatctaggcctgaactgcgaatctgcctcagatcattgtcaccacccccttcaccacggatttgatcatttctacggtatgcctttctcactcatgggcgactgtgcccgatgggaactgtccgaaaagagagttaatctggaacagaagctcaactttttgttccaggtgctcgctcttgtcgcactaactctggtcgctggcaaacttacacatcttatccccgtgtcttggatgccagtgatctggtccgcgctgagtgccgtgttattactggcctcatcttatttcgtgggagcactgattgtgcatgcagactgctttctgatgagaaatcacacaattactgagcagccaatgtgctttcagcgcaccaccccactgatcctgcaggaggtggcttcattcctgaaacgaaataaacatggtcctttcctgcttttcgtctctttcttgcacgtgcacattccgctcataactatggagaattttctggggaaatccctgcacggactgtacggggataatgtagaggaaatggactggatggttggaaggatcttagacacattggatgtcgaaggactcagcaatagcaccttgatatactttacctctgatcacggaggctcactggagaaccagctcggaaacacacagtatggtgggtggaacggtatatataagggtggcaagggcatgggcggctgggagggagggatcagggtgccaggcatcttcagatggcctggagtgctgcctgccgggcgcgttataggagaaccaacctccctcatggacgtcttcccaactgtggtgcgtcttgctggaggtgaggttccgcaagatcgggtgattgatggacaggatctgttgccactgctcctcggaaccgctcagcatagtgaccatgagtttctaatgcattactgcgaaaggttcctgcacgccgcacggtggcatcagcgggatcgcggaaccatgtggaaggtgcacttcgtgaccccggtgtttcaacctgagggagctggggcatgttatggacgaaaggtgtgtccatgcttcggagaaaaagttgtgcaccatgaccccccactgctctttgatttatcgagggatccttctgagacccatattcttactcccgcctccgaacccgttttttatcaagtcatggagcgggtgcagcaagcagtgtgggagcaccaacgaacacttagccctgtgcccctccaattggaccgtctgggcaatatctggcggccttggctgcagccttgctgcggccccttccctctttgctggtgtttaagagaagacgacccgcagtag

SEQ ID NO: 108710 - DNA, 537 bp, synthetic construct
  misc_feature 1..537: note = Description of Artificial Sequence: Synthetic coding sequence
  source 1..537: mol_type = other DNA
atgctgcacctgcaccacagctgcctgtgtttccggtcttggctcccagcaatgctagcggtcttgttaagtctggccccttccgccagcagcgacatatccgcttctagaccgaacattctgctgctgatggccgacgacctggggatcggtgacatcggctgttacggcaacaacaccatgagaacgcccaacatcgatcgtttagctgaggacggcgtcaagttgacccagcatatttccgcagcctctctgtgtaccccctcaagagctgcttttctgaccggtcgctaccctgtccgcagcggcatggtctcatccatcggttatagggtattgcagtggactggtgcctccggcgggttgccaacaaatgagaccacctttgcaaagattcttaaggaaaaaggatacgccacaggactcattggcaaatggcacctcggactcaactgtgagtccgcaagtgatcattgccaccatccactacatcacggctttgaccatttctatggtatgcctttcagcctgatgtag

SEQ ID NO: 108711 - DNA, 1635 bp, synthetic construct
  misc_feature 1..1635: note = Description of Artificial Sequence: Synthetic coding sequence
  source 1..1635: mol_type = other DNA
atgtctggttccagggaaagggataacatgctccacctgcatcattcctggacacccaacatcgatcgattagccgaagacggggtgaaactcactcagcatatttcagccgcttcactctgcacacctagcagggcggctttcctcacaggacggtaccccgtaagaagcggaatggttagtagcatcggctatagggtgctgcaatggaccggggcctctggcggcctccctaccaacgagaccacctttgccaagattctgaaggaaaagggctacgccaccgggctgattggaaagtggcatctgggcctgaactgtgagtccgcgagcgaccactgccaccatcctctccatcacggatttgaccatttctatggtatgcccttcagccttatgggtgactgtgctaggtgggagttgagcgagaaacgagttaacctggagcagaagctgaatttcctcttccaggtcctggctctcgtggcccttacactggttgcagggaaactgactcacctgatccccgtatcttggatgcctgtgatatggtccgccctgagcgcagttcttcttctggcttcttcatacttcgttggagctcttattgtgcacgccgattgctttctaatgaggaatcataccataacagagcagcctatgtgctttcaacgcacaaccccgttgattttacaggaagtggctagctttctcaagaggaacaagcatggcccgttcttactctttgtgtcatttctccacgtgcatatacctctgattactatggaaaactttttgggcaaaagtttacacggcctctacggcgataacgtcgaggagatggactggatggtgggccgcatcctggatacccttgatgtagagggactctccaattctacactgatatactttacaagcgaccacggcggcagcctggagaatcaactgggtaatacccagtacgggggatggaatggaatttataagggaggcaaggggatgggcggatgggagggagggatccgggttccaggtatttttcgctggcctggggtactgccagccggtagggtgattggggaaccaacttctctcatggatgtgttccccaccgtagtgcgcctggcgggcggagaagtccctcaagatcgcgttatcgatgggcaggaccttcttccgctactgttgggaaccgcccaacactccgaccatgaattcctcatgcactactgcgaacgctttttgcatgcagcccgttggcatcagagagaccggggcaccatgtggaaagttcattttgtgacaccagtcttccagcccgaaggcgccggagcatgctacggaagaaaagtatgtccatgttttggagaaaaagtcgtgcatcatgaccctccacttctgtttgacttgtcccgtgatccctccgagacacacattctcactcccgctagcgagcccgttttttatcaggttatggaaagggtacaacaggctgtatgggagcaccagcgtacattgtcaccagttccgctccagctggatcggcttgggaatatctggcgaccctggctgcaaccgtgttgtgggcccttccctctgtgctggtgtctgcgcgaggatgatccacaatag

SEQ ID NO: 108712 - DNA, 1845 bp, synthetic construct
  misc_feature 1..1845: note = Description of Artificial Sequence: Synthetic coding sequence
  source 1..1845: mol_type = other DNA
atgcggcctgttattaataggtgcgcccccggctccctggacttaatgctgccgcaagctgcgtcagaggggatcgtgttccactcactgcagatctccctgtgcttccggtcatggctgccagcaatgctcgctgtgctgctcagcctggccccatccgccagctctgacattagcgccagccgtccaaacattctcctgctgatggcagatgacctcggtattggcgatataggctgctacggcaacaataccatgaggacacccaatatcgataggttggctgaggatggtgtgaagttgacacagcacatcagcgcagcgtctctttgcaccccttccagggctgctttcctgaccggaaggtatccagtgcgctccggaatggtgtcatcaattggttatagagtcttgcagtggactggtgcgtcagggggcctgcccacaaacgaaaccacatttgctaaaatcctcaaagaaaaaggttacgcgaccggactgatcggcaagtggcacttagggttgaattgtgaaagcgcttccgaccattgtcaccatcccctacaccacggcttcgatcacttctatggtatgccattcagtttaatgggcgactgtgctcgatgggagctttccgaaaaacgagtgaacttggagcagaagcttaacttcctttttcaagtcctggcactagtggccctgaccctggtcgccggaaagctgactcacctgatcccagtatcatggatgccagttatctggtccgcactttccgccgtgctgctgctggccagtagctactttgtgggggctctgatcgttcacgctgactgtttccttatgcggaatcatacaatcaccgagcagcctatgtgtttccagcggaccacacccttgatcctacaagaggttgcatctttcttaaaacggaacaagcacggaccatttctactgtttgtgagctttctgcatgtacacattcctctgatcacaatggaaaattttcttgggaagagtctccacggactttatggggataatgtggaagagatggattggatggtcggacggatcctggacacgctggacgtggagggcctgtcaaactcaacactgatttactttacaagcgatcacggtgggtcacttgagaaccagctcggcaatacacagtacggtggctggaacggcatctataagggagggaaaggtatgggcggttgggagggcggcatcagagttcctgggatctttcgatggcctggggtactgcccgcgggacgggttatcggcgagcctaccagcctcatggatgtgttccctaccgtggtgcgacttgctggaggtgaggtgccccaggatcgggtgatcgacggccaggatttgctacctctcttattaggtactgctcagcatagtgaccatgagtttctgatgcactactgtgaacgctttttacacgccgctaggtggcaccagcgtgaccggggcacgatgtggaaggtgcacttcgtaacaccagttttccagccggagggagcaggggcttgttacggacgcaaagtgtgtccctgcttcggggagaaggtggttcatcatgatcccccgctccttttcgacttaagccgcgatccttcagaaacacatatactgacacccgcatctgaaccggtcttttatcaggtcatggagcgcgtccagcaggcagtgtgggagcatcagcgtacactgtctcctgtacctctgcagctcgatcggcttgggaacatttggcgaccgtggttgcaaccatgttgtgggccttttcctctttgctggtgtctgagagaggatgaccctcagtag

SEQ ID NO: 108713 - DNA, 1773 bp, synthetic construct
  misc_feature 1..1773: note = Description of Artificial Sequence: Synthetic coding sequence
  source 1..1773: mol_type = other DNA
atgcggccaaggagacctctggtgtttatgtctctcgtttgcgccttgcttaatacatgtcaggctcaccgagtgcacgatgacaaacctaacatagtgttgatcatggtggatgatttaggtattggcgatttagggtgttacggtaacgacaccatgcgcacccctcatattgaccgcttggcccgagaaggcgtgagactgacgcagcacatcagcgccgcctctctgtgttctccctccagatctgctttcctgacaggtcgataccctataaggagtggaatggtatcttctggaaatcgacgcgtgattcagaatctggctgtgcccgctggtttgcctttgaacgagactacgctggctgcgctgttgaaaaagcaaggatacagcactggattgattggcaaatggcaccaggggcttaactgcgacagccggtccgatcagtgccatcacccttacaattatggctttgactactactacggaatgccctttaccctggtagatagttgttggcccgatccatcgaggaacacagaactggcatttgagagccagctgtggctgtgcgtgcagctggtcgcgatcgccatcttgaccctcacatttggtaaactgtctgggtgggtctcggtgccctggctgctgatctttagcatgattctgtttatattcctgctcggctatgcatggttctcatcacatacctccccactctattgggactgtcttcttatgcgaggtcatgagatcaccgagcagccaatgaaagctgagagggctggctccataatggtgaaggaggcgataagctttcttgaacggcacagtaaggagacctttctcttgttcttttcctttttgcacgtacacacccctctgcctacaaccgacgatttcaccggaacatccaaacacggactgtacggcgacaatgtcgaggagatggatagcatggttggtaagatcctggacgccattgacgacttcggcttgcgaaataataccctcgtgtattttacaagtgaccacgggggccacctggaggcaaggcgaggacacgcccaactgggcggatggaacgggatctacaaagggggcaaaggcatggggggatgggagggaggcatacgagtcccggggatcgtgcgttggccgggcaaggttccagcaggcagactgataaaagagccgacaagtttaatggatattctgccaacagtcgcatccgtgagcggcggctcccttccacaggatagggtcattgatgggcgggacctcatgcccctactccagggaaacgtcagacatagcgagcacgagtttctctttcattattgcgggtcctatctccatgcagttagatggatacctaaagatgatagcgggtcagtttggaaggcgcattatgtgacccctgttttccagcccccagcctccggaggctgttatgtgaccagcctgtgtagatgttttggagagcaagtgacttaccacaatccaccactactgttcgacctgtctcgggaccctagtgaatcaacccctctgactccagccactgagcctctgcacgatttcgtgataaaaaaagtggcaaacgctcttaaggagcatcaagagactatcgtgcccgtcacataccagctaagcgagcttaatcaggggaggacctggctcaagccatgctgcggggtgtttcccttttgcctgtgcgacaaggaagaggaggtcagtcagccacgaggccccaatgaaaagcggtag

SEQ ID NO: 108714 - DNA, 1773 bp, synthetic construct
  misc_feature 1..1773: note = Description of Artificial Sequence: Synthetic coding sequence
  source 1..1773: mol_type = other DNA
atgcgcccacgtcgcccactggtgtttatgagcctggtgtgcgcactgctaaatacctgccaggcccacagggtccatgacgataaaccaaatatcgtgctcataatggtcgacgacctaggcatcggagacttgggttgttacggcaatgacaccatgcgcacgcctcatattgaccgacttgcacgcgagggagtaagactcacccagcacatcagcgccgcctccctgtgcagccctagtagatctgccttcctgaccggacgataccctatacgctctggtatggtaagctcaggaaataggagagtcatccaaaatttggcggttcccgccggattgcccctgaatgaaaccacactcgccgctctgcttaaaaagcagggatacagtacgggtcttataggcaaatggcatcagggcctgaattgtgattctagatcggatcaatgccaccacccttataactatggctttgattactattatggtatgccatttacactcgttgactcatgctggccagatcccagtcgcaataccgaattggccttcgaatcacagctctggctgtgcgtccagcttgtggccattgctatactgacactcacattcggcaaactatctggctgggttagtgtcccttggctgttgattttctcaatgatcttgtttatctttctcctgggctatgcttggtttagttctcacacctcgccattatactgggactgtcttctgatgcggggccatgagattaccgaacaaccaatgaaggccgaaagagccggaagcatcatggttaaggaggcgatttccttcctcgagcggcatagcaaggaaacctttctcctgttttttagcttcctacacgtccacaccccgcttcctaccacagatgacttcactggcacttctaaacatggactctatggtgataacgttgaagaaatggattcaatggtgggtaaaatactagacgccattgacgactttgggttgcgaaacaatacgctcgtttactttacttctgaccacggtggtcacctggaggcgaggcgtgggcatgcccagctgggagggtggaatggaatatacaaagggggcaagggcatgggcggctgggaaggcgggatccgtgtacccgggatcgtccgatggccaggcaaggtacccgcgggcagactgatcaaggaaccaacaagtctgatggatatcctgccaaccgtggcctccgtttcaggcgggtcccttccccaggaccgcgtaatagatggacgagatcttatgcccctgctgcagggtaacgtgcggcactccgagcatgagttcctgttccactattgcggcagttatttgcacgccgtacggtggatccccaaagacgactctggaagtgtgtggaaggcacattacgttacgcccgtcttccaaccccccgcaagtggcgggtgttacgttaccagcctctgtcgctgttttggtgagcaggtcacctaccacaaccccccgttacttttcgatctctcgagggacccatcggagtccacccctctgacacccgccacagagccactgcacgatttcgtaatcaagaaagtggcaaacgcgctgaaggagcatcaagaaaccatcgtccctgtgacttatcagctcagcgagctgaaccaggggagaacatggctgaagccatgttgcggcgtttttcccttctgcctgtgtgataaggaggaggaggtctcacaaccaagaggacccaatgaaaaacggtag

SEQ ID NO: 108715 - DNA, 1773 bp, synthetic construct
  misc_feature 1..1773: note = Description of Artificial Sequence: Synthetic coding sequence
  source 1..1773: mol_type = other DNA
atgaggcctcgtcggcctttggtgtttatgtcattagtttgtgctctgcttaatacctgtcaggctcatcgggtgcacgatgataagccaaacattgtgcttatcatggtggacgacctgggtatcggtgacctaggttgttatggaaatgatactatgcggactccccatatcgatcgacttgcaagggagggcgtgcggcttacccaacacatatctgcagcctccttgtgctcacccagtcggtcggctttccttacagggaggtatccaataaggagcggcatggtcagcagtgggaaccggcgggtgattcagaatctcgccgtacccgctggcctgcctttgaatgagacaacgttggccgctctgcttaaaaagcagggatactctacaggattgattggaaaatggcaccagggcctcaactgcgatagtagaagcgaccagtgtcatcacccctataattatggctttgattactattacggtatgcctttcaccctggtggactcttgctggcctgacccctcccgtaatactgagctggcttttgaatcgcaactatggctatgtgtgcagctggttgccattgccatcctgaccttgacattcggtaagctctcagggtgggtcagcgttccttggctgctcatattctctatgatcctgtttattttcctgttaggttatgcgtggttttcatcccatacgagtccattgtactgggactgcctgctgatgcgcgggcacgaaattaccgagcaacccatgaaggcagagcgagcagggagcattatggtaaaagaggccatctcgtttctggaacggcatagcaaggagacgtttctcctgttctttagctttcttcacgttcatacccccttgccgaccacagacgattttaccggtactagcaagcatggcctttatggggataacgtggaggaaatggactctatggttggcaagatattggatgcaatagatgatttcggccttcggaacaacacactggtctattttacctccgaccatggtggacacctggaagcaagacggggacatgctcagcttggaggctggaacgggatatataaggggggcaaaggaatgggaggctgggagggcgggatccgggttcctggaatcgtccggtggcccggaaaggttcccgctggacggctgatcaaggaacctacctcactgatggacattctcccaactgttgcgtcagtgagtggaggatcgttgccacaggaccgggtaatcgacggtagagacctgatgccactgctgcaagggaacgtccgacactccgagcacgagttccttttccactattgcgggtcctacttgcacgcagttcggtggatccccaaggacgattcagggtcagtgtggaaggcccattatgtaactccagtcttccaaccgcccgcttccggtgggtgctatgtgacttccctgtgccgttgcttcggcgaacaggtcacctaccacaacccacctcttttattcgacctgtctcgcgacccttccgaaagcacgccgctgaccccagctaccgaacctctgcatgatttcgttataaaaaaggtggcgaacgccctgaaggaacatcaagaaactatcgtgccagtgacctatcagctgtccgaattaaaccaggggcgcacatggctgaaaccatgttgtggcgtttttcccttttgtctgtgcgacaaagaggaggaggtgtctcagcctaggggccctaacgagaagaggtag

SEQ ID NO: 108716 - DNA, 1689 bp, synthetic construct
  misc_feature 1..1689: note = Description of Artificial Sequence: Synthetic coding sequence
  source 1..1689: mol_type = other DNA
atgactagaaatgccagaccaaacatcgttctacttatggccgatgacctaggagtgggcgacctctgttgctacggcaataactccgtgtctacaccaaatatcgaccgcctggcgtcagagggagttcgtctcacacaacatctggctgctgcctctatgtgcaccccatctagggcggcttttttgaccgggcggtaccctatccgctctggcatggtttctgcatataacctgaatcgggccttcacatggctcggcggatccggtggcctgccaaccaacgaaactacctttgctaagctgctgcagcatcgtggctatcggaccggtctgatcggcaagtggcaccttggcctttcctgcgcatcccggaacgaccactgctaccatcccctgaatcacggtttccactatttttatggcgtgcctttcggacttctatcagactgccaggccagcaaaaccccggaactgcatcgatggctgcgcatcaagctttggatatctaccgtcgctctcgccctggtgccttttcttcttttgatacccaagtttgctaggtggttttccgtgccctggaaagtgatctttgtgtttgcccttctagcctttctcttttttacttcctggtactcatcgtatgggtttacacgaagatggaactgcattttaatgcggaaccacgaaataattcaacagccaatgaaagaagaaaaggtggccagcctgatgttaaaagaagcgctggcgttcatcgagagatataaacgagaacccttcctgttgttctttagtttcctgcatgtccatacaccactgatctcaaagaaaaagttcgttggcagatccaagtacgggcggtatggggacaatgtcgaggagatggactggatggtgggaaaaatactggatgccttggaccaagagagactggccaatcacaccttagtgtactttacttcagacaatggaggccacctggaacctttggatggagccgtgcagctgggaggttggaatggaatttacaagggcggcaagggcatgggtggatgggaaggaggcattcgagtacccggcatcttcaggtggccgagtgtgctcgaagccggtagagtcattaacgaacccacttctcttatggacatttacccaactctgtcctacataggcggtggaatcctcagccaggatcgtgtgattgatggccagaacctgatgcctttgttggaggggcgcgcatcccactccgaccacgagttcctctttcactattgcggcgtgtacctgcacacagtgagatggcaccagaaagactgcgctacggtgtggaaagctcactacgtgactcccaagttctacccggaaggcactggcgcctgctacgggtcaggaatctgctcatgctccggtgatgtgacctatcatgaccctccactactgttcgacatctcccgggacccttcagaggcccttcctcttaatcctgacaacgaaccactgtttgactcggttatcaagaagatggaagctgcaatcagggaacatcggcgcacccttaccccagtcccccagcagttctcagttttcaataccatctggaagccgtggctgcagccctgctgcggaaccttccctttttgcggctgtgataaggaagatgacatcctgccgatggcgccttag

SEQ ID NO: 108717 - DNA, 1710 bp, synthetic construct
  misc_feature 1..1710: note = Description of Artificial Sequence: Synthetic coding sequence
  source 1..1710: mol_type = other DNA
atgcatacattgactggcttctcgcttgttagcttgctcagttttggttacctgagctgggactgggccaagccatctttcgtggccgatggacccggcgaggccggagaacagcctagcgcagctcccccccagcctccacatattatcttcatcctgacggatgatcagggataccatgacgttggataccatggaagtgatatagagacccctaccttggaccggcttgcagctaaaggggtcaagctcgaaaattattatatccagcctatttgtacgcctagtcggtcgcaactcctcactggtaggtaccagattcacacaggtctccagcactcgattataaggccacaacaacccaactgcttgcccctggaccaagtcaccctaccccagaagctgcaggaggctggctactccactcatatggtgggaaaatggcacctgggattttacagaaaggaatgtctgcctaccagaaggggttttgacacattcctggggtcactgaccgggaacgtggattattacacctatgataactgtgatgggcctggggtgtgtggttttgatttgcatgaaggcgaaaatgtagcctggggcctatccggacaatactctacaatgctgtacgcccagagggctagccatattctcgcctcacattccccccagcggccactgttcctgtacgtggccttccaagcagtacacaccccactgcaatcgccccgggagtatctctatagatatcgcactatgggcaacgtcgcacggagaaaatatgcagcaatggttacctgcatggacgaggccgtccgtaacattacctgggccctgaagcgatacggcttctacaataactctgtgataatttttagctccgataatggagggcagacattctccggagggtctaactggccactccgcggtcgtaaagggacttactgggaaggcggagtgcgcggcttaggctttgtgcactctcctttgctcaaacggaaacagagaacaagtcgggcactcatgcatattacagattggtaccctaccctcgtgggactggcgggcggaaccacatccgctgcagacggcttggatggatatgatgtatggcctgccatttcggaaggcagagcgtcacctagaaccgagattctgcataacattgatcctctttataaccacgcccagcatgggtcactggaaggagggttcggaatttggaataccgcagtgcaggccgcaattcgggtgggggaatggaaactccttaccggagatcctggatacggagattggataccaccccagacattagccacctttccaggttcctggtggaatctcgagcgcatggcttccgtgcgccaggccgtctggctgttcaatatttctgccgatccgtacgaacgcgaggacttagctggacagcggccggatgtcgttagaactctattagctaggctggcagaatacaaccgcaccgccatcccggtgagatatccagctgaaaatcctcgtgctcaccccgacttcaatggaggagcctgggggccttgggcatctgatgaagaggaagaagaggaggaaggccgggcccgctctttcagccgaggccggaggaaaaagaaatgtaaaatttgcaaattgaggtcattctttcgaaaactgaatacacgcttaatgtctcagcgcatctag

SEQ ID NO: 108718 - DNA, 261 bp, synthetic construct
  misc_feature 1..261: note = Description of Artificial Sequence: Synthetic coding sequence
  source 1..261: mol_type = other DNA
atggtaggaaagtggcacctcggcttctatcggaaagagtgccttccaacccgtcgaggtttcgacacattcctcgggagcttgaccggtaatgtagattactacacttacgataactgcgacggacccggagtgtgtggcttcgatctacatgaaggcgaaaacgttgcgtggggattgtctggccaatattctacaatgctttacgctcagcgggcctcccatatcctggctagtcattcgccccagcgtcccctgtag

SEQ ID NO: 108719 - DNA, 1281 bp, synthetic construct
  misc_feature 1..1281: note = Description of Artificial Sequence: Synthetic coding sequence
  source 1..1281: mol_type = other DNA
atggtcggaaaatggcacttaggattttacagaaaagaatgtctcccaactcgcaggggatttgataccttcctcgggagtctgactggaaacgtggattactatacttatgataattgcgacggcccaggagtttgtggtttcgatctccatgagggtgagaatgtcgcttggggcctgtcgggccagtattccactatgttgtacgcgcagcgagcctcccatattttggcctcccatagcccacagcgaccactgtttctgtatgttgctttccaggccgttcatacaccattacagtcgcctcgagagtatttgtaccgctatagaacgatgggcaatgtcgcccgaagaaaatatgcagccatggtaacttgtatggacgaggccgtccgaaacatcacatgggctctgaagagatacggcttctataacaactccgtgatcattttttcttccgacaatgggggccaaaccttcagcggaggatccaactggcctttgaggggcagaaaaggcacatactgggagggcggcgtacgggggctgggctttgtgcactcacctctcctgaaaaggaagcagaggacgtccagagctctcatgcatattacggactggtatccaaccttagtggggctggcggggggaactacttcagccgccgacggtctcgacgggtacgacgtgtggcctgccatttctgagggtcgggcaagccctagaactgagatcctccacaatatcgaccctctgtataaccatgcccagcatggttcgcttgaagggggttttggcatttggaatactgctgtccaggcagcgatcagggtgggagaatggaaacttctgacgggtgatcctggctatggggactggatcccgcctcaaaccttggccaccttccccggaagttggtggaacctcgaacggatggcctcggtaagacaggcagtgtggctcttcaatatttcagccgatccctacgagagagaagacttggcaggacaacgccccgatgtcgtgaggaccctgctggcccgtttggctgaatataaccggaccgcaattcccgttaggtatcctgccgaaaatcccagggctcatcccgattttaacggcggagcctggggcccttgggccagtgatgaggaggaggaggaggaggaaggcagggccaggagcttcagccgggggaggaggaagaaaaaatgcaaaatctgcaaactgcgctcattctttcggaagttgaacacacgactgatgtcccaacgcatctag

SEQ ID NO: 108720 - DNA, 1800 bp, synthetic construct
  misc_feature 1..1800: note = Description of Artificial Sequence: Synthetic coding sequence
  source 1..1800: mol_type = other DNA
atggcgccgaggggctgtgcgggacacccaccacctccatcacctcaggcctgcgtgtgtcctggcaagatgctggccatgggggcactggcaggcttttggattctgtgcctgctgacctacgggtatctgtcctggggacaggctttggaagaagaggaggagggcgccttgctggcccaggcaggagagaaactggagccaagcacaacatctacttctcagccacatctgattttcatcctggccgatgatcagggcttccgagatgtgggatatcacggatctgaaataaaaactcccacgttggataaactcgccgccgaaggagtcaagctggaaaactactatgtgcagcccatctgtaccccttctcgtagtcagttcataactgggaagtatcaaatccataccgggctacagcatagcattatacggccaacccaaccaaactgtctgcctctggacaatgccaccctacctcaaaagctgaaggaagtgggctatagcacacatatggtgggaaaatggcacctgggtttttacagaaaggagtgtatgcccacccggcgtggctttgacaccttttttggttcactcctcggaagcggcgactactacactcactacaagtgcgactcaccaggcatgtgtggctacgatttgtatgaaaatgacaatgctgcctgggattacgacaacgggatctatagcacgcagatgtacacccaacgggtacagcagattttggcttctcataaccccactaaaccaatttttttgtatatcgcataccaggccgtacacagcccactgcaagcccctggtcgctacttcgaacattataggtccatcatcaatatcaatcggaggcggtacgccgccatgttgtcctgcctcgatgaggccattaataacgtcacccttgcacttaaaacctacggcttttataacaattcaatcatcatctattcctccgacaatggaggccagcctactgccggcgggtcaaactggcccttgaggggcagcaaaggtacctactgggaaggagggattcgcgctgtggggtttgtacatagtccactgttgaagaataaaggcaccgtatgtaaggaactggtgcatataacagattggtacccaacactaattagtctagctgaaggacagattgatgaagatatccagctcgacggatacgatatctgggagacaatctctgaaggcctgcgctcccccagggtggatatccttcataatatcgaccccatctataccaaagcaaagaatggctcttgggctgcaggctacggaatctggaacacggccattcaatcagccatcagggtgcagcactggaaactcctaaccggcaacccgggctacagtgactgggtgccaccacagtctttcagcaatctgggcccaaatagatggcacaacgagaggattacattgtctaccgggaagtccgtatggctcttcaacataacagctgatccatatgaaagggtggacttgtctaataggtatccaggtatcgtgaaaaagttattacggaggcttagtcagtttaataagaccgcagtgccagtgaggtatcctcccaaagaccctagaagcaacccacgactgaatgggggagtatgggggccttggtacaaggaggagactaagaaaaagaaaccttcgaagaaccaggccgaaaagaagcaaaagaaatccaaaaagaaaaagaagaaacagcaaaaagctgtgagcggatctacttgccatagtggggtaacttgcggctag

SEQ ID NO: 108721 - DNA, 1791 bp, synthetic construct
  misc_feature 1..1791: note = Description of Artificial Sequence: Synthetic coding sequence
  source 1..1791: mol_type = other DNA
atggccccaaggggatgtgccggccaccccccgcctccctcgcctcaagcttgtgtttgccctggcaaaatgctcgccatgggcgccctggcagggttctggattttatgtctgcttacttatggctatctgtcgtggggtcaggccctagaagaagaagaagagggggccctgttggcccaggcaggcgagaagcttgagccctccactacatcaactagccaaccccacctgattttcattctcgctgatgaccaaggcttccgtgatgtgggctaccacgggagtgagatcaagacgccaacccttgacaagctagctgcggagggggtgaagctggaaaactactacgtgcagccgatatgcacccctagccgctcccaattcatcacgggaaagtatcagatacacacaggccttcaacacagtatcatacgtcccactcagcctaactgtctacccctggacaatgcaaccttaccccagaagctgaaggaggttggttattccacccacatggtgggtaaatggcatctgggattctaccggaaggagtgtatgcccactcgacgcggctttgatactttttttggctctctgttggggagtggtgattactatactcactataaatgtgattcccctggaatgtgcgggtatgatctctacgaaaatgataacgcagcatgggactacgataatggtatttactcgactcagatgtatactcagagggtgcagcagatcctcgcctcccacaatccaaccaaacccatattcctctacattgcatatcaggctgtgcatagtcccctgcaagctccgggtaggtatttcgaacactatcgtagcatcataaatatcaacagacgaagatacgcggcaatgctttcctgcttagacgaagcaatcaacaatgtgaccctcgcactcaagacatatggcttttacaataattctattattatctactcttccgacaacggcggacaacctaccgccgggggctcaaattggccgctgagaggctccaaaggcacttattgggaaggaggcatccgggccgtcggcttcgttcattcaccactgctgaaaaacaaaggcaccgtttgtaaagaactcgtccatattacagactggtacccaacactgataagtctcgcagaggggcagatagacgaagacatccaactggatgggtacgatatctgggagacgatcagtgagggtctacgctccccaagagttgacatcctgcataatatcgaccctatctacaccaaagccaagaatggctcctgggcggcgggctacggcatatggaatactgccatccaatctgccatcagagtgcaacattggaagctcctcaccgggaatcctgggtatagtgactgggtgccaccccagtctttttctaacttagggccaaacagatggcataacgaaagaataactctctcaactgggaagtcagtttggctgttcaatatcactgcggatccatacgaacgcgtagacctctcaaatagataccctggcattgtgaagaagctcctgaggagactgagtcagttcaacaaaactgccgttcctgtgcgctaccctccaaaggaccccagatccaaccctcggctgaacggaggagtatggggcccttggtacaaggaagaaactaaaaagaagaagccgtctaaaaaccaggcggaaaagaagcagaagaagagtaaaaagaaaaaaaaaaagcagcagaaagctgtctccggtaagccagccaatctggcccgctag

SEQ ID NO: 108722 - DNA, 507 bp, synthetic construct
  misc_feature 1..507: note = Description of Artificial Sequence: Synthetic coding sequence
  source 1..507: mol_type = other DNA
atggcaccagggcagcaggctatgggctccggaacattacagtcaagccagccatcagagtgctctacaggcctgctcacgggcaaccctggctattcagattgggtccctccccagtcattttccaatctgggccctaatagatggcacaatgagcggatcaccctcagcactggaaagtcggtgtggttatttaatataaccgccgacccttatgagcgagtggacttaagcaatcggtaccccggcatcgtgaaaaagttgctgagaaggctgtctcaattcaataaaactgccgtgcccgtgcgctaccccccaaaagatcccaggagtaacccgcggctgaacgggggtgtgtggggaccgtggtataaagaggagacaaagaaaaaaaaaccgtccaagaatcaggcagagaagaagcaaaaaaagtcgaaaaaaaaaaagaagaagcagcagaaagccgttagtggttccacgtgccacagtggagtgacatgtggatag

SEQ ID NO: 108723 - DNA, 1611 bp, synthetic construct
  misc_feature 1..1611: note = Description of Artificial Sequence: Synthetic coding sequence
  source 1..1611: mol_type = other DNA
atgctattgctttgggtttccgtagtggccgcactggccttagcagtgctggctccaggggcaggcgagcagcgcagaagagcagcaaaggccccaaacgtggtgcttgtggtgtccgattccttcgatggacgcctcacattccatcctggcagccaggtagtcaagctgccattcatcaactttatgaagactagaggcacctcattcctgaacgcttacacgaatagtccgatctgctgcccctcccgggctgctatgtggagcggcttatttactcacctgaccgagtcatggaacaatttcaaagggctcgacccgaattacacgacttggatggatgtcatggagagacatggttataggacccagaagttcgggaaactggattatacctcagggcaccatagcatttctaatcgggtggaagcctggactcgcgatgttgctttcctgttacggcaggaaggtcgccccatggttaatttaatcagaaatcgtaccaaggttcgggtcatggagcgggattggcagaacacagataaagctgtcaactggcttcggaaagaggcaataaactacacagaacctttcgtgatctacctcgggctgaacctcccccacccatacccaagcccttccagtggggagaattttggttcttctactttccacacttctttgtactggctggagaaagtcagccacgacgcgatcaagatcccaaaatggtccccgctgtctgagatgcacccagtggactactattcatcttacaccaaaaattgtacaggtcggttcaccaagaaggagataaaaaacattagagctttctactatgcaatgtgtgccgagacagacgcaatgctcggggaaatcattcttgccctgcatcaactggaccttctacagaaaacaatcgtcatctattccagtgatcatggagagctcgcaatggaacatcgccaattttataaaatgtctatgtatgaagcctcagcccatgtgccattgttgatgatggggcccgggataaaggcgggtctgcaagtgtccaatgtggttagcctcgtcgacatatatccgacaatgcttgacatcgccggaataccccttccacagaacctgagtggatatagtctgctgcctctgtccagcgagacatttaagaacgaacataaggtgaagaacctccatccaccctggattctgtcggaattccatgggtgcaatgtgaacgcaagtacatatatgctgcgcacaaatcactggaaatacattgcctacagcgacggagcctctattctgccccagctcttcgatttgtccagcgacccagatgagctgacaaacgtggcagttaaattcccagagatcacctattcccttgaccaaaagctccacagcatcattaattaccccaaagtgtccgcttctgttcatcagtataacaaagagcagtttatcaagtggaagcagtcgatcggtcaaaattactctaacgtgatcgctaaccttcgctggcatcaggactggcagaaagagcccaggaagtatgagaacgctatcgatcaatggctgaagacccacatgaacccaagggcagtatag

SEQ ID NO: 108724 - DNA, 561 bp, synthetic construct
  misc_feature 1..561: note = Description of Artificial Sequence: Synthetic coding sequence
  source 1..561: mol_type = other DNA
atgctgctcctgtgggtgtcagtggtcgccgcactggccctcgccgtactcgcacctggcgccggtgagcaacgacgcagagcagctaaggcccccaacgtggttcttgtcgtgtcagacagcttcgatgggcggttgacctttcaccccggctcacaggtagtgaagctcccgttcattaactttatgaagacgagaggtacttcattcctgaacgcttataccaactctccgatatgttgcccatcacgagccgccatgtggagtggcctgttcactcatcttactgaaagttggaacaatttcaaggggttggaccctaactatacgacctggatggacgtgatggagcgccacggctatcggacccagaaatttggtaagctggactacacatctggtcatcactctatctctaaccgggtggaagcatggactcgggacgtagcattccttctgcgccaggaaggtcggcccatggtgaacttaattcgcaatcgcactaaggtccgtgtaatggaacgggactggcagaacacagataaggcagtcacaggatag

SEQ ID NO: 108725 - DNA, 1275 bp, synthetic construct
  misc_feature 1..1275: note = Description of Artificial Sequence: Synthetic coding sequence
  source 1..1275: mol_type = other DNA
atgtggggctgttgtgtgtgtggggctctgttcgaagggcagcgtttgcgcttacttagggcccctggggacggactgtccagcccgttcactgtggtttcacgtaagtggcacctcggacatcatggcagctaccacccaaacttccgagggttcgattattattttgggataccgtacagccacgacatgggatgtaccgacacccccggctataatcatcccccctgccccgcctgcccacagggtgacgggcctagtaggaatctgcaacgagattgttacaccgatgttgctctgcctctgtatgagaatctgaacatcgtggagcagccagtgaatctcagttctctggcccagaagtacgcagagaaagctacccagtttatccagagagcatctacaagtgggcgcccttttctgttatatgtggcgcttgctcacatgcacgtccccttacccgtcacgcagctgcccgccgctccccggggcaggtcattgtatggggccgggctgtgggagatggactccctggtagggcaaatcaaggataaggtggaccacaccgtgaaagagaacactttcctgtggttcactggagacaatggcccctgggcccagaaatgcgagctcgcagggtctgtggggcctttcactgggttctggcagaccaggcagggaggcagccctgccaagcagaccacctgggagggggggcatagggtcccggcactggcttattggccggggcgagtacctgtgaacgtgaccagcaccgccctgcttagcgtcctggatatcttccctactgtggtagcccttgcccaggccagcctgccccaggggcggagattcgacggcgtcgacgtgtcagaagtgctctttggacgctcacagccaggtcacagggtgctgtttcatcctaattctggcgctgctggagagtttggggcacttcagacagttagattggagcgctacaaggcgttttacatcacgggtggtgctcgggcttgtgatggcagtacaggaccagagctccagcataagtttcctctgattttcaacctggaggacgataccgcagaagccgtaccattagaacggggaggggccgaataccaggcagtcctgcccgaggttagaaaggtgctggccgacgtgctgcaggacatcgccaacgataacatttcttccgccgactatacccaggaccccagcgtgacaccttgttgtaacccttaccaaatagcctgccgctgccaggctgcatag

SEQ ID NO: 108726 - DNA, 1578 bp, synthetic construct
  misc_feature 1..1578: note = Description of Artificial Sequence: Synthetic coding sequence
  source 1..1578: mol_type = other DNA
atgggttggctgttcctgaaggtgcttctggccggcgtttcattctccggtttcctctatcctctggtagatttctgtatcagtggcaagaccaggggccagaagcccaacttcgtaattatcttggcagacgacatgggttggggggatctaggagccaattgggctgaaacgaaggacaccgccaacttagacaaaatggcttccgaggggatgcggtttgtcgatttccacgcagcagcctctacatgttctcccagccgggcctcccttcttaccgggcgactgggactaagaaatggggtgactcgaaactttgcggtgacgtctgttgggggtttgcctctcaacgagacaactcttgctgaagtgctgcaacaagctggatatgtgacaggcattattggtaagtggcatttgggccatcacggatcataccatcctaattttcgaggtttcgattactactttgggatcccctattcccatgatatgggctgcacagacacgcctggttacaatcaccctccctgtccagcctgcccgcagggtgacggccccagccgaaacctgcaaagggattgttataccgatgttgccttgcccctctacgagaacctgaacattgtcgaacagcccgtgaacttgtcaagcctggcacagaagtatgctgaaaaggcgacccagttcattcagcgagcgtccacttccgggcgcccctttctcctgtacgttgcattggcacacatgcacgtgcccttgcccgtgacccagctgccagccgcaccaagggggcgctctctgtacggcgctggcctttgggagatggatagtctggtgggacaaattaaagacaaagtcgaccacaccgtgaaggaaaatacctttctttggtttacaggcgataacgggccatgggcacagaaatgcgagctggccggttccgtgggacccttcaccggattttggcagacccgacaaggcggcagccccgcaaaacagacaacctgggagggtggacaccgagtgccggcactcgcttattggccggggcgagttccagtcaacgtcaccagtaccgctttgctcagtgtgctcgacatcttccctactgtcgtggcgttagcccaagcgagtctgccacagggccgccgattcgatggcgtcgacgtttccgaggtcctgtttgggaggtcccagccaggccatcgcgtgctgttccatcccaactctggagccgccggggaatttggcgccctacaaacagtaagactcgagcggtataaagctttctacatcacaggcggggcaagagcttgcgacggctcaactggcccagagctgcaacataagttcccactcatttttaatctagaggatgataccgccgaggccgtcccactggaaagggggggagctgagtaccaggccgtgcttccggaggtgagaaaagtattggctgatgtgcttcaggatatcgcaaatgacaacattagctccgctgattatactcaggatccttctgttaccccttgctgtaacccctaccagatagcctgtcgttgtcaggctgcttag

SEQ ID NO: 108727 - DNA, 747 bp, synthetic construct
  misc_feature 1..747: note = Description of Artificial Sequence: Synthetic coding sequence
  source 1..747: mol_type = other DNA
atgacaaagacctccacctgcatctatcactttcttgtcctgagttggtacaccttcctcaattactacattagtcaggaaggaaaggacgaggtaaaaccaaaaatactggcaaacggagcccgctggaaatatatgacactgctgaatttgctgaagaaccgaaccgccggcttcgatatttatcaaccaggttcattcaggcagctgcttcagaccatattttacggcgtgacctgcctcgatgacgtactcaagaggaccaaaggaggtaaggacatcaagttcctgacggcctttagggatttgctgttcactactctcgcctttccggtcagcacatttgtattcctcgccttttggatacttttcctgtacaaccgagacctgatatatccaaaagtgctggatacagtcattcctgtttggctaaaccacgcaatgcacaccttcatattccccattactctagcggaagtggtgttgcggcctcattcctaccctagtaagaagactggcctgaccctgctggctgctgcctccatcgcatacatttctcgcatcctgtggctgtacttcgaaaccggaacctgggtgtaccccgttttcgcaaagttgagcttactgggtcttgccgcctttttctctctgtcttacgtgtttatcgctagcatatatctattaggtgagaaactcaaccactggaagtggggggatatgcgacagcccagaaagaagcgcaaatag

SEQ ID NO: 108728 - DNA, 609 bp, synthetic construct
  misc_feature 1..609: note = Description of Artificial Sequence: Synthetic coding sequence
  source 1..609: mol_type = other DNA
atggcaaaggtgtctgtattgaacgtggctgtgctcgaaaatccctcacccttccactctccctttaggtttgagatctccttcgaatgttccgaggctttggccgacgatttggaatggaagatcatctacgtgggctctgctgagagcgaagagtttgatcagattctggacagcgtgctggtcggccctgtgcccgcgggccggcatatgtttgtcttccaagccgatgccccaaacccctcgctgatcccagaaaccgacgccgtgggagtgacagtcgtgctgatcacctgtacgtaccacggacaggaattcattcgggtgggctattacgtgaataacgagtatttaaacccggaattgagggagaaccccccaatgaagcctgatttctcccaactgcagcgcaatatactggcgagtaacccgagggtgacccggttccacatcaattgggataacaacatggatagattggaagccatcgagactcaggacccaagccttggctgtgggctgccactgaactgcactcctattaagggattgggattgccaggatgcatccccggtctgctgccggagaactccatggattgcatttag

SEQ ID NO: 108729 - DNA, 1506 bp, synthetic construct
  misc_feature 1..1506: note = Description of Artificial Sequence: Synthetic coding sequence
  source 1..1506: mol_type = other DNA
atggatactcaggccggaagtgtcgacgaagagaacgggcggcagcttggcgaggttgagctgcagtgcggcatttgcaccaaatggtttacagcagacacttttggaattgatacgtcttcttgcctcccatttatgactaattatagtttccactgcaatgtctgtcatcattccggcaacacgtatttcctgaggaagcaggcgaacttgaaggaaatgtgtctaagtgccttagcaaacctgacctggcaatccagaacccaagacgagcatcccaagacaatgttctccaaggataaggatattatcccgttcatcgataagtattgggagtgtatgacaacgcgccaacgcccaggcaagatgacttggcctaacaacatcgtgaagactatgagcaaggagcgcgacgtatttttagtcaaggaacatccagatccaggatcaaaggaccctgaagaagattacccaaaattcggcttgctcgaccaggatcttagcaacattggtcccgcctatgataaccaaaagcagtcttccgctgtttctacatcaggaaatctcaatggggggatcgccgctggcagtagcggcaaaggacgaggggctaagcgaaagcagcaggacggcggcacaacaggaaccacgaagaaagcccgatctgaccccctattctccgctcagcgacttcctcctcacggctaccctttggagcacccatttaacaaggacggctacagatatatcctggccgagccggatccccatgctcctgatccggagaagcttgaacttgattgctgggccggcaagccaattcccggggacctctatcgcgcttgcctttacgaacgagtgctgcttgccctgcatgatcgagcaccacaacttaaaattagtgacgacaggctcaccgtggtaggagagaaggggtacagcatggtaagggcatcccatggcgtgaggaaaggggcctggtatttcgaaattaccgtagatgaaatgccacctgatactgccgcccggctaggatggtcccaaccgcttggcaaccttcaggcgcccctgggctatgacaaattctcctactcctggaggtcgaaaaaggggacaaaattccatcaatccatcggcaagcattacagcagtggatatggtcagggagatgtgctgggcttctacattaatctacctgaggatacggaaacggcaaaatctctaccagatacctacaaggataaggctctgatcaagttcaagtcgtatctctactttgaggagaaagactttgtggacaaggctgaaaaaagtctgaagcaaacacctcacagcgaggtgtcaatcaatttcggaccctgtttcaaatatccgcctaaagacttgacatatcggcccatgagtgatatggggtggggcgcagtcgtagagcacactctcgccgatgtcctatatcacgtggagacagaggtggacggaagacgttctcccccctgggagccttag

SEQ ID NO: 108730 - DNA, 1887 bp, synthetic construct
  misc_feature 1..1887: note = Description of Artificial Sequence: Synthetic coding sequence
  source 1..1887: mol_type = other DNA
atggcggccgctggtgccggccccggacaggaggccggtgccggccccggtcccggagcagtggcaaatgcaacaggcgccgaagagggcgagatgaagcctgtcgctgctggggccgccgcccctcccggggagggtatctccgcagccccaactgttgaaccaagctcaggggaggcagaaggcggcgaggctaatctcgtggatgtgagtggaggcctggaaactgaatcttctaacggtaaggatacactggagggagccggggacaccagtgaggtgatggatactcaggctggtagcgtcgatgaggaaaacggaaggcaactgggagaggttgagcttcagtgcggcatttgtaccaaatggttcaccgccgatacctttggcatcgatactagctcttgtctcccattcatgacgaactattcatttcactgcaatgtctgccaccactccggcaatacgtactttttacgtaaacaggcaaatctgaaagaaatgtgcttgtcggccctcgctaacctgacgtggcaatcccgtacacaggacgaacacccaaagactatgttctcaaaagacaaagatattatcccttttatagacaaatactgggagtgtatgacaacccgtcagaggcccggaaagatgacatggcccaacaatatcgtcaagactatgagtaaggagcgggacgtgttcctggtgaaggaacacccagaccctggctccaaagaccctgaggaagattaccctaagttcggccttctggatcaggatctgagcaacatcggccccgcatacgacaatcagaagcagagcagtgcagtgtctacaagtggcaatttgaatggcgggatagcagccgggagctctggaaaggggaggggagccaagagaaagcaacaggacgggggcacaacagggacgactaaaaaggccagaagcgatcctctgtttagcgctcagcggcttcctcctcatgggtatccactggagcatcctttcaataaggatggctatcggtatattctcgccgagcctgatccccatgctccagaccccgagaaacttgagctggactgctgggccggtaagccaatccccggggacctctacagggcatgcctgtacgaacgcgtcctgttagctcttcacgaccgggccccccaacttaagatttctgacgatcggttgacggtcgtgggcgagaagggttacagcatggtcagagcatctcacggggtgaggaagggcgcctggtactttgagatcacagtcgacgagatgcccccagatacagccgcacggctgggctggtcgcagcctctgggcaacctgcaggcccctttagggtacgacaaattttcatactcctggcgctccaaaaaggggaccaaattccatcagtctatcggaaaacattactcctcaggctacggccagggtgacgtcttgggcttctacattaatctccccgaggatacagagaccgctaaatctttaccggacacgtataaagataaggccttaataaagtttaagagttacttgtattttgaagagaaggatttcgtggataaggccgagaaatccctgaagcaaactccccattccgagatcatcttttacaagaacggtgtgaaccagggtgtggcgtacaaggacatcttcgagggggtatactttccagcaatatcactctacaagtcttgtacagtgtccattaattttggtccatgtttcaaataccctcctaaggatttgacgtatcgacccatgtctgacatggggtggggagcagtggtggaacatacactggctgatgtgctgtatcatgtcgaaactgaagtggacggtaggaggtctccaccttgggagccatag

SEQ ID NO: 108731 - DNA, 1605 bp, synthetic construct
  misc_feature 1..1605: note = Description of Artificial Sequence: Synthetic coding sequence
  source 1..1605: mol_type = other DNA
atggacacgcaggccggaagtgtcgatgaggagaacggtaggcagctgggcgaagtggaactgcagtgcgggatttgcacaaaatggttcactgcagatacattcgggatcgacacctcctcatgcctacctttcatgaccaattatagctttcattgcaatgtctgtcaccactctggaaatacctatttcctccggaaacaagcaaatctgaaagagatgtgcttgtccgctttagctaacctaacctggcagtcacgcacccaggacgagcacccaaagaccatgttctcaaaagataaggacataatcccctttatagataagtactgggagtgcatgacaaccagacagcgtccaggaaagatgacctggccgaacaacatagttaagaccatgtccaaggagcgtgatgtgttcctggtgaaagagcacccggatcccgggtcaaaggacccagaagaagactacccaaaatttggactactggaccaggacctgtcaaacatcggccccgcatatgacaatcagaaacagtctagtgcagtaagcaccagcggcaatctcaatggagggatagcggccggcagcagtgggaaaggtcggggcgccaagcgcaagcagcaggatggcggaacaacggggacaactaagaaagctcgtagtgatcctctgttcagtgcacaacgcctgccacctcacgggtatcctcttgagcatccttttaataaagatggatatcgatacatcctcgctgagcccgatccacatgcaccagatccagagaagcttgagctggattgctgggccgggaaacctatcccaggggacctgtatcgggcttgcctgtacgagcgcgttctgctagcactccatgatcgggctcctcaactgaaaatctctgatgacaggctgactgtggtgggcgagaagggctactcaatggtgagggcttctcacggcgtgcgtaaaggagcttggtatttcgagattaccgtggacgaaatgcccccagataccgccgcacggctgggatggtctcagcccctgggcaacctgcaggcgcctctgggatacgacaaattcagttatagttggcgctctaaaaagggtacgaagttccatcagagtattggtaaacactactcaagcggctatggtcagggcgacgtgctaggcttctacatcaatctgcccgaggacaccgagacagccaaatcactacccgatacctacaaagacaaggccctcattaagtttaaaagttatttgtattttgaagaaaaggattttgtggacaaggcagaaaaaagcctgaagcagacacctcactctgagatcatattttacaagaatggagttaatcagggagtggcctacaaagatattttcgagggcgtatactttcccgcaattagtttgtataagtcctgcacggtctccattaattttggcccatgcttcaagtatcctcctaaggacctgacttacagacctatgagcgacatggggtggggtgccgtcgtggagcacacactcgccgacgtgctataccatgtggaaaccgaggtcgacggacgacgcagccccccctgggagccctag

SEQ ID NO: 108732 - DNA, 1506 bp, synthetic construct
  misc_feature 1..1506: note = Description of Artificial Sequence: Synthetic coding sequence
  source 1..1506: mol_type = other DNA
atggacactcaggctggtagcgtggacgaagaaaacggcaggcagcttggcgaggtcgagctgcagtgcggcatttgtaccaagtggttcaccgctgacactttcggaatcgatactagttcctgtctcccctttatgacaaattactctttccactgcaatgtgtgccatcactctgggaacacatatttcctgagaaagcaggccaacctgaaggaaatgtgtttgagcgccctagcaaacctcacatggcaaagtcggacacaggacgagcaccccaagacaatgtttagcaaagataaagacatcatcccctttatcgataaatattgggaatgtatgaccacccgccagcgcccggggaaaatgacgtggccaaataatattgtcaagacaatgtccaaagagcgcgatgtgttcctggtcaaggaacatcccgatcccggctcaaaagacccggaagaggactatccaaagtttgggctcctcgatcaggacctcagcaatatcggccccgcttacgacaatcagaagcagtcaagtgccgtgtctactagcggtaatctgaatgggggtattgccgctggaagctctggaaagggcagaggagctaaacgcaaacaacaggacggagggactaccggaaccaccaagaaggcaagaagcgaccccctattttccgcacaaaggctgcccccgcacggatatccattggagcacccatttaataaggatgggtacagatacatcttggcggagccagatccacatgccccggatccagaaaaactggaactggactgctgggccggaaagcccattcccggcgatctgtaccgggcatgtctatatgagcgcgtcctactagcccttcacgatagggccccccagctgaagatatccgatgatagactgaccgtcgtgggcgaaaaaggctacagcatggtgcgggcatcccatggagtgaggaagggagcttggtattttgaaatcacagtcgatgaaatgccccccgatacagccgcgcgcctgggttggagccaacctttggggaacctgcaggctcctctagggtacgataagttcagttattcatggagatctaaaaaggggactaagttccatcagtccattggaaagcattatagttcaggatatgggcaaggagatgtccttggtttttatattaatctccccgaggacacggagacagctaaaagcctacctgacacttacaaggacaaagcactgatcaaattcaagtcttatctttattttgaggaaaaagacttcgtggataaagctgagaaaagtctgaagcagaccccccattctgaagtaagcataaacttcggcccttgttttaaataccctccgaaagatctcacgtataggccaatgagcgatatggggtggggcgcggtggtggaacacactcttgctgacgtgctgtaccatgtcgagactgaagtggatggacggcgcagccctccctgggagccttag

SEQ ID NO: 108733 - DNA, 1470 bp, synthetic construct
  misc_feature 1..1470: note = Description of Artificial Sequence: Synthetic coding sequence
  source 1..1470: mol_type = other DNA
atgaccaactatagttttcattgtaatgtgtgccatcactcagggaacacctacttccttcgcaagcaagctaatctcaaagaaatgtgcctctcagccttagcaaacctaacatggcagtcccgcacgcaggatgagcatcccaagaccatgttttctaaagataaagacataattcctttcattgataaatactgggagtgcatgaccacacgccaacgcccgggaaagatgacatggcctaataatatcgtaaaaactatgtccaaggagagagacgtttttctggttaaggagcaccctgatccgggatccaaggatcctgaagaggattaccccaagtttgggctgctcgatcaggacttatctaatatcggccctgcatacgataaccagaaacaaagctccgcagttagcacttcaggaaatctgaacggtggcatcgccgctggttcatccgggaaaggcaggggggcgaagagaaaacaacaggatggcggcaccactggaaccaccaagaaggctcgctctgacccgctgttctccgcacagcgcctgccgccccatgggtatcccctcgagcacccgtttaataaggatggatatcgttatattcttgcagagcctgatcctcatgcccccgacccagaaaaactggaactggattgttgggctggcaagcccatccccggggacctgtaccgtgcttgcctctatgagcgagtcctgcttgcattacatgatagggcgcctcagctcaagatttccgacgatagacttactgtggtcggtgaaaagggttatagcatggtgcgggcttctcatggcgtaaggaagggagcttggtatttcgagatcactgtggatgagatgccccccgatacagccgcacgattggggtggtcccagcctctggggaatctccaggccccattgggatacgataaattcagttatagctggaggagcaagaaagggacaaagttccatcaatcgatcggcaagcattattctagcggctacggccagggggatgttttggggttttacataaacctccccgaggacaccgaaaccgcaaagagcctccctgatacctacaaagataaggcactgatcaaattcaaaagctatttgtactttgaggagaaagactttgtggacaaagctgaaaagtccctcaaacaaaccccgcattccgagattatcttctataaaaatggcgtgaatcaaggagtagcttataaggatattttcgaaggggtctatttcccagccatctccttatacaaaagttgcactgtatcgattaattttgggccctgctttaaatatccgcccaaggaccttacgtaccgccccatgagtgacatgggatggggagccgtcgtcgagcacaccttggcagatgtcctctaccatgtggagaccgaggtggacggccgtcgtagtcctccctgggaaccctag

SEQ ID NO: 108734 - DNA, 876 bp, synthetic construct
  misc_feature 1..876: note = Description of Artificial Sequence: Synthetic coding sequence
  source 1..876: mol_type = other DNA
atgaccaaggagtaccaggacctccagcacctcgacaacgaagaaagcgaccaccatcagctgaggaaaggtcctccgcccccacagcctctgctccagcgcctctgttctggccccagactgctgctgctatcgctaggtttatccctactgttgctagttgtagtgtgtgttatcggcagccaaaacagccaattgcaggaggaactgagaggcctgagggagacgttcagcaacttcactgccagtactgaggcacaggtcaagggactatcaacgcagggaggcaatgttggaagaaagatgaagagcctcgagtcccaattagaaaagcagcagaaagatctgtccgaggaccactcctcactgctcctgcacgtcaaacagtttgtttccgacctccgctctttgtcttgccagatggccgctttgcagggtaacggctccgagcgcacctgttgccctgtgaactgggtggagcatgaaagaagctgctactggttcagccgatcagggaaggcttgggctgacgctgacaactactgtcgtctggaagacgcccacttagtggtagttactagttgggaggagcaaaaatttgttcagcatcacatcgggcccgtcaacacatggatgggcctccatgatcagaacggcccctggaagtgggttgacggaacagactacgagaccggtttcaagaactggcggccagaacaacctgatgattggtatggacatggcctgggcggaggggaagattgcgcccatttcacagatgacggaaggtggaacgacgatgtgtgccaacgaccctaccgttgggtgtgcgaaacagaattagacaaagcctcccaggagccccctttgttatag

SEQ ID NO: 108735 - DNA, 759 bp, synthetic construct
  misc_feature 1..759: note = Description of Artificial Sequence: Synthetic coding sequence
  source 1..759: mol_type = other DNA
atgactaaggaataccaggacctgcaacacttagacaacgaggaaagtgaccatcaccaacttagaaaagacagtcagttgcaggaggagctgcgaggcctcagggaaacattttctaacttcaccgcgtctacagaagcacaagttaaggggttatcgacccagggtggaaatgtcggccgaaagatgaaaagtctagaaagtcagctagaaaagcaacagaaggaccttagtgaagatcattcgagtttgctgctccatgtaaagcaattcgtttctgacctgaggtccttgagttgtcagatggccgcacttcagggaaatggttccgaaagaacctgctgtcccgtaaactgggttgagcatgaaaggagctgctactggttctctaggagcggcaaggcttgggcggacgccgacaattactgcaggctcgaagacgcacatcttgtcgtggtgacttcctgggaggaacagaaattcgtgcaacatcatattggtccagtcaacacgtggatgggcttgcacgaccagaacggcccatggaaatgggtagacggtactgattacgagactggcttcaagaactggaggcccgaacagccggatgattggtacggccatggcctgggtggtggggaggattgcgctcactttaccgacgacggtaggtggaatgacgatgtgtgccagaggccgtaccgctgggtttgcgagacagagttggacaaggcctcccaagagccaccgttgctgtag

SEQ ID NO: 108736 - DNA, 759 bp, synthetic construct
  misc_feature 1..759: note = Description of Artificial Sequence: Synthetic coding sequence
  source 1..759: mol_type = other DNA
atgactaaggaataccaagatttacagcacctagacaacgaggagagcgaccatcaccagctgcggaaggacagccagctccaggaggagctcaggggtcttcgggaaacttttagcaattttactgcaagcacagaggcccaagtgaaggggttgtcaactcagggtgggaacgtcggccgcaagatgaagtcattagaatctcagcttgagaagcagcagaaggacctttcggaagatcatagctcgctgctcctgcatgttaagcagtttgtaagtgatctccggagcctctcctgccagatggctgccctccagggtaacggctctgaacggacatgttgccctgttaactgggtggaacacgagcggtcctgctactggttctctcggtccgggaaggcctgggctgacgctgataactattgcagactggaggacgctcatctggttgtcgttacgtcttgggaggagcagaaattcgtgcagcaccatataggtcccgtcaacacctggatggggctgcacgaccaaaacggcccctggaagtgggtggacggcactgactacgaaacggggttcaaaaactggaggcccgaacagcccgacgattggtacggacatgggctcggcggcggggaagactgcgcccacttcacagatgatggcagatggaacgatgatgtttgtcagcggccgtacagatgggtgtgcgaaaccgaactcgataaggcgtcgcaggagcctccgctgctctag

SEQ ID NO: 108737 - DNA, 5679 bp, synthetic construct
  misc_feature 1..5679: note = Description of Artificial Sequence: Synthetic coding sequence
  source 1..5679: mol_type = other DNA
atggctaatcgacgcgtgggccggggctgttgggaagtcagtcctactgagcgcaggccacctgctggcctcagggggcctgcagccgaagaagaggcgtccagtccaccggtgttaagtttgagccacttctgtaggtctccctttctttgctttggtgatgttctattaggcgcttccagaactctctccttagcgctggataatcccaatgaggaagtggcagaagttaagatctctcacttccctgcggccgacctgggatttagtgtgagtcagcgatgttttgtccttcagcccaaggagaagatagtgatcagcgtgaattggactcctttaaaagaaggacgtgtgagagagataatgacctttcttgtcaacgacgtgcttaaacaccaagcaatcctgttgggtaatgccgaagaacaaaagaagaagaaacggagcctgtgggacaccatcaaaaagaagaaaatctctgccagtacatcccacaatagacgggtatccaacattcaaaacgtcaataaaaccttcagcgtgagtcagaaagttgaccgggtgcggagcccattgcaggcgtgtgaaaacttagcaatgaacgaaggcggtccccctactgaaaacaactcccttatccttgaggagaataagattccaatttcacccatctcaccagcttttaacgagtgtcatggagccacgtgcctccctctatccgttagaaggtccaccacctactcgtctctccatgctagtgagaacagagaactgctgaatgtgcacagcgccaacgtatccaaggtgtcctttaacgaaaaagcagttaccgagacttcatttaactctgtgaatgtgaacggacaacgcggcgaaaactctaaactgtccctaacgcccaactgcagctccacattaaacatcactcaaagccaaattcactttctatcgcccgattcatttgtgaataactcacacggggccaataacgagctcgagctagtgacatgcctgtccagcgatatgtttatgaaggataatagccaacccgtccatttggaaagcaccatcgcccacgagatctatcaaaagattctttcacccgactcatttattaaagataattatggactcaatcaggacctcgagagcgagtccgttaatccgattctctcccccaatcagttcctgaaggacaacatggcctacatgtgcacgtcccagcaaacttgtaaagtcccgcttagcaacgagaattcgcaagtaccacagtcacctgaagactggagaaaaagtgaggtgtcaccaaggatccccgagtgccagggttcgaagtcacctaaggcgatatttgaggagctcgtagaaatgaaaagcaactattattcctttatcaagcagaataatccgaagtttagcgctgtacaggatatttccagtcacagccataacaagcaacctaaaaggcggccaattttgtctgctacagtgactaagagaaaggctacatgtacacgggagaatcagaccgagatcaacaagccaaaggctaaaaggtgcctgaattccgcagtgggtgaacatgaaaaggtcatcaacaaccaaaaagagaaagaggatttccattcttacttacccatcatagaccctatcctgtctaaaagcaaatcctataaaaatgaggttactcccagcagcacaacagcttccgtggcacggaaaagaaagtctgatgggtcaatggaagacgccaacgtgagagtggcaatcacagagcatactgaagtgcgggagattaaacgtattcacttctccccttccgagccaaaaacttctgccgtcaagaagactaaaaatgtgaccactcctatctccaaacggattagcaacagggaaaaactcaacctgaaaaagaagactgacctttccatattccggacaccaataagcaagacaaacaaaagaaccaagcctattatcgctgtggcgcaatctagcttgacctttattaaaccactaaagactgatatccccaggcatcctatgccattcgcagctaagaatatgttctatgacgagaggtggaaggaaaaacaggaacagggtttcacctggtggttaaatttcatcctgactccagatgacttcactgtcaagacgaacatctccgaagtcaacgccgctacccttctcttagggatcgagaaccagcacaagatctctgtgcctcgggccccaacaaaggaagagatgagccttcgcgcatacacggcaaggtgtcggcttaatagactaaggagggcggcgtgcaggctgtttacaagcgagaagatggtgaaggcaataaagaagttggagattgaaattgaagctcggaggctcattgtgcgtaaagaccggcatctctggaaggatgtgggggaacgccagaaggtactgaactggttgctgagctataatccgctgtggctccgtataggccttgaaactacatatggcgagctaatctctctggaggacaactccgatgtaactggtctcgccatgttcatattaaatcgtctgctgtggaaccctgatatcgccgccgagtacagacaccccactgtacctcatttatatagggacggacacgaagaggccctttccaaatttactcttaagaagctactgttactcgtttgcttcttagactacgccaaaattagtagactgatcgaccacgatccgtgtctgttttgtaaagacgcggagtttaaagcaagtaaagaaatactccttgcattctccagggatttcctgtccggggaaggtgatctttcacgtcatctcggattactcggcctccccgtgaaccacgttcagaccccatttgatgagttcgactttgccgtgacaaatttggcagttgaccttcagtgcggtgtgcgactggtgcggaccatggagctcctaacgcaaaactgggacctgtccaaaaaactgaggattccagctatcagcaggcttcaaaaaatgcataatgtggatatagtcctccaggtgctcaaatcccgggggatcgagctgtcagatgaacacgggaataccattttgtctaaagatatcgtagaccgccatcgcgagaagacattgaggttattgtggaaaatcgcatttgcctttcaagtggacatctccctgaacctagatcagttgaaagaggaaatcgcctttctgaaacatactaagagcattaaaaaaaccatttctctactatcatgccacagcgatgaccttatcaacaagaaaaaagggaaacgggactctggaagcttcgagcagtattccgagaatataaaactcctcatggactgggtgaacgccgtctgcgcgttctacaacaagaaagtggagaatttcacagtgtcctttagcgacggccgggtcctgtgttatctgattcatcattatcatccgtgttatgtacctttcgacgcaatctgtcagcggactacgcaaacagttgagtgtacccagacaggtagcgttgtgctgaatagttctagcgagtccgacgattcaagcctcgacatgagccttaaggcttttgaccatgaaaacacaagtgagctctataaagagctgctagagaatgaaaaaaaaaacttccacctggtccgctccgcagttcgggacctgggcgggatccccgccatgataaaccactcggacatgtccaacaccattccagatgagaaggtggtgatcacgtatctgagtttcttgtgcgcacgtctgctggatttgaggaaggaaatcagagccgcaagacttatccagacaacatggcgcaaatacaagttgaaaacagatctcaagcgccaccaggagcgagaaaaagccgcccgaatcattcagctggccgttatcaactttcttgccaagcagagacttagaaagcgtgtgaacgccgccctggttattcagaaatattggaggcgggtgttagctcagcgcaaactgcttatgctgaagaaagaaaagctagagaaagtgcagaacaaagctgccagcctcattcaagcaatgtggagaagatacagagctaagaaatacctgtgcaaggttaaagctgcttgtaagattcaggcttggtatcggtgctggcgggcgcacaaagagtacctggcaattctgaaggcagtaaagatcattcagggatgtttctacactaaattggagcggacaagattcctgaacgtgcgtgcgtctgcgattattatccagaggaagtggcgagccatactgcctgctaagattgcgcacgagcactttctcatgatcaaacggcatcgcgccgcttgtcttatccaggcccactataggggatacaaaggccggcaggtgttcctgcggcaaaagagcgcagccctgattatccagaaatacataagagcgcgcgaggcgggtaagcacgagagaatcaagtatattgaatttaagaagtctactgtgattctccaggctttggtgcgtggatggcttgtgaggaaaagatttctggagcagagggccaagatccggttattgcacttcaccgccgctgcatactaccacctgaacgcagtaagaatccagcgcgcctacaagctatatctcgctgtcaaaaatgcaaataagcaggtgaactcagtgatttgtattcagcgatggttcagagcccgcttgcaggagaaacggtttattcagaagtaccattcaatcaagaagatcgaacacgagggccaagaatgcctgtctcagaggaatagggcggcatccgtgattcaaaaagccgttcggcactttcttttgcgcaagaagcaggagaagtttacctcgggaatcataaaaattcaggcgctgtggagaggttactcctggcgcaaaaagaacgactgtaccaagataaaagccattaggctgagtctccaggtagtgaatcgggagattcgcgaagagaacaagctctacaagagaaccgcactggctctgcattatctgttgacctataaacacctaagtgccattctggaggccctcaagcatttggaagtggtcaccagactttcccccttatgctgtgaaaacatggctcagagcggggcaatcagtaagatattcgtgctcatcagaagctgtaacagatcaatcccatgcatggaggtcatcaggtacgcagtgcaagtgttgctgaatgtgagcaagtatgaaaagaccaccagtgcagtgtacgatgtcgagaactgcatcgatatcctcctggagcttctgcagatctacagggaaaaacctggtaacaaggttgcggataagggcggaagcatattcacaaaaacttgctgcctgctcgccatcttgctcaagaccaccaatagggcttctgacgtgcgctcccgctcaaaggtggtagatcgaatttactccttgtacaagttaacagcgcacaaacacaagatgaatactgagaggatactgtataagcaaaagaaaaacagcagcatttcaatccccttcatccccgagaccccagtccgcacgcggattgtgtcgaggttgaagcccgactgggtactgcgaagggataacatggaagaaataacaaaccccctccaagctatccagatggtcatggatactttgggaatcccctattag

SEQ ID NO: 108738 - DNA, 4170 bp, synthetic construct
  misc_feature 1..4170: note = Description of Artificial Sequence: Synthetic coding sequence
  source 1..4170: mol_type = other DNA
atggcgaaccgacgggttgggagggggtgttgggaggtatctccaacggagaggcgaccacctgccgggctgagggggcccgcagctgaggaagaagcaagcagtccccctgttctatctctgagccatttctgcagaagccctttcctatgtttcggagatgtgctgctgggggcgtccaggacccttagcttggctttagacaaccctaacgaggaagtggctgaggtcaaaatcagccatttccctgctgcggacctgggattcagcgtctcccagagatgcttcgtcctgcagccaaaagaaaaaatcgtcatcagcgtcaattggactcccctgaaggagggaagggtgagagagatcatgacttttcttgtaaatgatgtgctcaagcaccaggccatactgcttgggaacgccgaggagcagaagaagaaaaaacgctctctatgggacaccattaagaagaaaaagatcagcgccagcacaagccacaatcgccgcgtgtctaacatccaaaatgtaaacaaaactttttcagtttcgcagaaagtggaccgccgataccggcaacaaacctatttcaacaaactcaagaagatcacaaagacagtgcagcagagatattgggccatgaaggaaaggaacatccaattccaaaggtacaataagctcagacatagtgtcatttatatccaagctattttcaggggcaaaaaggcacgtaggcatcttaaaatgatgcatatcgccgccaccctgatccaacgtcgtttcaggactctcatgatgcggcgtaggtttctctctctgaagaagaccgccatccttattcagcggaaatatcgtgcacacctgtgtacaaagcatcacctccagtttctgcaagtgcagaatgccgttatcaagattcagtcttcgtacaggcgatggatgataagaaagaggatgcgcgagatgcacagagccgccacctttattcagtcaacctttcggatgcaccggctccacatgagataccaagccctgaagcaggcttcagtagtgattcagcagcagtaccaggcgaatagagccgctaaactgcagagacagcactatctgcgacaacgccattctgctgtgatactgcaggctgcgttcagggggatgaagacgcggcgtcatcttaagtcaatgcacagcagcgctacactgatccagagcagattcaggtctctcctcgtcagaagacgcttcataagccttaagaaggcgacgatctttgtccagaggaaataccgtgctactatttgcgccaagcacaaactgtatcagttcctccacctcaggaaagcagcgattaccatacagagtagttataggcgccttatggtgaagaaaaagctccaggaaatgcaacgcgctgccgtgctgattcaggccacctttcggatgtaccgaacctacatcaccttccagacctggaaacacgcttctattctcatacagcagcactataggacctaccgcgcagctaagctgcaaagagaaaattatatccggcagtggcacagtgccgtggtgattcaggcagcatataagggcatgaaagcccgacagctcctcagagaaaagcacaaggccagtatcgtcatacagtctacttacaggatgtatcggcagtactgcttttatcagaaactacaatgggcaacaaaaatcatccaggaaaaatatagggcaaataaaaaaaagcagaaagttttccagcacaatgaactcaagaaggagacttgcgtgcaggcaggcttccaagatatgaatatcaagaagcagatccaagaacagcatcaggcggctataataatccagaagcattgtaaagccttcaaaattcgcaagcactacctgcacctccgggccactgtggtctctatccaaagacggtacagaaaactgaccgccgtgcggacccaggctgtgatctgcattcaatcgtattatcgggggtttaaagtccggaaagacatccaaaatatgcatcgcgcagccaccctgatacagtctttctataggatgcacagggccaaagtagactacgagacaaaaaagacggctatagtggtgatacagaactattacagactgtacgttcgtgtgaagactgagaggaagaacttcctcgctgtgcagaaatcagttagaactatccaggctgccttccgaggcatgaaggtgagacagaagctcaaaaatgtgtccgaggaaaagatggcagccattgtgaatcaatccgctttgtgctgttaccgttccaagacacagtatgaggcggtccaaagtgaaggagtgatgattcaagaatggtacaaggcatcagggctcgcctgcagccaggaagccgagtaccacagtcaaagcagagccgctgttaccatccagaaggccttctgtaggatggttacccgcaagctcgaaacccagaaatgcgctgcgctgaggatccagttttttctgcaaatggctgtgtaccggagacggttcgtgcaacaaaagcgggccgcgataacactgcagcactactttcgaacatggcagactcggaagcaattccttctgtaccgcaaagccgccgttgtcctgcagaatcactacagagcttttctttcagctaagcaccagaggcaagtttacctgcagatacgctcctccgtgattatcatccaggcacggtcaaagggatttattcagaaaaggaagttccaggagatcaaaaattccaccattaagattcaggccatgtggcgtagatatagagccaagaagtacctgtgcaaggtgaaggccgcatgcaagatccaggcctggtatagatgctggcgcgcacacaaagaataccttgctattttgaaggcggtcaagattattcagggctgtttttatacgaaactggagagaactaggttcctcaacgtacgcgcctctgctatcataattcagagaaagtggcgcgccatattgcctgctaagattgctcatgaacatttcctgatgatcaaacgccacagagcagcctgcctcattcaggctcactatcgcgggtataagggacgccaggttttcctccgccagaagtctgccgccttgataattcagaaatatatcagggctcgcgaagcaggcaaacacgaaaggatcaagtacatcgagttcaagaaaagcacagtcatcctacaggccctcgttaggggctggctggtcagaaagcgtttccttgagcagagggccaagattaggttactccattttacagcggcggcctactaccacctaaacgcagtgcgaattcagcgcgcctacaagctgtacctggcagtgaaaaatgccaacaagcaggtgaattcagtgatttgcatccagaggtggttcagagccaggctgcaggaaaaaaggtttatacaaaagtaccactccataaagaaaatcgagcacgagggtcaggaatgcctgagccagagaaacagagccgccagcgtaatacagaaagccgtaagacactttctcttacggaagaagcaggagaagttcacttctggtatcatcaagatccaggctctatggaggggatacagctggaggaaaaagaatgactgtactaagatcaaggccatcaggctgtcactacaggtggtgaaccgagaaataagagaggaaaacaaactgtataagaggaccgccttggcattgcactatctgctgacctataagcatctgtcagccattttagaggcgctcaaacacctggaagtcgttacccggctatctccactctgctgcgaaaatatggcgcagtctggagccatttctaagatcttcgtgctgattagaagctgtaataggagcatcccctgcatggaggtgattaggtatgctgtgcaagtcttattgaatgtgtccaagtacgagaagactacttcagcggtttatgatgtggagaactgtatcgatattctactcgaactgcttcagatctaccgtgagaaacccggcaacaaggtcgctgataagggcggatccatcttcactaaaacatgttgcctgcttgcaatcctgttaaaaacgactaatcgggccagtgtgagtatctcccagctgccttttttcaaaataattttcctgtggtcctag

SEQ ID NO: 108739 - DNA, 3429 bp, synthetic construct
  misc_feature 1..3429: note = Description of Artificial Sequence: Synthetic coding sequence
  source 1..3429: mol_type = other DNA
atgtctctgcgtgcctacactgcgcggtgccgccttaatcgtttacgcagagcagcgtgtcgactgttcacttcagagaagatggttaaggccattaagaagctggagatcgaaattgaagctaggcgacttattgtgagaaaggatagacacctatggaaggacgtcggcgagaggcagaaagtgctgaactggctcctaagctacaacccgctgtggctgagaattggcctcgaaacgacctacggggagctcatcagtctcgaggacaactctgacgtaacgggccttgctatgtttattctgaatagactgctgtggaatcctgatatcgcggcggaatatagacaccctacggttccccacctgtatcgcgacggacatgaagaagcactgtctaagtttactttgaagaaacttctcctgcttgtctgtttcctcgattatgctaaaatctctcgcctaatagatcatgatccctgtctgttttgcaaagatgcggagttcaaagcgtccaaagagattttgttagctttctctagggacttcttgtctggagagggggatctgtcccgccacctgggcctgctgggactgcctgtcaaccatgtacagaccccctttgacgagttcgattttgcggtcaccaacttggctgtcgatttgcagtgtggcgtaaggttggtgcggactatggagctgctgacacagaactgggatctgtctaagaagttgcggattccggcgatttcgaggctccagaagatgcacaatgtcgatatagttttacaggtactgaagtctagaggtattgagctgagcgacgagcacggcaacaccattcttagcaaagatatcgtcgatagacatcgcgagaagaccctccgtctcctctggaagattgccttcgcttttcaagtggacataagcctgaacctcgaccagctcaaggaggaaatcgcgttcctgaagcatactaagtccattaaaaagacaatcagcctgctgtcatgccattccgatgatcttattaacaagaagaagggtaagcgggattctggcagcttcgagcaatatagcgaaaacataaagctgctgatggactgggttaacgccgtatgcgcattctataacaagaaagtggagaatttcaccgtgtccttttcagatgggcgggtgctctgctacctgatccaccattatcacccatgctacgttcctttcgacgctatctgccaacgcacgactcagacggtggaatgtacccagactggcagcgtcgtgcttaattcctctagtgagagcgacgatagctccctggatatgtcacttaaagctttcgatcatgaaaatacctctgaactgtacaaagagcttcttgagaatgaaaaaaagaattttcacctcgtgcgctccgctgtgagggaccttgggggcatccctgccatgataaaccactccgacatgagcaataccatccccgacgagaaagtcgtcattacctatctaagcttcctgtgtgctaggctgttggatctgcggaaggagatccgcgcagcacggcttattcaaaccacttggcggaaatacaagcttaaaacagacctgaaaagacatcaagagcgagagaaagccgctaggatcatccagctcgcagtgattaatttcctcgctaaacagcggctgcggaagagagtgaatgctgctttggtgatccaaaagtactggaggcgagtcctggcccagaggaaactgctgatgctgaaaaaagaaaaacttgagaaagtccaaaacaaagctgcctcactaatccaggctatgtggcgaagatacagggccaagaagtatctgtgtaaggttaaggcggcctgcaagatacaggcctggtatcgatgctggagagcgcataaagagtacctggcaatcttgaaagctgtgaaaattatccagggatgtttctataccaagctcgagagaacccgttttcttaacgtgagagcttctgcgatcattattcagcggaaatggagagccatactgccagccaagattgcgcatgaacatttcctgatgatcaaaaggcacagagcagcttgcctcatccaagcacactacagaggatataaaggacgccaggtattcctccggcagaagagtgcggccttgattattcaaaagtacatcagagcacgcgaggccggcaaacacgagcggatcaaatacatcgagtttaaaaaaagtactgtaatcctacaggcacttgtccgtggctggctagtgcgcaagcgctttctggagcagagggctaaaattcggcttttgcacttcacagctgcagcctattatcaccttaatgctgtgaggattcagcgggcgtataaactctacttggccgttaagaatgcaaataaacaggtgaactcagtgatctgtattcagcgctggttcagggccagactccaggagaaacgtttcatccagaagtaccattctattaagaagatcgagcatgaaggccaggagtgtctgtctcagaggaaccgagctgcttctgttatccaaaaggctgtgagacatttccttctgcgaaagaagcaagaaaaatttactagcggcatcattaagatccaggccctttggcgcggttatagctggagaaagaagaatgactgcacaaagattaaggcaattcgcctaagtctccaagtggtgaaccgcgagatccgggaggaaaacaagctatacaaaagaacagcactagcccttcactatctgctcacatataagcacttatccgccatcctggaagcactcaagcacctcgaagtggtgacccgtctgtcccctctgtgctgtgaaaatatggcccaatccggggctatctctaagattttcgtgctgatccgatcatgcaaccgatctatcccgtgtatggaggtgattaggtatgccgtccaggtgttgcttaatgtgtcaaagtacgagaagacaacaagcgccgtgtacgacgtcgagaattgtatcgacatattgcttgagttactgcagatttaccgtgaaaagcccgggaacaaagtagctgacaaggggggctccattttcacgaagacttgctgcctcctagcaatcctgctgaagactactaatcgggcctcagacgtgcgctccaggagtaaggtggtggacaggatttatagcctatacaagttgaccgcccataaacataaaatgaacacagagagaatcctctataaacagaaaaagaattcaagcatatcaatcccattcatcccggagactcctgtgcgcaccaggattgtgtcacgattgaaaccagactgggtcttacgccgcgataacatggaggagataacaaatccgctgcaggctatccaaatggttatggatacactcggcataccgtattag

SEQ ID NO: 108740 - DNA, 10434 bp, synthetic construct
  misc_feature 1..10434: note = Description of Artificial Sequence: Synthetic coding sequence
  source 1..10434: mol_type = other DNA
atggccaacagaagggtaggaaggggctgttgggaagtttcccccaccgagcgtcggccccccgcgggcctccggggacctgccgctgaggaagaagcctcttcacctccagtgttatcactgtcacatttttgtcggtccccgtttctctgcttcggtgatgtcctccttggcgcttctagaacactgtctttggcactggacaatcctaacgaggaagttgctgaggtgaaaattagccacttccctgctgccgatctgggattttccgtttcacagcgttgcttcgtgctgcagccgaaggaaaagatagttattagcgtgaattggacaccacttaaagaggggagagttcgagagatcatgaccttcctggttaatgatgtcctgaagcatcaggctattcttctagggaatgctgaagagcagaagaagaagaagcgatccctgtgggataccatcaagaaaaaaaaaatatcagctagtacgtcccataacaggagggtttctaacatccaaaacgtaaataaaaccttttcagtgagtcaaaaagtagatcgggtgaggtcccccctgcaagcctgtgaaaacctcgcaatgaatgagggcggacccccgacggagaacaattcactgatactcgaggagaacaaaatccccatctcacccattagtcctgcttttaatgaatgccatggggccacctgtctgccccttagtgttcgtcggtctacaacttacagctcactacatgcctctgagaatcgcgagttgttaaacgtccatagcgctaatgttagcaaggtctctttcaatgaaaaggccgtaacagaaaccagcttcaactcagtcaatgtgaatggccaacggggggaaaattctaaattatccttaactcccaactgcagcagcaccctgaacattacccagtcacaaattcattttttgtcccccgattctttcgtgaataattcacatggcgctaacaacgagctggagcttgtgacctgcctgtctagcgatatgttcatgaaagataactctcagcccgttcacctcgagtccactattgcccacgaaatttaccagaaaatcctgtctcccgactctttcattaaagacaattatggactgaaccaggatttggaaagcgaatctgttaatcctatactgagccccaatcagttcctcaaggataacatggcatacatgtgcacctcccagcagacatgcaaagtcccattgagcaatgagaacagtcaggtgccccagagccctgaagactggaggaaatctgaagtcagcccccgcatacctgaatgtcaagggtccaaaagccctaaagcgatattcgaagagttggtcgagatgaaatcaaactactattcttttatcaagcagaataaccccaaatttagcgctgtgcaagatataagtagccacagtcataacaagcagccgaagcggcgaccaatcctgtctgccaccgttactaaacggaaggccacctgtacccgcgaaaaccagactgagatcaacaagcccaaagccaaaagatgtctgaacagtgcagtcggagaacacgaaaaagtgatcaataatcagaaggagaaggaggatttccacagctatttgcccatcatagaccccattctctcaaagtccaaaagctacaagaacgaggtcacaccatctagtaccacggccagtgttgctcgcaagaggaagagcgatgggagcatggaagatgctaacgtgagagtcgcaatcaccgagcatactgaggtccgggagatcaaaaggattcatttcagcccctccgagcccaaaacatctgccgtcaagaaaacaaaaaatgtcaccacgcctatcagcaaacgcatctctaaccgcgaaaagctcaacttaaagaaaaaaaccgatctcagcatcttcagaactcccatcagcaaaaccaacaagaggactaagcctatcatagctgtggcccagtcctctctcacattcatcaagccactcaaaactgacataccccgacacccgatgccttttgctgccaagaatatgttttacgacgagagatggaaagagaaacaagaacagggattcacctggtggctgaattttatcttgacgccggacgatttcaccgtgaaaacaaacatcagcgaagtgaacgccgccacacttttgttggggatcgagaatcagcacaagatctccgtacctcgtgcccccacgaaggaggagatgtcactgcgcgcctacactgcgagatgcagattgaaccgcctgagacgcgctgcctgtagactttttacctccgagaaaatggttaaggcgattaaaaaactggagatcgagatcgaggcaaggaggctgatagtgcggaaagacaggcatctgtggaaagatgtcggggagcgccagaaggtgctgaactggctgctgagttataaccctctgtggctgcggatcggccttgaaaccacgtacggagagcttatctcgttagaagacaactctgacgtaactgggctcgccatgtttatactcaataggttgctgtggaatcctgacatcgcagccgagtatcgccaccctacagttccacacctgtatcgggacgggcacgaagaggcactgtctaaatttaccctgaaaaagctgctgctcctagtctgttttctggactacgccaaaatttcacgcctgatagatcacgacccttgtctgttctgcaaagacgccgagtttaaggcctccaaggaaattctgcttgcgttttctagagatttccttagtggcgagggagacttgagtcgacatctagggctgttagggctccctgttaatcatgtgcagactcccttcgacgagtttgattttgccgtgaccaacttggccgtagatttgcaatgtggagtgagattagtacggacgatggagctcctcacgcaaaactgggatctatctaaaaaactgcggataccagccatttccagattacagaagatgcataacgtggacattgtgctacaggtcctcaagtcccggggaatagaactgtccgacgagcatggcaataccattttatcaaaggacattgtcgataggcacagagaaaaaaccctgcgtctgctttggaaaattgcctttgcattccaagtggacatatcactgaatttagaccaattgaaggaggagatcgccttcctgaaacacactaaaagcataaaaaaaacaatttcactgctgtcctgtcatagcgatgacctgatcaacaagaaaaaagggaagagagattccggctctttcgaacagtactccgaaaacatcaaactgctaatggattgggtcaatgccgtctgtgccttttacaacaaaaaggtcgaaaacttcacagttagcttttcagacgggcgggtcttatgctatctcatccatcattatcacccttgctatgttcctttcgacgcaatctgtcagaggaccacccaaactgtggagtgtactcaaacgggatctgtagttcttaatagtagctcagaatccgatgactcatctttagacatgtccttaaaagcatttgaccatgagaataccagcgagttatataaggaactgcttgaaaatgaaaagaaaaacttccatctagtccgctctgccgtgcgcgacctcggtggaattcccgcaatgatcaaccactctgacatgagtaacaccattcccgacgagaaggtcgtgatcacctacttgagctttctgtgcgccagattgttagacctgcgaaaggaaatcagagccgctcgcttaattcagaccacctggcgcaaatataagctcaagacggatctgaaacggcaccaggaacgcgagaaagccgctcggattattcagctggctgtgataaattttctggccaaacagcgcctgcggaaacgggtgaatgcagctctcgtcatccagaagtactggaggcgggtgttagcacaacgcaaactgctcatgctgaagaaggagaagctagagaaggtgcagaacaaggctgcctctctaatacagggatattggcgtcgctactctactagacaacggtttctgaaactgaagtactatagtatcattctccaatcacgcatacgaatgattatcgccgttacctcatataaaagatatctgtgggctaccgtcaccattcaaagacactggcgggcctatctgagacgcaagcaagaccagcaaagatatgaaatgcttaagtccagcacactgattatacagagcatgttcaggaagtggaagcagcgtaaaatgcagagccaagtaaaagccactgtcattcttcaaagggcgtttagagagtggcacctgcgcaagcaggctaaggaggagaattctgccattatcatacaatcttggtaccggatgcataaagagttgcgcaagtacatttacatcagatcctgcgtcgtaatcatccagaaacggttccgctgtttccaggcacagaaactgtataagcgccgcaaggagtctatcctgaccattcagaaatactataaggcttatctaaaagggaaaatcgagcgcactaactacctgcagaaacgggctgcggccatccagttacaagctgctttccgtcgcttgaaggcccacaacttgtgtagacagattagggcggcctgcgtgatccagtcttactggcggatgaggcaggaccgggttcggttcttgaatcttaagaaaaccataatcaagttccaggcgcacgttcgtaagcaccaacaacgtcagaaatataagaagatgaaaaaagcagcagtaattattcagacacatttcagggcctacatttttgcaatgaaggtgttggcaagctaccaaaaaacaaggagcgctgtcattgttttgcagagcgcataccgggggatgcaggctcgcaagatgtatattcatatccttacttccgtaattaaaattcagtcttattatagagcttatgtatctaaaaaagagttcctgagccttaagaatgccactattaaactgcaaagcacggtgaagatgaagcagactcgcaaacagtatctgcacctgcgggctgccgcactgttcatccaacagtgttacagaagtaagaagatcgcggcccaaaagcgggaggagtatatgcaaatgcgtgagtcatgtattaagctccaggcttttgtgaggggatatctggtgagaaaacaaatgcgtttgcagagaaaagccgtgatctccctgcaatcatatttcagaatgaggaaggcccgccagtattatcttaagatgtataaagccataattgtgatccaaaactactaccatgcctataaagcccaggtgaaccagcgcaagaatttcctacaagtaaagaaggctgcgacgtgtttacaggctgcataccgagggtacaaggttaggcagctcatcaagcaacagtcgatcgccgccctgaaaatacagagcgctttccgaggatataacaaaagagtcaagtaccagagcgttctacagtctattattaagattcagcgatggtatcgcgcgtataagactctgcacgatacccggacacatttcctcaaaactaaggccgccgtgatctctcttcaaagcgcctatagagggtggaaagtgagaaaacagatccggcgggagcaccaggcagctctcaagatccaatctgcctttcggatggccaaggctcagaagcagttccgattgtttaaaacggccgccctcgtgatccagcaaaatttccgggcctggaccgctggccgaaagcagtgcatggagtatattgagctcaggcacgccgtgctggtccttcagtccatgtggaaaggcaaaaccctccgtcgacagctccagcggcagcacaagtgcgctatcattatccagtcctactaccggatgcatgtccaacaaaaaaagtggaagatcatgaaaaaagcggccttgctcattcagaagtattatcgggcatattccatcggtagggaacagaatcatctctaccttaaaaccaaagccgcagtggtgactcttcagtccgcttaccgcgggatgaaagtgagaaaaaggataaaggactgtaacaaagcggctgtcaccatacagtcaaagtatagggcatacaagaccaagaaaaaatacgctacttatcgggcatcagccatcattatccagcggtggtaccgtgggataaaaattacgaatcatcagcataaagagtacttgaatctcaaaaagacggccatcaaaattcagtctgtatatcgcggcattagggtcaggaggcatatccagcatatgcatagggcagctacctttatcaaagctatgtttaagatgcaccagagtcggatcagttaccacaccatgagaaaggctgctattgtcatccaagtaagatgtagggcgtattatcagggaaaaatgcagcgggaaaaataccttactattctaaaagccgtaaaggttttacaggcctcctttagaggagtgagagtgaggcgaaccctgcgcaaaatgcaaactgctgcaactctcatccagagcaactaccgccgctaccggcaacagacctatttcaacaagctgaaaaagattaccaagacggtacagcaacgctactgggcgatgaaggagcgaaatattcagtttcagaggtataacaaactcagacattctgtgatttacattcaggccattttcagaggcaaaaaggccagaaggcatctgaaaatgatgcacatcgctgccacattgatccagagacgctttaggaccctgatgatgagaagaaggttccttagcctgaagaagacagcaatactgattcagcgcaagtatagagcccacctgtgtaccaagcaccatttgcagttcctgcaggttcagaacgctgtgataaagatacagtcctcttatcgccggtggatgatccgtaagcgaatgagagaaatgcaccgggctgccacctttattcaatcgaccttccgcatgcaccgtttgcatatgaggtatcaggcgctcaaacaggcctctgttgtgatccagcagcagtatcaagccaacagggcagccaagcttcagaggcagcactacttacggcaaaggcattctgctgtcatcctccaggcagcatttcggggaatgaaaacccgcagacacctcaagtctatgcatagtagcgccactcttatccaatctcgcttcagatctctgctcgtgagacgcaggttcatctcccttaaaaaggccactatttttgttcagaggaagtacagagcaactatctgcgccaagcacaaactctaccaattcttgcacctgcgtaaagcagcgatcaccattcaatctagctacaggcgccttatggtcaagaaaaagctgcaggagatgcagcgcgcagccgtcctgatccaagccacatttcggatgtatcgtacttacattacctttcagacctggaagcacgcctccattctgatccagcagcattacaggacctacagagctgctaagctccaacgtgagaactacatcaggcagtggcacagcgccgtggtcatccaggctgcttacaaaggcatgaaggccaggcagctcctccgtgaaaaacacaaagcctccatcgtcatccagtctacataccgtatgtacaggcaatactgtttttaccagaaactgcagtgggcgactaaaatcatccaagaaaagtatcgcgctaacaaaaaaaagcagaaggtttttcagcacaatgagctgaagaaggagacctgcgtccaggccggcttccaggacatgaatattaagaaacagatacaggaacagcaccaggcggctatcatcattcagaagcattgcaaagcttttaaaatcaggaaacattatctgcacctcagggctactgtcgtgtccatccagaggcggtaccgaaaactgacagcggtgaggacacaagctgtcatctgtattcagtcatactacagggggtttaaggtacgaaaggatatccagaacatgcatcgggccgcaacccttattcagtccttttaccgcatgcaccgcgcgaaggtcgattacgagaccaaaaaaactgcaatagttgtgatccagaattactacaggctttacgtgagagtgaagacggagcgaaagaatttcttagcagtgcaaaagagcgtacgaaccatacaagccgccttccgcggcatgaaggtgcggcaaaagttgaagaatgtgtccgaagaaaaaatggctgccattgttaatcaatctgccctctgctgctaccgcagtaagacacaatacgaggcagtgcagtcagagggggtaatgatccaggagtggtacaaggcctctggcctagcgtgcagccaagaggcagaataccactcccagtctagggcagcagtgactattcaaaaagcattttgcagaatggtgacccggaagctagaaacgcaaaagtgtgcggccctgcgtatccaattttttctacagatggccgtgtatagacggcggtttgtgcagcagaagcgcgccgctataacgttgcagcactattttcgcacttggcagactagaaagcagtttctgttgtatagaaaggctgctgtggtgctccaaaaccattatagggctttcctgtccgccaagcaccaacggcaggtgtacctgcagatccggagtagtgtgattatcatccaggctagaagtaaaggctttatccagaagagaaagtttcaggagataaagaatagcacaatcaaaatccaggcaatgtggcgccgctatagggccaagaagtacctttgcaaggttaaggccgcttgtaaaatccaggcttggtatcgctgctggcgggctcacaaggaatatcttgctatattgaaagcagtgaaaattatccagggctgcttttacaccaaactcgagcggacccggtttctgaacgtgcgtgcgtcagctatcattatacagcgcaaatggagagcaatcctccctgccaagatcgcacatgaacacttccttatgatcaaaagacaccgcgcagcttgcctgatccaagcccattaccgaggctataaaggccggcaggtttttctccgacagaagtccgctgctcttatcattcaaaagtatattcgtgcaagagaggccgggaaacacgaaaggatcaagtatatcgagttcaagaagagtaccgtgatactccaagccttagttaggggctggctcgtgagaaaacggttcctggagcagagagccaagatacggctgctccacttcacagcagccgcctattatcacctaaacgctgtgagaatccaaagggcttacaaattataccttgcagtgaaaaatgcaaacaagcaggtcaatagcgttatctgcatacagcgctggtttcgcgcccggctgcaggagaaaaggttcattcagaagtatcactctattaaaaagattgaacacgaaggccaggagtgcctgtctcagcgcaatagggcagcttccgtgattcagaaggcggtgcggcacttcctgcttaggaaaaagcaggagaagtttacctctggaattatcaagatccaggccctttggagaggttatagctggcgaaagaagaatgactgtacgaagatcaaggcgattagacttagcctccaggtggtgaatagggagatccgtgaggagaacaagctatataagagaacagctcttgctttgcattatctcctgacttataagcatctttctgctatattagaggcacttaaacacctcgaggtcgtgacgcgattatctccactgtgctgtgaaaatatggcccagtctggtgctatcagcaaaatctttgtactgatacggtcttgtaatcggagcatcccttgcatggaggtgataaggtatgctgtgcaagtacttctcaatgtgtctaaatatgagaagactacaagcgcagtgtacgacgttgaaaactgtatcgacatcctgttagagctgctgcaaatctatcgggaaaaacccggaaacaaagtggctgataaggggggatcaattttcacgaagacatgctgcctgctggcaattctcctgaagacgaccaaccgggcgtctgatgtgcggtcccgatcgaaggtcgtggaccgaatttattccctgtacaagctgactgcacacaaacacaaaatgaacacagagagaatcctatataagcagaagaagaactcaagcatctctattccttttatccctgaaacccctgttcggacccgaatcgtgtcacgcttaaagcccgactgggtgttacgcagggataatatggaggaaattacaaatcctctccaggctatccaaatggttatggacacccttggcatcccctattag

SEQ ID NO: 108741 - DNA, 1686 bp, synthetic construct
  misc_feature 1..1686: note = Description of Artificial Sequence: Synthetic coding sequence
  source 1..1686: mol_type = other DNA
atgtgcggcatatgggcgcttttcggaagtgacgattgtctgagcgtacagtgtttaagcgccatgaaaatcgcccaccggggccctgacgcatttcggtttgagaatgtgaacgggtacaccaattgctgtttcggtttccatagacttgccgttgtggatcctcttttcggaatgcaaccaattcgggtcaaaaagtacccttatctgtggctctgctacaacggcgaaatctataaccataaaaaaatgcagcaacacttcgaattcgagtatcagaccaaagtggatggcgaaatcattcttcatctctatgataagggcgggatcgagcagactatctgcatgctcgatggcgttttcgcctttgtgctgctggacacagctaataagaaggtgttcctgggtagagatacctacggcgtacggcccctcttcaaggcaatgactgaggacggcttcctcgccgtgtgcagcgaggccaaagggcttgtaacacttaaacactctgcaaccccgtttctcaaggtggagccattcctgccggggcattacgaagtgttggatctgaagcccaacggtaaggtggcttccgtagaaatggtcaaatatcaccattgtcgcgatgttcccttacatgccctatacgacaatgtcgaaaagctgtttccaggatttgagatcgagaccgttaagaacaacctccgcatcctttttaataatgctgtgaagaaacggctaatgactgaccgtcggattggctgcctgcttagcggcgggttggactccagtctggtggcagctactctgctgaaacaactgaaggaagcccaggtgcagtacccgttacaaacattcgcgattggcatggaagattctcctgacctcctggctgcacgcaaagtggcggaccacatcggcagtgaacactatgaggtgctcttcaatagcgaggaaggtatccaggccctggacgaggtgatcttcagcctggagacgtatgatataactactgtacgcgcgtctgtgggaatgtatttaatctccaaatatatccggaaaaacacggattcagtcgtcatcttcagcggcgagggatcggatgagctgacccagggttatatttactttcacaaggcccctagcccagagaaggcagaagaggagagcgaaagactgctgcgcgagctctatctcttcgacgtactgagggccgacaggaccactgctgcccacggccttgagctgagagtccctttcttggaccaccggttcagctcctactacctgtcattgccgccagaaatgcgcatacctaaaaacgggatcgagaaacatctactgagggaaacctttgaggatagcaacttgatccccaaagagattctgtggagacctaaggaggcattttcagacggaattacgtcagtcaaaaattcttggtttaagatactacaggagtacgttgaacatcaggtggacgatgctatgatggccaatgcagcccaaaagtttcctttcaacaccccaaagacaaaggagggctattactataggcaggtgtttgagagacactatccgggaagagctgactggctttcccattactggatgcccaagtggatcaacgcaaccgatccatcagctcgtaccctgactcactacaagagcgccgtgaaggcttag

SEQ ID NO: 108742 - DNA, 1686 bp, synthetic construct
  misc_feature 1..1686: note = Description of Artificial Sequence: Synthetic coding sequence
  source 1..1686: mol_type = other DNA
atgtgtgggatctgggccctgttcggcagtgacgactgtctgagcgttcaatgcctatctgccatgaagatcgcacacaggggtcccgacgctttccgatttgagaatgttaatggatataccaattgttgctttggcttccaccgtctcgctgtagtggaccccctttttgggatgcagcccattcgcgtcaagaaatacccttacctctggctctgctataatggagagatttataatcacaagaaaatgcaacagcatttcgagtttgaataccaaactaaggtggacggcgaaataatactgcatttgtatgataaggggggcatcgaacagactatttgtatgctcgacggcgtgtttgcattcgtactgctggatacggccaataaaaaagtattcctggggcgcgacacatatggagtgagacctctgtttaaggccatgactgaagatggctttttagctgtgtgctccgaggccaaaggtctggttacacttaagcattctgcaacccctttcctaaaagtggaaccatttctgccaggacattatgaagtgctagatttgaaaccaaacgggaaagttgcatctgtggaaatggtgaagtatcaccattgtcgcgatgtgcctctccacgccctttatgataacgtggagaagctgtttccagggttcgagatcgagacagtcaaaaacaatctaaggatattgttcaataacgccgtcaagaagcgtctgatgaccgatcggcgcatcggctgcctcctttctggagggctggatagtagtctggtcgccgcaactttgctgaagcaactgaaagaagcacaagtccagtatcccctacaaactttcgctattggtatggaggactcacctgacctgctggcagctcgaaaagtcgcagatcacataggaagcgagcactatgaagttcttttcaactctgaagaaggcatccaggcgctggacgaggtgattttttccctcgagacgtatgacatcacgactgtgagagcgtccgtgggtatgtacttgattagcaagtatatcagaaagaacaccgattctgtagtgatcttctcaggggaggggtcggacgagttgacccaggggtacatttattttcacaaggccccctctcctgaaaaggccgaggaggaatccgaacgcctgttgagggagctgtacctctttgacgttttgcgggcagaccgaacaaccgccgcgcacggattggagctaagggtgcccttcttagaccaccgcttctcctcttactacctgtctttaccaccagaaatgcggatcccaaagaacggtatcgaaaagcatttgctgcgggaaactttcgaggactcaaacctcattccaaaggagatcctgtggagacctaaggaagccttctcagatggaatcacaagcgtgaagaactcctggtttaaaattctgcaggagtacgtggaacaccaggtggacgacgcaatgatggccaatgccgcccaaaaattcccgttcaacacaccaaagaccaaagaaggttattattatcgtcaggtctttgaacgccactaccccgggcgcgccgactggctgtcgcactattggatgccaaaatggattaacgcgacggaccctagcgcaagaacattgacacattacaagtcagcagtaaaagcatag

SEQ ID NO: 108743 - DNA, 1686 bp, synthetic construct
  misc_feature 1..1686: note = Description of Artificial Sequence: Synthetic coding sequence
  source 1..1686: mol_type = other DNA
atgtgtggtatttgggccctgttcgggtccgacgattgtctgtcagttcagtgcctgtcagctatgaagattgctcataggggccctgatgccttccggtttgagaacgtcaacgggtacaccaactgttgtttcgggtttcataggcttgcagtggtggatcccctgttcggaatgcagccgattcgagtgaaaaagtatccttatttgtggttgtgctataatggagagatttataaccacaagaaaatgcagcaacactttgaatttgaataccagaccaaagtggacggggaaatcatcctccatctgtacgataagggcggaatcgaacagacaatctgcatgctggatggcgtgttcgcctttgttcttttggatactgcaaataagaaagtgttcctgggccgcgacacttatggcgttcggcctctgttcaaagccatgacagaggatgggttcttagctgtgtgcagcgaagcaaaaggactggtcactctcaaacacagcgcgacaccatttctgaaggttgagcccttccttcccgggcactacgaagtacttgacctgaaacccaatggaaaagtggcctcggtggagatggttaagtatcaccactgccgcgacgtgcctctccacgccctatacgataatgtagaaaagctgttccctggttttgaaattgagacagttaagaacaatctcaggattctttttaataatgctgtgaaaaaaaggctgatgactgatagaagaataggatgccttctctccggtggtctggacagctcccttgtcgctgccaccctgttaaagcagctcaaagaggcccaagtccagtatcccctgcaaaccttcgctatagggatggaagattcacccgatcttctggccgcccgtaaggtggccgaccacatcggaagcgagcactacgaggtcctgtttaactccgaggaggggattcaggcgctcgatgaggtgattttcagcctcgaaacctacgacattacgacggtccgagcctccgtcgggatgtacttgatcagcaaatacatccgcaagaatacagattctgtggttatctttagcggagaagggagtgatgaactgacccaggggtacatatattttcacaaggctccgtctcccgagaaggctgaggaggaaagcgaacgtctgcttcgggagctctacctgttcgacgtcctgagggccgaccgcaccactgctgcccacggtcttgagctgcgtgtgccctttctcgaccatcgattctcttcgtactacctgtccctccctcctgaaatgcgcataccaaaaaatggcatcgagaaacacctgctgcgcgagacattcgaggactccaatctcattccgaaagagatcttatggcgtcccaaagaggcattctctgacggaattacctcagtaaaaaattcttggttcaagattctgcaggagtacgttgaacatcaagtggatgacgccatgatggcgaacgccgcacaaaagttcccattcaacacacccaaaacaaaagaaggttattattatcgacaggtcttcgagcgacactaccctggccgggcagactggctctcccactattggatgccgaaatggattaatgctacggatccatcagcccgtacgctgactcactacaaatcggctgtgaaggcatag

SEQ ID NO: 108744 - DNA, 87 bp, synthetic construct
  misc_feature 1..87: note = Description of Artificial Sequence: Synthetic coding sequence
  source 1..87: mol_type = other DNA
atgtgcggtatttgggccctgtttggcagcgacgattgcctgagcgttcaatgcctgtctgcaatgaaaatcgcacaccgtggttag

SEQ ID NO: 108745 - DNA, 489 bp, synthetic construct
  misc_feature 1..489: note = Description of Artificial Sequence: Synthetic coding sequence
  source 1..489: mol_type = other DNA
atgtgcggaatttgggcgctgttcgggtcggacgactgcctgtccgtccaatgcctgtcagcaatgaagatcgcgcacaggggacccgacgcatttaggttcgagaatgtcaatgggtacactaactgttgtttcggttttcacagactcgccgttgtggaccctctattcggcatgcagccaatccgtgttaagaagtatccctacctctggctctgctataacggggaaatttataatcacaagaaaatgcagcagcacttcgagtttgagtatcagaccaaagtggacggagagattatactgcacctttacgacaagggtggtattgaacagacaatatgcatgctggacggcgtcttcgctttcgtcctgctggataccgctaacaagaaagtctttcttggtcgggacacctacggggttcgtccgttgtttaaagccatgacagaagatgggtttcttgctgtctgcagcgaagcaaaatag

SEQ ID NO: 108746 - DNA, 648 bp, synthetic construct
  misc_feature 1..648: note = Description of Artificial Sequence: Synthetic coding sequence
  source 1..648: mol_type = other DNA
atgtgcgggatctgggccctgtttggctcagatgactgtctgtcagttcaatgcctctctgcaatgaagatcgcgcacagaggacccgacgccttccgattcgaaaatgtaaacggatacaccaactgctgcttcgggttccatcggctggcagtggtagaccccttattcggcatgcagccaatccgcgtgaagaagtacccgtatttgtggctctgttacaacggagagatatacaatcataaaaagatgcagcagcattttgaatttgagtaccagaccaaagtggatggcgaaatcattcttcacctgtatgacaaaggaggaatagaacagactatctgtatgctcgatggtgtgtttgcgtttgttctgctggatactgcaaataagaaagtgttcctagggcgggatacatacggggttcggcctctttttaaagctatgaccgaagatggctttttggccgtgtgtagcgaggccaagggacttgtgacactgaaacatagcgccaccccattcctcaaggttgagccatttctcccaggccactatgaagtgttggacctgaaaccgaatggaaaggtggcgtccgtggaaatggtgaagtatcaccactgccgggatgtccccctacacgcactctag

SEQ ID NO: 108747 - DNA, 360 bp, synthetic construct
  misc_feature 1..360: note = Description of Artificial Sequence: Synthetic coding sequence
  source 1..360: mol_type = other DNA
atgtgcggcatctgggctctgttcggaagcgatgactgtttatctgtgcagtgcctatccgccatgaaaatagctcacagaggcccggacgcattcagatttgagaacgtgaatggctacactaactgttgcttcgggttccaccgactggccgtggtggatcctttgtttggaatgcaaccgattcgcgtcaaaaagtacccatacctgtggctgtgttacaatggtgagatctataaccacaaaaaaatgcagcaacacttcgagttcgagtaccagaccaaagtggacggcgagattatccttcacctatatgacaaaggtggaatagaacaaacaatctgcatgctggacggttag

SEQ ID NO: 108748 - DNA, 102 bp, synthetic construct
  misc_feature 1..102: note = Description of Artificial Sequence: Synthetic coding sequence
  source 1..102: mol_type = other DNA
atgtgtggcatctgggctctgtttgggtccgatgactgtttatcagtgcagtgcctttccgccatgaagatcgcacatcggggcccggatgccttccgatag

SEQ ID NO: 108749 - DNA, 192 bp, synthetic construct
  misc_feature 1..192: note = Description of Artificial Sequence: Synthetic coding sequence
  source 1..192: mol_type = other DNA
atgaaaatcgctcaccgcggtcccgatgcgttccgattcgaaaacgtgaacggatacaccaattgttgctttggcttccacaggttggccgtggtcgatccactattcggtatgcaacctattcgcgtgaagaagtacccttacttgtggctgtgctacaatggagagatttacaaccataaaaaagtgtag

SEQ ID NO: 108750 - DNA, 1437 bp, synthetic construct
  misc_feature 1..1437: note = Description of Artificial Sequence: Synthetic coding sequence
  source 1..1437: mol_type = other DNA
atgcagcagcacttcgaatttgagtaccaaactaaggtcgacggagagattatccttcacctgtatgacaaagggggtatcgagcaaacaatttgcatgctcgatggtgtgttcgcattcgtgctcctcgacactgccaataaaaaggtgtttctgggacgcgatacttacggcgttagacccctttttaaagccatgacagaggacggattcctcgccgtgtgcagcgaggccaagggtctggtcaccctaaagcactcagctacgccctttttgaaagtcgaacccttcctgcctggacactacgaagtcctcgacctgaagccgaacggcaaggtggccagcgtggagatggtgaaataccaccactgtcgtgatgtccccctgcacgccttgtacgataacgtggaaaagctattcccaggattcgagattgaaaccgtcaaaaataatcttaggattctcttcaataacgctgtaaagaaaagattaatgactgaccggcggatcgggtgcctcctctcaggcggtctcgactctagtctggtggctgccacactgttaaaacaactgaaggaggcgcaagttcaatacccattacagacatttgctatcggaatggaggattctcctgacctgttggccgcccgaaaggtggcggaccacataggatccgaacactacgaggtcctctttaatagcgaagagggcattcaagctctcgacgaagtcatttttagtctcgagacttacgatatcacaacagtgcgggcgagcgtcgggatgtatctgatatctaagtacattaggaagaataccgattctgtggttatcttctcaggcgaaggcagcgacgaactgactcaggggtatatttatttccacaaggcacccagtcccgaaaaggctgaggaagagtctgagaggctgcttcgcgagctctacctcttcgacgtactgagagccgatcgtacaaccgccgctcatggcctagaattgcgtgtcccatttctggatcataggttcagctcatattatttgagccttcctcccgagatgaggatccctaagaacggcattgagaaacatcttctgagggagacatttgaggattcgaacctgataccgaaggaaattctttggcggcccaaggaagcttttagcgacggcattacttctgttaaaaactcatggttcaaaatcctgcaagaatacgtggaacatcaggtggatgacgccatgatggccaacgccgcacaaaagttcccctttaacacaccaaagaccaaggagggatattactacagacaggtgttcgaaagacactaccccggacgcgccgactggctgtcgcattactggatgcctaagtggataaatgccaccgacccaagcgcccgcaccttaacacactacaaatctgctgtgaaagcatag

SEQ ID NO: 108751 - DNA, 1623 bp, synthetic construct
  misc_feature 1..1623: note = Description of Artificial Sequence: Synthetic coding sequence
  source 1..1623: mol_type = other DNA
atgaaaattgctcaccgtggcccggacgcgtttcggttcgagaacgtcaatgggtatactaactgctgcttcggattccacaggctggcggttgtagaccctttgtttggcatgcagcctatacgggtcaaaaagtacccctatctctggctgtgctacaacggggagatttacaatcataagaagatgcagcaacatttcgagttcgaataccagacgaaagttgatggtgaaatcatcctacatctatacgataagggaggaattgagcaaactatatgtatgctggacggtgtgttcgcttttgtgctgcttgacaccgccaataaaaaggtgttcctggggcgcgacacctacggagtgcggccccttttcaaggcaatgacagaagacggttttctcgccgtgtgctctgaggccaagggtctagtcacactgaaacactcagccaccccatttcttaaagtagagcccttcctgccgggacactatgaggttctggaccttaagcctaacggcaaagtcgcctccgtcgaaatggtaaaataccatcattgtcgcgacgtgcctttacacgccctgtatgataacgtcgaaaaactctttccgggtttcgagatagaaaccgtcaaaaacaacctgcgcattctcttcaataatgctgtgaagaaaagactgatgaccgatcgccggataggatgcctattgagcgggggcctcgactcaagtctggtcgccgccactcttttaaaacaactgaaagaggcacaagttcagtaccctctgcaaacgttcgcaatcgggatggaagattctccagatctgctagcagccaggaaggtagcggatcatatcggctctgagcactacgaggttctcttcaatagcgaggaagggattcaggccttagatgaagttattttctctctagaaacatatgacatcactaccgtgcgggcttctgtcggcatgtatctgatttccaagtacatccgcaagaacactgattcggtcgtgatatttagcggagagggatccgacgaacttacccaaggatacatatattttcacaaggccccaagccctgagaaagccgaggaggagagcgaaagactgctgcgggagctttacctgtttgacgtacttagggcggaccggaccaccgccgctcacggtctcgagctccgcgtgccattcctcgaccacagattcagctcttattatctcagccttccacctgagatgcgtatccccaagaacggtatcgaaaaacacttgcttcgcgaaacttttgaggactctaacctgattcctaaagagatactctggcgccctaaagaggctttttctgacgggatcactagcgtaaagaattcctggttcaagatcctgcaagagtatgtggagcatcaggtggacgacgctatgatggccaacgccgcacagaagtttccttttaacacaccaaaaacgaaggagggctattattaccggcaggtattcgagaggcactatcccggacgagccgattggctcagtcattactggatgcccaaatggataaacgcaaccgatccctccgcccggactctaacccattataagtcggccgtcaaggcgtag

SEQ ID NO: 108752 - DNA, 1437 bp, synthetic construct
  misc_feature 1..1437: note = Description of Artificial Sequence: Synthetic coding sequence
  source 1..1437: mol_type = other DNA
atgcagcagcatttcgagttcgagtaccaaactaaagtggacggagagattatactgcatctgtatgacaaagggggcatcgagcagaccatctgcatgctcgacggagtctttgcttttgtgctgctggacaccgccaataagaaggttttcctggggcgagacacctatggcgtacgccctttgttcaaagctatgactgaggatggttttctcgcagtttgtagcgaggcaaaaggtctcgtgactctcaagcattctgccactcccttcctcaaggtcgagccattcctgccgggacattatgaagtactcgatctgaaaccaaacggtaaggtcgcaagcgttgaaatggtgaaataccaccattgccgcgatgtgcccctgcatgcgttgtatgataacgttgaaaagctgtttcccggctttgagatagaaactgttaaaaataacttgcgtattctgtttaataacgccgtcaaaaaacggttgatgaccgatcgcagaattggttgtctgctgtctggagggctggactcctccttggtcgcagcaacgttgctgaaacagctcaaagaagcccaggtacagtaccctctgcagacattcgcaattggcatggaggacagtccggacttgctggccgcaagaaaggtcgctgaccacatcgggtcagagcactacgaggtactctttaattctgaggagggaatccaggctctcgacgaggtaattttctctcttgaaacctacgatattacaaccgtgcgtgcctccgtaggtatgtacttgatttcaaagtacatccgcaaaaatacagactctgtcgtaatttttagcggagagggcagtgatgagctgactcagggatatatctatttccataaggccccctcacccgaaaaggccgaggaggagtccgagaggctgttgcgagaactttacttattcgatgttctcagggctgacaggacaactgcggctcatggattggagctgagggtgccgtttctggatcataggtttagctcctattatctgtccctaccgcccgaaatgcgaatccccaagaacggtatcgagaaacacctgttgcgagaaactttcgaagactccaatctgataccaaaggagatcttatggagacctaaggaggccttttcagatggaatcacttctgtcaagaacagttggtttaagattcttcaggagtacgttgagcaccaggtggatgatgccatgatggctaatgctgcgcagaagttcccatttaacacccccaagactaaagaaggctattattatcgccaggttttcgagcgtcattatcctggaagggctgactggttatcccattactggatgccgaaatggatcaacgcaacagatcccagcgctcggacgctgacccactataagtcagcagtcaaggcgtag

SEQ ID NO: 108753 - DNA, 1395 bp, synthetic construct
  misc_feature 1..1395: note = Description of Artificial Sequence: Synthetic coding sequence
  source 1..1395: mol_type = other DNA
atggctgccagctgtctcgtgctgctagccctttgtttgttgctgccactgcttctactcggggggtggaagcgctggagacggggccgggccgcaaggcacgtggtcgccgtggtgttaggcgatgtgggaaggtctcccagaatgcagtaccacgcactgtccttggcaatgcacggcttttcagtcactctcctcggattctgtaattcaaagcctcacgacgaactcctccagaataatcggatccaaatcgtgggtttgacagaattgcaatccttagctgtcggaccaagagtgttccaatatggggtgaaggtcgtcttgcaagccatgtaccttttgtggaagctgatgtggcgggaacccggggcctatatctttttacagaaccctcccggattgccctcaatcgccgtttgctggtttgtcgggtgtctgtgcggcagtaagctagttatcgattggcataattacggctactccatcatgggcctagtgcatggtcctaaccacccattagttctgcttgccaaatggtatgagaaattttttggccgtcttagccacctgaacttgtgcgtgacgaatgctatgcgagaagatcttgctgacaattggcacatcagggctgttacagtttacgacaagccagcttctttttttaaggaaaccccattagatctccagcacagattgtttatgaaactaggatcgatgcactcacccttcagagcccgttctgagccggaggaccccgtgactgaacggtccgctttcactgagagggatgctggatccggcctggtgactcgactgcgtgaaagacctgctctgctagtatcctctacatcgtggactgaggatgaagatttttcgattctactggctgctctggaaaaatttgagcagctgaccctcgacgggcacaacctgccatcattggtgtgcgttattactggcaagggccccctgcgagaatactattcacgacttatccaccaaaagcactttcaacatatccaggtttgcactccctggctggaagctgaagattacccactcttactcgggagcgctgacttgggcgtgtgcctccacacgtccagttccggcctcgacctacccatgaaagtcgtggatatgtttggatgctgtctgcctgtgtgtgccgttaatttcaaatgcttacacgagttggttaagcacgaagagaatggattggtctttgaagattctgaggaattagccgctcagctgcagatgcttttttcgaacttccccgatcccgccgggaagcttaatcagtttcggaaaaatttacgcgagagtcaacagctgcgctgggacgaaagctgggtgcagactgtgcttcccttggtgatggatacgtag

SEQ ID NO: 108754 - DNA, 1062 bp, synthetic construct
  misc_feature 1..1062: note = Description of Artificial Sequence: Synthetic coding sequence
  source 1..1062: mol_type = other DNA
atgtacctcctgtggaagctgatgtggcgagagcccggtgcatacatttttctgcagaacccaccaggcctgccatcaatcgctgtgtgctggttcgttgggtgcttgtgcggatctaagcttgtaattgattggcataactatggatacagcatcatggggcttgtccacggtcccaaccaccccctggtgctcctggcgaagtggtacgagaaattcttcggtagacttagccacctaaatctctgcgtgaccaacgccatgagagaagatctggcagacaactggcacattagagctgttactgtctatgacaaaccagcctcattcttcaaggaaacccccctcgatctccaacataggctatttatgaaactcggttctatgcactccccttttcgagctcgctccgaacctgaagatcccgtgaccgaacgctcggcctttacagagagggatgcaggcagtggtctggtgactcggctgcgggaacggcccgcgctcctcgtgtcaagtacctcatggaccgaggacgaagatttcagcatacttctggctgccctggagaaatttgagcagctcaccctggacggccacaatctcccaagccttgtgtgtgtaataacgggaaaaggtcccctccgcgaatattatagtagactaatccaccagaagcacttccagcacatccaagtgtgtaccccttggctcgaggctgaagactacccccttctgttagggagtgccgacctaggcgtgtgcctgcacacctctagctctggcctggacctgcctatgaaagtggtggacatgttcggatgttgcctgcctgtgtgcgcagtgaactttaagtgcctgcatgagctagtaaagcacgaagagaatggactcgtgttcgaggacagcgaggagcttgccgcacagctccagatgttattcagcaacttcccggatcccgctgggaaattgaaccagtttcggaagaacttacgcgaaagccagcagttgaggtgggatgaatcttgggtacagacggttttacctctggttatggatacctag

SEQ ID NO: 108755 - DNA, 1422 bp, synthetic construct
  misc_feature 1..1422: note = Description of Artificial Sequence: Synthetic coding sequence
  source 1..1422: mol_type = other DNA
atggcacagcttgagggttactacttctctgcggcattatcttgcacgtttcttgtatcctgcctccttttctccgccttcagcagagcccttagggaaccatatatggacgagatttttcatcttcctcaggcccagcgctactgcgaaggccacttcagtttatctcagtgggacccgatgattacaactctgcctggactctatttggtgtctattggtgtgattaagcccgcaatctggatttttggatggagtgaacacgttgtttgttcaatcgggatgttgcgttttgttaatctgctgttttccgtcggtaatttttacctactatacctcctcttttgcaaagtgcaaccaaggaacaaggccgcgtcatcaatccaaagggtcttaagcactctcacgctggctgtgttcccaacactgtatttttttaacttcttatattataccgaggccggttctatgttttttacattgttcgcttatttgatgtgtctctacggaaaccacaagaccagtgccttcttgggattctgcggtttcatgtttagacaaaccaatatcatctgggcagtgttttgtgccggaaatgttatcgcacaaaaactaactgaggcctggaagaccgaactacaaaagaaggaggacagacttccccctataaagggtcccttcgcggagtttagaaagatccttcagttcctgcttgcctactcaatgtcatttaagaacctgtcaatgctgctgctccttacctggccttacatccttctgggctttttattttgcgctttcgttgttgtgaatggaggaatagtaatcggggaccgtagctcacacgaggcctgcctccactttccacagctcttctatttcttttcctttaccttatttttctcatttccccatttgctgtctccaagtaaaataaagacttttctcagtctcgtgtggaagcggcgcatactattttttgtcgttaccctggtgagcgttttcttggtttggaagttcacttacgcccacaagtacctcctggccgacaataggcactatacattttatgtttggaagcgggtcttccaacgctacgagacagtcaagtaccttctggtgcccgcctatatctttgccgggtggtccatcgccgattcactgaagagcaaaagtatattctggaatctcatgttttttatctgcttgttcacagtcattgttccacagaagttactcgagtttcgatacttcattctgccttatgtcatatatcgcctgaacatcccactgccccccaccagtagactgatttgtgagctgagctgttatgccgtggttaacttcatcaccttcttcatcttcttgaacaaaaccttccagtggcctaacagccaggatattcagagattcatgtggtag

SEQ ID NO: 108756 - DNA, 1479 bp, synthetic construct
  misc_feature 1..1479: note = Description of Artificial Sequence: Synthetic coding sequence
  source 1..1479: mol_type = other DNA
atggcggcaggagagcgatcttggtgtttatgtaagctgcttcgattcttctatagcctgtttttccccggactcatcgtgtgcgggaccttatgtgtctgcctggttatcgttctttgggggatccggctattgctccagagaaagaagaaactggtgtccacctcaaaaaatggaaaaaatcagatggtcattgccttcttccatccgtactgtaacgcaggcgggggaggggagagggtcttgtggtgtgctctgcgcgccctgcagaagaaatacccagaagctgtgtatgtggtgtacacaggcgatgttaacgtgaatggccagcaaatcctggaaggcgcttttcggcggttcaacattcgcctcattcatcctgtgcaattcgtcttcctgcgcaaacggtacctggtcgaggattcactgtatcctcattttaccctgctgggacagtcgttaggatctatcttcctcgggtgggaggcactgatgcagtgtgtccctgatgtgtacatcgacagcatgggctacgcattcaccctacccctttttaagtacattggcggatgccaggttgggagctacgtccactacccaacaattagtaccgacatgcttagtgtggttaagaatcaaaatatagggtttaacaacgctgcatttattacccgcaacccttttctcagcaaggtcaaactgatttactactacttgttcgccttcatctatggccttgtcggctcttgttccgacgtcgtcatggtgaactcttcttggactctgaatcacattttgtctctgtggaaggtggggaattgcacaaacatcgtgtacccgccttgcgacgtgcagacctttctggatataccactgcatgaaaagaagatgacccctggccacctactggtctcggtaggtcagttcagacctgagaagaaccacccactgcagatccgagccttcgctaaactgcttaataaaaagatggtcgagtctccccctagcctcaaactggtactgatcggcggctgccgcaacaaagatgacgagctgagggtgaaccagctcagacgcctgtccgaggacctgggtgttcaggaatatgttgaattcaagattaacattcccttcgatgaattaaagaactacctcagcgaagctacaatcggcctgcacacaatgtggaacgagcacttcggcattggcgtagtagaatgcatggccgccggaacgatcattctggctcataactccggcggacctaagttagacattgtagtccctcatgaaggcgacattacagggtttctcgcagagtccgaagaggactacgccgagactatcgctcatattctgtcaatgtcagcagagaagcgattgcaaattcggaaatctgcccgtgcatccgtgagtcggttcagcgaccaagagttcgaggtaaccttcctctcttctgtcgaaaagctattcaaatag

SEQ ID NO: 108757 - DNA, 111 bp, synthetic construct
  misc_feature 1..111: note = Description of Artificial Sequence: Synthetic coding sequence
  source 1..111: mol_type = other DNA
atggctgccggggagcgtagttggtgtctgtgtaaattgctaaggagttgtggtgtgtatgggagttggcacaattatccttgcactcaattcggaggccccaaagcttag

SEQ ID NO: 108758 - DNA, 1467 bp, synthetic construct
  misc_feature 1..1467: note = Description of Artificial Sequence: Synthetic coding sequence
  source 1..1467: mol_type = other DNA
atggctgggaagggcagcagcgggcgacggccattgctgttaggcctcctcgtagctgtggccactgtgcatctcgtgatttgtccctacacaaaggttgaggagagttttaacctccaggccacacacgacctcctgtaccattggcaagatctagagcaatatgaccatctggagtttcctggagtggttcctagaacgtttctgggtccagtagttatcgccgtattttctagtcctgctgtgtatgtgctgtccctcctggaaatgtcaaaattttacagccagcttatcgtccgcggcgtactgggcctgggcgtgatctttggtctgtggaccctgcagaaggaggtgcgacgacactttggcgccatggtcgccacaatgttctgttgggtcacggccatgcagttccacctcatgttttactgcactagaacattacccaatgtgcttgcactccccgtggtgcttttggcactcgctgcttggctgagacacgagtgggcaaggtttatttggttatctgcattcgccatcattgtgtttagggtggagttgtgtctatttcttggcttacttctgctgttggccctgggaaatcggaaggtaagcgtggtccgcgcactcaggcatgctgtgcccgcaggcattctctgcttgggcctgacggtggcagtcgactcctacttctggaggcagttgacatggccagagggcaaggtgctttggtacaatacagtgctgaataagtccagcaactggggaacaagtccgttgctttggtatttctattccgcgctacccagaggactgggctgtagcctgttgtttattccccttggactggtagaccgtaggacccatgcacccacagtgctggcgcttggctttatggctttatatagcctactcccccataaggaactgaggtttatcatttatgccttccccatgctcaacatcactgctgcccggggttgctcatatctgctgaacaactataaaaagagctggctctataaggctggttccctgctagtcatcgggcaccttgtcgtaaacgccgcctatagtgccaccgctctatacgtgagtcactttaactacccaggaggcgtcgctatgcaacggctccatcagttggtaccccctcagaccgatgtcctgttgcatatcgacgttgctgctgcccagaccggagtgagtaggtttctgcaagtgaactccgcttggaggtatgacaagagggaggacgtgcagcctggaaccggcatgctggcttacacgcatatactgatggaagctgctcccgggctgctggcactctatagggatacacatagggtgcttgcctcagtggtaggaaccactggcgtttctctaaacctcacccagctgccacctttcaatgtgcacttgcagaccaaactggttttgctcgagcgtctgccccggccctcttag

SEQ ID NO: 108759 - DNA, 987 bp, synthetic construct
  misc_feature 1..987: note = Description of Artificial Sequence: Synthetic coding sequence
  source 1..987: mol_type = other DNA
atgccaccgactcagccgaggccctgtatgtgtcccatttctactacccaggttgcatcacagtgccgtggctgcacgagctggtgccctcctcgccagacttctttctgtacccttacttggcagcccccgagacaggtctgccttgggttttccaagagcactgcaccaggtggcactactcggggaagaatgtgttccagagggcaggcctgctggcacacccacaccagctcatggcgtcgcccttgggcacctggacctctacaagggcacacacccggacccggccaacgccggggcgaccacaggtgtgaatcggagcctgatcctactgcaccactgcagcggcccccagcagacaaagccggagctagtggggaggcccctccagccgttctacggggaacccgacagccgagtgctgctaccgggctgcccggtgcagttataaccactagcttttggcacaactctagtacaatcatgactatacagcgaagtaagtcgaaagattgggctccagctagtgacagacaccagacccggagtcgtgccagctcaaccgcctcagctggcgccttatctaccaaggagcgaggcgctcaggtccttctggcgccccgtgagcctctgccacgcgttatggtggcatcctccgggcttccggcaggagactgtcgccccgaccaggtgcccttcatgaccaaccaggaacagcgcgcgcaccctggcacctgtctccctggagggcatgtgtgcccagcccacccgggtggcgccgtcttttggcagcaccctaccctcgcagcccggggcccactcggggctccaaaaaccgcccctccactcagaggggatcacggggggcccggccgcactccaccaccctggtgccaccactgcaatttctgtatccaccggcatcctatctccatcactgacaagatactgggggacaaacatatccagaaaggaatgaggtag

SEQ ID NO: 108760 - DNA, 2865 bp, synthetic construct
  misc_feature 1..2865: note = Description of Artificial Sequence: Synthetic coding sequence
  source 1..2865: mol_type = other DNA
atgaacaatcaccagctcgaactggccaagcagctccataaagaaggtcacctgttctactgtacctgtagggttctgacctgcccagggcaggcgaagtccattgcctcagcaccaggcaaatgtcaggactctgcagccctgacctccaccgcatttagcggactagatttcggcttgctcagtgggtatctgcacaagcaggccctcgtcaccgccactcatcctacttgtaccctgctgtttccgtcctgccacgctttcttccctctgcccctgacaccaacactgtataagatgcacaagggatggaaaaattactgttcccagaaaagcctgaacgaagccagcatggatgagtatctggggagccttggtctgttcaggaaactcaccgctaaggacgctagctgcctattcagggcaatctcagagcagctgttctgttctcaggtccaccacttggaaatcaggaaggcatgtgtgtcatacatgcgcgagaatcagcagaccttcgagtcttatgttgaaggatcattcgagaagtacctggagaggcttggggaccctaaagagtcggcaggacagctggaaattcgtgctctgtcactcatttataatcgggactttattttataccgcttcccaggcaaacctccgacctacgtaacagataacgggtatgaggataagatcctgctctgttattccagtagcggccattatgactcagtgtacagcaaacagttccagagttccgccgcagtttgccaggcagttctttacgagatactatacaaagatgtctttgttgtagacgaagaggagctcaagaccgctatcaagctgttcaggagcgggagcaaaaaaaacaggaacaacgccgtgaccgggtctgaagatgcacacactgattacaaatccagcaaccaaaaccggatggaggagtggggtgcctgctacaacgcggagaatatcccagaagggtataataagggaacagaggaaactaagtccccggagaatccctccaaaatgcccttcccctacaaagtacttaaggcgctggacccagaaatatatagaaacgtggaattcgatgtctggctggacagtcgaaaggagctgcagaaatccgattacatggaatacgctggccggcagtattacttgggagataagtgtcaggtttgcctcgaaagtgagggccgttattacaatgctcatattcaggaagtcgggaacgaaaataattcagtaacagtctttatcgaagagctcgccgaaaagcacgtcgtcccactcgctaacttgaagcccgtgacgcaagtgatgtccgttccagcctggaatgccatgccctcccggaaagggcggggctaccagaagatgccaggcggctatgttccagaaattgtaatctccgagatggatatcaagcagcaaaagaagatgtttaaaaagatcaggggcaaggaggtatatatgaccatggcttatgggaaaggcgaccctcttctcccgcctcgcttgcagcactccatgcactacggacatgatcctcctatgcactattctcagacagcgggaaatgtgatgagcaatgagcattttcatcctcaacacccctcacctagacagggtagaggctatgggatgcctaggaattccagcaggttcattaacaggcataatatgcctggacccaaggttgacttttaccccggtccaggaaagcggtgttgtcaaagctacgacaatttcagctaccggtctcgatcatttaggcggagtcatcgccagatgagttgcgtgaataaggagtctcagtacggcttcacacccggcaatggccagatgccccgaggcctcgaagagaccattacattctacgaggtggaggaaggtgacgagaccgcttaccctacgttgcctaaccacggaggccccagcaccatggtgcccgctacctcaggatattgcgtcggccgacggggacactcttccgggaagcagaccctcaatctggaggaaggaaacgggcagagcgaaaatgggcgctatcacgaggagtatctttacagggcagagccggattatgagacatccggcgtctacagtaccacggcatctacagcaaatctgtctctgcaggacagaaaatcctgtagcatgtcacctcaggacacagtgacgagctataactacccccaaaaaatgatgggaaacatagccgccgtcgctgcctcctgtgccaacaacgtgcccgctccagtcctgtccaacggcgcagcagcgaaccaggcgatatctacaacaagcgtcagctctcagaacgctatccaaccattgttcgtgtcaccacctacacacggcaggcccgacacaaaggtgctacagtactacttcaatctgggcctacagtgctactatcactcttactggcattccatggtgtacgtcccccaaatgcagcagcaattacatgtggaaaattatcccgtctacaccgaaccccccctggtagaccagactgtcccccagtgctactccgaggtgaggcgcgaggatggtatacaagctgaggcttcagctaatgatacattcccaaacgcagacagcagcagcgtgccccatggtgccgtctactatcctgtgatgtccgatccctatgggcagcctcccttgccaggattcgatagctgtcttccggtggtgcctgattacagctgtgtccccccatggcatccggttgggaccgcgtatggcggatcgagtcagattcacggcgccattaacccagggcccattggatgcatcgccccttcccctcctgcaagccattacgtccctcagggaatgtag

SEQ ID NO: 108761 - DNA, 498 bp, synthetic construct
  misc_feature 1..498: note = Description of Artificial Sequence: Synthetic coding sequence
  source 1..498: mol_type = other DNA
atgaagtgtgtgttcgttacagtgggtacaacgtcatttgacgacctcatcgcctgcgtgtccgctccggacagcctccagaagattgaatcccttgggtacaaccgcctaatcctgcagattggacggggaacagttgtcccagaaccctttagcactgaatccttcacattagacgtgtacagatataaagattccctgaaggaagacattcagaaagccgacctggtgatcagtcacgcaggagccggcagctgtctggagaccttggagaaaggcaagccattggtggtagtgatcaacgaaaaactgatgaacaaccaccagttggaactggccaagcagctgcataaggaggggcacctgttttactgtacatgcagtacactacctggcttgcttcagagcatggatctaagcacgctcaaatgttaccctcccggccagcctgagaagttctcagctttccttgataaggtagtggggctacagaagtag

SEQ ID NO: 108762 - DNA, 3414 bp, synthetic construct
  misc_feature 1..3414: note = Description of Artificial Sequence: Synthetic coding sequence
  source 1..3414: mol_type = other DNA
atgaaatgcgtgttcgtgactgtgggcacgacatctttcgatgatttgatagcttgcgtttcagctcctgacagtctgcaaaagatagaatcactcgggtacaacagactcattctgcaaatcggaagaggcactgtggtacctgaaccgttctccacagaatcctttactttagacgtgtacaggtacaaggattcactcaaagaagacatccagaaggccgatcttgtcatctctcatgcgggtgccggatcatgcctcgagacgctggaaaaaggtaaaccattggttgtggtcataaatgaaaaactgatgaataatcaccagttggagctggcaaagcagttgcataaagaggggcatctattttattgtacctgcagagtattgacttgcccagggcaggctaagtctattgctagcgcccctgggaagtgccaggacagcgccgctctcaccagtaccgccttcagtgggctcgacttcgggctgctgagcgggtacctgcacaagcaggcactcgtcacagccacccaccctacgtgtaccctgctattcccttcctgccatgctttcttccctctgcctctgacaccgacactctacaaaatgcacaaaggctggaagaattactgctcacagaagtcactgaacgaagcctcgatggacgaatatctcggttccctcggattattcagaaaactgacagccaaggacgccagttgcctctttcgtgcgatcagcgaacagctcttctgctcgcaagtccaccatctagagataaggaaagcgtgtgtgagttatatgcgagagaaccagcaaacatttgaatcctacgttgaggggtcctttgaaaagtacctcgaacgacttggagaccccaaggagtcagccggccaacttgagatacgtgccctgagccttatatacaatcgggatttcatactctatagattccctggcaagcccccgacgtatgtgacagacaatggttatgaggacaaaatccttctctgttattctagctcagggcactacgacagcgtgtatagtaaacagttccagtccagtgcggcggtctgccaggcagtactgtatgagattctgtacaaggacgtattcgtggtggatgaagaagaactaaagaccgcgatcaagttgttccggagtggtagcaaaaaaaatcgcaacaacgccgtgaccgggagcgaggatgcccatactgattacaaatctagcaaccagaacaggatggaggagtggggggcttgctataacgcagaaaacatcccggagggctacaataagggaactgaagagaccaaatcgcccgaaaatcctagtaagatgccctttccctataaagttttgaaagccctggatcccgaaatctacaggaacgtcgagttcgacgtctggctcgatagtcgaaaggagctccagaaatcggattacatggagtacgcgggtcgtcagtactatctgggcgataagtgtcaagtgtgcctggagtctgaaggaaggtactataatgcccacatccaggaagtgggcaacgaaaacaacagtgtaacagtgttcatcgaggaactggctgaaaagcacgttgtgcctctcgcaaatcttaaaccagtaacacaggttatgtcagtgcccgcctggaatgccatgccatcacgcaaagggcgaggttaccagaagatgcccggaggatacgtgcctgagattgtgatctctgaaatggacatcaaacagcagaagaagatgtttaaaaaaattcgaggaaaagaagtgtacatgaccatggcatacgggaagggggacccgttgttgccccccaggctgcagcattcaatgcactatggccatgaccctcctatgcattattctcagaccgctggcaacgtcatgagcaatgaacacttccatccgcagcacccaagtccccggcagggccgcggatacggaatgccccgcaactctagccgtttcattaaccggcacaacatgcctggtcccaaagtcgacttctatccaggtcctggtaagcgatgttgtcagagttatgacaatttctcttaccgatcgcgtagcttcaggagaagccatcgacagatgtcttgtgtaaacaaagaatcacagtacggtttcacacccggcaacgggcagatgccgcggggcctggaggagacgatcactttctacgaggtagaagaaggagatgagacagcctatcccacactgcctaaccacggcggcccttcgacaatggtcccagccacatctggttattgtgttggccgcaggggccactcgtctggcaaacagaccctgaatctcgaggaaggcaatgggcagtcggagaacggtcgctaccacgaagaatatctgtaccgggctgagcctgattacgaaacgagcggtgtgtacagcactactgcatccactgccaacctgtcgcttcaagacaggaagtcttgcagcatgtccccacaggacacagttacgagttacaactacccccagaaaatgatgggcaacatcgccgctgtggctgcatcctgcgccaacaatgtcccagctccagtgctgagcaacggagccgcagcaaatcaggccatttcaacaacaagcgtgtcatcccaaaatgcaatccaaccgctgttcgttagtcccccaacccacggccgacctgtgattgcgtccccgtcctatccttgtcactccgccataccgcatgccggcgcttcattgcccccaccgcctccacctccaccaccccccccgcctccaccaccgccaccgcctcctccacctccgccacccccaccaccagccctggacgtaggggaaacttccaatctccagcctccaccacctctgcccccaccgccgtactcatgcgatcccagcggctcagatttacctcaggacaccaaagtgttgcagtattactttaacctcggtttgcagtgctattatcacagctattggcactctatggtgtatgtgccacaaatgcagcaacagctccacgtcgaaaactatcctgtgtacaccgaacccccattggtggaccaaaccgtaccgcagtgttattcagaagtgcggagggaggacgggatacaggcagaggcctctgccaacgacactttccccaatgccgatagcagctccgtgccccacggagcagtgtactatcctgtcatgagtgacccttacggacaacctccactgccagggtttgattcttgcctccctgtggtacccgactattcgtgtgtgcccccatggcaccccgtggggaccgcctatgggggatcctcccagatacatggagctattaaccctggccccattgggtgcatcgcaccctctcccccagcatcacattacgttccacagggcatgtag

SEQ ID NO: 108763 - DNA, 651 bp, synthetic construct
  misc_feature 1..651: note = Description of Artificial Sequence: Synthetic coding sequence
  source 1..651: mol_type = other DNA
atggtatgtgttctggtgcttgcggccgcagccggagccgttgccgtcttcctgatactaagaatctgggtggtgctgcgttccatggacgtcacccctcgcgaatctctctccatactcgtcgtcgcaggcagcggcggacacaccactgagattctgcggctgttgggatcactgtcaaacgcctacagcccccgccactacgtgatcgctgacaccgatgagatgtctgccaacaaaataaattcgttcgagctggaccgggccgacagggacccctccaacatgtatacgaagtactacattcatcgaatcccaaggtcccgggaagtgcagcagtcctggccctcgacagtgttcaccacccttcacagcatgtggctctcctttccgcttatccatcgcgtaaaacccgacctcgtactctgcaacggccccggcacttgcgtgcccatctgcgtatctgctttgctgttaggcatcctgggcataaagaaagtcatcatcgtgtacgtggaatccatttgccgcgtggaaaccctttctatgtctggcaagatcctgtttcatctgagcgactactttattgtgcaatggccagctttgaaggagaagtaccccaaaagcgtgtacctgggtagaatagtgtag

SEQ ID NO: 108764 - DNA, 972 bp, synthetic construct
  misc_feature 1..972: note = Description of Artificial Sequence: Synthetic coding sequence
  source 1..972: mol_type = other DNA
atgcctctgctcaaactagttcacggaagcccactggtcttcggtgagaagtttaaactgttcacgctggtgtccgcatgcatcccagtgttccggctggctagaaggagaaagaagattctcttttactgtcacttcccagatctgctccttaccaaacgcgattcttttcttaagcgactgtatcgagccccaatcgactggatagaggagtataccactggaatggctgactgcattctggtgaatagccagtttaccgcggcggttttcaaagaaactttcaaaagtttgagccatatcgacccagatgttctgtaccctagtctcaatgttactagcttcgatagtgtcgtgccagagaagctggacgaccttgtgcccaagggcaagaaattcctcttgctttccataaatcgatatgagcgcaagaagaatctgactctggccctcgaagccttggtccaactcagaggcagactgacctcacaagactgggagagggtccacctcattgttgccggaggctatgatgaacgagtgctcgaaaatgttgagcactaccaagagctcaaaaaaatggtgcagcaatctgacctggggcaatatgtcacttttttgaggtcattttccgataagcagaaaatatcactcctccacagctgtacatgtgtgctatacactccttctaacgagcacttcgggattgttcctttggaagccatgtatatgcaatgccctgtcattgccgttaatagtggcggacctcttgagtcaatcgaccattcagttacagggttcctttgtgagcccgacccagttcacttctcggaagcgattgaaaaattcattagagagccttctctgaaagccaccatgggattagccggcagagcacgcgtgaaagagaagttttcacctgaggcctttacagagcaactgtaccggtacgtaaccaaactactggtctag

SEQ ID NO: 108765 - DNA, 1251 bp, synthetic construct
  misc_feature 1..1251: note = Description of Artificial Sequence: Synthetic coding sequence
  source 1..1251: mol_type = other DNA
atggctgaagagcagggcagagaacgggactctgtgcccaagccgtcggtgctgttcttgcatcctgatctaggtgtgggcggtgctgagcgactggtcttagacgcagcccttgctctgcaagctcgaggctgctctgtcaagatctggaccgctcattacgatcctggacattgctttgccgaatccagggagcttcccgtgcgatgcgccggagattggctgcctcgtggactgggctggggcggtcgaggagctgctgtgtgcgcttatgtgagaatggtgtttctcgccctgtatgtgctgtttttagctgacgaggagttcgacgtagttgtctgtgaccaagtctcggcctgcatccccgtatttagactggcacgacgtagaaagaagatccttttttattgccattttccagacctgcttctcacaaaacgggactctttcttaaagcgcttgtaccgtgcccccatcgactggatagaagagtacactacagggatggccgactgcattctagttaatagccaatttactgccgctgtcttcaaggagacgtttaagtccctgtcacatatagatcctgacgttttgtacccttccctgaacgtcacctctttcgactcagtggtgccagagaagctggacgatttggttccgaaaggtaaaaagttcctgcttttaagcattaacagatatgagcgcaaaaagaaccttaccttagctctggaagctctggtacagcttcgagggcggctgaccagccaagactgggagcgcgtgcatctaatcgtggccggaggatatgatgaacgggtactcgaaaacgtcgaacactatcaggaattaaagaaaatggtgcagcagtcagacctgggccagtatgtgaccttcctccggagctttagcgacaagcaaaagattagtcttctccattcatgcacttgtgtgctgtacaccccctcaaacgagcacttcggtatagtacctctggaggccatgtacatgcagtgtccagttatcgccgtcaactcagggggtccattggagtccattgatcattcagtaactggttttctgtgcgagccggaccctgttcatttctcagaggctatcgaaaaattcataagagagccttccttaaaggccactatggggctagcgggccgcgctagagtgaaagagaagtttagtcctgaagcctttaccgaacagctatacaggtatgttactaagctgctggtgtag

SEQ ID NO: 108766 - DNA, 1317 bp, synthetic construct
  misc_feature 1..1317: note = Description of Artificial Sequence: Synthetic coding sequence
  source 1..1317: mol_type = other DNA
atggcagctggcctcagaaaacgcggtcgatcgggctccgcagctcaggccgagggactgtgcaagcagtggctgcagcgtgcgtggcaagagaggcgcctgctattgcgggagccaagatatacactgttagtggctgcctgcctgtgtctggcagaggtgggaattacattctgggtgatacacagggtcgcctatacggagattgactggaaggcatatatggccgaagtggaaggggttattaacggcacttacgactacactcagctgcaaggagacacgggaccgctggtgtaccccgctggcttcgtgtacatcttcatgggtctgtactacgctacgtcccgcgggactgacatacggatggcacagaacatttttgcagtgttatatctggcaacgctgctactcgtgttcctaatttaccatcagacgtgcaaagttccaccgttcgtgttctttttcatgtgctgtgccagttacagggtccattctatcttcgtcctccgtctgtttaacgacccagtcgctatggtgttgctgttcctgagcattaatctccttcttgcacaaaggtggggctggggctgctgttttttctctctggctgtcagtgtgaagatgaacgtacttctcttcgcaccagggctcctcttcttgcttctgactcagttcggtttccgaggcgcactgcccaagttgggcatatgcgcggggctgcaggtggtactcggcctccctttcctcttggaaaatccttctgggtacttgagcaggtcatttgatttgggcaggcagttcctatttcattggactgtgaactggcgcttcctacctgaagctctattcctacacagggccttccaccttgcgctcctgactgcgcacttgaccctgctcctgctgtttgccttatgcagatggcatagaactggagagtcaatactgtcactcctgcgggacccctccaaacgcaaggttcctccccaaccccttacacccaaccagatcgtctccacattgtttaccagtaatttcatagggatttgcttctcccgctcactccactaccagttttacgtttggtattttcacacactgccctaccttttgtgggctatgcctgcaaggtggctgacacacctgctaaggctgctggtgctcggcttaattgagctgagctggaacacttatcctagcacttcttgctcaagtgcagctcttcacatctgtcatgcagtgatcctgttacaattgtggctcggcccccagcccttcccgaaatctactcagcattctaagaaggcccactag

SEQ ID NO: 108767 - DNA, 1149 bp, synthetic construct
  misc_feature 1..1149: note = Description of Artificial Sequence: Synthetic coding sequence
  source 1..1149: mol_type = other DNA
atggccgcagcgcgcctcgcgagagcagctcctgcagcagccggcgctgcacttcacgcagcaggaggacggctgcctctcccagggggcggtggacaccacctgttaggtcactcgcagggggggatgtaccccgcgggattcgtgtacatattcatgggactgtattatgcgaccagccgcggaaccgatatcaggatggctcagaatatctttgccgtgctgtacctggccactctactactggtttttctcatttatcaccaaacttgcaaggttcccccgttcgttttttttttcatgtgctgtgcctcctatcgtgtgcattctattttcgtgcttcggctctttaacgacccagtggctatggtgctgttgtttctgtccattaacttactgctagcccagagatgggggtggggctgctgcttcttctctctagccgtgtctgtaaaaatgaatgttctgctatttgcaccaggtctgctgttcctgctgttgacccagttcggtttccgcggcgctttgcctaaactgggtatctgtgctggcctacaggttgtgctcggcttgcctttcctgctggagaatcctagtggctatctttcgcgctcattcgacctgggacgccagttcctattccactggactgtgaactggcgcttcctacctgaggcactcttcctccatagagctttccatctcgctctacttaccgcccacctgacactgcttctgctcttcgctctgtgtcgctggcacagaacaggcgagtcgatcctctcactgctacgcgacccaagcaagcggaaggtacctccacagcccttgactccgaatcagattgtcagcacactcttcacttctaacttcatagggatttgcttcagccgttcactgcactatcagttttatgtatggtacttccatacgctgccatacctgctgtgggccatgcctgccagatggctaacacacctactaagacttcttgtgctcggtctgatcgaactaagctggaacacctatcccagcacgagctgttccagcgcggcgctccatatttgccatgccgtgattctactgcagttgtggctgggacctcagcctttcccgaaaagcactcagcattccaagaaggcacactag

SEQ ID NO: 108768 - DNA, 1530 bp, synthetic construct
  misc_feature 1..1530: note = Description of Artificial Sequence: Synthetic coding sequence
  source 1..1530: mol_type = other DNA
atggagaaatggtaccttatgaccgttgtggtccttattgggctgaccgttagatggactgtaagcctcaattcctattctggcgccgggaaacccccaatgttcggagactacgaggcccaaagacattggcaggaaattaccttcaacttgcccgttaagcagtggtattttaactcctctgacaacaatctccaatactggggcctcgactatccaccactgactgcgtaccactcactgctatgcgcatacgtagctaagttcattaaccccgactggatcgctttgcacacctctaggggctacgaatcccaagctcacaagctgttcatgaggacaactgttctgattgctgacctgctgatttatatcccagcggtcgtcctttattgctgttgccttaaagagatttctaccaaaaagaagattgccaatgccctctgtattctgctttaccccggattaattctaatcgattatggacacttccagaacatttacaattctgtgtctctagggtttgccctctggggcgtgttaggtatcagctgcgactgtgatctattagggagtctcgccttttgtttagccattaattacaaacagatggaattgtaccatgctctaccctttttctgctttttgctgggaaaatgtttcaaaaaaggattaaaggggaagggtttcgtgctgctagtgaaattggcctgtattgtcgtcgcaagctttgtgctttgctggctgccgtttttcactgaacgagagcaaacgctgcaggtactccggagactttttcctgtggacaggggactgttcgaggacaaggtggcgaatatttggtgttcatttaatgtatttctcaagatcaaggatatcctgccgagacacatacagctgattatgagtttctgtagcacattcctttcgctgctacccgcatgcatcaaacttattttacagccatctagcaagggctttaaattcaccctggtctcctgcgccctgtcattttttcttttctcgtttcaagtgcacgagaaaagcatcctgcttgtctctctgccagtctgcctcgttctctccgaaatcccttttatgagtacctggtttctgttagtctcaactttctctatgctcccacttctgcttaaggatgagcttctaatgccaagcgtggttaccaccatggccttttttatagcttgtgtgaccagcttttcaatctttgagaaaacatcagaggaggagctgcagctgaagtcctttagcatctccgtgagaaaatatcttccgtgttttaccttcttgtcccggatcattcagtacctgttcctgatctccgtgataacgatggttctcctaacccttatgacagtgaccttagaccccccacagaagctcccagatttattctcagtgctggtttgcttcgtatcgtgtctgaatttcttgttttttctagtttacttcaacatcatcatcatgtgggatagtaagagcggaaggaaccagaaaaagatttcttag

SEQ ID NO: 108769 - DNA, 1524 bp, synthetic construct
  misc_feature 1..1524: note = Description of Artificial Sequence: Synthetic coding sequence
  source 1..1524: mol_type = other DNA
atggagaaatggtaccttatgactgttgtggtgcttatcgggctgactgtcaggtggacagtctctctgaatagctactccggcgcaggcaaaccgcctatgttcggcgactatgaggcacagcgccactggcaggaaattactttcaatttaccggtgaaacagtggtactttaacagcagtgacaacaatctccagtactggggcctggattacccaccgttaacggcttatcatagccttttgtgcgcctatgtcgctaagttcattaatccagactggatagctctccatacgtctcggggctatgaaagtcaggcccacaagctgtttatgcggacgaccgttcttattgctgacctgcttatttacattcctgccgtggtcttatattgttgctgcctgaaagaaatttcgaccaaaaaaaaaatcgcaaatgccctgtgcattttactctatccagggttaatattaattgactatggccatttccagtataacagcgtgtccctcggtttcgctctgtggggggtcctgggtataagttgcgattgcgaccttttagggtccttggccttttgtttggccattaactataagcagatggagctttatcacgccctccctttcttctgcttccttttgggtaaatgctttaagaagggcctgaagggcaaaggttttgttttgcttgtgaaactagcctgtattgtggtcgcttcttttgtgctgtgctggctgcctttctttacggagcgggaacagacactgcaagtgctgcggcgcctcttccctgtagatagaggattatttgaggacaaggttgcaaacatttggtgttcgtttaacgtgttcttaaagataaaggacattctgcctcgccacatacagctgatcatgagcttctgcagtacctttctgtctctgctcccggcctgcatcaaactaatattacaacccagctctaagggatttaagttcacactggtgagttgcgccctatcattcttcttgttctccttccaggttcacgagaagtcaatactactggtatcgctgcctgtatgtctggtgctcagtgagataccgtttatgtccacatggttcttgctggtgagcacattctctatgctgccactcctccttaaggatgagctgttaatgccttcggttgttacgacaatggccttcttcatcgcctgtgtgacatcattttccattttcgagaagacgtccgaagaggaactgcagttgaagagtttctccatatcagtgagaaagtacttgccctgttttacgttcctgtctaggattatccagtatctatttctgatcagtgtgataacaatggtcctgctcacactcatgacagtcactctcgacccacctcagaagctccctgacctatttagcgtgttggtgtgctttgtctcctgcctgaactttctgtttttcctggtgtacttcaacattatcattatgtgggactccaaatcaggtaggaatcagaagaagatcagttag

SEQ ID NO: 108770 - DNA, 765 bp, synthetic construct
  misc_feature 1..765: note = Description of Artificial Sequence: Synthetic coding sequence
  source 1..765: mol_type = other DNA
atggaattgtaccacgcgctcccttttttttgctttctccttgggaagtgttttaagaagggtctcaagggcaaagggtttgtccttctagtcaaacttgcatgcattgtggtggcttctttcgtcctgtgctggctgccattttttacagaaagggagcagaccctccaggtgctgagacggctttttcccgtggaccgtggcctgttcgaagataaggtagctaacatatggtgttctttcaacgtgtttttgaaaatcaaggacattctcccccggcatatccagttgatcatgagacctgtttgcctagtcttgtcagaaatcccattcatgagcacatggtttctcctagtgtccacattttcaatgctaccgttgttgttaaaggatgagctgcttatgcccagcgtcgttactaccatggccttctttatcgcctgcgttacgagctttagtattttcgagaagacctcagaggaggaactacagctcaagagtttctctattagtgtgcggaaatatctgccctgttttacgtttttgagtaggattattcagtacctgtttctgatctctgtgattacaatggtgctactaactcttatgacagtgacactggatccaccccagaagttaccagacctgtttagtgtgctggtgtgttttgtgtcctgcctcaacttcctgttctttttggtctactttaacattatcatcatgtgggatagcaagtccggacgcaaccaaaaaaagatctcatag

SEQ ID NO: 108771 - DNA, 1581 bp, synthetic construct
  misc_feature 1..1581: note = Description of Artificial Sequence: Synthetic coding sequence
  source 1..1581: mol_type = other DNA
atggccgcattgacgatagccaccgggacaggcaactggttctccgccctggctctgggtgtcacgctgttgaagtgcctgctgataccaacctaccatagcacggactttgaggtccaccgcaactggttggccattacccactctctgccaatatcccagtggtactacgaggccacgagcgaatggaccctcgactaccccccttttttcgcctggtttgagtatatcctgagccatgtcgccaagtactttgaccaggagatgctcaacgtgcacaacttgaattactcttcttcaagaaccctgctgtttcagcggttttctgtaatttttatggatgtgctattcgtgtacgccgtgcgggagtgctgtaaatgtattgatggcaagaaggtcgggaaggagctgactgaaaagccaaagtttattttgtcggttctgctcttgtggaactttggtctgctgatcgtggatcatatccattttcagtacaatggtttcctattcggcctgatgttgctgtccattgctaggcttttccaaaaaaggcacatggaaggagccttccttttcgcagtgctgctccatttcaagcatatatatctctacgtggcccccgcttacggtgtatacctcctgcgctcctactgctttacagcaaataaaccagacggatccattagatggaaatccttcagttttgtcagggttatctccctggggttagtggtgtttctagtcagtgcactgagcctgggccccttcctcgctttgaaccagctaccacaagtattttcccggctctttcctttcaaacgcggcctgtgtcacgcatattgggcgcccaatttttgggccctctacaacgccctggacaaggtcctgagtgtgataggtctgaaactgaagttcctggaccccaacaatataccaaaggcttccatgacatccggcctcgtccagcagttccagcataccgtgctgccaagtgtaactcctctcgcaacgctgatctgcactctgatcgcaatcttgccgtctattttctgcttgtggttcaaaccccagggccctcgaggattcctgcggtgcctcacgctgtgcgccctatcctcgttcatgttcggttggcatgtgcacgagaaggccattctcctcgcaatcttaccaatgtcactgttgtccgtgggcaaggcaggtgatgcatcaatcttcctaatccttacgacgacaggacactatagccttttcccactgctgttcaccgctcccgaacttccaatcaaaattttactcatgctgttgttcactatttacagtatatcaagcctgaaaactctgttcaggaaggagaagcctctttttaattggatggagacattttacctgctgggtttaggacctttggaggtgtgctgcgagttcgtttttccattcacatcatggaaagtaaagtatcccttcatacccctacttctgaccagtgtctattgtgccgttggtattacctacgcctggttcaaactgtatgtgtctgttttaatagattcagcaattggaaaaacaaagaaacaatag

SEQ ID NO: 108772 - DNA, 1404 bp, synthetic construct
  misc_feature 1..1404: note = Description of Artificial Sequence: Synthetic coding sequence
  source 1..1404: mol_type = other DNA
atggctgccctaaccatcgctacagggactggtaactggttcagtgcactagccctgggggtgacactgctaaagtgtcttctcatcccaacataccacagcacagactttgaagttcatagaaactggctggcaatcacacacagtctgcctatatctcagtggtattacgaagcgacttccgagtggacactggattaccctccatttttcgcatggtttgaatatatcctgagccacgttgccaagtatttcgatcaggagatgctgaatgtgcacaatctgaactattccagttcccgtaccctactttttcagcggttctccgtcatcttcatggacgttctgttcgtctacgccgtacgggagtgctgtaaatgcattgacggcaagaaggttggcaaggagctcactgaaaagccaaaatttattttatccgtgcttctactgtggaatttcgggctgttaatcgtggaccatatccattttcaatacaatggcttcctttttggacttatgctcctgtcaatcgcccgtctcttccagaagcgacacatggaaggagccttcctctttgccgtcttattacacttcaaacatatttatctctatgtggcaccggcctatggcgtctatcttctacggagctactgttttaccgcgaataagcctgatggatctattcgttggaaaagcttctcttttgttagagtgatttcactggggctggtagtctttctagtgtcagcactgagtctgggcccctttctggcacttaatcagctgcctcaggtgttctcgcgtctctttccatttaagaggggcctgtgtcacgcgtactgggcgccaaacttctgggccctgtataacgctcttgacaaagttctgtccgtgattgggctcaaactcaaattcctggatccaaataatattcccaaggcgagtatgacatccggtctcgtgcagcaattccaacatacagtgctgcctagtgttaccccgcttgcaactctaatctgcactttgatcgcaatacttcctagcattttctgcctgtggtttaagccacagggtccccgcgggtttctgcgatgcctgacactgtgtgccctcagttccttcatgtttggctggcacgtccatgaaaaagcaatacttctcgccatcttacctatgtcattgttgagtgtgggtaaagccggggacgccagcatctttcttattttgacaactacaggtcattactccctttttccactgctgtttacagctcccgagctacctattaaaattctgctgatgttactcttcacgatttactctatttcgagcctgaaaacgcttttccggcggagcttcacgctagtggctcaagctggagtgcaatggcacgacctgtcatag

SEQ ID NO: 108773 - DNA, 1323 bp, synthetic construct
  misc_feature 1..1323: note = Description of Artificial Sequence: Synthetic coding sequence
  source 1..1323: mol_type = other DNA
atgatgctggccttcctggtgctttctaccgggatgttctgctccagctctgcctttctaccaagtagcttttgcatgtacaccaccctcattgcaatgacaggatggtatatggataagacatcaatcgccgttttgggtgtggctgcgggtgcaatactggggtggccttttagcgccgctcttgggctgccaattgcttttgacctgctcgtgatgaagcacagatggaagtctttcttccactggagcctaatggccctgatcctgttccttgttcccgttgtcgttattgattcttattactatggcaaactggtcatcgcccctttgaacatcgtgttgtacaatgtcttcaccccacatggtcccgatctgtatggtactgagccatggtatttctacttgatcaatggattccttaactttaatgttgccttcgcactcgctctgcttgtgctcccattaacaagcttaatggagtacctgttgcaacgatttcacgtgcagaatctgggacatccctactggctgaccctcgctccgatgtacatctggttcataatttttttcattcaacctcacaaagaggagcgctttctgtttcccgtgtaccccctaatttgcttgtgtggcgctgtggcactgtccgcgctgcaaaaatgctaccattttgtgttccagagatacaggctggagcactatacagtgaccagtaattggctagcactcggcacagtatttctgttcggactgctatccttctcccggtcagtggcattattcagggggtatcatggcccgctggacctgtaccccgaattctacaggatcgcaacagatccgactattcacacagttccagagggccggcctgtaaatgtgtgcgtggggaaagaatggtacaggttccctagtagtttcctcctccccgacaattggcagctccaattcatcccaagcgagttccgaggccaactgcccaaacctttcgccgagggccctttggcaacacggattgtaccaactgacatgaacgaccaaaatctagaggagccaagcaggtacatcgacataagcaagtgtcattacctagtagatctcgacaccatgcgggaaacccccagggaaccaaaatatagttccaataaagaagagtggatttcgctcgcgtaccgtcccttcctggacgcatcacgaagtagtaaactcctgcgggctttctacgtaccgtttctgagcgaccaatacaccgtatacgttaactacaccatcctaaaaccccggaaggctaaacagatacggaaaaaaagcgggggttag

SEQ ID NO: 108774 - DNA, 2535 bp, synthetic construct
  misc_feature 1..2535: note = Description of Artificial Sequence: Synthetic coding sequence
  source 1..2535: mol_type = other DNA
atggccccgcgcagactgctgctcgtcggcgaggggaatttcagctttgccgcagctctaagtgaaacactggaccaatccactcagctgacagctacatgtctgcagcgacctgcagagctggcgagagacccactggcatgggagaacctgcagtgtctgcgggaacgtgggatcgacgtcagatttggagtggactgtacccagttagccgacgtgttcgaacttcacgagagagaattcgatcagatctattttattttccctcactgcggtaggaaggccggcgtggctaagaatagagaactgctggccaagttttttcaatcctgcgccgacgtgctggccgaggaaggggaggtgcacgtggccctctgtcgaggccaaggcggcaccccagcagataagcctcagcgggaatggcacaacagttggcaggtggtggcaatggctgctctgggcgggctaattctgtccgacgtctatcctttcagttgtaaagccgtggcaggatacaagtgcaccgggtaccgatctcaggataaaagttttcacgtggaaggggcgctcaatcatatcttcacacgctctctaccctttgaaggcagtcaaccacgaatcttccggatcaaacttggtaaccagtggttctcatttcccgaaccggaagccctcgtgggaaaactgaacaggctggccatggcgtcacggggtgctcgccaacgcctgaaggggtcaggagcatcttccggtgacaccgcaccggcggcagacaaactgcgcgaactcctggggagccgcgaggctgggggggctgaacataggacggaactgtccggaaataaggctggtcaggtctgggcccctgaaggaagcacggctttcaaatgtctgctgagtgccaggttgtgcgcggcgctgctcagcaacatcagcgattgcgatgagacttttaactattgggaaccaactcactatttgatatatggggaggggttccagacatgggagtacagtcctgcgtacgccattagatcctatgcctacctgttgctgcacgcctggccagccgcattccatgcccggatcctgcagactaacaagattctcgtcttttatttcctgagatgtcttttagctttcgtatcttgtatctgcgaactgtatttttacaaagcagtgtgcaagaaattcggattacatgtgtctcgaatgatgcttgcgttcttggtgctgagcacagggatgttttgtagcagctccgcctttctgccttctagcttttgcatgtacacgacacttatcgctatgactggatggtatatggataaaaccagcattgccgttctgggcgttgccgcaggcgccattctaggatggcctttctcagccgctctcggtctgccaatagcattcgacttactggtgatgaagcatcgttggaagtcattttttcactggagcctcatggccctcatcttgttcctggtacccgtcgtggtgatcgatagctactactacggcaaattggtgatcgctcccctcaacatcgtactgtacaacgtctttacgccacacggacccgatttatatggtacggagccctggtatttctatctgatcaacggtttcctgaatttcaatgtggcctttgcactcgctctgctggtcctcccactgacgagcctgatggaatatctcctgcagagatttcatgttcagaacctgggtcacccttactggttaacgctcgccccaatgtatatttggttcattattttcttcatacagccccacaaggaggagcgttttttgtttccagtgtacccactgatctgcctttgcggagcagtagctctctcggctctccagaaatgttaccatttcgtttttcaaagatatagacttgaacattacacagtgacttctaactggctggctctcggtaccgttttcctgttcgggttgctctctttctcacgcagtgtggccctgtttcggggctaccatggaccactggacctgtatccagagttctacagaatcgctaccgaccctaccattcatacagtgcctgagggccgcccggtaaacgtgtgcgtgggaaaggaatggtacagattcccctcttccttcttgcttccagataactggcaactccagttcataccgtccgaatttcggggtcagttgcctaagcctttcgccgaagggccacttgccactcgtatagtgcccacagatatgaatgaccagaaccttgaggaaccgagccgctatattgatatctccaagtgccactatttggttgatctagacaccatgcgcgagacaccccgggagcccaagtatagctcaaacaaggaggaatggatctccctcgcatataggccatttttggacgcttccagaagttctaaactgctgcgagctttctatgttccctttctgagtgatcagtacactgtgtacgtgaactacacaattttgaagcccagaaaggccaaacaaatccgcaaaaaatcgggcggctag

SEQ ID NO: 108775 - DNA, 1344 bp, synthetic construct
  misc_feature 1..1344: note = Description of Artificial Sequence: Synthetic coding sequence
  source 1..1344: mol_type = other DNA
atgatgctggctttcctcgtgctgtcgacaggtatgttttgtagcagctccgccttcctcccctcttctttttgtatgtatacgaccctgattgctatgactggctggtacatggataagacatctattgcagttctgggcgttgccgccggggcgatcttggggtggcctttttctgccgccttaggtttgccaatcgcatttgacctgttagttatgaaacatcgttggaagtcgttctttcactggtcactgatggcactcatcctgttcttggtgcctgttgtggtcattgattcctattactacgggaagctagtgattgcccctcttaacattgttctttacaatgtttttactcctcacggccctgatctgtacggcacggaaccttggtacttctatctgataaatggctttttaaatttcaatgtcgctttcgccctggctctgctggtgttacctctaacttcgctgatggagtatttgctgcagcgctttcacgtacaaaacttgggccatccctattggctaactctggcaccaatgtatatttggtttatcatattttttatccagcctcacaaggaggagcggttcttgttcccagtctacccattaatctgtctgtgcggtgcagtcgcgctgagcgcgttgcagcattcattcctttactttcagaagtgctaccacttcgtgttccaacggtaccggctggagcattacacggttacaagcaattggctggcgcttggtaccgtgtttcttttcggcctcctttcattttcccgttccgtcgccctttttcgggggtaccacggaccactggatctgtatcccgaattttaccgtatcgctacagatcccaccatacatactgtaccagaggggagacctgtaaacgtgtgcgtgggtaaggagtggtacaggttcccaagtagtttcctgctgcccgacaactggcagctgcagtttattccctcagaatttagggggcagctgccgaagcccttcgcagagggccccctggccacgcgcatcgttcccaccgacatgaacgatcagaatttggaggaaccctctcggtacatcgatatctccaaatgccactatctggtagatttagatactatgagggaaaccccaagggagcctaaatacagctccaacaaagaagagtggatcagcctggcctaccgaccctttcttgacgcttccaggagttcaaaactccttagggccttctacgtcccatttttgtctgatcagtacaccgtctatgtgaactatactattctgaagcctcgtaaggccaagcagattcgcaaaaagagcggagggtag

SEQ ID NO: 108776 - DNA, 1647 bp, synthetic construct
  misc_feature 1..1647: note = Description of Artificial Sequence: Synthetic coding sequence
  source 1..1647: mol_type = other DNA
atggtgttagcagagttatatgtgtccgatcgcgaggggtctgatgcaaccggtgacgggaccaaggagaagccattcaagaccggcctaaaggctttgatgactgtggggaaagagcccttccctacaatctatgtggactctcagaaggaaaacgaacggtggaatgttataagcaaaagtcaactaaagaatatcaagaaaatgtggcacagagaacagatgaagtcagagagcagagaaaaaaaggaggcggaagacagtttaagacgggagaagaacttggaggaggcaaagaaaatcaccatcaagaacgatcccagccttccggaacccaaatgtgttaaaataggagctcttgagggctatagaggacagcgcgtaaaggtttttggttgggtccaccgactcagacggcagggtaagaaccttatgttcctggtcctgagggatggcacaggctatctgcagtgcgtactggctgatgagctgtgtcagtgttacaacggagtgttgctgtccactgagagcagcgtcgccgtctacggaatgcttaacttaactcccaagggaaagcaggctcccggcgggcatgagctgagttgcgatttttgggaactcatcggccttgcgccggccggaggagcggacaaccttataaatgaggagtctgacgtggatgtgcagcttaataaccgccatatgatgattagaggagaaaacatgtcaaaaatcctgaaggccaggtctatggtaacgaggtgtttccgtgatcatttcttcgaccgtgggtactacgaggttacacctccaacccttgtgcagacacaggtggagggcggtgccacactgtttaaacttgactactttggcgaagaggcattcttgacacagtcatctcagctgtatctggaaacctgtctgccggcactcggagatgtgttctgcattgcccaatcttacagagccgagcagtctcgaacacggcggcatcttgccgagtacacacacgtggaagctgaatgtccattcttaactttcgatgatttactaaacaggctggaggatctagtgtgcgacgtcgtcgacaggattctcaagtcaccagcagggtccatcgtacatgagctgaatcccaactttcagccacccaaaaggccttttaaaagaatgaattactccgacgccattgtttggttgaaagaacatgacgtgaaaaaggaagacggaaccttctacgaatttggagaagatattcctgaagctccagaaaggctgatgaccgatacaattaacgagcccattctcctctgccggtttcccgtggaaatcaaatctttttatatgcaacgctgccctgaagacagcaggctaacagagtcagtggacgtcctcatgcccaatgtgggggagatcgtggggggcagtatgaggatttttgatagtgaggagattctggccggatacaaacgagaaggcattgatccgactccctactactggtataccgaccagaggaagtacggaacctgcccgcacgggggctacggattgggactcgaaagatttctgacctggatcttgaatcggtatcatattagagacgtttgtctgtatcccagatttgtacaacgctgcaccccctag

SEQ ID NO: 108777 - DNA, 765 bp, synthetic construct
  misc_feature 1..765: note = Description of Artificial Sequence: Synthetic coding sequence
  source 1..765: mol_type = other DNA
atgactgtcggcaaagaacccttcccaaccatttacgtggacagccaaaaagagaacgaacgatggaacgtgatcagtaagtctcagttaaaaaatataaaaaagatgtggcaccgagaacagatgaaatccgagtcacgcgaaaaaaaagaagccgaggattctttgcgtcgagagaagaacttggaggaggccaaaaagataactataaagaacgaccccagccttcctgaacccaaatgtgtcaagatcggcgcactcgagggctacagaggccagagagttaaggtgtttggatgggtccacaggttgaggagacagggcaagaacctgatgttccttgtcttaagggacggaactgggtatctccaatgcgtcctggctgacgaactgtgccaatgctataacggtgtactgctgagcacagagtcttctgtggctgtgtatgggatgcttaatctgacccccaaagggaaacaagcacccggtggacacgagctttcctgcgacttctgggagcttattggactggctccagcgggcggcgccgataatcttattaatgaagaaagcgatgtggatgtccagttgaataatcggcacatgatgatccggggcgaaaacatgagcaagatactcaaagccaggtccatggttacacggtgctttcgagaccatttcttcgatagaggatattacgaggtgtccatgcattcctccgcctttgctaagaacatgtttttcgcggtgttgaaacttgaatag

SEQ ID NO: 108778 - DNA, 900 bp, synthetic construct
  misc_feature 1..900: note = Description of Artificial Sequence: Synthetic coding sequence
  source 1..900: mol_type = other DNA
atgtgtgaagactggtgttttagagaccattttttcgatcgcggttactatgaggtcacaccccccaccctggtgcagacccaggtcgagggtggcgctacgctgtttaagctggactactttggcgaggaagcattcctgacacaatccagccagctgtacctggagacctgcctgcctgctctcggcgatgtcttctgcatcgcccagagttaccgggcagagcagtctcggactcgacggcacctggcagaatacactcatgtggaagctgagtgtcctttcctgacattcgatgacctgctgaaccggctcgaagatctcgtgtgcgacgtcgtggatcggatcctgaagtcacccgccggtagcatcgttcacgagttgaaccctaacttccagccaccaaaacggccttttaagcggatgaactactctgacgcgatcgtgtggctcaaggagcacgacgtcaagaaggaggacggcacgttttatgagttcggagaggatattcctgaagcccctgagcggctgatgacggacacaattaacgagcctattctgctgtgtagatttccagtagaaatcaaatcattttatatgcagaggtgccccgaggactctagactgaccgaaagcgtcgacgttttaatgcccaacgtcggagagatcgtgggtggatctatgcgtatattcgacagcgaggagatcctcgccggctacaaaagagaaggaatcgacccaacaccttactactggtacacagaccaacggaaatacggaacctgtcctcacggggggtacgggctagggctggaacggttccttacatggattttgaaccggtaccatatcagagatgtgtgcctgtatcccagatttgtccagcgctgtaccccttag

SEQ ID NO: 108779 - DNA, 525 bp, synthetic construct
  misc_feature 1..525: note = Description of Artificial Sequence: Synthetic coding sequence
  source 1..525: mol_type = other DNA
atggtgctcgcagagctgtacgtgtcagaccgggaagggtctgatgcgacaggcgacggtacaaaggaaaagcctttcaagactggcctgaaggccctgatgaccgtgggcaaggagccctttccaaccatttatgtggacagccagaaggagaacgagaggtggaatgtgatctcaaaaagccagctgaagaatatcaaaaaaatgtggcaccgcgagcagatgaaaagcgagagccgcgaaaagaaggaggccgaagattccctccggcgggaaaagaacctggaggaggccaagaagatcaccattaagaacgatccttcgcttcccgagccaaaatgcgtcaaaataggcgcattagaggggtaccggggacagagagttaaggtgtttgggtgggttcaccgtcttagacgtcaggtgtccgtgctgcagtggagttctctggtgcacggcgaacagtgctgcagcgtgtggaatgccaaatcatacccaaaggggcaagccgggtccaggtggccctag

SEQ ID NO: 108780 - DNA, 1434 bp, synthetic construct
  misc_feature 1..1434: note = Description of Artificial Sequence: Synthetic coding sequence
  source 1..1434: mol_type = other DNA
atgctgggagtgaggtgcctcctccgttcggtccgcttctgttcgagcgcccctttccccaagcataaaccgagtgccaagctgtccgtgcgcgacgccctcggcgcgcagaacgcttccggcgaacgcatcaagattcaagggtggataagatcggttagatcccaaaaggaagtcctgttcttgcacgtaaacgacggctcttctctggagagcctccaggtcgtggccgacagtggcctcgatagtcgggagttgaactttggatctagcgtcgaggtgcagggccaactaattaaaagtccgtctaagaggcagaacgtcgaattgaaggccgagaaaatcaaagtcattggaaattgcgacgcaaaggatttcccaatcaagtacaaggagcgccaccctctagaatatctgcggcagtatccacacttcagatgcagaactaatgtgctcggtagcatattgagaatccgaagtgaggcaaccgcagctatccattcatttttcaaggattctggctttgttcatatccacacccctattattacatcaaatgactctgaaggagcaggggagcttttccagctggagccaagcggcaagctgaaagttcctgaagaaaacttttttaatgtgcccgcgttcctgacagtcagtggtcagctccacttggaagtgatgtcaggagcctttacacaggtgtttacatttggccctacgttccgcgccgaaaattcccagagtcggcgacatctggcggagttctatatgatcgaggcggaaatatcgtttgtagacagcctgcaggatctgatgcaggtgattgaggagttgtttaaggctaccaccatgatggtgcttagcaaatgcccagaggatgtcgagctctgccacaagttcatcgcaccaggacagaaagaccgcctggagcacatgctgaagaataactttctaatcatctcttataccgaagccgttgaaattctgaaacaagcttctcagaattttaccttcacacccgaatggggggctgatttgcgcacggagcatgagaagtatttggttaagcattgcggtaacatcccggttttcgtaatcaactatccgctaactttaaaacctttctatatgagggacaacgaagacggaccgcagcacactgttgccgccgtggacctgctggtgcccggggttggtgagctatttgggggtggtctgcgcgaggaacggtaccactttcttgaggagcgactggcacgctctggcctgactgaggtataccaatggtacctggacctgcgccggtttgggagcgtaccgcatggagggttcggcatggggttcgagagatacctgcagtgtatacttggagtggataatattaaagatgtgatccctttccccagatttccccattcttgcttattgtag

SEQ ID NO: 108781 - DNA, 942 bp, synthetic construct
  misc_feature 1..942: note = Description of Artificial Sequence: Synthetic coding sequence
  source 1..942: mol_type = other DNA
atggctcaacgcaagaacgcaaaatccagtgggaactcatcatcctccggttccgggtccggcagcacgtccgccggatcctcttccccaggggcgcggagggagacaaagcatggagggcataagaatggtcgcaagggcggcctgtctggtactagctttttcacttggttcatggtgatcgccctgctgggggtgtggactagtgtagcggtggtctggttcgatttagttgactacgaggaggtacttggaaagctggggatatatgatgccgacggagacggcgattttgacgttgatgacgctaaggttttgctgggcctgaaggagcgttctacatctgagcctgctgttcctcctgaagaagccgagcctcatactgaaccagaagagcaggtgccagtggaagctgaaccccagaatatcgaggacgaggccaaggagcagattcaaagcttactgcacgaaatggtgcatgccgagcacgtcgagggcgaggacctgcagcaggaagatggtccaactggtgagccacagcaggaagacgatgagtttctgatggctactgatgttgatgatcggttcgagaccttggagcccgaggtttcgcacgaagagaccgagcacagctaccatgtagaagaaaccgtctcccaggactgcaatcaagatatggaggagatgatgagcgaacaggaaaacccagactcttctgaaccggtggtcgaagacgaaagactgcatcatgatactgatgatgtcacatatcaagtttacgaagaacaggccgtatatgagccactcgaaaatgagggcatagaaattaccgaagtcactgcgcccccggaggacaatccggtggaggatagccaggtcatagttgaagaggtaagcatttttcctgtagaagagcaacaggaggtccctcccgatacatag

SEQ ID NO: 108782 - DNA, 612 bp, synthetic construct
  misc_feature 1..612: note = Description of Artificial Sequence: Synthetic coding sequence
  source 1..612: mol_type = other DNA
atggcccagagaaagaatgcgaagagcagtggtaattcttcctctagcgggagcggaagcgggagcacaagtgcgggctcctcgtccccgggcgcaagaagagagaccaagcacggcggacacaagaatggaaggaaaggcggcctcagtggaacatcatttttcacgtggttcatggtgatcgcgctgctaggggtgtggacctccgtcgccgtcgtttggtttgacctggttgactacgaagaggtgctagccaaagcaaaagattttcggtataacctgagcgaagtcctgcaggggaaactgggaatttacgacgccgatggggacggcgactttgacgtggatgacgctaaagtacttttgggactgacaaaagacggcagtaacgaaaacattgatagcctggaagaggtgcttaacattttggccgaagaatcaagtgattggttctatggctttctgtccttcctttacgatatcatgacacctttcgagatgctggaagaagaggaggaagagagcgaaacagcagatggggtagatggcacaagtcagaacgaaggcgtacagggaaaaacctgtgtcatactcgatttacacaatcagtag

SEQ ID NO: 108783 - DNA, 2277 bp, synthetic construct
  misc_feature 1..2277: note = Description of Artificial Sequence: Synthetic coding sequence
  source 1..2277: mol_type = other DNA
atggcccaaaggaaaaatgccaagtcttcgggcaacagcagctcgagtggctccggatcgggctccaccagtgctgggtcgtccagcccaggtgctaggagggagaccaaacatgggggacacaagaatggccgcaaaggtggccttagcggaacatcctttttcacatggtttatggtgattgccctgctgggagtttggaccagtgtcgccgtagtatggtttgacctcgtagattacgaagaggtgctggggaagttgggtatctatgatgccgacggtgatggagactttgacgtggacgatgccaaggtcttgctgggcctcaaggaacgcagtacctcggagccggccgttcctcccgaagaagcagagcctcacacagaaccagaagagcaagtcccagtcgaggcagagcctcagaacattgaggacgaagcgaaggagcagatccaaagcctgttgcacgagatggtccacgccgagcacgttgagggggaggacctgcagcaggaggacggaccaactggggagccgcagcaggaggatgacgagttccttatggctactgacgtcgatgacagattcgagactcttgaacccgaggtgagccatgaagagacagagcatagttaccatgtagaagagaccgtttcgcaagactgtaatcaagatatggaggagatgatgtcagagcaagaaaatcccgatagctccgaacccgtggtggaggacgaacggctgcaccatgacactgatgacgtgacctaccaggtttacgaagagcaagcggtctatgaacccttagaaaacgaaggaatcgagattactgaggttactgcccccccagaggacaaccccgtggaagacagccaggtgatcgtggaggaggtgtccatttttccagtggaggagcagcaggaggtgcctccggagactaataggaagacagatgatcctgagcaaaaagcaaaggtgaaaaaaaagaagcccaagctgttaaacaaattcgataaaacgattaaggccgagctcgacgccgccgaaaaactgcggaagcggggcaagattgaggaggccgtcaacgctttcaaggagctcgtcaggaagtatccacagtctcccagagcaaggtatggtaaggctcagtgcgaggacgatctcgccgaaaagcgccgcagtaatgaggtgctgaggggggccatcgaaacgtaccaggaggtggctagcctgcctgacgtgccagcagacctgcttaaactctccctaaaacggcgcagtgaccgccagcagttccttgggcatatgagaggatctctgctgaccctgcagagattagtccagctgtttcctaatgacacctctttgaaaaatgacctcggggtgggatatcttttaatcggagacaacgacaatgctaagaaagtgtacgaagaggtgctttctgtgacacccaatgatggtttcgcaaaggtacactatggctttattttgaaagcccagaacaagattgctgaatctattccctatctgaaggagggaattgagtccggagaccctgggaccgacgacgggaggttctactttcacctcggggatgccatgcagcgagttggcaataaggaagcttataagtggtacgaactcgggcacaagcgcggtcactttgcatcggtttggcagcgctcattgtataatgtgaatggcctaaaggctcagccatggtggacccccaaggaaactggctacacagaacttgtcaagtccttggagcgcaactggaagcttattcgcgacgaaggactggcagtaatggacaaagcgaaagggctgtttctgccagaagatgaaaatttgagagagaaaggggattggagtcaatttaccctttggcaacagggccgcaggaatgagaacgcttgcaaaggagccccgaagacttgtacattactggagaagttcccagaaactaccgggtgtcgccgcggccaaattaaatattccattatgcatcctggcacccacgtgtggccacacactggtccaaccaactgtcggttgcggatgcatctcggtctcgttatccccaaagagggatgcaagattcggtgtgcaaatgaaacgaagacctgggaggaaggtaaggtcctgatctttgacgattcatttgagcatgaagtttggcaggacgcatcctctttccgccttattttcatcgtcgatgtgtggcaccccgagcttaccccccagcagcgtcgctctctccctgccatctag

SEQ ID NO: 108784 - DNA, 678 bp, synthetic construct
  misc_feature 1..678: note = Description of Artificial Sequence: Synthetic coding sequence
  source 1..678: mol_type = other DNA
atggccgaggacaaagagaccaagcatggtggacacaagaacggacggaagggtggtctgtccgggacttcattttttacttggttcatggtcattgcactgctgggtgtttggacatccgtagctgttgtgtggttcgaccttgtggactacgaggaagtcttggctaaggcaaaggacttcaggtataacctctcggaggttctccagggtaaattaggcatttacgatgcagatggcgatggcgatttcgacgtggatgatgccaaagtactgcttgaaggtccaagcggggttgccaaacgcaagacgaaggcaaaagttaaggaactgactaaagaagagctgaaaaaagagaaggaaaagcccgaatctagaaaagaatctaagaacgaagagagaaaaaagggtaaaaaggaggacgtccgcaaggacaagaaaatcgcggatgccgacctgtctaggaaggaatctcccaaaggcaagaaagaccgcgaaaaagagaaagtggacttagagaagagtgccaagacgaaagagaacaggaagaagtctacaaatatgaaagatgtctcttctaagatggctagccgtgataaggacgaccgtaaagaaagccgatcatctacacggtacgcccacctgaccaaggggaatacacagaaacgtaacggatag

SEQ ID NO: 108785 - DNA, 1290 bp, synthetic construct
  misc_feature 1..1290: note = Description of Artificial Sequence: Synthetic coding sequence
  source 1..1290: mol_type = other DNA
atggcccagcggaagaacgcaaagagtagtggcaactcatcgtccagcggatctgggtccggctccaccagtgccggatcctcctcccccggcgcgagaagagagaccaagcacggtggtcacaagaatgggcggaaaggtgggcttagcggaaccagtttctttacatggtttatggtgatcgcattgctcggagtctggacgagcgtagctgtagtgtggttcgacttggtcgattatgaagaggttttgggcaagctcggcatctatgatgccgatggcgacggggatttcgacgtggacgacgccaaggtgttgcttgggcttaaagagagatcgactagcgagcctgcagtgccgccagaagaggctgagccccatacagagcctgaggaacaggtgcctgttgaagccgagccccagaacattgaagacgaagctaaagaacagatccagagtctacttcatgagatggtccacgctgagcacgtagagggagaagacctccagcaggaagatggtcccacaggtgagccccagcaagaagacgacgagttcctcatggccaccgacgtcgacgaccggtttgagaccttagaacctgaagtgagccatgaagagactgaacattcatatcatgttgaagaaaccgactcctctgaacccgtggtagaagatgaacggcttcatcacgacacagacgacgtcacctaccaggtgtacgaagagcaagccgtatatgaacccctagaaaacgaaggtatcgaaatcactgaggtgacggctccccccgaggataaccccgttgaggactcacaggtaatagtggaggaggtgagcatcttcccagtggaagaacagcaagaagtgcctcctgagacaaatcgcaaaacggacgaccccgaacagaaggccaaagtgaaaaaaaagaagcctaagctgttgaacaagtttgacaagaccattaaggccgagttggatgccgctgagaaactccgcaaacgtggaaagattgaggaggccgtcaacgctttcaaagaactggtgcggaagtacccccaatccccacgagcccgctacggcaaagcccagtgcgaggatgacttggctgagaaaaggagatccaacgaagtgctgcgaggggccatcgaaacctaccaggaggtagcttcgcttcccgatgtgccagccgatttgctcaagttaagccttaagcgaagaagcgaccggcaacagttcctcgggcatatgagagggagcttgctgacactccagagactagtacaatag

SEQ ID NO: 108786 - DNA, 900 bp, synthetic construct
  misc_feature 1..900: note = Description of Artificial Sequence: Synthetic coding sequence
  source 1..900: mol_type = other DNA
atggcagaagataaggagaccaagcacgggggccacaagaatggccgcaaaggtggtcttagcggcactagcttttttacctggttcatggttatcgcactcctgggggtatggacttcagtcgctgtagtgtggttcgacctcgtggactacgaggaggtgcttgccaaggccaaggactttagatataacctgagcgaggttcttcagggaaagctggggatttacgacgccgacggggatggcgatttcgatgttgatgatgccaaggttttgctcgggctgaaggagcgcagcacctccgaaccagcagtcccgccggaggaggcagagcctcacactgagccggaagagcaagttccagtcgaagcagaaccacaaaatatagaggacgaggccaaggaacagatacagtccttgttgcacgagatggtacacgctgagcatgtcgaaggcgaagacttgcagcaggaggacgggcccaccggcgaaccccagcaggaggatgatgagttcctgatggccacagatgttgatgacagattcgaaaccctggagcccgaagtatcccacgaggagactgagcatagctaccatgtagaggagaccgtcagccaggactgtaaccaggatatggaagagatgatgagcgaacaggagaaccctgattcctctgagcccgtcgtagaggacgagcgtctgcatcacgacacggatgacgtgacatatcaggtgtatgaagagcaggcggtgtacgagcccctggaaaacgaggggattgagataaccgaggtcaccgcacccccagaggacaatcccgttgaagactcccaggtaattgtggaagaggtttccatttttccagttgaggagcaacaagaggttcctccagacacatag

SEQ ID NO: 108787 - DNA, 900 bp, synthetic construct
  misc_feature 1..900: note = Description of Artificial Sequence: Synthetic coding sequence
  source 1..900: mol_type = other DNA
atggccgaagacaaagaaacgaaacatggcgggcacaaaaacggacggaaaggtgggctctctgggacatcttttttcacatggtttatggtgatcgccctactcggagtgtggacctcagtcgctgttgtgtggttcgacctcgtcgactacgaggaggtactggccaaggccaaagatttcagatacaacttgagcgaggtgcttcaaggcaagctcggtatttatgacgctgatggggacggtgacttcgatgtggacgatgccaaagtgctactgggtcttaaagagcgaagcaccagtgagcccgctgtccctcccgaggaggcggaaccacacactgagcctgaggagcaagtgccagtcgaggccgagccgcaaaatattgaggatgaggcgaaggagcaaatccagagcttattgcatgagatggtacatgcagaacatgtggagggggaggaccttcagcaagaggatggccccactggggaaccccagcaggaggacgatgagtttttgatggcgactgatgtggatgacagatttgagaccctggagcctgaggtcagtcacgaggagactgagcactcgtaccacgtggaagagaccgtgagccaggactgtaaccaggacatggaggaaatgatgtcagagcaagagaatccagactccagcgaaccagtggttgaggatgaacgtctgcatcacgatacagacgacgtaacttaccaggtgtatgaagaacaggctgtgtatgagcctctagagaatgagggcatcgagatcaccgaggtgacagctcccccagaagataaccccgtcgaggactctcaggtgatcgtggaagaagtaagcatcttcccagtggaagagcaacaggaagtgcccccagacacatag

SEQ ID NO: 108788 - DNA, 897 bp, synthetic construct
  misc_feature 1..897: note = Description of Artificial Sequence: Synthetic coding sequence
  source 1..897: mol_type = other DNA
atggccgaagataaggagaccaagcacggggggcacaagaatggccggaaagggggactgtcgggaacaagcttctttacttggttcatggtgatagctctcctgggcgtgtggaccagtgttgctgtagtttggttcgatttggtggactacgaggaggtgctggccaaagcgaaggactttcgatacaatcttagtgaggtgctgcagggaaagctcggaatttacgatgcggatggggatggagactttgacgttgacgacgctaaggtcctgcttgggttgaaagaacggagtacttctgagcccgctgtgcccccagaagaggcagaaccgcataccgagcccgaggaacaagtgcccgtagaggctgaaccacaaaatatcgaagatgaagcaaaggagcagatacaatccctactgcacgagatggtgcatgccgaacatgtagagggtgaggacctgcagcaggaggacggccccacgggagagccgcaacaggaagatgatgagtttctgatggcgactgacgtcgacgaccgattcgaaaccttggagcctgaagtcagccatgaggaaaccgagcattcttatcacgtggaagaaacagtctcgcaagattgcaaccaggatatggaagagatgatgtctgagcaagaaaaccctgactcctcggaacccgtcgttgaggatgagcggctccaccacgatactgatgatgtcacctaccaggtgtatgaagaacaggtatacgaacctttagaaaacgaagggatcgagattactgaggtgacagccccaccagaggacaatcctgtggaagattcacaggtgatagtggaagaggtgtccattttcccagtggaggaacaacaggaagtgccgcctgacacctag

SEQ ID NO: 108789 - DNA, 813 bp, synthetic construct
  misc_feature 1..813: note = Description of Artificial Sequence: Synthetic coding sequence
  source 1..813: mol_type = other DNA
atggctcagcgtaagaacgctaagtcaagcgggaattcgtcctcttctggatctggcagtggttcaacaagcgcaggatcctcctcacccggagccagacgggaaaccaagcacgggggccataaaaatgggcgaaagggaggcctaagcggcacgtcgttcttcacttggttcatggtaattgcgcttctcggcgtgtggacaagcgtagccgtggtctggtttgaccttgtcgattatgaagaagttctgggaaagttaggtatctacgacgctgacggggatggggactttgacgtagacgatgccaaagtgctgctcggccttaaggagagaagcacaagtgagccagcagtcccacctgaagaggcagaacctcacacagagccagaggaacaagtgcccgttgaagcagagccccagaacattgaggatgaagcgaaggagcagatccagtccttgctacatgagatggtccatgccgaacacgagactgagcactcttatcacgtggaggagaccgtgagtcaagactgcaatcaagacatggaggaaatgatgagcgagcaggagaaccctgattcctccgagcctgtggtagaggacgaaaggctgcatcatgatactgatgacgtgacgtaccaggtgtacgaggagcaggctgtgtatgagccactcgagaatgaaggaatcgaaatcaccgaggtgacagcaccgccggaggacaatccagtggaggacagccaggtaatcgtggaagaagtctccattttccctgtggaggagcagcaggaagtcccgccggacacgtag

SEQ ID NO: 108790 - DNA, 633 bp, synthetic construct
  misc_feature 1..633: note = Description of Artificial Sequence: Synthetic coding sequence
  source 1..633: mol_type = other DNA
atggcagaggacaaggaaactaaacacgggggacacaagaacgggagaaaaggaggcctcagcggcacatctttctttacatggtttatggtcatcgccttgcttggcgtttggacgtctgtggccgtggtttggttcgacctggtggattacgaagaggtgctgggaaaactggggatctacgacgcagacggggacggtgatttcgacgtggatgatgccaaggttctgctggaaggccctagcggggttgccaagcgcaagaccaaagccaaagttaaggagctaaccaaagaagaactcaagaaagagaaagaaaaacccgagtcgcggaaagagtcaaaaaatgaggaaagaaaaaaaggtaagaaggaagacgtgcgtaaggacaagaaaattgcggacgccgatctctctaggaaagagtcgccaaagggcaaaaaggaccgagaaaaggaaaaagtggatctcgagaagagcgcaaagacgaaggagaatcggaagaagtcgactaacatgaaagacgtttctagtaaaatggcctctagggataaagacgacaggaaggaatccaggagctcaacccgctacgcccacctgactaaaggcaatacccagaagagaaacggttag

SEQ ID NO: 108791 - DNA, 771 bp, synthetic construct
  misc_feature 1..771: note = Description of Artificial Sequence: Synthetic coding sequence
  source 1..771: mol_type = other DNA
atggccgaggataaagagacaaaacatggggggcacaagaatgggaggaagggagggctctctggcacaagtttttttacttggtttatggtgatcgccttgctgggcgtctggacctccgtcgctgtcgtttggttcgacctggtcgattatgaggaagtcttagccaaggccaaggatttccgatataacctcagcgaagtattacaaggtaagttgggtatatatgacgcagacggcgacggtgatttcgatgtggacgatgccaaagtgcttctgggcctgaaggagcgcagcacttccgaacctgcagttccaccggaggaggccgaaccacatacagaacctgaagagcaggtgcctgtagaggcagaaccccagaatatcgaagacgaggccaaggagcagatccaaagcctccttcacgagatggtgcatgcagagcacgaaaccgaacatagttatcacgtggaggagaccgtgtcacaagattgtaaccaggacatggaggaaatgatgtcagagcaggaaaatcctgacagcagtgagcctgtggtggaggatgaacggctgcatcacgataccgacgacgtaacctatcaagtctatgaggagcaggcggtttatgaaccactcgagaatgagggaatagagatcacagaggtcacggctccacccgaggacaaccccgtagaggattcacaggttatagtcgaagaagtgtctatttttccagtggaggaacagcaggaggtacctcccgatacgtag

SEQ ID NO: 108792 - DNA, 2190 bp, synthetic construct
  misc_feature 1..2190: note = Description of Artificial Sequence: Synthetic coding sequence
  source 1..2190: mol_type = other DNA
atggcagaagacaaagagaccaagcacggcggccacaagaacggccggaagggagggttgagcggtacctcattcttcacctggtttatggtaattgcattgctgggcgtgtggacatcagtggctgttgtatggttcgatcttgtcgactacgaagaggttcttggcaagctagggatatatgacgcagatggcgacggcgacttcgacgtagacgatgcaaaggtcctcctgggactcaaggaaagaagcacaagcgaaccagccgtaccacctgaagaggccgagcctcacaccgaacctgaggagcaggtgcccgtagaggcagagccgcaaaatatcgaagatgaagccaaagagcagatccagagcctattgcacgaaatggtacatgccgagcacgtggagggggaagatttacaacaagaggacgggcccacaggagaaccgcaacaggaagatgacgagtttctcatggctaccgacgtggacgaccgcttcgaaacccttgagcctgaagtgtcccatgaagagactgaacattcgtaccatgtggaagagactgtttcccaggactgcaatcaggatatggaggagatgatgtctgagcaggagaatcccgactctagtgaaccagtcgtcgaggacgagcgtctgcatcatgatactgatgacgtgacctaccaggtgtacgaggaacaggccgtctacgagcctcttgaaaatgaaggtatcgagatcacagaggtaacagctccccccgaagacaaccccgtagaagattcacaagtgatcgtcgaagaagtctcaatctttcccgtagaggaacagcaggaggtccctccagagactaacaggaagacagatgacccagaacagaaagccaaagtcaagaagaaaaaacccaagctgttgaataaatttgacaagactattaaggctgagctagatgccgcagagaagctgcggaagcgcggtaagatcgaggaggccgtgaacgcgttcaaagaattggtccgaaagtatccacagtctccccgggcccggtatgggaaggcacagtgcgaggatgatcttgcggaaaaaagaagatctaacgaggtcttacgcggggcaatcgagacctaccaagaggtggcctccctcccagacgtacctgcggatttactaaagctctccttgaagagacggtctgatcggcaacagtttttaggccacatgcgaggcagcctcctaaccttacaacgcctggtgcagttatttccaaacgacactagcctgaagaatgacctgggcgtgggctatcttctgataggagataacgacaacgctaaaaaggtttacgaagaggtgctttctgtgacacctaacgacgggtttgcaaaggtccattacggattcattttgaaggcccaaaataaaatcgcagagagcattccatacctgaaagagggaattgaaagcggggatccaggaacagacgatggtaggttctacttccacctgggcgatgcaatgcaaagagtgggaaataaggaggcctataaatggtatgaactgggccacaaaagaggacattttgccagcgtgtggcagagatctctgtataacgtgaacggactgaaggcccagccctggtggacacccaaggagaccggatatactgaactcgttaaaagcttagagcgcaattggaaacttataagggatgaggggctggccgttatggataaagctaaaggcctcttcctgccagaggatgagaatcttcgagaaaagggcgactggagtcagttcacgctttggcagcaggggcggcgcaatgaaaacgcatgtaaaggcgctcccaaaacatgtacattgctggagaaattcccagaaacgaccggatgtcggagaggacagatcaaatattctatcatgcacccaggcacccacgtgtggcctcatactggccccactaattgccgacttcggatgcacctgggacttgtgatcccaaaggaagggtgtaaaattcggtgtgccaatgagacaaagacgtgggaggaaggaaaagtactaatttttgatgactcattcgaacatgaggtctggcaggatgcatcttctttccggctcatctttattgttgacgtctggcatccggagctgacccctcagcaacgccggagtcttccagcaatctag

SEQ ID NO: 108793 - DNA, 1032 bp, synthetic construct
  misc_feature 1..1032: note = Description of Artificial Sequence: Synthetic coding sequence
  source 1..1032: mol_type = other DNA
atggggtccccgggtgcttctctgggcatcaaaaaagcattgcagtctgagcaggccactgcccttccggcgagcgcccccgccgtctcacaacctaccgcccctgctccaagctgtttacctaaggccggccaggtgattccgacactcttgcgagaggcaccattctcgtccgttattgctcccaccctactttgcggctttctttttctggcgtgggtcgcagccgaagtgcccgaggaatcgtcccggatggccggaagcggtgcccggagcgaggagggacgccgacaacacgcctttgtaccggagccattcgacggagccaacgttgtgccaaatctatggctgcattctttcgaagttataaacgacctgaatcactgggatcatatcactaaactgcggtttcttaaagaatcattaagaggtgaggcccttggcgtatataatcggctgtctccgcaagaccagggagattatggaactgttaaggaagcactcctaaaagccttcggggtgcctggtgcagctccgagccatctgcctaaggaaatagtttttgccaactcaatgggcaaggggtattatcttaagggcaaaatcggtaaggtgccggtcaggttcttagtagattcaggcgcacaagtgagcgtggttcatcccaacctgtgggaggaggtgacagacggggatctcgacacattgcagccttttgaaaatgtcgtcaaagtggccaatggggcagaaatgaaaatactcggcgtgtgggacaccgccgtctccctcggcaaactcaagctcaaagctcagtttctggttgctaacgcaagtgcagaggaggcaattatcgggaccgatgtcctgcaggatcataatgccatcctggacttcgaacaccgcacatgcactctgaaaggaaagaagtttcgactgctgccagtgggaggatcactggaggatgaatttgatttggagctcatcgaggaagacccatcaagcgaagaggggagacaggaattgagccactag

SEQ ID NO: 108794 - DNA, 960 bp, synthetic construct
  misc_feature 1..960: note = Description of Artificial Sequence: Synthetic coding sequence
  source 1..960: mol_type = other DNA
atgtgttctcttcccgttccccgtgaaccgttgaggcgtgtggctgtcacgggcgggacacacgggaacgagatgtctggggtgtatctcgcacgccactggctgcacgcaccagccgagctacagcgggcctccttcagtgctgtccctgtcttggcgaatccggcggctacctccggatgtaggcgatatgtggatcatgacctgaacaggacatttaccagcagctttcttaattccaggcccactccagatgacccctacgaagtgacacgtgcacgcgagctcaatcagctcctcggcccaaaggcttctgggcaggctttcgatttcgttcttgaccttcataacactacagccaacatgggtacatgtttaatcgccaagagtagccacgaggtcttcgccatgcacctgtgcagacacttgcagcttcagtaccctgagttaagttgtcaagttttcctgtaccagagaagcggagaagaatcttataacttggattcagtggctaaaaacggcctggggctcgaactgggcccccagccccagggcgtgctccgggcagacatattctcaagaatgaggaccttggttgctaccgttttggattttatcgagctgtttaatcagggtactgcattccccgccttcgagatggaggcctacaggcctgtgggtgtagtggattttccacgcaccgaggcgggacatcttgctggtacagtacacccacagttacaagacagagacttccaacctctgcagcccggtgcccctatcttccaaatgttctcaggagaggatctcctgtatgaaggagaaagcacagtatacccggtgtttattaacgaggctgcctattacgagaagggggttgccttcgtccagaccgaaaaatttacattcaccgtccccgccatgcctgccctgactcccgcacccagtccagcttcatag

SEQ ID NO: 108795 - DNA, 1041 bp, synthetic construct
  misc_feature 1..1041: note = Description of Artificial Sequence: Synthetic coding sequence
  source 1..1041: mol_type = other DNA
atggccagaaagagtaatctgccagtgcttttagttccattcctgctgtgtcaggctctggttcggtgtagttctcctttgccacttgtggtcaatacatggccatttaaaaacgccacagaggctgcatggagggcccttgccagtggtggatctgcattagacgccgttgagtctggctgtgccatgtgcgagcgggaacagtgtgatggctccgtgggcttcggaggcagcccagacgagctcggcgagacaactctggatgctatgatcatggacggaaccacaatggacgttggtgccgttggagatctccggagaatcaagaatgctatcggagttgctagaaaagtgctcgaacatacgacacatactctactggtgggcgagagtgccaccaccttcgcacagtccatggggtttatcaatgaggatctttcgacaaccgcgtcccaggctctgcattctgactggcttgctagaaactgtcagcccaactattggagaaatgtcataccagaccccagcaagtattgtggcccttataaacctcccggcatcctaaagcaggacatccccattcataaagagaccgaagatgacagaggacatgacactatcggaatggtggttatccacaagaccggacatatcgcagctggcaccagtactaatggcattaaattcaaaatacatggacgcgtgggggactcccccatcccaggggccggtgcctacgccgatgacactgctggagctgccgccgccacaggcaacggggatatcttgatgaggttcttgccgagctaccaggcagtggaatacatgcgtcgcggcgaggacccaaccattgcttgtcagaaggtgatctccagaatccagaagcactttcccgagttcttcggcgccgtgatttgcgccaatgtgaccgggtcttatggggccgcctgcaacaaactgtcgacgttcacccagttttcctttatggtgtataactcagaaaagaatcagccaaccgaggaaaaggttgactgcatctag

SEQ ID NO: 108796 - DNA, 573 bp, synthetic construct
  misc_feature 1..573: note = Description of Artificial Sequence: Synthetic coding sequence
  source 1..573: mol_type = other DNA
atggagtcccaacggctggaactgattcggctcatggaaacccaggaggaggatgttgttctcctcaccgcaggcgagcataacaaggcctgttcactgttgggcaagctccgcctggaatgcgctgaccttctggagacaagaggagtggtgttacgggatccaacgcttttcagttttctctgggtggttgacttcccactattcttgcccaaagaagagaaccctagggagttggagagcgctcaccaccccttcaccgcaccgcacccatccgacatacatttactgtacaccgagcccaagaaggaagacgtcaagatgctctctcatctgctgcaggcactggactatggcgcccctccccacggcggtatcgcacttggtcttgacaggcttatctgtctggtgaccggcagccctagcattcgagatgttatcgcctttccaaagagttttcgtggtcacgatttgatgagtaacacccccgactccgtgccccctgaggaacttaagccttaccatattagggtgagcaaacctacagacagcaaggcagagagagcgcattag

SEQ ID NO: 108797 - DNA, 1938 bp, synthetic construct
  misc_feature 1..1938: note = Description of Artificial Sequence: Synthetic coding sequence
  source 1..1938: mol_type = other DNA
atgtacttcccgtcctggctgagtcaattatatagaggcttatcacggccaataagaaggaccacccaaccaatctggggttctctgtatcgctccctccttcagtccagccagcggcgcatcccagaattcagttcatttgtggtgagaaccaacacatgtggagagttacgatctagccatctcggtcaggaggtgacgctgtgcgggtggatccagtaccgccggcagaacacattcttggtgctgcgcgatttcgatggcttggtccaagtaatcatacctcaggacgagtctgctgcgtcggtcaagaaaatcttgtgcgaggctccagtggagtccgtggtccaggtgtccggcacggtgattagcagaccagcggggcaagagaatccaaaaatgccaacgggagaaatcgagatcaaagtcaaaactgccgagctccttaacgcgtgtaaaaaacttccttttgagatcaaaaacttcgtgaaaaaaacagaagccctgcggctgcagtatagatacttggatttgcgctcgtttcagatgcagtacaaccttaggttacggtctcaaatggtcatgaagatgcgagaatatctgtgtaatctccacggatttgtagatatcgagaccccaacactgtttaagagaacccccggaggagcaaaagaatttctggttccaagtagagagcccggaaagttttatagccttccccaaagcccccagcagtttaaacaactgctaatggttggcggtctggataggtactttcaggtggccagatgttatagagatgaaggatcaagacctgatcggcagcctgagttcacacagatcgacattgaaatgtcattcgtagaccagacaggaatccaatccttgatcgagggcctcctgcagtattcttggcctaacgacaaggatccagtggtcgtgccgtttcctaccatgacttttgcagaagtgctggcaacctacggtaccgacaaacccgatacaaggttcggtatgaagataatcgacatttctgatgtgtttcgcaacacagagattggcttcctacaggatgcactctcaaaacctcatggtaccgtgaaggccatttgtatcccagagggcgctaaatacttgaaacgcaaggacatcgaatctattagaaactttgcagcagatcatttcaaccaggagatcctgcccgtgtttctcaacgcaaaccgtaactggaactctccggttgccaacttcattatggaatctcagcgcctcgagcttataaggttgatggagacccaggaggaagatgttgtgctactcacagcaggtgagcataacaaggcctgctccctgctggggaaactgaggctggagtgcgcagacctgctcgagacacgcggagtcgtcctgcgagatcctacactgttttcattcctgtgggttgtggatttccctctgttcttgccaaaggaagagaatcccagagaactggaatccgctcaccacccattcaccgctccgcatccaagtgatattcatctgctctatactgagcctaaaaaagctcgcagccagcattatgacctggtgttgaatggtaacgaaattggtggaggctctatccggatacataatgctgaattacagcgctatatactggcaacactgctcaaagaagacgtcaaaatgctgtcacatctgcttcaagccctggattacggtgccccccctcacggaggcattgccctgggtctggatcggttaatctgcctggtcaccggaagcccttctattagggatgtaatcgcatttcctaaatcttttagagggcatgatctgatgtccaatacacccgattccgtgccacctgaagagctgaaaccctatcacatcagggtgagcaagccaaccgattcgaaagccgaaagagcccattag

SEQ ID NO: 108798 - DNA, 1143 bp, synthetic construct
  misc_feature 1..1143: note = Description of Artificial Sequence: Synthetic coding sequence
  source 1..1143: mol_type = other DNA
atgaaagaatacgtgctcctgctgtttctcgcgctctgctcagccaaaccgttcttcagcccctctcacatagctctaaaaaacatgatgctcaaggacatggaggatactgatgacgacgacgatgatgacgacgatgacgacgatgacgatgaggacaattctctgtttcctactcgggagcctcgcagccatttttttcccttcgatctattccctatgtgtcccttcgggtgccaatgttactcccgcgtcgtgcattgctccgacctggggctgacgtccgtgccaacaaacatcccgtttgacaccaggatgctggacttgcagaacaacaagatcaaggaaatcaaggaaaacgatttcaagggactcacctctctctacggcctcatcttgaataacaacaaactgactaagatccaccccaaggctttcctcacgacaaaaaaactgcggcggctgtaccttagtcataaccagctgtccgagatacctttgaaccttcccaagtctctcgctgagttgcgtattcatgaaaacaaggtgaagaaaatccaaaaagatacctttaaaggaatgaatgctctgcatgtccttgagatgagcgccaatcccctggacaacaacggaatcgagcccggcgcatttgaaggagttaccgttttccatatacggattgcagaggctaagttgaccagtgttccgaagggactgccaccaaccctactcgaactccacctggactacaacaagatttccactgttgagctggaagactttaagcgatacaaggagctgcagaggctcggcctgggaaataacaagatcacagacatcgagaatggctcattggccaatatccctcgcgtgagagagatacatctagaaaataataaattaaagaagattccttccggcctcccagagctgaagtatctacagataatcttcctacactccaattctatcgccagggttggagtgaatgatttctgtcccaccgtccccaagatgaagaaatccctctacagcgccatctcattattcaacaaccccgtaaaatactgggaaatgcagcccgctaccttccggtgtgtgctcagtaggatgtcggtgcagctcgggaattttggtatgtag

SEQ ID NO: 108799 - DNA, 732 bp, synthetic construct
  misc_feature 1..732: note = Description of Artificial Sequence: Synthetic coding sequence
  source 1..732: mol_type = other DNA
atgaaagagtatgtgctcctactgtttcttgccctgtgctccgccaagcccttcttcagtccatctcacatcgccctgaaaaatatgatgctgaaggacatggaggataccgacgacgatgacgatgacgacgacgacgacgacgacgatgatgaagataattcacttttcccgactagagaaccccgctcccatttttttccttttgacctctttcctatgtgtccttttgggtgccaatgttattctcgggtggtacactgctcagatctgggattgacctcagttcctacaaacatcccgttcgacacgcggatgctggatctgcagaataataaaataaaggaaattaaggagaatgacttcaaagggctcacatccctttatggactcatcttgaacaataacaagcttaccaagatccaccctaaggcttttctaaccacaaagaagctgagaagactttatctcagccataaccagctttctgagatacctctgaatctacctaagtcactggcagagctgaggatccacgaaaacaaagttaaaaagatacagaaagacacattcaaaggcatgaacgctctgcatgtcctggagatgtccgctaacccactggataataacggcattgagcccggtgcattcgaaggagtcacagtatttcatatccggatcgcagaggcaaaactcactagcgttcctaaggtgaatctgccccagttctag

SEQ ID NO: 108800 - DNA, 243 bp, synthetic construct
  misc_feature 1..243: note = Description of Artificial Sequence: Synthetic coding sequence
  source 1..243: mol_type = other DNA
atgatgctgaaggacatggaggacaccgacgatgatgatgatgacgacgatgacgatgatgatgacgacgaggacaatagtttgtttcccaccagagaaccacgcagccacttctttcctttcgacctgtttcccatgtgcccatttggatgtcagtgctattcccgggttgtccattgctcagatctaggcctgactagtgtgcctacgaacatacctctaatcctggaatgccttatctag

SEQ ID NO: 108801 - DNA, 732 bp, synthetic construct
  misc_feature 1..732: note = Description of Artificial Sequence: Synthetic coding sequence
  source 1..732: mol_type = other DNA
atgaaggagtatgtccttctgctgttcttagctttgtgctctgctaaaccttttttctcccctagccacatcgccctgaaaaacatgatgttgaaagacatggaagatacagacgacgatgacgatgatgacgacgacgacgacgacgatgatgaggataactccctgttccccaccagggagccgaggtctcatttctttccctttgaccttttccccatgtgcccattcggttgccagtgttacagccgggttgtgcactgtagcgatctaggactcacttctgtccccactaatataccatttgatactcggatgctggatctacagaacaataagataaaggagatcaaagaaaatgatttcaaaggcctgaccagtctgtatggacttatcctcaacaataacaaactgacaaaaatccacccaaaggcgtttttaacgacaaaaaaactgcgcagactctacctcagccacaaccagctaagcgaaatccccctgaatcttccaaaaagtttagctgaactgcgaattcatgaaaacaaggtcaagaagattcagaaggacactttcaaaggtatgaacgcattgcacgttcttgaaatgtcagcaaaccctttggacaacaacggaatcgaacccggggcttttgaaggggtaacagtcttccatatccgaatcgcagaggcgaaactcacttctgtcccaaaggacaatttgcctagcttttag

SEQ ID NO: 108802 - DNA, 3885 bp, synthetic construct
  misc_feature 1..3885: note = Description of Artificial Sequence: Synthetic coding sequence
  source 1..3885: mol_type = other DNA
atggccctggctggcttatgtgcgttgctggcctgttgttggggccctgctgccgtgctggccactgctgcgggcgacgttgatccgtccaaagagctcgagtgcaaacttaaatctatcaccgtgtctgcactgcccttcctgcgcgaaaatgatctgtcaataatgcattcgccttcagcctccgagccaaagctcctgttctcagtgcgcaacgatttcccaggcgaaatggtggtggtggacgatttggaaaacacagagcttccgtatttcgtgttggaaatttccgggaatacagaagacatacctctggtgcgatggcgccaacaatggctggaaaacggtacgctgctgttccatatccaccatcaggacggggcgccttccctcccgggtcaggaccctactgaagagcctcagcatgagagtgctgaagaagaactgagaatactgcacatcagcgtgatgggcggcatgatcgctttgctgctctctattctgtgccttgtcatgatactgtatacccgacgccgttggtgtaagagacgccgcgtgccacagccccagaaaagtgcctccgctgaagccgctaacgagattcactacatacccagcgttctcattggcggacatggacgggagagcctacgaaacgccagagtgcaggggcacaacagctccggcacactgagcataagagaaacaccgatcctcgatgggtatgaatacgatatcaccgacctccgacaccaccttcaaagagaatgtatgaacgggggcgaagattttgcctcgcaagtcacgcgcaccctcgacagcctgcagggatgtaatgaaaagtccgggatggacctcactcctggctcagataacgccaagttgtcattgatgaacaagtataaggataatattattgctacatctcccgttgattccaatcaccagcaggccacattgctgtcacacacttccagctcccagagaaagagaatcaataataaggccagggctggctccgcctttctgaaccctgaaggggactcagggacggaagccgagaacgacccacaattgacattttacaccgacccctccagatccaggaggcggtctcgcgtgggcagcccgagaagcccagtgaacaaaaccaccctaacgctgatctcaataactagttgcgttattggcctcgtgtgttccagtcatgttaattgcccgctggtggttaagattaccctgcatgtgcctgaacatctcattgccgatgggagcaggtttattctcttagagggctcccagctggacgcctccgattggctgaatcctgctcaggtggtgttgttctcacaacagaacagcagtggaccatgggcgatggacctctgtgccaggcggctgttggatccttgtgaacaccagtgcgaccccgagactggcgagtgtctctgttacgagggctacatgaaggacccagtgcacaagcatctgtgcatccgaaacgagtggggtaccaaccaggggccctggccgtatacaatcttccagagggggttcgaccttgtactgggagagcagccgtctgataagatcttccgctttacatacactctgggcgagggcatgtggctgcccttaagcaaatctttcgtcatcccccccgctgagctcgccattaatccttctgccaagtgcaaaaccgatatgaccgtgatggaggacgctgttgaagtcagagaggagctaatgacgagtagctcgttcgattccctcgaggtcttgcttgatagctttggaccagtgcgagactgcagtaaagataatggaggttgtagcaagaatttcagatgcatttcagatcgaaaactagatagcaccggatgcgtatgcccaagcggccttagtccaatgaaagactcatctggatgctatgatcgccacatcggcgtggactgctctgatggtttcaacgggggctgcgagcaactgtgcctccagcagatggcccccttcccagatgaccccaccctgtataacatcctcatgttttgtggatgtatcgaggactataagctgggcgtggatggacgcagctgccagttgatcactgagacgtgccctgagggaagcgactgtggtgaatccagggagcttccaatgaaccaaaccctttttggcgagatgttttttgggtacaataatcactccaaagaggtagccgccggacaggttttgaaaggaacatttcgacaaaacaatttcgcacggggcctggatcagcagctccctgatggtctggtagtggctaccgtgccactggagaaccagtgcctggaagaaatcagtgaacccactcccgacccagattttctgactggcatggtcaatttttcagaggtctccggctatcctgttctgcaacactggaaagtaagatcagtgatgtaccacattaaattaaatcaggtggccataagccaggcgctcagcaacgcgttgcattcactagacggagccacttcgcgggccgacttcgttgctctgttggatcagttcggcaaccactacattcaagaagcgatatacggatttgaggagagttgttctatttggtaccctaataaacaggtacagagaagattgtggctggagtacgaggatatttctaaaggtaatagtccaagtgatgagagcgaagagagggaacgcgaccccaaggtcctgaccttccctgaatacatcacatccctgtcagactccggtaccaagcacatggccgcgggcgtcagaatggagtgtcactccaaaggccgatgtccttcatcctgccctctgtgccatgtaacgtcctcacctgatacaccagctgaacccgtgctgctggaggtgacaaaggcagctcctatttatgagctcgtgaccaacaaccaaacacaaagactgttacaggaagctacaatgtcctccctatggtgcagcggaacaggcgatgtgatcgaagattggtgccgatgtgattccactgcatttggtgccgatggattgcccacttgcgcccctcttcctcagccagtgctgcgattgtcgactgtgcacgagccctctagtacactggtggtcctggagtgggagcactcagagccaccaattggagtgcagattgtagactacttgctgagacaggagaaagtgacggaccgcatggatcatagcaaagttgagacggagactgtgctctcttttgtcgacgacatcatctccggcgcaaaaagtccttgcgccatgcctagtcaggtcccagacaaacagctcactacaattagtctgatcatacgttgcttggaaccggatacgatctatatgttcactctttggggggtggacaacacggggcgaaggtcgaggccttcggatgtcatcgttaagactccttgtccagtggttgacgatgttaaggcccaggaaattgccgataaaatctataatctattcaacgggtacacaagcggcaaggaacagcagacagcatacaacacccttttggacctgggctcacccacgctacacagagtgctataccactacaaccagcactatgagagcttcggggagttcacctggcggtgcgaggacgaacttgggccccgcaaagcgggtttgatacttagccagctgggggatctttcatcgtggtgcaacggcctcctgcaggaacctaagatctcgctgcggcggagttctcttaagtacctgggctgtcgctattccgagattaagccttacggactggactgggcggaacttagccgcgatctgcgtaagacttgtgaggagcagaccttatcaatcccatacaacgactatggagacagcaaagagatttag

SEQ ID NO: 108803 - DNA, 3909 bp, synthetic construct
  misc_feature 1..3909: note = Description of Artificial Sequence: Synthetic coding sequence
  source 1..3909: mol_type = other DNA
atggcgttggccgggctgtgcgcactactggcttgttgctggggaccggctgctgtactggctactgccgcaggggacgtggacccaagtaaagagctggagtgtaagcttaaatccattacagtctctgctttgccatttcttagagagaacgatttgtcaatcatgcactctccgtccgcctctgagcctaaactcctgtttagcgtgcggaacgactttccaggagaaatggttgtcgtagatgatcttgagaatacagagcttccttatttcgtgctggaaatatctgggaacacagaggacatccccctcgttcgttggcgccagcaatggcttgagaacggtaccctgctgtttcacatccatcaccaagacggtgccccttcgctacctgggcaggaccccaccgaggagccccagcatgagagcgcggaggaggagttaagaatcctgcacattagcgtgatgggaggcatgatcgccctgctgcttagtatcctctgcctagtcatgatcttatacacaagacgccgatggtgcaaaagaaggcgggtccctcaaccacagaaatctgccagcgccgaagctgccaacgagatccactacatcccctcagtccttataggtgggcacgggcgagaatcacttaggaacgcccgtgttcaaggccataattcgtccggaaccctgagcattcgggaaactcccatcctggacggctacgaatacgacatcactgatctgagacatcacttacaacgagagtgtatgaacggaggagaagacttcgcatcacaagtcacaaggactctcgactcactgcaaggatgtaatgagaaatccgggatggatctgacacccggatcggacaacgccaaactgtccctcatgaacaagtacaaggacaatatcatagcaacaagcccggtcgattccaatcaccaacaagccacactgttgagccatactagtagctctcaaagaaagaggatcaacaacaaggctcgtgccgggtccgcattcctcaacccagaaggcgatagcggaaccgaggccgaaaatgacccgcagttgactttctacaccgatccttccagaagccgaaggcggtcacgcgtaggctcccctcggagtcccgtgaataagactaccctaactctgatatccatcaccagctgcgtcatcggtttggtatgcagctcacacgtgaactgtccacttgtggtgaagataaccctgcacgtgccagagcatctgatcgcggatggatcccggtttatactcctcgaaggctcacaacttgacgcttccgactggttgaaccccgcccaggtagtcttattcagtcagcagaacagctccggtccatgggcgatggacttgtgcgctcggaggcttcttgacccctgcgagcaccagtgcgacccagaaacgggccggcgcgaacacagagcagctggagaatgtctgtgttatgaagggtacatgaaggatcccgttcacaagcacctgtgcatacgtaacgagtggggaaccaatcaagggccttggccctataccattttccaacggggatttgacttggtgctgggggaacagccctctgacaaaatctttcggtttacgtatactttaggtgaaggaatgtggcttcccctatccaagtcatttgtgatacctcctgcagagctagccattaatcctagcgcaaaatgtaagactgacatgacagtcatggaagatgccgttgaggtcagagaagagctaatgaccagtagctcatttgactccctcgaggtgcttcttgattccttcggtccggtccgcgactgtagcaaagacaacggtggttgctctaaaaattttcggtgcatttcagaccggaaactggacagcacgggctgcgtatgcccaagtggactgtcaccaatgaaggattcctccggctgttatgataggcacattggcgttgattgttcagatggcttcaatggtggctgcgaacaactctgcctacagcagatggctccttttcctgacgatcccaccttatacaatattctgatgttttgcggatgtatcgaggattacaagctgggggtggatggacgaagctgccaactgatcaccgaaacctgcccggaaggctctgattgtggtgaatcccgcgaactgcctatgaaccagacgctattcggggaaatgttcttcggttacaacaatcacagtaaagaagtcgcagcggggcaggtgttaaagggaacttttcgccagaataatttcgcaagaggacttgaccagcagcttcccgatggactggtggtcgctaccgtcccgcttgaaaaccagtgtctggaggaaattagcgagcctacacctgacccagatttcctgaccgggatggttaatttctccgaagtgtccggctaccctgtgttgcagcactggaaggtgcggtctgtgatgtaccacataaaattaaaccaggttgccatcagtcaagctcttagtaatgctctgcacagtctcgacggagcaacttcacgggctgattttgtggccctcctcgaccagttcggcaatcactacattcaggaagccatctacgggttcgaggagtcctgctcgatatggtaccccaataaacaagtgcagcggcgactttggctggaatacgaagatataagcaaaggcaattcaccaagtgatgagtctgaagaacgcgagagggacccgaaggtcctcactttccctgaatacattacgagcctgagcgactctggcacaaaacatatggctgcaggagtccggatggagtgtcatagcaaagggcgctgtccttcttcatgccccctctgtcatgtaacttcaagccctgatacccctgccgaaccagttttgcttgaggtgaccaaggcagcacctatttatgaactggtgaccaacaatcagacccaaaggctgctccaggaagccacaatgtcttctctgtggtgtagtggtactggcgacgtgatagaggattggtgtcgatgcgactctacggccttcggtgccgacggcttaccaacatgcgcaccgcttccacagcctgtgttgcgtctgagcacagtgcacgagccctccagtacccttgtggtgctggagtgggagcattctgagcctccgattggggtgcaaatagtggactaccttttaagacaggaaaaggtaaccgatagaatggatcacagtaaggtcgaaactgagacagtgctgtcctttgtggacgatattatctccggagcaaagagcccttgtgcaatgccctcacaagtgcctgacaagcagcttactaccataagcctcatcatccgatgccttgaaccagatacaatctatatgttcactttgtggggcgtcgataacacgggaaggcgatctcgtccctccgatgtgattgtgaaaactccttgtccagttgttgatgacgtaaaggcccaagagattgcagacaaaatctacaatctttttaatggctacacatctgggaaggaacagcagaccgcatacaatactctgctggacctggggagcccaacactgcaccgtgttctctatcactataatcaacactacgagtcttttggtgagtttacttggaggtgtgaggacgagctgggaccaaggaaagcagggctgatcctgagccagctcggagacctgtcctcttggtgtaatggtctccttcaggaacctaaaatttcccttaggagaagcagccttaagtatctgggttgtcggtacagtgaaataaagccttacggattagattgggccgagctttcaagagacctgcgtaagacctgcgaagaacagaccctgtctattccctacaacgactacggcgattccaaagaaatttag

SEQ ID NO: 108804 - DNA, 3651 bp, synthetic construct
  misc_feature 1..3651: note = Description of Artificial Sequence: Synthetic coding sequence
  source 1..3651: mol_type = other DNA
atggctttagcagggctgtgcgctctgctagcctgttgctggggtcctgccgccgtcctggcgaccgctgcaggcgatgtcgacccttctaaggaactagagtgtaagctgaaatccatcaccgtgtcagcactcccttttctgcgggaaaatgacttaagtatcatgcactccccaagcgcaagcgagcctaagctgctattctctgtgcgtaatgactttcccggagagatggtcgtggtggacgatctagagaacactgagctcccgtatttcgtactggagatttccggaaataccgaggatatccctcttgtcagatggagacagcagtggttggaaaacggaacactcctgtttcatattcatcatcaagatggggcaccctcattgcctggtcaagatccgacagaggagcctcagcacgagagcgcggaagaagagttgaggattctccatataagcgtaatgggaggaatgatcgctctgctcctgtcaatcctgtgcctagtgatgatactttatacccgccgcagatggtgcaagcgtcgtcgcgtgccacaacctcaaaaatccgcttcagccgaagcagcaaatgagattcactacatccccagtgtgctaattggcggccacggtcgggaatctttaagaaacgcgcgcgtgcaggggcacaatagctctggaactctgagtataagagagactcccatcttggatgggtacgaatatgacatcacagacttgcgacaccatctacagagagagtgtatgaatgggggcgaggattttgcttctcaggtgactcgaacccttgactccctgcagggttgtaacgaaaaatctggaatggacttgactcccggcagtgacaacgcaaagctgagccttatgaacaaatataaagacaatattattgccacaagcccggtcgacagcaaccaccaacaagctacgcttctgagccacacttctagttcacagagaaagaggatcaataataaagcacgggcaggatccgccttcctgaaccctgagggtgattccgggacagaggcggagaatgatccgcaattgactttctacaccgacccaagtaggtctagacgcagatccagagtggggtctcctagatcacctgtaaacaagaccacgctcacacttatctctatcacgtcctgtgtaatcgggctcgtatgcagctcccacgtgaactgtcctctggtggtcaagattactttacacgtgcctgaacacctcattgctgatggctccagatttattttgctcgagggttctcagctggacgcgtctgactggctcaaccccgcccaggtggtactgttctcccagcaaaactccagtggtccttgggcaatggacctttgcgcaagacgattactagacccctgcgaacaccagtgcgatcccgagacaggagagtgcctgtgctatgagggatacatgaaagaccctgtacacaagcacttgtgcatacggaacgagtggggaacaaatcaaggcccatggccatataccatatttcagcggggatttgacctcgttcttggggaacaacctagcgacaaaattttccggttcacctatacactgggggagggaatgtggctgcccttaagtaagtccttcgtgatccccccagctgagctggctatcaatccaagcgctaagtgtaaaacagatatgaccgtcatggaggacgccgtggaagtgagggaggaacttatgacatcttcatccttcgactccctggaggtgcttctggacagtttcggcccggtaagagattgctccaaagataatgggggatgctctaaaaactttaggtgtatctccgacagaaagctcgactcaaccggatgtgtctgccctagcggcctttcgccgatgaaggacagcagtggatgttacgacaggcatattggggtggattgcagtgacgggttcaacgggggctgcgagcagctctgtctgcagcaaatggctcccttcccggacgatccgacattgtacaatatcctgatgttctgtgggtgtattgaggattataaactgggagttgatggccgctcatgccaattaattaccgagacttgcccagagggaagcgactgcggtgaaagccgagagttgccaatgaaccagaccctgtttggcgaaatgttctttggctataacaatcactcaaaagaggtcgcagcgggccaggttttaaaaggaacatttcgtcagaacaacttcgcaaggggactggaccagcaactcccagatgggctggtcgtggctaccgtgcccctggagaaccaatgcttagaagagattagtgaacctacgcctgatcctgacttcttaactggcatggtcaattttagcgaagtgagcggatatcctgtgttacagcactggaaagtgcgttcagtgatgtatcacattaagctgaaccaagttgccatttctcaggccctttctaatgcgcttcactctctcgatggcgcaacaagccgggccgattttgtggcccttttggaccagtttggaaatcactatatccaggaggcgatttacggcttcgaggaaagctgtagtatttggtatcccaataagcaggtccagcgacgcctttggctggaatatgaggatatctccaagggcaacagtccctctgatgagtccgaagagcgggaacgcgatcccaaagtcctaacatttccggaatacattaccagtctcagtgactctggaaccaagcatatggccgctggagtgagaatggagtgtcattctaagggccgatgtccctcctcctgccctctctgccacgttacatcgtctccagataccccagcggagcccgtgctgctggaagtgactaaagcagcccctatctacgaactggtcaccaataaccagacgcagcgcttactacaggaagccactatgagcagtctgtggtgcagcggtacaggggacgtaatagaggactggtgtcggtgtgactctactgcctttggcgctgacggtttgccaacttgtgctcccctgcctcagcctgtgttgagactgtcaaccgtgcacgaaccgtcatccacactggtggtcttggagtgggagcatagcgagccccccatcggggtgcagatcgttgactatctccttcgccaggagaaagtcactgataggatggaccatagtaaggtcgagactgagactgtactgtcgttcgttgatgatatcatcagcggggccaaatcaccctgtgctatgcctagtcaggtgcctgacaagcaactaactaccatttctttgattatccggtgcctagagccagatacaatctacatgttcactctgtggggcgtggataacaccgggagacgcagcagaccatctgacgtgattgtgaagaccccatgtccggtcgtcgacgacgtgaaagcacaagaaatcgctgataaaatctataaccttttcaacgggtatacaagtgggaaggagcaacagactgcatacaacacgttgctggacttgggctcccccacactgcatagggtgctttaccactacaaccaacactacgagtcatttggtgaattcacctggaggtgcgaggatgaactcgggcctaggtag

SEQ ID NO: 108805 - DNA, 3657 bp, synthetic construct
  misc_feature 1..3657: note = Description of Artificial Sequence: Synthetic coding sequence
  source 1..3657: mol_type = other DNA
atggcactggcaggcttatgcgcattactggcttgttgctgggggccagcagccgttcttgccaccgccgccggcgacgtagatccatcaaaagagctggagtgcaaacttaaaagcattactgtgagcgctctgcccttcctgcgcgagaatgacttgagtatcatgcactccccctcagccagcgagcccaagctcctgttttccgtgcggaatgacttccccggcgagatggtggtggttgatgatttagaaaataccgaattgccctattttgtgctggagattagcgggaataccgaagacatcccgctggtcagatggaggcagcaatggctggaaaacgggacgttattatttcatattcatcaccaggacggcgcaccttcactgcccggccaggacccgaccgaagagccccagcacgaatctgccgaggaagaactgagaattctccacataagcgtgatgggcgggatgatcgctctattactaagtatcctttgtctcgtgatgattctctacacacggaggagatggtgcaagcgcagacgggtgcctcagccacagaagtctgccagtgccgaagccgccaacgaaattcactatatccccagcgtactcataggcggtcatggcagggagtccttaagaaatgcccgcgtgcaggggcacaattcttccgggaccctctctatacgggaaacacctattttggatggatatgagtacgacattaccgacctgcgccaccatttacagcgcgagtgtatgaatgggggcgaagacttcgctagccaggtaacccgaacactggacagcctacagggctgcaatgaaaagagtgggatggacctgacgcctgggagtgataacgccaaactgtccctcatgaataagtacaaggacaatatcatcgcgacctccccagttgattctaatcaccagcaagccaccctcttgtcacacaccagctccagccaacgcaaacgcatcaacaataaagctcgggctgggtctgctttcctgaatcccgaaggggactccggcactgaggccgaaaacgatcctcagttgacgttttacaccgatcctagtcgaagtcggcggagatcaagggtggggtcccctagaagcccagtcaacaaaactaccctgacgctcatctcaattacctcctgtgttatcgggctagtgtgttcaagccatgtgaactgccccctggtggtgaagattacgctacatgtccccgaacacctcatcgcggatgggtcaaggtttattttgttagagggctctcagctggacgcctcggactggcttaacccggctcaggtggttttattctcgcagcaaaactctagtggcccctgggcaatggacttatgtgcgaggcgcttactcgatccctgcgagcatcagtgcgaccccgagacaggagaatgtctgtgttatgaggggtatatgaaggacccagtacacaagcatctttgcattcgaaatgaatggggcactaatcaaggcccatggccatacacaattttccagaggggtttcgacctggtgctgggagaacagcccagtgataagatttttcgctttacatacacgctgggagagggcatgtggctcccgctgagtaagtcatttgtcattcctcctgctgaactggctatcaatccctcggcaaaatgcaagacagatatgaccgtgatggaagacgccgttgaagttcgggaagagctgatgacttcaagcagctttgattctctggaagtcttacttgacagctttggccctgtgcgggattgctcaaaagacaatggaggatgctccaagaacttccgatgcatttcggatagaaagctcgatagcactggctgcgtctgcccatcgggattgtctccaatgaaagactcctcaggatgctacgatcgccacataggagtggactgttcagacggattcaatggggggtgcgagcagctgtgtctgcaacagatggcaccttttcctgacgacccaaccttgtataacattctcatgttctgcggatgcatcgaggattacaagttgggggtcgatggacgtagttgccagttaatcactgagacctgtcctgagggaagtgattgcggcgaatcccgggagttgcctatgaatcagactctctttggcgagatgttttttggctacaacaaccactccaaggaggtcgccgccgggcaggttcttaaggggacttttcgtcagaataatttcgccagggggctggaccagcagcttcctgacggcctggtagttgccaccgtgccgctggagaatcagtgtctggaagagatttcagagccaacccccgaccccgatttcttgactggaatggtaaacttctcagaggtgagtggctatccagtcctacagcactggaaggtacgaagtgtaatgtatcacattaaattgaaccaggttgcaatatctcaggctctgagtaacgcactccatagcctcgatggtgccacatctcgagcggactttgtggccctgctggatcagttcggaaatcattacatacaggaggcgatctacggctttgaagaatcctgtagtatatggtatcccaataaacaggtgcagaggcgcctatggctcgagtacgaggatatcagtaagggtaactccccctctgatgagtccgaagagcgggaacgagatcctaaggtcctaaccttcccagagtacataaccagcctttcagactccgggaccaagcacatggcagcaggagtgagaatggaatgccactcaaaaggccgctgtccctccagctgtccactttgccacgtgacaagctctcctgatacccccgcagaacccgtactccttgaggtgactaaggccgctcctatttacgagcttgtaaccaataatcagactcagcgccttcttcaggaggctacaatgagttctttgtggtgtagcgggacaggggatgtgatcgaagattggtgtcgctgtgatagcacagccttcggcgccgatggattgcctacatgcgccccgcttccccagcccgttttgcggctgagcaccgtgcatgagccgtccagcactctggtggtcttagagtgggaacatagcgaaccgccaatcggagtgcagattgtggattacttactgaggcaggagaaggtgacagaccggatggatcacagcaaggttgaaaccgaaacggtgctctcctttgtagatgacattatcagcggcgctaaatccccatgcgctatgcccagccaagttcccgacaagcagcttaccaccatttctctgatcatccgctgtctggaacccgacacaatttacatgttcactttatggggagtggacaacactggaagaagatccaggccaagcgacgtcatcgttaagacaccctgccccgtcgtggatgatgttaaagcccaggagatcgctgacaaaatatataatctgtttaacggctacacttctggcaaagagcagcagacagcctataatactctgttagacctcggctcgccaacgttgcatcgtgtcctgtatcattacaaccagcattatgagtcatttggtgagttcacctggcggtgcgaggatgagctaggaccacgaaaccagtag

SEQ ID NO: 108806 - DNA, 1323 bp, synthetic construct
  misc_feature 1..1323: note = Description of Artificial Sequence: Synthetic coding sequence
  source 1..1323: mol_type = other DNA
atgaatacacttctgtgcaaaggaatgttctgcctgcttagctgggaggccgactcaagagggcggctcggcgagtacaccttacagcccctgtccttacagaccgaagagacgaccgagctcggctcaaagaaagagctcaaatccatgccctttatcacctacctgtcagggttactgacggcccagatgctaagtgacgaccagcttatctcaggcgttgaaatccgctgcgaggaaaagggcagatgcccttcaacatgccatctctgtcggcggcccggaaaggagcaactgagcccaacacccgtcttgctggaaatcaaccgggtcgtccccctttataccctcattcaagacaatggtaccaaggaagcatttaagagcgcgttgatgagttcttattggtgctcaggaaagggcgacgtgatcgatgattggtgtaggtgtgaccttagcgccttcgacgccaatggactccctaattgcagccccctgttgcaacccgtcctgcggttatcccctacagtggagccaagttccaccgtggtcagtttagagtgggttgatgtccaaccagcgattggtaccaaagtctctgattatatcctgcaacacaaaaaggttgacgaatatacagatacggacttgtatactggcgaattcctctccttcgccgacgatctcttatccggactgggcacatcttgcgtggcagcggggcggagccacggcgaagtgccagaagtgagcatctactccgtcattttcaaatgtctcgaacccgacggcctctataaatttaccctgtacgcagtcgacacaagggggcgccacagcgagctctcaaccgtgacactgagaaccgcgtgtccactggtggatgacaataaggcagaagaaatagccgataaaatctataacttatacaatggatatacatccggcaaagaacagcaaatggcctataacactctgatggaagtctctgcttccatgctgttccgcgtccagcatcactacaacagtcactacgagaaattcggggacttcgtgtggaggtccgaggatgaactgggaccgcggaaggctcacctcatcctgcggcggctggagagggtctccagccactgttcctcactgctgaggtccgcctacatccagtccagagtggagactgtaccatatctcttctgtaggagtgaagaggtaaggccagcgggcatggtttggtactccatactgaaggatactaaaatcacttgtgaggagaagatggtgagtatggcgaggaatacgtacggcgagtcaaaaggccggtag

SEQ ID NO: 108807 - DNA, 4020 bp, synthetic construct
  misc_feature 1..4020: note = Description of Artificial Sequence: Synthetic coding sequence
  source 1..4020: mol_type = other DNA
atggccgctgcaggggcccggctgagccccgggccaggctcaggcctgagagggcgaccaagactttgttttcacccggggcccccccctctcttaccgctcctcctgctcttcctgctgctgctgcccccccccccacttttggcaggtgccacagctgccgcaagccgggaacccgacagcccttgtcggctcaaaactgtcacagtgtccaccctccctgctttgagggaatccgacatcggatggtccggagcccgggccggcgccggcgcaggtaccggagctggtgccgcagcggcagccgcctcaccgggtagccccgggtccgccggaaccgctgcagaatcgcgccttctgctgttcgtgaggaacgagttgccaggaaggatcgctgtgcaagacgatctggataacaccgagctcccctttttcactctggaaatgtcaggcactgctgctgatatctcactggtgcattggagacagcagtggttagaaaacgggaccctgtactttcacgtatccatgtcttctagcggacagcttgcccaggcaacagcgccaacactgcaggaaccttcagagatcgtggaggagcagatgcatatcctgcatattagtgtgatgggaggtctgattgctctgctactgctactgctggtgttcaccgtcgctctgtacgcacagagaagatggcagaagcgtagaaggattccacagaaatctgcttcaacggaggcaactcacgagatccattatatcccaagtgtgctgctggggcctcaggccagggagtcgttccgctcatcccgtcttcaaacgcacaatagcgtgataggcgtgcctataagagaaacaccgatcttggacgactacgactgtgaagaggatgaggagccaccgaggagggccaaccacgtttcacgggaggatgaattcggtagccaagtgacccatacgcttgactctctcggacaccccggtgaggaaaaagtcgattttgagaagaaagctgcggccgaggccacacaggaaaccgtggaatctcttatgcagaagttcaaggaatcatttcgcgcaaatacaccaattgagatagggcagctccaacctccactgaggtctacatccgcaggaaagaggaaacggaggtcaaagtcccgaggtggaatctctttcggacgagcgaaaggtacttccggcagtgaggcagacgacgaaactcagctgacattttatacagaacagtatcggtcacgacgtagatcaaaaggactactgaagtccccggtgaataaaactgccctcaccctcattgctgtaagctcctgtatcctggcaatggtatgcgggtctcagatgtcttgtcctctgactgtcaaggtgacattgcacgttccagagcattttattgcagatgggtcatcttttgtggttagtgaaggctcctacctggatatctccgactggcttaacccagccaagctatctttgtattaccagataaacgccacatctccttgggtaagggatctctgtggacagcggactactgacgcttgcgagcagttgtgcgacccggagacgggagaatgctcttgccacgaaggctacgcacccgatccggtgcatcgccacctttgtgtgagatcagattgggggcagtccgaaggtccctggccatatacaactcttgagagaggctacgatctcgtgacaggcgaacaggccccagaaaagatcctgcgctcgactttcagcctgggtcagggactgtggctgcccgtctctaaatctttcgtcgtaccacccgtggagctgtctatcaaccccctggcctcctgcaaaacagacgtcttggtaaccgaagatcccgccgacgtcagagaggaggcaatgctgagtacttacttcgaaactatcaatgaccttctgtcatcgttcggcccggtcagggactgctcccgcaacaatggagggtgcacacgcaatttcaaatgcgtgtcagaccgacaggtcgacagcagcggttgtgtctgtcctgaagagctgaagccaatgaaagatggctccggttgctacgatcactcaaagggcatcgattgctccgatggcttcaatgggggctgtgagcaattgtgtcttcagcagacgctgcctcttccttacgacgctacatccagcaccatttttatgttctgcggctgcgttgaagagtacaaactggccccagatgggaagtcttgtctgatgctgagcgacgtgtgtgaaggccccaagtgtctgaaaccagattctaagtttaacgatacattattcggcgagatgctgcatggctacaataatcgcacgcaacatgtaaaccaaggccaggtttttcagatgacttttcgggaaaacaactttatcaaggattttccccaactggccgacggtctgctggttattccactccccgtagaggaacaatgccgcggcgtgttgtccgagccattacccgatctgcagttgctgaccggtgatatacgttatgatgaggccatgggctacccgatggtacagcagtggcgcgtgcgcagtaatctttatagggtaaagttaagcacaattactctggctgccggcttcactaacgtattaaaaatactcacaaaggaaagttccagggaggaattgctctctttcattcagcactatggttcccattacatcgccgaagcgctatacgggagcgaactcacatgcatcattcacttccctagcaagaaggtacagcagcaactgtggttgcagtaccagaaggagaccaccgagctcggaagtaaaaaggaactcaagtcaatgcccttcatcacataccttagcggtttgctcaccgcccaaatgctttcagatgaccaattaatttccggagtggagatccgatgtgaggagaaaggcagatgcccctccacttgccatctgtgcaggaggcccgggaaggaacagctttcgccgactccagttctgctcgaaataaatcgagtcgtacccctctatacgcttattcaggacaatggtacaaaagaggcctttaagagtgctcttatgtccagttattggtgtagtggaaagggcgacgtgattgacgactggtgccgatgcgacctcagcgccttcgatgccaacggcctccccaactgctcacccctcttgcagccagtgctacgtctttctccaaccgtcgagccaagttctactgtggtgagcctggaatgggtcgatgttcagcctgcaatcggtaccaaggtcagtgattatatactccagcataaaaaggtggatgagtacactgacaccgacttgtatacaggcgaatttttgagcttcgccgatgacctgctgtctgggctcggcacatcttgcgttgcggccggccgttcccacggggaagtcccggaagtgagcatttacagtgtgatttttaaatgtctcgagccggacgggctctataagttcaccctatatgcagttgacacaagggggaggcatagcgagctctccacggtgaccctgcgcaccgcctgccccctggtagacgataataaggcagaggaaatagccgataagatctataatttgtacaatggctatacgagtggcaaagagcagcaaatggcttacaatacactgatggaggtgtccgcctcgatgctgtttcgtgttcagcaccattacaatagccactacgagaaattcggggactttgtgtggagatccgaagacgagctgggtcccaggaaagctcaccttattctgagaagactggaacgagtgtccagtcactgttcaagtttactcagatccgcttacattcaatctcgcgtcgaaaccgtcccataccttttttgcagatccgaagaggtgagacccgcaggaatggtctggtattctattctcaaggataccaaaataacttgtgaagagaaaatggtctcaatggccaggaatacgtatggggagagcaagggacgatag

SEQ ID NO: 108808 - DNA, 1188 bp, synthetic construct
  misc_feature 1..1188: note = Description of Artificial Sequence: Synthetic coding sequence
  source 1..1188: mol_type = other DNA
atgccttttatcacctacctctccggccttcttacggcccagatgctttcagacgatcagctgatctctggggtggaaattcgatgcgaagagaaggggagatgcccaagtacctgtcatctgtgccgtagaccaggaaaggaacagttgtcccctaccccggtccttctggaaataaaccgggtggtaccgctgtataccctgatccaggataacggcaccaaagaggcatttaaaagtgcgttgatgtcctcctactggtgctccgggaagggagatgtgatcgacgattggtgccgatgtgatctgtctgcttttgatgccaacggcctgcccaactgcagtccgctgctgcagcctgtcctccgactgtctcccaccgtggagccttcctccacagttgtgagtcttgagtgggttgatgtacaaccagcgatcggaaccaaagtgtctgattacatcctgcagcataagaaggtagacgaatatacagacacagacctgtacacgggggagtttcttagctttgcagacgacttgctgagcgggctggggactagttgcgtcgctgctggtagaagccacggcgaagtgcctgaggtttctatatattcagtaatcttcaaatgcttagagccggacggcttgtataaatttacactctacgcagtggacacgcgaggccggcactctgaactatccacagtgacattgaggactgcctgtcctctagtggatgataataaagcagaggaaatcgcagataagatttacaacctctacaatgggtatacttccgggaaagaacagcagatggcttataacacacttatggaagttagcgctagcatgctctttagagtccagcaccactacaactcccactacgagaaattcggcgacttcgtgtggaggtctgaggacgaacttggccctagaaaagctcacctcattctcaggcggttggaaagagtgtcttctcattgctcctccctgctacgatcagcatacatacagtctagggtggagaccgtcccatacctgttctgtagatcagaggaggtgcgcccagcagggatggtgtggtatagcattctcaaagacaccaagatcacatgcgaggaaaagatggtgtcgatggctcgtaacacctattatctcaccttaagtaaagtgtcaccattctag

SEQ ID NO: 108809 - DNA, 585 bp, synthetic construct
  misc_feature 1..585: note = Description of Artificial Sequence: Synthetic coding sequence
  source 1..585: mol_type = other DNA
atgccttttataacatatctttctgggttactgacagcccagatgttaagcgacgaccagctgatttctggagtagagataagatgcgaagagaaaggtcgttgcccgagcacgtgtcacctctgcagaaggccaggaaaggaacagctgtcccctacccctgtgctgctagaaattaaccgcgtggtaccgctatatacgctgattcaggataacggcacaaaagaggccttcaagtcagctcttatgagtagttattggtgttcgggtaaaggtgacgtgatcgatgactggtgtcggtgtgatctatctgccttcgatgctaatgggctcccgaattgcagcccattgttgcaacctgtcttacggctctctcctacggtagaaccgtcttctaccgtggtgtcactggaatgggtcgatgtccagcccgccattggtactaaagtctcagattacattcttcaacacaagaaggtggatgagtatacagacaccgacctctacaccgtttactgctggataacgttcattgacttgaggatcctcaatcaaccatgtataccaggaatgaaacctacctag

SEQ ID NO: 108810 - DNA, 3867 bp, synthetic construct
  misc_feature 1..3867: note = Description of Artificial Sequence: Synthetic coding sequence
  source 1..3867: mol_type = other DNA
atggcagccgcgggcgcacggcttagcccagggccagggtccggcctgaggggccgaccccgcctctgcttccaccccggtccaccaccccttctccccctacttttgctgttcttattgctgctgcctcctcccccactgcttgccggagcaactgctgccgcatcacgggagccagacagcccctgccgtttaaaaacagtgactgtaagcactctgcctgccctgagagagtctgacatcggctggagtggcgctcgggcaggtgctggtgcaggaaccggggccggagccgcggccgctgcagcctctcccgggtcccctggatctgccggcacagccgcagaaagccgtctgctgctcttcgtgcgcaatgagctgccaggacggattgctgtgcaagatgacctggacaacaccgaactaccattctttaccctggagatgtccgggacagccgctgacatttcacttgtgcactggcggcagcaatggctagagaatggtacattgtacttccacgtttctatgtctagtagcggtcagctggcccaggccacagctcccaccctgcaggagccctccgagatcgtcgaggagcagatgcatattttgcacatctccgtcatgggtggactcatagcactgctgttactgttgttagtcttcacggtcgctctctacgcccaaagacggtggcaaaagagacggcggattccccagaaaagtgcctctacagaagcgacacatgagattcactacatcccctcagtcctgttaggaccacaggctagagaaagctttaggtctagcaggctgcaaacccacaattcagttataggggtgccgattcgcgaaacccccattctggatgactacgattgcgaggaggacgaggagccccctcgaagagctaatcatgtttccagggaggatgagttcgggagccaggtcacacatacactggactccttaggtcaccctggggaagagaaggtggatttcgagaagaaggggggcatcagcttcgggcgggcgaaaggtaccagcgggagcgaagcagacgacgagacacagctcacattttatacagagcagtacaggagtcgaagacgaagtaagggtctactgaaatctcccgtgaataagacggcactgacactgattgccgtctctagctgcatcctcgcgatggtgtgtggttctcagatgtcctgtccccttaccgtgaaagtgacccttcatgttcctgagcattttatcgctgacggcagctccttcgtcgtgagtgagggctcctacctggatatttctgactggctgaatcctgcaaagctgtcgttgtactaccagatcaacgctaccagtccttgggttagagacctgtgcggacagcggactacagatgcgtgtgaacaattgtgtgaccctgagacaggtgaatgttcctgccacgagggctacgctccagatcctgtgcatagacacctatgtgtgcggtcggactggggacagtcagaaggcccgtggccttacactacgctcgagcgtgggtacgatctggtgaccggagagcaggcacccgagaagattctgcggagcacatttagccttggccagggtctgtggctgccggtctccaagtctttcgttgttccacccgtcgaactgagcatcaaccccctggcttcttgtaaaacagacgtcttagtgactgaggacccagccgacgtgcgggaggaagctatgctgtcgacatatttcgagacaattaacgatctcctaagctccttcgggcccgttagggattgcagccgcaacaacgggggctgcacccggaactttaagtgcgtcagcgacaggcaggtagactcatctgggtgtgtatgtccggaggaattgaagccgatgaaggatggttctggctgttacgatcactccaagggtattgactgtagtgatggtttcaacggagggtgcgagcagctgtgccttcagcagacactgcctctgccatacgacgccacttcatcaacaattttcatgttctgtgggtgcgtcgaggaatataaacttgctcccgatgggaagtcatgtttaatgttgtccgacgtgtgtgaaggaccgaagtgtctgaaacccgattccaagtttaatgacaccctatttggcgaaatgctgcatggctacaataaccgcacccagcatgtgaatcagggtcaggtatttcagatgacctttagggagaataatttcatcaaggattttccacagcttgcggacggtctgttggtaatccctctccccgtcgaagagcaatgccgcggagtcctcagtgaacctctgcctgacctgcagctgctcactggtgacattcgctatgatgaagctatggggtacccaatggtgcaacagtggagggtgaggtctaacctatatagagtcaaactaagtaccatcactctggctgcaggatttactaatgtactgaaaatcctgacaaaagaaagctcccgagaagagctgctcagttttattcaacactatgggagccactacattgcggaagctttatatgggtctgagctgacatgcatcatccacttcccgagcaagaaggtgcagcagcaactgtggctgcaataccagaaagagacaactgagctcgggagcaagaaagagttaaaaagcatgccattcattacttatttgagcggattactgacggctcagatgctgtcagacgaccagctgatctccggggtcgagattaggtgtgaggaaaaaggcagatgtccgagcacctgtcatctgtgccgacggccggggaaggagcaactgagtccaactcccgtcctgttagagatcaatagagtagttcctctatatacactgatccaggacaacgggaccaaggaagccttcaagtctgctctgatgagcagctactggtgctctggtaagggggatgtgattgatgattggtgtaggtgcgatttgtctgcgttcgatgccaatggcctcccaaactgcagcccactgctgcaacccgttctaaggctcagtcccacagtggaaccctcatcaacggtagtgtcactggagtgggttgatgtgcagccagccatcggcacgaaggtatcagactacattctgcaacataaaaaggtggacgagtacactgacactgatctatacaccggtgagtttctctccttcgctgacgatctactgtccggcctcgggacaagttgcgtggccgctggaagaagccatggtgaggtgccagaagtcagtatttactcagtcattttcaagtgtctagaacccgatggcctctataagtttacactgtacgctgtcgacacaagagggcgacattctgaactctctactgtgaccctacgaactgcttgtccgctggttgatgataacaaagccgaggagatcgccgataaaatatacaatctctataacggttatactagcggcaaagagcaacagatggcctataatacactgatggaagtgtccgcatccatgctctttagagtgcagcatcattacaacagccactacgagaagtttggcgacttcgtgtggagaagtgaggatgaactgggtcctcgcaaagctcacctaatcttgcggagacttgagagagtgtcaagtcactgttctagtctcctgagatctgcatatatccagagcagggtggagactgtcccctacttattctgccgatccgaggaagtccgcccagctggcatggtgtggtactcgatcctcaaagataccaagatcacctgtgaggagaagatggtttctatggctcgcaatacctatggtgaatctaaggggaggtag

SEQ ID NO: 108811 - DNA, 1188 bp, synthetic construct
  misc_feature 1..1188: note = Description of Artificial Sequence: Synthetic coding sequence
  source 1..1188: mol_type = other DNA
atgccttttatcacctacctgagcgggctgctcactgctcagatgcttagcgacgatcagttgatctcaggggtcgagatcagatgcgaagagaaggggaggtgcccatccacatgccacctgtgccgccgtccaggcaaggaacagctgtctccaactcccgtgctgcttgagattaaccgggtagttcccctgtataccctaattcaggacaacggtactaaagaggcgttcaagagtgcactaatgtcatcatactggtgttccgggaaaggtgatgtaattgacgactggtgtcgatgtgacctctccgccttcgatgcaaacggactgccgaactgttcccctttgttacagcccgtgctgaggctatcaccaacagtggaaccaagctctactgtcgtgtccttggaatgggttgacgttcagccggccatcggcacaaaagtcagtgactatattcttcagcacaaaaaggtggatgagtataccgacactgacttgtacacaggcgaattcctgtcgttcgccgacgatctgctgtctggtctgggcacatcctgtgtcgccgctggccggtcacacggagaagttccagaggtgtctatttactccgttatcttcaagtgcctggagcctgatggactctacaagttcactctgtatgctgtcgacacgcgcggacgacattctgagctgtccactgtcaccctgcggactgcttgccctctggttgatgacaataaggccgaggaaatcgctgataagatatacaatctgtacaacggctatacatctggaaaagagcagcagatggcatacaatacacttatggaagtgtccgcaagcatgctgttccgcgtgcagcatcactacaacagccattatgagaaattcggcgacttcgtgtggcggtcagaggatgaattgggccccagaaaagcccacctgattttgcgacgcctggagagagtgtcctcccactgctcgtcgctgcttaggtcagcatacattcagtcaagggttgagactgtgccctatctgttctgcaggtctgaagaggtccgccctgctggaatggtatggtattccattctgaaggatacaaaaattacctgtgaggagaagatggtatccatggcgcggaatacgtattacctgacactgagcaaggtctctccattctag

SEQ ID NO: 108812 - DNA, 4008 bp, synthetic construct
  misc_feature 1..4008: note = Description of Artificial Sequence: Synthetic coding sequence
  source 1..4008: mol_type = other DNA
atggcagcagctggcgcaagattgtcccctgggccagggagtggactaagagggaggccgagactctgttttcacccaggtccgccccctctactccctcttctattacttttccttctcctgttgccgccaccacccctactggctggcgctacagccgcggccagccgggagccggacagcccctgcaggctcaagactgttacagtctctactctgccagccctaagggagagtgacatcgggtggagtggcgctcgggctggagccggggccggaacgggcgcaggagctgctgcggccgctgcctctcctggctctcctggcagcgccggcactgcagcagaaagtcggctgctgcttttcgtccggaacgagctgccaggcaggatcgcagtgcaggatgatctggacaatacagagctcccattctttacgctggaaatgtccggtaccgctgcggatatttctctggtccactggcgccaacagtggctggaaaatgggacactgtacttccatgtgagcatgtcctcaagcggccaactcgctcaggcaaccgcacccaccttacaggagccttccgagattgtggaggagcaaatgcacattttgcatatctcggtgatggggggtctgatcgctttgctactccttctcttggtctttaccgtggcattatacgcccaacgtcgctggcaaaagagacgcagaataccacagaagagcgcatctaccgaagctacccacgagatccattatattccctccgtgttacttggaccacaggccagagagagttttcggtcatctcgcctccagactcacaactccgtcataggggtcccaattagggagacccctatcttggatgactatgattgcgaggaggatgaggagcctccaaggcgtgcaaatcatgtatcccgcgaggacgaatttggatcgcaagtgacacacactttggactcccttggtcatcctggagaggaaaaggtggactttgaaaagaaagccgccgcagaggccactcaggagacagtagagtcactgatgcagaaatttaaagaatcgttccgagccaatacccctatcgaaatcggacagcttcagcctccgctacgttctaccagcgcgggcaagaggaaaagaagatctaaatccagaggaggaatctcttttggaagagcaaaagggacgtcaggtagcgaagctgatgacgaaacccagcttacattttataccgaacagtatcgatcacggagacgaagtaaagggctcttgaaaagcccagtaaacaaaacagcccttacgctcatcgctgtttcttcctgcatactcgcaatggtgtgtggatcacagatgtcatgcccacttactgtgaaagtgaccttgcatgttccagagcattttatcgccgacggatcgagtttcgttgtctccgagggcagctatctggatattagcgattggctgaatccagccaagttgagcctgtattaccagatcaacgctacatcaccctgggtgcgagacttatgtggccaacggactaccgatgcttgcgaacagctgtgcgaccccgagacgggagaatgcagttgccacgaaggttacgcacccgatcccgtccaccgccacctctgtgttcgatcagactggggccagagcgaggggccctggccctacactaccctggaacgaggatatgatttggtaactggcgagcaggctccagaaaagatcctgtctcttgggcaaggtctgtggctccccgtgtccaaatccttcgtggttccacctgtggagctgtcaattaatcctctcgcttcgtgtaagaccgatgttctggtgaccgaggatccggctgatgtacgagaggaagcgatgctctcaacttattttgaaaccatcaacgatcttttatctagctttgggccagttcgcgactgttcacgaaacaatgggggctgtaccagaaacttcaagtgtgtttccgatcggcaggtggactctagcggttgcgtatgtcccgaggagctcaagccaatgaaggacggatctggctgttatgatcattcaaaggggatagactgcagcgacggatttaacggaggctgcgaacagctgtgcttgcaacagaccctgcccctaccatacgacgctacttctagcacgatatttatgttttgcggctgcgtggaagagtataaactagcgcccgacgggaagtcttgccttatgctaagcgacgtgtgtgaggggccaaagtgcttaaagcctgactctaaattcaatgataccctcttcggcgagatgctgcacggctacaataacaggactcagcacgttaatcagggccaggtcttccaaatgacctttagagagaataacttcatcaaagacttcccccaactcgccgacggcctgctggtcatcccgcttccggtcgaagaacagtgcaggggcgtgctgagtgagcctttgcctgacctccaattgctgaccggggacataaggtacgacgaggcaatggggtacccaatggtacaacagtggcgtgtgaggtccaacttgtaccgcgtcaaactgagtacaatcacacttgccgcaggcttcaccaacgtcctgaaaattctgacaaaggagtcctcccgggaagagctactgtcattcatccagcactacggctctcactacatagcagaagctctttacggctcagagttgacatgcattattcatttccctagcaagaaagtccagcaacagctgtggttacaataccagaaggaaaccaccgaacttgggtctaagaaagagttgaagagcatgccctttataacatatttgagcggcctgttgactgctcagatgttatcagacgaccagctcatctccggggtcgaaatccggtgcgaggagaaagggcggtgcccatccacctgccatctttgccggcgacctggcaaggaacagctgtcgccaaccccagttcttctcgagattaatcgggttgtacctctgtacaccctgattcaggacaacggtactaaagaggcctttaaaagcgcattaatgtcttcctactggtgctccggcaaaggcgacgtgatcgatgactggtgcaggtgcgatttgtctgcctttgatgcgaatgggctgcccaactgttcacctctcttacagcccgtgctgcggctcagtccaaccgtggaaccttcttctaccgtggtatcacttgagtgggtggatgtacagccggccattgggaccaaagtgagcgattatattttacaacacaagaaggttgacgagtacacagataccgatctttacacgggtgaatttttatcctttgccgacgacctcctgagcggcctagggacctcttgtgttgccgccggcagaagccatggcgaggtgccggaggtcagtatttattctgtgatcttcaagtgcttggagcccgatggactctacaaatttacattatacgccgttgatacacggggaagacatagtgaactgtcgaccgtcactctgcgcacagcctgtcctcttgtggacgataacaaggcagaagaaatcgcagataagatctataacctgtacaatgggtataccagcggaaaggagcaacagatggcttacaacacactgatggaggtttcggctagcatgctgtttcgagttcagcatcattacaactcacactacgaaaagtttggagatttcgtgtggcgctcagaggacgagctgggccctcgcaaagcccatttaatcctacgacggctggagcgcgtttcctctcattgctcatccttgctgaggtctgcttatattcaaagtcgggtggaaacggtgccttatttattttgtaggtccgaagaggtgaggcctgcgggcatggtctggtattcgattctgaaggacaccaagatcacatgtgaggagaagatggtgagtatggctcggaacacatatggtgagtccaaaggtaggtag

SEQ ID NO: 108813 - DNA, 297 bp, synthetic construct
  misc_feature 1..297: note = Description of Artificial Sequence: Synthetic coding sequence
  source 1..297: mol_type = other DNA
tgaatggcctacaacactctgatggaagtatccgcctcaatgttatttcgagttcaacaccactacaattcccactacgaaaagtttggagactttgtgtggagatccgaagacgagttaggcccatccctgcttgagagttttatgagtctgcaagatattaatttgctggagcgccggccaggccggccccagcggcccggcaaccctctgagtaacgtatcgtggaggatcagcgagattgctccaacttcacacactgatatgtcagccgggatcaaggaaactgcgtcctag

SEQ ID NO: 108814 - DNA, 6828 bp, synthetic construct
  misc_feature 1..6828: note = Description of Artificial Sequence: Synthetic coding sequence
  source 1..6828: mol_type = other DNA
atggccgccgaacgtcggtgcggctcaatgagagatcttcgcgcacaagtgacaagcgggctgctgcctttccctgaggtgacactccaagccctaggagaagacgagattaccttggaatccgtcctcagagggaaatttgctgccgggaaaaatggcctcgcctgcctcgcctgtgggccacagctggaggtagtcaattctatcactggcgaaaggctatcagcttaccggtttagcggcgtgaatgaacaaccgccagtcgtattggccgtcaaggagttcagctggcagaaaagaacagggctgctgatcgggctcgaagagactgaagggagcgtcctgtgcctgtatgacctcggcatcagtaaagtagttaaagcagttgtgctgccaggccgagtgactgccatcgagcctataatcaaccacgggggcgcaagcgccagtactcagcacctgcatcctagcctcaggtggctgtttggagtggctgctgtggtgacagacgtgggtcagattctcttggtggacctgtgcctagacgatctgagctgcaatcaaaatgaggtagaagcgtcagatctggaggtactgaccggaattccggccgaggtcccgcatatcagagagtccgtaatgaggcagggccgccatttgtgtttccagttggtgtctccaacaggtacagccgtgagtactcttagttatatcagcagaacaaatcagctggccgtgggttttagtgatggctatctagcactgtggaatatgaaaagcatgaaaagagaatactacattcaactggagagcggccaggttcctgtttacgctgtcacattccaggagcctgaaaacgatcccaggaattgttgctacctgtgggccgtccaaagcacacaggattctgagggagacgttctgtcacttcatttactgcagctcgcctttgggaatcgaaaatgcctggcatctgggcagatcctgtatgagggactcgaatactgcgaagaaaggtacactctcgatctgaccgggggaatgttccccctgcgcggtcaaacctctaatactaagctgttaggctgccagtcaatcgagaagtttaggagccatggcgatcgggaagagggcgtgaacgaagctctttctcctgatacctctgtgtctgtttttacatggcaggtcaacatctacggtcaaggaaagccttccgtctatctggggttattcgatatcaaccgctggtaccacgcgcagatgcctgactctctccgctctggggaatacctccacaactgttcgtactttgcgttgtggagcctggagtccgtagtgtcgcggacgtcccctcacggcatcctagacattttagtgcacgagaggagtctaaatcgcggcgtgcccccttcttatccacctcccgagcaattttttaacccatcaacttataattttgacgccacatgcctgcttaacagcggagttgtgcatctcacttgtaccggcttccaaaaagaaaccctcaccttcttgaagaagtcaggcccatccctgaacgagcttattccagatggttacaataggtgtcttgtggcggggcttttatcaccccggtttgttgacgttcagccctccagtctatcccaagaggagcagctcgaagccatactgtccgcagcaattcagactagctcactagggctcctcactgggtatattagaaggtggataaccgaagaacagcctaactccgcgacaaatttgcgtttcgtcctagagtggacctggaataaagtggttcttaccaaagaggagttcgaccgactctgcgtccccctatttgatggttcttgtcacttcatggatccccagacgatccagtcaatacaacagtgttaccttctcttaagcaacctgaacattgttctctcgtgcttcgcttccgaggccagagagattactgagcgtggcctcatagatctgtccaacaagttcgtcgtgtctcaccttatctgtcagtatgcccaggtggttctctggttcagccacagcggcttgttacccgaaggcatcgacgatagtgtgcagctctcccggctctgttataactatccagtgattcagaactattatactagccgaaggcaaaagttcgaacgactctccagaggtaagtggaatcccgactgcttaatgatcgacggcctggtaagtcaattaggagagaggatagagaaactctggaagcgagatgagggcggaacagggaaataccctcccgcctcactgcacgccgtcctggatatgtacctgctggacggggtgacagaagccgctaaacattcaatcactatctacttgctgctcgatataatgtacagctttcccaacaagacggatacccctatcgagagttttcctaccgttttcgctattagctggggccaggtgaaacttattcaaggcttttggctcatagaccacaatgactacgagagcgggttggatctgctttttcatcctgcaacggccaaaccgctaagctggcaacacagcaaaatcatccaggcatttatgagtcagggggagcacagacaggccttacggtacatccagactatgaagccgaccgtaagcagcgggaacgacgtcatcctgcaccttaccgtcctgctgttcaatcgttgcatggtcgaagcctggaacttccttaggcaacactgcaatcgacttaacatcgaagagttgctgaagcacatgtatgaggtatgccaggaaatgggcctcatggaagacttgctcaaacttcctttcactgatacagagcaagagtgcctcgttaagttcttgcaatctagcgcctcagttcagaatcacgagtttctcttggtgcaccacctacagcgcgcaaactatgtccctgcactgaagcttaatcaaacacttaagattaatgtgatgaacgatagggacccgagactccgcgagcggtccctggccaggaattccattctcgaccaatatggaaagatactgccacgagtccatagaaaactagctatcgagagagcaaaaccctaccatctgagtacatcatcggtatttcggctcgtgtctcgcccgaagcctctttcagcggtgccgaagcaagtggtaactggaacagtgctcacccggtctgtatttataaacaatgttctgagcaagattggggaagtgtgggcctccaaagaaccaattaatagcacaaccccttttaatagtagcaagatcgaagaaccatcccctatagtgtacagtctccccgcccccgagctgccagaggccttttttggtacccccatttctaaagccagccagaaaataagtagactgctagatttagtggtccagcctgtgccccggccctcacagtgtagtgaatttatccaacaaagtagtatgaaatcacccctgtaccttgtgagcaggtcgttgcccagttcttcccagttaaaaggatccccacaagcgatctcccgggcttctgaactccaccttctcgaaactcccttggtcgtgaagaaggctaagtcattagcaatgagtgtgactaccagcggttttagtgaattcactccccaaagcattttgagaagtacactcaggtctacaccccttgccagcccttcccccagtcccggtcgaagtcctcagcgtctaaaggagaccagaatcagctttgtggaggaagacgtgcatccaaaatggatccccggggctgccgacgatagcaagctcgaagtcttcaccacccctaaaaagtgtgctgtgcctgtggaaactgagtggttgaaatcaaaggatagaaccacttctttctttctcaacagtcccgagaaggaacatcaggaaatggacgagggatcccagtcgctggagaaactagatgtgtccaagggaaattcttctgtttccatcaccagtgacgaaaccacactggagtatcaggacgcccctagccccgaggatctggaagagacagtatttaccgcatcgaagcccaaatcttcttccactgcccttactaccaatgtcaccgagcagaccgagaaggacggcgataaggacgtgtttgcctctgaagtgaccccatctgacctgcagaaacaaatggggaatctcgaggatgccgagaccaaagacctcctggttgcagctgaagcattctctgaactgaatcacctgagtccagtacagggcaccgaagccagtctgtgtgccccatcagtgtacgaaggcaagatttttacgcagaaatcgaaggtgccagttttagacgagggactaactagcgtcgagacctatacacccgcaatccgcgcaaatgacaataaaagcatggccgatgtcctcggggatgggggtaactcttcgctcactatctccgaggggccgatcgtgtctgaacggcggctcaaccaagaagtggccctaaatctcaaagaagatcacgaggtagaggtgggggtgctcaaagagagtgttgatctgcccgaagaaaaactccctataagcgactccccaccagacacgcaggaaatacacgttatcgagcaggaaaagctcgaagcccaagattctggagaagaggcccgaaacctgagttttaacgagctgtacccctcaggtactctgaaactccagtataatttcgataccattgatcagcagttctgcgacttggctgataacaaggataccgcagagtgcgatatagctgaggtggatggggaactttttgtggcccagtccaactttacactgattctggaaggcgaggaaggcgaagtagaacctggggattttgctagcagtgacgtactgcccaaagccgcgaacaccgcaactgaggagaagctggtgtgcagtggggaaaatgacaaccatgggcaaatcgctaaccttcctagtgctgtcacctcggaccagaaatcccagaaggtagacaccctgccttacgttcccgagcccatcaaggtcgccatcgctgagaacctgctggacgtcatcaaggacacaaggtcaaaggagatcacctccgacactatggaacaatctatccatgaaacgatccccctggttagtcagaacattatgtgtcccactaaacttgttaaatctgcctttaaaacagcgcaggagacttccacgatgactatgaatgtgtctcaggttgacgatgttgtcagtagcaaaactcgaacccgtgggcagcgaattcagaacgtgaatgtcaagtctgcacaacaggaggcctctgcagacgtcgcaactcctaagatgcctggccagagcgtgcgcaaaaagacccggaaggctaaggagatatccgaggcctccgagaatatctacagtgacgtgagaggactctctcaaaatcagcagataccccagaattctgtgacccctagacgggggcggcggaaaaaggaggtcaaccaggatatcctggagaatacgtcaagtgttgaacaggaactgcagataaccactggccgcgagtccaagcgtctcaaaagttctcagctccttgaacccgccgtggaggaaaccactaaaaaggaggttaaagtgtcaagcgtgacaaaacgaaccccccgccggatcaagcgctctgtcgagaatcaggagtccgttgaaattatcaatgatttaaaagtctcaaccgtgacatccccctctcgtatgatccgcaagctgcggagtaccaacctggacgctagcgaaaacactgggaataaacaggacgataagagttcggataaacagcttcgcatcaagcacgtgcgccgcgtgcgcggaagggaggtgtcccccagcgatgtccgggaagattccaacctcgagtcatcgcagttaacagtgcaggccgagttcgatatgtcagctattcctagaaaacgaggccggccaaggaagatcaacccttccgaggacgtaggatccaaggcagtaaaagaggagcgctctccaaagaagaaagaagctccttcaatacggagaagatccactcgcaatacccccgcaaagtccgagaatgttgacgtgggaaaaccagcattggggaagagtatcctggtccctaatgaggagttatcaatggtaatgagcagcaaaaaaaagttgacaaaaaaaacggagagccagtcccaaaaaagaagcctgcactccgtctccgaagaacgcacggacgagatgacacacaaagaaactaacgagcaggaagaaagactgctggcaactgcctctttcacaaagtcttctcggagctctcggactcgatcctctaaggctatcttactgccagacctatcggaacctaataatgaacccttgttctctcccgccagcgaggtgccccgcaaggctaaggctaagaagattgaggtccccgcacagcttaaagagctggtgtctgacctcagttcacagtttgtaatctccccccctgctctcagaagtcggcagaaaaatacctctaataagaacaagttggaagacgagctcaaagacgatgcacagagtgtcgagaccctcggcaagcctaaagccaagaggatccggaccagtaagaccaagcaggcctccaagaacactgaaaaggaaagcgcctggagcccaccccccatagaaattcgtctcattagccctttagctagcccggcggatggggtgaaaagtaagccccggaaaacgaccgaggtcaccgggaccgggctggggcgcaataggaaaaagctgagctcctatcctaaacagattctgcgccgcaaaatgctctag

SEQ ID NO: 108815 - DNA, 6906 bp, synthetic construct
  misc_feature 1..6906: note = Description of Artificial Sequence: Synthetic coding sequence
  source 1..6906: mol_type = other DNA
atggacagcctcgctggcttgtcacctcgcgaggcagctggggttctgagcctgagctgcgtaggcgtttgtagcacctgcgcatgggcatggccgcacggcagcatgcgcgatctcagagcccaggtcacttcaggcctccttcctttcccggaagttactctgcaggctcttggagaagacgagatcacactggaatcagtccttaggggcaagtttgccgccggcaagaacggcttggcctgtctggcttgtggccctcagttggaagttgtgaactctatcaccggtgaacgactgtcggcataccgcttttctggcgtgaatgaacagccccctgtggtgctcgcggtaaaggagttctcttggcagaagcgtacaggtcttctgatagggctggaggagaccgaagggagcgtcttgtgtctgtatgacttgggtataagcaaagtcgtgaaagcggtcgttctgccaggcagagtaacagcaatagaaccaatcattaaccacgggggagcaagcgcttctacccagcacctgcatccttctctccggtggctttttggcgtggccgctgtagtgactgatgttgggcagattctgctggttgatttgtgtctggacgacctgtcatgcaaccagaacgaagtggaggcatctgacctcgaggtgctgacagggatccccgccgaggttcctcacatcagggagtctgtcatgcgtcagggtagacatctttgctttcagttggtgtctcctactgggaccgcagtctctacgctctcctacatttcaaggactaaccagctggctgtagggttcagcgatgggtacttagccctgtggaacatgaaatctatgaagagagaatactacatccagctggagtctgggcaagtccctgtgtacgctgtgaccttccaggaaccagagaacgatcccaggaactgttgctatctctgggctgtgcagtctacgcaggatagcgaaggagacgtcctatctctacatctcttgcagctggcatttggaaaccggaaatgtctggccagcggtcagatcttgtacgaggggctggaatactgtgaggaacgctatacgctagacctgacgggaggaatgtttcctctgcgcgggcagacatctaacaccaagttgctgggctgtcagtcgattgaaaaattcaggagccacggggaccgagaagagggggtcaacgaggccctgagccccgacacgagcgtgtccgtgtttacgtggcaggtgaacatctatggacagggcaagccctcagtctatctgggcctcttcgacatcaaccggtggtaccatgcccaaatgccagatagcctgaggtctggagagtacctgcacaactgctcttacttcgctctctggagcctggagtcagtcgtgagccggaccagcccccatggtatattggacattcttgtacacgaaaggtcattaaatcgaggggtacctccctcgtatccaccacctgagcaattcttcaacccctctacttacaactttgatgcaacgtgtctgctgaactctggagtcgtacatttaacatgtacaggcttccagaaagagacgctcaccttccttaagaaatcaggacccagtctgaatgaactcattcccgacgggtataaccgctgtttagttgcagggctgctgtccccgcgcttcgttgacgtgcagccctcatcactgtcacaggaggaacagttggaggctattctctctgccgccattcagactagcagtctgggcctcttaacgggctatatcagaaggtggatcaccgaggagcagccaaattctgccactaatctgcgcttcgttctcgagtggacttggaacaaagtagtgttaacaaaggaggagtttgatcgactctgcgtgcccctgtttgacgggtcctgccactttatggacccacagaccatacaatcaattcagcagtgttatctcctgctgtctaatttgaatatcgtattgtcttgtttcgcctccgaggcccgtgaaattactgaaagaggcctcattgacctcagtaacaagtttgtggtttctcatttgatttgccagtacgcccaagttgtcctgtggttctctcattccggcctcttacccgaagggatcgatgatagcgtgcagttgagccggctgtgttacaattatcccgtgatccagaactattatacctccaggcgccagaagtttgagcgcctcagcagaggtaagtggaatcctgattgtctaatgattgatggacttgtttcccagctaggggagcgcattgagaaactgtggaaacgagatgaagggggtacagggaaatacccacctgcctctttacacgcagtgctcgacatgtacctcctcgatggcgtgacagaagcagccaaacactccataactatctacttgctgctggacataatgtatagcttcccaaataaaactgatacaccaattgagtcctttcctacagtgtttgccataagctggggccaagtgaaactaatccagggattctggctaatcgaccataatgattatgagagcggactagacctcctctttcaccctgccaccgctaaacctctgtcctggcagcatagcaagatcatacaagccttcatgtcgcaaggcgaacaccggcaggcactacgctatatccagactatgaagcctaccgtgtcaagcgggaacgacgtgatcctacatcttaccgtgctgttgttcaatagatgcatggtggaggcctggaacttcctcagacagcactgtaaccgattgaatattgaggagctgcttaaacatatgtatgaggtctgtcaggagatgggactaatggaagaccttctgaagttgcctttcactgatacagagcaagagtgtctggtcaaattcctgcagtcatccgcaagcgttcagaaccatgagtttctgctggtgcaccacctgcagagggcgaactacgtgccggccctgaagctgaaccaaaccttaaaaatcaatgtcatgaatgaccgggatccgcggttgagggaaaggtccctcgctagaaattcaatccttgaccagtacggtaagatactccccagggtccacagaaaattagccattgagcgagcaaaaccataccatctctccacctcctcggtgtttcgtctggtgagtagaccaaaacctctgtccgccgtacctaaacaagtcgtgacgggtaccgttttgactcggagcgtgttcatcaacaatgtgctgagtaagataggcgaggtctgggcctcaaaggagcccatcaactcgactaccccttttaattcaagcaagattgaagaacctagcccgattgtgtacagtctgcccgccccagaactgcccgaagcattcttcgggacacccataagcaaggcatctcagaagatctcccgcctgctggacctggtcgttcagccagtgcctagacccagtcagtgttccgagttcattcagcagtcatccatgaagtcacctctctatcttgtgagtaggagtctgccctctagctctcagttgaagggcagcccacaggccatatcacgggcatcggaattacacctgttggaaaccccactggttgtgaaaaaagccaagtccttagccatgtcggtgacaacctctgggtttagtgagtttacccctcagagtattcttcggagcacattacgttctacccccctggcatccccatctccttctcctggacggagccctcaacgcctgaaagaaacaaggatcagctttgtggaggaagacgtacaccccaagtggatccctggtgcagctgacgacagtaagctcgaggtgttcaccactccaaagaaatgcgctgttccggttgagacagaatggttaaagtccaaggatcgcacaaccagtttcttcctcaactcgccggagaaagagcatcaggagatggacgaggggagccagtccctcgaaaaactagacgtatctaaaggtaatagtagtgtctccatcacaagcgatgaaaccacgctggaataccaagatgctccttcccctgaagatcttgaggaaacagtatttacggcttctaagcctaaatcatcctccaccgcccttacaaccaacgtcacggagcaaacagagaaggatggggataaggacgtgttcgcttctgaagtcacgccatcagacctgcagaaacagatgggcaatcttgaggatgcggagacgaaagacctgctcgtggctgcagaggctttttctgagctcaatcacctgagccccgtgcaggggacagaggcgtcactctgtgcccctagtgtgtacgagggcaaaattttcacgcaaaagagcaaggtccccgtgctggacgagggtctgacttcagtcgagacttatacccccgctattagagctaatgacaacaagagcatggctgacgttctgggagatgggggcaattcctctctgaccatcagtgaaggccccattgtttccgagaggcgactgaaccaggaagtagctttaaatttgaaggaggatcatgaggtggaggtcggagtattgaaagagagcgtagacttaccagaagagaaactaccaatctccgactccccccccgacactcaagaaatccatgttatagaacaggagaagttggaagcccaagactctggggaggaagcacgtaatctctcctttaatgagctgtatccttccggcactctgaaattacagtataatttcgacacaatagaccagcagttctgtgatttggcggacaacaaggatactgcagagtgcgacatcgctgaagtggacggggagttgtttgttgctcagtccaatttcacgctcatccttgagggcgaggaaggcgaggtcgagccaggagacttcgcttcttctgacgtgctccctaaagccgccaatacagcaaccgaagaaaagctggtttgtagtggagagaacgataatcacggccagatcgccaacctgccatctgcagtcactagcgatcagaagtctcagaaggtcgacactctcccctacgttcccgaacccattaaagtcgctatcgccgaaaatctgctcgacgtcataaaggatacaagatccaaagagatcactagtgacacaatggaacagagtatccacgaaacgatccctttggtctcacagaacatcatgtgccctaccaagttagtcaagtcagcatttaaaactgctcaagagacgtccacaatgactatgaatgtatcccaggttgatgacgttgtttccagcaagacgcgcactcggggccagcgtatccagaacgtcaatgtcaagtccgcgcagcaggaggcatcggccgacgtggcaacccccaagatgccgggccaatcagtgcggaaaaagactagaaaggcaaaagagattagtgaagcttccgaaaacatttatagcgatgtgcggggtctttcccagaatcaacagatccctcagaactcggtgacacctcggcgcgggcgccgtaaaaaggaagtaaaccaggatatattggagaacacctctagtgtggaacaggagctccagatcactacagggagggagtcgaagagattgaaatcatcacagttgctcgagcccgctgttgaagagactaccaagaaagaagtaaaggtttcgtctgtcacaaaaaggacgccaagaagaataaagagatccgtagaaaaccaggaaagcgtggaaattatcaatgacctgaaggtttcgaccgtcacttctccctctcgcatgattagaaaactccgttccactaatctcgatgctagcgagaatacgggaaataagcaggacgacaagagcagcgataaacagctgcgtattaagcacgtgcgtcgggtcagagggagagaggtctcccctagcgacgtacgtgaggatagcaacctagaatcaagtcaactcactgtacaggccgagttcgatatgtcagctattcccagaaagcgtggaagaccaaggaaaatcaatcctagtgaagatgtagggtctaaagccgtcaaggaggagcgctcccccaagaagaaggaagccccgtccatccgtaggaggagcacacgcaatacaccggctaagagcgagaacgtagatgtgggcaaacccgctttgggtaaaagtattctggtgcctaacgaagagctgtccatggtgatgtctagcaaaaagaagcttacgaaaaaaaccgagagccagagtcagaagaggagtctgcacagtgtgtcagaggagagaactgacgagatgacgcacaaggagactaatgaacaggaagagcgcctgcttgcaacggcatcttttacaaaatcttccaggagttcacgcacccgtagctcgaaagccatcttactgcctgatctcagcgaacctaacaacgagcctctcttttcgccagcgtccgaggtgcccaggaaagccaaggccaagaagatcgaggtgcccgcccagctcaaggagttggtgtcagatctgagttcccagttcgtaatcagcccgccagcactgaggtctcgacagaagaacactagcaataaaaataagctcgaagacgagctcaaagacgacgcacagagtgttgagactctgggaaagccaaaagcaaagcgtatacgcaccagcaagactaaacaggcgagtaagaacaccgagaaggaatcagcatggtctcctcctcccattgaaatcaggttgatctcccccctggctagcccagcagacggagtgaaaagtaagcctcggaagaccacagaggtaacaggaacaggcctgggccgaaaccgcaaaaaattatcgtcataccccaagcagattttgagacggaagatgctatag

SEQ ID NO: 108816 - DNA, 6801 bp, synthetic construct
  misc_feature 1..6801: note = Description of Artificial Sequence: Synthetic coding sequence
  source 1..6801: mol_type = other DNA
atgagagatctaagggcccaggtcaccagtggcctcttacctttcccagaggtgactctacaggctctgggggaggatgagatcaccctggaaagcgtgctaagaggaaaatttgccgccgggaagaatggtctggcctgtcttgcttgtggaccacaactagaggtagttaattctatcaccggtgagcgactgtctgcctatcgctttagtggtgtcaatgaacaaccaccggttgtgctcgctgtaaaggaattcagttggcagaagcgcaccggacttctgatcggcctggaagaaacggaggggtccgtgctgtgtctctacgatctgggcatttctaaagttgtgaaggctgtggttctccccggaagagttactgcaatagagccaattattaatcacggcggcgcttccgctagcacgcagcatctccacccgtcactcaggtggctgttcggggtggctgctgtggtgactgatgtgggacaaattcttcttgtcgacttatgtttggacgacctgtcctgtaatcagaatgaggtggaggcctctgatcttgaggttctgacaggcatcccagccgaggtgccccacattcgggagagcgtcatgcgccaaggaaggcacctttgtttccaactggtatccccaacaggaacagctgtctccaccttgagttatataagccggacgaatcaactggccgtaggcttttcagatggctatctcgcgttgtggaatatgaagagtatgaaacgagaatactacattcagcttgaatctggccaggtgccagtctacgccgtgacttttcaggaacctgaaaacgatccgaggaactgttgttatctttgggcagtccagagcacccaagacagcgagggagatgtcctgtccctccacctattgcagctggcttttgggaatcggaagtgtctggcgagcggacaaatcttatatgaagggctggagtactgcgaagagagatatacattggacctgacaggcggcatgtttcctctgaggggacagacctcaaatactaagctgttgggctgccagtcgattgagaaatttcggtcccatggggaccgggaggagggcgtcaatgaggccctcagcccggataccagtgttagcgtgttcacgtggcaggtgaacatctatgggcaaggcaaaccatctgtgtacttgggactgtttgatattaatcgctggtaccacgcacagatgcccgactcactgaggtcaggcgagtacctgcacaattgctcgtattttgctctgtggagtctcgagtcggtggtgagtagaacctcacctcatggcatccttgacattctcgtgcatgaacggtcacttaaccgaggagtgccccccagttaccctccccccgagcagttcttcaacccctcaacatataattttgacgccacatgtctgctgaatagcggagtggttcacctgacatgcaccggcttccagaaggaaacccttacgttcctaaagaagtccgggccatcccttaatgagctgattccagacggctacaatagatgtcttgtggcaggtttgctgtctccacgatttgtggatgtccagccttcttccttgtcacaggaggaacagcttgaggcaatactgtcagctgccatccagaccagtagtttgggattgcttactgggtacattagaaggtggataacggaagagcagccaaacagtgctactaacctgcgatttgtactggagtggacttggaacaaggtggtgctgacgaaggaagaattcgatcggttatgcgtgcctctgtttgacgggtcgtgccacttcatggaccctcaaactatccagtccattcagcaatgctacttgttactcagtaacttaaatattgtgctgtcctgtttcgccagcgaagcccgggagattacagaacgcggccttatcgacctgagtaacaagttcgtggtcagccatctgatttgccaatatgcccaggtggttttgtggttctcccacagcggccttttgcctgaaggcatagacgattcagtacagctgagccgactgtgctacaattatccagttatccaaaattactacacttcacgtaggcaaaagtttgagagattaagccgcggaaagtggaacccagattgtctcatgattgacggtttggtcagccagctgggagaaaggattgaaaaattgtggaaaagggatgaaggaggaacagggaaatacccgccagcttccctgcacgctgtgctggacatgtacctgctggacggtgtaaccgaggcagcaaaacattccataaccatctacctgctgcttgatatcatgtattctttccctaataagaccgatacccccattgaatcctttccaaccgtgttcgccatcagctggggccaagtgaaacttattcaaggcttttggttgattgatcacaacgattatgaatcaggactggatctcttgttccaccccgcaacagcaaaaccacttagctggcagcatagcaaaattattcaggcgttcatgagccagggcgaacacagacaggccctgcgatacattcaaactatgaaaccaacggtgtcatctgggaatgatgtcatattgcacctcaccgtgctactgtttaatagatgcatggtggaagcatggaattttctgagacaacactgcaatcggctaaatattgaagaattgctaaaacacatgtacgaagtgtgccaggagatgggcttgatggaggacctgcttaaactaccattcactgatacagaacaagagtgcctcgtcaagtttctgcagtcctcagccagcgtccagaaccatgagttccttcttgtccatcatttacaaagggccaactacgttcctgcgctgaagttgaatcagaccctgaaaatcaatgtgatgaacgatcgcgatcccagattgagagagcggagtctcgctaggaatagcattctggatcagtatggaaagatactgcctagggtgcatcggaaattggccatcgaaagggccaaaccctaccacttgtccacctcctctgtatttcgtcttgtgagcagaccgaaacccttatccgcagtcccaaaacaggtcgttaccggaactgttctgactagatccgtttttattaacaatgttctttccaaaattggcgaggtttgggctagcaaggagcctattaacagtacaaccccattcaacagttccaagatcgaggagccttcccctatcgtttattccctgcccgctccggagttacctgaagccttcttcgggacacctatcagcaaagcttcgcagaagatttctaggctgctggacctcgtcgtgcaaccggtgccacgtccaagccaatgctccgaatttatacagcaatccagcatgaaatcaccgctgtacctggtcagcagaagtctccccagtagcagccaactgaagggcagcccacaagctatttcccgcgcaagcgagctgcatctgttggagacacccctcgtagtgaaaaaggctaagtcactggcaatgagcgtgacaacatcgggattcagtgagtttacccctcaaagcattctgcgcagcacgctgcgctcaacaccactcgcatctccgtccccgtcacccggaaggagtcctcagcgccttaaagagaccaggattagctttgtagaggaggatgtgcaccctaaatggatccctggcgctgcggacgatagcaaattggaggtgtttacaaccccaaaaaaatgcgctgtcccggtggagaccgagtggctgaagtccaaggataggactacttccttctttctaaactccccagaaaaagagcatcaggaaatggatgaaggcagccagtctcttgagaagttggacgtttcaaaaggtaatagctccgtatctatcaccagtgacgagacaaccctagaataccaggatgcaccatctcccgaggacttagaagagactgtgttcaccgcttcaaagcccaagagctcatccacggccctcaccaccaacgttacagaacagacagagaaggacggtgacaaagatgtgttcgcatcagaggtgactccaagcgatttgcagaaacaaatggggaatctggaggatgcagaaaccaaggacctgctggtagctgctgaagcttttagcgagttgaatcacctgagccccgtgcagggcacagaggcctcgctgtgcgcaccaagcgtttatgagggaaagatttttacccaaaaaagcaaggtgcctgtcctggacgaaggactgacaagtgtggaaacatatactcccgccatccgggctaacgacaacaagtctatggccgatgtcttgggagatgggggaaattcgtctctgactatatcagaagggcctatcgtctcagaaagacgcttgaaccaggaggtcgctcttaacttaaaagaggatcacgaagtggaggtcggtgtcctcaaggaatccgtggatctccccgaagaaaaacttccaatatcagatagcccacctgacacacaggagattcatgtgatcgagcaggaaaaactggaggcccaggattcgggtgaagaagctcggaacttatcctttaatgaactctatccttctggcaccctcaagcttcagtataacttcgacaccattgaccagcagttctgtgacctcgcagacaacaaggataccgccgagtgtgacatcgcggaggttgacggagagttattcgtggcccagagtaacttcacgctgattctagagggcgaagaaggcgaggtggaacccggggattttgcgagctcagacgtgctcccaaaagccgcgaatacagccactgaggagaagctggtttgctctggagaaaacgataatcatggtcagatcgcaaacctgcccagcgccgtaacctctgaccagaaatcccaaaaggtggatactcttccgtacgttcctgaacctatcaaggtagcaatcgcagaaaaccttctggacgttatcaaggatacacgtagcaaggagattacctccgacactatggagcaatcaatacatgaaacaattccgcttgtgagccagaatatcatgtgtccaacaaaactagtcaagtctgcttttaagacggctcaagaaacctccaccatgaccatgaatgtttcccaagttgacgacgtcgtcagctctaagacaagaacccgcggccagaggatccaaaatgttaacgttaagagcgcacaacaggaggctagcgccgatgtcgctacaccaaagatgcccggtcagagtgtgagaaaaaaaaccagaaaggcaaaggagatcagtgaggcaagtgaaaacatctactctgacgtgcgtggactgagtcagaaccagcagatcccacagaactccgtgacaccaagaaggggaaggagaaagaaagaagtgaaccaagacatcttggaaaatacctcctccgtagaacaggaactacagatcactactggaagggaatctaagcgcctaaaatccagtcagctgctggagccggccgtcgaagagaccaccaaaaaagaggtcaaggtgtcctccgtaaccaagaggacgccaaggcgaatcaagcgaagcgtcgagaatcaagaaagtgtcgagataatcaatgacttaaaggtttcaacagtgacctctccgagccgcatgatcagaaagctgcgatctactaatctagacgcttctgagaacaccggaaacaaacaggatgataagtccagtgacaaacagctgcgcattaagcacgtccgccgggtgcgcggcagagaggtttccccatcggatgtcagggaagattccaatctggagagttctcagctgactgtgcaggcggaatttgacatgtctgccattccgagaaagcgtggccgccccagaaagatcaacccctctgaggatgtcggatcaaaggcagttaaggaagaaaggtcccctaagaaaaaggaggccccctccattcgcaggcgatcaactaggaatacacctgctaagtccgagaacgtggatgtcggaaaaccagctctaggaaagtccattcttgtaccaaatgaagaactgagcatggtcatgtcatcaaagaagaagctcacaaagaagacagaaagccagtcgcagaagcgctcgctgcacagcgtctctgaagagcgcaccgacgagatgacccataaggaaaccaacgagcaggaggaaagacttttagctacagcctcatttaccaaaagcagccggagttccaggactcgatcctcgaaagccatcctccttcccgatctgagcgagccgaacaatgaacctttgtttagccctgccagtgaggtgcctcgcaaagctaaagctaagaaaatagaggtgccagcccaacttaaggaactcgtgtctgatctgtcatcacaattcgtcatcagccctcctgcccttaggagcaggcaaaagaacacctcgaataaaaataaactcgaggatgaactgaaagacgatgcacaatccgtcgaaacactcggcaagccaaaggcaaagcgcataaggacaagcaagaccaagcaggcctctaaaaacaccgagaaggagtctgcctggtcccccccacctatcgagatccgtctgatatctccgttggcatcacccgccgacggtgttaagtcaaaaccgagaaagactactgaggtgactggcaccggactggggcgcaaccgcaagaagcttagcagctaccccaagcaaatactgagaagaaagatgctttag

SEQ ID NO: 108817 - DNA, 3567 bp, synthetic construct
  misc_feature 1..3567: note = Description of Artificial Sequence: Synthetic coding sequence
  source 1..3567: mol_type = other DNA
atgaaggccgccgatgagccagcctacctcaccgtgggcaccgatgtgagcgccaaataccgcggagctttctgcgaggccaagataaagaccgtgaagcggttggtgaaggtcaaggtgctgcttaagcaggataacacaacccagctagtacaggatgatcaggtgaagggccctctccgtgtcggtgcaatcgtggaaacccgaacgagcgacggtagcttccaagaggctattatctcgaaactcacggatgccagctggtatactgtggtcttcgatgacggagacgagcgtaccctccggcgaacctctctgtgccttaagggggagcggcatttcgccgagtcagaaacactggaccaattgccactgacaaaccctgagcactttggtactccagtgattgcaaagaagactaatagaggacggagatcaagcttgccagttacagaggacgaaaaagaagaagagtcaagcgaggaagaggacgaagacaagaggagactcaacgacgaactgctgggtaaggtagtgtctgtagtgtccgcaacggagcgaacagagtggtaccccgcgctagtcatcagcccttcctgcaatgatgatatcaccgtgaagaaggatcaatgtctggtgcgaagcttcatcgatagcaaattctactccatcgcgcgcaaagatataaaagaggtagacatcctcaatctgccggaaagcgaattgtcaactaagcccggtctgcaaaaggcctcaatttttctgaaaactagagtagtgcctgataactggaagatggacatcagcgagatattagagtcctcgagctctgacgatgaggatggacccgctgaggaaaacgacgaggaaaaggaaaaggaggccaagaagaccgaggaagaggtgccagaggaggaattagacccagaggaacgcgataacttcttacaacaactctataaatttatggaggaccggggtacgcccatcaataaacctccggtgttaggatacaaggatctcaatctatttaaactcttccgcctcgtctaccaccagggggggtgcgataatattgactcaggagccgtgtggaagcagatctatatggacctcggtatccctattttgaatagcgccgcatcttacaacgtgaagaccgcttaccggaagtacctctatgggtttgaggaatactgccggtcggccaacattcaattccgaacggtccatcatcacgaacccaaagtcaaggaggagaaaaaagacctagaggaaagcatggaggaagctcttaagctggaccaggagatgcccctaacagaggttaagtccgaaccggaggagaatattgattccaactctgagagcgagcgtgaagagatagagctcaagtcccctcgcggcagaagacggatcgcccgggacgttaattccatcaaaaaagagatagaggaagaaaagaccgaagataaactaaaggataatgacacagaaaataaggatgtggacgacgactacgagactgccgaaaaaaaagagaacgagcttcttctcggccgcaagaatactcctaaacagaaggaaaagaaaattaagaaacaggaggactcagataaggattctgatgaagaggaagaaaaaagtcaggagcgagaggaaacagagtccaagtgcgattcagagggggaagaagacgaggaggatatggagccttgtctgaccggcactaaggtaaaggtgaagtatggcagggggaagacacaaaagatttacgaagctagcattaagtccaccgagatcgacgacggggaggttctgtacctggtgcattattacggatggaacgtgaggtatgacgagtgggtgaaggcagaccgaattatctggcctctcgacaaaggcgggcccaaaaagaaacagaagaaaaaggcgaagaacaaagaagattcagagaaggatgaaaaaagggatgaggaaagacagaaatcaaaacgcggaagaccccctctcaagtccaccctctccagcaatatgccttatggcttaagcaagaccgccaatagcgagggcaagtctgactcctgttccagtgattccgagacggaagacgccctagagaagaatctgataaatgaagaactcagccttaaggatgagctagaaaagaacgaaaatcttaatgacgacaagcttgacgaagaaaatcccaagatctcagcgcatatcctgaaagagaacgaccgtacacagatgcagcccttagaaactctcaagttggaggtgggcgagaacgagcagatagttcagatctttggaaacaagatggagaagacggaggaggtgaagaaggaggctgaaaaatcccctaaagggaaggggagacgtagtaaaactaaagacttaagcttggagattatcaagatctcctccttcggtcagaacgaagccggatcagagccgcacatcgaagcgcatagcttggaactcagcagcctggataacaagaatttttcaagtgcaacggaagatgagattgaccagtgtgtgaaagaaaaaaagcttaaacggaaaatccttggtcagagcagccctgaaaaaaaaattcgcatagagaacgggatggagatgacgaatacagtttcacaggaacggacaagcgattgtatcgggagcgaaggaatgaaaaacctgaacttcgaacagcactttgaacgagaaaatgaggggatgccttcccttattgccgagtctaatcaatgcattcagcaactgaccagcgagaggtttgacagccctgccgaggagaccgtcaatatccctctgaaagaagacgaggacgccatgccactgattggcccagaaacccttgtctgccatgaagtggacctggacgaccttgacgaaaaggataagacctccattgaggatgtggctgtcgagtcgtcggaaagcaactctctagtgagcatcccccctgcccttccacccgtagtgcagcacaacttctccgtcgcctcgccactgactctttcacaggacgagtcccgttccgtgaaaagtgagtctgacatcactatcgaggttgactcgattgcggaggaatcccaggaaggtctctgtgagcgcgagtccgccaatggcttcgagacaaatgtagcaagcggaacttgcagcatcattgtccaggaaagagagtcacgcgagaaaggtcagaagcgccccagcgatggtaatagtggactcatggctaaaaaacagaaacgcacaccaaagagaacctccgctgcagccaagaacgagaaaaatggaacagatgagctggacaacatgaattctactgagaggatcagcttcctccaggaaaagcttcaggagatacggaagtattatatgtctttaaaaagcgaagtggctaccatcgaccggcgccggaagaggctgaagaagaaggaccgagaagtgagccatgccggggcatccatgtcttctgcctcctccgatacaggcatgagtcctagtagttcctctcctccccaaaatgtgctcgcagtagagtgtaggtag

SEQ ID NO: 108818 - DNA, 3774 bp, synthetic construct
  misc_feature 1..3774: note = Description of Artificial Sequence: Synthetic coding sequence
  source 1..3774: mol_type = other DNA
atgaaagcagctgatgaacccgcttacctgaccgtaggtacggacgtgagcgcaaagtaccggggggcattctgcgaggccaagataaagaccgttaagcgattggttaaagtgaaagtgcttctcaaacaggacaacacaactcaactggtgcaggacgatcaagtcaagggccccttacgggtgggtgcaatcgtcgaaaccaggacatctgacggatctttccaagaggcaatcatttcaaagctgacagacgcatcctggtacacagtcgtatttgatgacggcgatgagaggacgctgaggcggactagcctgtgcttaaagggagagcggcattttgcagagtctgaaaccctggaccagctaccgttgacaaaccccgagcatttcggaactcccgtgatcgcgaagaagaccaacaggggaagaaggagttctctgccagtgacggaagacgagaaggaggaagaaagttcagaggaggaggatgaggacaagaggagactgaatgacgaactcctgggtaaagtcgtgtccgtggtgtcggccaccgaacgaacagagtggtaccctgccttggttataagcccaagctgcaatgacgatataaccgtgaaaaaagatcagtgtctggtgcgatcttttattgacagcaaattttatagcattgcacgtaaggatattaaagaggtggacattttaaacctgcctgagtctgagctgtctactaagccaggccttcagaaggcctccatattcctgaagactagggtcgtccctgacaattggaagatggatatcagtgagattctagaatcttcaagttccgatgatgaggacggaccagccgaggaaaatgacgaggaaaaagagaaggaagctaagaaaacggaggaagaggtacccgaggaggaattagaccccgaggaacgcgataacttcctgcagcagctttacaagttcatggaagatcgggggacacctattaacaagccccctgtgctggggtacaaagatctaaacctcttcaagctatttagactggtctatcaccaagggggttgtgataatattgacagtggagctgtttggaaacagatatatatggacctggggattcctatcctgaactctgcagcctcatacaacgtaaaaacagcgtatagaaagtatttgtacgggtttgaagagtattgtcggtctgcgaatatccagttccgcaccgtccatcatcacgagcccaaggttaaggaagaaaaaaaggatttagaggagtccatggaggaggccttgaaactggaccaggagatgccgctgaccgaggttaagtccgagcctgaagagaacatcgacagcaacagtgaaagcgaacgggaagagatcgagctgaagtccccacgcggacgaaggcgaatagctagagatgtgaattctatcaagaaagagatagaggaggagaaaactgaggacaagttgaaagacaacgacacagaaaataaagacgtcgatgacgactacgagacagctgaaaaaaaggagaatgagctcctactcggaaggaagaacactccaaaacagaaagagaaaaagattaagaagcaggaagattcagacaaggatagcgacgaggaagaggaaaaatcccaggagcgcgaggagacagagtcaaaatgtgacagtgagggggaagaggacgaagaggatatggagccatgtctgaccgggacaaaggttaaagtgaaatatggaagagggaaaacacagaagatctacgaagcaagcatcaagtcaaccgaaatagacgacggggaggtactgtatctagtccattactatggttggaatgttagatacgatgagtgggtgaaggccgatcgcatcatttggccgctggataagggagggcctaagaagaagcagaagaagaaggcgaagaataaggaggattctgagaaggacgagaaacgggacgaggaacgccagaagtcgaaaagagggagaccacccctgaaaagcacgttaagtagtaacatgccctacggattgtctaagacagccaatagcgaggggaagagtgactcttgcagctctgattccgagactgaagacgctctggaaaagaatctgatcaacgaggaactttctctgaaggatgagctggaaaaaaacgagaatctgaatgatgacaaactggacgaggagaaccctaagatcagtgcccacatcctgaaagagaacgataggacccaaatgcagccactggaaacgctcaagttagaagtaggtgagaacgaacagatcgttcagatctttgggaataaaatggaaaaaactgaagaagtgaagaaggaggccgagaagtcccctaagggcaaagggagacggtcaaaaaccaaggacctttcgctcgaaatcatcaaaatttcatcttttgggcagaatgaggccggaagcgagcctcacatcgaggctcattcacttgagttgtcatctctggacaataaaaactttagctcagcaacagaggacgaaatagatcagtgtgtgaaagagaaaaagctaaagaggaagatccttggacagagttcaccagaaaagaagatccgaatcgagaacggtatggagatgaccaatactgtgtctcaggagagaacttcagactgtatcggctccgagggtatgaaaaacctcaactttgagcagcatttcgagagggagaatgagggcatgccgagcctgatcgctgaatccaaccagtgtatccagcagctgacctccgaacgattcgacagtccagccgaagagacggtaaacattccactgaaggaggatgaagacgctatgcccctgataggacctgaaactttagtgtgtcatgaggtagatcttgatgatctcgatgagaaggataaaacctccatagaggacgttgccgtggaaagctctgaaagcaactcattagtgagcatcccaccggccctgccccctgtggttcagcacaactttagtgttgctagccccctgacactttcacaggatgaatcacgttccgtgaaaagtgagagcgatataactatcgaagttgactctatagccgaagagtcccaagagggcttatgcgaacgagagagtgctaacggatttgagaccaatgttgcctcagggacctgcagtattatcgttcaggaacgggagtcacgcgaaaaggggcagaaacgcccttcagacggcaacagcgggctaatggccaagaaacagaagagaacaccaaagaggacatccgctgcggccaagaatgagaagaacggcacggggcagagcagtgattctgaggatctgcctgtgctcgacaatagctctaaatgcacacctgtcaaacacctgaatgtgagtaaacctcagaaactggcccgctcacccgcccgaatttccccccacatcaaggacggagagaaggataagcacagagagaagcaccctaacagcagcccaaggacctacaagtggagtttccaattgaacgagctggacaatatgaattctacagagcggatttcattccttcaggagaaacttcaagagattaggaaatattatatgagtctgaagtccgaggtcgctaccattgatcgccggcgcaaaaggctcaagaagaaggacagggaagtaagtcatgcaggggcgtccatgagttcagcgtcctcagacaccggcatgtctccaagttcctcctccccaccacagaatgttctggcagtagaatgtagatag

SEQ ID NO: 108819 - DNA, 3612 bp, synthetic construct
  misc_feature 1..3612: note = Description of Artificial Sequence: Synthetic coding sequence
  source 1..3612: mol_type = other DNA
atgaaggccgccgacgagcctgcatatctgactgtgggtaccgacgtgtccgccaaataccgcggggccttctgtgaggccaaaataaaaacggttaaacggctggtgaaggttaaggtgctactgaaacaagacaacacaacacagctcgtccaggacgaccaggttaagggacccctccgcgtgggggcaatcgtcgagaccaggacctccgatggttccttccaggaagctattatatctaaactaacagatgcctcctggtacaccgtggtgttcgacgatggtgatgaacgtacattgcgccgtaccagcttgtgccttaagggcgaaaggcacttcgctgaatctgagactcttgatcaactcccactgacaaaccctgagcacttcggcacacccgtcatcgctaagaagacaaaccgcggcaggaggagttccctacctgttacagaagacgagaaggaagaggagtcttcggaggaagaggatgaagataagcgccgactgaatgacgagttgctgggcaaagttgtctccgtggtgtccgcaacagaacgtacggaatggtatcctgccttggtgatttccccctcatgcaacgatgatatcacagttaagaaggaccagtgtctggtacggtccttcatcgattccaaattttatagcattgcccggaaagacattaaggaggtggatatcctgaacttgccggaatctgagctcagcacaaaaccagggttacagaaggcatcaatatttttaaagacccgagtggtccctgacaactggaaaatggatatcagcgagattctcgaaagctcatccagcgacgatgaggatggccccgcggaagaaaacgatgaagaaaaagagaaagaagcaaaaaaaaccgaggaggaggtccctgaggaagagctcgaccctgaggagcgcgacaatttcctgcagcagttgtataaattcatggaggaccgtggtacccctatcaacaaacccccagttctgggatacaaagacctgaacctatttaagctgttcaggctagtgtatcaccaaggtgggtgcgataacattgactctggcgccgtttggaagcagatatatatggacctgggtattcccatcctcaatagcgccgcgagttataacgtgaagactgcgtatcgcaagtacctctacggctttgaggagtattgcagatctgcaaatatacaattccgcaccgtccaccatcacgagcccaaagtcaaagaggagaagaaagacctcgaggaatctatggaagaggccttgaagctagaccaggaaatgccactaacagaggtgaagagcgaacctgaggagaatatagattccaatagtgagagtgagagggaggagattgagctgaaaagtccacgggggcggcgtagaattgcccgggacgtcaactctattaagaaggagattgaagaggagaaaactgaagacaaactgaaggacaacgacaccgaaaacaaggacgttgacgatgactatgagactgctgagaaaaaggagaacgaactcctgctcgggaggaagaacacgcctaagcagaaggagaagaagatcaaaaagcaggaggactctgataaggacagcgacgaggaggaggagaaatcccaggagcgagaggagactgaatctaagtgcgactctgagggcgaagaagatgaggaggatatggagccttgtttgactggaacaaaggtcaaggtgaaatatgggcggggaaaaacacagaaaatatacgaagcttctattaagtccacagaaattgacgacggtgaagttctgtaccttgtgcattactatggctggaatgtccgctacgatgagtgggtgaaggccgaccgcattatctggcccctcgacaaggggggtcccaaaaagaagcagaagaaaaaggccaaaaataaggaggactctgaaaaggacgagaagagggatgaggagcggcagaagagtaaacgtggacgaccacccctgaagagcactctttcctctaatatgccatacgggctaagtaagactgcaaacagcgagggcaaatcagactcctgcagtagtgacagcgagactgaagatgcattagagaagaacctcattaacgaagaactgtctctgaaagatgagctggagaaaaacgagaatctgaacgacgacaagctggatgaagagaaccccaagatatctgctcacattctcaaagaaaacgaccggacgcaaatgcagccactcgaaactctgaaactggaagtcggagagaacgagcagatagttcagatatttggaaacaagatggaaaaaaccgaggaggttaagaaggaggctgagaagagccccaagggcaaaggtaggaggtcaaagactaaagacctgtcactagaaataatcaaaatctccagtttcgggcagaacgaagcagggtccgagccccacattgaggcacatagcttggagctgagttcactcgataataagaatttttcatcggccaccgaggatgagattgatcagtgcgtgaaagaaaagaaacttaagcgcaagatactgggacaaagctccccagagaagaagatccggatagaaaatggcatggagatgaccaatacggtgagccaggagcgaacaagcgactgtatcggctccgagggcatgaagaatctgaattttgagcagcattttgaacgcgaaaacgaaggtatgccatcactgattgccgagtcaaatcagtgcatccagcaactgacgtctgaacggtttgacagccccgccgaggaaacagtgaacatccctctcaaggaggacgaggacgccatgccactcataggacctgaaacacttgtatgccatgaggtggaccttgacgatctagatgagaaggacaaaacgtccatcgaggacgtggctgtggagtcgagtgagtccaatagccttgtgagcattcctcctgccctaccacctgtcgtacagcataattttagcgttgcttcacctctgaccctgtctcaggacgaatcacgatccgtcaagagcgaatctgacattactattgaggtcgatagcattgctgaggagtcccaggagggtctctgtgaacgagaaagcgctaatgggtttgagactaacgttgcttcgggaacctgctcaattatcgtccaagaaagagagtctcgcgagaaggggcagaagcgtccgagcgatggaaattccgggctgatggccaaaaaacagaagcgtaccccaaagcgtaccagtgctgctgctaaaaatgagaaaaatggaactggacagagctccgactctgaggacttgcctgtgctggacaatagcaatgaactggataacatgaactccaccgagcgcatctctttcctccaggagaaactgcaagaaattcgaaagtactacatgagtctcaagtccgaagtggcaacaattgatcgaagacggaagaggctaaaaaaaaaggaccgggaggtttctcatgcaggagcttccatgagtagcgcctcttcggatacaggcatgagcccttcaagcagctctccaccacaaaacgtgctggcagtagaatgtcgctag

SEQ ID NO: 108820 - DNA, 165 bp, synthetic construct
  misc_feature 1..165: note = Description of Artificial Sequence: Synthetic coding sequence
  source 1..165: mol_type = other DNA
atgaaagctgcagatgagcctgcttatctgacagtgggcactgacgtgtcagccaaatatcggggtgcgttctgcgaagctaaaatcaagactgttaagcgtcttgtgaaggtcaaggtactgttaaaacaggacaatacaacccagttggtgcaagacgactag

SEQ ID NO: 108821 - DNA, 3567 bp, synthetic construct
  misc_feature 1..3567: note = Description of Artificial Sequence: Synthetic coding sequence
  source 1..3567: mol_type = other DNA
atgaaggctgctgatgaacccgcctacctaaccgtcgggactgacgtctccgccaaataccggggagcattctgtgaggcgaagataaagacagtcaaacggttggtgaaggtgaaggtcctgttgaaacaagataacacaacacagctggtgcaggacgaccaggttaagggcccgttaagagtaggggccatcgtcgaaacgcggacgagtgacggcagctttcaggaggctatcatcagcaaactcactgatgcatcttggtacacagttgtattcgacgacggcgacgaacgtactttaagaagaacgagcctgtgtctcaaaggcgaacggcatttcgcagagagcgaaaccttggaccagctgcccctgaccaatccagagcattttggcaccccggtaatcgctaaaaaaaccaacaggggacgccggtcatctctgcctgtaacggaagacgagaaggaggaagagtcgagtgaagaggaagatgaggataagaggaggcttaacgacgaattgttgggaaaggtcgtgagcgtcgtttctgcaacagagcgaacagagtggtatcctgccctcgtcatcagcccttcttgcaatgacgacatcacggtcaagaaagaccagtgcctcgtccgttctttcatcgacagcaaattttattccattgcccggaaggatattaaggaggtagatatcctgaacctcccagaatctgagctgtctactaaaccaggcttgcagaaggcctccattttcctgaagacccgagtcgtgccagacaactggaaaatggacatttctgaaatactggagagttcaagctctgacgacgaggatgggccggccgaagagaacgacgaggaaaaagaaaaggaagcgaagaagactgaggaggaagtgccagaggaagaacttgaccctgaagaacgcgacaatttcctccaacagctctacaagttcatggaagacagggggacacctatcaataaacctcccgtgttgggttataaggacctgaatctatttaagctctttcgcctggtctatcatcagggaggctgtgacaacatcgacagtggggctgtctggaagcagatctacatggaccttggtatcccaatactcaactctgccgccagttataatgttaaaacggcatatcgaaagtacctgtatggcttcgaggaatactgccggagcgccaatattcaatttcgcacagttcaccatcacgagcctaaagtgaaggaggaaaaaaaagatctcgaagaatccatggaggaggcattgaagcttgaccaggagatgccactgacagaagtgaagtccgaacccgaggagaacatcgattcaaactcagaatcggagcgggaggagatagagctgaaatctccccgcggaagacgcaggatcgcccgggacgttaatagcattaagaaggaaattgaggaggagaagaccgaggacaagttgaaagataacgatacagagaataaggacgtggacgatgactacgaaactgctgagaaaaaagagaacgaattgctgctgggcagaaaaaacactcctaagcaaaaggagaaaaaaataaaaaagcaggaggacagcgacaaagactccgatgaagaagaggagaaatcccaggagcgtgaagagactgagtctaaatgtgacagcgagggtgaagaagacgaggaggacatggagccttgtctgaccgggactaaggttaaggtgaagtatggacgtggtaagacacagaaaatttatgaggccagtatcaagtctacagagatcgacgacggcgaagtattatacttggtccattattacgggtggaacgtgagatacgatgaatgggtaaaggccgataggataatctggcccctcgacaaaggcggccctaaaaagaagcagaaaaaaaaggcaaaaaataaggaagacagcgaaaaggatgaaaagagggacgaggagcggcaaaagagcaagcgtggacgcccccctttgaaaagcacactgagctccaatatgccttatgggttaagtaaaacagccaactctgaaggtaagtccgactcttgtagttccgactccgagacagaagacgccctggaaaagaatctgattaatgaagaattgtctcttaaggatgagctggagaagaatgaaaacctgaatgacgacaaactggacgaagagaatccaaagatttccgcccatattttaaaagagaatgatagaacccagatgcagcccctagaaactctaaaacttgaggtgggcgagaatgagcaaatagtgcagattttcggcaacaagatggaaaaaacagaggaagttaagaaagaagccgaaaagtctcctaaaggcaaagggcgtagaagcaagacaaaggatctatccctggagatcatcaagatcagtagcttcggccagaacgaggctggctctgaaccccacatcgaggcacactcacttgaactgagctcactcgacaacaaaaactttagtagcgccaccgaggatgagatcgaccagtgtgtgaaggaaaaaaaactgaagcgaaaaattctgggccaatcctctcctgaaaaaaaaataagaattgagaatgggatggagatgaccaacaccgtgagtcaggagaggacatcagactgcattggttccgaaggcatgaaaaatctcaattttgagcagcacttcgagagggagaatgagggcatgccgagtcttatcgcggagtctaaccagtgtatacagcagctgacctcagagaggttcgactccccggcagaagagaccgtgaacataccacttaaggaggatgaggatgctatgcctcttatcgggccagaaactctggtttgtcacgaagttgacttggacgatttagatgagaaggataaaactagtatcgaagacgtggctgttgagagctccgaatcaaattcactcgtctcgatcccaccggccttgccgcccgttgtgcagcataatttctctgtggcatcaccattgaccctctcccaagatgagagcaggagcgtcaagagcgaatcagatatcactatcgaggtcgactctattgctgaggagagtcaagaggggctctgcgaaagagagagcgccaacggattcgagactaacgtcgccagcggaacctgctcgatcattgtccaggaacgggagagccgcgagaaggggcagaaacgaccatctgatggcaactcaggtctgatggcaaagaaacaaaaacggacacctaaacgaactagcgcagccgcgaagaatgaaaaaaacggtaccgatgagttggacaacatgaacagtactgagcgcattagttttctgcaggagaaactgcaggaaatcagaaagtattatatgtctctgaagtcagaagttgccaccattgaccgtagacgaaagaggttgaagaagaaggaccgcgaagttagtcatgccggcgcaagcatgagctcagcatcctcagacactgggatgtccccttcaagctcgagtccaccccaaaacgtgttagccgtggaatgtcggtag

SEQ ID NO: 108822 - DNA, 3939 bp, synthetic construct
  misc_feature 1..3939: note = Description of Artificial Sequence: Synthetic coding sequence
  source 1..3939: mol_type = other DNA
atgaaagcacttgacgagcccccttatctgaccgtgggtaccgacgtaagtgctaagtaccggggagccttctgtgaagctaaaataaagactgcaaagcgtcttgtgaaagttaaagtcacatttcgtcacgactcgtccaccgttgaagttcaggatgaccatataaagggccccctcaaggtaggtgcaattgtcgaggtgaagaatctcgatggcgcctaccaggaggcagttataaataagctcaccgacgcgtcatggtacaccgtcgtctttgacgatggagacgaaaagaccctccgacgctctagcttgtgccttaagggcgagcgccatttcgccgaatccgagactctggatcagctacccctgaccaatcctgaacactttggaaccccggttattggtaagaagaccaaccgcggccgcagatctaatcacatacccgaagaagaatctagctccagcagttctgacgaagacgaggatgataggaagcagatcgatgagctgctgggcaaagtggtgtgcgttgactacatcagcctggacaaaaagaaggcactgtggtttcctgccttggtggtatgccctgactgctcagatgaaattgccgtgaaaaaagataacatactggtccgttccttcaaggacggaaaattcacatccgtgcctagaaaggatgtccacgagataaccagcgacactgctcccaaaccagacgccgtgctgaagcaggcctttgagcaggccttggagttccacaagagtaggacaatcccggctaactggaaaaccgagctgaaagaagactcttcctcttctgaagctgaggaggaggaggaggaggaagacgacgaaaaagagaaggaggataatagttccgaggaggaggaagaaattgagccatttcctgaggagcgcgaaaacttcctccagcagttgtacaaatttatggaagaccgggggactcccatcaacaagcgtcccgttttaggataccgcaacctgaatctcttcaagctgttccgattagtacataagctgggtgggttcgacaatatagagtccggtgctgtttggaagcaggtataccaggacctgggcattcctgtcttgaattctgccgccgggtacaatgtgaagtgtgcatataagaagtatctgtacggatttgaagaatattgtaggtcagcaaatattgaattccagatggcactgcctgaaaaagtagtgaacaagcaatgtaaggaatgcgagaacgttaaggaaatcaaagtgaaggaggagaacgagacagaaataaaggagattaagatggaggaagagagaaacatcattccccgtgaggaaaagccaattgaggatgagatagaacgaaaggagaacattaagccctcactaggcagcaagaaaaatctgctcgaatccatccctactcacagcgatcaggagaaggaagttaacataaagaaaccagaggataatgagaatctggacgataaagatgacgataccaccagagtggacgaatcgcttaatatcaaggtggaggctgaggaggagaaggctaagagtggcgacgaaaccaacaaggaggaggacgaggatgacgaagaagccgaagaggaggaagaggaggaagaggaagaagaggatgaggatgacgacgataataatgaagaggaggagttcgaatgctaccccccagggatgaaagtccaggtgcggtacggacgtggcaagaaccagaagatgtacgaagctagtatcaaggactcggatgtggaggggggtgaagttctgtatttggtgcactactgtggctggaatgtgcggtacgacgagtggatcaaggccgacaagatagttcgtcctgcagacaagaatgtacctaagataaaacataggaaaaagataaagaacaagttggacaaggaaaaggacaaggatgagaaatactctcccaaaaattgcaagctgcgaagattgagcaaaccaccttttcagaccaatccgtctcccgaaatggttagcaagctcgacctaactgacgccaagaatagcgataccgcccacattaagtcaatcgagatcacgtctatcctgaacggactgcaagccagcgagtccagtgccgaggatagcgaacaagaagacgagcggggtgcccaagatatggacaataacggaaaagaagaatcaaagatcgatcatctgacaaacaaccgtaatgacctgatcagtaaagaagagcagaattcttcttccttgttggaggagaataaagtccatgccgatttggtgatcagcaaacccgtttccaagagccctgaaaggctgaggaaagatatcgaagtcctgagcgaagacactgattacgaggaagacgaggtcaccaagaagagaaaggacgtcaagaaagacacgacggacaaatcatcaaagcctcagatcaaacgaggtaagagaaggtattgtaatacagaagagtgcctgaagacgggctccccaggcaagaaggaggagaaagcaaaaaacaaggaatcactatgcatggaaaacagttccaacagttcctctgatgaggacgaggaggagacaaaagctaaaatgacacccacgaaaaagtataatggccttgaggaaaagagaaagtcgttaaggaccacagggttctatagtggattctctgaggttgccgagaagagaataaagctgttaaataattccgacgaaagactccagaatagcagagctaaggacagaaaggatgtatggtctagcattcaggggcagtggccaaagaagaccttaaaggagctgttctccgactccgatacggaagcagccgcttccccccctcatcctgcacccgaagaaggggtcgccgaggaatctctgcagacagtagccgaggaggagtcgtgcagtccttccgtggagctggagaaaccccccccagtcaacgtggatagcaaacccatcgaggagaaaaccgtggaggtgaacgatcggaaggccgagtttcctagttccggcagcaattctgttcttaacacccctcccactacacctgaaagcccaagtagcgttacagtcaccgaggggtcaaggcagcagtcaagtgtgactgtgtcagagccccttgcccccaatcaggaagaggtacggtccattaagtccgaaaccgacagcaccattgaggtagatagcgtagctggagagctgcaggacctccagagcgaggggaactccagcccagccggattcgatgcatctgtgtcctcatctagctcaaaccagccagagccggaacatcctgagaaagcctgcaccggccagaaacgagtgaaggatgctcaggggggcgggagttcctcaaaaaagcagaaacgctctcacaaggctacggtggttaataacaagaagaagggaaagggcacgaacagtagcgactctgaagagctttccgctggggaatctattactaagtctcagcccgtgaagagtgtctctaccgggatgaaaagccatagtacgaaaagtcccgcccggacccaatctcccgggaagtgtggcaagaacggggataaggatcccgacctcaaagaaccttccaaccgactaccaaaagtgtacaaatggagttttcagatgtcagatctcgagaacatgacgtcagcggagcggatcaccatcctgcaggaaaagttgcaggaaatccgcaagcactacctatctctgaaatcggaggtggccagcatcgaccgtagacgtaagaggcttaagaagaaggagcgagaaagcgcagctacatcgagcagctcctcatccccctccagtagcagtatcaccgctgccgtgatgctcacactggccgagcccagtatgagctctgcctcccagaatggtatgagcgtggagtgtcgatag

SEQ ID NO: 108823 - DNA, 3681 bp, synthetic construct
  misc_feature 1..3681: note = Description of Artificial Sequence: Synthetic coding sequence
  source 1..3681: mol_type = other DNA
atgaaggcccttgatgagcccccatatcttactgtaggcacggacgtctcagccaagtaccgtggcgcattttgcgaagccaagatcaagacagcaaaacggctggtgaaagttaaagtcactttccggcacgattcgtcaaccgtggaggtgcaagatgatcatattaagggcccgctgaaagtgggagctattgtggaggtgaaaaacctggacggagcgtaccaggaggccgtcatcaacaaactcacagatgcatcctggtatacagtggtgtttgatgacggagacgagaagactctcaggcgatcctctctttgcctgaagggggagagacacttcgcggagtccgaaactctcgaccagctcccgttgaccaaccccgaacacttcgggaccccagtcataggcaaaaagaccaaccgcggccgacgctccaatcacataccggaggaggagagttcgtcatcctcctcagacgaggacgaagatgatcggaagcagatagatgaactcctgggcaaagtcgtttgtgtggactatatttccctcgacaagaagaaggcactgtggttccccgcactcgtggtgtgcccagactgcagtgacgagatcgcagtgaaaaaagacaacatcctagtgcgcagtttcaaagatgggaagtttacctccgttcctcgtaaagacgtacacgagattacctcagacactgcaccaaagcccgacgcagtgctgaaacaggcattcgagcaggcgctcgagttccataagtcccgcactatccctgccaactggaagacagagttgaaggaagatagcagcagctccgaggcggaagaggaggaagaagaagaggacgatgaaaaggaaaaagaagacaattcatctgaggaggaggaggaaattgaaccattcccagaagaacgagaaaacttcctgcaacagctatataagttcatggaggatcgaggaactcctatcaataagagaccggtgctcggatacaggaatctgaatctcttcaaactcttccgactggtgcataagttgggtgggttcgacaacatcgagtcaggcgcagtgtggaagcaggtctaccaggatctggggatcccagttcttaacagtgctgctggatacaacgtaaaatgcgcatacaagaagtacctgtacggctttgaggagtattgccgatctgcaaatattgagttccaaatggcactcccggagaaggtggtcaacaagcaatgcaaggagtgtgaaaacgtgaaagaaattaaagtgaaggaggaaaacgaaacagagataaaggagatcaagatggaggaggagcggaatattattcctcgggaggagaagccaattgaggacgaaatcgagagaaaggaaaacatcaaaccatccctgggcagtaagaagaatctgttagagagtattccgacccactccgatcaggagaaagaggtaaatatcaagaagcccgaggataacgagaatctcgatgataaggatgacgacaccactcgtgttgatgagtcattgaacatcaaggtggaagctgaggaggagaaagccaagtcaggttacgatgagtggatcaaagccgacaaaatcgtcagacctgctgacaaaaatgtgcctaagataaaacatcgcaagaagattaagaataagctcgataaagagaaggacaaagatgaaaagtattcacctaagaattgtaagctcagacgtctctccaagccacctttccagacaaatccaagtccagagatggtgtccaagctggatcttaccgacgcaaagaactccgataccgcgcacattaaatccattgagattacctccatcttgaacggactacaggcatctgagagtagcgccgaggattccgaacaagaagacgagaggggggcccaggacatggacaacaacggcaaagaagagtccaaaattgaccatctgacgaataatcggaatgacctcatttccaaagaagagcagaacagcagcagtttgctcgaggagaataaggtgcacgccgatctcgtgatatcaaaacccgtatccaagagccctgagcgtctccgcaaggatattgaagtcctctctgaggacacagattacgaggaggacgaggtaaccaagaagcggaaggacgtgaaaaaagacacaactgataaaagctcgaaaccacagataaaacggggcaagcggcgctattgcaatactgaagagtgcttaaaaactggtagtcctgggaaaaaagaggaaaaggcaaagaacaaagagtccttgtgtatggagaatagctctaattccagcagcgacgaggacgaggaagagactaaggcaaaaatgactcctaccaaaaagtataatggcctggaggaaaagcgtaaatcactgcgtacaacgggcttttatagcgggttttctgaggtggctgaaaagcgtattaaacttctcaacaactctgacgagcggctgcaaaactctcgtgctaaagacaggaaggatgtctggtcgtcgatacagggacagtggcctaagaagacactgaaagagctattcagcgattccgacacagaggctgctgcatcacctcctcatccagctcccgaagagggcgtggctgaagagtccctccagacagtcgcggaagaagagtcttgttctccatctgtggaactggaaaagccacctcccgttaatgtggacagtaaacccattgaagagaaaacagttgaagtgaatgacagaaaagctgaattccccagttccggcagcaattccgtgctaaataccccaccaacaacccctgagtctccatccagcgtcacggtgactgaagggtcaaggcagcagagctctgtcactgtgtccgagcctcttgccccaaatcaggaggaggtgagatccataaagagtgaaactgacagtacaatcgaggttgacagtgttgcaggagaactgcaggatctgcaatcggaaggaaattcttctcctgccgggttcgacgcttccgttagcagctcttcttccaaccaaccagagccggagcatcctgagaaggcctgcacagggcagaaaagggtaaaagacgctcaaggaggtggaagcagcagcaagaaacagaagcggagtcacaaagccaccgtagttaacaacaagaagaaaggaaagggtacgaactctagtgactccgaagagctgtccgcgggagagtcgattacgaagagccagcccgtcaagagtgtatcaactggtatgaagagtcactctactaaaagccccgcccgtacccagagtcccggtaagtgtggtaagaacggggacaaagaccccgatttgaaggaacctagtaacaggctgccgaaggtctataaatggtctttccaaatgtctgacctagaaaatatgaccagcgctgagagaataactatactccaagagaagctccaggagatccgcaagcactatctgtcgctaaagagtgaggtcgcaagcattgatcggcgtagaaaacggttaaagaaaaaggagcgcgaatctgccgcgacatccagttcatcatcctccccctctagttcatccatcaccgccgctgtcatgttaaccctagctgaaccatcgatgagtagcgcctctcagaatggtatgtctgtcgaatgccgatag

SEQ ID NO: 108824 - DNA, 3939 bp, synthetic construct
  misc_feature 1..3939: note = Description of Artificial Sequence: Synthetic coding sequence
  source 1..3939: mol_type = other DNA
atgaaggccctcgatgagcccccatacctgacagtcgggaccgacgtctccgcaaagtacagaggagccttttgcgaagccaagattaaaactgcaaagagacttgtgaaagtgaaagtaacgtttcgacacgattcttctactgttgaggtgcaggatgaccacattaaaggccctctgaaagtgggggctatcgtagaagttaaaaatctcgacggggcatatcaagaggccgtgataaataaacttaccgacgcctcttggtacaccgtggtttttgatgacggggatgagaagacgttgcgacggtcgagcctctgccttaaaggggaaagacacttcgctgaaagcgagacactggatcagttgccactgacaaatccagaacattttggcaccccagtcattggcaagaaaacaaatagaggcaggcgctcaaatcacatacccgaggaggagagttcaagctcatcctcagatgaggatgaagacgacaggaagcagattgacgaactgctcggcaaagtggtctgcgtcgactatatttctctagacaagaagaaagccttatggtttcccgctcttgtggtgtgtcccgattgttcggacgagatcgctgttaagaaagacaatatcctggtaaggtctttcaaggacggcaaattcacgtctgtccccagaaaggacgtacacgaaattaccagcgacaccgctcctaaaccagacgcagtgcttaagcaggccttcgagcaagctctcgaatttcacaagagtcgcacgattccagcgaattggaaaactgagctgaaagaggacagttcctcatctgaggcagaggaagaagaggaagaggaggatgacgagaaagagaaggaggataacagcagtgaagaggaagaggagatcgaacccttccctgaagaaagggagaactttttacaacagctttataaattcatggaggacaggggaacaccgataaacaaaagaccagtgctgggatacagaaatctgaatctttttaaactttttaggctggtgcataaactgggtggatttgacaatatcgagagcggcgcggtctggaagcaggtgtaccaggacctgggtattccggtcctaaactctgccgctggttataacgttaaatgcgcatataagaaatacctatatggattcgaggagtattgcaggagcgctaacattgaatttcagatggccctgcccgagaaggtggtcaataagcagtgtaaggaatgcgaaaacgtgaaagagattaaggttaaggaggagaacgagaccgaaattaaagagataaagatggaagaggaaagaaacatcatccctagggaggagaaaccaatcgaggacgagattgaacgcaaggagaatataaagccctcgctcggttccaagaagaacctcctcgagtcaataccaactcactctgatcaggagaaagaggtgaatattaagaagcctgaggataatgaaaacctggatgacaaagacgatgatacgaccagggtagatgaaagtctgaacatcaaagtggaagcagaggaggagaaagcgaagtcaggcgatgagactaataaagaagaggatgaggatgatgaagaggcagaggaagaagaggaggaagaagaagaggaggaagacgaagacgatgatgacaataatgaggaggaggagttcgaatgctatcctccaggtatgaaagtgcaggttagatatggcagggggaaaaatcaaaaaatgtatgaagcatccattaaagactccgacgtggagggcggcgaggtgctgtatttagtgcactactgtggttggaacgtacgctacgacgagtggattaaagccgacaaaatcgtacgccctgcagacaaaaacgtgccgaagatcaaacatcgaaaaaagatcaagaacaaactggacaaagaaaaagataaggatgagaagtactctccaaaaaactgcaagttgaggagactatccaagcccccattccagactaatcctagtcccgagatggtgtctaaactcgacctaacggacgctaagaattcggatactgcacacattaagtccattgagattaccagcatcctgaatggtttacaagcatctgagagctccgcggaggatagtgaacaggaagatgaaagaggcgcacaagacatggataataatggaaaggaggagagcaaaatcgatcacctgacaaataaccgcaacgatttgatctcaaaagaagagcagaattcctcctctctactggaagaaaataaagtgcatgccgacctggtcattagtaagcctgtttccaagagtccagaacgcctcagaaaagatatagaggtgctgtccgaggatacagattatgaggaagacgaggtcaccaaaaaacggaaagacgtgaaaaaagataccacagataagagctcaaagccacagatcaagagggggaaacggcgctattgtaatactgaggaatgtctcaaaacaggctcaccaggcaaaaaggaggagaaagccaaaaataaggagtccctgtgtatggaaaacagctccaactctagcagcgacgaggatgaagaagaaaccaaagctaagatgacgccaacaaaaaagtacaacggcctcgaggaaaagcgaaagagtctgaggacaaccggcttctattccggttttagcgaggttgcagagaaaaggataaagcttcttaataacagtgatgaaaggctacaaaacagtagagcgaaggaccgtaaggacgtgtggagctctattcaaggccagtggccaaagaagaccctcaaggaactgttcagtgatagcgatactgaggccgcggcctcaccgcctcatcccgctcccgaagagggcgtggcagaagagagtctccagaccgtggccgaagaggagagctgctcgccctcggttgagttagaaaaaccccctcccgtgaacgtcgattctaagcccatagaagagaaaacagtggaagtaaacgatcgcaaagctgagtttccttcaagcggatctaactctgtcctgaacaccccccccaccacacccgagagcccatcatctgtcactgtgactgagggatcccggcagcagagctccgtgaccgtgtccgagccgttggcgccgaatcaagaggaggtgcggagtataaagagtgagaccgactcgacaatcgaggtggactccgttgcgggcgagctccaggatctacagtcggagggcaactcttccccagctggctttgatgctagcgtcagttcgagctctagtaaccagcctgagccagagcaccccgaaaaggcctgcacaggccaaaaaagagtaaaagacgcacagggggggggatcatcctctaagaagcagaagcgcagtcacaaagctacagtagtgaataacaagaagaaaggcaagggaactaattccagcgactccgaggaactctctgcgggggaatcaatcacgaagagccagccagttaagagcgtcagtaccggaatgaagtcccattcaactaagtcccctgcgcgaacccagtcccccgggaagtgtggaaaaaacggcgacaaggatcctgacctgaaggagcccagcaatagactgccgaaggtctataagtggtcctttcaaatgagtgacctggaaaacatgacctcagctgagagaattaccattctccaggagaagctgcaggaaatccgtaaacactacttatcactgaaaagcgaagtagcttcaatcgataggaggagaaagcggctgaagaaaaaagaaagagaaagtgcggcaacttctagctctagctccagcccatcttcttcgtcaatcaccgctgcagttatgctgacccttgcagagccaagcatgtctagcgcgtcccagaacggcatgagtgtggaatgtcgttag

SEQ ID NO: 108825 - DNA, 3462 bp, synthetic construct
  misc_feature 1..3462: note = Description of Artificial Sequence: Synthetic coding sequence
  source 1..3462: mol_type = other DNA
atgaaggcccttgatgagcccccatatcttacagtgggaacagacgtcagtgctaagtacagaggcgctttctgtgaggccaagattaaaactgccaaaaggctggtgaaggtgaaggtgaccttcagacacgacagttccacagtggaggtccaagatgatcatataaaaggaccattgaaggtgggagcaatcgtggaggtcaagaaccttgatggtgcttatcaggaagccgttataaataaactgaccgacgctagctggtacaccgttgtgttcgacgacggcgatgagaaaacactgcggcggagttctttgtgcctcaagggagagcggcacttcgctgagtccgagaccctggaccaactgccactgaccaatcccgaacactttggcaccccggttattgggaagaaaacaaatagaggaaggaggagcaatcacatcccagaggaggaatcatcctctagcagcagcgacgaagacgaagacgatcggaaacagatcgacgagctactggggaaagtcgtgtgtgtagactatatcagtctggataagaaaaaagctctgtggttccctgctctggtcgtctgtcctgactgtagcgacgagatcgctgtgaagaaagataacatcctcgtccgctcctttaaagatggcaaatttacaagtgtgccaagaaaggacgtgcacgagatcacaagcgatacggcacccaaaccagatgcggttcttaaacaggcatttgagcaagctctagagtttcacaagagccgtaccattcccgctaattggaagaccgagctgaaagaagatagctcttcttcagaggctgaagaagaggaagaggaagaagatgatgaaaaggagaaggaggacaatagttccgaagaggaggaggaaattgagccattccccgaagaaagggagaattttctccagcagttgtacaagttcatggaggacagggggaccccaattaataaacgacccgtgcttgggtacaggaacttaaatttattcaaactcttccgactggtgcacaaactgggggggtttgacaatattgaaagcggagccgtatggaagcaggtgtaccaggatctgggaatcccagtattaaatagcgccgccggttacaatgtgaagtgcgcctacaagaagtatctgtatgggtttgaagagtattgccgttctgccaatatcgagtttcagatggcactgcccgagaaggtggtcaataagcagtgcaaggagtgcgagaatgtcaaggaaattaaggtaaaagaagaaaacgaaacagagattaaagagatcaagatggaagaggaacggaatattatcccgcgagaagaaaaaccgatcgaagatgagattgagcggaaggaaaatataaaacctagtctgggcagcaaaaaaaacctgctcgaatcgatccctacccactctgatcaggagaaggaagtaaatatcaagaaacctgaggataatgaaaacctggatgacaaggatgacgacaccactcgcgtggatgagagcctgaacatcaaggttgaagcagaggaggagaaagccaagtctggcgatgagacaaataaggaagaggacgaggacgatgaagaagctgaagaggaagaggaggaggaggaggaggaggaggacgaagacgatgatgacaacaatgaggaggaagagttcgaatgctacccccccgggatgaaagtgcaggttagatacggtcgcggtaagaaccagaaaatgtatgaagcttctatcaaagattccgatgttgaaggaggcgaagttctctatttggtccattactgcggttggaatgtgcggtatgacgagtggatcaaggcagataagattgttagaccggcggacaagaacgtacccaaaattaagcaccgcaagaaaattaagaacaaactggataaagagaaagacaaggacgaaaagtactctccgaaaaattgcaaactcagaagacttagtaagcctccattccagacaaacccgtcccccgaaatggtgagtaagctcgatttaaccgatgcaaagaactccgacaccgcccacattaaaagcattgaaatcacctccattctcaacggattgcaggcctcagagagctccgctgaggactccgaacaggaggatgaaaggggtgctcaagatatggataataatgggaaagaagaatccaagattgaccacttaacgaacaacagaaacgacttgatttccaaagaggagcagaactcctccagcctcctagaggaaaataaagtgcacgcagatctcgtgatctccaaaccagtgagcaagagtcccgagagacttagaaaagacattgaagttttaagtgaagatactgattacgaagaagacgaagtcacgaagaagcgcaaggatgtgaaaaaagacactacagacaagagctcaaaacctcaaataaagcgcgggaagagaaggtattgcaacaccgaagagtgtcttaagacagggtctcccggaaaaaaagaggaaaaggctaagaacaaagagagcctctgcatggaaaacagttctaactcatcatcagacgaggatgaggaagaaacaaaggctaagatgacccccacgaagaagtataatggattggaggagaaacgcaaaagtcttcgtacaacagggttttactcaggcttctccgaggttgccgagaagaggatcaaactgcttaacaatagtgacgaaagactacagaactcacgcgctaaagatcgcaaggatgtctggtcatccatccagggacaatggccaaaaaaaactctcaaagagctgttcagtgatagcgacacagaagctgccgcatccccgcctcatcccgccccagaagaaggggtggctgaagagtctctgcaaactgtggcagaggaagaatcttgttctccatctgtagaactggagaagcccccacctgtcaatgtggattccaagcccatcgaagagaagacagtggaagtcaacgatcggaaggccgaatttccctcctccggttctaacagtgtattgaacacccccccaacaacccctgaaagcccttccagtgtgaccgtgaccgaagggagcaggcagcaatcaagcgtgacagttagtgagcccctcgcacctaaccaggaagaggtgagaagcatcaaaagtgaaactgactccaccatcgaggtggacagtgtggctggagagctacaggaccttcagagcgaaggcaacagtagcccagccggatttgacgccagcgtctcaagtagttcttcgaaccagcccgaaccagaacaccccgaaaaggcttgtacaggtcagaagagggtgaaagatgctcagggcggcggttcgtcaagtaaaaaacaaaagaggtctcacaaagccaccgttgtgaacaacaagaaaaaggggaaaggcattctgcctcactag

SEQ ID NO: 108826 - DNA, 1452 bp, synthetic construct
  misc_feature 1..1452: note = Description of Artificial Sequence: Synthetic coding sequence
  source 1..1452: mol_type = other DNA
atgaaagcactcgacgagcctccatacctcacagtcggaacagatgtgagtgccaagtaccgcggcgcattttgtgaggcgaaaattaagacagcgaagagactagtgaaggtgaaggtgaccttcaggcacgattcgtcaactgttgaagtccaggatgatcacatcaaaggtcctcttaaagtaggtgctatcgttgaagttaagaatctagatggggcctatcaggaagctgtgatcaataagcttaccgacgccagttggtacactgtcgtttttgacgatggcgacgagaaaacacttcgtcgctcttcgctgtgcttgaagggagagaggcacttcgcagagagtgagaccctagaccaactcccactgactaaccccgaacatttcggaactccagtgatagggaaaaagaccaaccgaggcaggagatctaatcacatcccagaggaagagtcatcttcgtcatctagcgacgaggatgaagatgatcgtaaacagatcgatgagctcttaggcaaggtcgtttgcgtggattacatcagtctggataagaagaaagctctctggtttccagccctggtggtgtgcccggattgctctgacgagatcgcagtgaagaaggacaatattctggtgcggtccttcaaggatggcaagtttacaagtgtgccacggaaagacgttcacgagattacaagcgacaccgcgccgaaacctgatgccgtcttaaaacaagctttcgaacaggcgctggagttccataaatcccggaccatcccggccaattggaaaaccgagctgaaggaagatagcagctcatctgaggcagaggaagaagaggaggaagaggacgatgagaaagagaaggaggataactcaagcgaagaagaggaggaaatcgaaccttttccagaagaaagggagaatttcttacagcagctctacaagtttatggaggatagaggaacacccatcaacaagagaccagtgttgggctaccggaatctgaacctgtttaaacttttccgtctggtgcacaagctgggagggttcgacaacattgaatcgggagccgtgtggaagcaggtataccaagacctgggcatacctgtgctgaattcagcggcagggtacaacgtcaagtgcgcctacaaaaagtacctgtatggattcgaagagtattgcaggagtgcaaacatcgagtttcaaatggcacttcctgagaaagtagtgaataaacaatgtaaggaatgcgagaacgtaaaggaaattaaagttaaagaggaaaatgaaaccgagattaaagaaatcaaaatggaggaggaaagaaacattattccacgagaggagaagcccattgaggatgagatcgagagaaaggagaacatcaagccctccctgggcagtaagaaaaatctacttgagtcaatccctacccactcctag

SEQ ID NO: 108827 - DNA, 1968 bp, synthetic construct
  misc_feature 1..1968: note = Description of Artificial Sequence: Synthetic coding sequence
  source 1..1968: mol_type = other DNA
atgaaagcactggacgaacccccctaccttacagtaggcacagatgtgtcggctaaatatcgcggggctttttgcgaggcaaagataaaaactgccaagaggctcgtgaaagtgaaggtcactttcagacacgacagctcaacagtggaggtccaagacgaccacattaaagggcccctgaaagttggcgccatcgtggaagttaagaacttagatggagcttaccaggaggcagtaatcaacaaactaacagatgcctcttggtataccgtggtgtttgatgacggcgatgaaaagaccctgcgtcgctccagtctctgtctgaaaggagaacggcacttcgcagagtcggagacattggaccaactgccgctcaccaatcctgagcacttcgggactcccgtcatcggaaagaaaaccaatagagggcggagaagcaatcacattccagaagaagagagctcctcttcatcttccgatgaggacgaagatgaccgcaagcagattgacgaattgttaggcaaagtggtgtgcgtggattacatctctctggataagaagaaggctctctggttcccagccctggtggtgtgccctgattgctctgatgagatagccgtcaaaaaagataacattctggtgaggtcgtttaaagacggtaagtttaccagcgtgcctagaaaagacgtccacgagatcacctcagacacagccccgaagccggatgccgtccttaaacaggcattcgagcaggccctcgaatttcacaagtcccgaaccatccccgccaactggaagaccgaattaaaggaggattcttccagctctgaggcggaagaagaagaggaggaggaagatgacgaaaaagagaaggaagataatagtagcgaagaagaagaggagatcgagccctttccagaggagcgtgaaaattttctgcagcaactctacaaatttatggaagatagggggactccgatcaacaaaaggccggtccttggttatcgcaacctgaacctgttcaagttgtttagactggtgcacaaactaggaggttttgataacatagagtctggggccgtgtggaagcaggtttaccaggacctgggaatcccggtccttaactcggccgccggctataatgtcaagtgtgcttataagaagtatctgtacggattcgaagagtattgcagaagcgctaacatcgagtttcagatggcattacccgaaaaagtagtcaataaacagtgcaaagaatgtgagaatgttaaggagataaaagtaaaggaagagaatgaaacagagatcaaggagatcaagatggaggaagagaggaatattatccctcgggaagagaaacccatcgaggacgagatagagagaaaggaaaacattaaacctagtctcggctcaaagaagaacttgttggagtctataccaacacactccgaccaagaaaaggaagtgaacattaagaagcctgaagacaacgagaatctggatgataaggacgacgacaccactagggttgatgagagtctcaatataaaggtggaggctgaggaggagaaagccaagagcggcgacgagacaaacaaagaagaggacgaggatgatgaagaagctgaggaggaggaggaggaagaagaggaagaggaggatgaggatgatgacgacaataacgaggaggaggagttcgaatgctacccccctggcatgaaggtccaggtgagatatggtcgggggaagaaccagaaaatgtatgaagctagcatcaaggatagtgatgtcgagggtggtgaagttctttatctggtgcattattgcggctggaacgtcagatatgacgaatggatcaaggccgataaaatagtgagacctgcagacaaaaatgttcccaagatcaaacataggaagaagataaagaacagcgtttataagaagaaaaaaaaaaaaaaaaacaagtag

SEQ ID NO: 108828 - DNA, 1785 bp, synthetic construct
  misc_feature 1..1785: note = Description of Artificial Sequence: Synthetic coding sequence
  source 1..1785: mol_type = other DNA
atggctgccccagttaaaggtaaccgtaaacagagcacagagggagacgcgctcgatcctccagcttcccccaagcctgccggtaaacagaatggcatccagaaccccatctcactggaggacagccccgaagctggaggagagcgggaggaagagcaggaacgcgaagaggaacaggcttttctggtatcactgtacaagttcatgaaagaacggcacacacccatcgagcgcgtgccacatttaggcttcaaacagatcaatctctggaagatctataaggcagtagagaagctgggggcatacgaacttgtaacagggaggcgcttgtggaaaaacgtttacgacgagctcggcggaagcccaggcagtacaagtgcagcaacatgtacccggcggcactacgagcggctggtgttaccctacgtccgacatttaaaaggagaagatgacaaacctctgcctacttcaaagccccggaagcagtacaaaatggccaaagagaaccggggtgacgacggcgccactgagagaccgaaaaaggccaaggaagagcgacgaatggatcagatgatgccaggaaagacaaaagcagacgctgccgacccagctccactcccaagccaagaaccccctcgcaatagcacggaacagcagggccttgcctctggctcctcagtcagttttgtaggcgcctctggttgtcctgaagcttacaaaaggctgttgtctagcttctactgcaagggtacccatggtataatgtctcccctagccaagaagaagctgctagctcaggtctcaaaagtggaggccctacagtgtcaggaggaggggtgccggcacggagccgaaccacaagcatctccggcagtgcaccttcccgaaagcccgcagtcccccaaggggctgactgagaactcacggcaccgcctaacccctcaggaagggctgcaggccccgggcggcagcctgcgagaagaggctcaggcaggcccatgtcccgcagccccaatattcaaaggctgcttctatacacaccctaccgaagtcctcaaacccgtgtctcagcatcctagagacttctttagccgccttaaggacggcgtgttgctggggccgcccggcaaggaagggctgtccgtgaaggagccccagctggtgtgggggggggacgcaaataggcccagtgcatttcacaaggggggatcccggaaggggatactctatcctaaacccaaggcttgttgggtctcacccatggccaaggttccagccgagtcccccaccctgcctccaaccttcccatcgagtcccgggctggggtctaagcggtctctcgaagaggagggagctgcgcacagcggcaaacgcctgcgagcggtatccccgtttctgaaggaggccgatgcaaagaagtgcggagccaagcctgctggaagcggactcgtgtcctgccttttaggccctgcactcggaccagtgccgcccgaggcgtacagggggaccatgctccattgccccttgaacttcacaggaacacccggacctctgaagggtcaagcggctcttccattctctcctcttgtgatacccgcattccccgcccactttttggcgaccgctggcccttcccccatggcggctggcctcatgcacttcccgcccacatcgttcgattctgccctgagacataggctttgccccgcaagttctgcctggcacgcaccaccagtaactacgtacgctgccccacacttttttcatctcaataccaaactttag

SEQ ID NO: 108829 - DNA, 1917 bp, synthetic construct
  misc_feature 1..1917: note = Description of Artificial Sequence: Synthetic coding sequence
  source 1..1917: mol_type = other DNA
atggcagcgcccgttaaaggcaaccgcaagcagtccacggagggtgatgctctggatcctcctgcctctccaaaaccagccggcaagcaaaacggcattcagaatccaatcagccttgaggacagtcctgaggctgggggcgaaagggaagaagaacaagaaagggaggaagagcaagcctttctcgtaagcctttataaatttatgaaggaacgtcacaccccaatagagcgggtcccacacttgggctttaagcagattaatctgtggaagatctacaaggctgttgaaaaactgggagcctacgaactggtaaccgggcgtagactctggaagaacgtttatgatgagctcgggggatcacccggcagcacatccgctgcaacttgcactcggaggcactatgaacggctggtgcttccatacgtgagacatcttaaaggagaggacgataaaccactcccaacctctaaacctcgcaaacagtataagatggctaaagagaataggggcgacgacggagcaactgagagaccgaaaaaggcaaaggaagagcgaaggatggatcagatgatgcccggcaagacaaaggccgacgctgccgacccagctccactccctagccaggaacccccccgaaactctactgagcagcagggcctggcgagcgggtctagcgtgagtttcgttggcgccagcgggtgtcctgaagcctataagagactcctgtcaagcttttactgcaaaggaactcatggtatcatgtcacccctagcaaaaaaaaagctgttggctcaggtgagtaaagtcgaggccctgcaatgccaggaggagggctgtcggcatggcgctgagccccaggcatcccctgccgttcatctgcctgaatcccctcaatcacccaagggacttactgaaaattcccgccaccgcctgaccccccaagaggggcttcaggccccaggcggctccctgcgggaggaggcgcaggcaggaccttgccctgcagccccaatcttcaagggttgcttttatacgcacccaaccgaggtactgaaacctgtatcacagcaccccagagatttcttttccaggctcaaggatggcgtgttgctaggccctccaggaaaggagggtctatccgtaaaagaaccacagctggtgtggggaggtgacgctaatcgacctagcgcttttcacaagggcggctcccgtaagggtatattgtacccgaaacctaaggcctgctgggtgagccccatggctaaagtccctgctgagagccccactctaccacccacttttcccagcagccccgggctgggctctaagcgatccctcgaagaagaaggagcagcacattcaggtaaacggcttcgggccgtgagccccttcttaaaggaagccgatgctaagaaatgtggtgcgaagcccgccggaagcggtctggtgtcttgtctgctaggcccggctttgggaccagttcctcccgaagcctaccgaggaacaatgcttcattgcccccttaattttaccggaacgcaccaccagagtcaacctatgcagcggcctacatcaagtacctccactccgtcctgtcgcccagcgcacggtgttgtttacacagtcgaaagcaccggcgcctacaaccggcaggtcctcctgccggggggtagcgagcttgtgcctgctactcaggacactcgcgcgatgccactcgccgggcagcccggaacttccgaagaggaggggagtggcaaaaccggttttatttctcgtcaacagcctgagcccaggtccaggggcccatcctgttataaggccttgggcgaggatgggcagctgccacttcctcagtcgggcgcccgctctactcaggtggcacacgggaagagcaataagaagactccagtctag

SEQ ID NO: 108830 - DNA, 1581 bp, synthetic construct
  misc_feature 1..1581: note = Description of Artificial Sequence: Synthetic coding sequence
  source 1..1581: mol_type = other DNA
atgaaagaacgacacacccccatcgagcgcgtaccccatctgggatttaaacagatcaatctgtggaaaatttataaagctgtcgaaaagctcggcgcttatgagctggtgactggcaggagactctggaagaatgtctacgatgagctggggggcagtcccggcagtacctcggcagccacctgcacccgtcgccactacgagcgcctcgtgctaccttacgtccggcatctcaaaggcgaggacgataagcccttaccaacatcgaagcctcggaagcagtataagatggccaaggaaaatcgtggggacgacggagccacagagagacctaagaaggccaaggaagagaggagaatggaccaaatgatgcctggtaaaactaaagcagatgcagccgacccagccccattgccatctcaggagccaccccggaattctacggagcagcagggtcttgcatccggctccagtgttagcttcgtgggggctagcgggtgccccgaggcttataagcgattgctctcatcattctattgcaaaggtactcacggcatcatgagtccactcgctaagaaaaagttgctggcacaggtcagtaaagtcgaggctctacagtgtcaagaggaaggttgcaggcacggtgccgagccacaggcaagtcccgctgtgcatctcccagaatctcctcaatcaccgaaggggttgacggaaaacagccgacatcggcttacccctcaggagggactgcaggcacctggtgggtcactacgagaagaggcccaggccggaccttgtccagctgcccccatcttcaagggctgtttctacacgcacccgacagaagttcttaaacccgtcagccagcatccccgtgatttttttagccgactgaaagacggtgtattacttggaccgcctggtaaggagggcctcagcgtgaaagagccccaactggtgtggggcggcgacgcaaaccgacctagcgcattccacaaagggggctcgaggaagggaattctgtatcccaagccaaaggcttgttgggtcagcccgatggccaaagtgcccgccgaatcaccaaccttacctcctacctttccctcctcgcccggcctgggttctaaaagatccctggaagaggagggggctgcacattctggaaaaaggctgcgcgccgtgtcgcccttcctgaaggaagctgatgctaagaagtgtggtgctaagcccgcggggagcggattggtgtcctgcctcctagggcctgctctgggtccagtgcctcctgaggcatataggggcaccatgctgcactgccctcttaacttcaccggtacacctggcccactgaaagggcaagccgccttgcctttttcaccattagtcataccagctttccccgcacatttcttggctactgctggcccgtcccccatggctgcaggcctgatgcacttcccccctacttcttttgattccgctcttcggcacaggctgtgtccagccagcagtgcctggcacgcccccccagtaacaacctacgcggccccccattttttccaccttaataccaagctatag

SEQ ID NO: 108831 - DNA, 3567 bp, synthetic construct
  misc_feature 1..3567: note = Description of Artificial Sequence: Synthetic coding sequence
  source 1..3567: mol_type = other DNA
atggaaccgaattcgttacaatgggtgggtagcccatgcggcctccatggcccatatattttctataaggcattccaattccaccttgagggtaaaccgcgaatattgtcactgggcgacttcttctttgttaggtgtactccaaaggacccaatctgcatcgccgagctgcagctcctttgggaggagcgcacaagccggcagttgctgtcctccagcaagctctactttctgccagaagataccccccaaggtagaaattcagaccacggggaagacgaggtgatagcagtgtccgagaaagtaattgtcaaactggaagacctcgtcaagtgggtgcatagtgattttagtaaatggaggtgcggcttccacgctgggcctgtcaaaaccgaggcacttggacgcaacggtcagaaggaagctctgctgaaatataggcagtctacactgaacagcggactgaacttcaaggacgtgctaaaggagaaggccgatctgggcgaggacgaggaggaaaccaacgtaattgtgttgagctacccacagtactgtagatatcggtctatgctgaaaagaattcaggacaagccctcctccatcctgactgaccagtttgctctcgccctcggtggaatcgctgtcgtgtctagaaatccccagattttatactgccgggatacatttgatcaccctacgctgattgagaacgagtcgatatgtgacgagttcgcacccaatttgaaggggcgcccccggaagaaaaaaccgtgtccccagcgccgggattctttcagcggtgtgaaggattccaataacaactcggatggcaaagctgtagctaaggtaaaatgcgaagcacggagcgcattgacaaagcccaagaataaccacaactgtaaaaaagtgtccaatgaagagaagcccaaagttgcaatcggcgaagaatgcagggccgatgagcaagctttcctggtggcattgtataaatatatgaaggagcggaagaccccgattgagagaataccttatttgggatttaaacagattaacctttggacaatgttccaggccgcacaaaaactcggtgggtatgaaacaattaccgctagacggcagtggaaacacatctacgacgagctcggcggtaaccctggaagtacctctgcagcaacgtgtacaagaagacactatgaacgactgattctgccatatgaaaggtttatcaaaggtgaagaagataagcccctgccccctataaagcctcgaaagcaagaaaacagctctcaggaaaacgaaaataaaactaaggtgagcggaacaaagcgcatcaagcacgaaattcccaagtctaagaaggaaaaggagaatgccccaaaaccccaggacgcggcagaggtctcctcagaacaggagaaggagcaggagaccctaatcagtcagaaaagcatcccagaacccttacccgccgctgatatgaagaagaagattgagggctaccaggaattctcagcaaaacccctggccagcagagtcgacccagaaaaagataatgagaccgaccaggggtctaatagcgagaaggtggcagaggaggccggcgagaagggtccaacaccccctctgcccagcgcaccactggccccagaaaaggattctgctctggtcccaggggcctccaagcagccgttgacatccccctccgccttggtggactccaagcaggagtccaagctgtgctgcttcaccgagtcaccggaatcggagccccaggaagcttcgttcccaagcttccctaccacccaaccacccttagccaatcagaatgaaacagaggatgacaagttgcctgcgatggctgattacatcgcgaattgtactgttaaagtggaccagttaggctccgatgacatccataacgcactcaagcagactcccaaggtgttagtcgtgcaatcattcgacatgttcaaggataaagatctcactggaccaatgaacgaaaaccatgggctgaattatacgcccctactgtatagtagagggaaccctggcattatgagcccattagccaagaaaaagttgcttagccaggtgtctggcgcttcattgagctcctcgtacccctatggctcacccccacccctaatcagcaaaaagaagctgattgcaagagacgatctgtgtagcagcctaagtcaaacacaccatgggcagagtaccgatcacatggctgtgtcacggcccagtgttatccagcacgtccaaagttttcgaagtaagccgagcgaggaaagaaagaccattaacgacatttttaagcatgagaaactgagtcgaagtgatccccacagatgcagttttagcaaacatcatttgaacccccttgccgatagctatgtcttaaagcaagagatccaagagggcaaagacaagctactcgagaaacgtgctctgccgcactctcacatgccctccttcctggcagacttttatagttctccccatcttcattctctttaccgacacacggagcaccaccttcataatgaacagacctctaaatatccatccagggacatgtatcgggaatccgaaaattcctccttcccatcccatcgacaccaggaaaaacttcatgtgaactatttgacatccctccacttacaggacaagaagtccgcagccgctgaggcccccacagacgaccagcctactgatctgtccctgcctaaaaaccctcataaaccaaccggcaaagtactgggtctggcccattctactacaggtccacaggagagtaagggcatttcccagttccaggttcttggctctcagtcccgcgactgccaccctaaggcatgccgggtaagtcccatgacaatgtcaggacctaaaaagtacccggaatccctgagcagaagcgggaagcctcaccacgtgcgattggaaaacttcaggaagatggagggcatggtgcatcctatactgcaccgtaagatgagtccccagaatataggggctgctcgccccatcaaaagatccctggaagacctggacctagttatcgctggcaagaaagcacgagctgtgagccccttagaccctagcaaggaggtgtcaggaaaggaaaaagcaagcgaacaagagtctgagggtagcaaagccgcacacggcggacactcaggagggggctcagaaggacataagttgcccttgtcctctccaatttttccgggtctgtattcaggtagcctttgcaatagcgggctgaattcaaggcttccggccgggtattcccacagcctccagtatcttaaaaatcagactgtcctcagcccccttatgcagcctctggcctttcacagcctggtgatgcaacgagggatattcaccagccctactaacagtcagcaactgtacaggcatctcgcggcggcgactccagttgggagttcctacggagacttgttgcacaattctatatacccactcgccgccattaatccacaagccgcctttccaagttcacagctctcctcagtgcatccttccacgaaattatag

SEQ ID NO: 108832 - DNA, 2838 bp, synthetic construct
  misc_feature 1..2838: note = Description of Artificial Sequence: Synthetic coding sequence
  source 1..2838: mol_type = other DNA
atggcaccaaacctgaagggaaggccacgtaagaagaaaccatgtccacagcggagagactcattcagcggggtgaaggacagcaataataacagcgatggcaaggcggtggctaaggtgaagtgtgaagcccgctcagcactgaccaaaccgaaaaataaccacaattgcaaaaaggtctccaatgaggagaagcccaaggttgccataggcgaagagtgccgggccgacgaacaggcttttctggtcgccttgtacaaatatatgaaggaaagaaagacccccatagaacgaatcccatatctcggctttaaacagatcaatctgtggacaatgtttcaagctgcccagaaactcggcgggtacgaaactattactgcgcgcaggcagtggaagcatatttacgatgagctgggaggaaatccaggcagcacttccgcagctacttgcactcgccgacattacgagagattgatcctcccatacgagagattcatcaaaggggaagaggacaagccactgcctcccatcaagccccgaaagcaggaaaattcgagccaggagaatgaaaataaaactaaggtcagcggcacaaaacgcataaaacacgaaattcccaagtcaaaaaaggaaaaagaaaacgctcccaagccccaagatgccgccgaggtttcatcagagcaggagaaggagcaggagacgctgatctcccagaagtcaattcccgaaccgctgcccgctgctgacatgaaaaaaaagatcgaggggtatcaggaattcagtgccaagcccctggcttctcgcgttgaccctgaaaaggacaacgaaacagaccagggatccaatagcgaaaaagtggcagaggaagcgggtgaaaaggggccgaccccccctcttccgagcgcaccactggcgccggagaaggacagcgctctggtaccaggtgcctcaaagcagcctcttaccagcccatccgcgctcgtcgactcaaagcaggagtcaaagctgtgctgtttcaccgagagtccagagtcagaaccacaggaagcatcatttccgagtttccctacaacccagccccccttagccaatcagaacgaaacagaagacgacaagttgcccgctatggcagactacatcgcaaattgcactgtgaaggttgaccagctgggctcagacgacatccataatgcgctgaaacagactcctaaggttctcgtggttcaatcttttgacatgttcaaggacaaggatttaaccggacccatgaacgaaaatcatgggctgaattatacccccctgctgtactctcgtgggaatcctggcatcatgtcgccactggctaaaaagaagctgctatcgcaggtgagcggagcttcactgtccagctcgtacccttacgggtccccgccgccactgatcagcaaaaagaagctgatcgcacgggacgacctgtgttcaagcctgtcgcagacccatcacgggcagtcgacagaccacatggccgtttcccggcctagcgtgattcagcacgtgcagtcctttaggagtaaaccgtctgaggagagaaaaaccatcaatgacattttcaaacatgagaagcttagccggtcagaccctcaccggtgtagtttctcgaagcaccacctgaaccccctggcagactcttacgtgctcaagcaggagatccaggagggcaaggataagctccttgagaaacgtgcccttccccattcccacatgcccagtttcctcgccgatttctacagctcaccacatctccacagtctgtataggcacaccgagcaccaccttcataatgagcaaacatccaagtaccctagtagggatatgtacagagaaagcgagaatagtagcttccctagtcatagacatcaagagaagctgcacgttaactacctgaccagcctgcatttacaagacaagaagtccgccgctgcagaggcaccgaccgacgaccagcccacagatctctccttgcccaaaaatccacataagcctacgggcaaggtgctgggcctagcacactcaaccaccggcccgcaggagtccaaagggatttcccaatttcaagtgctgggcagtcagtcccgggattgccacccgaaggcctgccgtgtctctcccatgacaatgagtggcccaaagaaataccccgaaagcttatcccggtctggcaagcctcaccatgtgcgactggaaaatttccgaaagatggaggggatggtgcatccaatactgcataggaagatgtccccccagaacatcggcgccgcccggcctatcaagcggtcgctggaggacttggatctagtcattgcagggaagaaggcccgcgccgtatcacccctggacccctctaaggaagttagcggaaaggagaaagccagcgaacaggagagcgagggatccaaagctgctcatggtggccattctggcggagggagtgagggccacaagctgcccttgtcttcgcctatattccccgggctgtattcaggttcgctgtgtaacagcgggcttaattctagactaccagccggatactcccacagcctgcagtatctgaaaaatcaaaccgtcctatcgcccctcatgcaaccactggcatttcactccctggtgatgcaaagagggattttcacaagcccaacaaatagtcagcaattgtatagacatttagcagctgcaacccctgtgggtagttcttacggcgatctcctgcataatagcatatatcccttggcggcaattaacccgcaagctgcttttccctcttctcagctctcttctgtccatccctcaactaaattatag

SEQ ID NO: 108833 - DNA, 1134 bp, synthetic construct
  misc_feature 1..1134: note = Description of Artificial Sequence: Synthetic coding sequence
  source 1..1134: mol_type = other DNA
atgggtacaacagaagccacattgaggatggaaaatgtcgacgtgaaagaggaatggcaggatgaggacttgccacgcccccttcccgaagagaccggcgttgagctgctggggagccccgtggaagacacctcatctcccccgaacacactcaatttcaacggtgctcacagaaagcgaaaaaccctcgtggcgcccgaaattaatatctctctggaccagtccgaagggagcctgctgagtgacgattttctcgacactccagatgacctcgatattaacgttgatgacattgaaacccccgacgaaacagattcccttgagttcctgggaaacggaaatgaactcgaatgggaggacgacaccccagtggccactgccaagaatatgcctggggactcggccgatttattcggcgacggcacgaccgaagacggatccgctgccaatggaagattatggagaacagtgattatcggtgagcaggaacataggattgacctccacatgatccgaccatacatgaaggtggtcacgcacggtggatattacggcgagggtctgaatgccataattgttttcgctgcttgtttcctgcccgacagtagcctacctgattatcactacattatggagaatcttttcctgtatgtgatctcttcactggaactcctcgtggccgaggactacatgatcgtgtacttgaatggcgcaacgcctagaaggaggatgcctggaattggatggctgaagaaatgttatcagatgattgatcgccggctgcggaaaaacctgaagagtctcattatcgtgcacccaagctggttcatacggactgtcctggctatcagccgacctttcataagtgttaaatttattaacaagattcaatatgttcactctctggaggatttggaacagctgattccgatggaacacgtgcagattccggactgtgttctgcaatatgaagaagagcggctaaaagcacggagggagtccgcccgcccccagcctgagtttgtgctgcctcggtctgaggaaaagccagaagtggctcccgtcgagaacagatcagccctggtctcagaagaccaggagaccagcttgcaaccgttgcacaggagctcttag

SEQ ID NO: 108834 - DNA, 1116 bp, synthetic construct
  misc_feature 1..1116: note = Description of Artificial Sequence: Synthetic coding sequence
  source 1..1116: mol_type = other DNA
atggggacaaccgaggcaactttgcgcatggaaaatgtggatgtgaaggaagaatggcaggacgaagatctgcctaggcctctgcctgaggagactggagtagagctgctaggcagccccgtggaggatacctccagcccacccaataccctgaatttcaacggggctcatcgtaaacgcaaaaccctcgtagctcccgagattaatatctccctggaccaatccgagggatctctactgtctgatgactttttggacactcctgacgatctggacattaacgtcgatgacatcgagactccggatgagactgacagtttagaatttctgggaaacgggaatgagttggagtgggaagatgatacacctgtcgccacagcaaagaacatgcccggagatagtgccgacctgtttggcgacggaactactgaggatggctccgccgcaaatggccgcttgtggcggaccgtcatcataggcgaacaggaacaccgcattgaccttcatatgattcgaccctatatgaaagtagttactcatgggggctattatggagaaggcctgaatgccattatagtttttgctgcatgttttcttccggattccagcttgcctgattatcactacattatggagaatctctttttatatgtgatctcatcactggagttgctggtggccgaggactatatgatcgtgtacctcaacggggccacaccaaggagaaggatgcccggcattggttggctgaagaagtgttaccagatgatcgatcgcaggctgagaaagaatcttaagtccctgattattgtgcatcccagctggttcattcgaactgtcttggctatttcccggccttttatctcagtgaagttcattaataagatccagtacgtgcattcactggaggacctggaacagcttatccccatggaacatgtgcagattcctgactgtgttttacaatacgaggaggagagattgaaagcccggagggaatccgcgcgaccacaaccagaattcgttctgccaaggagcgaggaaaaaccagaagtggccccagtggagaatagaagcgccctcgtgagtgaagatcaggagacacgcatgtcgtag

SEQ ID NO: 108835 - DNA, 1134 bp, synthetic construct
  misc_feature 1..1134: note = Description of Artificial Sequence: Synthetic coding sequence
  source 1..1134: mol_type = other DNA
atggccgggagacgaagctcacaacccgggattgccctgcataatcccggtaaccaccaagtgcaaaacccacaaggcaggctcgagactgtccggccactccccgaagagacgggcgttgaacttcttgggagccctgtggaggatacctcatctcctccaaataccctcaacttcaatggcgcccaccgaaagcgcaagaccttagtggcccctgaaatcaatatcagtctggaccaaagcgaagggtccttgctctccgacgacttccttgacacccccgatgatctggacattaacgttgacgacatcgaaactcctgacgagaccgattcccttgagtttctgggtaacggcaacgaacttgagtgggaggatgatacgcctgtcgcgaccgccaagaacatgcctggagacagcgctgatcttttcggggacgggacaacagaagatggctccgccgcaaacgggcgcctgtggcggacagttataatcggggaacaggaacacagaatagacctccatatgatcagaccttacatgaaagtggtcacacatggaggatactacggtgaaggactgaatgccatcatcgtattcgcagcgtgctttctccccgatagtagtttgcccgattaccactacattatggagaacctctttctctacgtgatttcatccctggaattgttagtagcagaggattacatgatagtctacctgaacggggctactcccaggcgccgtatgcccgggattgggtggttgaaaaaatgctaccagatgatagataggcggctcaggaaaaatttgaagtcattaattattgtccatcccagctggttcatacgtacagtactcgccattagccgacctttcatctccgtgaagtttattaacaagatccagtacgtgcattccttagaagacctggagcagctgattcctatggagcacgtccagatccccgactgcgtgctgcagtacgaagaagaaagactgaaagccagacgagagagtgcacgtccacagccagagttcgtcctgccgagaagtgaggagaaacccgaagtggcaccagtggagaaccggtccgctctggtcagtgaggaccaggagacaagcatgtcatag

SEQ ID NO: 108836 - DNA, 1116 bp, synthetic construct
  misc_feature 1..1116: note = Description of Artificial Sequence: Synthetic coding sequence
  source 1..1116: mol_type = other DNA
atgggtacaaccgaagctaccctaagaatggagaatgtggatgtcaaggaagaatggcaggacgaagatctaccacgtcctctgccagaggagactggagttgaactcttgggatcacctgttgaggatacttcctcaccacctaacaccctgaattttaacggtgcccaccgtaaacggaagaccctggtggccccagagatcaacatatccctcgaccagtctgaaggtagtctgctgtccgatgactttttagacacgcccgatgacctggacattaatgttgatgatatcgaaactccggatgaaactgacagcttggagttcttaggaaatggcaacgaactagaatgggaggacgataccccagttgccaccgccaaaaacatgcctggtgattcggccgatctttttggcgatggtactactgaagacggcagcgccgctaacggccgactctggcggactgtgatcattggagagcaggagcacagaattgatctgcatatgattcgcccttacatgaaggtagtcacgcacggcggctattatggagaggggctaaatgctattatcgtcttcgcagcctgtttcttgccagacagctctcttccggattatcactacatcatggagaatctcttcctgtacgtgattagctccctggagctgcttgtggccgaggactacatgatagtatacttgaacggtgctacacctaggagaaggatgcccggtatcggttggctcaaaaagtgttaccagatgatcgataggaggctcaggaaaaacctgaagagcctcatcattgtgcacccttcctggttcattagaaccgtgctggcaatctcaagaccctttatatctgtaaaatttataaacaagatacagtatgttcactccctcgaagacctcgaacaactaattcccatggagcacgtgcagattccggactgcgtgttgcagtacgaggaagagagactgaaagctagacgagagtccgcccgaccacaacctgagttcgtgttgcctcgttctgaggagaagcctgaggttgctcccgttgaaaataggtctgccctggtatcggaggatcaagagactagtatgtcttag

SEQ ID NO: 108837 - DNA, 1050 bp, synthetic construct
  misc_feature 1..1050: note = Description of Artificial Sequence: Synthetic coding sequence
  source 1..1050: mol_type = other DNA
atggggactaccgaagcgactttgcgtatggaaaatgtggatgtgaaagaagaatggcaggatgaagatccccccccaaacactcttaatttcaacggagcccataggaaacgcaagacactggtggcacccgagataaacatatccctagaccagtctgaaggatcactgcttagcgacgacttcctcgacacccccgacgacctcgatatcaacgtggacgatatcgaaacacccgacgaaacggactcactcgagttcctgggaaacggcaatgagctggaatgggaggatgacacccctgtcgcaacagcgaaaaacatgccaggtgattctgcagatctgttcggagatggcactaccgaagacggatcagccgctaacgggcgcttgtggaggacggtcattattggagagcaggaacatcggattgacctccacatgatcagaccatacatgaaagtggtgactcacgggggctactatggcgaaggcctgaacgcgatcatcgtgtttgcagcttgttttctgccagatagcagtctacctgactaccactatattatggagaacttattcctctatgtcatctcctcgcttgagttactggttgccgaggactacatgattgtctatctgaacggtgctaccccacgaagaagaatgccaggcattggctggctgaagaagtgctatcagatgatcgataggcgccttcgaaagaatctcaagagcttgatcatcgttcatccaagctggttcattagaaccgtgttggcaatttctaggccctttatcagtgtgaagttcatcaataaaatccagtacgtccattcactggaagatctggagcagctgatccccatggagcatgtgcagattcccgattgcgttctgcagtacgaggaggagaggctaaaagcccgccgcgagagcgctcgaccacagccagagtttgttctgccacggtccgaagagaagcctgaagtggccccagtcgagaatagatcggccctagttagcgaggatcaggagacacgaatgagttag

SEQ ID NO: 108838 - DNA, 2448 bp, synthetic construct
  misc_feature 1..2448: note = Description of Artificial Sequence: Synthetic coding sequence
  source 1..2448: mol_type = other DNA
atgaagagcaatcaagagcgcagcaacgaatgcttgccacccaagaaaagagagattccagcaacctctaggtcaagcgaagagaaagcacccaccctcccctcagataatcatagggtcgaagggacagcttggttgcctgggaacccagggggtcgtggccatggcgggggccggcacgggcctgccggaacctcagttgaattaggacttcagcaaggcatcggcttgcacaaggccttatcaactggcctcgactatagcccgccgtccgcaccacgcagtgtgccggttgccaccaccctgcccgctgcatacgcgaccccccagccgggaactcccgtgtcccctgtgcagtacgcacacctcccacataccttccaatttattggctctagccagtattccggcacttacgcctcgttcatcccgtcccagctaattccccccacagcgaaccctgtaacaagcgctgttgcctccgcggctggcgctaccacccctagccagaggagccagcttgaagcatattctacgctcctcgcgaatatgggttctctgtcacagactccaggccataaggccgaacagcagcagcagcaacagcagcaacagcagcagcagcaccagcatcaacaacagcagcagcagcaacagcagcagcaacagcagcaacacctttcaagagctccaggactgatcacaccaggatcacctccacctgcacagcagaaccagtatgtgcacatcagctctagtccccagaataccggccgaaccgcaagccctcccgctattccagtgcatcttcacccccaccagacgatgattccacacaccttgacactcggacctcccagccaggtcgttatgcagtacgccgactccggatcccacttcgtgccccgggaggccacaaaaaaagctgagtcttcccgactccaacaggcaattcaggctaaagaggttcttaatggcgagatggaaaagagccggaggtacggcgccccctcttccgcagatcttggcctgggcaaggccggtggtaagtctgtgcctcacccgtacgagagtcgacacgtggttgtgcatccttctcccagcgactactcctcgcgagacccctcaggggtgcgagctagcgtgatggtgctgccaaacagtaacaccccagccgccgaccttgaggttcagcaagccactcacagagaagccagtccctccaccttaaatgacaaatcaggattacatctcggtaaaccgggtcatcgctcatatgctttgtcaccacacactgtgatacaaacaacacatagtgcctccgaacccctgcccgtaggcttgccagccaccgcgttctatgcggggactcagcccccagtcattggttacctgagtggacaacagcaggccatcacttacgccgggtcactgcctcagcacctggtgattcccggcacccagcctttattgatcccagtgggcagcactgacatggaggccagcggagcagcccctgcaattgtcaccagcagcccccagttcgctgctgtgccccacacattcgtaaccacagctctgccaaaaagcgagaattttaatcctgaggccttggttacacaggcggcctaccctgcaatggtgcaggcacaaatacatttacctgttgtacagtctgtcgcaagccccgcagctgcacctccaacacttccaccctattttatgaaaggaagtattatccaactggcaaatggagagctgaagaaggtggaggacctgaagactgaggattttatccagagtgccgagatcagcaacgacctcaaaatagactcaagcaccgtggagcgcattgaagatagccactccccgggcgtggctgttattcaattcgcagtcggcgaacatcgtgcccaggtgtctgtggaggttctggtggagtacccattctttgtgttcggacagggctggagcagctgctgcccagaaaggacgtcccagctgttcgatttgccatgcagcaaactatctgtgggagatgtttgcatcagcttgaccctgaaaaacctaaaaaacggcagtgttaaaaagggccaacctgtcgaccccgcaagcgtactcctcaagcactccaaagccgacgggcttgccgggagtagacaccgctatgcagaacaggaaaatgggatcaatcagggtagcgcccagatgctgagtgaaaatggagaactcaagttccctgaaaagatgggtttgcccgctgctccatttctgactaaaatcgagcccagtaagcccgcagcgacacggaagaggagatggtcagccccagagtctcgcaagcttgaaaagtccgaagacgagccaccactgactctccctaaaccatcattgattcctcaggaggtcaaaatctgtatcgagggccggagcaatgttggaaagtag

SEQ ID NO: 108839 - DNA, 2448 bp, synthetic construct
  misc_feature 1..2448: note = Description of Artificial Sequence: Synthetic coding sequence
  source 1..2448: mol_type = other DNA
atgaaaagcaatcaggagagatcaaacgagtgcttacctccgaagaagcgcgagattccggctacctcacgttcttctgaggaaaaggcccccaccctgccttctgacaaccacagagtggagggaacagcatggttacccggtaatcccggaggaaggggtcatggcggaggtcgccacggacccgcaggcacctccgtcgagttggggctgcagcagggtatcggtctgcataaggcactaagtaccggcctcgactactcaccaccttccgcgccacgttctgtcccagtcgccaccactttacctgccgcttacgcaacacctcaacccggaacaccggtttcacctgtccagtatgcacatttgcctcacacattccagtttatcgggtcctctcagtactccgggacctacgctagttttattcctagccagcttatccctcctaccgcaaatcctgtcaccagcgcagtcgcttcagctgccggcgctacgacgccatcccagcgcagtcagctcgaggcatattcaactctgctcgcaaatatgggttctctttctcaaacacccggtcataaggccgaacagcagcagcagcagcagcagcaacagcagcagcagcaccagcaccagcaacaacagcagcagcagcaacagcagcaacagcagcagcatctatcgagggcacccggcctcatcacccccgggtcgcctccccctgcccagcagaaccagtacgtgcatatctccagctccccacagaacactggccgaacagcatctcctcccgccatcccagtccatctgcatccccatcagactatgattccgcatacactcaccctgggtccaccgtcccaggtcgtgatgcagtatgctgattcagggtcccacttcgtacctcgggaggcaacaaagaaagccgagtcatcacgcttgcagcaggcgatccaggccaaagaggtgttaaatggggaaatggagaaaagcaggcgttatggggctccttcatctgctgatcttggcctgggcaaagccgggggaaaatctgtgcctcatccttatgagtcccggcatgtggttgtgcatccatcgccatcagactacagctccagggaccccagcggcgtgagagcttcggtcatggttttgcctaactctaatactcccgctgctgaccttgaagtacagcaggcgacgcacagggaggcctccccttccacattaaacgacaagagcggcctccacctcggcaagccaggtcacagatcctacgctttaagcccacacaccgtaatacagacaactcatagcgcctctgagcctctgcccgttggcctgcccgcaacagcgttttacgccggcacccaaccaccagtgatcggatatctgtcagggcaacaacaggccatcacatatgccggctctctaccccaacaccttgtcattcccggcacccaacccctcctgatccccgtggggagcactgacatggaggccagcggagccgcgcccgccatcgttactagtagccctcagtttgccgccgtacctcacaccttcgtgaccaccgccctgccaaagagcgagaacttcaacccagaagctctggtgacccaggcagcatacccagcgatggttcaagcccagattcatctcccagtggtgcaatcagtcgccagcccagccgcagctcctcccaccctgcccccctacttcatgaaaggaagcattatccagctggccaacggcgaattaaaaaaggtggaggatcttaagactgaagatttcattcagtctgcggaaatttccaacgatcttaagatcgactctagcacggtggagaggatagaggattcccacagtcccggagtagccgttattcagttcgctgtcggtgaacacagagcccaagttagcgtggaagtgctggtcgagtaccccttctttgtgtttgggcagggatggtcaagttgctgcccagagcggacatcacagttgttcgatctgccttgctccaaacttagcgtgggggatgtttgtatctcactcactctgaagaatttaaagaacggaagcgtcaaaaaagggcagccagtggatccagcctctgtcctcctaaagcacagcaaagccgacggacttgccgggtcaaggcaccgctatgctgaacaggaaaatggcatcaaccagggcagtgcacaaatgctaagcgagaatggagagctgaaatttcccgaaaagatgggacttcctgccgcccctttcctaaccaaaattgaaccaagtaagccagcggccactagaaaacggagatggtccgctcctgagagtcggaagcttgagaagagtgaagatgagccccctctgactctcccaaagccatcgcttatccctcaggaagttaaaatctgcatcgagggccgcagcaatgtcgggaaatag

SEQ ID NO: 108840 - DNA, 2448 bp, synthetic construct
  misc_feature 1..2448: note = Description of Artificial Sequence: Synthetic coding sequence
  source 1..2448: mol_type = other DNA
atgaagtcaaaccaagagcgtagcaacgaatgcctgccccctaaaaagagggaaatccccgcgaccagcaggagttccgaggagaaagctccaactctaccctccgacaaccaccgtgtggagggaacagcatggctccccggcaacccaggcggtaggggacacggtggggggaggcacgggccagctgggacctccgtggagctgggactgcagcaagggatcggcctccacaaagccctgagcacaggcctcgattactccccgccatcagctccgaggtcagttccggtcgctacaaccctccctgcagcatatgcgacaccccagcccgggactccagtctcacccgttcagtacgcccacctcccccatacatttcagtttatcggttcttctcaatattccggtacttacgcttcgttcatacctagccagctcattcctcctaccgcaaatcctgtgacaagcgcagtggcctcagccgccggagctactacacctagccagaggagtcagctggaggcgtattccaccctgctggccaatatggggagcctttcacagacacctggacataaggccgaacagcaacagcagcagcagcagcagcagcagcagcagcatcagcaccaacagcaacagcagcagcaacaacagcagcagcaacagcagcacctgtctagagccccagggctgatcacacccggttccccacctccagcccagcagaatcaatacgtacacatatcttcttcaccccaaaatactgggcgaaccgcctcacctcctgcaattccagtccacctgcatcctcatcaaaccatgattccccacacgctcaccttgggtcccccatcccaggtcgttatgcagtacgccgattcgggcagccattttgtgccacgcgaggccacaaagaaggcagaaagttctcgactccaacaggcgatacaggccaaagaggtgcttaacggcgagatggagaaatccaggcgttacggggccccatcctcagctgatctgggtctgggaaaggcaggcgggaagtcagttcctcacccatatgagtctagacacgttgttgtgcatcccagcccttctgattacagcagtcgggacccatcaggagtacgtgcttctgtgatggtactgccaaattctaacacaccggccgctgacctggaggtgcagcaggctacccaccgggaggcctctccctctaccctcaatgacaaatctggcctacacctaggaaagccaggacatagatcatacgccttatcgccccatacggtgattcagacaactcacagtgccagtgaacctttgccagtaggattgccagccacggcgttttacgccggtacacagccacctgtgattggatatttatctggccagcagcaggcaataacgtacgctggcagtcttcctcaacacctagtgatcccggggacccagcctctgctcataccagtcggcagcacagatatggaagcgtccggcgccgcaccagctatcgtgacgtctagtcctcaatttgctgcagtgcctcataccttcgtaactactgctctgcccaaatccgagaatttcaacccagaggccctggtgacacaggccgcctaccccgccatggtgcaagctcagatacacctgcccgttgtgcagagcgtagctagccccgcagcggccccaccaacccttcccccttactttatgaagggcagcattatccagctcgcgaatggggaacttaagaaagtggaagacctgaagactgaagactttattcagtctgccgagatttctaacgacctaaaaattgatagtagcacagtcgaaagaatcgaggacagccactcacccggggtggccgtgattcagtttgcagtcggggaacaccgggcacaggtgtcagttgaagtactcgtcgagtacccctttttcgtgttcggccagggatggtcctcatgttgtccagagcgcaccagccagctttttgacctcccgtgctctaagttatcagtcggtgacgtgtgcatcagtctcaccctgaaaaatctgaaaaatggttcagtaaagaaaggccaaccagttgatccagcttccgtccttctgaaacacagcaaggccgatggattagctgggtctcgccacaggtacgctgagcaggagaacgggattaaccagggctcagcgcaaatgctctccgagaacggcgagttgaagtttcctgagaagatgggcctgcccgccgctcctttccttacaaaaatcgaaccgagcaagcctgctgccacaaggaagcgacgatggtctgccccagaaagcagaaaacttgagaaatcagaggacgaacctcccttaactctccctaagcccagtctgattccacaggaggtcaagatctgtatcgagggccgctcaaatgtgggaaagtag

SEQ ID NO: 108841 - DNA, 1428 bp, synthetic construct
  misc_feature 1..1428: note = Description of Artificial Sequence: Synthetic coding sequence
  source 1..1428: mol_type = other DNA
atggcagccccgagacctccaccagccaggctctctggggtaatggtcccagcaccaatccaagatctggaagctctgagagcccttacagcccttttcaaggaacaacggaatcgggagacagcccctcgcaccatcttccaaagagtgttggatattttgaaaaagtcatctcatgccgttgagctggcctgccgcgatccctctcaggtggaaaacctcgcctcaagtctgcagttaatcactgaatgttttagatgtctacgcaatgcctgcatcgaatgtagcgtaaatcagaactctattcgaaacttagatactatcggagtggcagtggaccttatcctactgttcagagagctgcgggttgagcaagagtccctcttgacagcctttaggtgtggattgcagttcctgggtaatattgcatctcggaacgaggatagccagtctattgtgtgggtccacgccttccctgaattgttcctctcttgtctgaatcatccggacaagaaaattgtggcatattctagcatgatcctgtttactagcttgaaccacgagaggatgaaggagctggaagaaaatcttaatatagccatcgacgttatagacgcgtaccagaagcatccagagagcgagtggcccttcctgatcatcaccgacttatttctcaagagccccgagctcgtccaggccatgttcccgaaactaaacaatcaagagagagttaccctcctagatctgatgatcgcgaagatcaccagcgatgaacctttaacaaaagacgatataccagtctttctccggcatgctgagctgatcgctagcacttttgtggatcagtgcaaaaccgtactgaaactcgcatcagaagaaccacctgacgatgaggaggccctggccaccatacgcctgctcgacgttctctgcgaaatgactgttaacaccgaactactgggctatctgcaggtcttccccggcctgctggagagggttatcgatctcctgcgcgtcatccacgttgccggaaaagaaaccacaaatattttcagcaactgcggttgcgtgagggctgagggcgacatcagcaacgtcgctaacggctttaaatctcatctcattcggttaatcgggaacctgtgttacaagaacaaagacaatcaagacaaagtcaatgaactcgacggtataccactaattctggacaattgcaacatctctgactccaatccctttttaacccaatgggtgatatatgccatcagaaacctaaccgaggataacagccagaatcaggacctgatcgcaaagatggaggagcagggcctcgcagatgcgtccctactcaagaaagtaggattcgaggtggaaaagaagggggagaaattaatccttaaatcaactcgggatacgccaaagccctag

SEQ ID NO: 108842 - DNA, 1236 bp, synthetic construct
  misc_feature 1..1236: note = Description of Artificial Sequence: Synthetic coding sequence
  source 1..1236: mol_type = other DNA
atggccgcccccaggccacccccagctagactgtccggtgtgatggttcccgctccaattcaggacctggaggccctgagagctttgaccgcgctatttaaggaacagcgtaaccgaaatttagacacaataggcgtggcggtggatctgatcttacttttcagggaactgagagtcgagcaagaaagcctgctcactgctttccggtgcgggttgcagtttctgggcaatatagcttccaggaatgaggattcccaatctatcgtgtgggtgcacgctttccctgagctctttctcagctgcctgaaccatcctgataagaagattgttgcttattcctccatgattcttttcacgagtctcaaccatgaaagaatgaaggaactagaggagaacctcaatattgccatcgatgtgattgacgcataccaaaaacatcctgagagtgaatggccttttctgattattaccgatcttttcctgaagtcaccggaattagtgcaggctatgttcccgaaactgaacaatcaagaacgcgtgacattattggatctgatgattgcaaagatcaccagcgacgagcctctcaccaaggatgacatccccgtgttcctgcggcatgccgagctgattgcttccacatttgtcgatcagtgcaagactgtgctcaaactagctagcgaggaacctcctgacgatgaggaagcattagccaccatacgtcttctcgatgtcctgtgcgagatgaccgttaacaccgagctgctgggctacttgcaggtgtttccaggcctactcgagagggtgatcgatcttctcagggtgatccatgttgcaggcaaggagaccacaaacatattttcaaactgtggttgtgtccgggccgaaggggacatctccaatgtggcaaatggattcaagtctcacctgattagattaatcggcaatctgtgctacaaaaacaaggacaaccaggataaggtcaacgaactcgacgggatcccactaatcctcgacaactgcaatatttctgacagcaacccattcctaacccagtgggtgatatacgctattagaaacttaactgaagacaacagtcaaaatcaggatttgatcgcgaagatggaggaacaaggtctcgcagacgcttcgctgctgaaaaaagtgggttttgaagttgaaaaaaagggcgaaaagttgattctgaaatccacgagggacacccccaaaccctag

SEQ ID NO: 108843 - DNA, 1362 bp, synthetic construct
  misc_feature 1..1362: note = Description of Artificial Sequence: Synthetic coding sequence
  source 1..1362: mol_type = other DNA
atggccgcccctagacctcccccagctcggttgtcaggagtgatggtccccgcgcccatccaagatttggaggcactgcgggccctgaccgctctgtttaaggaacagcgaaacagagagaccgccccccgtactattttccagcgcgtgctcgacatccttaaaaaatctagccacgccgtcgaattggcctgtcgagacccgtcccaagtggagaacttggcttccagtctgcagctcatcacggaatgctttcgatgtctgcgtaacgcctgtatcgagtgttccgtaaatcagaatagtattcgcaacctcgacactattggtgtggctgtggatttgatcctgctcttccgtgaactgagagtcgagcaggaatctctgcttacagctttccggtgcgggctgcagttcctcgggaatatcgcatctcgtaacgaagattcccagagcatcgtatgggtgcacgccttcccggagctgtttctatcttgtcttaaccacccagacaaaaagatcgtcgcctatagcagcatgattttgttcacttccctcaaccatgagaggatgaaagaactggaggaaaatctaaatatcgcaatagatgtgatcgacgcataccagaagcatccggaatccgaatggcctttcctgatcatcactgatttgttccttaaatctccggagttagtgcaagcgatgttccctaagcttaacaaccaggagagagttacactccttgacctgatgattgccaaaattacatctgacgagccactaacgaaagacgacatccctgtctttcttcggcacgcagagctgatcgctagtacatttgtcgaccagtgcaagaccgtcctcaagctcgctagcgaagagccacccgtgatgtacccttacatgcgtatcgtgggaaagtttagattgctcgatgtcctgtgcgagatgactgttaacacggaactgctgggctacctgcaagtgttccctgggcttcttgaaagggttattgaccttctgcgagtaatccacgtcgccggaaaggagaccaccaacatcttttcaaattgcggttgcgtccgtgccgaaggcgacatttctaacgtggccaatggttttaagtcccacctgataaggctgattgggaatctttgctacaagaataaagacaatcaggacaaggtgaatgagctcgatggcatcccacttattctggataactgtaatatcagcgattcgaacccctgctccgacccagtgggcgacatctgtcacccaaagccctaccgccggcagcagcccaagccacgatttgattgcaaagacggcggaaccggtgccgggaggtgtattccaacttag

SEQ ID NO: 108844 - DNA, 2070 bp, synthetic construct
  misc_feature 1..2070: note = Description of Artificial Sequence: Synthetic coding sequence
  source 1..2070: mol_type = other DNA
atgaaacctgttcacgaaaggagtcaagagtgtctcccccctaaaaagagagacttacctgtgacgagcgaggatatggggagaacgacatcctgtagtacaaatcatactccaagtagtgacgctagcgagtggagccgtggcgtagttgtagcaggacaaagtcaggcaggagctcgcgtgagccttgggggtgacggcgcagaagctattacaggtcttactgtggatcagtatgggatgctgtataaagtagccgtaccccctgccaccttcagtcctactggccttccatccgtagttaatatgagtccgctgccaccgactttcaacgtggcctccagcttgatccagcatcccggcatccactaccctccccttcactacgcacagcttccctccacaagccttcagttcatcggcagcccgtattctttaccctacgccgttccacctaactttcttccttcccccctcctgtcaccaagtgctaacttggctacctcacacctgccgcattttgtgccatacgcctcactactcgccgaaggcgccactccacccccccaggccccgtcccccgcccactcgttcaataaggctccaagtgccacttctccatcaggtcagctcccacatcacagttccacccagccgctggacctggccccaggccgaatgcccatttactatcagatgtcccgattgcctgcaggttatacgctgcacgagacgccgccggctggagcttcaccagtgctgactccgcaagagtctcagtcagctctagaggctgctgcagccaacggaggccagcggcccagagagcgcaacttagtccggagggaaagtgaggccctagactcccccaactctaagggcgaaggacagggcctggttcccgtcgtcgagtgcgtggtggacggacagctgttctcaggttctcaaacgcctcgggtggaagtggccgcacctgcacatagaggaacaccggataccgatttggaagtccagcgggtagttggcgctttggcctcacaggactacagggttgttgctgctcagcgtaaggaggaaccatcacctcttaacttaagtcaccacactccagaccaccaaggagaaggaagaggtagtgctaggaatcctgccgagttggctgagaaatcccaggcccggggcttctacccgcagagccaccaagaacccgtgaaacataggccactgcccaaagcaatggtggtggccaatggaaatctggtccccactggcaccgatagtgggctgctcccagtggggagtgaaattcttgtcgcatctagtctggacgtgcaggctagagccacttttcccgataaggaaccgactcccccccctatcacatcttctcacctgccctcccatttcatgaagggtgctatcatccaactggcaacaggcgaattaaaaagggtagaggatctgcaaacacaggacttcgttcgatcggctgaggtcagtggggggttgaaaatagattcttcgacagtggtggacatccaggaatctcagtggccaggcttcgtgatgctgcactttgtcgtcggtgaacagcaatctaaggtgtccatcgaggtaccacctgaacatccctttttcgtatatggacaggggtggtctagttgctccccgggccgaaccacgcagctattctctcttccctgccataggctgcaggtcggtgatgtgtgtatatcaatttcactgcagagtcttaattcgaactccgtaagccaggcctcttgtgcaccaccctcgcagctgggtcccccgagggaacgccccgagcggaccgtcctggggagtagggaactttgcgactccgaaggcaaatcacagcctgctggggagggctcgcgagtggtagaacccagccagcctgaaagcggggcgcaggcatgctggcccgcaccgtctttccagcgctactcaatgcagggcgaggaggctcgcgccgcactactgcgaccttctttcataccccaggaagtgaagctgagcatcgaaggcagaagcaacgccggcaaatag

SEQ ID NO: 108845 - DNA, 3942 bp, synthetic construct
  misc_feature 1..3942: note = Description of Artificial Sequence: Synthetic coding sequence
  source 1..3942: mol_type = other DNA
atgcgctcagctgcagcagcacctcggagccccgctgttgccaccgagagcaggcgttttgctgccgctaggtggccgggctggaggtcccttcagcgccctgcccgcagaagcggcaggggcggcggaggcgccgcgccaggcccttatcctagcgctgctcctcctccaccaggtcctggtcctccacccagtcggcagagcagccctccgtccgcaagcgactgtttcgggtcaaacgggaacggggggggggcctttaggcccggtagccgacggctgctgggtcttggagggccaccaaggccattcgtggtcctgctgctccctcttgcatctcccggcgctccacccgccgcccccaccagagcttcacctctgggggcacgtgcttcacctcccaggagcggtgtgtccctggcccgccccgcaccgggatgccctcgccctgcatgtgaaccagtttacggtcccctgactatgtccctcaagccgcagcagcaacagcaacaacagcagcaacagcagcagcagcaacagcaacagcaacagcaacagcagcaacccccccccgccgctgctaatgtccgtaagcccggggggagcggacttttggcttctccagctgccgctcctagcccaagcagctcttcggtatccagctcctccgccaccgcaccatcctcagtggtggctgcaacatccggcggcggccgacccggcctcggtcgcggcaggaactcaaataaagggctgcctcagagcactatttcctttgacggcatatatgcaaatatgcgtatggtccacattttgacttcagtggtgggcagtaaatgcgaggtccaggtgaagaatggtggtatctacgaaggggtgtttaaaacatatagtcctaagtgtgacctggttctggatgccgcccacgagaagagcactgaaagctccagcgggccgaagcgcgaggaaattatggagtctatcctttttaaatgtagcgatttcgtcgtggtccaattcaaagatatggatagttcgtatgcaaaacgcgacgcttttacggattcagctataagcgccaaagtcaacggcgagcataaagagaaggacctggaaccctgggatgcgggggaactgacagctaacgaggagctggaagcccttgaaaatgacgtgtcgaacggttgggaccctaacgatatgttccggtataacgaagagaactatggcgtagtaagtacctatgactcgagcttatcctcatataccgtccctctggaaagggataatagcgaggagttccttaaaagggaagccagggctaatcagctggcagaggagatcgaaagctccgcacagtacaaggcccgcgtggccctggagaacgatgacagaagcgaagaagagaaatacactgctgttcagcggaatagcagtgagcgggaaggtcattctataaatactcgagagaataaatacatcccacccggccaacgcaacagggaagtgattagctggggctcgggaaggcagaatagtcctcgaatgggacaaccaggctccggcagtatgccaagccgttccacttcacacacaagcgactttaaccctaattctggtagtgaccagagggtggtgaacggaggcgtgccttggccttccccctgtccctccccaagctccaggccacctagccgataccagtcaggcccaaattccctgccaccaagagccgcaaccccaacacgtccccctagccgaccccccagtcgaccatcaagacctccgtctcatccgagcgcgcacggcagtccagccccagtatcgacgatgccgaagcggatgagcagtgagggccctccacgtatgtctcccaaggcccagcggcatcccaggaatcacagagtgtccgctggcagggggagcatctcaagcggacttgagttcgttagtcacaacccacctagtgaggcggccacacccccagtcgcaagaaccagcccctctggaggcacctggagcagtgtggtgagcggcgttccgcgccttagccctaaaacccaccgaccccggagtccgaggcagaacagtatcggtaacactccatcagggcccgtgttggcttccccacaggcgggcatcattcccactgaagccgtcgctatgcccatccccgccgctagccctacccccgcctcacctgcctccaatcgggccgtgacaccgagctcagaagctaaggatagccgactccaggatcagcgtcagaattcaccagccggtaataaagagaacatcaaacctaacgaaacatccccaagtttctctaaggcagagaataagggaatttcacccgtagtgtcagagcatcgaaaacagattgacgacctcaaaaagttcaagaacgattttagactgcagccttccagtacctccgagtcaatggatcaattgctgaataagaatagggaaggtgagaagtccagggatctcataaaggacaagattgaaccctctgctaaggatagtttcatcgagaactcctccagtaactgcacttccgggagttcaaagcctaactcaccgtcaatcagcccttccattttgagcaatacagagcacaaacgggggccagaggtgacttctcaaggcgtgcagacgtctagccccgcctgtaaacaggagaaggacgacaaggaggagaagaaggacgcagcggagcaggttaggaagagcaccctgaaccccaacgctaaagagttcaatccaaggtccttttcccagccaaagccatcaaccacgcccaccagccccagaccccaggcccagccatccccatctatggtggggcaccagcagccaacaccagtgtatacccagcccgtttgcttcgcccccaacatgatgtatcccgtgccagtaagcccaggcgtgcagcccctctaccccatcccaatgacacctatgcccgtgaaccaggccaagacgtaccgcgcagttcccaacatgcctcagcagcggcaagaccagcaccatcagtccgcgatgatgcacccagcaagcgcagctggcccaccgatcgcagcaacccctccggcctactccacacagtacgtggcatactcacctcaacaatttcctaaccagcccctcgtccaacacgtgccacactaccaaagtcagcacccacacgtatacagccccgtaatccaggggaatgccaggatgatggctcctcccacacatgctcaacccggtctcgtgagctccagcgctactcagtatggagcccatgaacaaactcacgctatgtatgcgtgtcctaaactcccctacaataaggagacatccccctcattctattttgccataagcacgggctcgctggctcaacagtacgctcatcctaacgctacccttcaccctcatacccctcatccccagccatctgctacccccaccggacaacaacagagccagcatggtggatcccaccccgctccctcccccgttcagcaccaccagcaccaagccgcccaggccctacaccttgcctccccccaacagcagagcgccatttaccatgccggcctcgccccaaccccccctagtatgacgcctgcttctaacacccagagtccacaaaatagcttccccgccgcccagcagacggtcttcacaatacatcctagccacgtccaacctgcgtatacgaaccccccgcatatggcacatgtgcctcaggctcacgttcagagcgggatggtgccatctcatccaaccgcccatgctcccatgatgcttatgacaacccagcctcctggtggacctcaggcggcattggcgcagtccgccctacagccgatccccgttagtaccacagcccattttccttacatgacccacccctccgtccaggctcaccatcagcaacagctctag

SEQ ID NO: 108846 - DNA, 2988 bp, synthetic construct
  misc_feature 1..2988: note = Description of Artificial Sequence: Synthetic coding sequence
  source 1..2988: mol_type = other DNA
atgcggtctgctgcagctgctccacgttctcccgctgtggctaccgagtctcgacgcttcgctgctgcaaggtggccaggatggcgctcactgcagcggcctgccagacggtcaggccgaggtgggggaggcgccgctccgggtccttacccctcagcagcgcccccacctcccggtccagggcccccccctagcaggcaatcgagcccccctagcgctagcgattgttttggttctaacgggaacggtgggggcgcctttcgtccgggctcccggagactgctagggttgggcggccccccccgccctttcgtcgtcttactattacccttggcctctcctggagcccctccagcggcgcccacccgcgcttctcctctgggcgccagagcaagtccgcccaggtccggagtgtcattagcacgacccgctcctggctgtccccgtccagcatgtgagcccgtttacgggccgctgactatgtcattaaagcctcagcagcagcaacaacaacagcagcagcagcagcagcaacagcagcaacagcagcagcagcagcagcagccaccccctgcggccgctaacgttagaaagcccggagggagtggactgctcgcttcacctgccgccgccccttcgccttcctcttccagcgtgagcagctccagcgccactgcacccagcagtgtggtggccgcaaccagcggagggggcagacctggattgggtcgggggcgcaactccaacaaggggctgcctcagtccaccataagttttgacgggatttacgctaacatgagaatggtgcacatcctgacatccgtggtgggaagcaagtgtgaggttcaagttaaaaacggcggaatttacgagggtgtgttcaagacttactctccaaagtgtgacctggtgctagacgcggcccacgagaaaagtactgaaagcagctctgggcctaagagagaggagatcatggaatcaattcttttcaaatgttcagattttgtggtcgttcagttcaaggatatggactcatcctatgccaagagggatgcattcaccgatagtgccatctccgctaaagttaacggcgagcataaagagaaagatttggaaccgtgggatgctggagagctaaccgcaaatgaagaacttgaggcgctagaaaatgatgtgtcaaacggatgggatccgaacgacatgttcagatacaatgaagagaactatggggtggtgtctacctacgactcttctctctcgtcctatactgtccccctggagagagacaactccgaagaattcttaaagcgggaagcccgagctaatcaactggcagaggagatcgagtcgtctgcacagtataaagcccgtgtggcgctggaaaacgatgatagatctgaagaagagaagtatacggctgtacaacgtaatagttctgagcgcgaggggcactctatcaacaccagagaaaacaagtatatcccacccgggcaacggaatcgggaggtgatctcctgggggagcggccgccagaactcaccacgaatggggcagccgggatccggctccatgccgtctcggagcacatcccatacctccgattttaatcctaacagcggcagtgatcagcgtgttgtcaatggcggggtaccttggcccagtccctgcccttcgcccagttccagacccccatccagatatcagagcggaccgaattcgttacctcctagggctgccacgcccacaaggcccccgagccggcctccttcacgccctagccgaccacctagccacccgtccgcccatggatcccccgcacccgtgtccactatgccaaaacgaatgagctccgagggccctccccggatgagccctaaagcacagaggcatccaagaaaccaccgtgtgtctgccggccgcggctctattagctccgggctggagtttgtttcccataacccacctagcgaagccgcaaccccacctgtggctcgcaccagtccctctggcggcacttggtctagcgtcgtgagtggggttcctcgtctgtctcccaagacccacagacctaggtcccctaggcagaactccatcggtaataccccatctggcccagttctggctagcccccaggccgggatcatccccacagaggccgtcgctatgccaatacccgccgcatctccaactcctgcctctcccgccagcaaccgcgccgtgacccccagctccgaggcgaaggattctcgcctgcaggaccaaagacagaacagccccgctggaaataaagagaacatcaaacccaacgaaaccagcccctctttcagcaaggcggagaataaagggatctcacccgttgtgtctgagcatcgaaaacagatcgatgacctaaaaaaatttaaaaacgacttcaggttgcagccaagcagcacatctgaatcgatggatcagctgctgaacaagaaccgcgagggggaaaaatccagagacctgataaaagataaaatcgagcctagcgcgaaagacagttttatcgagaattcttccagcaattgcacaagcggatctagcaaaccgaactcaccaagcatttctccatccattctctctaacacagagcacaagcggggacctgaggtaaccagtcaaggggtgcaaacttccagtccggcctgtaaacaggagaaagacgataaagaagagaaaaaagacgctgcagagcaggtgcgcaagtctaccctgaacccaaacgcaaaagagttcaaccccagatccttctcccaacccaaacctagtacaactccgacatcacccaggccacaggcccagccaagccccagcatggtgggacaccagcagccaacccctgtgtacacgcaaccagtatgtttcgctcccaatatgatgtatccggttcccgtctctcccggagtgcaatatcaaatctgccccaatagcggaaagactagcatcatcagagtgccctag

SEQ ID NO: 108847 - DNA, 3189 bp, synthetic construct
  misc_feature 1..3189: note = Description of Artificial Sequence: Synthetic coding sequence
  source 1..3189: mol_type = other DNA
atgctgaagccccagccgcttcagcagcctagtcagccccagcagccccctccaactcagcaggccgtggctagacgccccccgggaggtacctcacctcccaacggtggtcttccgggcccactcgctacttctgcagcaccaccgggaccgcccgccgcggcttctccttgcctgggcccagtggctgctgcaggatctggcttaaggcgaggggccgagggcatactggccccccagcccccccctccccagcagcaccaggagcggcccggagccgcagccatcggatcggcacgcgggcagagcacgggaaagggccctccgcagtcacccgtcttcgagggagtctacaataactctcggatgcttcactttctaaccgccgtcgtgggctcaacctgcgacgttaaggtcaaaaacggtactacttacgaaggaatatttaagaccctcagcagcaagttcgagcttgcagtggacgccgtgcaccgcaaagcttctgagcccgcgggtggccctaggcgggaggatatcgtcgacacaatggtgtttaagccctccgacgttatgctggtccacttcagaaacgtggactttaattacgctacaaaggataagttcaccgactccgccatcgcaatgaactctaaagtcaatggggagcataaggaaaaagtcttgcagagatgggaaggaggggacagcaactctgatgactatgacctggagtccgatatgtcaaatgggtgggacccaaatgagatgtttaaatttaatgaggagaactatggggtgaaaaccacatacgatagtagcctctccagttacacagtgcccttggaaaaggacaattcagaggagtttcgccagagagagctccgcgccgcccagctggcacgtgagatcgagtcctcaccccagtaccggctcaggatagccatggagaacgatgatggtaggacagaagaagagaagcactccgctgtgcagcgtcaaggcagcggcagggagagcccctccttggcctcacgggaaggcaagtacattcccctgccccaaagggtccgtgaaggtccacggggtggtgttaggtgtagctctagccgtggcggacgtcctggcctgtctagcctgccccctcgaggacctcatcacctggacaacagctcccctggtcccggtagcgaagcaaggggcatcaatggggggccatctaggatgagtcccaaagcacagagacctctgcgcggggctaagacactgagctctccatccaatcgcccgtcaggcgaaacctccgttcccccaccaccggccgttggccgcatgtaccctccccgcagccccaagtctgccgctcctgccccgatttccgcaagctgccctgagccccccattggttctgccgtgcccacaagctctgcctctattcccgtcaccagttctgtgtcagaccccggtgttggatcgatttctcctgcctccccgaagatttccttggcaccaacggatgtcaaagaactttctacaaaggaaccggggagaacactggagccgcaagagctggcgcgtatcgccggcaaggtgccagggctgcaaaatgaacagaagagatttcagctggaagagctgcgaaaattcggagcccagtttaaactccagccctcatcctctcccgagaactccttggatcccttcccaccacgtatcctcaaggaggagccgaaagggaaggagaaagaggtagatggccttctgactagcgagcccatgggcagccccgtgagcagcaaaacagaatcagtatctgacaaggaagacaaaccgcccttggcaccatccggggggaccgaaggccccgagcagcccccccctccctgcccttcgcaaaccgggagcccgcccgtgggcttaattaaaggggaggacaaagatgaagggcctgtggcggaacaggtgaaaaagagcacgctcaatcccaatgcaaaagagtttaaccccacgaagcccctcctctccgttaacaaatcaacgtccactcccacctcccctggccctaggacccactccaccccatcaatcccggtgctgactgccggccagtccggtctttactccccacagtacatttcatatatcccccagatacacatgggcccagccgttcaggctccccagatgtatccatacccagtctccaacagtgtaccaggacagcagggcaagtacagaggggcaaagggttctttgcccccgcaacgatcagaccagcaccagcccgcaagtgcacctcctatgatgcaggccgccgcagctgccggaccccctctcgttgctgcgactccatactctagctacatcccatataacccgcagcaatttcccggtcagccggctatgatgcagcccatggctcactatccctctcaacctgtgttcgccccgatgcttcaatcaaacccccgaatgctgaccagtgggtctcacccccaggccattgtgtctagtagcaccccacaatacccttccgcagagcagcctaccccacaagccctgtacgcaacagtgcaccaaagctatcctcaccacgccactcaactgcacgctcaccagccacagccggcaactacgccaactgggtcccagcctcagagccagcatgccgccccctcaccagtgcagcaccaggccgggcaggctccacatttagggtccggacagccccagcagaacctgtaccacccgggtgccctgactgggactcccccttcactgccacccgggccctctgcccagagcccacagagcagtttcccacaaccagctgctgtgtacgccatccatcatcagcagcttccccacggcttcacaaacatggcacacgtgacccaagcccatgttcagaccggaatcaccgccgctcctcccccacaccccggagccccgcacccgccccaagtgatgctcctgcacccaccacaatctcatggaggtccaccccagggcgctgtgccccagtcgggagttcctgctctgtccgccagcaccccttctccgtacccatacatcggccacccccagggtgaacagcccggtcaggcacccggcttcccaggaggcgccgacgacaggattcctccactcccaccgcccggtgaacttaagattgtcctggccgcaacgtag

SEQ ID NO: 108848 - DNA, 3228 bp, synthetic construct
  misc_feature 1..3228: note = Description of Artificial Sequence: Synthetic coding sequence
  source 1..3228: mol_type = other DNA
atgctcaagccccagcctcttcagcagccctcacagccccagcaaccacctcccactcagcaggccgtagctagacgacctccaggcggcacctcgcctccaaacggtggactgccaggtcccctcgccacatcagctgccccacccggtccaccggccgcggcctctccctgccttggcccagtggcggcagctggctctggtctgcgacgaggggccgaggggatcctggcccctcagcctcctccccctcagcagcatcaagaaagaccgggagccgcagctattggttccgcgagaggacagtcaactgggaagggacccccacagtccccagtcttcgaaggggtctacaataactctagaatgcttcattttttaactgccgtggtcggaagcacatgcgacgtgaaggtgaaaaatggcacaacctacgagggaattttcaaaacactatcctccaaattcgagctcgcggtggacgccgtgcatagaaaagcttcggagcccgccggcggccccaggagggaagatatcgtggacaccatggtctttaagccctctgatgtgatgctggtgcacttcagaaacgtagactttaattatgccaccaaggataagtttaccgacagcgccattgccatgaactccaaagttaatggcgaacacaaagaaaaggtcctccaacgctgggagggcggagactccaattccgacgattacgacctggaatcggatatgagcaatgggtgggatccaaacgagatgtttaagttcaacgaggagaactacggcgtcaaaacaacatatgattcttcattgtcatcttacaccgtcccactcgagaaagataacagcgaggagtttcgccagcgagagttgcgcgcggcccagctcgctcgcgagatcgagtcatccccccagtaccggcttcgcatcgccatggagaacgacgatggccggactgaagaagaaaagcactccgccgtccagcgacaggggagcggccgcgagtctccaagtctcgcatctcgtgagggtaaatacattccactgccacagagggtccgggaagggcctcgtggcggggttaggtgcagctcttccagaggaggacgccccggcttgtcctctttaccacccagggggccacaccacctagacaactccagccccgggcccggttcagaggcgcgcggcatcaacggaggaccatctagaatgagtcccaaagctcaaagacctttgcggggggcgaagacgttatcctctccttctaacagaccaagtggtgagaccagtgttccccccccacctgctgtcgggcggatgtaccctcccaggtctcctaaatcagccgctccagcccctatctcagcttcatgccctgaaccaccaatcggctctgccgttcccacatcatctgcttcaatcccagttacctcctctgtgtcggaccccggcgttggttccataagtcctgcttcaccaaagatttctctggcaccgacagacgtgaaggagctctctacaaaggagcctggaaggacattagaaccacaagagcttgcccgcatagctggaaaagtgcctggcctccagaatgagcaaaagcgcttccagctggaggagctgcgcaagtttggggctcaatttaagctgcagccgtcttcctctcccgaaaacagcctcgacccatttcccccacggattctgaaagaagagcccaaaggcaaagagaaggaagtggatggtttactaacgagtgagcccatgggtagtccggtaagtagcaaaactgagtccgtgagtgataaggaagataagccccctctagcaccgtccggagggacggaaggacctgagcagcctccaccaccttgcccctcccagaccggatcacccccagtagggctgattaagggggaagataaggacgaaggccctgttgcagaacaagttaagaaaagcacactgaatccgaacgccaaagaatttaatccaacaaagcctctactctctgtgaacaagtccaccagtaccccaacgtctccaggacccagaacccattccacaccctctattcccgttctgacagcaggacagagcgggctatatagtcctcagtatatcagttatatcccgcagatacacatgggtcctgctgttcaggctcctcagatgtacccctatcccgtctccaactccgtgcccggccagcaagggaagtacaggggcgctaaaggctctttacctccacagcggtctgaccagcaccagcccgcgtccgcccccccaatgatgcaggccgcagctgctgctgggccacctctggtcgctgccaccccctattcaagctatataccttacaatccccaacagttccccgggcagcctgcaatgatgcagcctatggcacactacccatcacagcccgtttttgccccgatgttgcagagcaaccccaggatgctgacgagcggctctcatccccaagcaatcgtctcaagctcaaccccccagtatccatcagcagagcagccaacacctcaggccctgtacgcaacagttcaccagtcctatccgcatcatgcaacgcagctacatgctcatcagccccagccagcgactaccccgactgggtcccagcctcagtctcagcacgctgccccgagtcccgtccaacatcaggctggacaggcacctcatttagggtcaggtcaaccccagcagaacctctatcatcccggggctctgacgggaacccctccatcactgccgcccggcccaagcgcccagtctccgcagtcctcatttccacagccggccgcagtatacgctatacaccatcagcagctgcctcacgggttcaccaacatggctcatgtgactcaggcccatgtccagactggtattaccgcagccccgcctccccaccctggcgccccgcaccccccccaggtgatgctgctgcaccccccccagtcccatggaggacctccacaaggggccgttccccagagtggcgtgccagctctgtcagcatctacccccagcccttatccctacattgggcatccccaaggagagcagcccggccaggccccaggttttcctgggggcgccgacgatagaattcgcgaatttagtctagcaggagggatttggcatggccgcgctgagggacttcaggtgggccaagacgctagggtgttagggggtgaatag

SEQ ID NO: 108849 - DNA, 3135 bp, synthetic construct
  misc_feature 1..3135: note = Description of Artificial Sequence: Synthetic coding sequence
  source 1..3135: mol_type = other DNA
atgttaaagcctcagccacttcaacagccctcccaaccgcagcagcctccccctacccaacaggcggtagcgcggcggcctcctggaggcacctcccctcccaacggaggcctacctggcccgctggccacctcggcagctcctcccggccctccagctgcagccagtccttgcctgggaccggtcgctgccgcaggttcgggcctgcgccggggtgcagagggcatcctggctccccagcctccacctccccaacagcaccaggagcgccccggggccgcagcgatcggctcggcgcgagggcagtccacaggtaaagggccaccccagagccctgtgttcgagggcgtttataacaactctagaatgctccattttctgaccgctgtggtgggatctacctgcgacgtaaaggtgaaaaacggtactacatatgagggcatcttcaaaactctgagctcgaagtttgaacttgccgtcgatgcagtgcatcgtaaagcaagcgaaccagcaggcggcccgaggagggaggatatcgttgacaccatggtgtttaaaccgtccgatgtgatgttggttcatttccggaatgtggactttaattatgcaaccaaggataagttcaccgacagtgcaattgccatgaatagcaaggtgaatggagagcacaaggagaaagtgctgcaacggtgggaaggcggtgactccaacagcgatgattacgacctggagagtgacatgtccaatggttgggatcctaacgagatgttcaagtttaatgaggagaactatggtgtgaagactacttacgactcaagtctctcatcttataccgtccccctggagaaggacaacagtgaagaatttcgtcaacgggagctgagagctgcacagctggcacgcgagatcgagagctctcctcagtatcgccttcgaatcgccatggagaacgatgacggacgcaccgaggaagaaaagcattctgccgtgcaacgtcagggttctggaagagagagcccctcactcgcctcaagagaagggaagtatattcccctgcctcagagagttcgggagggtccccggggaggggtgcgctgtagcagttcaagaggaggccgccccgggctcagctctcttccccccagggggcctcaccatttggataatagcagtcccggcccaggctccgaggcgcgcggcattaatggcgggccatccagaatgagtcctaaagcccaaaggccccttagaggggccaagacgctgagctcaccatcaaaccggccatccggggagacaagcgtccccccccccccagctgtgggtaggatgtatccaccccgcagccccaagagcgcagccccggctccaatcagcgcgtcctgcccagagcccccaattggcagcgcagtcccaacatcttcagccagcattcctgtgacttcttctgttagtgatccaggagttggaagcatttctccggcaagtcctaagataagcctggcaccaacagacgtcaaagagctctcgaccaaggagccaggacgaacacttgaacctcaggagctcgcaagaattgccggtaaggtgcccggccttcagaacgaacagaaaagattccagcttgaggaactgagaaagttcggtgcccaattcaaactccaacctagtagcagccctgagaactctcttgatccattcccaccacgtattctgaaggaagagcctaaaggcaaggaaaaagaggtagatggccttctaacatccgagccaatgggttcacccgtcagcagcaagaccgaatcagtctctgacaaggaggacaagccaccactagctccgagtgggggcaccgaggggccagagcagccaccacctccctgcccttcccagactggtagtcctcccgtgggtctgattaaaggtgaagataaagacgaaggcccagtcgcagagcaagtgaagaagtccacccttaacccgaatgccaaagaatttaatcccactaaaccactactgtcggtcaacaagtccaccagcacaccaacatctcccggacccaggacgcattccactccctctatccctgttctcaccgccggccagagcggactgtatagcccacaatacatttcatatatcccacaaatccacatgggtcccgccgtccaggcacctcagatgtatccttaccctgtctcaaacagcgtccctggacagcagggcaaataccgtggcgccaaaggcagtctgcctccacaacgtagtgatcagcatcagcccgccagcgctccgccaatgatgcaagcagcggcagccgccggccctcctcttgtcgccgccacaccttactctagctacatcccatacaaccctcaacaatttcctggccagcctgctatgatgcagcccatggcccattacccctcccagccagtgtttgcgcccatgttacagagcaatccaagaatgctcacatcaggtagccacccccaggccattgtcagttcatcaactccacagtaccctagcgctgagcagccgaccccacaggcattgtatgctacagtgcaccaatcgtacccacatcatgctactcagctgcacgcacatcagcctcagccagcaacaacaccaactggcagtcaaccacagagtcaacacgcagccccaagtcctgtgcagcaccaggcaggccaggctccccacctgggctccggccagccccaacagaatctgtaccaccccggtgcactgaccggcacacctccttccctgcctccgggcccatcggcccagtctccccagtcaagttttcctcagccagccgcagtgtatgctatccaccatcagcaactacctcatggttttaccaatatggcccacgtgacacaggctcatgtgcaaactgggatcacagccgcgccacccccccaccctggagctccccaccctccgcaagtgatgctgctgcaccctcctcagagccacggcggcccaccccagggagcagtgccacagtctggcgttcccgccctttcagcctcaactccctctccttacccctatattggccatccccaggtgcagtcccacccaagccagcagttaccattccacccgccaggtaactag

SEQ ID NO: 108850 - DNA, 1203 bp, synthetic construct
  misc_feature 1..1203: note = Description of Artificial Sequence: Synthetic coding sequence
  source 1..1203: mol_type = other DNA
atgctaaagccgcagccccttcagcaaccaagccagccccagcagcctccacctacgcaacaggctgtcgctagaaggccgcccgggggtaccagcccacccaacggagggctgcctgggccactcgccacctcagctgcacctcctggccccccagccgcggcttccccatgcctgggtcctgtagcagccgctggtagcggacttagacgaggggctgaaggtatcttggcccctcagccgcccccaccccagcaacatcaagagcgaccaggggccgccgccatcgggtctgcccgtggtcagagcacaggcaaaggtcctccccagtcacccgtctttgagggcgtctacaataatagtagaatgctgcacttcctcactgccgttgtaggctccacatgtgatgttaaggtcaagaatggaaccacttacgagggcatatttaaaactctctcgagtaagtttgaactggcagtggatgccgtgcaccgtaaggcttcagagcccgctggagggcctcgtcgtgaagatattgtcgatactatggtctttaaaccaagcgatgtgatgctggtgcacttccgaaacgttgacttcaattacgccacaaaagataaattcacagacagcgctatcgcgatgaatagcaaggttaatggggagcacaaggagaaagtgctccagcgctgggagggcggcgacagcaattcagacgactacgaccttgagagcgacatgagcaatggctgggaccccaacgagatgttcaagtttaacgaagaaaactacggcgtgaagactacttacgacagttcactttcttcatacacagtaccactggagaaggataattcagaagaatttcggcagcgggagctccgggcagcacaactagctcgggaaatagagtccagtccccagtataggctccgcatcgccatggaaaatgacgatggtcgcacagaggaggaaaaacacagtgccgttcagcggcagggctccggaagagaaagccccagcctagcttctcgggagggtaagtacatccccctgcctccacatagaggccagggccagggccctgctggcgtcgggggcagctgtagcgctcctgcccgtccacaccccgtgttgccctcgcatccactgatctattctccagcgggagacgggcgttcttttatattttactatctctag

SEQ ID NO: 108851 - DNA, 3135 bp, synthetic construct
  misc_feature 1..3135: note = Description of Artificial Sequence: Synthetic coding sequence
  source 1..3135: mol_type = other DNA
atgttaaagcctcagccactgcagcagcctagtcagcctcagcagccaccacccacacaacaagctgtggcccggcgccctcccggcggtacttcccctcccaatggaggtttgccaggtccccttgctacttcagcagctccccccggaccccccgccgccgcctctccatgtttaggtccagtggctgctgctggctccgggctcaggaggggcgctgagggaatcctggccccacagcctccgcccccccagcaacatcaggagagacccggagctgccgccatcggctcagctagaggccagtccaccggcaaggggccaccccaatcacccgtcttcgagggagtgtacaataactcacgcatgcttcacttcctcacagccgtggtgggctccacctgtgatgtgaaggtgaaaaatgggaccacatatgaaggtatctttaaaactctgagttccaaatttgagctggccgtcgacgcagtccataggaaagccagcgaaccagcagggggtccccggcgcgaagacattgtcgatactatggtgtttaagccttctgacgttatgctggtgcacttccgtaacgtggacttcaattatgcaaccaaagacaaattcactgacagtgccatcgctatgaactctaaggtaaacggggagcacaaggagaaagtgctgcaacggtgggaaggaggtgattcgaacagtgacgattacgatcttgaatccgatatgtctaatggctgggatccaaacgaaatgtttaaattcaatgaggagaactatggcgtgaaaaccacctatgatagctcgctttcatcctatactgtgccgcttgaaaaggacaattctgaggaatttcgccagagagaactgagagcggcgcagctggccagggaaattgagagctctcctcagtaccgcctcaggatcgccatggaaaatgatgatggccgtactgaagaggaaaagcattctgctgtacagagacaagggtccgggcgagagtcaccttccctggctagtagggaaggtaagtacattcctttgccccagcgcgttagagaaggacctaggggaggggtgaggtgttcctcaagccgcggaggtaggcctgggctgagcagcctaccacctagaggtcctcatcacctcgacaattcctcccccgggcccgggtccgaagctagaggaatcaacggcggcccatctaggatgtctcccaaggcacagcgaccccttcgaggcgctaagaccctgagttcaccctctaacaggccatccggggaaacaagcgtgccccctccgcccgccgtggggcggatgtatccacctcgcagtccaaagtcagccgctccggcacccatttccgcgagctgtcccgaaccccctatagggtccgcagtgcctacatccagcgcttcaattcccgtgactagttccgtgtccgatccaggtgtcggcagcatcagcccagcgtcacccaagatctcactggcgcccacggatgtgaaagagctgtctactaaggagccaggacggacactggagcctcaggagctagcccgaatcgcagggaaagtgccagggctgcaaaatgaacagaagcgattccaactggaggagcttagaaaattcggagcccagttcaaacttcagccctcttcttcacccgagaattctctcgacccctttccacctcggattctaaaagaggaaccaaaaggaaaggagaaggaggtcgacggcctgttaacaagcgagcccatgggttcgcccgtgtcctctaaaacagagtctgtgtctgataaggaagataagccccctttagccccttcaggtggcactgaggggcccgaacagccgccccctccgtgtccatcacaaactggcagtccacctgtaggactgatcaaaggagaggacaaggacgaggggccagttgccgaacaggtcaagaagtccacgctgaacccgaatgctaaagaatttaacccgactaaacctttattgtcagtaaataagtccacctcaacaccaacaagcccagggcccagaactcactccacccccagcatcccggtccttactgccggacagagtggcctatatagtccacagtatatctcttacattccacagatccacatgggccctgccgtgcaggctccccagatgtatccctaccctgtatcaaattctgtgccaggacagcaagggaaatacagaggcgctaaaggctcattacccccccagcggtcagatcagcatcagccggcttcagcgccgccaatgatgcaagcagccgccgcggctggcccgcctctggtggccgctaccccgtatagctcctatatcccttataacccgcagcaatttcctgggcagccagccatgatgcagcctatggcacattaccccagtcagcccgtgttcgcccctatgctgcaatctaacccccggatgctgacctctggatcacatccccaggctatcgttagctcctcaactcctcagtacccctcggccgagcagcccacgccacaggctctgtacgccacggtccatcagtcatatccccaccacgccactcagctgcacgcacatcagcctcagccggctactacccccactgggagtcagccccagtcccaacacgctgctccgtcaccagtgcagcaccaagcggggcaggccccacacctgggaagtgggcaaccgcagcaaaatctgtaccaccccggggcactcaccggcaccccacccagccttccccctggccctagcgcccagtctccacagtcctcttttccgcagcccgccgcggtgtatgctattcatcatcaacagctacctcacgggttcacaaacatggcccacgtcactcaagcacacgttcagacaggcatcaccgccgccccgccgcctcaccctggcgctccccaccccccccaagtgatgctccttcatcccccacagagccacggaggccccccacaaggggctgtcccacagtctggagttcctgctttatctgcctcgactcccagtccctacccctacatcgggcacccgcaagcccctctcccccctcctggcgagttgaagattgtactcgccgccacgtag

SEQ ID NO: 108852 - DNA, 3294 bp, synthetic construct
  misc_feature 1..3294: note = Description of Artificial Sequence: Synthetic coding sequence
  source 1..3294: mol_type = other DNA
atgctgaagcctcaacccctccagcagccatcgcaaccccaacagccccctcctacacagcaggccgtcgccaggaggccaccgggcggtacctctcctcccaacggcggactgcctggaccacttgcaaccagcgctgcccccccgggaccacctgcagctgcgtccccctgcctggggcctgtcgcagcggcagggagcggcttacggaggggcgcagaaggcattctagccccccaacctcctcctccccaacagcatcaggaaaggcctggagctgccgcaatcggcagcgctcgaggacagagcacgggaaaaggtcctcctcagagccctgtgtttgaaggggtgtataacaattcacggatgctccactttcttacagcggtggttggctcaacatgcgacgtgaaggtgaagaacggaaccacatatgagggaattttcaagacacttagcagtaagttcgaactggccgtcgacgccgtacatcggaaggcctctgaaccggccggggggccgagaagagaagatatcgtggatacaatggtgttcaaaccatccgacgtgatgctagtgcatttcagaaatgtcgatttcaattacgcgactaaggacaagttcactgattccgccatagcgatgaacagtaaggttaacggtgagcacaaagaaaaggtgcttcaaaggtgggagggaggcgattcaaacagcgacgactacgacctggaatcagacatgtccaacgggtgggaccctaatgagatgtttaagttcaatgaggaaaattatggcgtcaaaacgacctacgatagcagcctctcatcatacactgtccccctcgagaaagacaacagtgaggagtttcggcagcgggagctcagagccgcccagcttgctcgtgaaattgagtcatctccccagtatagactgcggattgcgatggaaaacgatgacgggcgaaccgaggaggagaagcattctgcagtccagcggcagggatctggccgggaatccccttctttggcatcacgggaaggtaagtatattcctctgccacagcgggttcgtgaaggccctcggggaggagtgagatgctcttcatctcgtggtggtcggcctggcttatcttctctgccaccaaggggtccccatcatttggacaacagctccccgggcccaggcagcgaagccagggggataaatgggggtcccagcaggatgagcccaaaggcccagcgtccgctgaggggtgctaaaacacttagcagtccaagtaatcgcccctccggggagacgtccgtccccccaccacctgcagtcggaagaatgtatcctcccagatcacctaaatccgcggcacccgcccccataagcgcctcatgccccgaaccacctattgggtccgcagtgcctacgagttccgccagcataccagtcaccagctctgttagtgatcctggtgtaggcagcatcagccccgcatcccccaagatctcgctggcacccactgacgtcaaagaattatctaccaaagagcctggcagaaccctggaaccccaggaactggctcgcatcgcagggaaagtgcctggcctgcagaatgagcaaaagcggttccaactagaggaactccggaagtttggtgctcagttcaagctgcaaccctctagcagtcctgagaatagcttagaccctttcccccctaggatccttaaggaagaaccaaaaggcaaagaaaaagaagttgacggattgttaacttctgagcctatgggaagtccagtgtcttctaaaactgaatctgtgtccgataaggaagacaagccgcctctggccccctcaggcgggacagagggcccagaacagccaccacctccatgcccctcccagacagggtcacctccagtcgggctcattaagggagaggataaggatgagggtcccgtggccgagcaagtgaaaaagtcgacactcaacccaaatgccaaagagttcaatcctaccaaacccttgctgtcagtgaataaatccacctctacgcccacttcccctgggccacgcacacactccactccatctatacctgttttgacagccggccagagcgggctttacagcccgcagtatatctcctatatcccccaaattcacatgggccctgctgtccaggcaccacaaatgtacccctatcccgtgtctaactccgtcccgggccaacagggaaagtacaggggggccaaggggtccctgcctccccagcggtctgatcaacaccagccggcctctgctccacccatgatgcaagccgcagccgccgcgggtcctccgctggttgccgcaacgccctattccagctatatcccatataatcctcaacagtttcccggacaaccagccatgatgcaaccaatggcccactacccttcacagcccgtctttgccccgatgttacagagtaacccccgtatgctcacctctggcagtcacccccaggcaattgtaagttcctccactcctcaatacccaagcgctgaacagccgactccgcaggctctgtacgccaccgtgcatcagagctacccgcaccatgccactcagctccacgcccatcagccacagcccgctacaactccaacagggagccagccgcagtcacagcacgctgctcctagccctgtgcagcaccaggccggtcaggccccacacctcggaagtgggcaaccccagcaaaacctttatcacccaggcgcattgactgggactccgccatcccttcccccaggccctagtgctcaaagcccacagtcttcattcccccagccggctgcggtctatgccatccaccatcaacagctgcctcacggcttcaccaacatggctcacgttactcaggcacacgtgcagacaggcatcaccgccgccccccccccccatcccggagccccacatcctccccaagttatgttgctgcatcctcctcagagccatggcggtccgccacaaggggcagtgcctcaatccggagtgcctgcactgagtgcatctacacctagcccttacccttatattgggcaccctcagggagagcagccgggccaggctcctgggttccccggaggggcggacgacaggatcctctgcagggtcggccgctcccattcgagacgccggcagggactagccccggggtccgtgctgtgttttccaccgtcttcccttagctgtgatcccgccgcccctctgcctaccgcatctccagccttatccgatcctgattgcctgttgacgtag

SEQ ID NO: 108853 - DNA, 2679 bp, synthetic construct
  misc_feature 1..2679: note = Description of Artificial Sequence: Synthetic coding sequence
  source 1..2679: mol_type = other DNA
atgagcgaacgcgccgctgatgacgtcagaggagaaccccgacgggcagcggctgctgcgggaggcgccgcggccgccgctgcccggcaacagcaacagcagcagcagcaacaacagccaccccccccacagccacagcggcagcagcatccaccaccaccaccccgcagaactcgccccgaggatggaggacccggcgctgcctcaacctctgctgctgctatggcaacggtcggggagcgccgaccattgccatcccctgaggttatgctgggacagtcttggaatctctgggtggaggcatcgaagctgcccgggaaggatggcaccgagttggatgagagcttcaaagagttcggcaagaaccgcgaggttatgggcctgtgcagggaggatatgcctatcttcgggttttgtcctgcacacgatgacttctacctggtcgtgtgcaacgactgcaaccaggtggtgaaaccgcaggcgttccagagtcactatgaacgaaggcatagcagcagctccaagccgcctctagccgtccctcctaccagcgtgttctctttctttccatccctatccaagtcaaaaggcgggagtgccagtggtagtaatcgatcctcatccgggggtgtccttagtgcctcatcatcctccagcaagttgcttaaaagtccgaaagaaaagctccaattgcgcgggaatacacgccctatgcaccctatacagcagtctcgagtgccccatggaagaatcatgacgcccagcgtgaaagtcgaaaaaattcaccctaagatggacggaacactcctgaaaagcgccgtgggacccacctgtcccgccactgtgagctccttggtgaagcctggtttaaactgtccttcaatcccgaagccaaccctgccgtccccgggacagattctcaacggcaaaggcttgcccgccccacccaccctcgagaagaagcctgaggataatagtaacaacaggaaattcttaaacaaacgcctttctgagcgggagttcgatcccgatatccactgcggggttatcgatctagataccaaaaagccttgtactcgctctctaacttgtaagactcattccctgacccagcggcgggctgtccaggggagacggaagcgctttgatgtgctcttagccgagcacaagaacaaaactcgagagaaagagctgatccgccaccccgatagccagcagcctccccagcccctcagggacccccaccctgcaccccctaggactagtcaggaacctcaccagaacccacacggtgtcatcccttcagagagtaagcctttcgtggccagcaaacctaagccacataccccaagcctccccagaccgccaggctgccccgcccagcaggggggatcagccccgatcgaccctcccccagtgcacgagtcaccacacccgcctttgccagctaccgagcccgcatccagactgagcagcgaagagggcgaaggagatgacaaagaagagtccgtggagaaacttgactgtcattacagcggacaccacccccaaccagccagcttctgcacattcggctctcggcagatcggccgcggttattacgtcttcgatagtcgctggaacaggttgcgatgtgccctgaacctgatggtggagaagcatttaaatgctcagctgtggaagaagatcccccccgttccatcaactaccagccccatctccactaggatcccgcaccggacgaattccgtccccacctcccaatgcggggtttcctatctagcagccgctacagtgagcactagtcccgtgctccttagttcaacatgtatatccccgaacagcaagtctgttcccgctcatggtaccactctgaacgcacagcccgccgcctccggcgcaatggacccagtctgctcaatgcagagtcgacaagtctcatccagctcaagcagcccgtccacaccatcgggactgtcttccgtgcctagctctccaatgagccggaaaccacagaagctgaaatccagcaaatcccttcgacccaaggagtcttcaggcaacagcacaaactgtcagaacgcgtcctcatccacgagcggtggatcagggaagaagagaaaaaacagcagcccattgctagtgcactcctcgtcctcctcctcgtcctcttcatccagcagccactccatggaatcattccgcaagaactgtgttgcccactctgggccaccttacccgtctacagttacatcctcccacagcatcggtttaaattgcgtcacaaataaggccaacgccgtgaacgttcggcatgatcagtccggtagagggccccccaccgggagccccgccgagtctataaagcgtatgtctgtcatggtgaacagttcagactccactctgtctctgggacctttcatccaccagtcaaacgagctccccgtgaattcacacggctcgttctcccacagccacacgcctctggataagctgatcggcaaaaagcgcaagtgctctccgagttcaagtagcatcaacaattcctcttcaaagcccacgaaggtcgccaaggtccccgccgtcaataatgtccacatgaaacatacagggacaataccaggcgcacagggcctgatgaactcctctttgctgcaccaacccaaagctcggccctag

SEQ ID NO: 108854 - DNA, 2838 bp, synthetic construct
  misc_feature 1..2838: note = Description of Artificial Sequence: Synthetic coding sequence
  source 1..2838: mol_type = other DNA
atgagcgagcgagcagctgacgatgtcaggggcgagcccagaagagcggcagccgcggccggaggtgctgccgctgcagctgcacgacaacagcagcagcaacaacagcagcagcagccaccacctccccagccccagcggcaacaacaccccccaccaccaccacggcggacccggcccgaagacgggggaccaggggctgccagcacaagtgctgccgctatggcgacagtgggcgaaagacggcccttaccctcgccggaggtgatgttggggcagtcatggaatctgtgggtggaggccagtaagctgcccggcaaggacggcaccgaactggatgagtcttttaaggagttcggcaaaaacagggaggtcatgggcctgtgtagggaagacatgcccatatttgggttctgtccggctcatgacgatttttacttggtggtgtgcaatgattgcaaccaggtagtaaagccccaggcttttcagagtcactatgaacgtcggcacagtagtagttcgaaaccgccactcgccgtaccacctacctctgttttcagtttcttccccagcctcagcaagagcaaaggagggagcgccagcggttcgaaccggtccagcagcgggggggtcttgtcggcgagttcatcttcaagtaaactgcttaaaagtcctaaagaaaagctgcagttgcgaggcaataccagacccatgcatccgatccaacagagcagagttccgcacggtcgaatcatgaccccttctgtgaaggtggagaagatacatcctaaaatggacgggaccctgctcaaaagcgcggtgggtccaacttgcccagctaccgtgtcttccttagtaaaacctggtcttaactgcccttccataccgaagcctaccctgccctccccaggacagattctgaacggaaaagggttacccgccccgcctactctggaaaaaaagccagaggacaactccaacaataggaaattcctgaataaaagactgagtgagcgcgaattcgatccagacatccattgtggagtcatcgacttagataccaagaagccatgcacaaggtccttaacgtgtaaaacccatagccttacccagcggagggccgtgcagggtcgccgaaagagatttgatgtgttgctagccgagcataagaataaaacccgcgagaaggaactgatcaggcacccagatagccagcagcccccacaacccctccgagacccccacccggctcccccgcgaacaagccaggagccacatcagaacccccacggcgtgatccctagtgagagcaagcccttcgttgcaagcaagcccaagccccatactccatctctcccaaggccacctgggtgccccgcacagcagggagggtccgcacccattgatccaccgcctgttcatgaatcaccgcacccgccactgcctgccacagaacccgccagcaggctatcctctgaggagggagagggagacgataaagaggagtccgtagagaagttggattgtcattacagcgggcatcacccacagccggcttccttctgtaccttcggaagtcggcagataggtcggggttactatgtcttcgattctcgttggaaccgccttcgctgtgcgctaaatcttatggtcgaaaaacatttgaacgctcagctatggaagaaaatacctcccgtgcctagcactacctcaccaatttccactaggatcccacatagaacaaactcggtgcctacttcccagtgcggggtgtcatacctcgcagcggccaccgtgtcaacctctcctgtactgctgtcatccacatgtataagccccaatagtaaatctgtgccagcccatggcaccactctcaacgcccagcctgccgcaagcggcgccatggatccagtctgctcgatgcagtctaggcaggtcagctcctcttcttcttcgccttcgaccccctctggcctcagctcagtcccaagttcgccgatgtcccgtaaaccccagaaactgaaatctagtaaaagcttgaggcctaaggaatctagcggaaacagcacaaattgtcagaacgcttcttctagcacctcgggcggtagcggaaagaagcggaagaactcaagccccctgttggttcactcatcatccagctcatcttcatcctcttccagtagtcatagtatggagagcttcagaaaaaattgcgtggctcattccggcccaccttatccatcgaccgtgacctccagccactcaatcggcctaaactgtgtgaccaacaaggctaatgcggtcaatgtgcgccacgaccagtccggccggggccctcctaccgggtcgcccgccgagtcgattaagaggatgtctgtcatggtgaactcttctgatagtaccttaagcttaggacctttcatccatcaatcgaacgagttgccagtgaattctcacggatccttttctcactctcacacaccactggacaaactcattggcaagaagcgcaagtgttctccaagctcctcaagtatcaataattcctcctcaaagcccactaaggtggcaaaagttcctgcggtgaataatgtccacatgaagcacacaggcacaatcccaggcgcccagggactcatgaacagttccttgttgcaccaggatattagcagcccatgcctgcgcactggcatatccgctacgtctccgcaaagccccgatctgaagtccaaagggacttctcttaccgccgagaacagcacaggaaggaataacgcggacacatttgaggacaagttacatctccactcagccctgtggactcccaggtgcctgtag

SEQ ID NO: 108855 - DNA, 81 bp, synthetic construct
  misc_feature 1..81: note = Description of Artificial Sequence: Synthetic coding sequence
  source 1..81: mol_type = other DNA
atgtccgagagggccgctgatgacgtgaggggtgagccaagacgcgccgcggccgccgctggaggggcagccgctgcctag

SEQ ID NO: 108856 - DNA, 2679 bp, synthetic construct
  misc_feature 1..2679: note = Description of Artificial Sequence: Synthetic coding sequence
  source 1..2679: mol_type = other DNA
atgtcagagcgtgccgctgacgacgtccgcggggagccacgtagggccgctgcagctgcggggggagccgcagcagccgccgcgcggcaacagcaacagcagcaacagcaacagcaaccgccgcctccccaaccacaaaggcagcagcatcccccgccacccccgcgaagaactcgaccggaggatggggggccaggcgctgcatctactagcgcagcagctatggccacggtgggggagagaagaccacttcctagccctgaggttatgttggggcaatcatggaacctgtgggtggaagccagcaaattgccaggaaaagacgggacagaattggacgaaagttttaaagagtttggcaagaatcgggaggtgatgggtctttgcagagaggacatgccaatctttggattttgtccggctcatgatgacttttacttggttgtgtgtaatgactgtaaccaggttgtcaagccacaggcgtttcagtctcactatgaacggcggcatagctctagctctaagccccctttggcagtgcctccaacaagcgtgtttagctttttccctagtttgagtaaaagcaagggcgggagtgcttctggatccaatcgctcatcttctgggggtgtgctttctgccagctcttcatcctccaagcttctgaagtccccaaaggagaaattgcaattacgcggaaatacacgcccgatgcatcccattcagcaatccagagttccccatggcaggattatgacaccctccgtgaaggtggagaagattcaccctaagatggacggaacacttcttaagtccgccgtaggacctacatgtcccgcaaccgtgagcagcctggtgaaacccggactaaattgcccaagtatacctaagccaacactcccctcaccaggacagatcctaaacggaaagggccttcctgcgccaccaaccctcgagaagaagcctgaagataatagcaataatcgcaagtttctgaataaacgcctcagcgaacgcgagttcgacccagacatccactgcggcgtcattgatctggacacaaaaaagccctgtacacgatctctgacttgtaaaacgcactccctcacacaaaggagagccgtgcaaggacggagaaagaggtttgacgtccttttggcagaacacaaaaacaagaccagagaaaaagaactgatcagacaccccgactcacagcaaccacctcaacctctaagagatcctcatcctgctcccccaaggacctctcaggagccgcatcagaacccccatggggttattccttccgaatccaaacctttcgtggcatccaaacctaaacctcatacaccatcgctcccacgcccccccgggtgccctgcacagcagggcggtagtgcacccattgacccaccccccgtccacgagtcaccccacccgcccctccctgcaacagagcccgcctctaggctttctagtgaagaaggggagggtgacgataaagaggagtccgtggagaaactcgattgccactatagcggccatcacccacagcccgcctccttttgcacattcggcagccggcagataggtcggggctactacgtcttcgactcccgttggaatagacttcgttgcgccctgaacttgatggtcgaaaagcatttgaacgcacaactctggaaaaaaataccgcccgtaccaagtacgacctcccccattagcacacgcattccacatagaacaaacagcgtgccaacctcccagtgcggagtcagttatctggccgccgcaactgtgagcacaagtcctgtcttgttgagctccacttgcattagcccgaattcaaagtcagtccccgcacacggaacaaccctgaacgcccaaccagcagccagtggagcaatggacccagtgtgtagcatgcagtcacggcaagtctcatcctctagctcgtcacccagcacgccaagtggactcagtagcgtaccctcttctccgatgtctagaaagccccagaagttgaaaagcagcaagtcgctccgtccaaaagagagctccggcaattccacaaactgccagaatgcctcctcctcaacttcaggcgggagcggaaaaaaaaggaaaaactcctccccactgctggtgcactctagctcaagtagttcctcctcctcatcatcctctcattcaatggaaagcttccgcaagaattgcgtggcgcactctgggccaccatacccatctacagtgaccagcagtcactcaattggcttaaactgcgttaccaataaagccaacgccgttaatgtgcgccacgaccagagtggacgcggaccccccacaggaagccctgctgagtccatcaaacgaatgtcagtgatggttaactcatccgactcaactctgtcactaggcccctttattcaccagtcgaacgagctgcccgtaaacagccacgggtccttctcccacagtcacactcccctcgacaagctgattggaaaaaagcgcaagtgcagcccgtcatcgagctccattaacaatagctcttctaagccaacaaaggtagccaaagtgcctgccgttaataatgtccatatgaaacatacaggaaccataccgggagcccagggccttatgaactccagtctgctgcatcaacccaaagcaaggccatag

SEQ ID NO: 108857 - DNA, 2838 bp, synthetic construct
  misc_feature 1..2838: note = Description of Artificial Sequence: Synthetic coding sequence
  source 1..2838: mol_type = other DNA
atgagcgaacgagccgctgacgatgtgcggggagaaccgcggcgggctgcggcagctgccggcggcgccgcagcggctgcagcacgtcagcaacagcaacagcagcagcagcagcagccaccaccacctcagcctcagcgccaacagcatccaccacccccaccgcgccgcacaaggcctgaggacgggggacccggagccgcctcaacatctgctgcggccatggccaccgtcggcgaacgccgtccattgcccagcccagaggtgatgctaggccaatcatggaatctgtgggtcgaggcgagtaagctgccgggcaaagatggcaccgaactggacgagtccttcaaagagtttggaaagaaccgggaggtcatgggcctttgtagagaggacatgcctatattcggcttctgcccagcccacgacgatttctacttggtggtgtgcaacgattgcaaccaggtagttaaaccacaggctttccaatctcattacgagcggagacattcttcaagttctaagccaccactcgcagtccctcctaccagcgtgttcagctttttcccttccttgtcgaaaagtaagggaggaagcgcgtcaggttcaaatcgatcgtccagtggcggagtgctgtctgcatcatcaagctcttcgaaactcctcaagagccctaaggagaaactacaactaagagggaatacacggccgatgcatccgatccagcaatccagggtaccacatggccgcattatgaccccgtcagtcaaggtggagaaaatacacccgaaaatggacggcacactcctgaaatcggcggttgggcctacttgccctgctaccgtatcatccctggttaaacctggcctgaactgccctagtattcccaaaccaacactgcctagtcctggacaaattctgaacggcaaggggctgccagccccacccacactggagaagaagcctgaagacaacagtaataatcgcaaattcctgaacaagcgtctctccgagcgagagtttgatccagatatccactgtggggttatcgatctcgatacgaagaaaccatgcacccgtagcctgacctgtaaaactcattcgctaacccagagacgcgcggttcagggaagacgaaagcggtttgatgtcctacttgcagagcacaagaataaaacacgggaaaaggaattgatcagacatccagattcgcagcagcctccccagccactgagggaccctcatccggcaccaccacgcaccagccaggagccacatcagaatccacacggtgtaattccgagcgaaagcaagcctttcgtcgcatccaaacctaagccacacactccatcgctgccaagacctccgggctgccccgctcagcagggaggaagtgcccccatcgatcctcctccggtgcacgagagcccccacccccccctgccggccaccgaacccgcgagtcgattgtcatctgaggagggggagggcgatgacaaggaggagtcagtcgagaaactggactgtcattacagtggtcaccacccgcagccggccagcttttgcactttcggaagccggcagattgggagaggttattacgttttcgacagccgctggaatcgtctaagatgcgccttaaatctcatggtggaaaagcatctgaatgcgcagctgtggaagaaaatcccccccgtaccttctacaacatcaccaatcagcacaagaatccctcatcggacgaactccgtgccaacgtcacagtgtggggttagctatctcgccgcggcaactgtgtctacatcccccgtgctcttaagtagcacctgtatctcccctaacagtaaaagcgtgccagcacatggtacaactctaaacgcccagcccgccgcatcaggagccatggaccccgtatgctccatgcaaagtcgccaggtcagctcctcgagctcaagcccttcaaccccctccggcctgagcagcgttccaagttccccaatgtcccggaaaccccagaagttaaaatcttcgaaaagcctccgccctaaggagtcaagcgggaatagcactaattgccagaacgcctccagttcgacttctggcgggtctggtaagaagcgcaagaactcctctccactactggtacattcctcaagttcatcgtcaagcagctccagttcttcccattccatggagagcttcaggaaaaattgcgtcgctcactcaggccccccttatccatccactgtcacaagcagccatagcattggcttgaactgtgtgaccaataaagcaaatgcagtgaacgttcgccatgaccagagtggaaggggcccgccgactggcagtcctgctgagtcgatcaaacgaatgagcgtcatggtgaactcctcagactccactttgagcctaggtcccttcatccaccagagcaatgagctgcccgttaacagtcatggttctttttcccattcccacactccccttgataagcttatcggcaaaaagcgcaagtgctccccatcatcatcaagtatcaacaactccagctctaagccgacgaaagtcgctaaagtgccagccgtcaataatgtacacatgaagcataccggcactatcccaggcgcccagggcctcatgaactcctcattgctccatcaggatatttcctcaccctgcctccgaacaggaatttccgctactagtccacaatcccccgacttaaaaagcaaaggcacaagcttgacagccgagaattcaacagggagaaataatgccgataccttcgaagacaagctgcacctccattcagcactgtggaccccacgctgtctgtag

SEQ ID NO: 108858 - DNA, 393 bp, synthetic construct
  misc_feature 1..393: note = Description of Artificial Sequence: Synthetic coding sequence
  source 1..393: mol_type = other DNA
atgtccgagcgggcagcagatgatgtgagaggcgaaccccggcgggcggcggctgccgcaggcggtgccgccgctgcggctgcccggcagcagcagcagcagcagcaacagcagcaaccaccccccccacaacctcaacgacaacagcacccgccccctccccctcggaggactaggccggaagatggtggtcccggagcggcatccacctccgctgccgcaatggcgaccgtaggtgagcgtcgcccccttccttcccctgaggtgatgttaggtcagtcgtggaacctgtgggtggaagcaagcaagctgccgggcaaggatggtgataggataggtcggaagtttcaaggcgtgtggaatcgggaagtcatgggcctgtgccgtgagtag

SEQ ID NO: 108859 - DNA, 2244 bp, synthetic construct
  misc_feature 1..2244: note = Description of Artificial Sequence: Synthetic coding sequence
  source 1..2244: mol_type = other DNA
atggagggctctaaaacaccactccagtcctcaccatctgctcaggagctgaaggctccactggaaaggagacacagtagctctagtaagccaccactggcagtacctcctactagtgtatttagtttctttccaagcctcagcaagagcaaaggcggtagcgcttccggcagcaaccgcagttcaagtggtggagtgctgtcagcttcatcctcctcctcaaaactactcaagtcacccaaggagaaactgcaactgcgcggcaatacacggcctatgcaccccattcagcagtctagggtcccacacgggagaatcatgacccctagcgtgaaagtagagaagatccaccctaaaatggatggcaccttgctaaagtcagcggtggggcctacctgtcccgccaccgtaagcagcctggtaaagccgggcctgaattgtccgagcatccctaaacctacactccctagccccggtcagattttaaacgggaagggactgcccgccccgcccacactcgagaagaagccagaggataactccaataataggaagtttctgaataagagactctctgaaagagagttcgaccctgatattcactgtggcgtgatcgatctggacaccaagaaaccatgtactagatccctcacctgtaagacacatagtctaactcagcgcagagctgtccaggggcggagaaagcggtttgacgttttactggccgaacataagaataagactagggaaaaagagcttataagacacccagattcccagcagcccccacagcctctgagggacccccacccagcccccccgcgcacgtctcaggagccccaccagaacccgcatggcgtcattccatcggaaagtaagccttttgtagcctctaagcccaagccccacacaccaagcctgcctagaccccccgggtgcccagcccaacagggtggttcagctccaatcgaccctccccccgtacatgaatcgccccatcctcctttgcccgctacagagcccgctagtcgtctctctagcgaggaaggggagggggacgacaaggaagaaagcgtggagaaactggattgtcattactccggacaccacccgcagccagcatctttttgtacctttggtagcaggcagatcggaagaggttactacgtcttcgactcaaggtggaaccggttgcggtgcgcgctgaacttgatggttgagaagcatctgaacgcccaactttggaaaaaaataccccctgtgccttccacaacttctcccatctcaacccgaatcccccatcggacgaacagcgtgcctacttctcagtgtggtgtgagctacctcgcggccgccaccgtgtccacttctcccgtgctgctgagcagcacctgcatctcccctaacagtaaatcagtgcccgcccacggcacaacacttaatgctcagcctgccgcctctggcgccatggaccctgtctgcagcatgcaatcccggcaggtgtcttccagctcttctagcccatctacgccatccggtctgtcttccgtgcctagcagccccatgtcacgaaagccacaaaaattaaaatccagcaagtccctcagaccgaaggagagttcaggtaatagcaccaactgccagaacgcatcaagctccaccagtgggggctcaggtaaaaagcggaagaattcctctccattactggtacacagctcctcatcgagcagttccagcagcagttcttcccattctatggaaagctttagaaaaaattgcgtggcgcatagtgggcccccatatccatcaactgtaacttcctcacattccatcgggcttaactgcgtcacaaataaagctaacgccgtgaacgtcagacacgaccagagcggccgcggtccccccacaggttctcccgcagagtccatcaaacgaatgtcagtcatggtcaattctagtgactctacactgtcccttggtccttttatccaccagagcaacgaactgccggtaaattctcatgggtcattctcccatagccacacacctctggacaagctgatcggaaaaaaaagaaagtgttctccctccagtagttctatcaataactcgtcctccaagccaaccaaggtggcaaaagtacccgcagtgaataacgtccacatgaagcacactggtacaatccccggggcccagggactgatgaactcatcccttctgcaccaaccaaaagccagaccatag

SEQ ID NO: 108860 - DNA, 663 bp, synthetic construct
  misc_feature 1..663: note = Description of Artificial Sequence: Synthetic coding sequence
  source 1..663: mol_type = other DNA
atggaggaagacgaatttatcggggagaaaacattccagcgttactgcgctgaattcataaaacatagccaacagataggcgatagctgggagtggagaccctcaaaggactgcagtgacggttatatgtgcaaaatccactttcagatcaagaacggctcagtgatgagtcacttaggcgcttcaacccacggtcagacttgtcttccaatggaggaggctttcgaactgccgttggatgattgcgaggttatcgaaacagccgccgcgtccgaggtaattaaatatgagtaccacgtgttgtacagctgctcttatcaagtcccagtactgtatttcagagcgtcattccttgatggccggcctctgactcttaaagacatctgggagggcgtacacgaatgctataagatgcgcctgcttcagggtccctgggacacaatcacccagcaggagcaccctatcctcggccagccatttttcgttttgcatccctgtaaaacaaatgagtttatgacaccagtccttaagaatagtcagaaaattaacaaaaacgtgaactacattactagctggctctctattgttggacctgtcgtgggactgaacctccctctgtcatatgccaaagctacaagtcaggatgagcggaacgtcccttag

SEQ ID NO: 108861 - DNA, 378 bp, synthetic construct
  misc_feature 1..378: note = Description of Artificial Sequence: Synthetic coding sequence
  source 1..378: mol_type = other DNA
atggaagaggacgagtttatcggggaaaaaacttttcagcgatactgcgccgagttcattaagcactctcaacagataggcgattcttgggagtggcgaccttccaaggactgctcagacggatacatgtgcaaaatccattttcaaattaaaaatggtagcgtgatgagccacctgggcgcgagtacgcatggacaaacttgccttcctatggaagtaaagtcgtgtagcgtgactcaagctggagtacagttgagagacctttccagcttgcaacccccgcccagcgggttcaaacaattcagttgcctgtccctcccaagtaactgggactatcgtgggtcccccctgcacctggcaaacttcttgtatttctag

SEQ ID NO: 108862 - DNA, 663 bp, synthetic construct
  misc_feature 1..663: note = Description of Artificial Sequence: Synthetic coding sequence
  source 1..663: mol_type = other DNA
atggaggaagacgaatttatcggggagaaaacgttccaacgctactgcgcagagtttattaaacacagtcaacagattggggattcttgggaatggcgaccttcgaaggactgctcagatggctacatgtgcaagatccatttccagatcaagaatggatccgtaatgagtcaccttggtgcttcgacacacgggcagacatgcctgcccatggaggaagcattcgagttgcctttggacgattgcgaggtgatagagacagctgctgcgtccgaggtcataaaatatgagtatcacgtgctgtattcatgtagctatcaggtgcctgtgttatacttcagagcctccttcctggacggccgcccgttaactctgaaggacatttgggagggcgtgcacgaatgctacaagatgcgcctcctgcaaggcccatgggacaccatcacccagcaagaacatccaatactgggacaacctttcttcgtgctacacccttgtaagacaaacgagttcatgacacctgtcttaaagaatagccaaaagattaataaaaacgtgaactacattaccagctggttgtcaatcgtcggaccggtcgtgggcctcaacctccccttgtcatacgcaaaagcaacctcccaggacgagcgcaacgtgccatag

SEQ ID NO: 108863 - DNA, 882 bp, synthetic construct
  misc_feature 1..882: note = Description of Artificial Sequence: Synthetic coding sequence
  source 1..882: mol_type = other DNA
atggaccggagagtcaagctttgggaggtgtttggtgagaagtgcgaattcaagggtagcctcagcggctcaaacgccgggatcacatcgatagaattcgatagtgctggtagctatttgctcgccgcttccaatgactttgcgagtaggatttggactgtagatgattaccgtttgcggcataccctgacaggccacagtggcaaagtactcagcgctaagtttctactggataacgccaggattgtaagcggatcacacgaccggactcttaagctttgggatctcaggtccaaagtgtgcatcaagactgtcttcgccggctctagttgtaatgatattgtctgcaccgaacagtgcgtcatgtctgggcacttcgataagaagattcgtttctgggacatcagatccgagtctatcgtgcgcgaaatggagctgctgggaaagataacagccctggatttgaaccctgagcgtaccgagctgttgagctgttcaagagacgacctgcttaaggtcatcgatctccggaccaatgccattaagcagacatttagcgcacccggcttcaagtgtgggtcagactggacccgggtcgtattttccccagatggaagttatgtcgcagcggggagtgccgagggctcactgtacatctggtcagtcctcactggtaaagtggagaaggtgctttccagcagcacagcccaccccagcatgcggtggagggggcgcccactcgcgcgcactctctctgtctggactaaggatgcaaaattatgctgtggccactcaacggacggggccttgcgtgctgggcgaaccccggttccaagctcagaagaggcacacggcctcctgcagccatgcccaggacgatag

SEQ ID NO: 108864 - DNA, 1335 bp, synthetic construct
  misc_feature 1..1335: note = Description of Artificial Sequence: Synthetic coding sequence
  source 1..1335: mol_type = other DNA
atgagcagcgggctgcgcgctgccgattttcccaggtggaagcggcatatctctgagcagctgagacgcagggacaggctccaaagacaggcctttgaggagattatcctccagtataacaagttgctcgagaagagcgacctccatagtgttctggcccagaagcttcaagcagaaaaacacgatgttcccaacagacacgaaataaggcggcggcaggctagattgcagaaggagcttgctgaggccgccaaggaacctctacctgtcgagcaggatgatgacatcgaggtcatagtggatgagactagcgaccatacggaagaaacctctcccgttcgtgcaatctccagagccgccactagacgttctgtttcctctttccctgtgccccaagacaatgtggacacccatcctgggagcggcaaagaagtgcgggtgcctgcgacggcactatgcgtgtttgatgcgcacgacggggaggtcaacgccgtgcagttttcacccgggtctcgattactcgcaacagggggtatggaccgccgcgtgaagttgtgggaagtgttcggagagaagtgcgaatttaaaggctccctctctggaagtaacgctgggatcaccagcatcgaatttgattcggccgggagttatctactggctgcaagtaacgattttgcttcccggatttggactgtcgacgattatcggctgaggcatactctgaccgggcactctggtaaagtgctttccgcaaagttcctgctggacaacgcccgcatcgtgtctgggtcgcatgataggaccttgaagctctgggatctgaggtcaaaggtctgtattaaaaccgtgtttgcaggcagcagttgcaacgacattgtttgcactgagcagtgcgttatgagcggacactttgataagaagatcagattttgggacatcaggagtgaaagtatagtgagggagatggaactactgggtaaaatcacagccctagacctcaacccggagcggaccgagttactatcctgctcacgcgatgatttactcaaggtgatcgacctgcgcacgaatgctatcaaacaaacattttctgcccctgggttcaagtgtggatccgattggacacgagtggttttcagcccagacggctcgtacgtagctgccgggagtgcagagggctccctgtatatatggagcgtgctgacggggaaggtggagaaggtcctctctaaacagcattcttccagtattaacgccgttgcgtggtcaccctctggttcccacgtggtgtcggtggacaaaggttgcaaagcagttctctgggcacagtattag

SEQ ID NO: 108865 - DNA, 1287 bp, synthetic construct
  misc_feature 1..1287: note = Description of Artificial Sequence: Synthetic coding sequence
  source 1..1287: mol_type = other DNA
atgtcatcggggctccgcgcagcagacttccctagatggaagcggcacatttcagagcagctgcgacgccgggacagactccagcgccaagcctttgaggagatcattttgcagtataacaaactgcttgaaaagtctgacctgcacagcgtgctggcccagaagcttcaggcggagaagcacgacgttcctaacaggcatgaaatacgacgaagacaggcccggctgcagaaagagctggccgaggccgctaaggaaccacttccagtggagcaagacgatgacattgaggtgatagtcgacgaaacctccgaccataccgaggaaacttcacccgtgcgggcgattagcagagccgcgaccaaaaggctttcccagcctgcaggagggctgctggatagcataactaacatattcggtcgacgcagcgtgagcagcttcccagttccccaggacaatgtagacacccacccaggatccggtaaagaagtcagggttccagctaccgccctgtgtgtcttcgatgcccacgatggggaagtgaacgccgttcaattctctcctggtataacatctatagagtttgacagcgcaggctcatacctcctagccgcttctaacgatttcgcgtcccgaatctggacagtagacgactacagacttagacataccctcacaggacatagcggaaaggtgctgtcggcaaagttcctcctggataacgctagaattgtatcaggtagtcacgaccgcactttgaagctgtgggacctccggtcaaaagtctgtatcaagaccgtgtttgcgggatctagttgcaacgacatcgtgtgtaccgaacagtgcgtcatgtctgggcacttcgacaaaaaaattcggttctgggacatcaggtctgagagcatcgttcgagaaatggaactcctgggaaagattactgccctagacctgaacccagaaaggaccgaattgctgagttgcagccgcgatgatcttcttaaggtgatcgatctccgaaccaacgccattaagcagacattttcagctccgggttttaagtgtggctccgattggacgcgggtggtgttctctcccgatggcagttacgttgcagcaggctctgccgagggtagcttgtatatttggtccgtgttaacaggcaaagttgaaaaagtgctctccaagcaacactctagcagtattaacgcagtggcctggagcccatccggatcccacgttgtgtctgtagacaagggatgtaaggctgtgctctgggcccagtactag

SEQ ID NO: 108866 - DNA, 1824 bp, synthetic construct
  misc_feature 1..1824: note = Description of Artificial Sequence: Synthetic coding sequence
  source 1..1824: mol_type = other DNA
atgagttctggactgcgcgccgccgactttccacgatggaaacgacacatcagtgagcagctccggaggcgtgaccggcttcagcgccaggcattcgaggagatcatcctgcagtacaataagctcctcgaaaaatcagaccttcattctgtgctggcacagaaacttcaggctgaaaagcacgacgtacctaaccgtcatgagatctctcccggccatgatgggacctggaacgacaaccagctccaggaaatggcacagctgaggatcaagcaccaggaggaactgactgagctccacaagaagcgaggggaactcgctcagctcgtgattgaccttaataatcagatgcagcggaaagaccgcgaaatgcagatgaatgaggccaaaattgccgagtgcttgcaaacaatctctgatctggaaaccgagtgtcttgacttgaggacaaaactctgcgacttggagcgcgcgaaccaaacactgaaggacgagtacgacgcactgcagatcacttttactgccctcgaggggaaactgagaaaaactaccgaagaaaaccaggaactcgtaacgaggtggatggctgaaaaggcccaggaggcaaatagacttaacgccgaaaacgagaaagactcgcgtaggcggcaggcccggcttcagaaagaactcgctgaagccgctaaagaacctttgccggtcgagcaggacgatgatatagaggtgattgtcgatgagacctcagatcacactgaagaaacatccccagtgagggccatctcaagagcggccacaaagaggctcagtcagccagccggagggctgctggacagtattaccaatatcttcggtaggcgcagtgtgtcctcctttccagtgccccaggataatgttgatacgcaccctggcagcggaaaagaagtcagagtgcccgccaccgcactgtgcgtgtttgatgcccatgacggagaggtgaacgctgtgcaattctctccagggtcacgcctcctagccacaggaggaatggaccggagggtgaagttgtgggaggtgtttggcgagaaatgcgagtttaaaggatctctaagcggtagcaacgcaggaatcactagcattgaatttgactccgcgggctcctacctcttagcggcaagtaacgacttcgcctcccgaatttggacagttgacgattatcgactgcgccacactctgacgggacactcagggaaagtgttgtctgctaaatttctgcttgacaacgcccgtatcgtctcaggatcccatgatcgtacattgaagctctgggacctgcgatcgaaggtttgtatcaagactgtctttgccggatcaagttgtaacgacattgtctgtacagagcagtgtgtgatgtcaggtcactttgataagaaaatacgtttctgggacatccggtctgaatctatcgtgcgagagatggagcttctcggcaagataacagctctggatctaaacccagaacgtacagagttgctgtcgtgttcaagagacgaccttcttaaggttattgacctgcgtaccaatgccatcaagcagaccttttccgccccaggcttcaagtgcggctccgactggacccgagttgttttctcacctgacggaagctatgtggctgcaggctccgctgaggggtccttgtatatttggtctgtccttacggggaaagttgagaaggtgctgagtaagcaacatagcagcagtatcaatgccgtcgcatggagcccctcgggttcccacgtggtgtccgtggacaaaggctgcaaggctgtcctgtgggcccagtactag

SEQ ID NO: 108867 - DNA, 1875 bp, synthetic construct
  misc_feature 1..1875: note = Description of Artificial Sequence: Synthetic coding sequence
  source 1..1875: mol_type = other DNA
atgtcgagtggcctgagggctgctgatttcccgagatggaagcggcacatctcagagcaattgcgccggagagatagactgcagagacaggcttttgaggagataattcttcagtacaacaaattactggagaagtcggatcttcacagtgtgcttgctcaaaagcttcaagctgagaagcatgatgtccctaaccggcacgagatttcaccgggccatgatggcacatggaacgacaaccaactccaagagatggcccagcttcgaatcaaacaccaggaggaattgacagagcttcacaagaaacgtggcgaactggcacagctcgtgatcgacctgaataatcaaatgcaacggaaagatcgcgaaatgcaaatgaatgaggctaagatcgccgaatgcctgcagactataagcgacctagagacggagtgcttagatctccggacgaagctttgtgaccttgagcgcgctaatcagacccttaaggacgagtatgatgcccttcagatcacatttacagccctagaaggaaagctgcgcaagaccacagaagagaaccaggagttagttaccagatggatggcagaaaaggctcaggaagctaataggttgaacgcggagaacgagaaagacagccgcagaaggcaggcacgattgcaaaaggaactcgccgaagcagcaaaggagccccttccagtggagcaggacgatgatatcgaagttatcgtagatgaaacgagcgaccacactgaggaaacctcacctgtgcgtgctattagccgggcagcgactaagagactaagccagccggcaggagggctccttgactccattaccaacatcttcggtttgtcagaatctcctcttctggggcaccactcaagttcggatgccgcccgacgtcgcagcgtgtctagcttcccggtgccacaagataatgtggatacccaccccggcagtgggaaggaagtgagggtgcccgctacagctttatgtgtgttcgatgcacacgatggcgaggtgaatgctgtgcagttttcgccgggctctaggttactcgcaaccggagggatggacaggagggttaagctgtgggaagtattcggcgaaaaatgcgagtttaaagggagcctgagtggcagcaacgccggaataacatccattgaattcgactctgcggggtcctacctgctcgctgcaagtaacgatttcgcctcccgcatctggacagtggacgattacagattacgccacactctcaccggacatagtggaaaggttctgagcgccaaattcctccttgacaacgcgaggattgtgagtggctcacatgatcggactcttaaactctgggacctgagatcaaaagtgtgcattaagaccgtgtttgctgggagctcctgcaacgacatagtgtgtacagaacagtgcgtgatgagcgggcactttgacaagaagattcgattttgggatatccggagtgagtcaatcgtgagagagatggagctattgggcaaaatcactgcactggacctaaatcccgagcgcaccgagctgctgagctgtagtcgagatgacctgcttaaagtgatcgacttgcgcactaacgccatcaagcagacatttagtgcgcctggattcaagtgtgggtctgactggacacgggtcgtcttctcccctgacggcagttacgtggccgccggatcggccgagggctctctgtacatctggagtgtccttacagggaaggtggaaaaggtcctgtctaagcagcacagctcaagcataaacgccgtggcctggtcaccctctggcagccacgtggtctccgtggacaagggctgtaaggctgtgctctgggcacagtactag

SEQ ID NO: 108868 - DNA, 1767 bp, synthetic construct
  misc_feature 1..1767: note = Description of Artificial Sequence: Synthetic coding sequence
  source 1..1767: mol_type = other DNA
atgagttccggactaagggcggcagacttcccgagatggaagcgccacatctctgaacaattacgtcgccgggataggcttcagcgccaggccttcgaagagatcatcttacaatacaacaaattacttgaaaagtctgatctacatagcgtgcttgcacagaaacttcaggccgagaaacacgacgtccctaacagacatgaaataagcccagggcacgacggaacatggaatgataatcagctgcaggaaatggctcagcttcggatcaaacaccaggaagaattgactgagctacataaaaagcgaggggaactcgcacagctggtgattgatttaaacaaccagatgcagcgcaaagaccgagagatgcagatgaatgaagcgaagattgcggagtgtttacagactatatccgatcttgaaactgaatgcctggatttgaggacgaagttgtgtgatctggaacgcgcgaaccagacgctgaaggatgagtatgacgccctccagatcacttttacagcactggagggcaaactcaggaaaaccaccgaggagaaccaggaactggtaacgcgttggatggcagagaaggcacaggaagcaaataggttgaacgccgagaatgaaaaggacagtcgcagacgacaggcacggctgcagaaagagctggctgaagctgctaaagagcctctccccgtggagcaggatgacgacatagaagtgatcgttgatgagacatccgatcacacagaggaaacgagtcctgttcgagccatctcccgggcagcaaccaggcgctccgtttcctccttccctgtgccgcaggacaatgtggatacccaccctggatccggtaaagaggtgcgggtgcctgccactgctctctgcgtcttcgatgctcatgacggcgaggtgaatgcggtgcaatttagccctggtagtaggcttcttgctacgggcgggatggatcgtagagtaaagctttgggaggtgttcggagagaagtgtgagtttaaaggctccctgtcgggatcaaatgccgggatcactagtatcgagtttgattctgccggcagctacttactcgctgcatccaatgacttcgcttctagaatctggactgtagacgactatagattgagacacacacttactgggcacagtgggaaggttctgtccgctaagttcctcctggacaacgctagaatagttagcggttctcacgaccgcacactgaaactttgggatctccgatctaaagtctgtatcaagaccgtgttcgccggctcatcttgcaacgacattgtgtgcactgaacagtgtgtcatgagcgggcacttcgacaaaaagatcaggttctgggacatcaggagcgagagtattgttcgcgagatggagttacttgggaaaataaccgcactggacctgaacccggagcgcaccgaacttttatcgtgctcacgtgatgatctcctgaaagtgattgacctccggactaatgccatcaagcagacgttcagcgcccccggtttcaagtgcggctcggactggactcgtgtcgttttcagtcctgatggaagctacgttgcagccggatctgctgagggctctctgtatatttggtctgttttaacgggcaaggttgaaaaggttctctccaaacagcactcctctagcataaatgcggtcgcctggagtccatcggggagccacgtggttagcgtggacaaggggtgtaaagctgtgctgtgggcccagtactag

SEQ ID NO: 108869 - DNA, 2520 bp, synthetic construct
  misc_feature 1..2520: note = Description of Artificial Sequence: Synthetic coding sequence
  source 1..2520: mol_type = other DNA
atggcacagttcgataccgagtaccagcgcctggaagcatcttattcggactcacccccaggtgaggaggaccttctcgttcatgtggctgagggttctaaaagtccatggcaccacattgagaatctagacttgttttttagccgagtgtacaatttgcatcagaagaatggcttcacctgcatgctgattggagaaatattcgaactgatgcagtttctgttcgtggtcgctttcaccacatttttggtttcctgcgttgactatgatattctgttcgctaataagatggtgaaccattcacttcatcctaccgaacctgtgaaggtaacactgcccgatgccttcctccctgctcaggtgtgttcagcccgaattcaagaaaatggatcccttatcactatccttgttattgccggggtcttctggatccataggctgatcaagtttatctacaatatttgttgttactgggagatccactcattctacctccacgctcttcgaataccgatgtccgccctgccctattgcacttggcaggaggttcaggcacgcatagtacagactcagaaagaacatcagatatgcatacacaaaagggagctcaccgagctggatatctaccaccgcatattacgttttcagaattatatggtagcactcgtgaacaagagcctgctgcccttgcgcttccgcctcccaggactaggggaagcagttttcttcacgcgtgggctgaagtacaactttgaactcatccttttctgggggcccgggagtctgttcttaaacgaatggtcccttaaagctgagtataaacgaggtggtcagcgattggaactcgctcaacgtctgtccaaccggatactctggatagggattgcaaacttcttgctgtgtccactcattttgatttggcaaatcctctatgcctttttcagctacgccgaggtgctcaaaagagaaccaggcgcccttggcgctcgatgttggtctctatacggacggtgttacctccgccacttcaacgagctcgagcacgagctccagtctagactcaaccggggctacaagcccgccagtaagtacatgaactgctttcttagccctctcctaactctcttggctaaaaatggcgcgttctttgctgggagcatcctggcggtattgatcgcgctcacgatctatgacgaagacgttcttgccgtggagcacgtgctaacaacagtcactctgctcggcgttacagtgaccgtttgtcgctccttcatcccggaccagcacatggtgttttgtcccgagcaacttctgcgtgtaatcctcgcccacatacactacatgcccgatcactggcaggggaatgcccatcgtagccagacccgggacgaattcgcgcagctgtttcagtacaaagcagttttcattctggaagaactgctctcgccaatcgtgacacccctgattctgatcttctgtttgaggcctcgtgcactagaaatcatcgacttcttccggaacttcacagttgaggttgtgggagttggcgacacctgtagcttcgcccagatggacgtgaggcagcatgggcatccccagtggttgtccgccggccagacagaagcttccgtatatcagcaggccgaggacgggaagaccgaattgtccctcatgcacttcgcaataactaaccctggttggcagcctccccgtgagtcaacagcctttctggggtttctgaaggaacaggtgcagagggatggcgcagccgcttctctcgcccaaggcgggttactgccagagaatgccctttttacctccatacagtctttgcagtccgaatcggaaccgctgtctctgatcgctaacgtcgtggcaggctcatcgtgtcgtgggccacctctgccgagggacctgcaggggagccggcatagagcggaggtggcctctgcactgcgcagttttagtcccctgcagcccggtcaggctcccacaggacgggcccacagtacaatgacaggatccggcgtcgacgccaggacggcctctagcgggtcttcggtgtgggagggtcagctgcagtctctagttctgagcgaatatgcgagcacagagatgagtctccacgcattatacatgcatcagttgcataagcagcaggctcaggcagaacccgagcgccacgtttggcatcgtcgggagagcgatgaatctggggagagcgctcctgacgagggtggagaaggggccagggcccctcagagcatcccccgctctgccagttacccatgcgctgctccaagacccggtgcccccgagacaactgctctccacggaggtttccaacggaggtatggtggaatcaccgaccccggaaccgtgccccgggtaccatcccatttctcaagattacccctcggcggatgggccgaggatggccagagtgccagcagacacccagagcccgttccagaggagggttccgaggacgaactcccccctcaagtgcataaggtctag

SEQ ID NO: 108870 - DNA, 2520 bp, synthetic construct
  misc_feature 1..2520: note = Description of Artificial Sequence: Synthetic coding sequence
  source 1..2520: mol_type = other DNA
atggcacagttcgacaccgaataccagaggctggaagcctcgtatagtgactcccctccaggcgaagaagacctgttagttcatgtggccgaagggagcaaatcaccatggcaccacatcgagaatctagatctgttctttagtagagtgtataatctccatcaaaagaatggatttacctgcatgctgatcggggagatcttcgaactgatgcagtttctttttgtggttgcgttcaccacattcttggtgtcatgcgtggactatgatattctgtttgcaaataagatggtgaaccatagcctccatcctactgagcctgtaaaggtgacactgccagacgcgttccttccagcacaggtgtgcagcgcgaggatccaggagaacgggagtctgataaccattctggtcatcgctggagttttctggatccacaggcttattaagtttatctataacatttgttgttactgggagattcactctttctatctgcacgctctcaggatccctatgtcagccctcccatattgtacatggcaggaagtacaggctagaatcgtccagactcaaaaggagcatcaaatttgcattcataaacgcgagttgaccgagctggacatttatcataggattctgaggttccagaactacatggttgctctggtaaacaagagcctgttacctcttagattccgcctccctggcttgggcgaggcggtatttttcaccaggggactcaaatacaacttcgaactgattctattctggggccctggaagtttgtttctcaatgaatggagcctgaaagcagaatataagcgtggggggcaacgcctcgaactcgcgcagcggttgagcaaccgcattctttggatcggaatagctaacttccttttgtgtcccctgatcctgatttggcagattctctacgcctttttctcctatgcggaagttcttaagcgggaacccggtgcattgggtgcgagatgttggagtctgtatggcaggtgctacttacgccacttcaatgaactggagcacgagcttcagtcccggctgaataggggctacaaacccgcatcgaaatatatgaattgctttctaagccctttgctgacacttctggcaaaaaacggcgcatttttcgctggttctatcttggcagtgctgatcgccctgacgatctacgatgaggatgtgttggccgtggaacacgtgctgactaccgttacgctgttaggggttaccgtcactgtttgcagatccttcatccccgaccaacacatggttttctgccccgagcaacttcttcgcgtcatattggctcatatccactatatgcccgaccactggcaggggaatgcacacaggtcacagacaagggacgaattcgctcagctgttccaatataaggccgtgttcatcctcgaagagcttctttctcccattgttacccccctaattctgattttctgcttacgaccacgggccctggaaatcattgatttctttagaaattttacggtggaggtcgtcggcgtgggtgacacttgttccttcgctcagatggacgttaggcagcacggccacccgcagtggcttagcgccggtcagacggaagccagtgtgtaccagcaggctgaggacggcaaaaccgaactcagcctgatgcactttgctatcaccaacccaggttggcaacctcctcgagaaagtaccgcgttcctgggcttcctgaaggagcaggtccagcgagacggggctgcagcctccctggcgcagggtggacttttacccgaaaacgctctgttcaccagcatacaatcactgcagagcgagtcagaaccattgtcacttatcgcgaacgtggtggccggcagtagctgccgggggccacctctgccgcgggacctgcaagggtctcgacacagagctgaagtcgccagtgccctgaggagcttctcacccttacagcctggtcaagccccgaccggccgagcccactccacaatgaccggcagcggcgttgatgcaaggactgcctcgtccggctctagcgtctgggagggacaactccagagcctcgttctaagcgagtatgctagtactgagatgtcccttcacgccctgtatatgcaccaactccacaagcagcaggctcaagcagaacccgaaagacatgtatggcatcggcgtgagagcgacgagagcggtgagagcgcgcccgatgagggaggtgaaggcgctcgggcaccccagtccatccctcggtctgcctcctatccctgcgcagccccacgaccaggcgctcctgagacaaccgctctgcatggcgggttccagagacgctacggtggaattacagacccggggaccgttccacgcgtgccttcccacttcagccgactgcctcttggaggatgggctgaagatgggcagagtgcatcgcggcatcctgagcccgttcctgaggaagggtcggaagacgagctgccacctcaggtgcacaaagtctag

SEQ ID NO: 108871 - DNA, 2337 bp, synthetic construct
  misc_feature 1..2337: note = Description of Artificial Sequence: Synthetic coding sequence
  source 1..2337: mol_type = other DNA
atgttgatcggagaaattttcgaactcatgcaatttctgtttgtcgtcgctttcaccacattcttagtttcctgtgtggactacgacatactgtttgctaataagatggtgaaccactcacttcaccccaccgagccggtcaaggtcacacttccagacgcatttttacctgctcaggtgtgttcagcccggatacaagagaatggctcactcatcactattttagtaatcgccggagtgttttggattcatcgtcttataaaatttatttataatatctgctgctactgggagatacactctttctacctccacgccttgcggattcctatgagtgcactgccatattgtacatggcaggaggtccaggctcggatcgtccagactcaaaaggaacaccagatatgtatccacaaaagggaactgaccgagctggatatttatcacagaatattgagatttcagaattacatggttgcactggttaacaagtctctgctgccactgagattccggctccccggactgggagaggcagtgttctttacaaggggcttaaagtataatttcgagctgatccttttctggggaccagggtctttatttctgaatgagtggagcctaaaagcagagtacaaaaggggcggccaaaggttggaactggcgcagcggcttagcaaccgaattctctggattggaatcgctaatttcctgttgtgcccactcattcttatctggcagatcctatacgcgttcttctcatatgccgaggttcttaaacgggaaccaggcgctctgggggcacgttgttggagtctatatggcaggtgctacctaagacatttcaacgagctggaacatgagcttcagagccgcctgaatcggggctacaaaccagcctcaaaatatatgaattgttttctcagccctctcctaacactactggctaaaaacggcgcctttttcgccggctccattctggccgtgctgattgctctgacaatatatgacgaagacgtgctagccgtggaacatgtgctgactactgtgaccctgcttggggtcacagtgactgtctgtagaagtttcatcccagatcagcatatggttttttgcccagagcaactcctgcgagtgatactggctcatattcattatatgcccgatcattggcagggaaatgcacatagatctcagacaagagacgagttcgcacaactgttccaatacaaagcggtgtttattctagaggagctcctgtcacctatcgtgactcctctgattcttatcttttgtttacgcccccgggctctggagattattgattttttccgaaatttcacggtcgaggtggtgggggtgggggacacttgttcctttgcgcagatggacgtgcggcagcacgggcacccacagtggctgagcgccgggcagaccgaagctagcgtgtaccagcaggcagaggatggcaagacagaattgtctctgatgcactttgcaatcacgaaccccggatggcagcccccccgggagagcacagccttcctaggatttctgaaggagcaagtgcagagagacggagccgcagccagcctggcacagggtggcctgctgccagaaaatgctctgttcacgagtatccagtctttacagtcagagtccgaaccgctgtcgctcatcgcaaatgtggtcgcaggttcctcatgtcggggcccccctctcccgcgggatctgcagggctccaggcatagagctgaggtggcttccgccctccggagtttctcgccactgcagcccggccaggccccaaccggtcgtgcccatagtaccatgaccggatccggagtcgatgcaagaaccgctagttctggctccagcgtctgggagggccagctgcagagcttggtcctgagcgagtacgcctcaaccgagatgtcactgcatgcactgtatatgcaccagcttcacaagcagcaagcccaggccgagcctgagaggcacgtgtggcacaggcgggagtccgacgaatcaggcgaatcggccccggatgagggcggtgaaggagcaagggctccccagtccatccctagatccgcttcttacccatgtgccgccccgcgcccaggagctcctgaaaccacagccttgcacggggggtttcagcgcagatacggcgggatcacagacccgggaactgttcctcgagtaccatcacactttagcaggttgcctctaggcgggtgggcagaggatggccagtcagcatccagacatccagaacccgtgccagaggaggggtcagaggatgaactccctcctcaagtgcacaaggtctag

SEQ ID NO: 108872 - DNA, 2520 bp, synthetic construct
  misc_feature 1..2520: note = Description of Artificial Sequence: Synthetic coding sequence
  source 1..2520: mol_type = other DNA
atggctcaattcgataccgagtaccagcgtctcgaagcctcatatagtgactctcccccaggggaagaggacttacttgtccacgtggctgaggggtctaagagtccatggcaccacatcgagaacctggatctgttcttctcgcgcgtgtataatcttcatcagaaaaacgggtttacctgtatgttgattggggagatcttcgagctgatgcagttcttgtttgtcgtcgctttcacaaccttccttgtcagctgcgtcgactacgacattcttttcgcaaacaagatggtcaaccactctctgcaccccacagagcctgttaaagtgacactcccagatgcttttctcccagctcaggtttgttcagcccgaattcaggagaatggctccctgattacaatcctcgtcattgcaggagtgttctggattcaccggctgataaagtttatctacaacatttgctgttactgggagatccatagcttctatttgcatgctcttcggattcccatgtccgctctgccatactgcacctggcaggaggtccaagcgagaatcgtgcagactcagaaagaacaccagatatgcattcacaagcgtgaactaaccgagctcgacatttatcacaggattcttaggttccaaaattatatggtggcactggtcaataaatctctcctcccacttagatttagactgcccggcctgggagaagccgttttctttacaaggggactgaaatacaacttcgagttgatactgttctgggggcctgggagcttgtttctcaatgagtggtcactcaaggctgaatataagcggggggggcagcggcttgagttggcacaacggctgagcaatcggattctgtggatcggcatcgccaactttctgctgtgtcctctgattctaatatggcaaattctttatgcttttttttcatatgctgaagtgctgaaaagggaacccggagccctgggggctcgatgctggagcttgtacgggcgttgttacctaagacactttaacgagctagagcatgagcttcagagcaggctaaacagagggtacaagcctgcctctaaatatatgaactgctttttgtccccactgctcacactgttggccaaaaacggtgcattcttcgcggggtcgatactcgcagtcctgatagccctgaccatatacgacgaggacgtgctggctgtggaacatgtcctaaccactgtgacactgctcggcgtgacagtgacggtttgcaggagttttattccggaccagcatatggtcttctgccccgagcagctgctcagggtgatactagcccacattcattacatgcccgaccactggcaaggcaacgcacatcgttctcagacgcgtgacgagttcgcgcagctgttccagtataaggcagtgttcatcttagaagagctcttatcccccatcgtgacgcctctcatcttgattttctgtctcagaccacgcgctctcgagattatcgacttcttcaggaacttcacagtggaagtcgtaggcgtcggggatacttgttcctttgcccaaatggatgtccgccaacatgggcaccctcaatggctgagcgcaggccagacagaggccagtgtttatcagcaggccgaggacggcaagaccgagctcagcttgatgcatttcgctattactaatcccggctggcagcctccaagggagtccaccgctttcctggggtttctcaaggagcaggtccagagagacggtgcggctgcctctctagcccagggcggtctgcttcccgaaaatgcacttttcacaagcatccagagtcttcagtccgagtcagaaccactgtcactaattgccaacgttgtggcgggaagctcatgccgcggtccacctctaccccgggacctacaggggagtcgccatcgcgctgaagtcgcctctgctctgcgcagtttcagccctctgcagcccgggcaggcccctacaggccgggcacacagcacaatgacaggctctggggttgacgcaaggacagccagcagcggcagctccgtctgggaaggccagctacaatcactcgtgctcagcgaatacgcaagcaccgaaatgtctctgcacgccctttatatgcatcagctccacaaacaacaggctcaggctgagccagagcgccacgtgtggcatcggcgagaatctgatgagagcggtgagtcagcgcctgatgaaggcggcgagggtgcgcgggctccccagagtatacctaggagtgctagctatccctgcgccgcccccagaccgggcgcacctgaaaccaccgctctgcatgggggtttccagaggaggtatggcgggattacagatcccggaacggtaccacgggtcccttctcacttcagccgcttgccactcggcgggtgggccgaggacgggcagtcagcatcgcgccacccggagcccgttcctgaggaggggagtgaggacgaactgccaccacaggtgcataaagtgtag

SEQ ID NO: 108873 - DNA, 510 bp, synthetic construct
  misc_feature 1..510: note = Description of Artificial Sequence: Synthetic coding sequence
  source 1..510: mol_type = other DNA
atggctcagtttgatacagagtatcagcgcctggaagccagctactccgacagtccaccaggagaggaggatctacttgtgcatgtggccgagggatctaagtccccttggcatcatattgagaacctggatctgtttttttctagagtgtacaatctccaccagaagaatggatttacttgtatgctgattggtgagatcttcgaactaatgcagttcctgttcgtcgtcgccttcaccacatttctggtgtcctgcgttgattatgacatcctgtttgccaacaagatggtaaaccactccctgcaccccactgagcccgttaaggtgacactgcccgatgctttcttgcctgcacaggtctgttctgcacggattcaggagaacggaagcctcattactattctggtgatcgccggggtcttctggatccataggctcatcaagttcatttacaacatctgttgttactgggagatacatagcttctatctgcatgcgctgaggtag

SEQ ID NO: 108874 - DNA, 435 bp, synthetic construct
  misc_feature 1..435: note = Description of Artificial Sequence: Synthetic coding sequence
  source 1..435: mol_type = other DNA
atggcccaatttgacacagagtaccaacgtctcgaggcaagctacagcgatagtcctccgggcgaagaagacttgctcgtgcacgtcgccgaaggctctaaaagcccttggcaccatattgaaaaccttgatctattctttagccgggtgtacaatttacatcaaaaaaacggttttacctgcatgcttatcggggagatctttgagctgatgcagtttctgttcgtcgtggcgttcacgacttttctcgtgtcatgcgtggactacgacattctcttcgccaacaagatggtcaaccattcgctccatcccacagaacccgtgaaggtgaccctacccgacgcatttctgcccgcacaggtgtgctccgcccgcatccaggagaacggaagcctcataaccatccttgttatcgccggcgtgttttggatctag

SEQ ID NO: 108875 - DNA, 282 bp, synthetic construct
  misc_feature 1..282: note = Description of Artificial Sequence: Synthetic coding sequence
  source 1..282: mol_type = other DNA
atggctcaattcgatactgagtatcagaggctggaggctagttattctgattccccccccggggaagaggatctactggtccacgtcgccgagggaagcaagtcgccttggcaccatattgagaatcttgacctattcttttcccgggtgtataacctgcatcagaagaatgggttcacatgtatgttgattggggagatctttgagctcatgcagtttttattcgtggtagccttcacaaccttcctcgtttcctgcgtggattatgatatactgttttag

SEQ ID NO: 108876 - DNA, 567 bp, synthetic construct
  misc_feature 1..567: note = Description of Artificial Sequence: Synthetic coding sequence
  source 1..567: mol_type = other DNA
atggcccagttcgacacggagtaccagagactggaagcgtcttattctgattcacctcccggggaagaggatctcctcgttcacgtagccgaaggaagtaagtccccttggcatcacattgagaatttggatctcttcttctctcgtgtctacaacctccaccagaaaaacggtttcacgtgtatgttaattggtgagatttttgagctaatgcagttcctatttgtcgtcgcctttacaactttccttgtgtcatgtgtggactatgatattctgttcgccaacaagatggtcaatcatagtctccacccgaccgagccagtgaaggttactctgcctgatgcatttttacccgcacaggtgtgctccgccaggatccaggaaaacggctccctgatcactatccttgtcatcgctggcgtcttttggatacatcgtctaattaagtttatctataatatctgttgctactgggagattcactccttctaccttcatgctctgcgcatcccaatgtctgctctgccctactgtacctggcaggaggtgcaggcccgtatagtgtag

SEQ ID NO: 108877 - DNA, 396 bp, synthetic construct
  misc_feature 1..396: note = Description of Artificial Sequence: Synthetic coding sequence
  source 1..396: mol_type = other DNA
atggcccagttcgacactgaatatcaaaggctagaggcttcatattctgacagccctcctggggaagaggacctgctggtgcatgtcgccgaaggaagcaaaagcccctggcaccacatcgagaatctcgacctgtttttttcaagggtctacaatctccaccagaagaacggatttacgtgcatgctgattggcgaaatattcgagcttatgcagtttttattcgtggtcgcctttacgacctttctggtgagctgtgtggactacgatattctcttcgcaaataagatggtaaatcatagtctgcatccaaccgagcccgtgaaggtcacactccctgacgcctttctgcctgcgcaggtgtgtagtgcccgcattcaagaaaacggctcttag

SEQ ID NO: 108878 - DNA, 294 bp, synthetic construct
  misc_feature 1..294: note = Description of Artificial Sequence: Synthetic coding sequence
  source 1..294: mol_type = other DNA
atggcccaattcgatacagagtaccagaggctcgaagcgagctacagcgacagtccacccggggaagaagacctgctggtgcacgttgccgaaggctccaagtccccttggcatcacattgaaaaccttgatctgtttttctctagggtctataacctgcaccaaaagaacggtttcacctgtatgctcattggtgaaattttcgagctcatgcagtttttattcgtcgtcgccttcaccacattccttgtcagttgcgtagattacgacattctgttcgcgaataagatgtag

SEQ ID NO: 108879 - DNA, 519 bp, synthetic construct
  misc_feature 1..519: note = Description of Artificial Sequence: Synthetic coding sequence
  source 1..519: mol_type = other DNA
atggcccagttcgacacagaatatcagcgtttggaagcgtcttacagcgatagtccaccaggagaggaggacctgctggtgcatgtggcagaagggtctaaatccccatggcaccatattgagaatttggatttgtttttctctagagtgtataacctgcatcagaaaaacgggttcacctgcatgctgatcggcgaaatctttgaactgatgcagttcctgtttgtggttgccttcactactttccttgtgagctgcgtggattacgatatactgttcgcaaacaagatggttaaccatagcctgcatccgaccgaacccgttaaggttacattacccgatgcatttcttcccgcacaggtgtgctcagcccgaatacaggagaatggaagcctgatcacgattctggtaatagctggggttttttggatacatcgcttaattaagtttatatataacatctgctgctactgggaaattcacagtttctatctgcacgcccttcgcattcctatgtag

SEQ ID NO: 108880 - DNA, 1662 bp, synthetic construct
  misc_feature 1..1662: note = Description of Artificial Sequence: Synthetic coding sequence
  source 1..1662: mol_type = other DNA
atggccaagaatcggcgagatcgtaacagctggggaggctttagcgagaaaacgtatgagtggtcaagcgaagaagaggaaccagtgaagaaggctggccccgtgcaggtgctgatcgtcaaggacgaccactcttttgaactcgatgagacggccctgaatcggatcctgctctcagaggctgtgcgcgataaggaggtagtggccgtgtctgttgctggcgcttttaggaaagggaaaagtttcttgatggacttcatgcttcgttacatgtacaatcaggagtctgttgattgggtgggagactacaacgagcccttgactggattcagctggagaggtggcagcgagcgagaaaccacaggtatacagatctggtccgagatatttctgataaataaacctgatgggaagaaagtcgccgtgttgctaatggacacacagggaactttcgactcacagtccacccttcgcgattcagccaccgtgtttgcactgtctacaatgatctcgtcaatccaggtgtacaacttatcgcagaatgtgcaagaggacgatctccaacatctccagctgtttacggaatacggacgccttgccatggaggagacattcctaaagccatttcagagccttattttcctggtgcgggactggagcttcccctatgagttttcttatggcgcggacgggggagctaagtttctggagaagcgcttaaaagtgtccggaaatcagcacgaggaactgcagaacgtgagaaaacacatccactcttgctttacaaacattagctgtttcctgctccctcaccccggccttaaggtcgcgacaaacccaaattttgacggaaagcttaaggagattgacgacgaattcatcaaaaacctgaagattctgatcccatggttgctcagtcctgaatccttagacattaaggagatcaacggaaacaaaatcacctgccgcggactggtagagtactttaaggcatacataaagatctaccaaggcgaagaacttccccaccctaagtcaatgcttcaagctaccgccgaggcgaacaatctcgccgctgtggcgacagccaaggacacttacaataagaagatggaagagatatgcggcggagataagcctttcctggcccccaacgaccttcagacaaaacatctgcagctaaaagaggagtccgtgaaacttttcagaggggtgaaaaaaatgggcggtgaagagtttagtcgccggtacctgcagcagttagaaagcgagattgatgaattgtacatacaatatataaagcataacgattccaaaaacatcttccacgcagccagaacaccagccactctcttcgtcgtcatttttattacctatgttattgccggcgttaccgggtttatcggcctggacattattgcatctctgtgtaacatgattatgggactgacactgatcacactgtgcacatgggcatatatccggtacagcggggagtaccgcgaacttggagccgtcatcgatcaagtcgcagctgcattatgggaccaagccttgtataagctctactctgcagctgcaacacaccgacacctgtaccatcaggcttttcccacaccaaaatctgagtcaacggaacagagcgagaagaagaagatgtag

SEQ ID NO: 108881 - DNA, 1677 bp, synthetic construct
  misc_feature 1..1677: note = Description of Artificial Sequence: Synthetic coding sequence
  source 1..1677: mol_type = other DNA
atggccaagaaccgccgagaccgcaattcttggggaggtttcagcgagaagacatacgaatggagctcagaggaagaggaacctgtgaagaaagctggaccggtccaggtgctcattgtaaaagatgaccatagcttcgagctcgatgaaacggcacttaaccggattctcctgtccgaagcagtgagagacaaggaagttgtcgccgtgtccgttgcaggggcctttagaaagggcaaaagcttcctcatggactttatgctgaggtatatgtataatcaggaaagcgtggattgggtgggagattacaatgagccattaaccggattctcatggagaggtggatccgaaagggagaccaccggtattcagatttggtctgagatctttctgatcaataagccagatggcaaaaaggtggccgtgctgctaatggatacacaaggcaccttcgacagtcagtctacccttcgcgattcagcaacagtttttgctttaagtaccatgatttcctcgattcaagtatataatctatcacagaatgtacaagaagacgacctacagcatttacaactgtttacggagtacgggcggttggcgatggaggaaacatttttgaaaccattccagagtctgatctttctggtgcgggactggagcttcccatacgaattttcttatggtgccgatggtggcgcaaagtttctggagaagaggctgaaagtgtctggaaatcaacacgaagagctgcaaaacgtccgcaaacatatccattcgtgttttaccaacatttcttgcttcctcctgccacatccgggattgaaagtagcgactaatccaaatttcgatggtaagctcaaggaaatcgacgatgaattcataaagaacctaaaaatcctaattccctggctgctcagtcctgagtccctggacattaaggaaattaatgggaacaagatcacctgtcgcggacttgtggaatattttaaagcctacatcaaaatctaccagggggaggagctcccacacccgaagagcatgctgcaggctacagcagaagccaacaacctggctgcggtcgcgacggcgaaagacacctataataaaaagatggaggaaatatgtggaggagacaagccctttctggccccaaatgatcttcagacgaaacacttacaactgaaggaggagtccgtgaaattgttcaggggagtgaagaaaatgggcggcgaggagtttagtagacgctacctgcagcaactagaaagcgagatcgatgagctgtatattcagtatatcaagcacaatgattccaagaacatttttcatgccgcgagaacgcccgccacactgttcgtcgtgattttcattacctacgtgatcgcaggcgttacaggctttatcggccttgatatcatcgcttccttgtgcaacatgatcatgggccttaccctaatcacactttgcacctgggcctatattcgctactccggcgagtatcgagagctcggtgcagtgatcgaccaggtcgccgccgcattgtgggaccaggggccatcccaccaagccttgtataaactgtattctgccgctgcaactcaccgccacctctatcaccaggcgttccctacccccaagtccgaaagtaccgaacagtccgagaagaaaaagatgtag

SEQ ID NO: 108882 - DNA, 1677 bp, synthetic construct
  misc_feature 1..1677: note = Description of Artificial Sequence: Synthetic coding sequence
  source 1..1677: mol_type = other DNA
atggccaagaacagacgggaccggaacagctggggcggcttttctgagaaaacttacgaatggtcttctgaggaggaagaacctgtgaagaaggccggccccgttcaggtactgatcgtcaaggatgaccacagtttcgagctagatgagactgctctcaacaggattctgcttagcgaagcggtccgggacaaagaagtcgtggcagtgagtgttgccggggccttcagaaaggggaagagtttcctgatggactttatgctgcgatacatgtataaccaggagtcagtcgactgggtgggggattacaatgaaccgttaaccggcttctcatggcgcggcggaagcgaaagagagactacgggaatccagatctggagcgaaatttttctgataaataagcctgacgggaaaaaagttgccgttctgctaatggacactcagggcacgttcgatagtcaatcaaccctgagagactcagctactgtgtttgccttgtctacaatgatttcttcaattcaggtgtataatctctctcagaacgtacaagaggatgatctgcaacacctacagctctttactgagtatggccgattagctatggaagaaactttcctcaagccattccaatcactgatattcctcgtcagggattggagcttcccatacgagtttagctatggagctgacggcggggccaaattcttagagaagcggctgaaagtgtcaggcaatcagcacgaggagctgcagaatgtccgcaagcacattcactcttgcttcacaaacatttcttgcttccttcttccgcacccgggactgaaagttgcgactaatcccaatttcgatggtaaactaaaagaaatcgacgacgagttcatcaagaatctgaagatactgattccctggttgctgtccccagaatcactagacatcaaagaaataaacggaaacaagataacctgccgcggtctcgtggagtactttaaggcctatatcaaaatttatcaaggtgaagagttgccacatccaaagtctatgctgcaggccacagcagaagccaataatctggctgccgtggccactgccaaggatacgtataataagaagatggaggagatttgtggaggcgacaagccatttctggcaccaaatgatctgcaaacaaagcacctacagctgaaggaggagagcgtgaagctgttcagaggagtaaagaagatgggcggggaggagttctcccggcgttatctacaacagctagaatcagagatcgacgagctgtacatccagtatattaagcataatgatagtaagaatatatttcatgctgctagaacacccgccaccctgttcgtagtcattttcatcacctacgtgattgcaggggtaacaggatttatcggactggacatcatcgcttcactgtgtaatatgataatgggactgacactaatcaccctctgtacatgggcgtacattcgctactcaggagagtatcgcgagctgggtgccgtcatcgaccaggtggccgctgccctgtgggaccagggctccacaaatgaggcgctctacaagctgtactctgcggcagcaacccacaggcacctttaccaccaggccttccctactccgaaatccgaaagtacagaacagagcgagaagaagaagatgtag

SEQ ID NO: 108883 - DNA, 1662 bp, synthetic construct
  misc_feature 1..1662: note = Description of Artificial Sequence: Synthetic coding sequence
  source 1..1662: mol_type = other DNA
atggcgaaaaaccggcgcgacagaaattcttggggcggcttctcagaaaagacctacgaatggagctctgaggaggaagagcccgtcaagaaggcagggcctgttcaggtcctgatcgtcaaggatgaccattctttcgaactggacgaaacagctttgaatcgcattctgctgtcagaggctgtgcgagataaagaggtcgtggccgtgtctgtagcaggagcttttcgaaagggcaagtcattcctgatggactttatgttgcgctacatgtacaatcaagaatctgtagattgggtgggggactataacgaaccattgaccggattctcttggagaggcggctcggaaagggagactaccgggatccagatttggtctgagattttccttattaataaacctgatggcaagaaggtggctgtgctgcttatggatacacagggtaccttcgactctcagtccaccctaagggacagtgcaaccgtgttcgccctatctaccatgatatcatccatccaggtctataatctgtctcagaatgtgcaagaagatgacttacagcacctgcagttatttactgaatatggtcgcctggccatggaggaaaccttccttaagcctttccagagccttatcttcctcgtgcgggattggagtttcccatacgaattcagctacggtgcggacggaggcgcaaagttcctcgaaaaacggctaaaggtcagtggaaaccagcacgaggaactgcagaacgtgaggaaacatatccacagttgcttcactaacatcagctgttttttactgcctcacccggggttaaaagtcgctaccaatccgaacttcgatggcaaattgaaagaaatcgacgatgagtttattaagaacttgaaaatcctgatcccttggctcttgtcaccagagtccctggatatcaaagagatcaatggcaataagattacctgcaggggactggtagaatatttcaaagcctacatcaagatctaccagggtgaggagttgccacacccgaaatctatgctgcaggcaacggcggaagcaaataatcttgccgcagtggcgacggcaaaggatacttataacaagaagatggaggagatctgcggaggagacaaaccttttttggctccaaatgatctgcagaccaagcacctgcagctgaaagaggaaagtgtcaagctgttccgtggtgttaagaaaatgggcggagaggagtttagccgacgatatctacagcagctggaatccgaaattgacgagctgtatattcagtacattaagcataacgatagcaaaaacatatttcacgccgcacggacccctgcgacgttatttgtggtgatctttattacttacgtaattgccggggttacaggttttatcggcctggacataatagcctcactgtgcaacatgatcatgggtcttacactgataacgctttgtacatgggcctatatcagatatagcggagaataccgcgagctcggtgccgtcatcgaccaagtcgctgccgctctgtgggatcaggcactgtacaagctgtattccgccgcagctacacaccgtcacctatatcaccaagcattccctaccccaaagtccgagtccaccgagcaatccgagaaaaagaagatgtag

SEQ ID NO: 108884 - DNA, 90 bp, synthetic construct
  misc_feature 1..90: note = Description of Artificial Sequence: Synthetic coding sequence
  source 1..90: mol_type = other DNA
atggccaagaaccggcgtgaccggaacagctgggggggcttcagcgagaaaacttacgaatggagttctgaggaggaggagcccgtttag

SEQ ID NO: 108885 - DNA, 303 bp, synthetic construct
  misc_feature 1..303: note = Description of Artificial Sequence: Synthetic coding sequence
  source 1..303: mol_type = other DNA
atggcaaaaaaccgacgcgatcggaactcgtggggcggattctccgagaaaacctatgaatggtcatctgaagaggaagagccagttaagaaagcaggaccggtccaggtgctgatcgtcaaagacgaccactcctttgagctcgacgagactgcattgaacaggatcctcctgtccgaagcggtgcgcgacaaggaggtggttgcagtctctgtggctggcgcatttcggaaggggaaatctttcctgatggacttcatgctgcgctacatgtataaccaggagtcggtcgactgggtgtag

SEQ ID NO: 108886 - DNA, 1701 bp, synthetic construct
  misc_feature 1..1701: note = Description of Artificial Sequence: Synthetic coding sequence
  source 1..1701: mol_type = other DNA
atggtgctcaaaaagggcattaagttttttcaaagactgattaactccaaatctttacgctttggggaaaactacgaggatgatgacttagttaatagcgatgaggtcatgaaaaagccatgccccgtgcagatcgttctcgcacatgaggatgaccataattttgaactcgatgaggaagccttagaacagatactcctgcaagaacacatccgagatttaaacattgtggttgtctccgtggctggcgcctttcgaaagggcaagtcctttctgctggattttatgcttcgatacatgtataacaaggatagccagtcttggatcggcgggaataacgagccccttactggcttcacatggagaggtggctgtgaaagggagacaacgggaatccaggtctggaacgaagtttttgtcatagaccggccaaatggcaccaaggtggctgttctgttgatggatactcagggggctttcgatagtcagagtaccattaaggactgcgctactgttttcgcgctgtccacaatgaccagcagcgtgcaagtttataacttatctcagaacattcaggaagacgatctgcagcacctgcaactgttcacagagtacggcagactggcgatggaagaaatctaccagaagcctttccaaactttaatgtttctgatcagggattggtcttatccctatgagcatagttacggcttggaagggggcaaacagttcttggaaaagcgattacaagtgaagcagaaccagcacgaggaactccagaacgtgagaaaacatatacataattgtttctccaaccttggatgcttcctcttgcctcatcccggtttgaaggttgcaaccaatccatcctttgacgggcgtttaaaggatatcgacgaagacttcaaaagagaactcagaaacttggtgccacttctgctggcgcctgaaaatctcgtggagaaggagatcagtggcagcaaagtaacttgccgggacctggtggagtatttcaaggcttatatcaaaatctaccagggcgaagaacttccacatcctaaaagtatgcttcaggcgaccgctgaagctaacaatcttgcggcagtcgccggggccagggacacctactgtaaaagcatggagcaggtttgcggaggcgataaaccttacatcgcaccaagcgacttagaacgcaagcacctggacctgaaggaggtggctatcaaacaatttcggagcgtgaagaagatgggtggtgatgagttctgccgtaggtaccaggatcagctagaggctgaaatcgaagagacatacgctaactttattaagcacaatgatggtaagaacattttctatgctgcccgcactcccgcaactttattcgcagtgatgttcgcaatgtacataatcagtgggctgaccggatttattggactcaacagcatcgccgttttgtgcaaccttgttatggggctcgccctgatcttcctttgtacctgggcttatgttaagtattccggcgaattcagggagattggtaccgtgatcgaccagatagctgaaactctctgggaacaacggagtcccaggaaggtcttcagcaaattgttcgaggtgacgagacggcggatggtccaccgggccttatctagcgcacagagacagaggttgagctccaacaacaataagaaaaagaactag

SEQ ID NO: 108887 - DNA, 1752 bp, synthetic construct
  misc_feature 1..1752: note = Description of Artificial Sequence: Synthetic coding sequence
  source 1..1752: mol_type = other DNA
atggctgagggtgacgaagcagcccgagggcagcagccccaccaggggttatggaggcggcgtcggacttccgacccctcggccgcagtgaatcacgttagttctaccacttcactgggtgagaactacgaagatgatgatttggttaacagcgacgaggtgatgaagaagccctgtcccgtgcagatcgtgctcgcacatgaggatgaccataatttcgagctggatgaagaggcgttggaacaaatcctgctgcaggagcacattcgggacctcaatatcgtggtggtgtcagttgccggtgcatttaggaaggggaagagcttcctgctcgattttatgctgagatatatgtataacaaagacagccagtcatggatcggtggaaataatgagccactgacaggctttacgtggcgggggggctgtgaacgagagacgactggcatccaagtgtggaacgaagtttttgtgattgacagacctaacggtaccaaggtcgccgtcttgctcatggatactcagggcgctttcgacagccaatccaccatcaaggattgcgctactgtatttgcgctcagcacgatgacctctagtgtgcaggtgtacaacctttctcagaatatccaggaagacgatctacagcacctgcagctctttactgaatatggacgtctggctatggaggaaatctaccagaaaccttttcagacattaatgttcctgattcgagattggagctatccctatgagcactcgtatggcctggaaggagggaaacagtttcttgagaaacggttacaggttaaacagaaccagcatgaggagcttcagaatgtgagaaagcacatacacaactgcttctctaatctgggatgtttcctcctgcctcaccctgggctcaaggttgcgactaacccttctttcgatgggcgcctgaaggacattgacgaggattttaagcgagaattgcggaatctggtgccgcttttgctggccccagagaaccttgtcgaaaaggaaatttcaggctctaaagtgacttgtagagacttagtcgagtactttaaggcctacataaagatttaccagggtgaggaactcccacaccccaaaagtatgctccaggccaccgccgaagcgaataacctggccgcggttgctggcgctagggatacctattgtaagagtatggagcaggtgtgcgggggagacaagccttatatcgccccgtccgatctggagcgaaagcacttggatctaaaggaagtcgccattaagcaatttagatctgttaagaaaatgggcggggatgaattttgccggcgctatcaggatcagctcgaggccgaaatagaagagacatacgcaaatttcatcaagcataacgacggtaaaaacatattctatgccgctcgtacacccgctactctctttgccgtcatgtttgctatgtatatcatcagtggcctcacaggatttataggtctaaatagtatcgccgtgctctgcaacctggtgatgggacttgcgctcatctttctgtgtacatgggcctacgtgaaatactccggtgaatttcgggagatcggcaccgtgattgatcagatcgccgagactttgtgggagcaagttctgaagcccctcggcgataacctgatggaagagaatataaggcagtctgtcaccaattcgattaaggccggactgacagaccaagttagtcatcatgcccggttgaagacggattag

SEQ ID NO: 108888 - DNA, 1239 bp, synthetic construct
  misc_feature 1..1239: note = Description of Artificial Sequence: Synthetic coding sequence
  source 1..1239: mol_type = other DNA
atggacacccagggagcgttcgattcccagagcacaatcaaagattgtgccactgtgttcgctctttctacaatgacatctagcgtgcaggtgtacaatttatcacagaatattcaggaggatgacctacagcacttgcagcttttcaccgaatatggccggctggccatggaggaaatctaccagaaaccatttcagacacttatgtttctgattcgcgattggagctatccatacgagcactcctatggactggaaggtggtaagcagtttctggagaaaagattacaggttaaacaaaatcagcacgaggaactgcaaaatgtgcggaaacacattcacaattgcttctcaaaccttggatgtttcttattgccacacccagggctgaaggtggccactaatccttcttttgatgggagactcaaggatatcgatgaagacttcaagcgagagcttaggaacctggttcccttgcttctggccccagaaaatcttgtggaaaaagagattagtgggtctaaggtaacctgtagagatctcgtcgagtacttcaaagcctatatcaaaatctaccaaggtgaagaactgcctcacccaaagagcatgctgcaggctacagccgaagccaacaacctcgcagcggtcgccggggctcgagacacctattgcaagtccatggagcaggtatgcggtggggacaaaccctatatagccccctccgaccttgagcgcaagcacttagatttgaaggaagttgcaatcaagcaatttaggagtgtgaagaaaatgggcggggatgaattctgtcggcgataccaggaccagctagaagccgagatcgaggagacctatgcaaacttcataaagcacaacgatggcaaaaatatcttttatgccgctagaactcccgcaacactgttcgccgtaatgttcgcaatgtatataatctccggtttgacaggcttcataggcttaaatagcatcgccgtgctctgtaacttggtcatgggcctagctctgatttttctgtgcacctgggcctatgtgaaatattcgggggagttcagggagatcggcacagtaatcgaccagatcgcggaaaccctctgggagcaggtcctgaagcctctaggagataaccttatggaagaaaacattaggcagtctgttaccaactcaatcaaagccgggttgacggaccaggtctcacaccacgctagacttaagacagactag

SEQ ID NO: 108889 - DNA, 1740 bp, synthetic construct
  misc_feature 1..1740: note = Description of Artificial Sequence: Synthetic coding sequence
  source 1..1740: mol_type = other DNA
atggccgagggagacgaggctgccaggggtcagcaaccccaccagggattgtggcggcgacgccgtacatccgacccttcagctgccgtcaaccatgtgtcgtcaacaaccagcctgggcgagaattacgaagatgacgatcttgtcaactctgatgaggtgatgaaaaagccttgtccggtgcaaatcgtgctggctcacgaggatgaccataattttgaattggatgaagaggccctggagcaaattctgctgcaggaacacattcgtgatttaaacatagttgtcgtgtctgtggcaggtgcgttccgcaagggaaagtctttcttgctcgacttcatgctaagatacatgtacaacaaggatagccagtcttggattggcggtaataatgagcctctgacgggattcacatggcgtggggggtgcgaaagagaaactacaggaattcaggtgtggaacgaagtgtttgtcattgaccgccctaacggtaccaaggtggccgttctgctaatggatactcagggcgccttcgatagccagagcacaatcaaggactgcgctaccgtattcgccctgtcaaccatgactagctccgttcaggtgtataacctgagccaaaacatccaggaagatgatcttcagcatctgcaactgtttactgagtatggcaggctggcgatggaagaaatctatcaaaaaccctttcagacattgatgtttcttatccgcgactggagttacccttatgagcatagctacggcctggaggggggtaagcaattcctcgaaaagcgtctccaggtgaagcagaaccagcacgaagaactgcaaaacgtcagaaagcatattcataattgcttttcaaacctgggctgttttctcttgccacacccgggtctcaaggtggccaccaatccctccttcgatggaagattaaaggacattgacgaggacttcaagcgggagctgaggaacttggtacccctcctgctcgcccctgaaaatctggtggagaaggaaatttcgggcagcaaggtcacctgcagggatctcgtagaatacttcaaagcatatatcaagatctatcaaggcgaggaattgccccaccctaaaagcatgctgcaagcgactgctgaggctaacaacctggccgctgtggctggagcccgggatacatattgtaagtctatggagcaggtctgcggaggagataagccttacatagccccaagtgatctcgagagaaagcacctggatctgaaagaagttgcgataaaacagttcaggtctgttaaaaagatgggaggcgacgaattttgtaggagataccaagatcagctggaggccgagatcgaagagacttacgctaacttcatcaaacacaacgatggaaagaacattttctatgcagctcggactccagccacattgtttgctgtgatgtttgctatgtatattattagcggtctcactgggtttatcggtctgaacagtatcgcggtcctgtgcaatctggtgatgggcctagccttaatctttctctgtacctgggcctatgttaagtactctggcgagttccgtgagatagggacagtgatagaccagatcgctgaaacattgtgggaacaggtgtttagcaaactctttgaagttactcgccggcgcatggtacaccgcgccctcagttctgctcagcgccagcgattgtcaagtaataacaacaagaagaaaaattag

SEQ ID NO: 108890 - DNA, 1239 bp, synthetic construct
  misc_feature 1..1239: note = Description of Artificial Sequence: Synthetic coding sequence
  source 1..1239: mol_type = other DNA
atggatacccaaggagcctttgactcccagtctactatcaaagactgtgcaaccgtttttgcgctctcaacaatgaccagttcagtccaggtttataatctaagccagaatatacaagaggacgacctgcagcacctgcaactctttactgaatacggacggctcgcaatggaagaaatttatcagaaacccttccagaccctgatgtttcttattcgcgactggagttacccctacgaacactcgtacggcctcgagggcgggaagcagtttctggagaagcggcttcaagtgaaacagaaccaacatgaggagttgcagaatgtgagaaaacacatccataattgcttctccaacctcggctgttttctcctgccccaccccgggctgaaagtggctacgaacccatcgtttgatggcaggttgaaggatatcgacgaggacttcaaaagggagctccggaatctggtgcccctgttgttagctcccgaaaacttagtggaaaaggagatttctggatccaaggtcacttgccgcgaccttgttgaatactttaaggcctacatcaaaatttaccaaggtgaagagttgccccacccaaagtccatgctgcaggccacagccgaggcgaacaacctggccgccgtagccggtgctagagatacctattgtaagagtatggagcaggtgtgtggcggggacaagccttacattgcaccctccgatctggagcggaagcacctggacctcaaggaagtagcgattaagcagttccgttcagtgaaaaagatgggcggcgatgagttttgccggcggtatcaagatcagttagaggcggaaattgaggaaacttacgccaatttcattaaacataatgacggtaagaacattttttacgcagccaggaccccagctacgttatttgctgtcatgttcgcaatgtacatcatctctggattgaccgggtttatcggattgaacagcatcgccgtcctgtgcaacctggtgatggggctggccctcatattcctttgtacctgggcttatgtcaaatattccggcgagtttagggagattggaacagtgatcgatcagatcgcggagaccctctgggaacaggtgctcaagcccctgggcgacaacctgatggaggagaatattcgccaatccgttacaaacagcatcaaagctgggctgaccgaccaagtttcccatcacgcacgcctgaagaccgactag

SEQ ID NO: 108891 - DNA, 1242 bp, synthetic construct
  misc_feature 1..1242: note = Description of Artificial Sequence: Synthetic coding sequence
  source 1..1242: mol_type = other DNA
atggatacccagggcgccttcgattcacagagcaccatcaaagattgtgctaccgtgttcgcgttaagcacaatgacctcctccgttcaggtgtataacttatcccagaatatccaggaagacgatctccaacatctgcagttgtttacagagtacggtcgccttgcgatggaagagatttaccaaaagcccttccagacactgatgtttctcatacgagactggtcctacccctatgaacatagctacggtttggagggcggcaaacagttcctcgaaaaacggctccaggtcaaacagaatcagcacgaggagctgcagaatgtccgcaagcatatccacaactgcttcagcaacctgggatgcttcttactgccccacccgggcctcaaggtggccaccaacccttctttcgatggccggctgaaggacatcgatgaggatttcaaaagggagttgaggaatctggtccctctgctgctggcacccgaaaatttagtggagaaggaaatctctggatctaaggtcacgtgcagggacctggtcgaatatttcaaagcctatatcaaaatctatcaaggggaggaactaccccaccccaaaagcatgctgcaggcgaccgcagaggccaataacctggccgccgtagcaggagcacgcgacacatactgtaagagcatggagcaggtatgcgggggtgataagccctacattgccccaagtgacctggagaggaagcatctcgatcttaaggaggtggcaattaaacagttcagaagcgttaaaaaaatgggcggtgacgaattctgccggcgataccaagaccagcttgaggccgaaattgaggagacgtacgctaacttcattaaacataatgacggtaaaaacatattctatgctgcgaggactcccgccaccctgtttgcagtgatgttcgccatgtatataatttctggacttactgggtttatcggcctgaactcaatcgccgttctgtgcaacctggtgatgggattagctctcatcttcctttgtacctgggcatacgtaaagtactctggagaatttagggagataggaacggtgatcgaccagattgcagagacgctgtgggaacagcgctccccaaggaaagtcttttctaagcttttcgaagtcaccaggcggcgaatggtgcatagagctctctcaagtgcgcagagacagcgactgagtagtaacaataacaaaaagaagaattag

SEQ ID NO: 108892 - DNA, 1707 bp, synthetic construct
  misc_feature 1..1707: note = Description of Artificial Sequence: Synthetic coding sequence
  source 1..1707: mol_type = other DNA
atgagaaccgctggccgggacccagtttccgccggtctccaattcccaaaggatggctccacccagcgccctgctaatagagcacgattcgtgcctgccagaacacgtccgagtcctcttcatccctgttgtttttgcttcgagggcggaggctccatgctatcaccacaaagggtggccgctgccgcttctcggggcgccgacgacgccatggagagcagcaatatactgctgcaggatcacattagagacctagacgtagtggtggtatcggtcgccggagcctttagaaagggcaagagtttcatcctggactttatgctccggtacctgtactcccagaaagaaagtggccacagcaactggttgggagatccagaggagcccctcactggcttctcctggaggggggggagtgatcctgaaacaacaggaatccagatttggagcgaggtcttcaccgtggaaaagcccggcggtaagaaagtggccgttgtacttatggacacccagggggcctttgattcgcagtctactgtcaaggattgcgctaccatttttgctctgagtactatgacctctagtgtgcaaatctataacctgagccagaacatccaggaagacgacctgcagcaactccaactgttcacagaatacggacgcttagccatggacgagatttttcagaaaccattccagaccctcatgttcctggtgagagattggtcctttccttatgagtactcctatggtctgcagggcggcatggcttttttggacaagcgacttcaggtgaaggaacaccaacatgaggagattcagaatgtgcgaaatcacattcattcctgtttcagcgatgtcacatgctttctgctacctcatcctggtttacaggttgccacctctcccgattttgatggcaaactgaaagacatcgcaggagagtttaaagagcagctacaggctctcatcccgtacgtgttgaacccttccaagctcatggagaaagaaatcaatggcagcaaagtcacatgtcgcgggcttctggaatatttcaaggcctatatcaagatatatcagggcgaggacctgccccatccaaagagtatgctccaagccacagcggaggcaaataatctggctgccgctgcctctgcaaaagacatctactataataatatggaagaggtctgtgggggggagaagccttatctcagccctgatatcctagaggagaagcattgcgaatttaaacagttggcactcgatcatttcaagaaaaccaaaaaaatgggcggcaaagacttcagctttcgctatcagcaggaactggaggaggaaattaaggaactctacgagaatttctgcaaacataacggatccaaaaatgttttttctacctttcggaccccagctgtgcttttcacgggaatcgtggccttgtacatagcatccgggctgacgggattcattgggctggaggttgtggcccagttgttcaactgtatggttggactgcttctcatagcgcttctgacatggggatacatcaggtactcagggcagtacagggagctagggggagcaattgacttcggggccgcttacgtgctggagcaggcatctagccacattggaaacagcacacaggccaccgtgagagacgctgttgtggggcgccctagcatggacaagaaggctcaatag

SEQ ID NO: 108893 - DNA, 1626 bp, synthetic construct
  misc_feature 1..1626: note = Description of Artificial Sequence: Synthetic coding sequence
  source 1..1626: mol_type = other DNA
atgcttagtccccagcgagtggcagccgccgcatccaggggagcagacgatgcaatggagtcgagtaaaccgggacccgtgcaggtggttctcgtacagaaggatcagcattcgtttgagctggacgagaaggcactcgccagcatactactgcaggatcatatcagggacctggatgttgtagtggtgtctgtggcaggggcctttcggaagggcaagagcttcatcctggattttatgctcaggtacctctacagccagaaggagtctgggcatagtaactggctaggcgaccctgaagaaccgttaacgggctttagttggaggggcggaagtgatccagagacgactgggatacagatctggtctgaggtgttcactgtagagaagcctggcggcaaaaaggtggccgttgtgctcatggatactcaaggagccttcgatagtcagagtacagttaaggactgcgctaccatattcgccttgagtactatgacatcatccgtgcagatttacaacctgagtcaaaacattcaggaggatgacctgcaacagctgcagctgttcacagagtacgggcggcttgccatggacgaaattttccagaaaccctttcaaacgctcatgttccttgtgagagactggtcgtttccctatgaatactcttacggcctgcagggaggtatggccttcctggataaacgcctacaggtgaaagaacaccagcacgaggaaattcagaacgttcgtaatcacatacatagttgcttttccgacgttacatgcttcctcctcccccaccccgggttacaggtcgccacatcccccgacttcgatggcaagctaaaggacatagctggagaattcaaggaacaactccaggccctgataccttatgtgctgaatcccagtaagctgatggagaaggagatcaacggtagcaaggtcacatgccgcggcctcctcgagtactttaaagcatacatcaagatctaccagggtgaagacttgcctcatcctaagagtatgcttcaagcaacggctgaagccaataatctggccgctgctgcctctgccaaggatatttattacaataacatggaggaggtgtgtggcggagagaaaccttatcttagtccagatattctggaagaaaaacattgcgagttcaaacagttagctctggaccacttcaaaaaaaccaagaaaatgggcgggaaggattttagttttcgatatcaacaagaactggaggaggagatcaaagagctctacgagaacttctgtaaacacaatgggtctaagaatgtattctctacgtttcggactccagccgttctatttactgggattgtcgccctgtacattgctagtggcctgaccggtttcattgggttagaggtggtcgcacagttattcaattgcatggtggggcttctgctaatcgccctactcacctggggctatatcagatactccggccagtaccgggagcttggcggcgccattgatttcggagcagcatacgtcctcgaacaagcctcaagccatatcgggaattcaacacaagccacggtcagagatgccgttgtcggcaggccatccatggataagaaagcccaatag

SEQ ID NO: 108894 - DNA, 1065 bp, synthetic construct
  misc_feature 1..1065: note = Description of Artificial Sequence: Synthetic coding sequence
  source 1..1065: mol_type = other DNA
atgtctcgactgctacatgccgaggagtgggcagaagtcaaggagcttggcgaccatcaccggcagccgcagccacaccacctacctcagcctccacccccaccgcagccacctgctacacttcaggctcgagaacacccagtgtatcctcccgaactcagcctcttggactcaaccgacccacgcgcttggctcgcccccaccttacaggggatttgtacagccagggcggcccagtacttgttacatagccctgaattaggagccagcgaggctgccgctccccgggacgaagtggacggaagaggcgagctggtgcgtcgcagcagcggtggcgcctcctcttcaaagagtccaggcccagttaaggtgagggaacaactctgcaaactgaaagggggcgttgtggtagacgaactaggctgttcacggcagcgggctccatcttctaaacaggtaaatggggtgcaaaaacagcgtcgactggccgcgaacgccagagagcggcggcggatgcacggactgaaccacgctttcgaccagctcagaaatgtgataccgtccttcaacaatgataaaaaactctccaaatatgaaaccctgcaaatggcccagatttatatcaacgcactaagcgagctgctgcagactccttcaggtggcgagcaaccacctccgccaccagcatcctgcaaatcagatcatcaccacctgcgtacagcagcctcttacgaaggtggcgccggtaatgccacagcagccggtgcccaacaagccagtggggggagccaacgccccactccgcctggttcttgtaggactcgcttcagtgctcctgcaagtgccggagggtactcagtccaactagacgcactgcattttagtaccttcgaagactctgccttgacagcaatgatggctcagaaaaacctgtcaccttccttaccgggcagcatcctccagccggttcaagaggaaaatagcaagaccagcccgagatctcaccgcagcgacggtgaattttcccctcactcgcactatagcgattctgatgaggctagttag

SEQ ID NO: 108895 - DNA, 459 bp, synthetic construct
  misc_feature 1..459: note = Description of Artificial Sequence: Synthetic coding sequence
  source 1..459: mol_type = other DNA
atgaagtcttgtaaaccaagcgggcctccagccggggcacgggtggcccccccatgtgcgggcgggaccgaatgtgctgggacttgtgccggagccggccgactcgagtcagctgcccgtcggaggcttgccgctaatgcccgggagcggaggcgtatgcaaggattgaacacagcgttcgaccgcttgcgccgcgtggttccccagtggggccaggataaaaagctgagtaaatatgagacattacagatggcactgtcttacattatggctctaacgaggatccttgccgaggctgagcggttcggttctgagcgcgactgggtcggactacattgcgagcactttgggagagaccattatctgccattccctggcgctaaacttccaggcgagagcgagctctactctcagcggctcttcggctttcaaccagagccattccaaatggccacctag

SEQ ID NO: 108896 - DNA, 627 bp, synthetic construct
  misc_feature 1..627: note = Description of Artificial Sequence: Synthetic coding sequence
  source 1..627: mol_type = other DNA
atgtggagatcctgcctgaggcttagagacggcggacgccgcctgcttaatcgacctgctggtggccccagtgcctcgatgtctcccggccccaccatcccttctcctgcccgcgcttacgccccaccgaccgagaggaaacgcttctatcagaatgttagcataactcagggggagggggggtttgaaatcaatctagatcaccggaagctcaaaaccccgcaggctaagttgtttactgttcccagcgaagctctcgccatagcagttgctacagagtgggacagtcaacaggatactatcaaatactataccatgcacctgacaacgttgtgcaataccagcctggacaaccccacccagaggaataaggaccaacttatcagagccgccgtaaaattcctggatactgacaccatctgctatagagtagaggagccagagacgctggttgagctgcaacggaatgagtgggaccctatcatagagtgggcggaaaagcgctatggggttgagatatccagctccaccagtatcatgggcccgagtattcccgccaagacacgggaggtgctggttagccacttggcctcctacaacacatgggccctgcaaggaatggattag

SEQ ID NO: 108897 - DNA, 618 bp, synthetic construct
  misc_feature 1..618: note = Description of Artificial Sequence: Synthetic coding sequence
  source 1..618: mol_type = other DNA
atgtggcggtcctgcctgcgcctccgagatggcgggcgtcgcttgctcaaccgaccagccggaggtccaagcgccagcatgagccccggccccacaattccttctcctgccagggcttacgcccctcctaccgagaggaagcggttctatcagaacgtgtccatcacacagggagagggtggttttgaaatcaacctagaccataggaaactcaaaactccgcaggcaaagttgttcacagttccttcggaagccctagccattgccgtcgccactgagtgggacagccagcaggatactataaaatactacacaatgcacctgaccacgctttgtaacactagtctagataatcccacacaaagaaacaaagatcagcttattagggctgccgtgaagttcctcgacaccgacacaatatgctatcgcgtggaggagccagaaacactcgttgaattgcaacgcaatgaatgggaccctattatcgaatgggcagaaaagaggtacggggtcgagatcagttcgtctaccagcatcatgggcccatctattcccgccaaaaccagggaggtcctcgtttctcacctcgcgtcctataatacttgggccctgcagtag

SEQ ID NO: 108898 - DNA, 870 bp, synthetic construct
  misc_feature 1..870: note = Description of Artificial Sequence: Synthetic coding sequence
  source 1..870: mol_type = other DNA
atgtggaggtcttgccttcgtctccgggacgggggtagacgtctcctgaacagacctgccgggggcccatctgcctccatgtcacctggccccacaatcccttcaccagccagagcgtatgctccccctacagaaaggaagagattctatcagaacgtgtctatcacacagggagaaggtggtttcgaaatcaatcttgatcataggaagctgaaaacacctcaggccaagttgtttaccgtgccgagtgaggctctcgccattgccgtggctactgagtgggattcccagcaggacacaatcaagtactatacaatgcacttgaccactttgtgcaacacttctctcgacaaccccacccaacggaataaggatcagctaataagggcggccgtgaagtttctcgacacagacacaatctgttaccgcgtggaagagccagaaactctcgtggagctccagagaaatgaatgggatcctatcattgaatgggctgaaaagaggtacggcgttgaaatcagctcctctacgagtatcatgggtcctagcatccccgctaaaacccgggaggtcctggtgagtcatttggccagctacaacacatgggctcttcaaggaatcgagttcgttgcggcacagttgaagtctatggttctgactctaggactgattgacctgcgacttactgtggagcaggccgtgttgctctcacgtcttgaagaggaataccagatccagaagtggggcaacatcgagtgggcacacgattacgaactgcaggagctccgtgcccggactgcagcgggaaccttgtttatccatctttgtagcgaaagcaccaccgtgaaacataaactcctcaaggagtag

SEQ ID NO: 108899 - DNA, 1590 bp, synthetic construct
  misc_feature 1..1590: note = Description of Artificial Sequence: Synthetic coding sequence
  source 1..1590: mol_type = other DNA
atgctcggattcgtgggtcgcgtcgctgcagcgcctgcgtccggcgctttgcggcggttgactcctagcgcaagtcttcccccggcacaactactactacgggccgctcccaccgctgtgcacccagtgcgcgactatgccgcccagacaagcccatcaccaaaagctggagccgctaccggacgcatagtggccgtaatcggcgcagtcgtcgatgtgcagttcgacgaggggctgcctccaattttaaatgcgctcgaggtccagggccgcgagaccagattggtgctggaagttgcccagcacctaggcgagagcactgtgcgaacaatcgcaatggatggtaccgaggggctagttaggggacaaaaagtcctggatagcggtgcgccgataaaaattccagtgggtccggagacactaggccgaattatgaacgtgatcggggaaccaattgatgagcggggccccattaagaccaaacagttcgccccaatccacgcagaggcgcctgaattcatggagatgtccgtcgagcaggagatcctcgtcacaggtataaaagttgttgatcttctagctccctacgcgaaggggggaaagatcggtctatttggcggggccggggtcggcaagacagtacttatcatggaactcatcaacaacgttgccaaggctcatgggggttacagcgtattcgccggggtaggcgagcgcactcgggagggaaacgatctgtaccatgaaatgatcgaatctggggtgatcaatctgaaggacgctacctccaaagttgccctcgtgtacggccagatgaacgagccccctggagctagagcccgcgtggccctgactggtttgacggtggccgagtatttccgagatcaggagggacaggacgttttgctcttcatagataatatctttcgatttacacaagctggatccgaggtttccgcactgctgggccggatcccgtcagctgtaggttatcagcccacactggcaactgacatgggtactatgcaggagaggatcaccaccactaagaagggaagcattacctcagtacaggcaatctatgttcccgccgatgatctgacggaccccgcccctgcaaccacgttcgcccatcttgatgcaaccaccgttctgtcccgagctattgcagaactgggcatctaccctgctgtggacccccttgacagtacgtctaggattatggacccaaacattgttggctcagaacactatgacgttgcccgaggtgtgcaaaaaattctgcaagattacaagtcattgcaggatataattgcaatactcgggatggatgagctcagcgaggaagacaaactcacggtgtcccgagcaagaaaaatccagcggtttctgtctcagcccttccaggtcgccgaagttttcaccggccacatgggaaagctcgtgccattgaaggaaactattaagggattccagcagattcttgcgggcgagtacgatcacctccccgaacaagcgttttacatggttggacccatcgaggaagctgttgcaaaagctgataaactggccgaagagcactcaagctag

SEQ ID NO: 108900 - DNA, 156 bp, synthetic construct
  misc_feature 1..156: note = Description of Artificial Sequence: Synthetic coding sequence
  source 1..156: mol_type = other DNA
atggtggcgtactggaggcaggcaggactgagttacattcgatacagccagatttgtgccaaggccgtgcgcgacgctctgaaaacagaattcaaggccaacgctgaaaagacctctggttccaacgtcaagattgtaaaagtgaaaaaggagtag

SEQ ID NO: 108901 - DNA, 156 bp, synthetic construct
  misc_feature 1..156: note = Description of Artificial Sequence: Synthetic coding sequence
  source 1..156: mol_type = other DNA
atggttgcctactggcggcaggcaggcctgtcctacatccgctacagccagatctgtgccaaagccgtgagagacgcactcaaaaccgagtttaaagcaaacgctgaaaagacatccgggtccaatgtgaaaatcgtgaaagtgaaaaaagagtag

SEQ ID NO: 108902 - DNA, 156 bp, synthetic construct
  misc_feature 1..156: note = Description of Artificial Sequence: Synthetic coding sequence
  source 1..156: mol_type = other DNA
atggtggcatactggaggcaagccgggctaagctatatcaggtatagccagatctgcgccaaggctgtacgagatgccttgaagacggagttcaaagctaacgctgagaagacatcaggctcaaatgtaaagattgtgaaggtcaagaaggagtag

SEQ ID NO: 108903 - DNA, 894 bp, synthetic construct
  misc_feature 1..894: note = Description of Artificial Sequence: Synthetic coding sequence
  source 1..894: mol_type = other DNA
atgttctcacgtgctggcgttgccggactctcagcgtggacactccagcctcagtggattcaggtgaggaacatggccaccctcaaggatatcaccagacgactgaagagtattaagaacattcagaagatcacgaagtcaatgaagatggtagcagccgcgaaatacgcccgggcagagagggaattgaaaccagctaggatttatgggctcggctcactcgcactgtacgaaaaagcagatatcaaaggtccggaagataagaagaaacacctgcttatcggtgtctcctctgatcgcgggctgtgcggggccatccactcgagcatagcaaaacaaatgaagtcagaggtggccacccttacagccgcaggtaaagaagttatgctggtcggcatcggtgacaagatacgcggcattttgtaccggacgcacagtgatcagtttctcgtggccttcaaggaagtagggcggaagccaccaacattcggcgacgcatccgtgattgccctggagctactgaatagcggttacgaattcgacgaagggagcatcatcttcaacaaattccggagcgtgatcagctataaaactgaggagaagcctatctttagtttgaatacagttgcatctgcagactctatgtcaatctacgacgacatcgacgctgatgtgcttcagaactaccaagaatataacctggccaacattatctattatagtctcaaagaaagtacaacttctgagcagtctgctaggatgaccgcgatggataatgcctctaagaacgcttccgaaatgatcgacaagttgacgttgaccttcaataggacacggcaggctgttatcactaaggagctgattgaaattatctccggcgccgccgctttgtag

SEQ ID NO: 108904 - DNA, 897 bp, synthetic construct
  misc_feature 1..897: note = Description of Artificial Sequence: Synthetic coding sequence
  source 1..897: mol_type = other DNA
atgttctcccgggcaggggttgcaggcctgtccgcttggactctgcagccacagtggatccaggttcgtaacatggccacactgaaggatatcacgcgacgcctgaaatcaataaaaaatattcagaagatcacaaagtctatgaagatggtagccgcagctaagtacgcaagggcagagagggagctgaaacctgcgagaatctatggacttgggagcctggcattgtatgaaaaagctgatatcaaaggacccgaagacaagaaaaagcacctgctcattggcgtgagctcagaccgcggactctgcggagcaatccatagtagcatcgctaagcagatgaagtccgaagtggctactctgactgccgcagggaaagaggtcatgctggtcgggatcggtgataagatcaggggaatcctataccgcactcacagcgatcagttcctagtcgcattcaaggaggttgggagaaaaccccctaccttcggtgacgcatcagtgatagctctggaattacttaactccggctacgagtttgacgaagggtctattattttcaacaagtttagatcagtcatctcatataagaccgaagaaaagcccatattctccttgaacaccgttgcttcggcagactccatgagcatttacgacgatatcgacgccgatgtactgcagaactaccaggaatataatctcgccaacattatctactacagtctgaaggaaagtacgaccagcgagcaaagcgcccggatgaccgccatggataacgcaagcaagaatgcctcggaaatgatcgataagttgactctgactttcaacagaacacgccaggccgttatcacgaaggagctgattgaaattatcagcggcgctgccgctctcgactag

SEQ ID NO: 108905 - DNA, 753 bp, synthetic construct
  misc_feature 1..753: note = Description of Artificial Sequence: Synthetic coding sequence
  source 1..753: mol_type = other DNA
atgaagatggtcgcagctgccaagtacgctagagccgagagggaacttaaacctgctaggatttacggcctcgggtccctggcgttgtacgaaaaagcagacataaaaggccccgaggacaagaaaaaacacctgctaattggggtgagttcagacaggggtctctgtggagccatccattctagcattgctaagcaaatgaagtccgaggttgctaccttaactgctgccgggaaggaagtaatgctggtcgggattggggacaaaattcggggcattctctaccgcacccattctgaccagttcctcgtcgctttcaaggaggtggggcgtaagccccctacgttcggagacgcttccgttattgctctagaacttctgaatagcggctacgagttcgacgaggggtccatcattttcaataaatttagatccgtgatatcctataagactgaggagaagcccatattttcactgaataccgtggcatcagcagatagcatgagcatatatgacgacattgatgccgacgtccttcagaattatcaggagtacaaccttgccaatataatttactatagcctgaaggaaagtacgacttcagagcagtccgccaggatgacagcgatggataatgcgtccaagaatgccagcgagatgatagataaactgaccctgacctttaaccgcacacgccaagcggtcattacaaaggaacttatcgagattatctctggggcagctgcgctgtag

SEQ ID NO: 108906 - DNA, 642 bp, synthetic construct
  misc_feature 1..642: note = Description of Artificial Sequence: Synthetic coding sequence
  source 1..642: mol_type = other DNA
atggcggcccccgccgtaagtggcctgtcaaggcaggtgagatgcttcagcacatctgtcgtacgccccttcgctaaactggtgcgccccccggtgcaagtgtacgggattgaaggacggtatgcgacagcactgtactctgctgcgtccaaacagaataaacttgagcaggtggagaaagagttactcagagtggctcagatcctgaaggaacccaaagtcgctgcttccgtactcaacccctacgttaaaagatccatcaaggtcaaaagtctgaatgacattacagccaaagaacgattcagtccgctcacgaccaatctgatcaatctgttggcagaaaatggcaggttgagcaacacacagggcgtcgtctccgctttctctacgatgatgtccgtgcacaggggggaagtgccctgcaccgtgaccagtgcgagccctctggaggaagccaccctgagcgaactgaagacagtcttaaagtcgtttctcagccagggtcaggtgctaaaactagaggctaaaaccgacccaagcattctgggcggtatgatcgtgcggatcggcgaaaagtacgtggacatgagcgtcaagacaaagattcagaagctgggtcgggccatgcgtgagattgtgtag

SEQ ID NO: 108907 - DNA, 411 bp, synthetic construct
  misc_feature 1..411: note = Description of Artificial Sequence: Synthetic coding sequence
  source 1..411: mol_type = other DNA
atgcaaaccgccggagcactcttcattagccctgccttaattcggtgttgtaccaggggcctaatccggcctgtttctgcatcattcttaaactcacctgtgaactcaagcaagcaacctagttattctaacttccctttacaggtggccagaagagagttccaaactagcgtggtcagtagggatatagatacagccgcgaaatttatcggtgctggggcggctacagttggggtagcgggaagtggcgctggtatcggtactgtgttcgggagcctcataattggttacgcgcgcaatcccagccttaaacaacagctgttctcttacgccatacttggatttgctctctctgaggcaatggggctgttctgtctgatggtggcttttctcatcctgtttgctatgtag

SEQ ID NO: 108908 - DNA, 411 bp, synthetic construct
  misc_feature 1..411: note = Description of Artificial Sequence: Synthetic coding sequence
  source 1..411: mol_type = other DNA
atgcagactgctggtgccctgttcatatcacctgcgctcatcaggtgctgtacccggggattgattaggcctgtcagtgcctcattcctaaattcacctgtaaattcttccaaacagccctcatactctaacttccctttacaggtggccagaagggagtttcagacatcagtggtgtctagggatatcgataccgccgctaagttcattggagcgggcgcagccactgtaggggtggccgggtctggagctggtatcggcaccgtgtttggctctctgattatcgggtacgctcgaaatccatctctcaagcagcagctctttagctatgccattttgggttttgcactgagcgaggcaatgggactgttttgtctaatggtggcgttcttgatactattcgccatgtag

SEQ ID NO: 108909 - DNA, 474 bp, synthetic construct
  misc_feature 1..474: note = Description of Artificial Sequence: Synthetic coding sequence
  source 1..474: mol_type = other DNA
atgcccgagctcatcctgagccctgccactgcgccccatccactgaaaatgtttgcttgctcaaagttcgtgagtacgccaagcctcgtaaaatctacctcccaacttctgagcaggcctttgagtgccgtcgtgctcaagcgccccgaaattcttactgacgaatctctgagctcactggccgtgtcttgccccttaacaagcctcgtatcaagcaggagtttccagacttcggccataagtcgggatattgacacggctgcgaaatttatcggggccggagcagccacagtgggtgtcgccggtagcggcgccggaatcggtaccgttttcggatccctcattatcggctacgctcggaaccctagccttaaacagcaactgttctcttacgctatcttaggtttcgccctctctgaggctatgggcctgttttgtttaatggtggccttcctgatactctttgccatgtag

SEQ ID NO: 108910 - DNA, 597 bp, synthetic construct
  misc_feature 1..597: note = Description of Artificial Sequence: Synthetic coding sequence
  source 1..597: mol_type = other DNA
atgcctgaattaattttatatgtggcaatcactctgtccgtcgccgaacgacttgtcggacccgggcacgcttgtgccgaacctagctttagatccagccggtgcagcgcgcctctgtgcctgctctgctctggctcgagttcccccgccacagccccccaccctctcaaaatgtttgcctgctctaagtttgtgtcgaccccctctctcgtgaagtcgacgagccagctgctgtctaggccccttagcgccgtggttctgaagaggcctgaaatcctgacagacgaatctctgtccagtttggctgtctcatgtcccctcacaagcctggtgtcgagcaggtcattccagaccagcgctatctcccgggacatcgataccgcagccaagtttatcggggctggcgctgccacagtcggagtggcaggctcaggagcaggcattggaaccgtgttcggctcgttaattattggctacgcacgtaatccctctctcaagcagcagttattcagttatgctattctgggattcgccttgagcgaggcgatgggattattttgtctgatggtcgcattcttgattctcttcgctatgtag

SEQ ID NO: 108911 - DNA, 426 bp, synthetic construct
  misc_feature 1..426: note = Description of Artificial Sequence: Synthetic coding sequence
  source 1..426: mol_type = other DNA
atgtttgcctgctctaaatttgtatccaccccgagtctagtgaaatctactagccagttactgtccaggccactgtcagcggtggtcctgaagcgccccgagattctgacagatgagtccctttctagcctggcggtgtcctgtcccctcaccagcctggtgtcatctcgatcgtttcagacttctgccatctcaagagatatcgataccgctgcaaagttcataggagctggcgccgcaacagtgggagtggccgggtccggcgccggaatcggtactgtcttcggttccttaatcatagggtacgctcgtaatcctagcttgaagcagcagttgttcagctacgcaatactcggcttcgcgctgtccgaggcaatgggcttgttctgcttaatggtggcatttctgatattgtttgcaatgtag

SEQ ID NO: 108912 - DNA, 429 bp, synthetic construct
  misc_feature 1..429: note = Description of Artificial Sequence: Synthetic coding sequence
  source 1..429: mol_type = other DNA
atgttcgcttgtgccaagttggcgtgtacgccgtccttgattcgggctggttcccgagtcgcttacagacctattagcgcctctgtccttagccggccagaagcgtctcggaccggcgagggctccacggtcttcaacggcgctcagaacggcgttagccagctgatccagagagaattccagacctctgccatctcaagggacattgacacggctgcgaagtttattggcgctggcgccgccaccgtgggggtggctggatcgggtgccgggattggcactgttttcggctctctgatcattggctatgccaggaacccctcccttaagcagcaactgtttagttacgccattcttggatttgcactcagtgaggccatgggtctgttttgcctgatggtggcctttcttatcctctttgccatgtag

SEQ ID NO: 108913 - DNA, 429 bp, synthetic construct
  misc_feature 1..429: note = Description of Artificial Sequence: Synthetic coding sequence
  source 1..429: mol_type = other DNA
atgtttgcctgcgcaaaactggcttgtactccctccctgattagagcgggctctagggtagcctaccggccgatctccgctagcgtgctgtccaggcctgaggcttctcggacgggtgaaggcagcacagtttttaacggcgcacagaatggggtctctcagctgattcagcgcgaatttcagacttcggccatcagccgggacattgatactgccgcaaagtttattggcgcaggcgccgctactgttggcgttgctggaagtggggcaggcattgggactgtgtttggcagcctcatcatcggatatgcacgcaatccctcccttaagcagcagctgttctcatacgcaatccttggattcgccctgtccgaggccatgggactgttttgtctgatggtggcatttctgatcctctttgcaatgtag

SEQ ID NO: 108914 - DNA, 429 bp, synthetic construct
  misc_feature 1..429: note = Description of Artificial Sequence: Synthetic coding sequence
  source 1..429: mol_type = other DNA
atgtttgcctgcgctaagctcgcttgcactccatcactcattagggccgggagccgagtggcatacaggcctattagcgcttccgtcctgtctcgacccgaagcctctcggactggtgaaggctcaaccgtcttcaacggcgctcagaacggcgttagtcagcttatacaaagggagtttcagacgtcagccatctcaagggatattgatacagcagctaagttcattggagccggtgctgcaacggttggcgtcgctggttccggagctggaatcggaactgtgttcggctccctcataattgggtatgctcggaacccttctttgaagcagcaactgttctcttacgcaatcctcggcttcgcgctttcagaggcaatgggccttttctgtcttatggtagccttcctgattctattcgcgatgtag

SEQ ID NO: 108915 - DNA, 210 bp, synthetic construct
  misc_feature 1..210: note = Description of Artificial Sequence: Synthetic coding sequence
  source 1..210: mol_type = other DNA
atggtgccccccgtgcaggtttccccattaattaaactcgggagatactctgctctctttctgggggtggcctatggcgcaaccagatataactatctgaagcctagggcagaggaagaacggaggatagctgccgaagagaagaagaagcaggacgagctcaagaggatcgcacgagaactggccgaagatgatagtatcttgaagtag

SEQ ID NO: 108916 - DNA, 327 bp, synthetic construct
  misc_feature 1..327: note = Description of Artificial Sequence: Synthetic coding sequence
  source 1..327: mol_type = other DNA
atgattctccagcgtctgttccgctttagtagcgtcatcagatcagcggtgtccgtgcatctgcgcaggaacatcggagtgaccgccgtcgcgttcaacaaagagttagatccaattcagaaactgtttgtcgataaaataagggagtataagagcaagagacagacctccggggggccagtcgatgcctcatccgagtaccagcaagaactagagcgcgagctttttaaattgaaacagatgtttggcaacgccgatatgaacacgttccctaccttcaagtttgaggacccaaaattcgaggtgattgagaagccacaggcatag

SEQ ID NO: 108917 - DNA, 327 bp, synthetic construct
  misc_feature 1..327: note = Description of Artificial Sequence: Synthetic coding sequence
  source 1..327: mol_type = other DNA
atgatccttcaacggctcttcagattctcgtctgttattaggtccgctgtctccgtgcatcttcgcaggaatattggggtcacagccgtggcttttaacaaggagctggaccccatccagaagctgtttgtggataagatccgcgaatataagtccaagagacagacctccggcggacccgtagacgcatcaagcgaataccagcaggagcttgaacgcgagctgtttaagttgaagcaaatgttcggtaatgccgacatgaacaccttccccacatttaagttcgaggaccctaaatttgaggtcatcgaaaagccccaggcttag

SEQ ID NO: 108918 - DNA, 327 bp, synthetic construct
  misc_feature 1..327: note = Description of Artificial Sequence: Synthetic coding sequence
  source 1..327: mol_type = other DNA
atgattctgcagaggctgttccggttctccagtgttattaggtccgccgtttccgttcatctcagacgcaatatcggcgtcactgctgtggcttttaataaggagctggatccgatccaaaaactcttcgtcgataagattagagagtacaaatcaaaacgccagacctctggtggacctgtcgatgcctcctcggaatatcagcaggagctggagcgcgagctgttcaagttaaagcaaatgttcggaaatgcggatatgaacacatttcctacatttaagtttgaggatcctaaatttgaagttatcgaaaaaccccaggcctag

SEQ ID NO: 108919 - DNA, 327 bp, synthetic construct
  misc_feature 1..327: note = Description of Artificial Sequence: Synthetic coding sequence
  source 1..327: mol_type = other DNA
atgatcctgcagcgactgtttcggttctcaagcgtgatcagaagcgccgtcagtgttcacctccgccggaacataggcgtgacagccgtagcctttaacaaggaacttgaccccatccagaaactgttcgttgataagattcgcgaatacaagtcaaaacgccagacgagcgggggccccgtcgatgcttcatcagagtaccaacaggagttggaacgtgagctgttcaaattgaagcaaatgttcggcaacgccgatatgaacactttcccaaccttcaaattcgaggaccccaagtttgaggttattgaaaagccccaggcttag

SEQ ID NO: 108920 - DNA, 327 bp, synthetic construct
  misc_feature 1..327: note = Description of Artificial Sequence: Synthetic coding sequence
  source 1..327: mol_type = other DNA
atgatactgcaaagattgttcaggtttagttccgtaatccgaagcgctgtctctgtccacctgcgccgcaacattggtgtgaccgccgttgcttttaacaaggaacttgatccaatccagaaactgttcgtggacaaaatcagggagtacaaatctaagcggcagacctctggcggtccagttgatgcatcgtccgagtaccagcaggaactggaaagagagctgtttaagctgaaacagatgtttggcaatgcagatatgaacacgttcccaacattcaaattcgaggaccctaaatttgaggttatcgagaaaccccaagcctag

SEQ ID NO: 108921 - DNA, 351 bp, synthetic construct
  misc_feature 1..351: note = Description of Artificial Sequence: Synthetic coding sequence
  source 1..351: mol_type = other DNA
atgcactgtgatggtggcatctccatgatcctccagcggctctttcgcttttcatctgtgatcaggagcgctgtctcggtacatctccggagaaacattggggtgactgctgtggcatttaacaaggagctggaccccatccagaaactgttcgttgacaaaataagagagtacaagtctaaaaggcagacgagtgggggcccggttgatgcctccagtgagtaccaacaggagttggagagagaactgtttaagctcaaacagatgtttggaaatgcggatatgaatacttttcctacgtttaagttcgaggacccgaagttcgaggtgatcgagaagcctcaggcgtag

SEQ ID NO: 108922 - DNA, 567 bp, synthetic construct
  misc_feature 1..567: note = Description of Artificial Sequence: Synthetic coding sequence
  source 1..567: mol_type = other DNA
atgaccgccaagggaagtaccggcatggagattctcctgtccacccttgagaatacaaaagacctccagaccactctgaacatcctgagcattttggtggaactcgtatcagccgggggcgggcggagagtatcctttctcgtgaccaaaggtggaagtcagatcttgctgcagctgctgatgaatgctagcaaggagagcccgccacatgaggacctgatggtgcagatccacagtatccttgccaagatcgggccgaaagataaaaagttcggggtcaaagcacgtatcaacggcgctctgaacatcacacttaacctcgtaaagcagaatctgcagaaccatcgattagtgctgccttgcctccagttactgagagtgtattcggctaacagcgtgaacagcgtgagtttgggaaaaaacggagtggtcgagttaatgttcaagataatcgggccatttagcaagaagaatagttcattgataaaaaataagtgtcaggagagttgtcggcagagaatctgcccaagcgccttcaataatctgtgcagactggcacccccttag

SEQ ID NO: 108923 - DNA, 3681 bp, synthetic construct
  misc_feature 1..3681: note = Description of Artificial Sequence: Synthetic coding sequence
  source 1..3681: mol_type = other DNA
atgtcaaagttgaaggtgatccctgaaaagtcactgaccaataactcccggattgtgggtctgttggcccaactcgagaaaatcaacgccgagccttcagagagcgacactgctaggtacgtgacaagtaaaattttacatttggcgcagtctcaagagaagactcgtcgtgaaatgacagccaaggggtcgacaggcatggagattcttctcagcaccctcgaaaatacgaaggatctccagacaacactgaacattctgtccatcctggtcgagctggtgagcgctggcggaggaagacgcgtgtcttttctcgtcacaaaggggggaagtcagatcctgctccaactattaatgaacgcaagtaaagaaagcccaccccatgaagacctgatggtgcagatacattccatattggcaaaaatcggtccgaaggataaaaagttcggggtcaaggcccggatcaatggtgcactcaatattactctcaatttggttaaacagaacttgcaaaaccacagactcgtcctgccttgtttgcagctgttaagagtatactcagccaacagtgttaacagcgttagcctaggaaaaaatggcgttgtcgaactcatgtttaagataataggaccttttagtaaaaaaaattcttccctcataaaggttgccctggataccctggctgcgctgcttaagagtaagaccaacgcgaggcgtgcagtggatcggggctatgtccaggtccttttaacaatttacgtcgattggcatcgccacgacaatcgtcatcgtaacatgctgatcagaaagggcatactacagtccctgaaaagcgttaccaacataaagttggggcgtaaggcattcatcgatgccaacggaatgaagattctttataatacttcccaagagtgtttggctgtgaggaccttggaccccctcgtcaatacctcttcactaataatgcggaagtgcttcccaaagaacaggctccccttacccacaatcaaatcctcatttcactttcagctcccagtgatccccgtaactggaccagtggcacagctgtacagcctccctccagaggtggatgatgtcgtggatgagagcgatgataatgacgatatcgatgtggaggcagaaaatgagactgaaaatgaggatgatctcgaccagaacttcaaaaatgatgacattgagaccgatattaataagttgaaaccgcagcaggagcctggccgcactatcgaggatcttaaaatgtatgaacacttatttcccgaactggtcgacgactttcaggattacgatctgataagcaaggagccaaagcccttcgtatttgagggaaaggttcgtgggcctatcgtggtgccaacagcaggagaggaaacttcgggcaacagtggcaacctacgcaaggttgtgatgaaagagaatatcagcagcaaaggcgacgagggggagaagaagtctactttcatggatctggcaaaggaagatatcaaagacaacgacaggacactccagcaacagcccggcgaccagaatagaactatttcaagtgtgcatggacttaacaacgacattgttaaggccctagaccgcattacattacagaacataccctctcagactgcgcccgggttcactgctgaaatgaagaaagactgttcactgcctctgaccgtcctgacctgtgccaaggcatgtccccacatggcgacttgtggcaatgtgctgtttgagggacgcacggtgcaattgggaaaactctgctgtacaggtgtggaaaccgaagacgatgaagatactgagagcaatagctctgtagaacaggcttcagtggaggtgccagatggcccaacactgcacgatcccgatctgtatatcgaaattgttaagaacaccaagtctgtgcccgagtacagcgaggtggcttaccctgactactttgggcatatccctccaccgtttaaggagcctatcctcgaaagaccatacggtgtgcagcgcacaaaaatcgcacaggacatcgaacgcctcatccatcagagtgacattatagacagagttgtgtatgacctagacaacccgaattatactatccctgaggaaggcgacatccttaaatttaatagcaagtttgaatcaggcaatttgcgcaaagtgatccagattagaaaaaacgaatacgatctcattctcaactcagacattaatagcaaccattaccaccagtggttctactttgaagtgtcgggcatgagacccggggttgcataccgctttaatattatcaactgcgagaaatcgaattcccagtttaattacggcatgcagcccctgatgtactccgttcaagaagccctcaatgctcgcccttggtggatcagaatgggcactgacatctgctattacaaaaatcatttcagcaggtcctccgtggccgcaggaggacagaagggtaaaagttactacaccattaccttcactgtcaactttccccataaagacgatgtgtgttatttcgcttaccactacccttatacctactccacacttcagatgcacctacagaagttggagtctgctcacaacccacagcaaatctatttcagaaaggatgtactgtgtgaaaccctctccggcaattcctgtcctttagtcaccatcactgccatgccagaaagtaattattatgagcacatatgtcactttcggaaccgcccatacgtgttcctaagtgcacgggtccacccaggagagactaatgcctcttgggtcatgaaagggaccctcgaatacctgatgtcaaataatccaactgctcagagcctgcgggagagctatatattcaaaatcgtgccaatgcttaacccggatggtgtgattaacggcaatcaccggtgctccctgagcggcgaagatttgaaccgccagtggcaatctcccagtcccgacttgcatcctacgatctaccacgcaaagggtctgctccaatacctcgctgcagtgaaacgcttgccacttgtttattgcgattaccatgggcacagcagaaaaaaaaacgtcttcatgtacggctgtagcatcaaagaaaccgtgtggcacactaacgataatgctacgagttgcgacgtagtggaagacaccggatatagaacactgcctaagattctctcgcatatagcccctgccttctgtatgtctagctgcagcttcgttgtggaaaaaagcaaggaatccactgcacgcgtcgtggtgtggagggagatcggcgtgcaacgtagctacacaatggaatctacgttgtgtggttgtgatcagggcaagtataaaggccttcaaatcggaacccgggagcttgaagaaatgggggcaaaattttgtgtgggactgctgcggcttaagaggttaacgagcccactggagtataacctcccatctagcttactggactttgaaaacgacctgattgaatcatcatgcaaggttacttcccctaccacctacgtgctagacgaagatgaacctaggttcctggaggaggtggattatagcgcagagtctaatgatgaactggacatcgaactcgccgaaaatgtgggcgactacgagccctccgcccaggaggaagtgcttagtgattctgagctgtccagaacgtatctgccctag

SEQ ID NO: 108924 - DNA, 567 bp, synthetic construct
  misc_feature 1..567: note = Description of Artificial Sequence: Synthetic coding sequence
  source 1..567: mol_type = other DNA
atgactgcaaagggaagtaccgggatggagatcctgctgtctaccctggaaaacactaaagatctccagacgaccctgaatatcttgtcaattcttgtggaactggtaagtgctggagggggcagacgagtgtctttcctggtgaccaaagggggatcgcaaatcctactccagcttctgatgaatgcgtccaaggaatccccgcctcatgaggatctgatggtgcagatccatagtattctcgccaagatcggaccgaaggacaagaagttcggcgtcaaagctcggataaatggggcacttaatattactctcaacctggtgaaacaaaacctgcagaaccataggttagtgctcccttgcttgcagctgctgcgcgtgtattctgccaacagtgtgaatagtgtgagcctgggcaaaaatggcgtcgtggaactcatgtttaaaatcattggcccgttctcgaagaaaaactcaagccttataaaaaataaatgccaagagagctgtaggcagcgcatctgtccatctgcttttaataacctgtgccgactggcgcctccttag

SEQ ID NO: 108925 - DNA, 714 bp, synthetic construct
  misc_feature 1..714: note = Description of Artificial Sequence: Synthetic coding sequence
  source 1..714: mol_type = other DNA
atgtccaagctcaaagtaatccctgaaaagtctctgactaataactcaagaatcgtgggcctcctagctcagctcgagaagatcaacgcagagccttctgagagtgacacagctcgctatgtcacatccaaaatcttacacttagcccagtcccaagagaagacccggcgcgaaatgacagcgaaaggatctaccggaatggaaatcctcttaagtacgttggaaaacactaaggatctgcagacaactcttaacatcctgagcatccttgtggagctggtcagtgccggcggcggaagacgtgtgagctttctggtcacaaaaggggggtctcagatcctgcttcagcttctcatgaatgcttccaaggaatctccacctcatgaggacctcatggtgcagattcacagtatcctggcaaaaatcggcccaaaggataaaaagttcggcgttaaggcccgaatcaacggtgcattgaacattacccttaacctggtaaagcagaacctgcagaaccaccggctggttctcccctgcttacagttgttacgcgtatactctgctaatagtgtgaactccgtcagcctaggaaaaaacggggttgtggaactcatgttcaagatcatcggccctttctctaagaagaacagctcccttattaagaacgtatggcagtctgggctgtggatactactgtccatcccgccggtttag

SEQ ID NO: 108926 - DNA, 3561 bp, synthetic construct
  misc_feature 1..3561: note = Description of Artificial Sequence: Synthetic coding sequence
  source 1..3561: mol_type = other DNA
atgagtaagctgaaagtgattcccgagaagtccctcacaaacaactctcgcattgtcggattgttagcccagcttgagaaaatcaacgctgagccgtcggaatcagacactgcccggtacgtgacatcaaagatactgcaccttgctcagagtcaagaaaagacgcgacgagaaatgacagccaaaggctcaaccgggatggagatccttctctccacgctggagaatactaaagacttacagacaacccttaatatattgagcatcttagtggagctggtgtccgccggaggcggacgcagggtcagcttccttgtgaccaagggagggtcccagatcctcctgcagctgctgatgaatgcatcgaaggaaagccccccacacgaagacttgatggtgcagatccactccatcctggctaagattgggcctaaagacaagaaatttggggtgaaggcccgcataaacggtgccctgaacatcacccttaacctggtcaaacagaacctgcagaaccatcgccttgtgctgccgtgtctgcagctgctcagagtgtattccgcgaacagtgttaactctgtgtccttgggaaaaaatggggtcgtagagctgatgttcaagatcatcggcccatttagtaaaaaaaattcctctttgatcaaagttgccctggataccttagccgccctgctgaaaagcaaaaccaacgctagaagagcagtcgaccgcggatacgttcaggtgctgttgactatttacgtagattggcataggcatgacaataggcaccggaatatgcttattaggaaggggatactgcagtccctgaagtctgtcaccaacatcaagctggggaggaaagcattcatcgacgccaatggaatgaaaatcctctataatacatcacagctcccggtgatccctgtgaccggtcccgtcgctcagctctattcccttccccctgaggtcgacgatgtcgtggatgagagcgatgataatgatgacattgacgtcgaggccgaaaatgaaaccgaaaacgaagatgacctcgatcagaactttaagaacgacgatatcgagaccgatatcaacaaactcaaacctcaacaggagcctggacgcacgatcgaggatctaaagatgtacgaacacctcttcccagaactggtggacgacttccaggattatgaccttatcagcaaagaacccaaaccattcgtcttcgaaggtaaggtgagagggcccatcgttgttccgacagccggggaggaaactagcgggaactcaggaaatcttagaaaggtggtaatgaaggagaacattagctccaagggagacgaaggcgagaaaaaaagtacatttatggacctcgccaaagaagacataaaggataacgacaggactctgcagcagcagcctggcgaccagaatcgcaccatttcctctgtgcacggactgaacaatgacatcgttaaagcattggaccgcatcaccttgcaaaatatcccatcccaaacggccccagggtttacagctgaaatgaaaaaggattgttccctcccgcttactgttttaacttgcgccaaggcctgtccccacatggccacctgcggaaacgtgttattcgagggccgaaccgtgcagctgggtaagttatgctgtaccggggtagaaaccgaagatgatgaagatacggaaagcaactcttcagtcgagcaagcctccgtggaagtgcccgatgggcctaccctgcatgatcccgatttgtacattgagattgttaagaatacaaaatctgtccctgagtacagcgaggtggcctaccctgactactttggccacatacccccaccttttaaggagcccattctggagagaccatacggtgtgcaacgcaccaagatagctcaggatattgagcgactcatacatcaatcggacatcatcgaccgtgtagtctacgatctcgataaccccaactatacaattcctgaggaaggcgacatcctcaagtttaatagtaagttcgagtcgggcaacctgagaaaggtcatacagatacgtaaaaacgaatacgacctaatcttgaactcagatattaacagtaaccactatcaccaatggttctactttgaggtttctggtatgagacctggagtggcttaccgttttaacataatcaattgtgagaaatccaactcacagttcaattacgggatgcagcccttgatgtatagtgtccaggaagcactgaatgcacggccatggtggatcaggatgggaaccgacatctgctactacaaaaaccacttttcacgaagctcagtggccgctggcggtcagaagggcaaatcatactataccatcacatttaccgtgaattttcctcacaaagatgatgtatgttactttgcctaccattacccttatacctactctacactgcagatgcacctacagaagctagaatccgctcacaatcctcagcagatctactttcgcaaagacgtgctgtgtgaaacactgagtgggaactcttgtccccttgtgaccataactgcaatgcccgagtcaaattactatgaacacatctgtcactttcggaacagaccttacgtgttcttgtcggctcgtgttcacccaggggagaccaatgcgagctgggtgatgaagggaactctggagtacctgatgtccaacaatcccactgcacaatcccttagagaatcgtatatttttaaaatagtacccatgctaaatccagacggagtgattaatggcaatcaccgctgcagcctgtccggcgaagacctgaatcgccagtggcagtccccatcccccgacttgcacccaaccatctaccatgcaaaaggactacttcagtatttagctgctgtcaaaagattacccctggtgtactgtgattatcatgggcactccaggaagaaaaacgtttttatgtacggctgctctatcaaggagactgtttggcataccaatgataacgccacctcttgtgatgtggttgaagacactggttaccggactctgcccaaaatcctgagccacatagctcctgctttctgtatgtcctcctgttcattcgtcgtggaaaagtccaaggaatccaccgctcgcgttgtagtttggcgggaaattggagtccagagatcctacaccatggaaagcaccttatgcggctgcgaccaaggtaaatacaagggtctgcagatcgggacacgcgagcttgaggagatgggggcaaagttctgcgtaggtctactgcgcctcaagcgtcttacctctcccctcgagtacaatcttccgagctcactcctcgactttgaaaacgatctgattgagagttcctgtaaagtgacgtcccccacaacatatgtacttgacgaggacgaacctaggtttctagaggaagtggactacagtgcggagtctaacgacgagctcgacattgaactcgccgaaaatgtgggtgactacgaaccttctgcccaagaagaagtgttgtccgactctgagctaagtcgcacttatctaccatag

SEQ ID NO: 108927 - DNA, 3717 bp, synthetic construct
  misc_feature 1..3717: note = Description of Artificial Sequence: Synthetic coding sequence
  source 1..3717: mol_type = other DNA
atgcggacaggtagcgcagcctctagcgcagctgcagctgctgccgcagcagcggcaagcgcctcacctgctacgggtgtctgtatgaaaaccccaggaggcggccgaaggggaattcggcgcgacccaggggccgaaccaggcgcagcagcactgcggggccccagacagaggcccatcctttcacgcctaaccaacaattctagaatagtgggtcttctggcccaacttgagaaaattaatgcggagccctccgagagtgatactgcacgatacgtgacctccaagatcctccacctagctcagtcccaggagaagacgcgccgagagatgacagcgaaggggtcaactggaatggaaattttgctgtcgacgctggagaacacaaaagatctgcagaccacactgaatatactctcgatcctggttgagcttgtgtctgccggtggcggcaggcgcgtttcctttctcgtcactaaagggggtagccagatactgcttcaactactgatgaatgcgagcaaggaatcccccccacatgaggacctcatggtccagattcactctattctagcgaaaattgggcctaaggacaagaagtttggagtaaaggcccgcatcaacggcgccctaaacatcaccctcaacctagtgaagcagaacctccagaaccataggctcgtgctaccctgtttgcagcttttacgagtctattctgctaacagcgtgaattcggtgtcgttgggcaaaaatggcgtggtcgaattaatgttcaaaatcatcggcccctttagcaaaaagaattcatccttaattaaagtggctttagacacactggccgctctgctgaaaagtaagaccaacgcccgacgggcagtcgacagagggtatgtgcaggtcctcctcacgatatacgtggactggcacaggcatgacaatagacaccgcaacatgttgatcagaaaaggtattctccagtcccttaagtctgtcacaaatatcaaactcgggcgaaaagcttttatcgatgctaacggcatgaagatactgtataatacgagtcagctgcccgtgattccagttactggtcctgtggcacaactttactctctgccacccgaggtggatgatgtggtggatgagagtgatgataacgatgatattgatgtggaggcggagaatgagactgagaatgaagatgatctggaccagaacttcaagaatgacgatatcgaaaccgacatcaacaaactgaagcctcaacaggaaccgggaaggactattgaagatctcaagatgtacgaacacctgttccccgagctcgtggatgactttcaagactatgatctgatctctaaggaacccaagcctttcgtgtttgaaggaaaggtacggggacccattgttgttcctaccgcaggagaggagaccagcggaaattccgggaaccttaggaaagtggttatgaaggagaacatctctagcaagggcgacgagggagagaagaaatcaactttcatggatcttgccaaggaggacatcaaggacaacgatagaacacttcagcaacaacccggcgaccaaaataggaccatcagctccgttcatggtctgaataacgacatcgtcaaggcacttgatcgcatcaccctccagaacataccatcccagacagcacccggatttaccgctgagatgaagaaggactgcagcttgccgttaacagttttgacttgcgccaaggcttgtccccacatggctacatgtggcaatgtcctgtttgagggacggacagtccaactgggtaagttatgctgtacaggagtcgagactgaagacgatgaagataccgagtctaacagttctgttgagcaggccagcgtagaagtgcctgatggccctaccctccacgacccagacctatacatcgaaattgtgaaaaataccaaatccgtgcccgagtattcagaagtggcctacccagactacttcggacacatacctcctccgtttaaggaacccattctggaacgtccatatggcgtgcaacgcaccaagatcgctcaagatattgagcgattgattcaccagtccgatattatcgatcgggtagtttacgacttggacaatcctaattacaccatcccggaggagggagacatcctgaaattcaattctaagttcgagtcaggcaatcttagaaaggtaattcagattaggaaaaatgaatacgacttgatcctaaattccgatattaactcaaaccactaccaccagtggttctacttcgaagtgtcagggatgcggcccggtgttgcttaccggttcaacatcataaattgcgaaaagtctaacagtcagttcaactacggtatgcagccactgatgtactccgtacaagaagctcttaatgctcgaccctggtggattaggatgggcacggatatctgttattataagaatcatttctcaaggtcctcagtggccgcaggtggacaaaaggggaaaagttattacacaatcacctttacggtgaacttcccccacaaagacgatgtgtgctactttgcataccactacccgtacacctatagcacgctccagatgcatctccagaaacttgagtccgcccataaccctcagcagatatacttcagaaaggacgttttgtgtgagactctcagcggtaactcgtgtcctctcgtgaccataaccgccatgccagaaagcaactactatgaacatatttgccacttccggaacaggccttacgttttcctgtctgccagggtccaccccggagaaacaaatgcatcgtgggttatgaagggcactttggaatatctgatgagcaataaccccactgcccagagcctgcgtgaaagttacatctttaaaattgtgcccatgttgaatccggacggcgtgatcaatggcaaccacagatgcagtctgagcggagaggacctgaatcgccaatggcaatcccctagccccgacctgcacccaaccatctatcacgcgaaagggctgctccaataccttgctgcggtcaagcgccttcccctggtttactgcgattaccacggacacagcagaaaaaaaaatgtcttcatgtatgggtgttctatcaaggagaccgtctggcataccaacgataatgccacttcatgcgacgtggtagaggacaccggttaccggaccctccctaagattctgagccacattgcccccgccttctgtatgagttcatgttctttcgttgtggagaagtccaaagagagtacagcccgcgtggtagtgtggagggagatcggggtgcagagatcttacaccatggagtctactctgtgtggttgcgatcaagggaagtacaagggccttcagatcggcactcgcgagctggaggaaatgggtgcaaaattctgtgtgggcctcctgcgcctgaaacgcttaacatcgcctctcgagtataacctaccgtcttctctgctagactttgaaaatgacctgatcgaatctagctgtaaggtgacgagtccgactacctacgtcctcgacgaagacgagcctcgctttctggaggaggtcgactattccgcagagagtaatgatgagctcgatattgagctggctgagaatgtgggtgattacgagccctctgcccaagaagaggttctcagtgattccgagctttcccgcacctacttgccctag

SEQ ID NO: 108928 - DNA, 1932 bp, synthetic construct
  misc_feature 1..1932: note = Description of Artificial Sequence: Synthetic coding sequence
  source 1..1932: mol_type = other DNA
atgaatgcctctaaggagtcccccccgcacgaagatttgatggtgcagatccacagtatcctggcaaaaatcggtccaaaagcagtgaatagcgtgtctctgggaaagaacggcgtcgtcgaactaatgttcaagattattggcccattttcgaagaaaaactcatcattgatcaaggtggccctggacacactcgccgcacttctaaagtcaaaaactaacgcaaggagagctgttgaccgtggctacgtgcaggtgttgttgacaatctatgtagactggcaccgccatgacaacaggcacaggaacatgcttattaggaagggcatcctccagtccctgaagagcgtcacgaacatcaagctgggccgtaaagccttcatcgacgcaaatggcatgaaaatcttatataacacaagtcaagagtgtcttgcagtcagaactttggaccctctggtgaacacgtcttccctgatcatgcgaaaatgtttccccaaaaaccgcctccccctgccaaccatcaaatcctctttccatttccagctgcccgttatccctgttacagggccggtggcacagctctacagtctgcctcccgaagtggacgacgttgttgatgagtctgatgataatgatgatatcgacgttgaagccgagaatgaaaccgagaacgaggacgatctagatcagaattttaagaatgacgacatcgaaaccgacatcaacaagctgaaaccacagcaggagcccggccgaacaattgaagacttaaagatgtacgaacatcttttcccagagcttgttgatgacttccaggattatgatcttattagcaaagagccaaaacctttcgtgttcgagggaaaagtaagaggtccgattgtggtgcctacagccggtgaggagacgtcgggcaattcgggaaacctgagaaaagttgtgatgaaggaaaacatctccagtaagggtgatgagggagagaagaagtccaccttcatggatctggctaaggaggacatcaaggataacgacagaacactgcaacaacaacctggggatcagaaccggacaatttccagcgtgcatggcttgaataacgacattgttaaagcacttgatcgcattacactgcaaaacatcccatcacagactgccccaggattcaccgctgaaatgaaaaaagactgttctctgccactgacggtgcttacatgtgcgaaggcctgcccccacatggctacctgtggaaatgtgctgttcgagggcaggacagtgcagctcggcaaattgtgctgtaccggtgtggagactgaagacgatgaagacacagaatcaaatagctctgtggagcaggcatccgtagaagtgccagatggtccgactctgcacgatcctgacctgtacatcgagatagtaaagaatacaaaatcagtgccagagtacagtgaagtagcctaccccgattacttcggccacattccaccacccttcaaagaaccaatccttgagcgcccttacggcgttcaacgcaccaagatcgcacaagatattgaacggctcatacaccaatcagacatcatcgatagggtggtgtatgatctggacaacccaaattataccattcccgaagagggcgatattctaaagttcaatagtaagttcgaaagcggaaacctccggaaagttatccagataagaaagaacgagtatgaccttattttaaatagtgacatcaatagtaaccactaccatcaatggttctattttgaagtttcaggtatgcggcccggtgtggcctataggtttaatatcattaactgtgagaagtctaactcgcagtttaattacgcgctgccacttatgtcctggatgaagatgaaccttgattcgctcaagaagctcattaccgtgcagaaagtaatgatgagctag

SEQ ID NO: 108929 - DNA, 1086 bp, synthetic construct
  misc_feature 1..1086: note = Description of Artificial Sequence: Synthetic coding sequence
  source 1..1086: mol_type = other DNA
atggtccacgcagaggccttctctcggcccttatcccggaacgaggtcgtaggcctgatctttaggttgactatatttggcgccgtgacatacttcaccattaaatggatggtcgacgctatcgatcccacgagaaagcagaaagtggaagcacaaaaacaggccgagaaactgatgaaacaaatcggcgtgaaaaatgtcaagctgtccgaatacgagatgtccattgctgcacatttggttgatcctcttaatatgcacgtgacatggagcgacatagctggtctggatgacgtcattaccgaccttaaggatacagtgattctcccgataaagaaaaagcatcttttcgaaaattcacgcctcctgcaacccccgaaaggcgtgttactctacgggcctccaggatgtgggaaaacactcatcgctaaggcaacagctaaggaagccggttgtcgcttcataaacctccagccctctacccttactgacaagtggtatggcgagtcacagaaattagccgcagccgtattttccctggccattaaactccagccatctatcatatttattgacgaaattgactctttcctgaggaaccgttccagttcggaccatgaggcaacggcaatgatgaaggcccaattcatgtctctatgggatggacttgacactgaccattcttgtcaggtcatcgtgatgggagccactaaccgacctcaggatctggattctgccataatgaggcggatgcctaccagattccatatcaatcagcctgccctgaagcagcgagaggccatactgaaattaattttgaagaatgagaatgtggaccggcatgtggatctcctggaggtagcgcaagagaccgacggtttctctggctctgacctcaaggagatgtgtagagatgccgcactcctgtgcgttagagaatacgtaaactctacctcggaggagtcacatgatgaggatgaaatccggccggtgcagcagcaagacttacacagagctattgagaaaatgaaaaagagcaaagatgcggcatttcagaacgtgctgacccatgtatgtctcgattag

SEQ ID NO: 108930 - DNA, 1086 bp, synthetic construct
  misc_feature 1..1086: note = Description of Artificial Sequence: Synthetic coding sequence
  source 1..1086: mol_type = other DNA
atggtacacgctgaagcttttagccgcccactgtcccggaacgaagtagtgggattaatatttagactgactattttcggcgctgtaacatacttcacaatcaaatggatggttgacgccatcgacccaacccgtaaacagaaagtcgaggcacagaagcaggctgaaaagttgatgaagcagatcggcgtgaaaaacgtcaagctcagcgaatacgaaatgagtatagcagcacacctcgtggacccactcaacatgcatgttacttggtctgatattgccggcttggatgacgtaataacagacctcaaggacaccgttattttacccattaagaagaagcacctcttcgaaaatagccggctgttgcaaccccccaagggtgtcctcctgtacgggccccccggttgcgggaaaacccttattgccaaggccaccgcaaaagaagcgggatgcaggttcatcaacctgcagccctcgactctgactgacaagtggtacggggagagccaaaagttagccgccgcagtgttcagcctagccatcaaattgcaaccaagcatcatcttcatcgacgagatcgacagcttccttagaaatagaagttcatccgatcatgaggcaaccgcgatgatgaaagcacagttcatgtccctctgggacggtttggacaccgatcatagttgtcaggtcatcgtgatgggagctactaatcgaccccaggacctggacagtgcaatcatgcggagaatgccaacgagatttcacatcaaccagcccgcccttaaacagagagaggctatactgaaattaattttgaagaacgaaaacgttgacaggcacgtagacctgcttgaggtggcccaggaaacagacgggttcagtggaagtgatttgaaggagatgtgtcgtgatgctgctttactatgcgtgcgtgaatatgtgaattcaacatccgaggagagtcatgatgaagatgaaataaggcccgttcagcagcaagacctccaccgcgcaatcgagaagatgaagaagtcaaaagacgccgcgtttcaaaatgttctgacccatgtgtgtctggactag

SEQ ID NO: 108931 - DNA, 822 bp, synthetic construct
  misc_feature 1..822: note = Description of Artificial Sequence: Synthetic coding sequence
  source 1..822: mol_type = other DNA
atgaaacaaattggcgtcaagaacgtaaaacttagcgagtatgaaatgagcattgcagcccacctggttgatccattgaacatgcatgtgacgtggtccgacatcgctggactggatgacgtgattaccgatttaaaagatactgttattctcccaatcaaaaaaaagcacctgttcgaaaactcacgcctgctccagccaccaaaaggagtccttttgtacggcccccctggctgcggtaaaacattgatcgctaaagctaccgccaaagaggccgggtgccgatttattaatctccagcccagtacgctgacggataaatggtacggggaatcacagaagctcgcagctgcggtgttttcactcgccattaagctccagccatccatcatcttcatagacgagatcgattcctttctgaggaataggtcctctagtgaccatgaagcaaccgctatgatgaaggcacagtttatgagtctgtgggacggacttgatactgaccacagctgccaggctttaaagcaaagagaagccattttaaagttgatccttaagaacgaaaacgttgacaggcacgtggatctcctggaggtagcccaggagacggatggcttttccggcagcgacctcaaagagatgtgtcgcgatgccgcgctcttgtgcgttcgcgaatacgtgaattccacgtccgaggaatcgcatgatgaggatgaaatccggccggtgcagcagcaggacctgcacagggcaatcgaaaaaatgaagaaatctaaggacgctgctttccaaaatgtactgacacacgtctgtctggattag

SEQ ID NO: 108932 - DNA, 864 bp, synthetic construct
  misc_feature 1..864: note = Description of Artificial Sequence: Synthetic coding sequence
  source 1..864: mol_type = other DNA
atggtccacgccgaggccttttcaaggcccctttcgagaaatgaagtggttgggttgatctttaggctcactatcttcggagctgtgacgtacttcaccattaaatggatggtcgatgccattgatccgacacggaagcagaaagtggaggcacagaagcaggccgagaagctgatgaaacagataggcgtaaaaaacgtgaaattgagcgagtatgagatgtcaattgcagctcatctcgtcgatcccctgaatatgcacgtcacctggtcagacattgcaggtctcgacgatgtaatcaccgacctgaaagatacggttattctgccaatcaaaaagaagcatctgttcgagaactccaggctcctccagccccccaagggcgtgctgctatacggacctccagggtgtggcaaaacattgattgccaaggccaccgccaaagaagctggctgtagatttataaatttgcagccaagcactttgacagacaagtggtacggggagagtcagaagttagccgcagccgtcttctcgctggctattaagctgcagccgtctattattttcattgacgagattgactcattcctcagaaaccgctcttccagtgatcacgaggcgaccgctatgatgaaggctcagttcatgtccctgtgggacggccttgacaccgaccacagttgccaggtgattgtgatgggggccacaaacagacctcaggacttggattccgctatcatgagaaggatgcccacacgtttccatattaaccaacctgcactgaaacagcgcgaggctatccttaaactcattctcaagaacgaaaatctgagaaagctcaagcctagagaggttctttag

SEQ ID NO: 108933 - DNA, 4173 bp, synthetic construct
  misc_feature 1..4173: note = Description of Artificial Sequence: Synthetic coding sequence
  source 1..4173: mol_type = other DNA
atggtagtgctgagatcatcacttgaactgcacaaccattcagccgcatcagctactggatccttggatctgtcttctgactttctctccctggaacatattggacgccgacggctccgcagcgccggcgccgcccagaagaagcccgccgcaacaactgctaaggcaggggacggcagcagcgttaaagaagtcgaaacctatcaccgaactcgggccctgcgtagcttgcgcaaggacgcgcagaatagttctgattctagctttgaaaagaacgtggagatcactgaacaactggccaacgggcggcactttacacgtcaactggcccggcaacaggctgacaaaaagaaagaggagcacagggaagacaaggtcattcccgtgacaaggtccttgcgagctaggaacatagtccagtctactgagcacctacacgaagacaacggtgatgtggaggtgcggcgtagctgtcgtatcagaagtagatacagtggcgtaaatcagagtatgttatttgataagcttattaccaataccgcagaggctgtgctccaaaagatggacgacatgaaaaaaatgagaagacagaggatgcgtgaacttgaggatttaggcgtctttaatgaaaccgaagaaagcaatctgaacatgtacactcggggaaaacagaaggatatacagcgcaccgacgaggagaccacagataaccaggaaggatccgtagagtctagcgaagaaggagaggaccaggagcacgaggatgacggtgaagacgaggatgatgaggatgacgatgacgatgatgacgacgatgacgacgacgatgacgaagacgatgaggacgaagaggatggcgaggaggagaatcagaagcgatactacctgcggcaacggaaagcgactgtctattatcaggctccgctggagaagccaagacaccaaagaaaacccaacatcttttactctggccccgcttctccagcacgaccccgttacaggctaagtagcgccgggccccgatccccgtactgcaaacgcatgaatcgtaggcggcacgccatccattccagtgatagcaccagtagcagctcctctgaggacgaacaacacttcgagcgcagacgtaaaagatcccgtaacagggccatcaaccgatgtttaccgttgaacttccgcaaggatgaattaaaaggaatctacaaagatcgtatgaaaattggcgctagtctggccgatgtcgatccgatgcaacttgattcttctgtgcgcttcgactccgtcggcggattgtccaaccatatcgcagcactgaaggagatggttgtgtttccgctgttatatcctgaggtgttcgagaagtttaaaattcagcccccgagaggctgcctgttctacgggccccccgggaccggcaaaaccctggtggcccgcgcgctggccaacgagtgctctcagggcgacaagagagtcgcattcttcatgagaaaaggcgctgactgtttgtccaagtgggtgggcgagagcgagcgacaactgcggctgctgttcgatcaggcgtaccaaatgagaccatccatcatctttttcgacgagatcgacggacttgcccctgtaaggtcatccaggcaggatcagattcactcttccattgtgagcactttgctcgcactgatggacggcttagactcacgcggtgagatagttgtgatcggcgccacaaatcgcctagacagtatcgatccagctttgagacgacctggacgattcgaccgagaattcttattctcgttgccggataaagaggcccggaaggagatccttaagatccatacacgtgattggaatccgaaacctctcgatacgtttctggaggagcttgcagagaattgcgtgggctactgtggggctgacatcaagtctatctgtgccgaggctgcactttgcgcgctgcgtcgccgatatcctcagatctataccacgtctgaaaagctgcagctcgacctatccagcatcaacatcagcgccaaagacttcgaagttgcgatgcagaaaatgatacctgccagccaacgcgccgtgacctcgccgggacaagccctgtccacagtcgtgaagcccttgctgcagaataccgtggacaaaattttagaggcattgcagcgtgtgtttccccacgctgagtttcggacgaataagacattggactctgacattagctgtccactcctggaatccgatttggcctactccgacgatgatgtacccagcgtgtacgagaatggactgtcacagaaaagttcccataaagctaaagacaatttcaacttcctgcacctaaacagaaatgcctgctaccagcccatgtcctttcgcccaaggatattgatcgtcggtgaaccaggatttggccaggggtcccacctggcccctgcggtcatccatgcattggaaaaattcaccgtgtacacgctggatatcccggtgcttttcggggtgtccacaacgtctcctgaagagacgtgcgctcaggtgatcagggaggccaagaggaccgctcctagcatagtttacgtgcctcatatccacgtttggtgggaaatcgttggcccaaccctgaaggctacgttcacgaccctcctccagaacataccatccttcgcgcctgtccttctcctggccacctcagataaaccacacagtgcccttcctgaggaagtgcaggaactcttcattcgggactatggtgagatctttaacgtccagttgccagataaggaggaaagaactaagttcttcgaggacctcatcctcaagcaagcagctaaaccaccaatatcaaagaaaaaggcggtgctccaggccttagaggtcctgccagtcgcacctcctccggaaccgcggtcactgactgccgaggaagttaagagactcgaggagcaggaagaggacacgtttagagagctgcggatctttctccgaaacgtcacccatcgactggctatagataagagattcagagttttcacgaagccagtagatcctgacgaagttcccgactacgtaaccgtcattaaacagcccatggacttatcttccgtgataagcaaaattgacctccataagtaccttacagttaaagactacctccgggatattgacctgatctgcagtaacgcgctggaatacaatccagatcgggatccaggggaccggctgattcgccatagagcttgtgcgctgcgcgacaccgcctatgccatcatcaaagaggagctggatgaggactttgagcagctgtgcgaggaaatccaggagtctcgaaagaagagaggctgttcttcaagcaaatacgccccttcatactaccatgtaatgcctaagcagaattcgacactcgtgggggacaagaggagcgaccctgagcagaacgaaaagttgaaaaccccaagcacaccagtcgcttgcagcacacccgcacagctgaaacgtaagattagaaaaaagagtaattggtatctcggaacaatcaagaagcgccgaaaaatttctcaggcaaaggatgacagtcaaaacgctatcgaccacaaaatagaatccgataccgaagaaacccaggacaccagcgtagaccataatgagacaggaaacaccggtgagtccagcgttgaagagaatgagaagcaacaaaatgcatctgaatcaaagctcgagttacggaacaattcaaacacttgtaatatcgaaaatgagcttgaggatagtcggaaaaccaccgcttgtactgaactccgggataagatcgcttgtaacggagacgcctcaagctctcagatcatccacattagcgatgagaacgagggcaaggaaatgtgcgtcctgaggatgacacgggcccgacgaagtcaggttgagcagcaacagctgatcactgttgaaaaggctctggccatcctgagccagcccacgccttcattagtggtggatcatgaacggttgaaaaacttgttgaagaccgtcgtcaaaaaaagccagaactataacatttttcaattagagaatctgtacgccgtgatatcacagtgcatctacagacatagaaaggaccatgacaaaactagcctcatacagaaaatggagcaagaggtcgaaaatttttcgtgtagtaggtag

SEQ ID NO: 108934 - DNA, 1719 bp, synthetic construct
  misc_feature 1..1719: note = Description of Artificial Sequence: Synthetic coding sequence
  source 1..1719: mol_type = other DNA
tgaggtgcattagcactagcggccccaaggcgttgccgccaaccactacctgggcgcgattgtgctcccggggctccgcctgccggcgctgtttctcgagccgggcgcattggcttgttccctagtccagtctgcacaagcgcagccgttagatccggttccggttacgccaaggacgccctgaacctagcacagatgcaggaacagaccttacaactggaacaacaaagcaagcttaaagaatacgaagccgcggtggagcagctcaagtcggagcagattagagcccaggctgaagagaggcggaagactctctccgaggaaaccaggcagcaccaggccagggcccagtaccaggacaagctggctcggcagcggtacgaggatcagttaaagcaacagcagctactgaacgaagagaatctccggaaacaagaggaatccgtgcagaaacaggaagccatgaggcgtgccacagtcgaaagggagatggaactccgacataagaacgagatgctgcgagttgaggctgaggccagggcccgggcgaaggcggaacgggagaacgccgatatcattcgagagcagatccgcctgaaggcagccgagcaccgccaaactgtactggagagcatccgcacagccggtaccttatttggggaagggtttcgcgcttttgtgaccgactgggataaagtcaccgcaacggttgccgggctgaccctgctggccgtgggcgtgtacagtgctaagaacgcaactttggtagctggtagattcattgaagccagactaggaaaaccctctcttgtccgagagacatcccgtattacggtcctcgaggcactgagacacccaatccaggtgagccgccgattgctgagcaggcctcaggatgcactcgagggggtggtgttgagccctagtctggaagctagagtgcgggatattgccatcgccacgaggaacacaaagaagaataggtcactgtacagaaatatcctcatgtatggccctcctggaaccggaaaaaccttgtttgcaaaaaaactcgccctgcactctggcatggactacgccatcatgacgggaggggacgtggctccaatggggagggagggcgtaaccgcaatgcataaattgttcgattgggcgaacacatccaggcgaggcctgctactattcgtcgatgaggctgacgcttttcttaggaaacgggccactgaaaaaatcagcgaagatcttagggccacgctgaatgcattcttgtaccgaactggccaacattccaataagtttatgctggtgcttgcctcaaaccagcctgaacagtttgactgggcaattaacgatcgcataaatgagatggtacactttgacctccccggtcaagaggaacgagagagactcgttcggatgtacttcgataagtacgtccttaagcctgccacggaagggaaacagcggctaaaactagcccagttcgactatgggcgaaaatgttccgaggtagccaggttgaccgagggaatgtctggccgcgagatcgctcagctggctgtgagctggcaggccacagcttacgcttctgaagatggggtgctcaccgaagcaatgatggatacacgcgtgcaggacgccgtgcagcaacatcagcagaagatgtgctggcttaaggctgaaggacctggccggggtgacgagccaagcccttcctag

SEQ ID NO: 108935 - DNA, 1905 bp, synthetic construct
  misc_feature 1..1905: note = Description of Artificial Sequence: Synthetic coding sequence
  source 1..1905: mol_type = other DNA
atgagctggctctttgggattaataaggggcctaaaggtgaaggggccgggccacccccacccctgccgcccgcccagcccggcgccgaagggggcggggatcgaggcctaggggaccgccccgcccctaaggacaagtggagtaatttcgacccgacagggctggagcgcgccgcaaaagccgcccgggagctggagcacagtcggtacgcgaaggacgcactcaatctggcccagatgcaggagcaaacccttcagctcgaacaacagagcaagctgaagatgcggttagaagccttaagtctccttcacacgctcgtttgggcctggagtctctgtcgtgctggcgccgtacaaactcaagagagactttcaggttccgcttcacctgagcaagtacccgccggggagtgttgtgcactgcaagaatacgaggcagcggtggagcagctgaagtctgagcagattcgtgcacaagccgaagaacgccgaaagacccttagtgaagagacgcggcaacatcaggccagagcccagtatcaggacaagctggcccggcagaggtacgaggaccagctgaaacagcagcagctcctcaacgaggaaaacctgcgtaagcaagaagagagcgtgcagaagcaagaggccatgagaagggccaccgtggaaagggaaatggaactcaggcacaagaacgagatgctccgggttgaagcagaagcaagggctcgagcaaaggcagagcgagaaaatgccgacatcattagggaacagattcgtcttaaggccgccgaacataggcagaccgtgcttgagtccatcagaaccgcaggaaccctgtttggcgaaggtttcagagcttttgtgacagactgggacaaggtgaccgcaactgtggcagggttaaccttgctcgcagtgggggtgtattctgccaaaaatgctactttggttgccggtaggttcattgaggcccgtctgggtaagccctcactcgtgagagagacatcaagaattactgtcctggaagctctccgccatcctatccaggtgtcccgccggctgctcagtcgccctcaagacgcgctcgagggggtcgtcctcagcccatctctggaggctcgcgttcgagacatcgccatagctactcgcaacaccaaaaagaaccggtcgctgtacaggaatatacttatgtacggaccccctggtaccgggaaaacactctttgctaaaaaattggcactgcatagcgggatggattatgctatcatgactggtggagatgtggcaccgatgggaagggaaggcgtcaccgccatgcataagctgtttgattgggctaacacctctagaagaggccttctcctctttgtcgatgaggccgatgcattcctgaggaagcgggcaaccgagaagatctcggaagacctccgggccacattgaacgcctttttgtatcgaacaggacaacatagcaataagttcatgttagtgctggcttccaaccaaccagagcagtttgattgggcaatcaatgatcgcattaacgagatggtgcacttcgacctcccaggccaggaggaacgcgaaagactcgtaaggatgtactttgataagtacgttttgaaacctgccacagaaggtaagcaacgcctcaaacttgcacaatttgactatggacgtaagtgctctgaagtcgctcgactcacagagggaatgtcgggaagagaaatcgcgcagcttgctgtgtcatggcaggccaccgcctatgcaagtgaagatggggtgctgaccgaggctatgatggacacccgcgttcaggacgcggtccaacagcaccagcagaagatgtgttggttgaaggcggagggtcctggccggggcgacgaaccttcaccgagttag

SEQ ID NO: 108936 - DNA, 1761 bp, synthetic construct
  misc_feature 1..1761: note = Description of Artificial Sequence: Synthetic coding sequence
  source 1..1761: mol_type = other DNA
atgagttggctgttcggtattaataagggcccaaagggagaaggggcaggtcctccgccacccctcccccctgcccaaccaggggctgagggtggcggagatcgtggtctcggcgaccggcccgccccaaaggacaagtggagcaacttcgaccctacaggcctggagagagccgcgaaagccgctagagagctggagcactcccgctatgctaaagatgccttgaacctggctcagatgcaagaacagaccttgcaactcgagcagcagagcaaactgaaagagtatgaagccgcagttgaacaattgaagagcgagcagatccgtgctcaggctgaggaacgcagaaagaccctcagtgaggagacgcgccaacatcaagcacgcgcccagtaccaagataaactagcccggcaacgatacgaggatcaactcaaacaacagcagctcctgaacgaagaaaatcttagaaagcaagaagagagtgtgcaaaagcaggaagcaatgaggagggccaccgtggaacgcgaaatggagctgcgccacaagaacgagatgctcagggtggaggccgaggcaagggccagagccaaagctgaacgcgagaacgccgacatcatcagagagcaaatccggctgaaagcggccgaacacaggcaaaccgtcttggaaagtattaggaccgcagggaccctttttggagagggctttcgggccttcgtgaccgactgggataaagtgacggctacggtggcggggctcactctgctggccgtgggtgtttactctgcaaaaaatgcaacacttgtggcaggtagattcatagaagctagattaggcaaaccctctctggtaagggagacttcaagaattactgtacttgaagccctgcgccacccgattcaggtctcacggaggttactgtctcgcccccaggacgctctcgaaggtgtcgtcttatcaccctcccttgaggctcgggttcgcgatatcgccattgctacgcgtaacactaagaagaaccgatccctgtacaggaatatactcatgtatggccccccaggcaccgggaagactttatttgccaaaaagctggcactccacagtggaatggactacgccatcatgacaggcggcgacgttgcacccatggggcgcgagggggtcactgctatgcacaagctgtttgattgggccaatacatcgcggagaggccttctcttgttcgtggacgaggcggacgcgtttttgcggaaaagggccaccgagaaaatatccgaagacctgcgcgccactctgaatgcctttctgtacagaacgggacagcactcaaacaagttcatgcttgtcttagccagtaatcagcctgagcagtttgactgggctatcaacgaccggatcaacgagatggtgcattttgatctccctggccaagaggagcgggagcgcctagtgagaatgtacttcgataaatatgtgctcaagccagcaacggaagggaaacaaaggcttaagctggcacagtttgattatggtagaaaatgttccgaggtggccagattgaccgaggggatgagtgggagggaaatcgctcagttggccgtgagctggcaggccaccgcttacgccagcgaggatggtgtgctgactgaagcaatgatggatacgcgagttcaggatgcagtgcagcagcatcaacagaaaatgtgctggctcaaggccgaggggcccggcagaggggatgagcccagtccaagctag

SEQ ID NO: 108937 - DNA, 792 bp, synthetic construct
  misc_feature 1..792: note = Description of Artificial Sequence: Synthetic coding sequence
  source 1..792: mol_type = other DNA
atgtacggtccacccggaacgggcaagacgctattcgcaaaaaagctggccttgcatagtggaatggattacgctatcatgacggggggcgatgttgccccaatgggacgtgagggggttacggccatgcacaagcttttcgattgggccaacacgagccgccgagggctgcttctgttcgtcgatgaggcagatgcctttctgcggaagcgcgcaactgaaaagatttctgaggacctccgagcaaccctgaacgctttcctgtacagaacgggacagcacagtaataatccaagccacgtctctcacgggggttcctctcccgctggacgcccttggctgactccccaggcccgatgggctcccagattcatgctggttttggcctctaatcagccagaacagtttgactgggcaatcaatgaccggattaatgagatggtgcacttcgacctccctggccaggaggaacgggagagattggttcggatgtattttgataagtatgtccttaaaccagctaccgaagggaaacagcggctgaagctggcccaatttgactatggacggaaatgctcagaggtggccaggctgacggaaggaatgtccgggcgtgaaatcgcccaactggcagttagttggcaggcaaccgcatacgcctcagaggatggagtgctaactgaagcgatgatggataccagggtgcaggacgccgttcagcagcaccagcagaagatgtgctggctgaaagcagagggtcctgggcggggcgatgagcctagcccttcatag

SEQ ID NO: 108938 - DNA, 606 bp, synthetic construct
  misc_feature 1..606: note = Description of Artificial Sequence: Synthetic coding sequence
  source 1..606: mol_type = other DNA
aaattggccctgcatagtggcatggactatgcgattatgacaggcggagatgtcgctcccatgggcagagaaggggtgacggccatgcataagctgtttgattgggccaacacgtcaagaagaggcttgcttctattcgtggacgaggccgacgcttttctgcgcaaacgagccactgaaaagatttctgaagaccttagagcaactctcaacgccttcctgtataggactgggcaacatagtaacaacccttcccacgtttctcacggtgggagctctcctgccgggcgcccctggctgacacctcaggcgagatgggcccccagatttatgctggtgctggcctccaatcagccagaacagtttgattgggctataaacgatagaatcaacgagatggtgcactttgatctaccagggcaagaagagagggaacgattagtacgcatgtatttcgacaagtacgttttgaagccagcaaccgaaggcaagcagcggttaaagttagctcagtttgactatggtcggaagtgtagcgaggtcgctagattgactgagggcatgtcagggagggaaattgcccaactcgctgtgtcctggcaatag

SEQ ID NO: 108939 - DNA, 435 bp, synthetic construct
  misc_feature 1..435: note = Description of Artificial Sequence: Synthetic coding sequence
  source 1..435: mol_type = other DNA
atgtgcctttgcaggccgctgctgccccagcgggcccagtaccaggacaaactggcccgtcaaagatatgaagaccagctcaaacagcagcagctgttgaacgaggagaatttgcgcaagcaggaagaatcagtacagaagcaagaagctatgcgccgcgcaacagtcgagagggagatggaactgcgtcacaagaatgagatgctgcgggtggaagcagaagctcgggcacgggcaaaggctgagcgcgaaaacgctgatatcattcgcgagcagatcagactgaaggccgccgagcacaggcagacggtgctcgaaagcatcagaacagccggaaccctcttcggagaaggcttcagggctttcgtaacagactgggataaagtgaccgcgacagtggccgggctgactctgctggccgtgggcgtgtattag

SEQ ID NO: 108940 - DNA, 309 bp, synthetic construct
  misc_feature 1..309: note = Description of Artificial Sequence: Synthetic coding sequence
  source 1..309: mol_type = other DNA
atgaggctggaggcactgtctcttctccatacactggtgtgggcatggagcctgtgcagagccggtgctgttcagacccaagaacggctgtccggctcagcatctcctgaacaggtgccagccggagaatgttgcgcactgcaggagtatgaagctgctgtagaacaattgaagtctgagcagatccgcgctcaggccgaggaaaggcgtaagacattatcagaagaaacacggcaacaccaggccagagcccagtaccaggacaaacttgcaagacagaggtacgaagatcagctgaagcagcaatag

SEQ ID NO: 108941 - DNA, 1524 bp, synthetic construct
  misc_feature 1..1524: note = Description of Artificial Sequence: Synthetic coding sequence
  source 1..1524: mol_type = other DNA
atgcaagagcagacactgcagctggagcaacagtcaaaactcaaggaatatgaggccgccgtcgagcagcttaagagtgagcagatcagggcccaggccgaggagcgtcgaaaaacactttcggaagaaactcgccagcaccaggccagggcacagtaccaagataagctggcgagacaacggtacgaggatcagctgaagcagcagcaactcttgaacgaggagaacttgcggaagcaagaagagtcggtgcaaaagcaggaagctatgcggcgggccacggtagagcgtgagatggagcttaggcacaagaatgagatgttgagggtcgaggccgaggcgagggccagagctaaagccgaaagggagaacgctgacattatacgggaacagattcgtctgaaagcggcagagcatagacagaccgtcttggaaagcattagaacagcgggtaccctctttggagagggattcagggcatttgtgaccgactgggataaagtaaccgccactgtggctgggctgaccctcctcgctgtgggcgtctacagcgccaagaatgctaccctagttgctggccgtttcattgaagcccggctgggcaaaccaagcctggtgagagaaacatcgagaatcaccgtgctagaggcattgcgacatccgatacaggtcagccgcagactgctcagcaggcctcaggatgcccttgaaggtgtggtcctttctccaagcctggaggcgagggtcagagatatcgcaatcgcaacaaggaacacgaagaagaataggtccctgtacaggaatattctgatgtatggtccccctggcactggtaaaaccttattcgccaaaaagcttgcgctgcactccggaatggattacgcaatcatgacaggaggtgacgtggcaccaatggggcgcgagggagtgactgccatgcacaaattattcgattgggccaataccagtcgccgcggccttttgctgtttgtcgatgaggctgacgctttcttacgcaagagggctaccgagaagattagtgaggatctgagggctaccctcaatgccttcctgtaccggaccgggcaacattccaacaagtttatgcttgttctcgcctctaatcagcccgagcagtttgattgggccattaatgacaggattaacgaaatggttcactttgatttgcctggccaggaagagagggagaggctggtgcggatgtattttgacaagtatgtgctgaaacctgccacagaaggtaagcagcgactcaagctcgctcaatttgactatggacgcaagtgcagcgaggttgctcgactgaccgagggcatgtctggtcgcgagatcgcgcagttggcagtgtcctggcaggcaactgcatatgcttcagaagatggcgtgctcacagaggctatgatggatacacgggtgcaggacgctgtgcagcagcaccagcagaagatgtgctggttgaaagccgagggccctggccggggggacgaaccctctccatcttag

SEQ ID NO: 108942 - DNA, 1947 bp, synthetic construct
  misc_feature 1..1947: note = Description of Artificial Sequence: Synthetic coding sequence
  source 1..1947: mol_type = other DNA
atgagttggctgtttggggtgaataagggaccaaaaggtgagggggctggcccacccccaccactacctcctgcccagcctggggctgagggtggcggggaccggggtctgggggatcgccctgctccaaaggataaatggtctaattttgatccaaccggcctcgagcgcgccgcgaaggctgcacgggagctggagcattcacgttacgcaaaggaagctcttaacctcgctcagatgcaggaacagacattgcaactggaacagcaatccaagttgaaggagtacgaggcagcagttgaacagctgaagtccgagcagatcagggcccaggcagaggagcgtaggaagactctgtccgaagaaacccggcaacaccaggcgagggcacagtatcaggataagctagctcggcaacgttatgaggaccagctgaaacagcaacaacttctgaatgaggagaatctgcgcaaacaggaagagtccgtacagaaacaggaggctatgcgacgggctaccgtcgagagagagatggagctgcggcacaaaaatgaaatgctcagagtggagacagaggcgcgagcacgcgcgaaggccgaacgcgagaatgctgacatcatccgtgaacagattcgcctgaaggcctccgaacatcgccaaactgttctcgaatctatccggaccgccggtactctcttcggcgaaggtttcagggcattcgtgactgaccgcgacaaagtcaccgcaactgtagcgggtctgaccctactcgctgtaggggtgtatagcgccaaaaatgcaacagcagtgaccggcaggttcattgaggcccggttagggaaaccctctctcgttagagaaacctcacgcataacggtattggaagcactcaggcatccgattcaggtcagcagacgcttattatcccgccctcaagatgtccttgagggcgtggtactgagcccttccctggaggccagggtacgcgatatcgcgattgccacacggaacacaaaaaagaaccgaggcctttaccggcacattctgttgtacggacctcctggaactggaaaaaccttgttcgccaaaaaactagcccttcattccggcatggattatgctatcatgacgggaggggacgtcgcacccatgggaagggagggcgtcaccgcgatgcacaaactatttgactgggcaaatacgagtcgtagaggcctgttgcttttcatggacgaagccgatgcgttcctgagaaagagagcaaccgaagaaatcagcaaggatctgcgggcaacccttaacgctttcctctaccacatgggccagcactctaataagttcatgctcgtactggcatctaacctgcccgaacagtttgattgcgcaatcaacagtaggattgacgttatggtacacttcgatctaccgcagcaggaagaacgcgagagactcgtgaggttgcacttcgacaattgtgtgttgaagcctgccactgaaggcaagagaagactcaagctcgcccagttcgattacggtagaaagtgttcagaagtggctaggctgaccgagggtatgtccggtagagaaatcgcacagctcgcagtatcttggcaagccaccgcttatgcctccaaggatggtgttttgactgaggccatgatggatgcgtgcgtgcaagacgcagtgcagcagtaccggcaaaagatgcgttggttgaaggccgagggcccaggtagaggagttgaacatcctctctccggcgtccagggtgaaacccttaccagctggagtctggctactgacccaagttatccgtgcctggccggcccttgtacttttaggatttgttcctggatgggaaccggcctttgccctgggcctctgtctccgcggatgtcctgcggaggtggaaggccattttgtccacctgggcacccactgctgtag

SEQ ID NO: 108943 - DNA, 900 bp, synthetic construct
  misc_feature 1..900: note = Description of Artificial Sequence: Synthetic coding sequence
  source 1..900: mol_type = other DNA
atgagctggctctttggggtgaataagggcccaaaaggagaaggagcaggacccccacctccacttcctccagctcagccgggggctgagggaggcggcgacagaggcctgggcgacaggcctgcaccaaaggataagtggtcaaatttcgacccgacagggttagagcgagctgcaaaagccgcacgggaactggagcattcccgttacgctaaagaggctctcaaccttgctcagatgcaagaacagaccttgcagctggagcagcagtcaaagttgaaacaacttctcaacgaagagaacctgcggaagcaggaggagtcagtgcagaagcaccgtcagactgtcctggagagtatccgaacggccggtaccctatttggggagggcttccgcgctttcgttacagacagagataaagtcactgctaccgtggctggcctgaccctcctggccgttggagtctactccgctaagaatgccacagcggtgaccggaaggtttattgaggctcggctgggaaagcctagcctggtgcgagagacttcccggatcacagtattggaagccctacggcatcctatacagcaggtcagcaggagacttttgtctcgcccacaggatgtgctagagggtgttgttttatctccttctctcgaggcaagagttcgtgacatagccatcgcgacacgcaataccaagaaaaaccggggcctgtacagacacattttactttatgggccccccggaacaggcaagaccttgtttgcgaaaaaacttgctctgcattcgggtatggactacgccataatgacaggaggcgatgtggctcccatgggaagagaaggggtcacggcgatgcataaactatttgactgggcaaacacttcccgccgctag

SEQ ID NO: 108944 - DNA, 351 bp, synthetic construct
  misc_feature 1..351: note = Description of Artificial Sequence: Synthetic coding sequence
  source 1..351: mol_type = other DNA
atgcggcgcgccaccgtggaacgcgagatggagctgcggcacaaaaacgagatgctgcgtgtggagaccgaagcccgcgcccgggccaaggcggaaagggaaaacgcggatatcatccgcgagcagattaggctgaaagctagtgagcacagacagacagtcttagaaagcatccggacagcaggcactctgttcggtgagggatttcgggcctttgtaaccgacagggataaggtcacagcaacagtgaatatttttataaagcagggatggcaggttgctgagcgccaacactttaggcggcggagatgggcggaccacgaagtgaggcgctcacggtcaagctggtag

SEQ ID NO: 108945 - DNA, 1449 bp, synthetic construct
  misc_feature 1..1449: note = Description of Artificial Sequence: Synthetic coding sequence
  source 1..1449: mol_type = other DNA
atgctgagggtcgagaccgaggctagagcgcgtgcaaaagccgagcgtgaaaacgccgacataatcagagagcagatccggctaaaggcaagtgaacacaggcagacggtcctggaatccatacgcacggcgggcacactctttggcgaggggttccgggccttcgtgactgaccgagataaggtgaccgccactgtggctgggttgacactgctcgcagtaggcgtgtacagtgcaaaaaacgctaccgccgttacaggcaggttcatcgaggccaggttgggaaagcctagtttggtccgtgaaaccagtcgcatcaccgtactcgaggccttgcgacatccaatccaggtgagcaggcgccttctctctcggccccaggacgttctggagggcgtagtgctgtcagtgtcaccctccctggaggctcgggtccgggatattgccattgccactcggaacaccaagaagaacaggggcctatatcgtcatatcctattatacggccccccagggactggcaaaactctgttcgccaagaagctggcacttcacagcggcatggattatgcgatcatgacaggcggcgatgtcgccccaatgggacgagaaggcgtcaccgcgatgcacaaattgttcgattgggccaataccagtcggagaggcttgcaggaagagatctctaaggacctgagagctacactgaatgccttcctctatcatatgggccagcactccaataaccggtttatgctggtgcttgccagtaacctccctgaacaatttgattgtgccatcaactcaagaatagacgtgatggtgcacttcgatctcccccagcaagaggaaagagaacgtttggtccgcttgcatttcgataattgtgtcctcaagcctgcgaccgagggaaaacgaatgggcgtcgggcagctaccagtgtttagacccccccctcatggcgttggctcagcagcactggccgcgtctctgggaaacagcttccccagaaggctgaagctcgctcaattcgactacggaaggaaatgttctgaggttgcaaggcttactgagggtatgagtggacgggaaattgctcagcttgccgtatcgtggcaggcaactgcttacgccagtaaggacggtgttctcactgaagctatgatggatgcctgcgtgcaggatgccgttcagcagtaccggcaaaaaatgcgctggctgaaggcagaagggcccgggcgcggtgtggaacaccctctcagcggcgtccaaggtgagacgctcacatcatggtctctcgcaacagatccctcctatccctgtttggccggcccctgtacatttcgtatctgcagctggatgggaaccggcctctgcccaggcccattgtcaccaagaatgtcctgcggcggaggaagaccattctgtcccccaggacaccctctactctag

SEQ ID NO: 108946 - DNA, 354 bp, synthetic construct
  misc_feature 1..354: note = Description of Artificial Sequence: Synthetic coding sequence
  source 1..354: mol_type = other DNA
atgaggagagcaacagtggaaagagagatggagctgcggcacaaaaacgagatgctgcgagtggagaccgaggcacgggctcgggccaaggccgaaagggagaatgcagatatcatcagagagcagatcagacttaaagctagcgaacacagacagaccgtgttagagtccatccgcacagccggtaccttgttcggcgagggtttcagggcatttgttactgacagagacaaagtgaccgccacggtaaatattttcatcaagcaggggtggcaggtagcagagcggcagcatcacttcaggcgccgacggtgggccgaccatgaagtccggcgctcccgatctagctggtag

SEQ ID NO: 108947 - DNA, 5535 bp, synthetic construct
  misc_feature 1..5535: note = Description of Artificial Sequence: Synthetic coding sequence
  source 1..5535: mol_type = other DNA
atggtcggggtcctcgcgatggctgccgcggccgctcctcctccagtcaaagattgcgaaatcgagccgtgtaagaagcgtaagaaagatgatgacacatcaacatgtaagactatcactaagtacctctccccattgggtaagactcgggacagagtgtttgccccccccaaacccagtaatatcttagattacttcaggaagacaagccctacaaatgaaaagacccagcttggaaaagaatgcaagataaagagccccgagagcgttcccgtagacagcaacaaagactgcactacacctctcgaaatgtttagcaacgtggagttcaagaagaagcgcaaacgagtgaatctgtcccaccagcttaataatatcaagactgaaaacgaggcccccatagagataagtagcgacgatagtaaggaagattactctctcaataatgatttcgtggagtcgagcacaagtgtgttgcgttacaagaagcaggtcgaggttctcgctgaaaatatccaagatacgaagagccagcctaatactatgacttcactgcagaattctaagaaggtgaatccaaaacaaggaaccactaagaatgatttcaaaaaacttcgaaagcgtaagtgtagagacgtggttgacctgagcgagtctctgcccttagcggaggaactgaatcttttaaaaaaagacgggaaggatacgaagcagatggagaatacgacttcccatgctaacagcagagacaatgtcactgaggcggctcaactgaatgattctatcataaccgttagctatgaagagtttttaaagagccacaaggagaataaagtcgaggagatccccgattccactatgtccatttgcgttccaagtgagactgtcgacgaaatcgtgaagagcggatacatttcagaaagcgaaaattcggaaatttcccagcaggtgcggttcaaaaccgtgaccgtactggcccaggttcatcccatcccacctaaaaagaccggcaagattccccgaatcttcctgaagcagaagcagttcgagatggagaacagcctatcagaccccgagaacgagcagacagtccaaaagcgcaagtctaatgtggtaattcaggaggaggagctcgagctagcagtgttagaagcaggcagcagcgaggccgtaaagccaaagtgcacattagaggagcgtcagcagtttatgaaggcgtttcgccagcctgcttcagatgcgttaaagaatggggttaagaagagcagcgataagcagaaagacctgaatgaaaaatgcctctatgaggtaggacgagacgataatagtaagaaaatcatggaaaacagcgggatacagatggtgtcaaagaatgggaacttgcagttgcacactgacaaaggcagcttcctcaaggaaaaaaacaaaaagctgaagaagaaaaataaaaagaccctggacacgggggctattcctggcaaaaaccgggagggaaacactcagaaaaaagaaaccactttctttttaaaggagaaacaatatcaaaataggatgagcttgagacagaggaaaactgaatttttcaaatccagcactctgtttaataacgagtccctggtgtacgaggacattgcgaatgacgatcttttgaaagttagcagtttatgcaacaacaacaagctgtctagaaagacctcaatccctgtgaaagatatcaaactgacgcagagcaaagctgagagcgaggcttcccttctgaacgtcagcactccaaaaagcactaggcgctctggccgtatatcttctacccctacaacagagacgatcagaggcattgacagcgacgacgtccaggataatagccaactgaaggcttccacgcagaaggcggccaatctctctgagaagcattcactctatacagccgaactcataaccgtgcccttcgactctgagagtcccataagaatgaagtttacaaggatttctacaccaaagaagagcaagaaaaagagtaataagcggtccgagaagagcgaagccacagacggaggatttacaagccagatacgcaaggcgtcaaacacctctaaaaatattagcaaagccaagcagctcattgaaaaggccaaagcccttcacatcagtcgttccaaagtcaccgaagagatcgccatcccccttcggcggtcaagcagacatcagacgctcccggagcgcaagaaactcagtgaaaccgaggactccgtgatcataattgactcatctcctactgcgctgaagcacccggagaagaaccagaagaagctccaatgcctcaatgatgtgttggggaaaaagctgaacactagcaccaaaaatgtgccaggcaaaatgaaggttgcgcccctgtttctggtaagaaaggcacagaaggctgctgaccccgtaccatcctttgacgagagtagtcaggacacgtctgaaaaaagccaggactgcgacgttcaatgcaaagcaaaaagagactttctcatgtcgggattaccagatctcctcaaaagacagattgctaagaaggccgcggctctcgacgtgtataacgcagtaagtacatcattccagagggtggtgcacgtacagcagaaagacgacggctgttgtctgtggcatctcaagccacccagctgtcctctgttgacgaaatttaaagaactaaataccaaggtaatagacttatctaaatgtgggattgcactaggcgagttctccactttgaattccaaactgaagtctgggaacagcgccgctgtctttatgcgcaccagaaaagagtttactgaagaggtgcgcaatctgctgttggaggaaatcagatggtcaaatcctgagtttagccttaaaaagtacttccctctactcttgaagaagcagatagagcatcaagttctgtcctctgaatgtcacagcaaacaggagctggaggccgacgtatctcataaggagaccaagagaaagcttgtggaggcagagaacagtaaatctaagcgtaagaagcccaacgagtattccaaaaatttggaaaaaactaatcggaaaagcgaggaactgagcaagaggaacaattctagcggtatcaagctagatagctcgaaagacagcggtacagaggacatgctgtggactgagaaatatcaaccgcagacggcctctgaactgatcggcaatgagttagctatcaaaaaactacacagctggctgaaagactggaaacgaagggctgaactggaggagcgccagaatttaaagggaaagcgcgacgagaagcacgaggatttttctggtggaattgacttcaagggttcttcagatgacgaggaggaatcccggctgtgtaatacagtacttatcaccggccctactggagtcggtaagactgcggccgtctacgcgtgcgcccaggaactgggtttcaaaatttttgaggtgaacgcctcgtcccagcgttccggacgccagattctgtcacagctgaaagaggctacccaaagtcaccaggtcgataaacagggagtgaacagccagaaaccctgtttttttaactcttattatattggaaagtctcctaaaaaaatttccagcccgaaaaaagtggtcacatctccccgaaaggtgcctcctccctcaccaaagtcctcggggccaaagcgagcgctcccgcctaagaccctggccaattactttaaggtgtcacccaagcccaagaataatgaggaaatcggcatgctgctcgaaaataataaggggattaagaactctttcgagcagaaacagatcacacagactaaaagtactaacgcgaccaactcgaacgtcaaagatgtgggagccgaagagccaagccggaaaaacgccacctcattgatcttatttgaggaggtggacgtgatatttgatgaggatgccgggttcctgaacgctataaagacctttatggccacgacgaagaggcctgtcattctgactacaagcgacccaacattcagcctgatgttcgatggttgttttgaggagatcaaattctctacaccctcactgctgaatgtcgcatcctacctgcaaatgatctgcttgactgagaacttccgtacagacgtgaaagactttgtaactctgctgactgcaaatacttgcgatatccggaaatccattctttacctgcaattctggatccggtcagggggtggtgtactggaggaacggccactgacactctacagggggaatagtcggaatgtccagctagtgtgcagtgagcatggcttagacaacaagatttatcctaaaaataccaagaaaaaacgagtagatctgcccaaatgtgacagcgggtgcgcagagacactcttcggcctcaaaaatatcttctctccctctgaggacttgttttcattcctcaaacacaaaatcactatgaaggaagaatggcacaagttcatccaactcctcacagagttccagatgcgaaacgtggacttcctttattcaaatctcgagttcattctacctctaccggtcgacaccattccagaaactaaaaacttctgtggcccctctgtcacagtggatgcctctgccgccaccaagtccatgaactgcctcgcaagaaagcattccgaaagggaacagcccctcaagaaatcacaaaagaagaagcagaaaaagactttagtgattctagacgattccgaccttttcgacactgatctggacttccctgaccagagtatctccttgtcttccgtttctagcagcagtaatgcggaagagtcaaagactggcgacgaggaaagcaaggctagagacaaagggaacaaccccgaaacgaaaaaatcaatcccatgtcctcctaagaccacagccggcaaaaaatgctccgccctggttagccactgcctcaattctttatctgaatttatggataatatgtccttccttgacgctctgttaacggatgtgagagaacagaacaagtatggcagaaacgatttctcctggactaatggcaaggtaacatcagggctttgtgatgagttttcgctggagagcaacgacgggtggacgtctcagtcgagtggcgaactcaaagcagctgcagaggcactcagtttcactaagtgtagcagtgcgatctctaaagctctcgaaacactcaactcgtgtaagaagttgggaagggacccaacaaacgacctgaccttttacgtctcccagaaaaggaataacgtatacttctcccagagtgctgctaacctggacaatgcctggaagcggatttcagtcataaagtctgtgttctccagtcggtccctgttgtacgtggggaataggcaggcaagtataattgagtatctgcctactctgaggaacatctgcaaaacagagaaattgaaggaacaggggaagtcaaagcgtcgcttcttgcattactttgagggcatccacttggacatacccaaagagaccgtgaacacacttgcggcagattttccctag

SEQ ID NO: 108948 - DNA, 3543 bp, synthetic construct
  misc_feature 1..3543: note = Description of Artificial Sequence: Synthetic coding sequence
  source 1..3543: mol_type = other DNA
atgtccgccgactcaagccccctggtaggaagtaccccaaccggttacggaactctcaccattggcacttcgatcgatcccctctcctcgtcagtatcgagcgtgagactttccggatattgcggcagcccgtggcgggtcattggatatcacgtcgtggtgtggatgatggccgggatccctcttctgctgtttcgctggaagcccctgtggggggtgaggctgcggctgcggccctgtaatctcgcgcacgcagagacactggttattgagatcagggacaaagaggattcatcatggcaactgttcacagtgcaggtccagacagaggctatcggcgaaggatccctggagccctctccccaatcccaggccgaagacggccgatcccaggcggcagttggtgcagtgcccgagggtgcctggaaagataccgcacaacttcacaaatccgaggaggccgtttcagtcggccagaaaagagtactccggtattatctgtttcaagggcaaaggtatatttggatcgaaacccagcaggccttctaccaggtttccctgttagaccacggacggtcctgtgatgatgtgcacaggagcagacacggcttgagccttcaagaccaaatggtgagaaaggcaatctatggtccaaacgttatctccattcctgtgaaaagttatccccagctgttggtagacgaagcactcaacccctactacggattccaagctttttcaatcgcactttggttggctgatcattactattggtatgcgctgtgcatcttcctgatcagcagcatctccatttgcctgtccctatataagactagaaagcagagtcagactctgagagacatggtgaagctgtccatgcgggtctgcgtctgcagacctgggggcgaggaagagtgggtcgattccagcgagctcgtgcccggcgattgtcttgtgctgccgcaggagggtggcttgatgccttgcgatgcagcactggtagcgggtgaatgcatggtgaacgagtcctctctgactggcgagtctataccggtccttaaaacggctctgcccgagggcctggggccctattgtgctgaaacacacaggcgacacacactgttctgcggcacattgatcctacaggcccgggcatacgtaggaccacacgtgctggccgtcgttaccaggactgggttttgcactgccaaaggcggcctggtttcatcgatattacatccccggccaataaactttaagttctataaacactctatgaagttcgtggctgcgttgagcgtactcgctctgctgggaacaatttactcaatattcatcctctataggaaccgcgtcccgctgaacgagatcgtcatccgcgcacttgatcttgttacagtagtagttcctccagccctgcccgcagccatgacagtctgcaccctctacgcacagtctcgattacggcgccagggtatcttctgcatccatcctctgcgtattaatctgggcggcaagcttcaactcgtgtgctttgataagacaggaacacttacggaagatgggttagacgtgatgggcgtggtccctctgaaggggcaagcatttctgcctctggtgcccgaaccacgacgcttgcctgtggggcctctgctgagagcgttggccacctgtcatgcactttctagactgcaagacactccggtgggggatccaatggatcttaagatggtcgaatcaactggctgggtgctggaggaagagcccgccgcagatagcgctttcggtacccaagtgctggcggtgatgcgaccccccctttgggaacctcaactgcaggccatggaagaaccccccgtccccgtctccgtgctgcacaggtttccattcagctcggcactgcaacgaatgtctgttgtggtggcctggcctggggccactcagcccgaagcatatgtaaaaggatctcctgagctggtggccggtttatgcaatcccgaaactgttccaacggatttcgcgcagatgctccaatcgtatacagctgccggatatcgtgttgttgctctcgcctccaagcccctccccaccgtcccaagcctggaggctgcacagcaactcacacgagatacggttgagggagacctgagtctcctcggattgctggtcatgcgcaatctcctgaagccacaaacaacacccgtcattcaggccttgaggaggacccggataagagccgttatggtcaccggcgacaatctacaaacggcggtgactgtggcaagaggatgcggcatggtggccccccaggagcatttgatcattgtgcacgcaacccacccagaaaggggtcagcctgctagccttgaattcctgccaatggaatcccccactgcagtgaacggggtaaaggatcccgaccaggccgcctcttacaccgtggaaccagatccccggtctcgccacctggctctcagcggccctacctttggtatcatcgtcaagcattttcctaaactgctcccgaaagtactggtgcaggggaccgtatttgcgcggatggcacctgagcagaaaaccgagctggtatgcgaactgcagaaactccaatattgcgtcggtatgtgtggagacggtgctaatgactgtggggccctgaaggctgcagacgtgggcatctccctaagccaggcggaggcatccgttgtgagcccttttaccagctctatggcgtctatagagtgtgtgccgatggtcatccgtgaggggaggtgctctttggatacatccttctccgtgttcaagtacatggcactctattcccttactcagtttatatcagtccttattctgtacacaattaacacaaacttgggcgacctgcagtttctagccatagatctggtcattaccaccacggtagcagtcctcatgagtaggactgggcctgccctcgtgctcggccgggtccgccccccgggcgctcttctgtctgttcccgtattgtcttctctgctgctgcagatggtactggtaaccggcgtccagcttggaggttacttcctgactctggcgcagccctggttcgtcccccttaatcgcactgttgccgcacctgacaatttacctaactacgagaatactgtggtcttctctttaagcagtttccagtacctgatcctggccgccgccgtctccaagggcgctccattcaggcgccctttgtacacgaatgtaccattcctggttgcccttgcgctgttatcctcagtgctcgtaggtctggtgctggtgccagggctgctccaggggccattagctttaagaaacattaccgatacgggattcaagctccttttactcggcttggtgacccttaatttcgtgggagcctttatgctggagtctgtattagatcagtgcctccctgcttgcttaagacgcctccgacccaaacgggcttccaagaaacggttcaagcaactggagcgagagctcgcagagcaaccttggccacccctccccgccggcccactgcgctag

SEQ ID NO: 108949 - DNA, 3477 bp, synthetic construct
  misc_feature 1..3477: note = Description of Artificial Sequence: Synthetic coding sequence
  source 1..3477: mol_type = other DNA
atgtcagccgatagtagtccactggtgggcagtacgcccacagggtacggcaccctgaccattggaacgtccatcgacccactcagctcttctgttagctctgtgagactgagcggctactgcggcagcccttggcgcgtgataggctatcatgtggtggtctggatgatggctgggatacccctgctgcttttccggtggaagccactttggggagtgaggctcaggctgagaccttgtaacttggctcatgccgagactctagtgatcgagattagagataaggaagatagctcttggcagctgttcacagtccaggttcagaccgaggctataggcgaaggatctttggagccttctccgcagagccaggcagaggacggcaggtcacaagctgcggtgggcgcggtcccagaaggggcttggaaggatactgcccagctgcacaaatccgaggaagcaaaaagggtgctcaggtattacctgttccaggggcaacgctatatatggattgagacacagcaggctttttaccaggtgtcacttttggatcatggacgaagctgcgatgacgttcaccgcagccgtcacggcctgtcactgcaagaccagatggtgagaaaagcaatatacggccccaatgtgatctcaatcccggtaaaaagttacccacagcttcttgtggacgaggctttgaacccttattacgggtttcaggccttttccatcgccctgtggctggccgaccactattattggtacgctttgtgcatctttctcattagcagcattagtatttgtctgtcgttatacaaaactaggaaacagtcacagacactgcgtgacatggtgaagttaagcatgcgggtgtgcgtgtgcaggccaggcggcgaggaggagtgggtagacagcagtgaactcgttcccggcgattgtcttgtgctcccgcaggagggaggcctgatgccttgcgatgcggccctggtagctggagaatgcatggttaacgaatccagtctgacaggcgagtccattccagttctgaagaccgccctgcccgagggcctaggcccgtactgcgcagaaacccacaggcgccacacactgttctgtggaacactaatcctccaggcccgcgcatacgtgggtccacacgtccttgcagtcgttacacgtaccggcttctgtacggcaaagggtggtttagtttcttctatactgcatcccagaccaattaatttcaagttctataagcactcgatgaaattcgtggctgccctgagcgttcttgcactattaggcacgatctactcaatttttatcctgtatcgcaaccgcgtgcctctgaatgagatagtgatccgggccctggatctggtgacggtcgttgtgccgcccgcgcttccagcagctatgacagtatgcacattgtacgcccagagcaggctcaggcgacagggcatcttttgcattcatcccctaaggatcaatctgggtggcaaactacaacttgtgtgtttcgacaaaactgggacccttaccgaggacggcctcgacgtgatgggcgttgtcccccttaagggacaagcctttctgccactggtgcctgagccgcgccggctgccagttggtccactgttgcgagctctcgcgacctgtcacgctctgtctcggctacaggatacccctgtcggtgatcccatggacctcaagatggtggaaagtacaggttgggtcctcgaagaggagcccgctgcagattctgcgtttggaacacaagtcttggctgtcatgcgcccacctctctgggaacctcagcttcaggctatggaggaaccaccagtcccagtgagcgtgttgcacaggttccctttttcttctgccctgcagcggatgtccgtagtcgtagcctggcccggagccacccagcccgaggcctacgtcaaggggagcccagagctcgtggctggcctctgcaaccccgagactgtgccgaccgatttcgcccagatgctgcaaagctacacggcagcaggatatcgagtggtggctctagcgtctaaacctctgcctacagtgccgagtctggaggccgcacagcagctcacgcgggacactgtggaaggggatctgtcattgcttggattgcttgtgatgcggaatctcctgaagccccagacgacccctgttatccaagctctcaggcgaactcgaattcgcgccgtcatggtgaccggcgataacctccagaccgccgtgactgtggccaggggatgcggtatggtggcccctcaggagcatctgattattgtgcatgcaactcatcccgaacggggacagcctgccagtctagaatttctccctatggagagccccaccgccgttaacggcgttaaggttttggtccaggggacagttttcgctagaatggcgccagagcagaagacagagctcgtgtgcgaactgcagaaactccagtactgcgtgggcatgtgcggcgacggagcaaatgattgcggagctctgaaggccgcagacgtggggatttcactgagtcaagcagaggcttctgtagtttctccctttacgagttccatggccagcattgaatgcgtgcccatggtcatcagagaagggaggtgctctttggatacctcctttagtgtcttcaagtacatggccctgtactccctgacacaattcatctccgtcctgattttatacaccattaacaccaatctcggcgacttacagtttcttgccatagatctggtgataactaccacggttgcggtgttgatgtcccgtaccggccccgcccttgtgctcggacgggttagaccccctggcgcccttctttctgtgcccgttctgagctcccttctgcttcagatggtattggtgacaggtgtgcagctgggcggctatttcctcacactcgcccagccctggttcgtgcccttgaaccggaccgtggccgccccagataatctgccgaactacgagaatactgtggtcttcagcctttcctcctttcaatacctgattctggcggctgccgtgtctaagggggcccctttcaggcgaccactgtataccaatgaacgtgctaggcctgtccctccacgactgcctgctcctccccccgcccaggcaggacttcaagaagcccttcaggccgctggaacaagggctggtcgagccgcactggctgctgcagctcgaagaccccctgaggttgttcaggcacacggacacccaaggcattggaactcattgcctctgtcccaccaattagaccctagtccggcaacaccccccccccccccaccaaccagtctacggttggccaccgtttatactccacccccaagacccccgcctccctggggctcagtggattattgtcccctgccatggacgatcccgagaaggggggggtccccccagttgccttctgtcctcctctccgtttag

SEQ ID NO: 108950 - DNA, 3528 bp, synthetic construct
  misc_feature 1..3528: note = Description of Artificial Sequence: Synthetic coding sequence
  source 1..3528: mol_type = other DNA
atgtccgctgattcctcacccctggtcggctcgacccctaccggctatggcacactcacaattgggacgtcgattgacccactgtcgtctagcgtctcttcagtgcgcttaagtggctattgcgggtccccatggagagtgatcggctatcacgtcgtcgtatggatgatggccggtataccactcctgttatttaggtggaaaccactttggggagttcgtcttcggcttaggccttgtaatttagcgcatgccgagaccttggtgattgaaattcgagataaagaggacagctcatggcaactgttcacagtacaagtacaaaccgaggcaatcggcgaggggtccctcgagcccagcccacagtcacaggctgaagacggtcgttcccaggcagcagtaggtgcagtacctgagggtgcgtggaaagataccgcgcagctccacaaaagtgaggaagccaaacgcgtacttcgatattacctgttccaggggcagcgttatatttggatagagacccagcaggcgttctaccaggtgagcctgcttgaccatggccgtagctgtgatgatgtgcacagatcccggcacgggctttcactgcaggaccaaatggtgcgaaaagcaatctacggcccaaatgtgatttcaattcccgttaaaagctacccccagctactggtggacgaggctctgaatccctattacggtttccaggcctttagcatcgcactgtggctcgctgatcattattattggtatgcgttgtgtattttcttgatctccagcatcagcatctgcttgagtctatataagacccgaaaacagtctcagaccttacgcgatatggtgaaactgtcaatgcgggtctgcgtgtgtcgccccggaggcgaggaggagtgggtagactccagcgaacttgtccccggagactgccttgtactgcctcaggaaggtggtctcatgccgtgtgacgcagcactggttgccggggagtgcatggtgaacgaatcctccctgactggtgagtcaattccggtgctgaagactgcccttcccgagggactggggccctattgcgcagaaactcaccgtcgccacactctgttttgcggcactctcatcttacaggcaagggcatacgtcgggccgcatgtgttagcagtcgttactcgcaccgggttctgcaccgctaagggcgggctggtatcatctatcctgcatccaaggcctatcaactttaagttttataagcatagtatgaagtttgttgcagcactttcagtgctagcactgctgggaactatttactctatttttatcctgtatcggaatcgagtgccccttaacgaaatagtgatacgagcgctcgatttggtcacagtggttgtgccacccgctttaccagctgcaatgaccgtgtgtacactgtacgcccagtctcgcctgaggcgccagggtatattctgtattcaccctctccgtatcaatctcggcgggaagttgcagttagtgtgcttcgataaaactggaaccctaaccgaggatggcctcgatgtgatgggcgtcgtcccgcttaagggacaggcctttctgccgctggtgccagaaccccgccgtttgcccgttggtcctctgctgcgggccttggccacttgccacgccctctcacgactacaggacacccctgtgggagaccccatggacctgaagatggttgagtcaacggggtgggtgcttgaggaagaacccgcggcagactccgccttcggaactcaagtccttgctgtgatgcgcccacccctctgggaacctcagctgcaggctatggaagagccccctgttccagtttctgtcctgcatcgatttcccttttcttctgcgctgcagcgtatgtccgtagtcgttgcctggcctggcgcaacacaaccagaggcctacgtcaaagggagtcccgagttggtagccggcctatgcaatccagaaaccgtgccaaccgattttgctcaaatgctacagtcatataccgccgcaggctaccgggtggtggccctggcctccaaaccattacccaccgtgccatcactggaggcagctcagcagctgacacgtgataccgttgaaggggatctatccctcctgggcctgcttgtgatgcgcaatttgctcaagccccagaccacaccggttattcaagctctcaggagaacacggattagagccgtgatggtcaccggggacaacctccagacggcagtaaccgttgccaggggatgcgggatggtggccccacaagaacatctgatcatcgtacacgcaacccatcctgaacgcggtcagcccgcctccctcgagtttcttcctatggaaagcccgactgccgtgaacggtgtgaaggacccagatcaggccgcctcttacacagtggagcctgaccctagaagtagacacctcgccctgagtggtcctaccttcggcattattgtgaagcacttccccaagttgttgcctaaagtcttggttcaggggaccgttttcgccaggatggcgccagagcaaaaaactgagttggtctgcgaacttcaaaaactgcagtattgtgtgggaatgtgtggagacggggccaacgattgtggggccctcaaagccgccgacgtaggaattagcctcagccaggccgaagccagcgtggtttcaccttttacttctagtatggccagcattgagtgtgtaccaatggtgatcagggaaggccggtgcagcctggacacctccttctcagtgtttaagtatatggcgctctacagcctcacccagtttatctcggttttgatactgtacacaataaacaccaacctgggcgaccttcagtttctggctatcgatctagtcatcacgacaaccgtggcagtgctgatgtcaagaactggacccgctctggttcttggcagggtgcggccccctggagccctactcagcgtacccgttctgagcagcctgcttctccagatggtgctggttacaggtgtccaactgggtggctattttctgacgctcgcccagccctggttcgtgcctctgaacagaaccgtagccgccccagacaaccttcctaattacgaaaacaccgtggtattttcactctctagtttccagtatctgatattagccgctgcagtcagtaaaggcgctcccttccgtcggccactgtatacaaatgtgcccttcctggttgctctcgctctgttgagttcagtgttggtcggtctggtgctcgtccccggcttgctacagggacctctagctctgcgaaacattacggacacggggttcaagttacttctccttggcctggtgacccttaacttcgtgggagcttttatgctggagagcgtcctcgaccagtgtctgcctgcatgcctcaggcgcctgaggccaaagcgcgcaagcaagaaacgctttaagcaacttgagcgagagctcgcagaacagccatggcccccactgccggccggccccctgcggtag

SEQ ID NO: 108951 - DNA, 3372 bp, synthetic construct
  misc_feature 1..3372: note = Description of Artificial Sequence: Synthetic coding sequence
  source 1..3372: mol_type = other DNA
atgtcacgggccaccagtgtgggcgaccagctcgaggcgccagctcggactatctacttgaaccagccccaccttaacaaattcagagataatcagattagtaccgccaaatactctgtgctgacatttctgccaaggttcctgtacgagcaaatacgccgagccgcaaacgcctttttcctgtttatcgcgcttctgcagcagattcccgatgtatcaccgacgggccggtatactaccttagtccctttaatcatcatcttaactattgctgggattaaagagatcgttgaagatttcaaacgccacaaggccgacaacgcggtgaataaaaagaaaaccatcgtgttacgcaacgggatgtggcatacaataatgtggaaggaggtggccgttggagacattgtgaaagtcgtgaacggtcagtatctgcccgctgacgtcgtgttgctgtcctccagcgaaccgcaggcaatgtgttacgtcgagaccgccaacttggacggggagaccaacctgaagattcggcagggcctgagtcacacagccgacatgcagaccagggaggtactgatgaagctctcaggaacaattgagtgtgaagggcccaatagacatttgtacgatttcactgggaacttaaacctcgacggaaaatcattggtggccttagggcccgaccagattctgttgagaggaactcagttaagaaatacacagtgggtcttcggcattgttgtatataccgggcatgacaccaaactgatgcagaactcaacaaaggcgcctctcaaacggtctaacgtggagaaagttaccaatgtgcagattttggtcctgttcgggatactgctggtgatggcattagtttcctctgcaggagctttatactggaaccgcagccacggagaaaaaaattggtatataaaaaagatggacacaactagcgataattttggctacaatctgttaacgttcattattttgtataataatctcatcccaatctcactgctcgttacactggaagtggtgaaatacacgcaggccttgttcattaactgggacacggacatgtattacattggcaacgacacgccggccatggcaagaacctcaaatctaaacgaggagctgggccaggtcaagtacctgttttccgacaaaaccggaaccctgacatgtaatatcatgaacttcaagaagtgtagtatcgcaggtgtgacatatggacactttcctgagttggctcgcgagccttctagtgatgacttttgccgaatgccgccgccatgcagtgatagctgcgacttcgacgacccgcgcttgctgaaaaatattgaggaccgtcatccaactgctccctgcattcaggagtttttgaccctcctggccgtgtgccacaccgttgttcctgagaaagacggggacaacataatttaccaggccagcagcccagatgaagccgctttggtgaagggggctaaaaagcttggttttgtgttcacagcccgaactcctttcagtgttatcattgaggccatgggccaggaacagacattcggcattctgaacgtcttagagttttccagcgacagaaagcggatgagcgttatcgtgagaacaccatcaggacggctgaggctatattgtaaaggcgccgacaacgtgatctttgagcgactcagcaaagatagcaagtatatggaagagaccctatgtcacttggagtacttcgctaccgaaggactgagaactctttgcgtggcatacgctgatctgtctgagaatgagtacgaggaatggctgaaagtgtatcaggaggcgagcacgatcctcaaggatcgggcacagcgactcgaagagtgctacgagataatcgaaaagaatctgctgctgttaggagcgaccgcaatcgaggaccgcttacaggcgggggtgccagaaacaatcgccaccctgttgaaagcggaaataaagatatgggttttaactggggataaacaggaaacagccattaatatcggatatagttgtcgcctcgtgagtcagaacatggccctgatcctgctgaaggaggactcacttgacgcaacacgggcagcaattacccaacattgcaccgatctcggtaatctcctgggcaaggaaaacgacgtggcactgatcattgatggccacactctaaagtacgcgctgtcttttgaggtgcggaggagtttcttagatctggcacttagctgtaaagctgtgatttgctgtcgcgtttcccccctgcagaaatccgagattgtcgatgtggtgaaaaagcgagtgaaggccattactctggccattggtgatggggctaacgacgtgggcatgatccagacagcacacgtgggggtcggcatcagcgggaacgagggcatgcaggcaaccaataacagcgactacgccatcgcgcagttctcctatctcgaaaagctgctcctggtgcatggagcctggagctacaacagggtcaccaagtgtatcttatattgcttttataaaaatgtggtgctgtacattatcgagatattcaccgctttgccccctttcacattgggaatttttgagcgatcttgtacgcaggagagcatgttgaggtttccacaactgtacaaaattacccagaatggcgagggctttaatacaaaagtgttttggggtcattgcatcaatgcgctggtccactccctgattttgttctggtttcctatgaaggccttggaacacgacactgtgctcacgagtgggcacgctaccgactacctgttcgtaggtaatatcgtgtacacttacgtggtggtgaccgtgtgcctgaaggctggcctagagactaccgcctggaccaaattcagtcatctggccgtttggggctctatgttgacttggctggtcttctttggaatctacagcaccatatggcctacaatcccaattgcacccgatatgcgtgggcaggcgaccatggtactgagtagcgcgcacttttggctaggcttgttcctcgtcccaaccgcatgcttaatagaagacgtggcttggcgagctgccaaacatacctgcaagaaaactctcctggaggaggtacaggaattggaaaccaaatctagagtgttaggtaaggccgttcttcgggattctaacggaaaaagattgaatgaacgcgaccgtttaatcaagcgtttaggtaggaaaacgccgcccacattattccggggatcttccctccaacagggagttccacacggctatgcatttagccaggaagaacacggcgccgtgagccaagaggaggtcattagagcatacgataccacaaagaagaaaagtaggaagaagtag

SEQ ID NO: 108952 - DNA, 426 bp, synthetic construct
  misc_feature 1..426: note = Description of Artificial Sequence: Synthetic coding sequence
  source 1..426: mol_type = other DNA
atgtcaagggccacaagcgttggagaccagttggaggcccctgcgaggaccatttaccttaatcagccacaccttaataagttccgcgacaaccagatctcgaccgcaaaatattcagtactcacctttctgccacgcttcctgtatgaacagattcggagagctgctaatgcattctttctattcatcgcgctccttcagcagatccccgacgtgagtcctacaggtaggtataccaccctggttcccctgattataatcttaaccatcgccggcatcaaagagattgttgaggatttcaagcgacacaaagcagataacgccgtcaacaagaaaaagaccatcgtattgagaaatggcatgtggcatacgatcatgtggaaagaagaaaacagtcctcccttcaaggaaatttcccccctctag

SEQ ID NO: 108953 - DNA, 3567 bp, synthetic construct
  misc_feature 1..3567: note = Description of Artificial Sequence: Synthetic coding sequence
  source 1..3567: mol_type = other DNA
atgttaaatggcgcaggcttggataaggccctcaaaatgtccctgcctcgccggagccgcatccgttcaagtgtggggcccgttagatcctctctgggttataagaaggctgaagacgagatgagccgtgctacatccgttggcgatcagttagaagccccggctaggacaatctacctgaaccagcctcacttgaataagttccgggacaaccagatttctactgctaagtactctgtgctcacatttctccctcggttcctctatgaacagatccgccgtgctgcaaacgcattttttcttttcatagcgctactgcaacagattcccgatgtgtctccaactggtcgttatacaactctcgtgccactgatcattattctgactatcgccggcattaaagagattgtcgaagacttcaagagacataaggccgataacgcagtgaataaaaagaaaactatcgtgctgcggaacggaatgtggcatacaatcatgtggaaggaggtagcagtaggagacattgttaaagtggtcaacggccaatacttgcctgccgatgtggtgctgctgtcaagcagcgaacctcaggccatgtgctacgttgaaaccgctaacttggacggcgagacaaatctcaagatcagacagggactgagccacaccgccgatatgcagacacgcgaggtactcatgaagctgagtgggaccatcgaatgtgaagggcctaatcgacacctctacgacttcaccggcaacctcaatctcgacggcaaatccttagtcgctcttggccccgatcagatccttcttcgaggcactcagctgcggaacacacagtgggtgtttggtatcgtagtatatacaggccacgacactaaacttatgcagaactcgactaaggctcctctcaaacggtcaaacgtcgaaaaggtcaccaatgtacagattcttgtgcttttcggcattctgctggtaatggcgcttgtttccagcgctggagcactgtactggaaccggagccacggcgagaagaactggtatatcaaaaaaatggacactacttctgataacttcggttacaatctcctcactttcattatcctgtacaacaacctgatcccaataagccttcttgtcacgctggaagtggtgaaatatacgcaggcgcttttcataaattgggatacagacatgtactacatcgggaacgacactcccgctatggcacgcactagcaacctgaatgaagagttgggacaggttaaatacttgttcagcgacaaaactgggacgttaacctgcaacattatgaactttaaaaagtgcagcatcgcaggggtgacctatggccacttccctgaactcgcccgtgagccttcgagtgacgacttctgtagaatgcctcccccttgctccgactcttgtgattttgacgatccacgactcctcaagaacattgaggatagacaccccactgccccctgcattcaggagtttctgaccctcctggctgtgtgtcataccgtggttccagaaaaggacggggacaacatcatttatcaggcctcctcaccagacgaagccgcgctggtgaaaggcgctaaaaaactggggttcgtgtttacggcacgtacgccgttctctgttataattgaagcaatggggcaggaacagacattcggcatcttgaacgtactggaattcagtagtgaccgaaaacgcatgtccgtgatcgtgaggacccctagcggaaggctgcgcctgtattgcaaaggggcggacaacgtgatcttcgagcgcctctccaaggacagtaagtacatggaggagacactctgtcacctggaatatttcgcaacagaaggtctgcgcacactctgcgtggcgtacgccgatctaagcgagaatgaatatgaggagtggcttaaggtgtaccaggaagcctcaaccatcctgaaagaccgggcccagcgtctcgaggaatgttatgaaatcattgagaaaaaccttctcctcttgggagcaactgcgatcgaggacagactccaggctggtgttcctgagacaatcgctacccttttaaaggccgagatcaaaatctgggtccttactggagataagcaagagaccgccattaacatcggttacagttgtcgcctggtgtcacagaatatggcactcatcttattaaaagaggactccctggacgcaacgagggccgccattacacagcactgcaccgacttaggtaacttactgggcaaggaaaatgatgtggctctcattattgatggccatacactgaagtacgccctgtccttcgaggttcggcgatccttcctcgatttggctctctcgtgcaaggccgttatttgctgtcgggtgagtccactacagaaaagcgagattgtggatgttgtcaagaaacgagtaaaggcaatcactcttgccatcggcgatggggctaatgatgtgggaatgatccagactgcacacgtgggggtaggcattagcggcaatgaaggcatgcaggccaccaataattcagattatgccattgctcagttctcttatctagagaaacttttgctggtccacggtgcttggtcatataaccgggtgaccaaatgcattctctattgcttctataaaaacgtggtcctgtacatcatagagttatggtttgcttttgtaaatgggtttagtgggcagattctgttcgaacgctggtgcattggcctgtacaatgtcatctttaccgccttgccacctttcactcttggcatcttcgaacgctcttgcacccaagagtcgatgctcagatttccccagctctataaaatcacccagaacggcgagggattcaacactaaagtgttctggggccactgcattaatgccctggtgcacagtctcatattgttctggttcccaatgaaggctttagaacatgacacagtcctcacctcagggcacgctaccgattatctgttcgtgggaaacattgtctacacgtacgtagttgtcacagtgtgtctgaaagctggcctggagacaactgcttggacaaaattcagtcatctggccgtttgggggtctatgctgacctggctcgtgttttttggcatatatagcacgatatggcctaccataccgatagcacctgatatgcgagggcaggcgaccatggtgttgtcctcagcgcatttctggttgggtttgttcttagtgccaacagcgtgtctcatagaagacgtcgcttggcgggctgccaagcatacatgtaaaaagacattgctggaggaggtccaggagctggagaccaaatcacgtgtactggggaaggcagtgctccgtgactccaacggtaaacgcctaaatgagagagaccggcttatcaaacgtttggggagaaaaacccctcccacgctgttcagggggtcatccctccaacagggtgtgccgcatggctacgcctttagccaggaagaacatggcgctgtatcacaagaagaagtcatccgcgcctacgacactacaaaaaagaaatcccgaaaaaaatag

SEQ ID NO: 108954 - DNA, 2907 bp, synthetic construct
  misc_feature 1..2907: note = Description of Artificial Sequence: Synthetic coding sequence
  source 1..2907: mol_type = other DNA
atgaggtgtccaggaccacgcctccttgagaccagctggcgccacccaccagctccattcaccagcaccaataggcacctgtatgactttaccggaaacttgaacctcgatggcaagtccctggtagcacttggaccagaccagatccttctccgggggacccagctgagaaacacacagtgggtgttcggcatcgtggtgtatactggtcatgacacaaagttgatgcaaaattccactaaagccccattaaagcgcagcaacgtggagaaggtaactaatgtgcaaattctggtgttattcggcatcctattggtcatggcactggtcagcagcgcgggagccctgtactggaataggagccatggtgaaaagaactggtatataaagaaaatggacacaacctccgacaacttcggatacaacctcctgacattcatcattttgtataacaacttaatcccgatatctctgctcgttactctcgaagtggtgaaatacacacaggctctgttcatcaactgggacaccgacatgtactacatagggaacgatactcccgctatggctcggacgagtaatctgaacgaggagctgggccaggtgaagtatctgttctctgacaaaacaggcacccttacttgtaacattatgaatttcaaaaaatgttcaattgcaggtgtgacctatggccattttcccgagttggcccgggagccttccagcgacgacttctgtcgaatgcctcccccttgttccgactcctgcgattttgatgatcctcgactgctaaagaatatcgaagaccgccacccgacagctccttgcatccaggaattcctgacattgctggccgtttgccatacggttgtaccggagaaggatggggataatatcatctaccaggcaagttctcccgacgaagctgccttggtaaagggagccaaaaagctcggctttgtctttacggcaaggacacctttttcagtgatcatcgaggctatgggtcaggaacagaccttcggaattctgaatgtgcttgaattttccagcgataggaaaagaatgtccgtgatcgttcgcacaccgagcgggcgcctgaggttatattgtaagggcgctgacaatgttattttcgagcgcttgtcaaaagactccaagtacatggaggaaaccctgtgtcatctggaatacttcgccacagaaggcctgcgaaccctgtgtgtggcttatgccgatttatctgaaaatgagtacgaggagtggctgaaagtttaccaggaggcatccacaatcctcaaggatagggcacagagactggaggaatgttatgagataatagaaaaaaacctcctgctactaggagctacagccattgaggatcgtcttcaagcaggcgttcctgagacaattgccacgctgctcaaagctgagatcaaaatctgggtcctgaccggagataagcaggaaactgccataaacatcgggtacagctgtcgacttgtctcacagaatatggcactcatactgctgaaagaggatagcttggatgccacaagagcggcaatcacacaacactgcaccgacttgggaaacttactggggaaagagaacgatgtggccttgataattgacggccacaccctgaaatatgcgctcagcttcgaggtgagacgcagtttcctggatctcgctctgtcgtgtaaggcagtgatctgctgccgagtctcccccctgcagaagtcagagatcgtggatgtggtaaaaaagcgagtgaaggccataaccctggctataggggatggagctaatgatgtcggcatgattcagaccgcacatgttggggtgggaatttcgggcaatgagggtatgcaggccaccaacaacagtgactacgcaattgcgcagttcagttatctggaaaaactgctgctcgtccacggcgcctggtcctacaaccgcgtgaccaagtgcatattgtactgcttttacaaaaacgtcgtattgtacattatcgaattatggttcgcgttcgtgaatggtttcagcggccaaatcctcttcgagagatggtgcattggcttgtacaatgtcatcttcactgcccttcccccattcacactggggatatttgaacgctcctgcactcaggaatctatgctgcggttcccgcaactttataagatcacccagaacggcgaaggtttcaacacaaaggtcttctggggacactgtatcaacgccttggtgcattcactcatcctgttttggttcccaatgaaagctctggaacatgatacagtgttgacaagcggacatgctaccgattatctctttgtcgggaatattgtgtatacttacgtggtggtgaccgtgtgtctgaaggcgggattggagacgactgcatggactaagttctctcatctcgctgtttggggaagcatgctaacctggctggttttcttcgggatctatagcactatatggcctaccatcccaatcgcgccggacatgaggggacaggcaacaatggtactctcctcagctcatttctggcttggcctgttcttggtccccaccgcctgcctgatcgaagacgtcgcgtggagggctgctaaacacacttgcaaaaaaactctcctggaggaggtgcaggagctggagacaaagtcacgagtcttgggaaaagccgttctgagagattccaatgggaagcgcctgaacgaaagagatagactgattaagcgtctcgggcgaaaaactcctcccaccttattccgaggaagtagcctgcagcaaggggtgccccacggctatgccttttcccaagaagagcatggggctgtatcccaggaggaagtgataagggcctatgatacaacaaaaaagaagtcacggaaaaagtag

SEQ ID NO: 108955 - DNA, 3903 bp, synthetic construct
  misc_feature 1..3903: note = Description of Artificial Sequence: Synthetic coding sequence
  source 1..3903: mol_type = other DNA
atgggtactgggcccgcacagacacctcggagtactagagccggaccagagccttccccagctcccccaggacctggcgacacgggcgactccgacgtcactcaggaaggaagtggacctgctggaattaggggcggggagaccgttatacgtgctggcatgggcgattctcccgggcggggagctcctgagcgcaggcacaaggcccaaccaggaagggctagaaagtatgagtggcgacctgagggaccaaccagcatgggatctctggggcaacgagaggacctgcaagacgaggataggaattccgcatttacttggaaggttcaggccaacaatcgcgcatacaacgggcagttcaaagagaaagtcatactgtgttggcagcgaaagaaatacaaaacaaatgtcattagaactgcgaagtacaacttttactcttttttgccactgaacttgtatgagcaattccaccgggtgagtaacctcttcttccttattataattatattgcaatcgattcccgatatcagcacactgccctggttctcactctcaaccccgatggtgtgtctgttgttcatcagggccacccgcgatctcgtggatgacatgggcagacataaatccgatagggccatcaataatcgaccatgtcagatcttgatgggcaagtcctttaagcaaaagaaatggcaagatctctgcgtgggggacgtggtttgcttgcgtaaggacaacatagtgcccgcagatatgctgctgcttgcaagcactgagccaagctccctctgttatgtcgaaaccgtggatatcgatggcgagactaacttgaaattcaggcaggctctgatggttacacataaggaactggccactattaaaaagatggcctcattccaagggactgtgacgtgcgaggcaccgaactcacggatgcaccacttcgtgggttgtcttgaatggaacgataaaaagtactcactggatatcgggaacttgctactgaggggctgtcgcatcaggaatactgatacgtgttacggcctagttatctatgctggcttcgatacaaagatcatgaaaaactgcgggaagattcatctcaaacggaccaagcttgacctgctgatgaacaaactggttgtagtgatttttatatccgtggtgttagtctgtttggtgctcgcctttggcttcggatttagcgttaaggaattcaaggaccaccactactaccttagcggagtccacggttccagtgtcgctgctgagtcgttctttgtcttctggtctttcttgatccttttatccgtcactatccccatgtctatgttcatcctgagcgaattcatatacctggggaacagcgtttttatcgattgggatgtccaaatgtactacaagcctcaggacgtccctgccaaagctcgatccacctccctgaatgaccacctggggcaggtcgaatacatctttagtgacaagactggcacattgacccagaacatcctcacattcaataagtgttgcatatcgggccgggtatacggcccagactcggaagctaccactaggccaaaagagaatccctacctgtggaataagttcgccgatggcaagctgcttttccataatgctgccctgctgcacctcgtccggacaaacggggatgaggccgtacgggagttctggcgactcctggccatttgtcacacggtaatggtccgcgaaagtccccgtgaacgaccagaccaactcctgtaccaggcagccagccccgacgagggcgcactggtcactgctgccaggaattttggctatgtttttctgtcccggacccaggatacagttactatcatggaattgggagaagaaagggtctaccaagttttagcaataatggattttaattcgacacgcaaacggatgtccgtcctggtcaggaaacccgagggcgccatttgcctatatacaaaaggagccgataccgtgatcttcgaacgactgcaccgccgaggagctatggagtttgccaccgaggaagcactcgccgccttcgctcaggaaacattaagaaccctctgtttagcttaccgcgaggtcgccgaagacatttacgaggactggcagcagagacatcaggaggcctccttgttacttcagaatcgtgcccaggccctgcagcagctgctgggtgccaccgcgatagaggacaggctccaggatggagtgccagaaacaatcaaatgtctcaagaaatccaatattaaaatttgggtcctcaccggtgataagcaggaaacggccgtgaacatcggatttgcctgcgagctgttgtccgagaacatgctgatcctggaagagaaagagattagtaggatcctggaaacttactgggagaattctaacaacctcctgacccgcgaatcactctcacaggttaagttagcgctggttattaatggtgatttcctcgacaaactcctggtgagtctacgaaaggagccccgtgctcttgcccagaatgtgaacatggacgaagcctggcaagagcttggtcagagtaggcgggactttctgtacgcaaggaggctgtccctgttgtgccgcaggttcggtttgcctcttgctgctcctcccgcgcaagacagccgggctagacgcagtagtgaggtgcttcaggagcgggcttttgtggacctggcctcgaaatgtcaggctgtgatctgttgtagagttactccaaaacagaaggccctgatcgtcgcgcttgtgaaaaaataccatcaggtggtcactctggccataggagatggcgcaaacgatattaacatgattaagaccgccgacgtcggcgtcggtcttgccggtcaggaggggatgcaggctgtgcagaattctgatttcgtactcgggcaattctgcttcctccagaggctgttactggtacatgggagatggtcttatgtaagaatctgcaaatttctgcggtatttcttctataagtcaatggcctctatgatggtgcaggtctggtttgcatgctataacggctttaccggccagccattatacgagggttggttcttagccctgttcaatctgttgtactcaactctgccagtcctttacattggtctttttgagcaggatgttagcgcagagcagagtctcgagaagcccgagttgtatgtggtgggacagaaggacgagctctttaattattgggtgttcgtgcaggctatcgcacacggcgtaacaacgtcactggtgaacttttttatgacgctctggatctctagggacaccgcaggccccgcgagcttcagtgaccatcagtccttcgccgtagtagtggccctgagctgccttttaagtatcactatggaagtgatcctcatcatcaagtattggacagccctgtgtgtggcaaccatcttgctgtcccttggcttttatgctattatgaccactacaacacaatctttttggcttttccgcgttagccctaccacattcccattcctgtacgccgatctctcagtgatgagctctccttctattctgctggttgtgttgctcagcgtgtccataaatacctttcccgtgctggctctgcgagtaattttcccggccctgaaggagctccgggctaaggaagaaaaagtggaggaaggacccagcgaagaaattttcaccatggagccactgccccatgttcatagggaaagcagggccaggagaagttcgtacgcattctctcaccgggagggatatgcaaacctgattacacaggggaccattttgagaaggggccccggggtgtcaagcgacattgcctctgagtcactggacccgagcgacgaagaagcagcctctagcccaaaagaatcccagtag

SEQ ID NO: 108956 - DNA, 1737 bp, synthetic construct
  misc_feature 1..1737: note = Description of Artificial Sequence: Synthetic coding sequence
  source 1..1737: mol_type = other DNA
atgggcgatagccccggtagaggagcacctgaaaggcgacacaaggcacaacctggacgggcacggaaatacgagtggcggccagagggccccacaagcatgggttcgctgggccagcgcgaagacctgcaagatgaggatcgcaatagcgcattcacatggaaagtccaagcaaataacagggcctataatgggcagttcaaagaaaaagtgattctatgctggcaacggaagaagtataaaaccaacgtgataaggactgcgaagtataacttttactcttttctccctctaaacctatatgagcagttccaccgcgtgtctaacctcttctttctgatcataataatcctgcaatccatccctgacatttcgacattgccatggttctcactgtcaactcccatggtgtgcctactgtttatccgtgccacccgcgacctggttgacgacatggggcgtcataagtctgacagagccattaataatcggccatgccagattttaatgggaaagagctttaaacagaaaaaatggcaagatctctgcgtgggtgacgtggtatgcctgagaaaagacaatattgtccctgccgacatgctcctgttagctagtaccgagccatcctcactttgctatgtggaaacagttgacattgacggagaaacaaacctgaagttccggcaagccctgatggtgacacacaaggagctggcaaccattaaaaagatggcctctttccagggaaccgtgacctgcgaggcccctaattctcgtatgcatcattttgtaggttgtctggaatggaatgataaaaagtatagcctggacatcggcaatctgttgctccgcggatgcaggattaggaatacagatacatgttatggcttggtgatctacgcaggctttgacaccaagatcatgaaaaattgtgggaagattcacctgaagagaactaagcttgatcttttaatgaacaagcttgtggtggtaatattcatcagcgtagtgttggtgtgcctggtcttagctttcgggtttggcttctcggtgaaggagtttaaggaccatcactattacttgtccggcgtgcacggctcaagtgtggcagccgaatccttctttgtgttctggtctttccttatattattgtctgttaccatccctatgagcatgttcatcctcagcgaattcatctatctaggtaatagtgtttttattgattgggacgtgcaaatgtactacaaacctcaagatgtgccagccaaggcaaggagtacttccttgaatgaccatctcggccaagtcgaatatatatttagtgacaagaccggtacactgactcaaaatatattaaccttcaataagtgctgcataagcgggcgggtctatggtgcagcccctacccccgagctccccgctggatccagcatcttcaaagggctacgagtccccgagaaccagagccatgtttggcctcacgcacagcatctgcgtcccaatctaaaccaggggaccgttgcacggtggccaggattcttatggcggggtcctggcaagttttttttcttccttcgccagtctctgaccctctccacccaggcggggatgcagtggtgcaatttgggctccctccagtcaccaccaccaaggttcaagagattttcctggctctcgctcccaagcagctgggattaccggcacctcccaccacacctgatcttcttgtatttctag

SEQ ID NO: 108957 - DNA, 3792 bp, synthetic construct
  misc_feature 1..3792: note = Description of Artificial Sequence: Synthetic coding sequence
  source 1..3792: mol_type = other DNA
atgggcgacagccctggaagaggcgcaccagaacggaggcataaagctcaacccggtcgggccagaaagtacgagtggcggccagagggcccaacttcaatggggagcctcgggcaacgagaggacctccaggatgaggatcgaaacagtgcattcacatggaaagttcaggccaacaaccgggcgtataatggccagtttaaggagaaagtgattttatgttggcagcgaaagaagtacaagacgaacgtcattaggacagctaaatacaacttttatagtttccttccgctgaatctttatgagcagttccacagagtcagcaatcttttttttctgatcataatcatcctgcagtccatccctgacatttctactttgccatggtttagcttatctacacctatggtgtgtctgttattcatccgtgcgacgcgggacctggtggacgacatgggtagacacaaatcagaccgtgctataaacaacagaccctgtcagatcctgatgggaaaaagcttcaaacaaaaaaagtggcaagatctgtgtgtgggcgacgttgtgtgcctccgcaaggataacatcgtcccagccgatatgctcctgttggcctcaacagaaccttcatccctttgctacgtcgagacagtcgatatcgatggcgaaaccaacttgaagttcaggcaggcgctcatggtgactcataaagagctggcaactataaaaaaaatggcatccttccaaggaaccgttacttgcgaagcacccaatagccgtatgcaccactttgtcggctgtctggagtggaatgacaagaaatattctctggatatcggcaatctcttacttcgaggatgtcgcattcgcaatacagatacttgctacgggttggtcatttatgctgatggctatatgttcgttggtttcgataccaagattatgaaaaattgtggcaagatccatctgaaaaggacgaagttggatctcctcatgaacaagttagtggtggtaatttttatcagtgttgtgctggtgtgcttggtgttggccttcggtttcggctttagcgtgaaagaattcaaagaccaccactactacctgagcggcgttcacggtagtagcgtggcagctgaatctttcttcgtgttctggtctttcctcatcttgttgtcagttactatccctatgtcgatgttcatactttcagaatttatatatcttggaaactctgtattcatcgattgggatgtccagatgtactacaagccacaggacgtacctgctaaggcacgttcgacatcactcaacgatcatttaggtcaggtagagtatattttctcggataagacaggaaccctcacgcagaacattttaacctttaataaatgctgtatttctgggcgcgtatatgggccagattcagaggcgactacgagaccaaaggagaatccctatctatggaataaatttgcggacgggaaactgctgtttcacaacgccgccctcttgcacctggtccggacaaacggcgacgaagccgtgagagagttttggcggctgttagcgatctgtcacaccgtcatggtgagggagtctccccgtgagcgccctgatcagctgctgtatcaggcggcttccccagatgaaggagcactggttacggcagctcgtaattttgggtatgtgttccttagccgtactcaggacaccgtcaccatcatggaattgggcgaagagagggtgtaccaagtcctcgccattatggattttaattcgactagaaagcggatgtccgtgttggtgagaaagcctgaaggcgccatctgtctgtatactaagggtgcggacacagtgatctttgaacggttacatagacggggagccatggaattcgccacggaagaggcactcgccgcatttgctcaagaaacacttcgcacactgtgtctagcttatagagaagtcgcggaagacatctacgaggattggcagcaacggcaccaggaggccagcctgctcctgcagaatcgggctcaggcccttcagcaggtctacaatgagatggagcaggacctgagactcctgggtgccacggcaatcgaggaccgcctccaggatggagtgcctgaaacaattaagtgtttaaaaaagtctaacataaagatctgggtactcaccggtgacaaacaggaaactgctgtgaacattggctttgcctgcgaactgctgtccgaaaatatgctgattctcgaagagaaggagatcagccgtatcctagaaacctactgggaaaatagtaataacctactgacccgcgaaagcctgtctcaagtcaaattggccctggttattaacggagatttcttggacaaattactcgtatcactccgtaaagaacctcgcgctcttgctcaaaatgtaaatatggacgaggcctggcaggagctgggccagtctcgaagggacttcttgtacgctaggagattatcgcttctctgcaggcgattcggactacccctggcagccccaccggcccaagacagccgagccagacggtcatcggaagtgctgcaggagcgcgcgttcgttgacctcgcgagcaagtgccaggccgtgatttgttgtagggtcaccccaaagcagaaggcactaatcgtggccctcgtgaaaaagtaccaccaagtagtgacgcttgctatcggtgacggggccaacgacatcaatatgatcaagacagccgatgttggtgttggcttggcaggccaggagggcatgcaggcagttcaaaactccgatttcgtgctgggacagttctgcttcctgcagcgattgctcctggtccatggcaggtggagctacgtgagaatatgcaagttcctgcgctatttcttctacaaatcgatggcttctatgatggtgcaggtctggtttgcgtgctacaatggattcacaggacagccactgtatgaaggttggttcttagcactgtttaatctattgtatagcacccttccggtcttatacataggtctgtttgaacaggacgtgagcgctgaacagagccttgagaagcccgagctgtatgtcgtgggtcagaaagacgagctttttaattactgggtgttcgttcaagccatcgcgcacggggtgaccacttctctggtcaacttctttatgacactatggatcagccgcgatacagcgggtcctgcaagcttctcggaccatcaaagcttcgcagtcgtggttgccttgtcgtgcctgcttagcatcacaatggaagtgatcctgattattaaatactggaccgcgctttgcgtggccaccattctgctgtctcttggcttttatgcgataatgacgaccaccacccagagtttttggctttttcgcgtctctccaaccacctttccgttcctctatgcagacctgtcagtgatgagctccccctcaatcttgctggtggtgctattatcggtctccatcaacacctttcctgtgctggctctgagggtcatattccccgctttgaaagagctcagagccaaggaagaaaaagttgaggaaggtccatccgaagaaatctttacaatggaaccgctccctcacgtgcatcgggagtctcgtgccaggcggtcaagctacgccttctcccatcgcgaggggtacgctaatctgattactcagggtaccatccttcggcgcggtcctggcgtgagcagcgatattgctagtgaatcactggatccaagtgatgaggaggccgcgtctagccccaaagagtcccaatag

SEQ ID NO: 108958 - DNA, 3933 bp, synthetic construct
  misc_feature 1..3933: note = Description of Artificial Sequence: Synthetic coding sequence
  source 1..3933: mol_type = other DNA
atgggtacagggccagcacaaactccaagaagcactagagctggccccgaaccttctccggctccccctggacccggagataccggtgattctgacgtgacacaagaggggagcggaccagccggcattcggggaggagagaccgtcattagagccggcatgggggattcccctggccgcggggctcccgaacggcgacacaaggcgcaaccgggtagggcgagaaagtatgaatggaggcccgagggcccgacgtctatgggcagcctcggacagagagaggatttgcaggatgaggacaggaattctgctttcacatggaaagttcaagccaataacagggcctacaatggccaatttaaagaaaaagtaattctctgttggcagaggaaaaaatacaaaaccaacgtcatcaggactgcaaaatacaacttttatagctttctgcctctcaatttatacgaacagttccacagggtgtctaacctattttttctcattattatcatcctacagtctatacctgatatctcaacacttccctggttctcattgtccactccaatggtgtgtctgcttttcatcagagccacccgagacttggtagacgacatgggacggcacaagtctgaccgcgctatcaataaccgcccttgtcagatcttgatgggcaaaagttttaagcagaaaaagtggcaggatctttgtgttggcgatgtggtgtgcctgagaaaggataatattgtgccagctgatatgctgctgctggcgagtacagagcctagctccttgtgctacgtggagaccgtagatatcgacggagagacaaatttaaaatttcggcaggccctcatggtgactcataaggagttagctacaattaaaaaaatggccagcttccagggcactgtgacctgtgaggcccctaacagcagaatgcatcacttcgtcggttgtttagagtggaatgacaagaaatactcgctggacataggcaatttgctgttgcgtgggtgtcggatccggaataccgacacttgttacgggttagtgatctatgctggattcgataccaagattatgaagaattgcgggaaaatccatttgaagaggaccaaactggatttgctcatgaacaagcttgtggttgttattttcatctctgttgtactggtgtgtctggttctggccttcggattcggattctccgtgaaagagttcaaagaccaccattactatctcagtggcgtgcatgggtcttctgtcgctgccgaatccttttttgtattctggtccttccttatcttgctctctgtgaccatccctatgtctatgtttatacttagcgagtttatatatttgggtaacagcgtgttcatcgattgggatgttcagatgtactacaagccgcaggatgtccctgccaaggcaagatctacttccctaaacgatcatttgggacaagttgaatatatcttttccgataaaacaggtaccctgacacaaaatatcctgaccttcaataaatgctgtataagtgggagagtctacggacccgactcagaagctaccacccggccaaaggagaatccttatttatggaacaagttcgccgacgggaagttactgtttcacaatgcagctctgcttcatctggtgaggacgaatggggatgaggcggttcgtgagttttggcgtctgctcgctatttgtcacactgttatggtgagggagtctcctcgggaaaggcccgatcagctcctttatcaggccgcctctcctgatgaaggcgctctcgtcaccgctgccaggaacttcggatacgtgttcctgagtaggacacaggataccgtgaccataatggaattaggagaagagcgagtgtaccaggttctagccataatggacttcaactccactaggaaacgtatgagtgtgctagttcgcaaaccagagggcgccatatgcttgtacaccaagggcgccgacacagtgattttcgaaaggctgcaccgccgaggagccatggagttcgccaccgaggaggccctagccgcctttgcacaagaaacactgcgaactttgtgcctggcataccgcgaggtcgcagaagacatatatgaggactggcaacagaggcaccaggaggcctccctcctgttgcaaaatcgggcccaggccctccagcaagtctacaatgagatggaacaggacctcaggttgcttggcgccactgccatcgaagatcggctacaagacggcgtgcctgagacaattaagtgtcttaaaaagtcaaacatcaagatttgggtgctcactggggacaagcaggaaaccgccgtgaacatcgggttcgcatgtgaacttctgtctgaaaatatgctgattttggaggagaaagaaatatcacgcatcctggagacatactgggagaacagcaacaacctgctaactcgcgagagcctttcccaggtcaaactggctctagtcattaacggggattttctcgataaacttttagtctcgttaaggaaagagcccagagctttagcccagaacgtcaacatggatgaggcttggcaagaactgggccagtcacgccgtgacttcttatacgcaaggaggctgagtctgctatgtagaaggtttggactgccactggcggcgccacctgctcaggatagccgcgcccgccgctccagcgaagtgcttcaagaacgcgcgtttgtagatctggccagtaagtgtcaggcggtgatatgttgccgcgtgacgccaaagcagaaagctctcattgtggctctcgtcaaaaaataccaccaggtcgtgaccctagctattggcgacggggccaacgacatcaatatgatcaaaactgcagacgtgggagttggtctcgccggccaagagggcatgcaagcagtccagaatagcgatttcgtgctgggacagttctgcttcctccaaaggctcttgctggtgcacgggcgctggagctacgtccggatctgtaaattcctgcggtattttttctacaaatccatggcctcaatgatggttcaggtgtggtttgcttgttacaatggtttcacaggacagcctctttatgaggggtggtttctggccctgtttaacctcttgtatagcactctacctgtcctgtacatcggtctgttcgaacaagacgtgtccgccgagcagagccttgaaaagcccgagctctatgttgttggtcaaaaggacgagcttttcaactactgggtgtttgttcaggctatcgcacatggtgtgacaacctctcttgttaactttttcatgaccctgtggatttctagggacactgcaggcccagcaagtttcagcgatcaccagagctttgccgtcgttgtagccctgtcgtgtttgctaagtatcacaatggaagtaatccttataatcaaatactggactgctctgtgcgtcgcgactattttgctgtctttaggattttacgccatcatgaccaccaccacgcaatctttctggctatttcgagtgtcaccaacaacttttccctttctctacgctgatcttagtgtgatgtctagtccatctatcctcttagtagtgctgttgtcagtctcaatcaatacgtttcccgtccttgcattacgggtgatatttcctgctctgaaagagctgagagccaaagaggagaaggttgaagagggtccctctgaagagatcttcacaatggagcccctgcctcacgtgcatcgcgagagccgcgctagaaggagtagctatgcattctcccaccgggagggctacgctaatctgatcactcaggggacaatcctgagacgtggtccaggcgtgtcctcagacatcgccagtgaatctctggatccatctgatgaggaggccgctagctccccgaaggaatctcagtag

SEQ ID NO: 108959 - DNA, 3006 bp, synthetic construct
  misc_feature 1..3006: note = Description of Artificial Sequence: Synthetic coding sequence
  source 1..3006: mol_type = other DNA
atggaggcggctcatgctaagaccactgaagagtgtctagcctattttggcgtcagcgagactactggtctgacaccggaccaggtaaagagaaacttagagaaatacggattgaacgagctccccgcagaggagggtaagacactgtgggaactggtgatcgagcaattcgaggatttgcttgtgcggatactgctgctggccgcatgtatctccttcgtgctggcatggttcgaggagggggaggaaacgatcaccgcgtttgtcgagcctttcgtgatcctgcttatcttgattgccaacgcaatcgtgggcgtatggcaggagcgcaatgcggagaacgctattgaagcgctgaaggagtacgaaccagagatgggaaaggtgtatcgagcagaccgaaaatccgttcagcgcatcaaagctcgcgatattgttccgggcgatatcgttgaagttgccgtcggggataaggtccccgccgacatacgaatcctggctatcaagtccaccacactgcgagtcgaccagtcaattcttaccggcgagtccgtgagtgttattaaacacaccgaaccagtgcccgatccgagagctgtgaatcaagataagaaaaacatgctgttttcaggcactaatattgccgccgggaaagccctggggatcgtcgccaccacgggtgtgggcacagaaattgggaaaattcgcgatcaaatggccgccactgagcaggataaaaccccccttcagcaaaagctggacgagtttggggagcagctatctaaggtcatttctctcatctgcgtggccgtttggctgatcaatattgggcacttcaatgaccctgtgcacggggggagttggttccgaggggctatttactactttaagattgcagttgctctggcagtggccgcgatccctgaagggctgcctgctgttataactacatgcttggcattgggtacgcgaaggatggccaagaagaacgctatagtcagatctctgcccagtgtagagacattgggttgcaccagcgttatttgtagtgacaaaacaggtacgctgaccacaaaccaaatgtccgtttgtaaaatgttcatcatcgacaaagtggacggagacatatgtctgctgaatgaattttccatcactgggagcacatatgctccagagggtgaagtgctcaaaaacgacaaaccagtgagacctggacagtacgacgggctagtcgagctggcaacaatctgcgctctttgtaacgattcctcacttgatttcaatgaggcgaagggtgtttacgagaaagtcggagaagccacagaaacggcattaaccaccctggttgagaagatgaacgtcttcaataccgacgtgaggagtctgagtaaggttgaaagggccaacgcctgtaatagtgtgatccgacaactcatgaaaaaggagttcaccctggaattctctcgggatagaaaatccatgagcgtctactgttctcccgcgaagtcaagtcgcgccgccgtgggcaacaagatgttcgtcaaaggggcacctgagggtgtgatcgatagatgtaactacgtgcgggtcggaactacgcgagtacctctgacaggaccagtgaaggaaaaaatcatggctgtgatcaaagaatgggggacaggccgcgatactttgagatgtctggccctggcaactagagacactcctcctaagcgggaagagatggtgctcgacgattcagcacggtttcttgagtacgagacagatcttacgttcgtgggcgttgtaggcatgttggatccacccaggaaagaagttaccgggtccattcaactgtgtagagacgcaggcatcagagtcatcatgatcactggagataataaggggacagcgattgccatctgcaggcggattgggatcttcggagagaatgaggaagtcgccgaccgggcctacactggcagagaatttgacgacttaccacttgcggaacagagggaggcctgcaggagagcctgctgctttgccagagtcgaaccctcgcataaatcgaaaatcgtggagtatctgcaaagttatgatgagataacagccatgaccggcgatggcgtcaatgacgcccccgccttgaagaaagccgagatcgggatagctatgggttccggaaccgctgttgctaaaacggcgagtgaaatggtactcgccgacgataacttctctaccatcgtagccgcggtcgaggagggtcgggcaatctataacaatatgaaacagttcattcgctacctgatttcgtccaatgtcggggaagtagtttgcatattcctgactgcagcccttggtctcccggaggcactgatccccgtgcagcttttgtgggtaaacttggtaacggatgggctgcccgccaccgctctgggctttaaccctcctgatctggacatcatggatcgacccccacgcagtcccaaggaacctctcatttctggttggctgttctttaggtatatggccataggtggatatgtgggcgccgcaactgtgggggccgccgcctggtggtttctttacgctgaggacgggcctcatgtgaactacagccagctgacacattttatgcagtgcaccgaagacaatacccattttgaggggatcgattgtgaagtgtttgaggcgcctgaacctatgactatggcgctctccgtcctggtgacaatcgagatgtgtaacgccctgaactctctctctgaaaatcagtctctgctccggatgccaccctgggtgaatatttggttattgggcagtatttgcctgagcatgtccctgcactttctcatcctttacgttgatcccctgcccatgatcttcaagctcagagccctcgatctgactcagtggctcatggtacttaagattagcctgccagtgataggattagatgaaattttgaaattcgtggcacggaattacttagaggaccctgaagatgagagaaggaaatag

SEQ ID NO: 108960 - DNA, 2535 bp, synthetic construct
  misc_feature 1..2535: note = Description of Artificial Sequence: Synthetic coding sequence
  source 1..2535: mol_type = other DNA
aaacggcgcaatcccgggcggcaggcagtaggtcacaccgaggaggatccaccgagagttggtacaccctggaaagaacataccggcccaggcccacaagaaggtagcactatggaagcagctcatgcaaagaccaccgaggagtgcctagcgtactttggcgtgagcgagactaccgggctaacaccagaccaggtgaaacggaatctggagaagtatgggttgaatgaactccctgcagaggaaggcaagactttatgggaactcgtgattgagcagttcgaggacctgttagtaagaatcctgctgctcgcagcttgcatttcctttgtcctagcgtggtttgaggagggggaggagaccatcacagcattcgtagagcccttcgttattctgctcatacttatcgcaaacgctatcgtcggtgtgtggcaggaacgtaatgccgaaaacgcaattgaagcactgaaggagtatgaaccagagatgggcaaggtatatagggctgatcggaagtccgtgcagcggatcaaagccagagacatcgtcccaggtgatatcgttgaagtcgccgtgggagataaagtccccgctgatatccgcatccttgccattaagtccaccacactgagagtggaccagtcaattctaaccggggagtctgtgtcagtgattaagcacaccgaaccggtgcctgacccaagagctgttaaccaggacaaaaagaacatgcttttctcggggactaatattgccgctggaaaggccctgggaatcgtcgccactactggagttggcaccgagatcggtaaaatccgcgatcaaatggcggccacagagcaggataagacacccctgcagcagaaactggatgaatttggtgaacaactcagtaaggttatctctttgatttgcgtcgcagtctggctgatcaatatcggccactttaatgaccccgtacacggagggtcctggttcaggggcgctatttattatttcaagattgccgtggctttggccgtagctgccatcccagagggcctccccgctgtcattacgacttgcttagctcttggaacacggcggatggccaagaagaatgcgattgtgcgaagcctgccaagcgtcgaaaccctggggtgtacgagcgtgatttgttccgacaaaactgggacactcactacaaatcaaatgagcgtgtgcaaaatgttcatcatcgataaggtggatggtgatatctgtctattaaacgaattcagtattacggggagcacatatgccccagagggagaggtactgaagaatgacaagccagtacggcctggacagtacgacggcctggtggaactcgctacaatctgcgcactgtgtaatgattcttcactggacttcaacgaagctaagggcgtgtatgagaaggtgggagaagccactgagaccgccctaactactctggttgagaaaatgaatgtttttaacaccgacgttaggtccttgtctaaggtggaaagggccaatgcatgcaacagtgtgattcgccagctaatgaaaaaggagtttactctcgagtttagccgtgacagaaagagtatgtcagtctactgctcaccagccaaaagctctagggccgccgtgggtaataaaatgttcgtcaagggcgcacccgagggggtgatagacagatgcaactatgtccgagtcggcactacacgtgttccgctcactgggccggtcaaggagaagatcatggcagttataaaggaatggggcactgggagagacacccttaggtgtctggccctggcaactcgcgataccccgcctaagcgagaggagatggtcctagatgactcagcacgtttcctcgagtatgagaccgatctgactttcgtcggggtggtcgggatgctcgaccccccacgcaaagaggtgacaggctccatccagctgtgccgggatgctggcataagggtgataatgatcacaggcgacaacaaaggcacagctattgccatctgtcgtcgcatcggcatatttggcgaaaacgaggaagtcgcagatcgagcctatactgggcgtgaattcgatgaccttccccttgcagaacagcgcgaagcatgccgtcgggcttgctgtttcgcccgagtggaaccttctcacaagtcaaagatcgtggagtatctccaatcttacgatgaaatcaccgccatgaccggcgatggtgtcaacgacgccccagcgctgaagaaggcagaaatcgggatcgctatggggtctggtacagcagtggcgaagaccgcatccgagatggtgctcgctgatgataatttctctaccatcgttgctgctgtggaagaggggcgagctatttacaacaatatgaaacagtttattcgttacctgatctcatctaatgtgggagaggttgtttgcatttttctgacagctgccctgggcttgcctgaggccttaatccctgtgcagctgttgtgggtaaatctggttacggactgtgccgaactgttaatctattag

SEQ ID NO: 108961 - DNA, 2985 bp, synthetic construct
  misc_feature 1..2985: note = Description of Artificial Sequence: Synthetic coding sequence
  source 1..2985: mol_type = other DNA
atggaggccgcccacgccaagacaaccgaggaatgtcttgcatattttggcgtgtccgaaacaacgggacttaccccagaccaggtcaagagaaatctggagaagtatgggctgaatgaacttccagcagaggaggggaaaactttgtgggagctcgtgatcgaacaattcgaggatctgctggttcgcatcctcctgctcgcagcctgtatatctttcgtgctggcctggtttgaagagggtgaggagactattaccgctttcgtagagccttttgtgattcttttgatcctaattgcaaatgctattgtgggggtctggcaggaacgcaatgctgaaaacgcgattgaagccctgaaagagtacgaaccggagatgggaaaggtgtatagggcagacagaaaatccgtgcagcgcataaaggcaagagatatcgtcccaggtgacattgttgaggtggctgttggggataaagtgcccgccgacatccgaatacttgcgatcaaatcgaccaccctgagagtggaccagagtatcctgacgggtgaatctgtcagtgtgattaaacacacagaacccgtgcccgaccctcgggccgtcaaccaggacaagaagaacatgctgttcagtgggaccaatatcgctgcaggtaaggcccttggcatagtggccaccactggcgtcgggacagagatcggcaagattagggatcaaatggcagctactgagcaggataagacaccactgcagcaaaagctcgatgaatttggagagcaactatccaaggtgatttcactcatatgcgtggctgtctggctcatcaacatcggtcactttaatgacccggttcatggaggcagctggtttaggggtgccatttactatttcaaaattgctgttgccttagccgttgcagctataccagaggggctgcctgcagtcataacgacctgcctggctttgggcaccaggcggatggctaaaaaaaacgccattgtaagatcactgccgtctgtggagacgctgggctgcacaagtgtgatatgctcagacaaaactgggaccttaacgaccaaccaaatgtccgtgtgcaaaatgttcatcattgacaaagtagacggggatatctgtctgttgaacgagttctctatcactggtagtacctatgcccccgaaggtgaggttcttaaaaatgacaaaccagtgcgcccaggacagtatgacggcctagtggaactggcaacaatctgtgcattgtgtaatgatagcagccttgatttcaatgaggctaagggcgtttatgagaaggtgggcgaagcgacagaaacagcattgacaacacttgtggaaaagatgaacgtgttcaacaccgatgtcagatctctgagtaaagtggagagagcgaatgcttgtaattccgtgatacgccaactgatgaagaaagagtttaccctcgaattttcgagggaccgtaagagcatgtccgtttattgcagcccggcaaagagtagtcgtgctgccgtggggaacaaaatgttcgtcaagggagccccggaaggtgtcattgacagatgcaattatgtaagagtcggcaccacccgcgtgccactgacagggccggtgaaagagaagattatggctgtgatcaaggagtggggtaccggccgcgacaccctgagatgtctggcactggcaacccgggacacaccacccaagcgggaagaaatggttctcgatgactctgctaggtttttagaatatgagactgaccttacattcgtgggggtagttggaatgttagatccaccaagaaaagaggttacagggtccattcagctgtgtagagatgctggtatcagggtgataatgattactggggataataagggcaccgctatcgccatctgtcgaaggatcggcatatttggtgagaatgaggaagttgccgatagagcctacaccggtagagaattcgatgacctccccctcgctgagcagcgggaagcttgccgtcgggcttgctgtttcgccagggtggagccctcacacaaatccaagattgtggaatacctacagtcttacgacgaaattacagctatgacgggcgacggtgttaacgacgctccggccttgaagaaagcagagattggtattgcaatggggtccggcacagcagtggcaaaaaccgcctctgagatggtgcttgcggatgacaactttagcaccatcgtggccgccgtagaagaggggcgggcaatctacaacaacatgaagcagttcataaggtatctgatctcctctaacgtgggggaagttgtgtgtatctttctgaccgcagccttaggactgccagaggcactaattcctgtgcaattgctctgggtgaacctcgtgacagacgggcttccagccaccgcattgggcttcaatcctcccgatctggatatcatggatcgaccacccaggtctccgaaggagcccctgatcagtggatggttatttttccggtatatggccataggcggatatgtgggagcagcaacagtaggagccgcggcctggtggtttctgtacgccgaagatggcccccacgtaaattactcacaattaacacactttatgcagtgtactgaagataacacccatttcgaaggtatagactgtgaggtgttcgaggctcccgaaccaatgacaatggcgttaagcgtccttgtcacgatcgagatgtgcaatgccttaaactcactttctgaaaaccagtccctcctccggatgccaccttgggtgaacatttggctcttgggcagtatttgtctgtctatgtcgctgcacttcctgattctttacgtagatccgctgccgatgatttttaagctaagagcacttgatctgactcagtggctcatggttcttaaaatttcattgccggtaataggcttagatgaaattctaaagttcgtggcacgcaattatcttgagggctag

SEQ ID NO: 108962 - DNA, 2610 bp, synthetic construct
  misc_feature 1..2610: note = Description of Artificial Sequence: Synthetic coding sequence
  source 1..2610: mol_type = other DNA
atgggaaaagtttatcgcgcggaccggaaatctgtgcaacgcatcaaggctagagatatagtgcctggggatattgttgaggtagccgtgggcgataaagtccctgcagatatccgcatcttggctatcaagtccactacacttagagtcgatcagtcaatattgacaggagaatccgtaagcgtgatcaagcatacagagcctgtccctgacccgcgggcagtgaaccaggataaaaaaaatatgctcttcagcggaacaaacatcgctgccggaaaggctttaggcatagtggcaactaccggggtgggcacagagatcggcaagatccgggaccaaatggctgccacggaacaggataaaacccctctccagcaaaaactggatgagttcggtgagcagttaagcaaggtcatttctttaatctgtgtggcagtgtggctgatcaatatcggacacttcaacgatcccgtacacggtggcagctggtttcgcggtgctatctattattttaagatcgctgttgcactggccgtggcagccattcccgagggtttacccgccgtcatcaccacctgcctggctcttgggacacgccgaatggccaagaaaaacgctattgttaggtctctaccctccgtggaaactctgggctgcacttccgttatatgcagcgataagactgggactctgaccacaaatcaaatgtcagtgtgcaaaatgttcataattgataaggtcgacggggatatatgtctcctcaatgaattcagcatcactgggagcacctacgcgccggagggtgaggttctgaagaacgataaacccgttcgtcccggtcagtacgatggcctggttgagctcgcaactatttgcgcactctgtaatgactccagcctagacttcaacgaagcaaagggggtgtatgagaaagttggcgaggccaccgaaactgctctgaccacattggtcgagaagatgaacgtttttaataccgacgtacgttcactaagcaaagtcgaacgggccaacgcctgtaactcagtcattcgccaacttatgaaaaaagaatttaccttggagttctctagagataggaagtctatgtcagtgtactgttccccagccaaatcatcacgagcagcggtgggtaataaaatgtttgtaaagggcgccccagagggcgtgattgatcgttgtaactatgtgagggttggcacgactcgagtgcctctgactggtcctgtgaaggaaaagatcatggccgtcattaaagagtgggggacgggaagagatacacttcgatgtctcgcattggctactcgcgacacccctccaaagcgagaggagatggtcttagacgattccgctcgatttttggagtatgagactgacctgacttttgtcggagtcgtgggaatgctagaccccccacgcaaagaggtcacgggaagcatacagctctgtcgggacgcaggaattcgagtcattatgatcacaggagataacaaaggaaccgcgatcgctatctgccggcggattggaatcttcggcgagaatgaagaggtggccgatagggcatatactgggcgcgagtttgatgacctccccctcgccgagcagcgcgaggcatgtcgaagggcgtgttgcttcgcgcgcgtcgaaccaagtcataagagcaagatcgtggagtatctccaatcctatgatgagataaccgccatgaccggcgatggcgtaaatgatgcccccgctcttaagaaagcagaaatcgggattgccatggggagtggaactgcagtggccaaaacggccagcgaaatggttttagctgatgacaatttctcaacaattgtcgccgccgttgaggagggtagagctatttacaacaacatgaaacaattcattcgttacttgataagcagtaacgtcggagaggtggtctgtatatttctaactgctgctctggggctgcccgaagcattaattccagtacagctgctgtgggtgaatctggtgaccgatgggctgccagcaacagccttagggttcaacccccccgatctcgatataatggacagaccccctcgaagccctaaggagcccctaattagcggatggctcttttttcggtacatggcaattggcggctacgtcggcgccgcaactgttggtgcagcagcctggtggtttctgtatgctgaggacggcccacatgttaattattcccagctcacccatttcatgcagtgtacagaggataatacccactttgagggcatagattgcgaagtgtttgaagccccggaacctatgaccatggccctctccgttctcgtcactattgaaatgtgtaacgccctcaattctctgtcagagaaccagagcctacttagaatgccgccctgggtaaatatttggctgctaggatctatctgtctgtctatgtcactgcactttctgattctgtacgtggatccgctccccatgattttcaaactccgcgccctcgacttgacccagtggctgatggtgctgaaaatttcactgcctgtgatcggactggacgagattttaaagttcgttgccaggaactatctggagggctag

SEQ ID NO: 108963 - DNA, 2994 bp, synthetic construct
  misc_feature 1..2994: note = Description of Artificial Sequence: Synthetic coding sequence
  source 1..2994: mol_type = other DNA
atggaaaatgcacacaccaagaccgtcgaagaggtgcttggacattttggggtcaatgaatccactgggttgtccctggagcaggttaaaaaattaaaagagcgatggggtagtaatgaactgcctgcagaggaagggaagacacttctggaactcgtaatcgagcaatttgaagatctgctggtgcgcattctgttgctcgccgcctgtatctcctttgtgctggcgtggtttgaggagggcgaggagacaatcaccgcctttgttgagccttttgtaattctgctgattctggttgcaaacgccatcgtgggcgtgtggcaggagcgcaatgccgagaatgccattgaagccctgaaggagtacgaacctgaaatgggcaaggtgtacaggcaggaccgcaaaagtgtccagagaattaaagcgaaggatatagtgccgggtgacattgtagagatcgccgtgggagacaaggtgccagctgacatccgcctgacaagcatcaaatctaccacccttagagtcgatcagtccatactgaccggcgaatccgtcagtgtcattaaacatactgaccctgtccctgatccgcgggccgtgaaccaggataaaaagaatatgttgttttctgggacaaacattgcagcaggcaaggctatgggggtggttgttgcaaccggggtgaacaccgagattggtaagattcgggatgagatggtcgccaccgagcaggagcggacaccgctgcagcagaagctcgacgagtttggtgagcagctctctaaagttattagcctaatttgtatcgctgtatggatcattaatataggtcactttaacgatcccgtccatggcggtagttggatacggggtgcaatatactacttcaagatcgcagtcgcccttgctgtggcagcaattccggaaggcttgcctgcagtgatcactacttgtctggcactgggaacccgaagaatggctaagaagaacgcgatagtgaggagtttacctagcgtcgagactttggggtgtactagcgtgatctgtagtgataagacaggcaccctgacgaccaaccaaatgtctgtatgcagaatgtttatcctggatagagtcgaaggcgacacatgtagcctcaatgaatttaccatcaccggcagtacctacgctccaattggagaggtgcataaagatgacaagcccgtcaattgccaccaatacgatgggctggtagaactggccacaatctgcgcattatgtaatgattcggccctagactacaacgaggccaaaggtgtgtacgaaaaagttggagaagctaccgagacagctctgacctgcctggttgaaaagatgaatgttttcgataccgaattgaagggtctgtccaaaatagagcgcgcgaacgcttgcaactccgtaattaagcagctcatgaagaaagaattcacattagagttttctcgggaccgcaaaagtatgtctgtttactgtacgcccaataaacccagccgcacatctatgtcaaagatgttcgttaagggtgccccagaaggcgttattgaccggtgcacacacatcagggtgggatccaccaaggtgccaatgaccagcggggttaaacagaagattatgtcggtaataagggagtgggggagcggaagcgacaccctgcggtgcctggccctagccacccatgacaatccactccgcagggaggagatgcacctggaggactcagctaacttcataaaatacgagactaacctgacgtttgtaggctgcgtgggaatgctcgaccctccacggatcgaggtagcctcatcggtgaagctttgtagacaagccggtatcagggttattatgatcactggagataacaaaggcactgccgtagccatatgtcggcgcattggcatctttgggcaggacgaagatgtgacatcaaaagctttcaccggcagagagtttgacgaattgaacccttcagctcaacgtgatgcgtgcctaaatgccagatgtttcgcacgggtggagccttcccacaaaagcaagattgtagaattcctacagtcctttgacgagattaccgcaatgacaggagacggggtgaatgacgcgcctgccctaaagaaggctgagatagggatcgccatgggctcgggcactgcggtggcaaaaaccgcatctgaaatggtgctggccgacgataacttctctaccatagtagctgcagtagaggagggaagggcaatatataacaatatgaaacaatttatccggtacctgatttccagtaatgtgggcgaggtggtatgcatattccttactgctgccctcggcttccctgaggctctcatccccgtgcagttgctttgggtcaacctagtaacagacgggctgccagctaccgccctggggttcaatccaccggacctggatatcatgaataagccccctcggaatcctaaggagcctttgataagtggatggctgttctttcgttatctggcaatcggttgttacgtgggagctgccaccgtgggcgcagctgcatggtggtttatcgccgctgacggagggcctagagtctctttctaccaactgagccactttttacagtgcaaggaagacaacccagattttgaaggggtcgattgcgctatctttgagtctccgtaccccatgacaatggccctttccgtgctagtgaccatcgagatgtgtaatgccctaaactccctgtccgaaaaccagagcctgctgaggatgcctccctgggagaacatttggttagtgggcagtatatgcctttccatgagtctgcattttctgatcctttatgtggaacccctgccgctgattttccagatcaccccattaaacgtcacacaatggctgatggtgcttaaaatcagtctgccggtgattctgatggacgaaacattgaagttcgtcgcacgcaactacctggaacccgccatactggaatag

SEQ ID NO: 108964 - DNA, 3048 bp, synthetic construct
  misc_feature 1..3048: note = Description of Artificial Sequence: Synthetic coding sequence
  source 1..3048: mol_type = other DNA
atggagaatgcccacaccaagacagtagaagaggttctggggcacttcggtgtgaacgagtctactgggctctcactggaacaggtcaagaagctgaaagagcgttggggaagcaacgagctccccgccgaggaaggcaaaactctcttggagctggtgatcgagcagtttgaagacctcctggttcggatccttctccttgctgcctgtatctccttcgttctggcatggtttgaggagggcgaagaaacgataaccgccttcgttgagcctttcgtgatccttctgatactcgtagccaacgctatcgtgggagtgtggcaagaaaggaacgctgagaatgctatcgaagctctcaaggagtacgagcctgagatggggaaggtctaccgccaggacagaaagagcgtgcagaggatcaaggccaaggacatcgtcccgggtgatatcgttgaaatcgccggtgagtcggtgtccgtgataaaacatacagatcccgtacccgacccccgtgccgtcaatcaggacaagaagaacatgctgttctcaggtaccaatatcgccgccggcaaagccatgggggtcgtggttgctaccggcgtgaatacagagatcggaaagatccgggacgagatggtggccactgaacaggagagaaccccacttcagcaaaagctggacgagttcggtgaacagctgagcaaagtaatcagcctgatctgtattgccgtctggatcataaacatcggacacttcaacgaccctgttcatggaggcagctggatccgcggcgccatctactattttaagatcgcagttgcactggctgtagccgccatcccagagggtctgccagccgtgatcactacctgcctggccttgggcactagaagaatggccaaaaaaaatgccatcgtacgatctctaccatccgtggaaaccttagggtgcacatcagtgatctgttccgacaaaacaggcaccttgaccacaaaccagatgtccgtctgccgcatgtttatactggaccgggtagagggcgatacctgctccctgaatgagtttacaataactggttccacctacgcaccgatcggtgaagtccataaggatgacaagccagttaactgccaccagtacgatggcttggtagaactggccactatatgtgctctgtgtaacgactcggctctcgactacaacgaggcgaagggtgtctatgagaaagttggcgaagccacggagaccgccctcacatgtctagttgaaaagatgaatgtgtttgacaccgagttgaagggccttagtaagatagagcgggcaaacgcatgcaattctgtcataaagcagctcatgaaaaaagagttcacactcgaattctctagggatcgcaagagcatgtccgtgtactgcacgcctaacaagccctctcgtaccagcatgtcaaagatgttcgttaagggtgccccagaaggtgtcatcgataggtgcacccacatccgtgtgggatccaccaaagtccccatgacgtccggggtgaagcagaaaatcatgtccgtgatccgggaatggggatccggatccgatacacttaggtgtttagctctcgccacacacgataacccactccgtagggaggagatgcacctcgaagactccgccaattttatcaagtatgaaactaatctgacatttgtggggtgtgttgggatgttggaccccccacgcattgaagtggcctcatcagtgaaactctgtcgacaggcagggattagggtcattatgatcaccggggacaataagggaaccgctgtcgcaatttgtcgcaggattggcatttttggacaagatgaagatgtcacaagcaaggctttcactggccgagagtttgacgagttaaacccaagtgcacagcgagacgcatgcctgaacgcgagatgctttgctcgggtggaaccgtcccataagtccaaaatagtggaatttctccaatctttcgacgaaattactgctatgacaggggacggtgtcaatgatgcccctgccctcaaaaaagctgaaattggcatcgccatgggaagcggtactgcagttgcgaaaacagccagcgaaatggttcttgcagacgataatttttccacgatagtcgcagctgtcgaagaaggccgagccatctataataatatgaagcaattcatccggtacttgatcagtagcaacgtgggcgaggtcgtctgtatctttttgacagcagcactcggcttcccagaagccctgatccctgtccagctgctgtgggttaatttggtgacagatggcctccctgcgacagcactggggtttaaccctcccgacctagatattatgaacaaaccccctaggaatccaaaggagcctctgatctcgggatggctattttttagatacctggccattggctgctacgtgggcgcggcaaccgtgggcgcagcggcgtggtggttcatagccgccgatggggggccaagagtaagcttttatcaactctcacatttccttcagtgcaaagaggataaccccgatttcgaaggggttgattgtgctatctttgagagtccctacccaatgaccatggcactgagcgtcctggttacgatcgagatgtgcaacgcattgaacagtctgagtgagaaccaatccttattgagaatgcctccatgggagaatatctggttagtggggtcaatctgtttgagtatgtccctgcacttcctcatcctgtacgtcgagcctttgcccctcatattccaaattacgccgctgaatgtgacacagtggcttatggtgctgaaaataagtttgcccgtgatccttatggatgagaccttgaaattcgtagctcgcaactatctggaaccaggtaaggagtgtgtgcaacccgctaccaagtcctgcagttttagcgcctgtaccgatggtatttcctggcctttcgtcttgctgatcatgcccctggtcatctgggtgtactcgactgacacaaattttagcgacatgttttggtcttag

SEQ ID NO: 108965 - DNA, 3129 bp, synthetic construct
  misc_feature 1..3129: note = Description of Artificial Sequence: Synthetic coding sequence
  source 1..3129: mol_type = other DNA
atggaaaacgcacatacaaaaacagtggaggaggttctcggtcacttcggagtcaatgaatctactggcctgagcctggaacaagtcaagaaattgaaggagaggtggggctctaacgagttaccagcggaagaagggaaaaccctactggagctcgttattgagcagttcgaggacctgcttgtgcggatcctgttactggccgcttgtatttcttttgtgcttgcatggttcgaggaaggcgaggaaaccatcacagccttcgtcgagccatttgtgattctgctgatcctcgtggccaacgccatcgtcggcgtatggcaagaaaggaatgctgagaacgccattgaagccctgaaggagtacgaacctgagatgggaaaggtataccgccaggatagaaagtccgtacaaagaatcaaggccaaggatatcgtaccgggcgatatagtcgagatcgccgtaggcgacaaggtgccagccgatatcagacttactagtataaaaagtactactctgcgcgtcgatcagtcgatcttgacaggcgaatcggtgagcgtcatcaaacatacggaccccgtccccgatcccagggccgtgaaccaagacaaaaaaaacatgctatttagcggtactaatatagctgctggcaaagcaatgggcgtcgttgtcgctacaggcgtgaacactgagatcggcaaaattagagatgagatggttgccaccgagcaggaacgaacaccgttgcaacagaaactggatgaatttggcgaacagctgtcaaaggtaatcagcctaatctgtattgccgtgtggataattaacataggtcacttcaacgaccccgttcatggaggcagctggatcaggggcgccatctattatttcaaaattgccgtcgccctggcagtagctgcaatcccagagggccttccagcggtcattacaacatgcctggctctgggcaccagaagaatggccaagaagaatgccatcgttcgctccttacctagcgtagagaccctgggctgcacctctgtgatctgcagcgacaagactggaactctgacgaccaatcaaatgtctgtttgtagaatgtttatattagatcgggtcgaaggcgatacttgctctctgaacgagtttaccattactggatccacttatgcccccatcggcgaggtgcataaggacgataaaccagtgaactgtcatcagtacgatggcctggtggaacttgccacaatctgcgccctttgcaacgacagcgccctcgattacaacgaagcgaagggcgtgtacgaaaaagtcggcgaggcaacagaaaccgccttaacttgtctggtggaaaagatgaacgtgttcgatactgaattgaagggactcagcaagatagagagggccaatgcatgcaacagcgtcattaaacagctgatgaagaaggaatttacactggaattctcacgggatagaaagtctatgagtgtgtactgcacacctaataaaccttcgcgtacttcaatgagtaagatgttcgtgaagggcgcgcctgagggtgtgatcgatcgctgtactcatatccgggttggatccacaaaggtgcctatgacttccggcgtcaagcaaaagattatgtctgttatccgggagtggggcagcgggtcggataccctcagatgtctagcattggccacacatgacaatccactccggcgggaggagatgcacctggaggatagcgcaaactttatcaagtacgaaactaacctgactttcgttggctgtgtgggaatgctggacccccctagaattgaggttgcttcgtctgtgaagctgtgtagacaggctggtattagagtcatcatgataacgggtgacaacaaagggactgctgttgctatctgcagacgtattgggatctttgggcaggacgaagatgtcacaagtaaggcctttaccggtcgggaatttgacgagctgaaccccagcgctcagagggatgcctgcctcaatgctcggtgctttgctagagtggaaccctctcacaagtctaagattgtcgagttcctccagagtttcgatgagattaccgccatgaccggggacggggtgaatgacgcgccagcgcttaaaaaggcagaaatcggaatcgctatgggttctgggaccgctgtggccaagaccgcatctgagatggttcttgccgatgacaacttttccacgatcgtagcggcagttgaggagggcagagcgatctacaataatatgaagcagttcatccgatatctgatctcttctaatgtgggggaggtagtgtgcatcttcctaactgctgcactcggcttccctgaggcactgatcccagttcaactcctgtgggtgaatctcgtcactgatggcctgcccgcaacagcattgggctttaatcccccggacctcgatataatgaataagcccccgcgtaatcccaaggaacctttaatcagtggatggctcttttttcgatacctcgccataggctgctacgtgggagcagcgaccgtgggtgcagctgcttggtggttcatagcggcggatggtgggcctcgggtttctttttatcagctgtcacacttccttcagtgtaaagaagataaccctgacttcgagggggtggattgcgctattttcgaaagcccgtaccctatgaccatggcactaagcgttctggtgactatcgagatgtgcaacgctcttaattccctgtctgaaaatcaatcgctcctcaggatgccaccatgggagaacatctggcttgttggatccatatgcctgtctatgagcctccatttccttatcctgtacgtggaacctttaccactcatattccaaattaccccacttaacgtgacacagtggctgatggtgctaaagattagcctccccgttattcttatggacgagactctgaagttcgtggctcgcaactacctagaaccaggaaaggaatgcgttcagcctgccaccaaatcctgcagttttagtgcctgtactgacggtatatcttggccctttgtcctgctgatcatgcctctggtaatttgggtgtattccactgacaccaattttagcgatatgttttggtcctag

SEQ ID NO: 108966 - DNA, 2802 bp, synthetic construct
  misc_feature 1..2802: note = Description of Artificial Sequence: Synthetic coding sequence
  source 1..2802: mol_type = other DNA
tagacaatcactgcatttgtggaaccgtttgttatcttgctgatcttagttgcaaatgcaatagtgggtgtgtggcaggagcggaatgctgagaatgctattgaggcgttgaaggagtacgaacctgagatgggcaaagtgtacaggcaagatcgaaaatccgtccaacggatcaaggctaaggacattgtccccggcgacatcgtggagatcgccggtgagagtgtgtcagtgatcaaacacacagatcccgtccccgacccgcgcgccgtgaaccaggataagaaaaatatgctgtttagcgggacaaatattgccgctgggaaggccatgggcgttgtggtcgccaccggagtaaataccgaaatcggcaaaatcagagacgagatggtggctaccgagcaggagcgcacacctctccagcagaagctcgatgagttcggagaacagctttctaaggtgatctcactgatctgcatcgccgtctggataatcaatattggccatttcaatgatcccgtgcacggcggttcttggatcaggggtgctatctactacttcaaaatcgcggtggccctggccgtggccgcaattcccgagggactcccggctgtcattactacttgccttgccctgggcactcggagaatggccaagaagaatgccattgtacggtcactcccttctgtggaaaccctagggtgtacctctgtgatatgttctgacaaaaccgggaccctaacaactaatcagatgtcagtgtgtcggatgttcatcctggaccgagtggaaggagacacatgcagtctgaatgagttcaccattactgggagcacatacgcacccatcggcgaagtgcacaaggacgataaacctgtcaattgtcatcagtacgatgggctcgttgagctcgccacgatctgcgccctctgcaacgattccgctctggattacaatgaggcaaaaggcgtatacgagaaggtgggagaggccacagagaccgcactgacttgcctggtggagaaaatgaacgtgtttgacaccgagctgaagggcctgagtaaaattgaacgcgctaacgcatgcaacagtgtaatcaagcaactgatgaagaaagagttcactctggaatttagtagagatcgaaaatccatgtcggtttattgtactcccaacaaaccctctcgcacttccatgtccaaaatgttcgttaagggtgcccctgagggggttatcgatcggtgtactcatatccgcgtgggctcaaccaaagttcctatgacgtctggcgtcaagcagaaaattatgagtgtcatcagagaatgggggtctgggagtgacaccttaagatgcttggccctggcgacccatgacaaccccctgcggcgagaggaaatgcacctcgaggactctgctaacttcataaaatacgagactaacctcacttttgttggatgcgtgggcatgctcgaccccccacgaatcgaggttgcatcttccgtaaagttatgtaggcaagctggcatcagggttatcatgattactggagataacaagggaaccgccgttgccatctgtcgccgcatcggcatctttgggcaggacgaggacgtcaccagcaaggcttttacaggacgcgagttcgacgaactcaacccctctgcgcaaagagatgcatgtctgaacgcgcggtgcttcgctagggttgagccctcacataagagtaagatcgtcgaattccttcagagcttcgacgagatcacagcgatgacgggagatggcgtcaatgacgcccctgctttaaaaaaggctgagattgggatcgccatgggaagcggcaccgccgtggccaagactgcctctgagatggtgctcgccgacgataatttctccacaattgtcgcagcggtggaggaaggtagggctatttacaacaacatgaagcagtttatccgctatttaattagctccaacgtcggagaagtggtctgcatctttttgactgcagccctgggctttcctgaggctctcattcctgtccagctgctttgggtgaacttagtgactgacggattgccggcaactgctctcgggtttaatcctccagacctggacatcatgaataagccgccccgcaaccccaaagaacccttgatcagtggttggctcttcttcaggtacctggctatcggatgctatgtgggagccgctaccgtgggagcagcggcctggtggttcattgccgctgacggaggccctagagtatccttttaccaactttctcacttcttacagtgcaaagaggacaatcccgactttgaaggtgtagattgcgccattttcgagtcgccatacccaatgaccatggccctcagcgtgctggtaacaatagagatgtgtaatgcgctcaattctctttcagagaaccagtctctattacgaatgcctccctgggagaatatctggctggtggggagtatctgcctgtcgatgtccttgcattttttgatcttatatgttgaacccctccccctgatctttcaaataacacccctgaatgtcacacaatggctgatggtgcttaagattagtctacccgtcattctgatggatgaaacattgaaatttgttgcacggaactatttggaaccaggcaaggagtgtgtacagccagccacgaagagctgtagtttttcagcatgcactgatgggatctcttggccatttgttttacttatcatgcccttggtcatttgggtatactctaccgatacgaactttagtgatatgttctggtcctag

SEQ ID NO: 108967 - DNA, 3663 bp, synthetic construct
  misc_feature 1..3663: note = Description of Artificial Sequence: Synthetic coding sequence
  source 1..3663: mol_type = other DNA
atgggggacatggccaacaattccgtggcttattccggcgttaagaacagcctgaaggaagctaaccacgacggcgattttgggatcacccttgcagagctacgggccctgatggagctgaggagcacagatgccctgcgcaagatacaggagagctatggggacgtatacggaatctgcaccaagctcaagacctcgccaaatgaaggcctctctggaaacccagccgaccttgagagacgcgaagccgtgtttggcaagaacttcattccccctaaaaagccgaagacctttctacaactcgtctgggaagccctgcaagatgtcaccctgattatcctcgaaattgccgctatcgtgtccctgggtcttagcttttaccagccgcccgagggggataatgctttatgtggggaagtgagcgtgggcgaagaagagggcgagggggagacaggatggattgagggggctgcaatcctgctctccgtcgtctgcgtggtcctggtgacagccttcaatgattggtctaaggagaaacagtttcgtggactgcagtctcggattgagcaagaacagaagttcacggtcatcaggggcggccaagtcattcagattcccgtcgcagacattacggtcggggacatcgcacaggttaaatacggggacctgctaccagccgatggaatcctgattcagggcaacgacctgaagatcgacgagtcgtccctgacaggcgaatcggatcacgtgaagaaatctctcgacaaggacccactgttgctgtccggaacccacgtcatggagggatccgggcgcatggtagtgactgctgtgggtgttaacagccagacaggcattattttcaccctactcggagcggggggtgaagaagaggagaaaaaggatgagaagaaaaaggagaagaaaaacaagaagcaggatggcgccatcgaaaaccggaataaagctaaagcccaagacggggcagccatggaaatgcagccgctgaaaagtgaggagggcggggatggagatgaaaaagacaagaaaaaggccaatcttcccaagaaagagaaatccgtcctccagggtaagttaacaaagctggctgtgcagattgggaaggctggcttactcatgtccgccatcaccgtgatcattctggtgctttacttcgtgatcgacacgttttgggtgcagaagaggccttggttggccgaatgcacgccgatatacatacagtattttgttaagttcttcataataggggttacggttttggtggtggccgtaccagagggcttgccccttgcagtgacaattagcctggcttattctgttaagaagatgatgaaggacaataacttagtaagacatctagatgcctgcgagaccatgggtaatgctactgccatctgcagcgacaaaacaggcaccctgactatgaacaggatgaccgtcgtccaagcatatattaacgagaagcattacaagaaagtccccgaacccgaagccatacctccaaatattctgtcttatctcgtgactggaatctccgtgaactgtgcttataccagcaaaattctcccgcctgaaaaagagggagggctccctcgacatgtgggcaacaagaccgaatgcgccctgctcgggctgctgctggatctgaagagagattatcaagacgtgcgcaatgagataccagaagaggccctgtacaaggtctatactttcaattccgtgaggaagagtatgtcaactgtcttgaaaaattcagatggctcctatcgcattttcagcaagggtgcgtctgagatcattctgaagaaatgtttcaaaatactgagcgccaacggggaggccaaggtcttccgcccacgggatagggatgatatagtgaaaacggtcatagaaccaatggcatcagagggccttaggacaatctgcctagccttccgcgacttccctgctggggagcccgaacctgagtgggacaacgagaacgatatcgtgaccggattaacctgtattgctgtggtgggaatcgaagacccagtgcggccagaggtgccagacgccatcaaaaagtgccaaagggcggggataaccgttcgcatggttacaggcgataacataaatactgcacgagccattgctactaaatgcggcatcctgcacccaggtgaggatttcctctgtctcgaaggaaaggatttcaaccgcagaatcagaaatgagaaaggtgagattgaacaggagaggattgacaagatatggccaaaattaagagtgcttgcccgaagttctcctacggacaaacatacattagtgaaaggtattatcgactcgaccgtcagtgaccagcgtcaggttgttgccgttacgggcgatggcacgaatgatggccccgcactgaaaaaagccgacgtcgggtttgctatgggcatagccgggaccgacgtggcaaaggaagcttcagacataattttgacagacgataactttaccagcatcgtcaaagcggtgatgtgggggcggaacgtgtacgattcgatctccaaatttctgcagtttcaactgactgtgaacgtcgtagcggtcatagtagcatttaccggagcctgcattacccaggattcgccactcaaggcagttcagatgttatgggttaatttgatcatggacactttagcgtccctggcgctggcgacggaaccaccaaccgagtctttgctcctgcgcaagccctatggtcggaacaagccactcattagccggaccatgatgaagaacatcctgggacacgcattttaccaactggtcgtcgtgttcacgctcttgttcgcaggagaaaaatttttcgatatcgattcgggccggaacgcacctctacacgccccaccatccgaacactatactatagtatttaacacatttgtgctgatgcagctgttcaatgagattaatgcccgtaaaatacacggcgaacggaacgtctttgaggggatcttcaataatgcaatcttctgtactatcgtcttgggcacgtttgtggttcagatcatcattgtgcagttcggtgggaagccattctcctgttccgaactgagtatagaacagtggctttggagcatctttctcggcatgggcaccctgctctgggggcagctgatttcaactatccctacatcccggctgaagttcctgaaggaagccggacacggcacacaaaaggaggaaatccccgaagaagagcttgccgaggatgttgaggagatcgatcatgccgaacgcgagctgaggcgaggtcagatactttggttccggggcctaaaccggatacaaacccagatccgcgtggttaacgcattccgaagctcactgtatgagggactcgagaagcctgagtcgaggtccagcatccataacttcatgacgcaccctgaatttaggatcgaagatagcgaaccccacattcccctaatcgatgatactgacgcagaggatgatgctcctaccaagagaaattcttccccccctccctcccccaacaaaaacaataacgccgtagactcgggaatacacttgacaatcgagatgaataaatccgccacctcgtctagcccaggatccccattgcactctttggagacgtcattatag

SEQ ID NO: 108968 - DNA, 3555 bp, synthetic construct
  misc_feature 1..3555: note = Description of Artificial Sequence: Synthetic coding sequence
  source 1..3555: mol_type = other DNA
atgggggacatggcaaacaactccgtggcctatagcggagtaaaaaacagtttgaaggaggcaaaccatgatggcgattttgggatcacgttggcggaactgcgagctctcatggaactcagatccaccgacgcactgcgcaagatccaggaatcatacggagacgtgtatggcatttgcaccaagctcaaaacgtcccctaacgaaggcctgtctgggaaccccgcagacctggaaaggagagaggccgtttttgggaagaattttattccccccaagaaaccaaagactttcttgcagctcgtgtgggaagctctgcaggatgtcactctgataatcctggagatcgcggccatcgtcagcctcggattgagcttttatcagcctcccgaaggcgataatgccctgtgcggtgaagtttcggtaggggaggaggaaggggaaggcgaaaccgggtggatcgaaggagctgccatcttgctgagcgtggtatgtgtggtccttgtgaccgctttcaacgactggtctaaagagaaacagtttcgaggattgcagtccagaattgagcaggaacagaagtttaccgtgataagaggagggcaggttatccagatccccgtggctgatatcacagttggtgacattgcccaggttaaatacggagatcttctcccagcagatggaattcttatccagggaaacgacctgaaaatcgatgaatctagccttacaggggaatccgaccacgtgaagaaatctctggacaaggaccccctccttctgagtggaacacacgtgatggagggtagcggacggatggtggtgactgcggtaggcgttaacagccagactggaataatttttaccctgctgggcgctggcggggaggaggaggagaaaaaggacgagaaaaaaaaggaaaaaaaaaacaaaaagcaagacggcgcaatcgaaaatagaaacaaagctaaggctcaggacggggcagccatggaaatgcagcctctaaaatctgaggaaggtggcgatggtgatgagaaagacaaaaagaaggccaatctccctaagaaagagaaatcagttctgcagggtaaactgaccaagttagccgtccagatcggcaaagcgggtctgctgatgagcgccatcacagtgatcatcctcgttctttatttcgttatcgacacattttgggtccaaaaacggccctggctggccgagtgtaccccaatctacattcagtacttcgtaaaattctttattatcggtgtcactgtgcttgtggtggccgtcccagaggggctccccctcgcggttacaatctcattggcatactctgtgaaaaaaatgatgaaggacaacaatctcgtgcgtcacctcgacgcctgcgaaaccatgggcaacgccactgccatttgctcagacaagacgggcacacttacaatgaacagaatgacggtggtgcaggcatacatcaatgagaagcactataagaaggtgcctgagccagaggctattccacccaacatattgtcgtatcttgttactggaatttctgttaactgcgcatatacatctaaaatcctgcctccggagaaagaaggcgggctccctcgccacgtcggtaataaaacggagtgcgccctgctggggctcttactggatttgaaaagggactatcaggatgtacggaacgaaatccccgaggaagcgctatacaaggtgtatacatttaattcagtgagaaagtcaatgtctacagtgctgaaaaactctgacggaagttatcgcattttcagcaagggggcctctgaaataattctgaagaaatgctttaagattctaagcgccaatggcgaagcaaaggtgttccgaccccgggaccgtgacgatatagtcaagactgttatagaacctatggcctccgaaggtctgaggaccatttgtctggccttccgggactttcccgccggagagccggaaccggagtgggacaatgagaatgacatagttactggcctgacgtgcatcgccgttgtgggcatagaggatccagtgagaccagaagttccggatgcgattaaaaagtgtcagagggcgggcatcacagtgcgaatggtgacaggtgataatattaacactgcacgagccatagcaacgaagtgcgggatccttcaccctggagaggactttctttgtctggagggcaaggatttcaatagaaggatacgcaacgagaaaggggagatcgagcaagagagaatagacaaaatttggccaaagctccgcgtgttggcccggagcagccccactgataagcatacactggtcaagggtattattgacagtacggtgtcagaccagcggcaagtagttgcggtgaccggtgatggcacaaacgatggaccagctctcaagaaagccgatgtggggtttgccatgggcatcgctggcaccgacgtggcaaaagaagcatcggacatcatcctgaccgatgacaacttcaccagtattgtaaaagccgtgatgtgggggcgcaacgtgtatgacagcattagcaagttcctgcagtttcaactgactgttaacgtggtcgcagtaattgtggccttcaccggtgcgtgcatcacccaggattcccctctgaaggctgtacaaatgttatgggtgaacctgatcatggacaccttagccagcttggcgttagccacagagccccccaccgagtcactcctgctgagaaagccatacggcagaaacaagccattaatttcccggaccatgatgaaaaatatcctcggtcatgccttttatcagttggtggttgtgttcacgctactgttcgcaggcgagaagtttttcgatatagacagtggtcgtaatgcacccctacatgcccctcctagtgagcattacacaatcgtatttaatacttttgtgttaatgcagctgttcaatgagattaatgccagaaaaatccatggcgaaagaaatgtattcgagggaatcttcaacaacgcaattttttgcaccattgttctaggaacgtttgtcgtacagctaatcagcactattccaacatccagactgaaattcctcaaagaggccggccacggcacacagaaggaagaaattccagaggaggagctcgcagaagatgtagaagagattgaccacgcagagagggaactgaggagggggcagatactttggtttagaggactgaacaggattcaaactcaaatccgggtggtgaatgcttttcgtagtagcctatatgaggggctggagaaacctgagtccagatcttcgattcataattttatgacgcatccggagtttaggatcgaggatagcgagcctcacatccccctcattgacgatactgacgctgaagatgacgcaccaacaaagcggaattcgtctcccccgccctcgcctaacaagaacaataacgccgtggatagcggcattcacctgaccattgagatgaacaagagcgcgacctcgtcatctccaggaagccctctgcattcccttgagacttctctgtag

SEQ ID NO: 108969 - DNA, 3531 bp, synthetic construct
  misc_feature 1..3531: note = Description of Artificial Sequence: Synthetic coding sequence
  source 1..3531: mol_type = other DNA
atgggtgacatggccaacaattctgtagcttatagcggagtgaaaaactccctgaaagaagccaaccatgacggcgatttcggaataactctcgcagagctccgggcccttatggagctcaggagtacagatgcgctgcgtaagatccaggagtcctatggggacgtatacggcatctgtactaagctgaaaactagcccgaatgagggcctctccgggaaccctgctgatttagaaaggcgcgaggccgtgtttgggaaaaacttcattcctccaaaaaagccaaaaacatttctgcagctggtatgggaagctctgcaggatgtaactctcataattctggaaattgccgccattgtgagtctcggcttatcgttttaccagccccccgaaggtgataatgctttgtgcggcgaagtatcggtcggcgaagaggagggagaaggggagactggctggatagaaggagctgccatcctgctttctgtggtttgcgtggtgctagtcactgcgttcaatgattggtctaaggaaaaacagtttcggggactacagtcccgaatcgaacaggagcaaaaattcaccgtgattcgcggtggccaggtaattcaaattcccgtcgctgacattacagtaggcgacatcgctcaggttaaatatggtgacctactgccggctgatggaatcctgatccaaggaaacgatctcaagattgacgagtcgtcgctgacaggggagagtgaccacgttaaaaagagcctggataaggatccactccttctctcagggactcacgtgatggagggcagtggcagaatggtcgttacagcagtgggagtaaattcacagaccggcatcattttcacactgttaggcgctggaggcgaagaggaagaaaaaaaagatgagaagaaaaaagaaaagaaaaacaagaagcaggatggggccatcgaaaatagaaacaaagcaaaagcccaggatggagctgccatggaaatgcaacctctcaaatccgaggaggggggagatggagatgagaaggacaaaaagaaggccaatttgcccaagaaagaaaaaagtgtactccaaggcaaacttaccaagcttgccgtgcagattggcaaggcaggactgctgatgagtgccataacagttattatacttgtgctgtacttcgtgatcgatacattctgggtgcagaaaagaccatggctggccgagtgcacgccaatttacattcaatacttcgtcaaattcttcatcatcggcgttaccgtactggtggtggcagtgccagaagggcttccgctggctgttactatttccctggcttacagtgtcaaaaaaatgatgaaggataataaccttgtgaggcacttggacgcctgtgaaaccatggggaacgccacggctatttgcagcgacaagaccggaacgctgacaatgaatcgcatgacagtcgtccaggcatacatcaacgagaagcattataaaaaggttcccgaaccagaagccattcccccaaatatcctctcctacctagtgacggggatcagtgttaattgtgcctacacgtcaaaaatactccctccggaaaaagaaggtggtctgcctcgacacgttgggaataaaaccgaatgcgctctgttaggtctgctcctggacctcaagcgcgactaccaggacgttaggaacgagattcctgaggaagccctttacaaggtgtacacatttaacagcgttcgaaagagcatgtccaccgttcttaagaattcagacggctcatatagaatattttccaagggcgcctctgagatcatattaaagaaatgctttaaaattttgtctgcaaatggcgaagcaaaagtgttccgcccaagagatagagatgatattgttaagaccgtgattgagccaatggcgtctgagggcttgcggacaatctgtctcgcctttcgggatttccctgctggcgagcctgaaccagaatgggataacgagaatgatatagttaccggattaacttgcatcgccgtggttggtattgaagatcctgttcgccctgaggttccggatgcgatcaagaagtgtcagagggcggggataaccgtgcgcatggtgactggagacaatatcaatacagccagggcaatcgcaacaaaatgcggaattcttcatcccggagaggattttctgtgcctcgagggcaaagattttaatcggagaatccggaacgagaagggagaaattgagcaagagcggattgataagatctggcctaagcttcgagtacttgccagaagttcccccaccgataagcacacactcgtgaaaggcatcatagactctactgtgagtgatcagcggcaagtggtcgccgtaacaggggacggcaccaatgacggccctgccctgaagaaagctgacgtaggcttcgcaatggggatcgcgggcaccgacgtggctaaggaagctagcgatatcattctcaccgatgacaacttcacatccatcgtgaaggcggtgatgtggggccgaaacgtgtatgattctatatccaaatttttgcagttccagctgacagtgaacgtcgttgccgtcattgtagccttcactggagcctgcattacccaggactcccctctgaaggctgtgcagatgctgtgggtgaatctgattatggatacactggctagcctggcactggccaccgaacctccaaccgagagcctgctgctgcgcaaaccatatgggcgcaacaaaccactgatatcccggacaatgatgaagaatatcctcggccatgcattttaccagctcgtggtggtcttcacccttctctttgccggggagaagttcttcgacatagatagtggtcgaaatgcacccctccacgcccccccctccgaacactacaccatcgtgtttaacacttttgttctgatgcagctgttcaatgagatcaacgccaggaagattcacggtgagaggaacgtttttgagggaatcttcaacaatgccattttctgcacaatagttctgggtacattcgtcgtgcaaatcattatcgtgcagttcggcggcaagcctttcagttgttccgaattgtcaattgagcagtggctgtggagcattttcttaggcatgggaacactgctttggggccagctcatctcaacaataccaacctccagacttaagtttctgaaagaagcaggccacggtactcagaaggaagagatcccagaggaggaactagcagaggatgtagaggaaatcgaccatgctgagcgggaattgcgccgggggcaaattctgtggtttagaggactgaaccggatccaaacacagatggacgttgtgaatgcctttcagtctggctcgtccatccaaggggctctaagacggcagcctagcatcgccagtcaacaccatgatgtgaccaacatcagtaccccaacccatgtggtgttttcaagttccaccgcctccaccaccgtgggatacagttcgggcgaatgcatctcttag

SEQ ID NO: 108970 - DNA, 2892 bp, synthetic construct
  misc_feature 1..2892: note = Description of Artificial Sequence: Synthetic coding sequence
  source 1..2892: mol_type = other DNA
atgtttctcgtcatcggaacacacgtgatggagggtagtggtcgtatggttgtgaccgccgtgggggtaaacagtcaaactgggattatttttaccctgctgggtgcgggaggcgaggaggaggaaaaaaaagacgagaagaagaaggagaagaagaataaaaagcaggatggagctatcgagaaccgcaacaaggcaaaggcacaggacggggctgctatggagatgcaaccattaaagagtgaggagggtggagatggagacgagaaggacaagaagaaggcgaatctccccaagaaggagaagagtgtgctgcagggtaaattgactaaacttgcagtgcagatcggaaaagctggtctgctgatgtctgcaatcactgttataattctcgtactttacttcgttattgacacattctgggtgcagaaaagaccgtggctcgcagaatgtacccccatatatatccagtacttcgtgaaattcttcattattggggtgacggtgctggtggtggctgtacctgagggccttccactagccgtgaccatctctctggcttattcggtgaagaagatgatgaaagacaacaacctggtgaggcacctggatgcatgcgaaaccatgggcaacgccactgctatctgcagcgacaaaacaggaacacttacaatgaatagaatgactgtggtgcaggcttacattaatgagaagcattacaagaaagtcccagagccagaagcgatcccccccaacatcctcagctacctggtgacggggatctccgttaactgtgcttacacgagtaaaatcctgccccctgaaaaggagggtggcctgcctagacacgtcggaaacaagaccgagtgtgcactgctgggactgctgttggacctgaagcgtgactaccaggatgtgaggaacgagatccctgaggaggcactgtacaaggtttatacattcaactcagtgcggaaatctatgtctacggtgcttaaaaactccgacgggtcctatcgtatatttagcaagggtgcgtccgagatcattctcaaaaagtgtttcaagattttaagcgctaatggggaggccaaggtcttccgccctagagaccgggatgatatcgtgaaaacagtgattgaacctatggcatctgaaggactcagaaccatttgccttgcctttagagatttccccgccggagagccagagcccgaatgggacaatgagaatgacattgtgaccggccttacctgcatcgctgtcgtgggcatcgaggatccagtgaggccggaagtccccgacgccatcaaaaagtgccagagggccggcatcactgtccggatggtgacaggtgacaacattaatactgctagggccattgctacaaagtgtgggattttgcaccccggggaggatttcctatgtctggagggcaaagatttcaaccgacgcatccgcaatgaaaagggtgagatcgagcaggagcggattgataagatctggcccaagctgcgggtgctggcgcgctcctccccgacagacaagcacaccctcgtcaaaggaatcatcgacagcaccgtctcagaccagcgacaggttgttgccgtgacaggagatgggaccaatgacggacccgcgctcaagaaggccgacgtgggcttcgccatgggtattgctggcactgatgtggccaaagaggcatccgacatcatccttaccgatgataattttaccagtattgttaaggccgtgatgtggggaaggaacgtttacgatagcatctcaaagtttctgcagtttcagcttaccgtgaatgttgtcgcagtgatcgttgcgttcacaggagcgtgcattactcaagactctcctttgaaagctgtccagatgctttgggtcaacctgattatggacactctcgccagccttgctctcgccaccgagcccccaacggaaagcctcctgctacgtaaaccgtatggtagaaataagcctctgatcagccgcaccatgatgaaaaacatccttggacacgcgttttatcagcttgtggtagtttttacactactcttcgcaggcgaaaaattttttgacatcgactctggcaggaacgcccctcttcacgcacccccgagcgaacattacaccattgtgttcaacacgttcgtcttgatgcagcttttcaacgaaattaatgctaggaagatccacggagaaaggaatgttttcgaggggatcttcaacaacgcaatattttgtactatcgtgctgggcactttcgttgtgcagatcataatcgtacagtttggcggtaagcccttcagctgttccgagctttcaatcgaacagtggctgtggtccatattcctgggcatgggaactttgctgtggggccagctgatctcgaccattcccacttctcgcttaaaattcctgaaagaggctggccatggcacacagaaagaggaaattccagaggaagaacttgctgaggacgtggaagaaatcgaccatgccgaacgtgagctccgccggggacaaatactttggttccgcggattaaatagaattcagacccagatccgcgtcgtgaacgcgtttagaagctcactttatgaagggctggaaaagcccgaatcaagatcatcaatccacaactttatgactcatccagaatttaggattgaggactcagagcctcacatccctttaatcgatgacactgacgccgaggacgatgccccgaccaaaagaaacagttctccaccacccagcccaaataaaaataataatgccgtcgattctgggatccacctaacaatagaaatgaacaagagtgccaccagctccagcccgggcagccccctccacagtctggagacctcactctag

SEQ ID NO: 108971 - DNA, 3663 bp, synthetic construct
  misc_feature 1..3663: note = Description of Artificial Sequence: Synthetic coding sequence
  source 1..3663: mol_type = other DNA
atgggtgatatggccaacaattctgtggcatatagtggcgtaaaaaacagtctcaaagaagccaaccatgatggtgacttcggcataactctggccgagctcagagccctgatggagctccggtctactgatgctttgcggaagatccaggaatcatacggggacgtgtacggcatctgcaccaaactcaagactagtccaaacgagggactgagcggaaatcctgctgacctggaaagaagagaggccgtcttcgggaaaaatttcatcccacccaagaagcctaagaccttcctgcagctggtctgggaggcgctgcaggacgtgacccttattattctcgagatcgcagccatagtatctctgggcttgagcttctaccagccaccagagggcgacaacgctctttgcggggaggtgagcgtgggggaagaagaaggcgaaggggaaactggttggatagagggcgcagccatcttgctctctgtggtgtgtgtggtcctggtgacggcctttaacgactggtctaaggagaagcagtttcggggtctgcagagtcggattgaacaggaacagaaattcaccgtcatacgtggtggccaggttattcagattcccgtggctgacatcacggtcggcgacattgcgcaggtaaagtacggggatctgctccctgcagacgggattttgattcagggcaatgacctgaagattgatgagagtagtctgacgggcgagagtgatcacgtgaaaaagagccttgacaaagatcccctgctgctcagcggaacccacgtcatggaaggatcaggccggatggtggttaccgctgtaggggtgaacagtcagacaggaatcatctttaccctgttgggggccggaggtgaagaagaggaaaaaaaggacgaaaaaaaaaaggagaaaaagaacaaaaagcaagacggcgctattgaaaatcgaaataaggctaaggctcaagatggagccgcaatggaaatgcaaccactaaaatccgaggagggaggggatggagatgaaaaagacaagaaaaaggcaaaccttcccaaaaaggagaagagtgtgctgcaggggaaactgaccaaactcgccgtgcagattggaaaggctggcttgcttatgagcgcaatcacggtgatcatcctcgtgctctatttcgtcattgacacattctgggtccagaagcggccatggctcgcagagtgtacgcctatctatattcaatatttcgtgaagttctttatcataggtgtgacagttttggtggtggccgtaccagaggggctgccactggctgtgacaatatccttggcctatagcgttaagaagatgatgaaggataataatctggtgaggcacctcgacgcctgtgagacaatgggaaatgcgacggcaatttgttctgataaaacagggactcttactatgaacaggatgactgtagtacaggcctatatcaacgagaaacattacaagaaggttccagagccagaggccataccccccaacattttatcctacttggttacaggtatcagtgtcaattgcgcatataccagcaagattttgcctcccgagaaagaagggggtctgccaagacatgtggggaataagactgagtgtgctctgctaggactgctgctggaccttaaaagagactatcaagatgtgagaaacgagatcccagaagaggccctgtacaaggtgtatacctttaatagcgtccgcaagtcaatgagcactgtcttgaagaatagcgacggctcttatcggatcttttcaaaaggcgcttctgaaattatcctgaagaaatgttttaagatcttgtctgccaacggagaggccaaggtgttccgtcctcgagatcgggatgatattgtgaagacagtgattgagccaatggcatccgaggggttacggacaatctgcttggcttttcgggattttcctgccggggagccagaacccgagtgggataacgagaatgacatcgtgacaggtctgacctgcatcgcagtggtggggattgaggatccggtgcgtccagaggttcccgatgcgatcaaaaaatgtcagcgcgctggtattaccgtgaggatggtaacaggcgacaacattaataccgctagggccattgcaacgaagtgtgggatcctgcaccccggagaggactttctgtgtctagagggaaaggactttaatcggcggatcaggaatgagaagggggagattgagcaagaaaggattgacaagatctggccaaagctgcgtgttctggctaggtcttcacctacggacaaacataccctcgttaaggggattatcgacagtacagtcagtgaccagcggcaagtcgtggccgtgacaggcgatggcaccaacgacggccccgccctgaaaaaggctgacgtagggtttgctatgggcattgccggaaccgatgtcgcaaaagaggcctcagatattatcctgacagacgataacttcacttccatcgtcaaggctgttatgtggggtcgcaacgtgtacgactcaatttccaaattcctgcagttccagctgactgttaatgtagttgcagtgatcgtggcattcaccggcgcgtgcatcacccaggatagcccgctaaaagcggtacagatgttgtgggtgaacctcattatggataccctggcgtctctggccttagcaacagaaccaccaaccgagagcctgttgcttcgcaagccgtacggccggaacaaaccactaatcagccggaccatgatgaaaaatatactggggcacgctttctaccagcttgtcgttgtattcacattgttgtttgccggggaaaagttcttcgacatcgactccggtagaaatgctcctctacacgccccaccctccgaacattacacgatcgtgttcaacacgtttgtcctgatgcagttattcaatgagattaatgcaagaaagattcatggggagaggaacgtttttgaaggaattttcaataatgcgattttctgtacaatcgtgctgggaacattcgtggtccagataataatcgtgcagttcggagggaagcccttcagctgcagcgaactcagtatagagcaatggctatggagtatcttcttaggcatggggaccctcctgtggggacaattgatttccaccattcctacctcaaggcttaaatttctcaaggaggccggccatggcacacagaaggaagagatccccgaggaagaactggcagaagatgttgaggagatagaccacgccgaacgggagttacggagagggcagatcctctggtttcggggcttgaaccggattcagacgcagatacgtgttgtgaacgctttccgcagttcactatacgaagggctggaaaaacccgagtccaggtcaagtatccataatttcatgacacatccagaattccggattgaggatagcgagccacacatccccttgattgatgacaccgatgctgaggatgacgccccaaccaaacgtaactcttcccctccccccagccctaacaagaacaacaatgctgttgacagtgggattcatttgaccattgagatgaacaaaagcgccacttcgagctcccctggatcgccccttcacagtctggaaacttcactgtag

SEQ ID NO: 108972 - DNA, 306 bp, synthetic construct
  misc_feature 1..306: note = Description of Artificial Sequence: Synthetic coding sequence
  source 1..306: mol_type = other DNA
atgggggacatggcaaacaacagcgtggcctactcaggcgtcaaaaatagtctcaaagaagcaaaccatgatggagatttcggaatcactcttgccgagctgcgggctcttatggagctgcgatcaactgatgctctgcgtaagattcaggagagttatggcgatgtctacggcatctgtacgaagctcaaaaccagccccaacgagggggagttttattacgcatgtttttggtttttcgtacagagagtactttacatttggctgattaacgagcacgcctacatcattctggccattgtgtag

SEQ ID NO: 108973 - DNA, 3600 bp, synthetic construct
  misc_feature 1..3600: note = Description of Artificial Sequence: Synthetic coding sequence
  source 1..3600: mol_type = other DNA
atgggcgatatgaccaattcggatttttattccaagaaccagcgcaacgagagctcccatggaggcgaatttggatgtacaatggaggagctgaggagtctcatggaactgaggggcaccgaagccgtcgtgaaaattaaagagacgtacggagatacagaggccatttgccggcggttgaagacaagtccagtggaaggtcttccaggcacagcgcccgacctcgaaaaaagaaaacagattttcggacagaattttattccacccaagaaacctaagacatttctgcagctagtttgggaagcactccaggatgtgacccttatcattttggagattgcggccatcataagtttgggactcagtttctaccatcctcctggcgaggggaatgaaggctgtgcaacagctcaggggggcgcggaagatgaaggcgaagcagaagccgggtggattgaaggcgctgctattttactgagcgttatctgcgtggtgctggtgactgcctttaatgactggtctaaagagaaacagtttagaggcctgcagtcacggatagaacaagagcaaaaattcaccgtggtgcgtgcgggccaggtggtccagattccagtcgccgagatcgtggtgggcgatatcgcccaagtcaagtacggagatctgttgccagcagatgggctattcattcaggggaacgacctaaagatagatgaaagtagccttacaggggaatccgatcaggttaggaagagtgtggataaagacccaatgctactttccggaactcatgttatggaagggtcaggtcgtatgttggtgacagcagtgggcgtcaatagccagacagggattattttcacattgctgggggcaggcggggaagaggaggagaagaaagataagaagggtgtgaaaaagggggatggcctgcaactgcccgcagccgacggcgcagccgcttcgaatgctgcagactcggctaacgcctcgctcgtcaatgggaaaatgcaggatggaaatgtggacgcatctcagtctaaggcgaagcagcaggatggcgcggccgcgatggagatgcagccgttgaagtctgccgaagggggagatgctgatgacagaaagaaggcttctatgcacaagaaggaaaaatccgtgctacagggcaagctaacaaaactcgcagtgcagattgggaaagccggcctggtgatgtccgctatcactgtaattattctagttttgtattttactgtcgacactttcgtggtgaacaaaaaaccatggctgccggagtgtacgcccgtgtacgtccagtacttcgtaaaatttttcatcatcggcgtgaccgtcttagtggttgccgtgcctgaaggtctacccctcgctgtgactataagtctggcatactccgtgaaaaagatgatgaaggataacaatctcgtacggcacctcgacgcctgcgaaactatggggaatgccaccgcaatctgctcggacaaaaccgggacattaacaacgaaccgcatgaccgttgtgcaggcctatgtcggcgacgtgcactataaagaaatacctgacccttctagtattaacactaaaactatggaactgcttataaatgcgatagccatcaactccgcatacactaccaagattctgcctcccgaaaaagaaggcgccctcccacgccaggtgggtaataagactgagtgcgggcttctgggcttcgtgctcgatctgaaacaggactatgaacccgtacggtcccagatgccagaggagaagctgtataaggtgtacacctttaatagtgtgagaaagtcaatgagcaccgttatcaaactccccgatgaatccttcaggatgtactccaaaggcgcgtctgagatcgttctcaaaaagtgttgtaaaatcctgaatggcgccggcgagccccgagtgttcaggccacgggaccgggacgagatggttaagaaagtaattgagcccatggcctgcgacggcctacgcaccatctgtgtagcatacagggattttccttcctctcctgaacccgattgggataacgaaaatgacattttgaatgagttgacatgtatttgtgtggtgggcattgaggatccagtgcgcccagaagtgcccgaagcaattaggaaatgccagagagctgggataacagttagaatggtgactggcgacaacataaacacagcgagggcgattgcaatcaagtgcgggatcatccaccccggagaagactttctgtgtcttgaggggaaagagttcaatcgtaggatcaggaatgaaaagggtgaaatagagcaggaacgaatcgataaaatttggccaaaactacgcgtgctagcacgctcaagccctactgacaagcataccctcgtgaagggtatcatagatagtacccatacagagcagagacaggttgttgctgtcacaggcgacggcaccaatgacggccctgctctgaaaaaggccgatgttggctttgcaatgggaattgccggcaccgatgtggccaaggaggcctctgacatcatattgactgacgacaacttcagttcaatcgtgaaggcagtaatgtggggccggaacgtgtacgactctatcagcaagtttctgcagttccaactcactgtaaatgttgtggcagtgatcgttgccttcacgggagcttgcattacacaggatagccctctaaaagcagtacagatgctctgggtaaacttgatcatggataccttcgccagtctcgcgttggcgaccgaacccccaactgagactctgctgctgaggaagccgtacggtagaaataaacctctcatttctagaaccatgatgaagaacattctgggacacgccgtatatcagttggccttgatttttacactattatttgtcggggaaaagatgttccagatcgattctggcaggaatgccccactgcatagccctccttccgagcattatactataatttttaacacatttgtcatgatgcagctttttaatgaaattaacgcccggaagattcacggagagagaaacgtattcgatgggatcttcaggaatccgatcttctgcacaatcgtgctgggcacctttgccatacaaatcgtcattgtgcagtttggcgggaagccatttagctgctcgcctttgcaactggaccagtggatgtggtgtatattcattgggttaggcgagctggtctgggggcaagtgattgctacaattccaacctccaggttaaagttcctcaaagaggcagggcgactgacacagaaggaggagatccctgaggaggaactgaatgaggacgtggaggaaattgaccacgccgaacgcgaactgcgtagagggcagatcttgtggtttcggggcctcaataggatccagacccagatcgaggtggtgaacacctttaaaagcggcgctagcttccagggtgccctgcgtcggcaaagcagcgtgactagtcagagccaggacgtcgccaacttaagtagcccgagtcgcgttagcttgtcaaatgcacttagcagtcccacctccctacccccagccgcagccggcagggaatag

SEQ ID NO: 108974 - DNA, 3690 bp, synthetic construct
  misc_feature 1..3690: note = Description of Artificial Sequence: Synthetic coding sequence
  source 1..3690: mol_type = other DNA
atgggcgatatgaccaacagcgacttctattccaagaaccaacgtaacgagagctcacatgggggggagtttggatgtactatggaggaattaaggtccttaatggaactgcgcggaacagaggctgtcgtcaagattaaggaaacttatggagacacagaggcaatatgtaggagacttaagacttcacccgtagaagggctccccggtactgccccagacctggaaaagagaaaacagatattcggccagaacttcatacctcctaagaagccaaagacgtttctgcagctggtgtgggaagccttacaggacgtcacactgattatactggagatcgctgctattatcagcctgggcctcagcttctatcacccccccggagagggcaacgaaggatgcgctactgcccagggaggagctgaggacgaaggggaagcagaggctgggtggattgagggagccgccatattactctctgttatctgcgtcgtgctggttacagcctttaatgattggtctaaagagaagcagtttagagggctgcagtcgaggattgaacaggagcaaaaattcactgtggtgcgcgcagggcaagtggtacaaattcctgtggcagaaattgtggtcggcgatatagcccaggttaaatatggagacctgcttcccgctgatggcctgttcattcagggaaacgacttgaagattgatgagagctcactgactggagaaagcgatcaggtccggaaaagtgtggacaaagatcccatgttgttgagtggaacccatgttatggagggcagcggaaggatgctggtcacagccgtcggcgttaattcacaaaccgggattatcttcaccctgctgggagccggcggggaggaggaagaaaagaaagataaaaaaggtgtgaagaaaggggacggactacaactgccagctgccgacggggctgccgcatctaacgccgccgattccgctaatgcttccctggtgaacgccaagcagcaggacggggcggccgccatggaaatgcaaccactgaaatccgctgagggcggggacgccgatgatcgcaaaaaggcgtcaatgcataagaaggaaaagtctgtcctgcagggcaaactaacaaaattggcggtacagattggcaaagctggtctggttatgtcagcaattaccgtgattatcttggttttgtatttcacagtggacactttcgtggtgaacaaaaaaccctggcttccagaatgcaccccagtctacgtccaatattttgtaaagttcttcattatcggagtgacagtgctggtggtggcggtgcccgaaggactccctctggcagtcactatcagcctcgcctactccgtcaagaaaatgatgaaggataacaacttagtgcgacacctcgatgcatgtgagacaatgggcaacgccacggctatctgtagtgataagaccggaactctgactacaaacaggatgaccgtggttcaggcctatgtaggtgacgtgcactacaaggagattccagatccgtcatctataaacaccaagactatggaattgctcattaacgccatagctattaacagtgcctacaccacaaagatcttgcctcccgagaaagaaggagcattgccacggcaggttggaaataaaaccgagtgcggcttactggggttcgtgctggatttgaaacaggattacgagcctgtgaggtcgcagatgcccgaagagaagctttataaggtctacaccttcaacagtgtccggaagtcgatgtccactgtcataaagctacctgacgagtccttcaggatgtactccaagggggcttctgaaatagtgctgaaaaagtgctgtaaaattcttaatggggcgggagagccccgggtcttccgtccccgcgatcgggatgagatggtaaagaaagtaatagaaccaatggcttgcgatgggctgcgaactatttgtgtggcgtacagggattttccgtcgtcgccagaacctgactgggacaacgagaatgacatcctaaatgaactgacatgtatctgcgtggtaggaattgaagatcccgtgaggcctgaggtcccagaggctattcgaaagtgccaaagggccggaattaccgtccggatggtaacaggagacaatattaataccgcccgagctatcgcgataaagtgtgggattatacatccaggagaggattttctgtgtctcgaggggaaggaattcaacagacgtattcggaatgaaaagggggagatcgaacaggaacgtatcgataagatttggcctaaattgcgggttttggcccgatccagccctacagacaagcacacactagtgaaaggcatcattgactcgacgcatacagagcagcggcaggtcgtggccgtgaccggcgacgggacaaatgacggccccgccctgaaaaaagccgacgtaggttttgcaatgggcattgctggcactgatgtcgcaaaagaggcctccgatatcatcctgactgatgataatttcagctctatcgtcaaggctgtcatgtggggcagaaatgtctacgattcaataagcaaattcctgcagtttcaactgacggtgaacgtggttgctgttatcgtggctttcaccggggcttgcataacgcaggactcccccctgaaagccgtgcagatgctttgggtgaacctgataatggacactttcgcttctctggcattagccaccgagcctcctacagaaaccctgctcctgcggaagccatatggtaggaataagcccctgatttccaggacaatgatgaagaatatcctcggacacgccgtgtaccagctggcactcatattcactctgctttttgtgggggagaagatgttccaaatagatagcgggcgaaacgctccgctgcactcgccaccaagcgagcactatactatcatattcaacacttttgtcatgatgcagctgtttaatgaaatcaacgccaggaagattcacggcgagcgtaacgtgttcgacggtatattccgcaaccctatcttttgcactattgtcctggggacctttgcaatccagattgtcatcgtgcagtttgggggcaaaccgttttcttgcagccctctgcagctggatcagtggatgtggtgtatcttcattggactgggcgagcttgtttggggacaggtgatcgctaccatccctaccagtcgtctaaagttcttaaaagaggccggacgactcacccagaaagaagaaatccccgaagaagaacttaacgaggatgtggaggaaattgaccatgcagaaagggagctgagacgcggccagatactgtggttcagggggctcaacaggattcaaactcagattagggtcgtgaaggcctttagatcgtcgttgtacgaagggttggaaaagccggagtcacgcacttctattcacaatttcatggcccatcccgagtttcgaattgaagattctcagccacacatccccctaatcgacgataccgacctggaggaggacgccgctttaaaacagaacagttcgccaccgagtagcctgaacaagaataacagtgccatagattcgggcattaacctcactaccgatactagtaaatccgccacctccagctccccaggaagtcctatccatagtctagagactagcttgtag

SEQ ID NO: 108975 - DNA, 3732 bp, synthetic construct
  misc_feature 1..3732: note = Description of Artificial Sequence: Synthetic coding sequence
  source 1..3732: mol_type = other DNA
atgggcgatatgacgaacagcgatttttacagcaaaaaccaacgaaatgagtcttctcatggaggggaattcggctgcactatggaggaactccggtcactgatggaactgcgcgggaccgaagcagttgtgaagatcaaagagacctatggtgatacagaagccatttgtagaagattaaaaacctccccggtggaaggattacccggcaccgcccctgacttggagaagcgcaaacaaatatttggccaaaacttcatcccaccaaagaaaccaaaaactttcctgcagctcgtgtgggaggctctgcaggatgttaccctgattatcctggaaatagctgccatcatcagtttaggactatcgttttatcatccccctggagagggcaatgagggatgcgccactgctcaaggcggagccgaggatgagggcgaagccgaggccgggtggatcgagggagcagccattcttctttccgttatttgtgtggtactcgtcacggccttcaacgactggtctaaggagaagcagtttagggggctgcaatctaggatcgaacaggagcagaagtttacagtggttcgggcaggacaggttgtccaaatccccgttgccgagattgtggtcggtgacatcgcccaagtgaaatatggcgacctgctgcctgctgacggtctattcatccagggcaatgatctcaaaatcgatgagagttctctaactggcgagtccgaccaggtgaggaaatcagtcgataaagaccctatgcttcttagcggaacccacgtcatggagggcagtgggagaatgctcgtcacagctgtgggagttaattcccagaccggtataatattcacattgctcggtgcaggaggggaggaggaggaaaagaaggataaaaagggagtgaagaaaggggatgggttgcagctgcctgcggccgatggggcggccgcatctaacgcagccgatagtgctaacgccagtctggtcaatggaaaaatgcaagatgggaacgtagatgcctcccagagtaaagcaaagcagcaagacggcgcagcggccatggagatgcagcctttgaaatccgccgaaggtggagacgccgatgaccgaaaaaaggcgagcatgcacaagaaagaaaaaagcgtcttgcaggggaagctgacaaagttggccgttcagattgggaaggcgggcctggtgatgtctgccatcaccgtaatcatacttgtcctgtactttactgttgacactttcgtggtgaacaagaaaccatggttgccagaatgcacaccggtatatgtacagtacttcgtgaagttcttcattatcggcgtcacggttttagtcgtggccgtcccggaaggccttccacttgcagtgacgataagtttagcttactctgtcaagaagatgatgaaggataacaatttagtcaggcacctggatgcatgcgaaacaatggggaatgctacggcaatctgctcggacaagaccggaacattgactactaaccgtatgacagtggtccaggcttacgtcggcgacgttcactataaggaaatccccgatccctctagcataaacactaaaaccatggaactgttaatcaatgctattgctataaatagcgcctacaccacaaagatcctccccccagagaaggagggcgcattacctaggcaggtgggcaataagacggaatgcggactcctgggcttcgtcctcgacctaaagcaggactacgagcccgtacggtcacagatgcccgaggaaaagctttacaaggtgtacacatttaacagcgtacggaagtctatgtctacagtgattaagctcccggatgagtcctttcggatgtatagcaaaggcgccagcgagatcgttctcaaaaagtgttgtaagatcctcaacggtgccggcgagccaagagtttttaggcctagggaccgggatgagatggtcaagaaagttatcgagcctatggcatgcgatgggctgaggacaatctgcgtcgcatatcgagacttcccatccagccccgagcctgattgggataatgagaacgacattctgaatgagttaacatgtatctgcgtcgttggtatcgaagacccggtacgacctgaagtgcccgaggcaattcgcaaatgccagagagctggcatcactgttcgcatggttacaggagataacattaacactgccagggctatcgccatcaagtgcgggatcatacatcctggggaagacttcttatgtcttgagggcaaggaatttaatcggaggatcaggaacgagaagggcgagatcgaacaggagcgcatcgataagatctggcccaaattgagagtattggctagatcatcacccacggacaagcatacacttgttaagggcatcattgattccacccataccgaacagcgacaggttgtggcagtgaccggcgatggaaccaatgatggccctgctctgaagaaggctgatgtgggctttgccatgggtatcgcggggaccgacgtggccaaggaagcctccgatattatcctaaccgatgacaattttagctcaattgtcaaggctgtcatgtggggacgaaacgtctacgactcaatctcaaagttccttcagtttcagctgacggtgaatgtagtagcagtcatcgtggctttcaccggagcctgtataacccaggacagcccgctgaaagcagttcagatgttatgggtgaatctaataatggatacttttgcaagcctggcgctcgcaaccgagccccccactgaaactttattgctccgtaaaccatatgggcggaataagccactcatctcacgtaccatgatgaaaaatatattaggtcacgccgtttaccaactggctctgattttcactctcctgttcgttggagagaagatgtttcagattgattctggtaggaacgctcccctccattcccccccttccgagcactacaccatcatcttcaacacatttgttatgatgcagctgttcaacgaaatcaacgctagaaagattcacggcgagcggaacgttttcgacggcatcttccgcaacccgatcttctgcaccattgtgttgggtacgtttgccatccaaatcgttatagtccagtttggcggcaagccatttagctgctccccgcttcagctggaccagtggatgtggtgcattttcatcggccttggcgagcttgtatggggtcaagtgatagccaccattcccacgtccaggcttaagttcctgaaggaagctggtcgcttgacccagaaggaagaaatccccgaggaggagctaaacgaagacgtggaggaaatcgaccacgctgaacgcgaactgcgaagaggccaaattctttggttccgcgggctcaataggatccagacgcaaattcgcgtagttaaagccttccgtagctctctgtatgagggcctggaaaaacctgagtcccgaacttctattcataatttcatggcccacccagagttcaggatagaggattcacagcctcatatcccactgatcgacgacactgacctggaagaggatgcagctctgaagcagaatagttccccccctagttcactgaataaaaataatagtgcaatcgattcggggataaacttgacgaccgataccagcaaatctgctacctcctcttcaccagggtctccaatccattcgctggagacaagcctgtag

SEQ ID NO: 108976 - DNA, 3732 bp, synthetic construct
  misc_feature 1..3732: note = Description of Artificial Sequence: Synthetic coding sequence
  source 1..3732: mol_type = other DNA
atgggcgacatgaccaactctgacttctattcgaagaaccagcggaacgagtcatcccacggcggggagttcggctgcacaatggaggagctgaggtcactgatggaacttcgaggaacagaggcagtagtcaaaattaaggagacatacggcgatacagaggcaatttgccgccgcctgaagacgtcacctgtcgaaggcctgcctggcactgctcccgacctggagaaaagaaaacagatctttggacagaactttattccccctaaaaagcctaagacatttctgcagcttgtgtgggaggctctccaagatgttacactgatcatacttgaaattgctgccattatctccctggggctcagcttttaccaccctcctggcgaaggtaatgaaggctgcgcgaccgcccaggggggggctgaggacgaaggagaagcagaggcaggatggatagagggcgcagcaattcttttgtcagtaatatgtgtggttcttgtgacagcctttaacgactggtccaaggagaaacagttcagaggcctccagagccggatcgagcaggaacaaaagtttactgtcgtccgggcaggccaggtggtccagattcctgtggctgaaatcgtggtcggcgacattgcccaggtgaagtatggagacctcctgccggcagatggattattcattcagggcaacgatctcaaaattgatgagtcgtctctgaccggggagtccgatcaggtgcgcaagtccgtcgataaagaccctatgctgctgtctgggacccacgtgatggagggaagcggtagaatgctggtgaccgctgtgggagtgaatagccagacagggatcatctttactctcctgggggctggtggtgaagaggaggaaaaaaaagataaaaagggggtgaaaaagggcgatggtctccagctgcccgccgccgatggagccgctgcttcaaacgcggccgactccgccaacgcgagcctcgtgaatgggaagatgcaggatggtaacgtcgatgccagccagagcaaagccaaacagcaagatggtgccgctgctatggaaatgcagccactaaagagcgccgaggggggggatgccgatgatcgcaaaaaggcttctatgcacaagaaagaaaaatccgtgttgcagggcaagctaaccaaactggccgtgcagattggaaaggccggtctcgtcatgagcgcgatcacggttattattctcgttctctattttacggtggatacatttgtggtgaataaaaagccgtggctgcctgagtgtactcccgtgtacgtgcaatactttgtgaaattttttataataggggtgacagtgctagtcgtggccgtccccgaggggcttcctctggccgtgacgatcagccttgcatactctgtgaaaaagatgatgaaggacaataacttggtgagacatctcgatgcttgcgaaaccatgggaaacgccactgccatctgttcagataagaccggcacactcaccaccaatagaatgactgtagtgcaggcctacgttggtgacgtgcactacaaagaaatccccgacccgtcatctatcaacacaaaaaccatggagctgctgattaatgctatcgctatcaattccgcctatacaaccaagatcctgccccctgagaaagagggcgcactccctagacaggtggggaacaaaacagagtgcggattactcggttttgtgctggacttaaaacaggattatgagccggtcaggtcccagatgcccgaggaaaagctgtacaaggtgtacactttcaattccgtccggaagagcatgtcaacagtcatcaagttgccagacgagtcctttcgaatgtattcaaagggggcttccgaaattgtcctgaaaaagtgttgtaaaattctcaacggggccggggagccccgtgtgtttcggccacgggaccgcgatgagatggtcaagaaggtgattgaacctatggcttgcgacgggctgcgtaccatctgcgtcgcatatcgagactttccttctagtcctgagcctgactgggataatgaaaacgatattttgaatgaactcacatgtatatgtgttgtcggcatcgaggatcccgtccggcctgaggtaccagaagccataagaaaatgccagagagctgggatcactgtgaggatggtgactggcgacaatataaacacagctcgcgcgatcgccatcaaatgcggaataattcatcccggtgaagacttcttgtgcctagagggcaaagaattcaaccgaaggattcgcaacgagaagggggagatcgagcaggaacgcatcgacaagatatggcccaagctgagagtgctagctcgcagcagtcctacagacaagcatactcttgtcaaggggattatcgacagcacccatacggagcagagacaggttgtagcagttacaggcgacggcacaaatgacggcccagctctgaagaaggcagatgtcggctttgcgatgggtattgccggcacagacgtagccaaggaagcaagcgatatcatcctcactgacgataatttctccagcatagtgaaggctgtgatgtggggtagaaacgtgtatgatagcatctctaaatttctgcagttccagcttaccgttaatgtcgtagccgtaatcgtggcttttacaggcgcctgtatcacgcaggattcacccctcaaggctgtccagatgctctgggtcaatctcattatggacacctttgcctccctggccctggctaccgaacctccaaccgaaacacttttattacggaagccatacggccggaataagccactgattagccgcacaatgatgaagaacatccttggacacgctgtatatcaattggccctcattttcacattactctttgtgggcgagaagatgtttcagatcgactccggacgaaatgcgcctctgcatagccccccctcggaacactataccatcatctttaatacattcgttatgatgcagttgtttaatgagatcaacgcacgtaagatccacggtgaacgtaacgtttttgacggcatcttcagaaaccctattttttgcactattgtcctagggaccttcgctattcaaattgtcattgtgcagtttggaggaaagccctttagctgttctcccctgcagctggatcagtggatgtggtgtatctttattggcctgggggaattggtttggggccaggtgatagccactattcctacctcacgcttaaagttcttgaaggaagccggtaggcttacccaaaaggaggagatcccggaggaagagctcaatgaagatgtcgaggagatcgaccacgcagagagagagcttaggagagggcaaatactgtggttccgcgggctcaaccgaattcagacgcagatcagagtggttaaagcattcagatcctctctctacgagggcttagagaaacccgaatccaggactagcatccataatttcatggcccatccggaatttcgaatcgaggactcccagcctcacatacccttgattgatgacaccgatcttgaggaagacgctgcactcaaacagaactcaagtccaccctcatccctgaataaaaacaactctgccatcgatagtggcatcaatttaaccaccgacacatccaagagcgcaactagctctagtcccggctctcccatccacagcctagaaaccagcttgtag

SEQ ID NO: 108977 - DNA, 3597 bp, synthetic construct
  misc_feature 1..3597: note = Description of Artificial Sequence: Synthetic coding sequence
  source 1..3597: mol_type = other DNA
atgggggatatgaccaacagtgacttttactctaagaaccagcggaacgaatccagccacggtggcgagttcgggtgcactatggaagaactcaggtctctgatggagctacggggaacagaggctgtcgttaaaatcaaggaaacttacggtgacaccgaggcaatctgccggcgactcaagacgtccccagtggagggacttccgggaacagcaccggatctggaaaaaaggaaacagattttcggccagaatttcatcccacccaaaaaacccaagacatttttgcagctcgtctgggaggccctgcaggacgtgacacttattatactcgagatcgctgccatcatcagcctcggtctctccttctatcacccaccaggcgagggaaatgagggctgcgcaactgcccagggtggtgccgaagatgaaggggaagccgaagcaggctggatagagggcgcggccatcttgctgagtgtaatctgcgtggtgttagtgacggcttttaacgactggagcaaggagaaacagtttcgtgggcttcaatctaggatcgagcaagaacagaaattcaccgtggtacgagcgggacaagtggttcagatccctgtagcagagattgtagtgggagatattgcacaggtcaagtatggcgacctccttcctgctgatggcctcttcatccaggggaacgacctgaaaatcgatgagagcagcctaaccggtgagtctgatcaggtgcgcaagtcagtagacaaagacccaatgctcctcagtggcacccatgtgatggagggatcagggcgtatgttagttacggctgtgggtgtgaattctcagaccggcattatcttcactctcctgggagccggtggggaggaggaggaaaagaaggacaaaaaagcaaagcagcaggacggagctgcagcaatggaaatgcagcccctcaagtccgcagaggggggggacgccgacgatcggaagaaagccagcatgcataagaaagaaaagtccgtcttgcagggcaagcttacaaaattggccgtgcagatcggcaaagcaggcctggtcatgagcgcgataacggtgattattctggtgctttacttcactgtggatacatttgtggtcaataaaaagccttggttgcccgagtgcacacctgtgtatgtacagtatttcgttaagttctttatcatcggtgtcactgtactggttgtggccgtcccagaaggtctacctctagcagtgaccatttcactcgcttactccgttaaaaaaatgatgaaagacaacaacttggtccggcacctggatgcatgtgaaactatggggaacgccaccgcaatctgcagcgataagacaggaactcttaccacgaaccgcatgacagttgtgcaggcctacgtaggggatgtccactataaagaaatcccggatccatcatccatcaacaccaaaactatggagctcctgattaacgccatcgcgataaatagcgcatacacaaccaagatcctacccccagagaaagaaggggccctgcctcggcaggtgggcaataagaccgagtgtggactgctgggattcgtcctggacctgaagcaggattacgaacccgtgaggtcacagatgccagaggaaaagttgtataaggtgtatacattcaatagtgtacgtaaaagcatgagcaccgtgataaaacttcccgacgagagcttccggatgtattccaaaggagcgtccgaaatagtgctcaaaaagtgctgcaagattctgaatggtgccggggagccacgcgtcttcagacctcgcgaccgcgacgagatggtgaaaaaggtaatcgagcctatggcctgcgatggcttgcggaccatatgtgtggcctaccgtgatttccccagtagcccagagcccgattgggataacgagaacgatatcttgaacgaactcacgtgcatctgcgtggtgggcatcgaggacccagtgcggcctgaggttcctgaagctatcagaaagtgtcagagggcaggtataacagtgcgcatggtcacaggagataacatcaacaccgctcgagcaattgccattaagtgtgggattattcacccaggtgaagatttcctgtgtctggaaggcaaagaattcaataggcgaattcggaatgaaaagggtgaaatagaacaggaacgaatagataaaatttggccaaagttgcgagtactggctaggagctctccaaccgataagcataccctggtaaagggcattatcgattctacacatacagaacagcgccaggttgtcgccgtgaccggtgatgggaccaacgatggacccgccctgaagaaagcggatgtggggttcgctatgggcatagcagggaccgacgtggcaaaggaagctagtgatattattctgactgacgacaatttctcttctatcgttaaagccgtcatgtggggaagaaacgtttacgacagcatcagcaagtttctgcaattccagctgactgtgaacgtggttgcagtcatcgttgcctttacgggagcgtgcatcacccaggattccccactcaaagcagttcagatgctgtgggtgaacttaattatggatacctttgctagcttggccctggcgaccgagcctccaactgagaccttactcttgagaaaaccttatggacggaataagcctctgattagccgaacaatgatgaaaaacattttaggccacgccgtgtaccagctggccttaatcttcactctcctgtttgttggagaaaagatgttccagattgacagcggccggaatgcgcctctgcattcccccccttcagaacactatactatcatattcaatacattcgtcatgatgcaattattcaacgagattaatgcccgaaaaatccacggcgagagaaacgtattcgatggaatcttcagaaacccaatcttttgcacgattgtgctgggtacatttgccattcagattgtaattgtccagttcgggggcaagcccttttcatgtagtcctctgcagttggatcagtggatgtggtgcatatttataggattgggtgaactggtttggggccaagtcatcgccaccatccctaccagccggctcaagttccttaaggaagccgggcgactaacacagaaggaagagattcctgaggaggaactgaacgaagatgtggaggagattgaccacgcagaacgggaactgagacgcggccaaatattgtggtttcggggccttaaccggatccagacccagatccgagtggtgaaggcattccgatccagcctctacgaaggcctggagaaacccgaaagcaggacatctatccacaacttcatggcccatccggagttcagaatagaggatagccagccacacatcccccttatcgacgacacagatctggaggaagacgccgctctgaagcagaatagcagcccaccaagctcgcttaacaagaacaactctgccattgactctgggatcaacctaaccaccgacaccagcaagtctgccacctccagtagcccaggctcacccatccactctcttgagacctctctttag

SEQ ID NO: 108978 - DNA, 3597 bp, synthetic construct
  misc_feature 1..3597: note = Description of Artificial Sequence: Synthetic coding sequence
  source 1..3597: mol_type = other DNA
atgggagacatgaccaacagcgacttttattccaagaaccagaggaacgagagctctcacggcggcgaattcggatgcacgatggaagaactgcggtcactgatggagttgaggggaacagaagctgtcgttaaaattaaagagacatatggagacaccgaagcgatttgcaggcgtcttaaaaccagccccgtcgagggccttcccggaaccgcgccagatctggagaagcggaaacagattttcgggcaaaatttcattccacccaagaaacccaagacgttcctgcagctggtgtgggaggctctccaggatgttacactcattatactggagatcgccgccattattagtctcggcctgtctttctaccacccacccggtgagggtaatgagggctgcgctaccgcgcaaggcggcgccgaggacgaaggcgaagccgaggctggttggatagagggtgccgctatattgttgtccgtgatctgtgtggtgctcgtgactgcctttaacgactggtctaaggagaagcagtttaggggcctgcagtctagaatcgagcaagagcaaaagttcacagtggtgcgggctgggcaggtggtgcagattccggtcgcagaaatcgtcgtcggggacattgcccaggtgaaatacggagatctgttacccgctgatggcttatttatccagggaaacgatctgaagatcgacgagtcttccttgacaggggagagcgatcaggttcgtaagtcagtcgataaggaccctatgctactgagcgggacgcatgtgatggaaggcagtggccgcatgctcgtgactgcagtgggggtgaatagccagactggaataatctttacgctactcggcgctggcggcgaagaagaggaaaagaaagacaaaaaagcaaagcagcaggacggggccgccgccatggagatgcaaccactgaaatcagctgaaggcggcgatgcggacgacaggaaaaaggcaagcatgcataagaaggaaaagtcagtactgcagggaaaactgactaagctggccgttcagattggtaaggccggcctggtcatgagcgccattaccgttatcattctagtgctctacttcaccgtcgatactttcgtggtgaacaagaagccttggttgcccgagtgtaccccagtgtatgtgcagtatttcgtcaaatttttcatcattggtgtgaccgtcttagtggtggccgtgcccgagggcctgccactggctgtgaccatctctcttgcttacagcgtcaagaaaatgatgaaagacaacaatctcgtccgtcacctggatgcttgtgagactatgggaaacgccacagccatttgcagcgacaagaccggcaccctgacaacaaacagaatgaccgttgtgcaagcatatgttggagacgtccattataaagagatcccagatcctagttccataaataccaaaacaatggagctcctgataaatgctatcgctattaacagcgcatacacaacaaaaatattgccacctgagaaagagggcgcgctcccgcggcaggtgggcaacaagaccgagtgcggccttctgggctttgtgttagacctgaagcaagattacgaacctgtgcggtctcagatgcccgaagaaaagttgtacaaagtgtatacgtttaactcggtgaggaaatcaatgtccacagtaattaagttgccggatgaaagcttcaggatgtattccaagggagcatcggaaatagtcctcaaaaaatgttgcaaaatcctcaacggcgccggagaaccaagggtgttcagaccacgagaccgtgacgaaatggtgaagaaagtgatcgagcctatggcctgcgatgggctccggaccatctgtgtggcttaccgagatttcccctcctcccctgaacctgactgggataacgagaatgatatcctgaatgaactgacctgtatttgcgtggtggggatcgaggatcccgttcgacccgaggtccctgaagctattcgtaaatgccagcgagccgggatcaccgtgaggatggttacaggcgacaatattaatacggcgcgcgccatcgccattaaatgtggcataatacaccccggcgaggacttcctgtgcctggaaggaaaggaatttaatagaaggattcgaaatgaaaaaggcgagattgaacaggagcgcatcgataagatatggcctaagctcagggttctcgcccgcagctccccaacagacaaacacacattagtgaagggtattattgacagcacccacactgagcaaaggcaggttgtcgcggtgacaggggacggcactaacgatgggcccgcactgaagaaggccgatgtgggtttcgcgatggggattgcgggcaccgacgtagctaaggaggccagcgacatcatcctgaccgacgacaacttttcaagcatcgtaaaggccgtcatgtgggggcgcaacgtctatgactctatttctaaatttctgcaatttcagcttaccgtcaatgtagttgccgttattgtggcttttactggggcctgcatcacccaagatagccccctgaaagctgtgcagatgctctgggtgaacctaataatggacacttttgcatccctcgccctggccacagagcctcctaccgagaccctcctgctccggaaaccttatggacgcaacaaaccattgatcagcaggacgatgatgaaaaacatcctggggcatgcagtttatcagctggccctcatatttacacttttgttcgtgggagagaagatgttccagattgatagtggacggaacgctcctctgcattcgcccccctccgaacactatactatcatttttaacaccttcgtgatgatgcagctcttcaatgagataaatgctcgcaagatacatggcgaaaggaatgtcttcgacggcatcttccgaaacccgatcttctgtactatagttctgggaaccttcgctattcagatcgttatcgtgcaatttggcgggaagcccttttcttgtagcccccttcagctggatcagtggatgtggtgcattttcatcggactgggcgagctcgtttggggccaggtaatagcaacaatcccaacctctagactgaagttccttaaggaggcaggccgactcactcagaaagaggaaatccccgaggaggagctcaatgaggacgttgaggagatcgaccacgccgagagggagttgcgcagagggcagatcctgtggtttaggggcctcaatcgtatccaaacccagatcagggtggttaaggccttcaggagtagtttgtacgagggcctggagaagccagagagcagaacgtctatccataatttcatggcccaccccgagtttaggatagaagattctcagccccatattccgctcatagatgacactgatctggaggaggacgctgctctaaagcaaaacagctccccgccatcctccctgaacaagaacaacagtgccattgattccgggatcaacctgaccaccgacacctcaaagtcagcgacttcctcaagcccaggttctcccatccactctcttgaaactagtctctag

SEQ ID NO: 108979 - DNA, 1299 bp, synthetic construct
  misc_feature 1..1299: note = Description of Artificial Sequence: Synthetic coding sequence
  source 1..1299: mol_type = other DNA
atgactgttgtacaggcctatgtgggagacgtccactacaaggaaatccctgatccttcgtccattaacaccaaaaccatggagttactgatcaacgccatcgccattaactccgcctacacgactaaaatccttcctcccgagaaagaaggtgccctgccacggcaagtgggtaatgtctatgacagtattagtaagttcctccagtttcaactgaccgtcaacgtggtggccgtgatcgtggcattcactggtgcttgtattacccaggattcaccactgaaggccgtgcaaatgctgtgggtgaatttaatcatggacaccttcgccagcttggccctggccactgaacccccaaccgagacccttctgctgaggaaaccctatgggcgaaataaaccactgatctctaggaccatgatgaagaacatcctgggccacgcggtctaccagcttgctctcatctttacattactgttcgtgggcgaaaaaatgtttcagatagattctgggaggaacgcaccccttcacagcccacccagcgagcattataccattatttttaatacttttgtcatgatgcagctctttaatgaaataaacgctcggaagattcatggagagcggaatgtgttcgatggtatcttcaggaacccgatcttttgtacaattgtgctcggcacatttgccattcagattgtgattgttcaatttggtggcaagccattttcctgtagccccctgcagctggaccagtggatgtggtgcatatttattggtttaggagagttagtgtggggacaggtgattgcgaccatccctacctcccggttgaagtttcttaaagaggcggggagattgacgcagaaagaggaaatccccgaggaggagctgaacgaggacgtcgaagagatagaccatgccgaacgggaattgaggcgcggacaaattctgtggttccgcggcttgaacagaatccagacccagatccgagtggtaaaggcattcagatccagtctatacgagggtctcgaaaagcctgagagccgcaccagtattcacaatttcatggcccaccctgaattccgtatcgaagactcacagccccacatccccctgatcgatgatactgacttagaagaagatgcggcgctcaagcagaattctagtcctcccagtagccttaataagaacaattccgcaattgacagcggtattaatctgaccacagacacatctaaaagcgcgacatcttcttctcccggcagtccaatccattcactggaaacatccctgtag

SEQ ID NO: 108980 - DNA, 3537 bp, synthetic construct
  misc_feature 1..3537: note = Description of Artificial Sequence: Synthetic coding sequence
  source 1..3537: mol_type = other DNA
atggaacttagaggcaccgaggccgtggtcaaaatcaaggaaacttacggggataccgaggctatttgccgcaggctcaagacgagtccggtggagggattgcccgggaccgcccctgacttggagaagagaaaacagatattcgggcagaatttcattccaccgaagaagccaaagaccttcttacaacttgtatgggaggcgctgcaagatgtgactctcattatcctggagatcgcagccatcatcagcctgggtctctctttctatcatccacctggggaagggaacgagggctgcgccactgcccagggcggcgcagaggatgagggcgaggcggaggcaggctggattgagggcgccgcaatacttctgtcagtcatttgcgttgtgctggtaactgcctttaacgattggtcaaaggaaaaacagtttagaggccttcagtctaggatcgagcaggaacagaaattcactgtagtgcgagcagggcaagtggtccaaattcctgtcgcggaaatcgtggtgggagacattgctcaggtcaagtacggagacctgctcccagccgacgggctgttcatacaggggaatgaccttaagattgatgagtcaagtttgacaggcgagtcagaccaggtccgaaagagtgtggacaaagacccaatgctgctgagcggtacacacgtcatggagggctccggccggatgctggtgacagccgtcggggtgaacagtcaaacaggcattatttttacgctgctgggtgctggaggcgaagaggaagaaaaaaaggacaagaaaggcaaaatgcaagatggaaacgttgatgcctcacagagcaaagcgaaacagcaggacggtgcggccgctatggaaatgcagcccttgaagagtgccgaaggaggcgatgctgatgatcgcaaaaaagcctctatgcataagaaagagaagagcgtgctgcaggggaagctgaccaagctggcggtgcaaattgggaaggccggcctggtcatgtccgccattacagtcattattctcgtgttatattttacagttgacaccttcgtggtgaacaaaaagccttggctcccggagtgcaccccagtgtatgtccagtacttcgttaagttcttcatcattggcgtgacagtgcttgtcgtggcggtcccagagggattgcctttagcggtgaccatctccctcgcctattccgtcaagaagatgatgaaagataacaacctggtgcggcatctggacgcttgtgagacaatggggaacgctactgcaatctgctcagacaagaccggaacgcttacaacgaataggatgacagtcgtgcaggcttatgtcggagacgtgcattacaaagagatccccgacccctcctcaatcaatactaagactatggagcttctgattaatgctatcgccattaactcggcctatactaccaaaattcttccacccgaaaaggagggggccctccctagacaggttggcaacaagaccgagtgtggccttttggggttcgtgttagacctgaagcaggactatgaacctgtccggtcacagatgcctgaggaaaagctgtataaggtgtatacgttcaattctgtgagaaagtccatgagtactgtcatcaaactgcccgatgagtccttccgcatgtatagcaagggtgctagcgagatagttctcaagaagtgctgcaagatcttgaatggagccggcgaaccaagagtttttaggccgagagatagagatgaaatggtcaaaaaagtgatagagcccatggcatgtgatggcttgcgaaccatctgcgttgcataccgagacttcccttccagtcctgaaccggattgggataacgagaatgatattctgaatgaactcacgtgcatctgcgtagtcggaatcgaggatcccgtgcgccctgaagtacccgaggccatacgcaaatgccagagggcaggcatcacggttaggatggtcactggtgacaatataaatactgctcgggctatagctatcaagtgcggcatcatccaccccggagaagattttttgtgtctggaaggaaaggagttcaatcgaaggatccgcaacgaaaagggcgagatagagcaggagcgcatagataagatatggcccaagctgcgggtattggctcgatcgtcacccacagataagcataccttagtgaaggggatcattgactcgactcacaccgagcagaggcaagtcgtcgccgtgacaggggatggtactaatgatggacccgccctgaagaaggccgatgtcggctttgccatgggtatcgccggcacggacgtggccaaggaggcttccgacatcattctcactgacgacaactttagtagcatcgtcaaagcggttatgtggggccgaaacgtctacgactccatctcgaaatttctgcaattccagctgactgtgaacgtagtggctgtgattgtggcctttacaggggcctgcattactcaagatagcccgttaaaagcggtccagatgctttgggtgaacctcattatggataccttcgcctccctcgcccttgccactgaaccacctacagagacactgcttctcagaaaaccttacgggcggaacaaacccctgatttcacgcaccatgatgaagaacatcttgggtcacgctgtctaccagctggcactgatctttacattgctctttgtcggggagaagatgtttcagatcgattccggccgaaacgcaccattacactcaccaccttctgaacactatacaattattttcaatacatttgtgatgatgcaactattcaatgaaattaacgctcggaagattcacggagagcggaacgttttcgacgggatcttccgcaaccccatcttctgtaccatagtgctggggacttttgccatccaaatcgtaattgtgcagttcggtggaaagccattcagttgctcacctctacagctggaccaatggatgtggtgcatcttcattggcttgggagaattagtgtggggacaggtgatcgctacgatcccgacttcccggctaaaattcctgaaggaggctggtcgtctcactcaaaaagaggaaattcccgaagaagaactcaacgaggacgtagaggaaatagatcacgccgaaagagaactccgtcgcgggcaaatactgtggttcagaggcctgaacaggatccaaacccagattagggtcgtgaaggcttttagaagctctttatacgagggactcgaaaagccagaatcaaggaccagcatacacaatttcatggcccatcctgaattccggatcgaggactcacagccacatatacctttgatcgacgatacagacctggaagaggatgccgccctgaaacagaactctagccccccatcaagcctgaacaagaataatagcgcaatcgatagcgggatcaacctcactacagatacctcaaagagcgccacatccagtagtcctgggtctcccatccatagcttagagacgagtctttag

SEQ ID NO: 108981 - DNA, 3663 bp, synthetic construct
  misc_feature 1..3663: note = Description of Artificial Sequence: Synthetic coding sequence
  source 1..3663: mol_type = other DNA
atgggtgacatggctaattcgtcaatcgagttccacccaaaaccacaacagcagagagatgtaccccaagcaggggggtttggctgcacactggccgaactacggacactaatggaactccgcggagccgaagctctgcaaaagatagaggaggcatatggtgacgttagcggcctctgtcgtcggctgaagacatcccctacggaggggctggcagataataccaacgacttagaaaagcggcgccagatttacgggcagaacttcatcccgccaaaacagccgaaaacattcctgcaattggtgtgggaagctttgcaagacgtgaccctgattattcttgaggtggccgctatagtctcattaggcctcagtttttacgctcctccaggagaggaatcagaggcctgcgggaacgtgtcaggaggagccgaagatgagggggaagctgaggccggttggattgagggagcagctatactgttgtctgttatctgcgtggtactcgtcacagctttcaacgattggagcaaggaaaaacagttcagaggattacagagcaggatcgagcaggagcagaagtttacggttatccgcaacgggcagctactgcaggtcccagtcgccgcactggtcgtgggtgatatagcacaagttaagtacggagacctgcttcccgcagatggggtgctgatacaggccaatgatttgaagatcgacgagtcctcactgacaggcgaatccgaccacgtccgtaaatctgctgacaaagatcctatgctgctgagcgggacccacgtaatggagggcagtggccggatggttgtaaccgccgtgggcgttaattcacagaccggcatcatcttcacgcttctgggagccggtggagaggaggaggaaaagaaagataaaaagggaaagcagcaggacggcgccatggagagttctcagactaaagctaaaaagcaggacggcgccgtggccatggagatgcaacctcttaagagcgcggaagggggggaaatggaggaaagagaaaagaagaaggccaatgctccaaagaaagaaaagtcggtgttgcagggaaaactgactaaactcgcagtgcagattgggaaggcaggactggtaatgagcgcaatcaccgtgattatcctggttctctattttgtgatcgagacctttgtagtcgagggccgcacgtggctcgcagagtgtacccctgtctacgtgcaatattttgtcaagttcttcattattggagtaacagtgctagtggtggcagtccctgagggacttccactcgctgtgacgatttccttggcatactcagtgaagaagatgatgaaagataacaatctcgtcagacacctggacgcctgcgaaaccatgggaaatgcaactgccatctgctcggataagaccggaaccctcacgacaaaccggatgacagtggtgcagagctatctcggagacacccattataaagagattcctgcgccgagtgctctgactccaaaaatcctagacttgcttgttcatgccatatctattaactccgcatacacaacaaagattctaccaccagaaaaggaaggagccttgcctcgccaggtaggtaacaagaccgagtgtgctttgctcgggttcgtgctggacctgaagagagatttccagccagttcgcgagcaaattcctgaggacaagctctacaaagtgtacactttcaattctgtgagaaagtccatgtccacagtgatccggatgcccgacggaggcttcaggctcttttccaaaggggctagtgaaatcctgctgaagaagtgcaccaacattctgaattctaatggcgaactcaggggctttaggccccgggacagagacgacatggtgagaaagatcatcgaaccaatggcctgtgacgggctgcgaaccatttgcatcgcatatcgcgatttcagcgccggacaggagcccgattgggacaatgaaaacgaagtcgtgggcgatttgacatgcattgccgtggtggggattgaagaccccgttaggcccgaggttcccgaagctatcaggaaatgtcagcgcgctggcattactgtcagaatggtgacaggcgacaatattaacacagctcgggctatagcagcgaagtgcggcattatccagccaggggaagacttcctctgcctcgaaggcaaggaatttaatcgacggatacgcaacgagaagggggaaatcgagcaggagcgcttggacaaggtatggccaaaattgcgcgtgctcgcgagatccagtcccacagacaagcatactctagttaagggtatcattgacagcacaaccggcgagcaacggcaagttgttgccgtgacaggtgatgggacaaatgatggacccgctctgaaaaaagcagatgtcggtttcgcaatgggcatcgcggggaccgacgtggccaaagaagccagtgatatcattcttaccgacgacaacttcacatctatcgtgaaggcagtcatgtgggggaggaacgtgtatgattctatatctaagtttttacagtttcagctcacggtgaacgtcgtggctgttattgtcgcttttacaggtgcttgtatcacacaggattcaccattgaaggctgtgcagatgctgtgggtcaacttaataatggatacatttgctagtttagcgctcgccaccgagccaccaaccgaaagccttctcttgcggaaaccctatggaagagataaacctctcatttctaggaccatgatgaaaaatatcctcgggcacgctgtctaccagcttgccattatatttactttgctgtttgtaggcgagttattttttgatatcgacagcggccgcaacgccccactgcacagtcccccaagcgagcactataccattatcttcaatacattcgtaatgatgcaactcttcaacgaaattaacgctcgtaaaattcacggagaaaggaatgtgttcgacggaatcttctccaaccccatcttctgtaccatcgtcctaggaacatttggcatccagattgtgatcgtgcagtttggaggcaagcctttcagctgctccccactgtcaacagagcagtggctctggtgtcttttcgttggggttggggagctggtgtggggacaggtcatcgcaactatcccaacctcacaacttaagtgtttgaaagaggccggccacgggcccggcaaggacgagatgactgacgaagagctggcagagggcgaagaagaaatagaccacgctgagagggagctccgaaggggccaaattctctggtttagaggattgaacagaatacagacccagattcgggttgttaaggcatttcgcagctccctctacgaaggtctggagaaacccgaaagtaagactagcattcacaactttatggccacacctgaatttctgatcaatgattatacacacaatatcccccttattgacgataccgacgtggacgaaaatgaggaacgccttcgcgcaccaccacctccaagcccaaatcagaacaacaacgccatagactcaggcatatacctgacaacccatgtcaccaagtcggctacatcttcagtgttcagttcttccccagggtcaccgttacactccgttgaaacttcactttag

SEQ ID NO: 108982 - DNA, 3663 bp, synthetic construct
  misc_feature 1..3663: note = Description of Artificial Sequence: Synthetic coding sequence
  source 1..3663: mol_type = other DNA
atgggcgatatggcgaactcatctattgagttccacccaaaaccccagcagcagcgggatgtgcctcaagcaggcgggttcggatgcacgctggctgaactgcgcaccctgatggagctccgaggcgctgaggcactgcaaaagatagaggaggcatacggggatgtaagtggcctgtgccgcagattaaaaaccagtccaacagagggcctggccgataatactaatgatctggaaaagaggcggcagatatatggacaaaatttcattccacctaaacagcccaaaactttccttcagttggtctgggaggcactgcaagacgttaccctgatcattttggaggtagcggcaatcgtttccttgggcctgtccttctatgctccacccggagaagagagcgaggcatgcgggaatgtgagcggtggtgccgaagatgagggggaagccgaggctggatggatagaaggcgccgccatcctgctctcggtgatttgtgtggtcctcgtgacagcttttaatgattggtcaaaagaaaaacaattccgaggactgcagtcccgtattgagcaggaacagaaatttaccgtgataagaaatggacaactgctgcaggttcccgtggcggcactggtggtgggtgacatcgcccaggttaagtacggcgatctgctgcccgccgacggcgtcttaatccaggccaatgatctgaaaatcgacgaatcgagtctgacaggcgagagcgaccacgtgcggaagagcgccgataaggacccgatgttactctctggaacccatgttatggaggggagtggcaggatggtggtcacggcagtcggagtgaattcccagaccggaatcatcttcacccttttgggcgccggaggagaggaagaggagaaaaaggacaaaaaagggaagcagcaagatggagctatggagtcttcccagaccaaggctaaaaagcaagacggagcagttgccatggaaatgcaacctctgaagtctgccgaaggaggagagatggaagagcgagaaaaaaaaaaggcaaacgctcctaagaaggagaagtctgtactccagggtaaattgacaaagttggccgtccaaatcggaaaagctgggctggtcatgtccgctatcacagtgatcatactggtgctgtactttgtgatagagacctttgtagttgaaggaaggacctggcttgccgagtgcacaccagtgtatgttcagtacttcgtaaaattttttatcattggcgtgactgtgttggttgtggctgtgcccgaaggcctgccactggctgtgactatctccctcgcctactcggtgaagaagatgatgaaagacaataatctggtaagacacctcgatgcttgcgaaactatgggcaacgctacagctatttgtagcgacaaaactggaacccttactacgaacaggatgacagtcgtacagtcatacctcggggacacccactataaagagattccagccccttccgctctgacaccaaaaatcctggatttattggtgcatgccatatcaattaactcagcctacactaccaagatactgccacccgagaaggagggagcactgcccaggcaggtaggcaataaaaccgaatgtgccctcctcggcttcgtcctggatcttaagcgcgatttccagcctgtgagggagcagatacccgaggacaagttgtataaggtatatacattcaattcagtgcgcaagtccatgtccacggtgattagaatgcctgatggcggattcaggctattctcaaagggcgcaagtgagattctgctgaaaaagtgtaccaatatcctgaactcaaacggtgaacttcggggattcaggcctagggaccgggacgatatggttcgaaaaattattgaacctatggcttgtgacggcctcagaactatttgcatcgcttatcgagatttttctgccggccaggagcccgattgggataacgagaatgaggtggtcggtgacctaacgtgcatcgctgttgtaggtattgaggaccctgtacgtcctgaagttcctgaggctattaggaaatgccagcgggccgggatcacggttcggatggtcaccggagacaacatcaatacggcgagagccatagcagccaaatgcggcatcattcaaccaggtgaggattttttgtgtctagagggcaaagagtttaatcggaggatacgcaacgagaagggcgaaatcgagcaagaacggctggacaaggtgtggccaaaactccgagttctagccagatcaagcccaaccgacaagcatacgctggtgaaggggatcatcgactccacaacaggtgaacagagacaagttgttgccgtgaccggagacggcacaaatgatggcccagccctcaagaaagcagacgttggcttcgccatgggaatcgcaggcacagacgttgcaaaagaagcctcagacattattctcacagacgataattttacttctatcgtgaaagccgtgatgtgggggagaaacgtgtatgattccatctctaagtttctgcagttccaactcactgtcaatgttgtcgccgtcattgttgctttcaccggtgcatgtatcacacaggacagcccgctcaaggcagttcagatgctctgggtcaacctgatcatggacacattcgcaagcctagctctggctactgagccgcccacagaatccttgctcctgcggaagccatatgggcgggataagcccctcatctcacggactatgatgaagaatattctgggtcacgccgtgtaccagctggcaattatctttacactgctctttgtcggagagctgtttttcgatatcgactcagggaggaacgctccgttgcatagccctccttctgaacattatacaataatcttcaatactttcgttatgatgcagctgttcaatgaaattaatgcaaggaaaatccacggagagcggaacgtctttgacggcatttttagcaatcccattttctgtaccatcgttctggggactttcgggatccaaatcgtaatcgtccagttcggcggaaaacccttctcctgtagtcctctgtcgacagaacagtggctgtggtgtctgttcgtcggggtgggagaactggtctggggccaagttattgctaccatacccacgagccaactcaaatgcctcaaagaggcgggccacggtcccgggaaggacgagatgaccgacgaggaactggcagagggggaagaggagatcgaccatgcggaacgagagctgcggcgaggtcagatattatggttcagagggctgaatcgcattcagacgcaaattcgggtggtcaaagccttccgttcaagcctgtacgagggcctcgaaaaaccagagtccaagacctcaattcataatttcatggccacccccgaattcctgattaacgattatacccataatattcctttgattgacgacactgatgtcgacgagaatgaggaaaggctgagggcacctccccccccatcacccaaccagaataacaacgccattgacagcggcatttaccttaccacgcacgtgactaaaagcgcaacaagtagcgtcttttccagcagcccgggatcccctctgcacagcgtcgagacttcgttatag

SEQ ID NO: 108983 - DNA, 3522 bp, synthetic construct
  misc_feature 1..3522: note = Description of Artificial Sequence: Synthetic coding sequence
  source 1..3522: mol_type = other DNA
atgggtgatatggcgaacagctccatcgaatttcaccccaaaccccagcaacagcgtgacgtgccgcaggccgggggctttggctgtactctggcggagctgagaacactgatggaattaagaggggccgaggctctgcagaaaattgaggaagcgtatggggacgtgtccggcctatgtagaagactaaagacgtctccaacagaaggtttggccgataacactaacgatctggaaaaaagaaggcaaatctatgggcaaaactttataccacccaagcagccgaagaccttcctgcaactggtgtgggaagcactacaggatgtcactctcataatcctcgaggttgcagctatcgtctccctgggcctgtcattttatgcccctcctggcgaggaaagcgaggcttgtggcaatgtgtcaggcggcgccgaagacgaaggtgaagccgaagccggctggatagaaggtgctgcaatcctactgagtgtgatatgcgtcgtcctggtgactgccttcaatgattggagcaaagagaagcaattcagaggcctccagtcgcgtatcgaacaggaacagaaattcactgtaatccggaacggacaacttctccaagtgcccgttgctgccctggtggtcggagatatcgctcaggtcaaatacggggatctcttgccagcagacggcgttctgatccaagcaaacgacctgaaaattgatgagagctccctcacaggtgagtcagaccatgtccgcaaaagcgcagacaaggaccctatgcttctgagcggcactcacgttatggagggatcaggcaggatggtagttacagccgttggcgtcaactcgcaaaccggaattatctttaccctgctgggtgccggcggagaggaggaagagaagaaagacaaaaagggcaagcagcaggacggggccatggagtccagccagacaaaagccaagaagcaggacggcgccgtggctatggagatgcagcctcttaaaagcgctgagggaggggagatggaggagagagagaaaaaaaaagccaacgcacctaaaaaagaaaagtcagtcttgcagggcaaactgaccaaattggccgtgcagattggaaaggcaggactcgttatgtcagctattaccgttattatcctggtgttgtattttgtaattgagacattcgttgtagaagggcgaacgtggttggccgagtgcactcccgtttacgtccagtattttgtgaaattcttcataatcggcgtcacagtcctcgtggtggcagtaccagagggcctgccgcttgccgtgacaatatctctggcttacagcgtaaagaaaatgatgaaagataacaatcttgtcagacacctcgacgcctgcgagacaatgggaaatgctacggctatatgttctgataaaacgggaaccctaacgaccaatcggatgactgtagtccagtcttacctgggcgacacgcattacaaagagatacccgcaccaagcgccctaactcctaaaatccttgacttacttgtccacgccatctctatcaactccgcctacactacaaagattctgccacccgagaaggaaggcgctctccctcgccaagttgggaacaagaccgagtgcgcacttctgggttttgtcctggacctcaagagagacttccagccagtgcgcgagcaaattcccgaagataagctgtacaaggtgtacactttcaattccgtgcggaagtctatgagcactgtcattcgcatgcccgacggcggcttcagattgttctccaaaggagcctctgagattctgctgaaaaaatgtaccaacatcctgaattccaacggggagctgaggggctttaggccacgggatcgggacgacatggtgaggaaaatcattgagcctatggcgtgcgatggcttgcgcactatttgtattgcctaccgggactttagcgccggacaggagcccgactgggacaatgagaacgaggtggtgggggaccttacctgtattgccgtcgtgggaattgaagatcccgttcgcccagaagtgccagaggcaatacgcaaatgtcagcgggccggtatcaccgtccggatggtgacgggcgataacatcaacactgctagagcaatcgccgccaaatgtggaattatccagcctggagaggactttttgtgcctggaaggaaaggagttcaaccggaggatacgcaatgagaagggggagattgaacaggagagactggacaaagtgtggcctaagttgagggtgctcgcccggagctcccccacggataagcataccttggtgaaaggcattattgacagtactacaggggagcagaggcaagtggtcgcagtcacaggagacggaacaaacgatggcccagcgctgaaaaaggcagatgtgggctttgcaatgggtatagccgggaccgatgtggctaaggaagctagcgatatcattctgacggatgataacttcacgagcatagtcaaagcagttatgtggggtaggaacgtgtacgattctattagcaagtttctccaattccagttaacagtcaatgtggtagctgtcatcgtggctttcacaggagcctgtatcactcaagactcccccttaaaagccgtccaaatgttgtgggtgaacctaattatggatacctttgctagccttgccttagccacagagccgcccactgaatcactgctgcttagaaagccatatggaagagacaaaccactcatttcaagaaccatgatgaaaaacatcctgggacacgccgtgtaccagctcgctatcatttttaccctcctatttgtaggtgagctcttctttgatatagacagcggcagaaatgcccctctccacagtcctccttcagagcattatactatcatattcaatacatttgtgatgatgcagctcttcaatgagattaacgcacgaaagatccatggtgagcgtaacgtttttgatggaatctttagcaaccccatattttgtacaattgtgttaggcacttttggcatccaaattgtaatcgtccagtttggcggcaagccgttttcctgcagccctttaagcactgagcagtggctctggtgcctctttgtaggcgtaggggaattagtttggggacaagtcatagccacgatccccacatctcaactgaaatgtttgaaggaggccgggcatggccccggcaaagacgagatgaccgatgaggaattggccgagggcgaggaggaaattgatcacgctgaaagggagcttcgcaggggtcaaatcctctggtttcgcggactgaaccgcatccagactcagatggaagttgtgtcaacattcaagcgctccggctcggtacagggggccgtgaggcggcgctcaagcgtactgagccagctgcacgacgtaacaaacttgtccactcccacgcacgcgatactctctgccgcaaatcctacgtccgccgcgggcaacccaggaggcgaaagcgttccttag

SEQ ID NO: 108984 - DNA, 3480 bp, synthetic construct
  misc_feature 1..3480: note = Description of Artificial Sequence: Synthetic coding sequence
  source 1..3480: mol_type = other DNA
atgggggacatggctaactcatctatcgaatttcatcccaagccgcagcagcagagggatgtaccccaagccggcggattcggctgcaccctggctgaactacgtacactaatggagttgaggggggcagaggccctgcagaagattgaagaggcatatggggatgtgagtggattgtgccgacggcttaaaaccagcccaacagagggtctcgcagacaatactaatgacctggaaaagaggagacagatttatggtcagaatttcatcccaccgaaacaaccaaaaacctttctacaactggtttgggaggctcttcaggacgtcaccctgatcatcttagaggtggcagcgatcgtgtctctcgggctctctttctatgcaccacccggcgaagagtccgaggcctgtggtaacgtcagcggtggcgcggaagatgagggtgaagcagaggctggatggatcgagggcgctgccatccttctgtccgttatttgcgtcgttcttgtgactgctttcaatgattggtcaaaggagaaacagtttcgcgggctgcagagccggatcgagcaagagcagaagtttactgttatccggaatgggcagctgctgcaggtaccagtggcagccctggtggttggcgatatcgcccaggtaaagtatggagatttactgcccgccgacggggtgctcattcaagcaaatgacctaaagatagacgagtcaagcttgactggggaatctgaccatgttagaaagtctgccgataaggatcctatgctgctgtccggcactcacgtcatggagggcagcggcaggatggtcgtcacagctgtaggggtcaactcccaaaccggcattatctttacacttctcggagctggcggggaggaggaggagaagaaggacaaaaaagccaaaaagcaggacggagcagttgccatggaaatgcagcccctgaaaagcgcagaagggggcgaaatggaggagcgcgaaaagaaaaaagctaacgcccccaaaaaggaaaaatccgtcctccaaggcaagcttaccaaactggctgtgcagatcggaaaggcgggactggtcatgtcagctattactgtaatcatcctcgtgttatattttgtgatagagacatttgtggtggagggaaggacttggctggcggaatgtacgccggtttacgtgcagtatttcgtgaagttcttcattattggagtgacggtcctggtggtcgcggtccccgaagggctgcccttagcagtaacgattagcttggcctattcagtcaagaagatgatgaaggacaataatctcgtgaggcacctcgatgcatgcgagaccatgggaaatgcaacagcaatctgctcagacaaaactggaactctgacaacaaaccggatgactgtggtgcagagctatctgggtgatactcactacaaggagatccccgcccctagcgcactgacgcccaaaattttagatttgttggtacacgccatttcaattaactcggcttacactacgaaaatcttaccaccagaaaaagaaggggccttaccccggcaggtgggaaataagaccgagtgcgcgctgttaggatttgttcttgaccttaagagggatttccagccagttagagagcagatcccagaggacaagctgtacaaggtgtatacattcaactccgtccgaaagtctatgtccaccgttatccgaatgcctgatggcggattcagactgttctccaaaggagcctctgagattcttctgaagaaatgcactaatattttaaatagcaatggcgaactcagaggctttaggccccgggacagggacgatatggtcaggaaaatcattgaacccatggcctgtgacgggctacggaccatatgtatcgcttatcgagacttctctgccgggcaggagccagactgggacaacgagaacgaggtggtcggagatttaacttgcattgctgtggtgggaatcgaggaccccgttcggccagaggtacctgaggccataagaaagtgtcaaagagcaggcataacggtcaggatggtcacaggcgataacatcaacactgcccgggccattgccgccaaatgtggaatcatacaacccggtgaggattttctgtgcctggaaggcaaggagttcaatcgacgcattcgaaatgagaagggcgagatcgagcaggaaaggctggataaagtttggccaaagctgcgcgttctggccagatctagccccaccgacaagcatactctggtaaagggaatcatcgactcaactaccggagagcagcggcaggtagtggctgtgaccggagacggcacaaatgacggacccgccctcaaaaaagccgacgttggtttcgcgatggggatcgcaggcaccgacgtcgcaaaggaagctagtgatattattcttacagatgataattttacctctatcgtcaaagcagtaatgtgggggagaaacgtctatgactcgatatctaagtttttgcagtttcagctaacagtaaacgtagtcgctgtgatcgtggctttcaccggcgcatgcatcactcaggattctcccctgaaagccgtccagatgctgtgggtgaacctaataatggatacgtttgcaagcctggccctcgcaacggaacctcctacagagtcgctgctgctaagaaagccctacggcagagataaaccactaatcagtcgcactatgatgaagaatatactcggtcacgctgtgtatcagttggcaattatcttcactttgctgtttgtgggggagcttttcttcgacattgatagtggtaggaatgctccccttcattctccacccagtgagcactacactatcatatttaatacattcgttatgatgcagcttttcaatgagattaatgccaggaagatccacggggaacggaatgtcttcgacggcatattttcaaatccaatcttctgtaccattgtgttagggacatttgggatacagatagtgattgtccagtttggggggaagccattctcctgttcccctctctctactgaacaatggttgtggtgcctgtttgttggcgtcggggaattagtgtggggccaagtgattgccaccattcccacttctcagctcaagtgcttgaaggaggcaggccatggcccaggaaaggatgagatgactgatgaggagctggccgagggcgaagaggagatcgaccatgccgaaagggaactgcggcgtgggcaaatactgtggttccgcggactcaatcgcattcagactcaaatggaagtggtgtcgacatttaagagatccgggtccgttcaaggagctgttcggagaaggagtagcgtactctctcagcttcacgacgtaaccaacttgtccacccctacacacgcaatcttaagcgcagcaaatcccacatctgctgccggtaatccggggggcgagagtgttccatag

SEQ ID NO: 108985 - DNA, 3480 bp, synthetic construct
  misc_feature 1..3480: note = Description of Artificial Sequence: Synthetic coding sequence
  source 1..3480: mol_type = other DNA
atgggagacatggcaaacagtagtatcgagtttcatccaaaaccacagcagcaacgcgatgtgccacaggcaggtggtttcgggtgcacattggcggagctccgaactctgatggagctaagaggagctgaggcactgcaaaaaattgaggaggcatatggagacgtgtccgggctctgtaggagactgaagacgagcccgactgaaggactggccgacaatacaaacgacctggagaagcgccgacagatttatgggcagaatttcatcccaccgaaacaacccaaaacgttcctccagttagtctgggaggccctgcaagacgtcaccttgatcatattggaggttgccgcaatcgtgtccctggggctctcattttatgcaccacccggcgaagagagtgaagcctgcggtaatgtttccggtggcgccgaggacgaaggggaggctgaagccggctggattgaaggcgccgcaattttgttaagcgtcatctgtgtggtgttagtgacagccttcaacgattggtcaaaagagaaacagtttcgcggtctgcaatcccggattgagcaggaacagaaattcaccgttatccgaaacggccagcttttgcaggtgcccgtagctgccttggtggtcggcgacattgctcaggtgaaatacggcgatcttctgcccgccgatggagtgctaatccaggctaatgacctcaaaatagatgaatctagcctgacgggcgagtccgaccacgtaagaaaatcagcagacaaagatccgatgttgctgagcgggacacacgtcatggagggcagcgggcgtatggtcgtcaccgcagtgggggtcaactcacagactggcatcattttcactctcttgggagctggcggcgaagaggaggagaaaaaggataagaaggccaagaagcaggacggagccgtcgccatggaaatgcagcccctgaaatccgccgagggcggagagatggaggagagagagaagaaaaaggccaacgcccctaaaaaggagaagtctgtactccaagggaagttgactaagctggccgtacaaatcggcaaggccggactggtcatgtcagcaatcacagtgattatcctcgtattatactttgtgatcgaaacattcgtggtcgaggggcgcacctggctggcagaatgcacaccggtatacgtgcagtattttgtcaaattcttcataattggggtgacagtgctcgtggtggccgtgcctgagggcttgcctctggccgttacaatttcactggcctactccgtcaagaaaatgatgaaggataacaatctggtgcgacacctggacgcttgtgagaccatgggcaacgcgaccgcaatctgctccgacaagactggcactttaaccactaacagaatgacagtggttcagagctatctcggggacacccattataaagaaatacccgcacccagcgccctgacccctaaaattctggacctgcttgtccacgcgatcagcattaattctgcttataccaccaaaatcctccccccagagaaggagggggctctgcccagacaggtgggaaataagacagagtgtgctttgctgggctttgtgttagacctcaaaagagatttccagccagtgagggaacaaatcccagaagacaaactgtacaaggtctacactttcaattctgtcagaaaaagcatgtcaaccgttatcagaatgccagatggcggcttcaggctctttagtaaaggagcttcagaaatcctgctgaaaaaatgcactaacatcctgaacagtaacggagagctgcggggattcaggccgcgcgaccgggatgatatggtgcgtaagatcatagaacccatggcatgtgatggactccgaactatctgcatcgcatatcgagatttcagcgcagggcaggaacccgactgggacaacgaaaacgaggtggttggggatctgacatgtattgccgttgtgggcattgaagaccccgttagaccagaggttccagaagccatccgcaagtgccagcgcgctggcattactgttcgcatggttaccggcgacaacattaatacagcccgggctattgcggccaagtgcggcattatccaaccgggagaggacttcttgtgtctggagggcaaagaatttaataggcgcattcgcaacgagaagggtgagatcgaacaggaacgcctggacaaggtgtggcccaaactgcgcgtgttggcccggagtagcccgaccgataagcacacgctggtaaagggaatcatagactccaccacgggcgaacaacgacaggtggtggcagtgaccggcgacgggactaatgacggccccgctctaaagaaagctgacgttgggttcgccatgggtatcgcggggacggatgtggcgaaagaggcaagcgacataatactgaccgacgacaactttactagcatcgtgaaggcggttatgtggggacgcaacgtgtatgactcaatctccaagttcctgcagttccagcttactgtgaacgtggtggcagttatcgtcgcttttactggagcatgcattacgcaagactccccccttaaggctgtgcagatgctctgggttaacctcatcatggatacgttcgcctccttggcactcgctaccgagccacccaccgaatcgttgctactccggaagccctatggaagagacaaaccactgatctcgagaaccatgatgaagaatatcctgggacacgcagtgtatcagttggcgataatcttcaccctgctgttcgtaggagagttgttctttgatatcgatagtggacggaatgcccccctccactcacctccttccgagcattatacaataatcttcaacacgtttgtgatgatgcagttatttaacgaaatcaacgcgcgtaagatccacggagagcgtaatgtcttcgatggtatcttctctaaccctatcttctgcaccatcgtgctgggaacatttgggatccagatcgtcatcgtgcagtttgggggcaaaccattctcctgttcaccattgtccactgaacaatggttatggtgcctgtttgtgggggtgggtgaactggtctggggtcaggtgatcgctactatacccactagtcagttaaagtgcttaaaggaggctggccacggtccaggaaaggatgaaatgacagacgaggagctggctgagggggaggaagagatcgatcacgccgaacgggaattaaggcgaggtcagattctttggttccggggacttaaccgcatccagactcagatggaagtggtgtctacctttaaacgcagtggctccgtgcagggtgcagttcggagacggtctagcgtgttgagccagctgcatgacgttaccaacctgtccaccccaactcacgcaattctttctgcggctaatcccacatccgcagctgggaatcccgggggagagtccgtaccttag

SEQ ID NO: 108986 - DNA, 3465 bp, synthetic construct
  misc_feature 1..3465: note = Description of Artificial Sequence: Synthetic coding sequence
  source 1..3465: mol_type = other DNA
atgggggatatggccaattcctccattgagtttcaccctaagccacaacagcagagggacgtgccccaggcaggcggcttcgggtgtaccctggcagagctccgtacactaatggagcttcgtggggcagaggccctgcagaagatcgaagaagcttacggggacgttagcggactttgtaggagacttaagacttctcccaccgagggcctggcagataataccaacgatcttgagaaacgcaggcagatctacggacaaaatttcatcccccctaaacagcccaaaacgtttttacagcttgtgtgggaagccctgcaggatgtcactttgattattctcgaagtagcagcaatcgtgtcccttggtttgagcttctacgcccctccaggggaagagtctgaggcttgcgggaacgtgagcggtggagcagaagatgagggggaagccgaggctggttggatcgagggcgcagctattctgctgagtgtcatctgtgttgtgctagtgacagccttcaatgattggtcaaaagagaaacagttcaggggcctccaatccaggattgagcaagaacagaaattcacagtgatccgaaacggtcaactcctgcaggtgcctgtggcggctctggtggtgggcgatatcgctcaggtgaagtacggcgaccttttaccggcagacggcgtcttgatccaggccaacgacctgaagatagacgaatcgtcactgaccggcgaatctgaccacgtgcggaaatctgccgataaagacccaatgctactaagtggaactcacgttatggagggatctggtagaatggtcgtcaccgctgtcggcgtcaattcacagacggggataattttcacactgctaggagccggaggggaagaagaggaaaaaaaggacaaaaaagcaaagaagcaagacggggcagtggcgatggagatgcagcctctcaagtccgccgagggtggagaaatggaggagcgtgagaaaaagaaagccaacgcccccaaaaaagaaaaatctgtacttcagggcaagttgactaagcttgctgtgcaaatcggaaaggctggtctggtcatgtccgccataacagtcataatcttggtgctgtacttcgtgatagagacgtttgtggttgaagggagaacatggctagcggagtgcacacccgtgtacgtccagtacttcgttaagttcttcatcataggagtcaccgtcctggtcgtggccgtgccggaaggactaccactggcagtgaccatctccctcgcatattcagtcaagaagatgatgaaagacaataacctggtccggcatctggatgcatgtgagaccatggggaatgccactgccatttgctccgacaaaacgggaaccctgacgaccaatcgcatgacagttgtgcagagctacctcggagatacccattataaagaaattccggcgccgtctgcgctgacaccaaagattcttgacctgctggtccatgccatttccatcaactccgcatacactaccaagatcctgccacctgaaaaagagggtgccctcccgcgccaggtggggaacaagacggaatgcgccctgctgggttttgtcctcgatctcaagagggatttccaaccagtgcgcgagcaaatccctgaggacaagctgtacaaggtttacaccttcaatagcgtccggaagtctatgagcacagtgatccgaatgcctgatggcggttttaggctctttagcaaaggagccagcgaaattttactgaaaaagtgcactaacattctcaatagcaacggtgagctacgggggtttcgccctagagaccgcgacgatatggtgcgcaagattatagagccaatggcatgtgacggactgagaacgatctgcatcgcttatagggatttctccgctggacaggaaccggattgggataacgagaacgaggtcgtgggtgacctgacatgtatagcggtcgtcggtatcgaggaccctgtgaggccggaggtccctgaggccatccggaagtgccagcgagctggcataacagtacggatggtgactggcgacaacatcaacaccgctcgtgccatcgccgctaaatgtggcatcatccaacctggagaagactttctgtgtctcgagggcaaggagttcaaccggaggatccggaatgagaaaggggaaatcgaacaggaaagactggacaaagtgtggcctaagctgagagtcctcgcccggtcatccccaacggacaaacacactctcgtgaaagggatcatcgactctaccactggcgaacaacgacaggtcgtcgctgtgacgggcgatggcacaaacgacggacccgctctgaaaaaggcggacgtgggatttgccatgggcattgcgggcaccgacgttgccaaggaggcatctgatatcatactcacagacgataatttcacctcgattgtcaaagccgtaatgtggggaaggaatgtgtatgactccatatcaaagttcctgcagtttcagctaacggtgaatgtggtagccgtgattgtcgccttcaccggagcttgtattacacaggactctcctttgaaggccgtgcagatgctgtgggtgaatttgataatggacacttttgcctctctggcactggctactgaacctcctactgaatcccttctgctgcgaaaaccttacggccgagataagcctctcattagtcgcacaatgatgaagaatattctgggccacgctgtttatcaactggccattattttcactctcctgtttgtcggagagctgttttttgacatcgacagcgggcggaatgccccactgcacagtcccccatcagagcactacactattatattcaacactttcgtgatgatgcaattattcaatgaaatcaacgcccgtaagatacatggggaacgtaacgtgtttgatgggatcttcagtaaccccatcttttgcaccatcgtgctcggaacctttggaatccagatcgtaattgtccaatttggcgggaagcccttctcttgctcacctctgagcaccgagcagtggctgtggtgtctgttcgttggagtgggggagctcgtgtggggccaagtgattgcaacaattcccacctcccagctgaagtgcctgaaagaggccggtcatggccccggaaaggacgagatgaccgacgaggagctcgccgagggggaagaggagatcgatcacgctgaaagagagctcaggagaggtcaaatcctctggttccgcggcctgaatcgcattcagactcaaatggaagtagtgagcactttcaaacgcagcgggtccgtgcagggagcggtgcgccgacggagctctgtgctatctcaactccacgacgtcactaatctctccacacccacacacgcgatcctgagtgccgctaacccaaccagcgcagccggttctgagagctag

SEQ ID NO: 108987 - DNA, 3513 bp, synthetic construct
  misc_feature 1..3513: note = Description of Artificial Sequence: Synthetic coding sequence
  source 1..3513: mol_type = other DNA
atgaccaatcctagcgatcgggtcctgcctgccaatagtatggccgagagtagagaaggcgacttcggctgcactgttatggaactgaggaagcttatggagctccgatccagggacgccttaacacagatcaacgtgcactacgggggggtgcaaaacctgtgttctcggctgaaaacttctccggtcgaggggctctccggtaaccccgcagacttggaaaagagaagacaagtctttggccataatgttattcccccgaaaaagcccaagacattcctggagttggtctgggaggctctgcaagacgtgactctaatcattcttgaaatagcagccatcatttccctggtgctgagcttctatcgtcctgcaggcgaagaaaacgaactctgcggacaggtagccacaacccccgaggatgaaaatgaggcacaagccggttggatcgagggggccgccattctgttttctgtcataattgtagtgctcgtcacggcttttaatgactggtcaaaagaaaagcagtttagaggcctgcagtgtcgcatcgaacaagagcagaagttcagtataatcaggaatgggcaactgatacagctgcctgtggcggaaatagttgtgggtgatatcgcccaagtgaagtacggagatctgctgcccgcggacggcatactgatccaggggaacgacctcaaaatcgatgagagcagcctaacaggagagagcgaccatgttaagaagtcattagacaaagatcctatgctcctgtcaggaacacacgtgatggagggatctggcaggatggtggttactgcagttggcgttaactcacaaacaggtatcattctgacgctgctcggggtcaacgaggatgacgagggcgaaaagaagaagaagggaaaaaaacagggggtgccagagaaccgcaataaggctaaaactcaggatggagtggctttagaaatccagccattgaactcccaggaagggatcgataatgaagagaaagataagaaagccgtgaaagtaccaaagaaagagaaaagcgtcttgcagggaaagctgacaagactggctgttcagatcggaaaggccgggctgctgatgtccgcgctgactgtgtttattttgattctatacttcgtgattgataacttcgtaattaataggcgaccttggctcccggagtgcacccctatttacattcaatattttgtgaaattcttcatcattgggatcaccgtcctggtagtggcggtgcctgagggactcccattagccgtgaccatctctctggcatactccgtaaaaaaaatgatgaaagacaataatttggtgagacatctagatgcttgcgaaacaatgggaaatgccacagcgatttgctctgataagactggcactctcaccatgaatcgtatgactgttgttcaagcatacattggtggcatccactatcggcagattccaagccccgacgttttcctccccaaagtcctggatctgatcgtgaacgggataagtatcaattccgcgtatacatcaaagatccttcctcctgaaaaggagggtggtctgccacggcaggtcggcaataagacggaatgcgctttactcggctttgtgacagatctcaaacaggactatcaggcagtacgcaacgaggtgccagaagaaaagctgtacaaggtgtatacattcaactctgtgcgcaaatccatgagtaccgttattaggaaccctaacggcggtttcagaatgtactccaaaggtgcatccgagatcatccttcggaaatgtaataggatccttgacagaaagggtgaagctgtgcccttcaaaaataaggacagagatgacatggttaggactgttattgagcccatggcgtgcgatgggttgaggaccatatgcatcgcatacagagactttgacgacactgaaccatcttgggataatgagaatgaaatcctgaccgagctgacgtgcatcgctgtggtgggaattgaagacccagtgagacctgaagtccctgacgctatcgcgaagtgcaagcaggcagggatcactgtgcggatggtaaccggtgataatataaatactgcccgggctatagctactaaatgcggtatactgaccccgggtgacgactttttatgtctagagggcaaggaattcaacagactgattcgtaacgagaagggtgaggtggagcaagaaaagttagataagatttggcccaagttgagagtgctggctcgttcttccccaactgataaacatacccttgtgaagggcattattgacagtactgttggcgagcaccgacaggtagttgctgttactggcgatgggacgaacgacgggccagctcttaaaaaagccgatgtgggttttgccatgggaatagctggaaccgacgtggccaaagaggcttccgacataattctgacagacgacaattttaccagtattgtgaaggctgtaatgtggggtagaaatgtgtatgactctatatctaagtttctccagttccagctgaccgtcaatgtggtcgccgtgattgttgcttttactggagcctgtatcacccaagacagcccacttaaggcggtgcagatgctctgggtgaaccttatcatggacaccttcgccagcctcgccctcgcaacagagccacccactgagagtttgctgaagcggagaccttacgggagaaacaagcccctcatatcacgcactatgatgaaaaacattctcggccatgcgttctatcagcttattgtgatttttatactggtgtttgctggggagaagtttttcgatatagattccggacgaaaagctccgctccattcaccaccaagccagcattatactattgtatttaacacatttgtactgatgcaattgtttaacgagatcaattcaagaaagattcatggggaaaaaaacgtattctctggtatctaccggaacataatcttttgttccgtggtcctcggaacgtttatttgccagatctttatcgtcgagttcggaggcaaacctttttcttgcacctcactcagcctgagccagtggctttggtgcctgttcatcggtattggcgagctgctgtggggccaattcattagtgctatccctacgcgctccctgaaatttctaaaagaggccggacacggcacaaccaaagaggagattacaaaagacgcagaagggctggatgaaattgaccacgcggagatggaactgagaagagggcagatcttatggtttagggggctcaatcgcatccagactcagattgatgtcattaataccttccagaccggagcctcatttaagggcgtgctcaggagacaaaacatgggacagcatttggatgtgaaactggtgccttcatcttcatatgtggccgtcgcccccgtgaaatcctccccgacaacttcggtccctgccgtttccagtcctcctatgggcaaccagtccgggcaatcggtcccttag

SEQ ID NO: 108988 - DNA, 390 bp, synthetic construct
  misc_feature 1..390: note = Description of Artificial Sequence: Synthetic coding sequence
  source 1..390: mol_type = other DNA
tagattggagagcttctttggggccaattcatctctgcaatccccactaggagccttaaattcctgaaggaagccggacatggcactaccaaggaggaaatcacaaaggatgcagaaggcctggacgagatagaccacgctgaaatggagcttaggcgcggccaaatactatggtttcgcggacttaaccgcatccaaacgcagatcgatgtgatcaatacatttcagactggggcctcttttaagggagtgctcagacgacagaacatgggccaacacctggacgtgaaacttgtgccttcatcatcctacgtggctgtagcccctgtgaagtcgtctcccactacctcagtgcccgccgtgagttcaccccctatggggtctgagtag

SEQ ID NO: 108989 - DNA, 3618 bp, synthetic construct
  misc_feature 1..3618: note = Description of Artificial Sequence: Synthetic coding sequence
  source 1..3618: mol_type = other DNA
atgacaaacccctcagaccgtgttctcccagccaattcaatggcggaatccagagaaggcgatttcggatgtaccgtgatggaactgcggaaactgatggaattaaggtcccgggacgctttgacccagattaatgtgcactatgggggcgtacagaacctctgtagcaggttgaagacatcacccgtcgaggggttgtcgggcaatcctgcagacctcgaaaagcgccggcaggtattcggccacaacgtcatccccccaaaaaaaccgaagaccttcctggaacttgtgtgggaagctctgcaggatgtcacgcttattattttggaaatcgccgccatcatttccttggtgctgagtttctataggccagcgggagaggaaaacgaactctgcggccaggtcgcaactaccccagaggatgagaacgaggcgcaggcaggttggatagagggggccgctatcctcttttcggtgattatagtggtccttgtcactgcctttaatgactggtcaaaggaaaaacagttccgggggttgcaatgtcgaatagagcaggaacagaaatttagcatcatccgcaacggtcaactcatccaactgcccgtggccgagattgtggtcggagacattgcccaggttaagtacggagacctgttgcctgctgacggcatcctgatacaagggaatgatctcaagatcgacgaaagctctctcactggcgagtcagatcatgtaaaaaagtctcttgacaaggaccctatgctcttgagtggtacccatgtcatggaaggtagcggacgtatggttgtgacagccgtcggcgttaactcccaaacaggcatcattctcacgcttctcggtgtaaacgaagacgacgagggtgaaaaaaagaaaaaaggcaagaagcagggtgtcccggagaacaggaataaggccaagacacaggatggcgtggcgctggagatccagccactgaacagccaggaggggatcgataacgaagagaaggacaagaaagctgtgaaggtgccaaaaaaagaaaaatccgtcctccaaggcaaactgactcgtctggccgtgcagattggcaaggccggactcctcatgagcgccctcactgtgtttattctgattctttactttgtcatcgacaactttgtcatcaacaggcgtccctggctcccagagtgcactccaatttacatccagtattttgtcaagttcttcataatcggaatcacagtgctggtggtggccgtccctgagggactacccttggccgtgacgatctccttggcttatagtgtgaagaagatgatgaaggataacaacctcgtgcggcatctggatgcctgcgaaaccatgggcaatgctaccgctatttgttcggataaaacagggaccctgactatgaaccgcatgactgtggtgcaagcctacatcggaggcattcattaccggcagatacctagcccagacgttttccttccaaaggtcttggacctgattgtgaacggcatcagcatcaatagcgcatacactagcaaaatcctcccaccagaaaaagaagggggtttgccacgccaggtgggaaataagacagagtgcgcccttttgggattcgtgacagatctgaagcaggactaccaagccgtgaggaatgaggtgcctgaggaaaagctgtataaagtttatacatttaattcagtgcgcaagagtatgtcgactgtgattcgaaatccaaacggggggttccgcatgtacagtaagggagctagcgaaataattctgcggaagtgcaataggattttagaccgtaagggtgaggccgttccatttaaaaataaggatagggacgacatggtcaggacagtcatcgagcctatggcttgcgacggtctgaggaccatttgtattgcttaccgcgatttcgacgacactgagccaagttgggacaatgagaacgagatcttgacggaattgacctgtatcgcagtggtgggaattgaagacccagtcaggcccgaggtccctgatgccatcgctaagtgtaaacaagcaggcatcaccgtgcgtatggtcaccggggacaacatcaacacggccagagccatagccactaaatgcgggattctaactcccggagacgattttctctgcctggagggaaaggagtttaacaggctgatcaggaatgaaaagggcgaggtagaacaggaaaagttggacaagatctggcccaagctgcgcgtcctagcgcgaagttcacctactgacaagcatacacttgtaaagggcatcatcgacagcaccgtgggggagcaccgccaagttgttgccgttactggagacggcaccaacgatgggccggctttaaagaaggccgatgtcggattcgctatggggatcgccgggactgatgttgcaaaagaggctagtgacatcatactgacagatgataacttcacctccattgtaaaagcagtcatgtggggacgcaatgtctacgattcaatctcaaagtttctccaattccagctgacggtgaatgtcgttgccgtaatcgttgcttttaccggggcatgcatcacccaggattccccacttaaagcagtacaaatgctgtgggttaacttgataatggacacattcgcaagtttagcattggccaccgagcctccgacggagagcctactcaagagaagaccctatggtagaaataagcctctgatctcacggaccatgatgaaaaatatactcggacacgcgttctaccagctgattgttatttttatacttgttttcgctggggagaagtttttcgacattgatagcggtcgcaaggctccacttcatagcccgccctcacagcactatacaattgtctttaatactttcgttctcatgcagctatttaacgagatcaatagccggaagatccacggggagaagaacgttttttctggaatttatcggaacatcatcttctgtagcgtagtgttgggcacattcatttgtcaaattttcatcgtcgagttcggggggaagcccttttcttgcacttcactgtcattgtcgcaatggctttggtgtctatttattggcataggagagctgctgtggggccaatttatcagtgcaatccccacacgcagtttaaagtttttgaaagaggcaggacatggcactacaaaggaagagatcaccaaggacgcagaaggcctggacgagatagatcacgccgagatggaattgcgaagaggccagatactttggtttcgtggccttaaccggatccaaacccagatcaaagtagtcaaagcctttcatagctccctccacgagtccattcagaagccttacaaccagaagtccattcactcctttatgacccacccagagttcgctatagaagaagaactgccccgcacaccgctgctggatgaggaggaagaggaaaacccagataaagccagcaagttcggtacccgggtcctgctgttggatggcgaggtgactccctacgcgaacacaaacaataatgccgtggactgtaatcaggtccagctacctcaatccgatagcagcctccagtccttagagaccagtgtctag

SEQ ID NO: 108990 - DNA, 3513 bp, synthetic construct
  misc_feature 1..3513: note = Description of Artificial Sequence: Synthetic coding sequence
  source 1..3513: mol_type = other DNA
atgaccaatcccagtgatagagttctgccagctaatagcatggccgagtctcgagagggagacttcggatgtaccgtcatggagttgcggaagctgatggagcttcgttcacgagatgccctgactcaaatcaacgtccattatgggggggtgcagaatttatgctctcgccttaagacctcacccgtggaggggctcagtggaaacccagcagacctcgagaagcgccgtcaggtctttgggcacaacgtcatcccccccaagaaaccaaaaacgtttctggaattggtgtgggaagccctgcaggatgttactctaattattttagaaatcgcagctatcataagtttggttctgtctttttaccgccctgcgggtgaagagaacgaactatgcggacaggtcgcgaccaccccggaagatgagaatgaagcccaggccgggtggatagagggggccgcaatactgttttctgtgatcatagttgttttggttactgcgttcaacgattggtccaaagaaaaacagttcaggggacttcaatgcaggattgagcaagagcagaaattttctatcattagaaacggccagctcatacagctaccagtggcagagatcgtagtcggagacatcgctcaagtaaaatatggcgacttgctgcccgctgatggcatcctcatccaggggaatgatttgaagatcgacgaatctagcctcaccggcgagagtgatcacgtcaagaagtcgctggacaaggatccgatgctattgagcggcacccacgtaatggaagggagcggcagaatggtggtcactgcagtgggagtgaacagccagactggaatcatacttacccttctcggggtcaatgaagatgacgagggggagaagaaaaaaaaagggaaaaagcagggtgtccctgaaaataggaataaagcaaagacacaggacggggtggctcttgagattcaacccctgaacagccaggaagggatcgacaatgaggaaaaagataagaaagcagtcaaagtgcccaaaaaggaaaagtcagtgttacaaggcaagctgactcggctcgcagtccagattggcaaagccggcctactcatgagcgccttgaccgtgtttattcttattctgtactttgtgattgacaatttcgtgattaatcgccgtccctggctccctgaatgtacacccatctacatccaatatttcgtcaagttttttattattgggatcaccgttttggtggtggccgtgcctgaaggactcccccttgccgtcactatctcgctggcgtactccgttaaaaaaatgatgaaagacaacaacctggtaagacacctcgacgcctgcgagacaatgggcaacgcgactgccatctgtagcgataaaacaggcactctgaccatgaatagaatgactgtggtgcaagcttacatcgggggaatccattaccgccaaatcccgtctcccgatgtcttcttaccaaaggtgctggatctgatcgttaacggaatctccattaactccgcgtacaccagcaaaatcctcccccccgaaaaggaaggtggactgccacgacaggtagggaataaaaccgagtgcgcgctcctgggattcgttacagatctcaagcaggactaccaggccgtgcgcaatgaagtccccgaagaaaagctgtacaaggtatacacttttaattcagtgaggaagtccatgagcaccgtgattagaaacccaaatggaggattccggatgtattctaagggcgccagcgaaatcattctacggaagtgtaacaggatactcgatcgcaaaggagaagctgttccttttaagaacaaagacagagacgacatggttcggaccgtgatcgagcccatggcttgtgacgggctgagaacaatctgcatcgcatatagggattttgacgacaccgagccaagctgggataatgaaaatgagatcttgacggagctgacatgtatcgcggtggtcgggatcgaggatcctgtgcgccctgaagtgccagacgcaatcgccaaatgcaaacaggctggtatcaccgttcggatggttaccggggataatataaacactgcacgagcaattgccactaagtgcggaatcctcacgcctggagatgacttcctctgtctggagggcaaggaattcaatcgactgattcgtaatgaaaagggcgaggtggaacaagagaaattagataagatttggccaaagttaagggtacttgcccggtcctcacctaccgataaacacaccctcgtcaaagggatcattgatagtacggttggcgaacacaggcaggtagtggccgtcaccggtgacggcacaaatgacggtcctgctctaaaaaaggcagatgtggggttcgcaatgggcatagcagggactgatgtcgctaaggaggcctccgacattattcttacagatgacaacttcacaagcattgtgaaggcagtcatgtgggggagaaatgtgtacgacagcatcagcaaattcctccaattccagctcaccgtgaatgttgtcgcggtgatcgtcgcattcactggcgcctgtatcacccaggactcacctctgaaagccgttcagatgctgtgggtgaatctgattatggacacatttgccagcctggctcttgcgacagagccacccaccgaatcactgcttaaaaggaggccatatgggaggaacaagccgctgatctccagaaccatgatgaagaatattctggggcacgccttctatcagttgattgtgatctttatactggtgtttgccggagagaagttttttgatatcgactctgggcgcaaagcgccactgcatagccctccttcacagcactatacaatcgtctttaatacctttgtcctgatgcagttattcaatgagattaactcacggaaaatccatggggagaagaacgtctttagcggcatctaccgcaatatcattttttgcagcgtagtgcttggcacctttatctgccagatttttatcgtggaattcggaggaaaaccgttttcttgtacttctctttctctgagtcagtggctatggtgcctctttattggcattggcgagctgctgtgggggcaattcatctcagcaattcctacacggagcttgaaatttcttaaagaggccgggcacggcactacaaaagaagagattacgaaggacgccgaaggcctggatgagatagatcacgccgaaatggagttgcgaagggggcagatcttgtggtttaggggcctgaaccgtattcagacgcaaatagacgtaattaacacctttcaaaccggagccagctttaagggagtcctgcgccggcagaatatggggcagcatctcgacgtcaagctggtaccctcctcttcctatgttgccgtcgcccctgttaaatcctctcctacgaccagcgttcccgctgtgagttcgcctcccatggggaaccaaagcggacagtcggtgccttag

SEQ ID NO: 108991 - DNA, 3477 bp, synthetic construct
  misc_feature 1..3477: note = Description of Artificial Sequence: Synthetic coding sequence
  source 1..3477: mol_type = other DNA
atgacaaacccttcagaccgggtgctgcccgcaaacagtatggcggagtctcgagaaggagatttcggttgtactgtcatggaactgaggaagttgatggaactccgatcccgcgatgctcttacacagattaatgtgcactacggcggggtgcagaatctatgctctagacttaaaacgtctcccgttgaggggctgagcggtaatcctgcagacttggaaaagagacggcaggtgttcgggcacaatgtcatcccccctaagaagcctaaaacattcctcgaacttgtgtgggaggccttgcaggacgttactctcattattctcgaaatcgctgcaatcataagtttagttttatcattttaccggcctgcaggggaggagaatgaactgtgtggtcaggtagcgactaccccagaagatgagaacgaagcacaggccggatggatcgagggggcggccatactgttcagcgtgatcatagttgtgctggttactgcgtttaacgattggtctaaagagaagcagtttcgtggattgcaatgccgtatcgagcaggagcagaagttctctatcatacggaatggtcagctgattcagctaccagtcgctgaaattgtggtgggtgacatcgctcaggtcaagtacggcgatctgctgccagccgacggaattctgatccaggggaatgacttgaaaatcgatgagagctcactaacgggcgagtccgaccatgtaaagaagagcttggacaaagatccaatgctgctctccggaactcatgtgatggaggggagtggacgcatggtcgtcacggccgtaggggtcaactcgcagacgggcattattctcacgcttctgggtgtcaatgaggatgacgagggcgaaaagaagaagaaggcgaaaacccaggacggtgtggctctggagatacaaccacttaactcgcaggagggaattgacaacgaggagaaggacaagaaggccgttaaagtgcccaagaaggagaagagtgtcctgcagggaaagctgactcgacttgctgttcagatcggaaaggccgggttgctcatgagcgctttaacagtgttcatcctgattttgtactttgtcatcgacaacttcgtcattaacaggcgtccatggctaccagaatgcactcccatttatatccagtatttcgtgaagtttttcattatagggatcaccgtgttagtggtagcggtccccgagggactgcctctggcggtcaccatttcactggcttattccgtaaagaagatgatgaaggacaataacttggtacgtcatctggacgcttgcgaaactatgggaaacgctacggctatctgttcagacaagacggggacactgaccatgaatagaatgacagtagtccaagcatatatcggtggcatccactaccgccagattcccagccctgatgtctttcttccaaaggtgctcgatctgatcgtgaacggcatttccattaactccgcatacacctctaagattcttcctcccgagaaggagggcggtttaccacggcaggtgggcaacaaaacggaatgcgcacttttaggatttgtcaccgatctgaaacaagattaccaagccgtgcggaatgaagtcccagaggagaaactatacaaggtctacaccttcaactctgttcgaaaaagcatgtcaactgtgattcgcaatccaaacggcggatttaggatgtattcaaaaggagcgagcgagatcatcctccggaaatgcaatcgtatcttagaccggaagggagaagccgtgccctttaaaaacaaggacagggacgacatggtgaggacggtgatcgagccaatggcctgcgatggtctcagaactatctgcatcgcatacagggacttcgatgatacagagccgtcttgggacaatgaaaatgagatcctgaccgagttaacatgcattgccgttgtgggcattgaagaccccgtgcgccccgaagtgccagatgctatcgccaagtgcaagcaggccggtattactgtgcggatggtcaccggcgataatatcaatacagcgcgggcaattgctactaagtgtgggatcctgactccaggcgacgacttcctgtgcttagaaggcaaggagtttaaccggctaatccggaatgagaagggtgaggtagagcaggaaaaactcgataaaatctggccaaagctgcgggttcttgccaggagcagccccactgacaaacatactctggtgaaaggaattatcgactccactgtcggtgaacaccgccaagtcgtagccgttactggagatggcaccaacgacggccccgccctgaagaaggctgacgtgggattcgccatggggatagccggcaccgacgtcgctaaggaggcaagcgatataattttaacagatgataatttcacttctattgttaaggcagtgatgtggggccgcaatgtatacgactcaataagtaaatttcttcaatttcagctcacagtcaacgtcgttgcggtgattgtagccttcaccggagcctgcatcactcaggattctccacttaaagccgtacagatgctgtgggtcaaccttattatggatacattcgcaagtctggccttagcgaccgaaccaccaacggagtccttgctgaaaagacgaccatatggaagaaacaaaccactgatctcccggacaatgatgaaaaatatcttaggccatgccttctaccagctaattgtgatttttatccttgtgtttgcaggtgagaaattttttgacatcgactcaggtaggaaggcccccttgcattccccaccctcccagcattataccattgtattcaacacgttcgtgcttatgcagttatttaacgagatcaattctagaaaaatacatggcgagaagaatgtcttcagcggcatataccggaacattattttctgtagcgtggttttgggcacctttatctgccagatctttatagtcgaattcggaggtaagccattctcatgcacatctttatctctctctcagtggctgtggtgcctctttatcggtataggcgagctcctgtggggccaatttattagcgcaatccctaccaggagtctgaagtttcttaaagaagcaggccatggaacaacaaaggaggaaattacaaaggatgcagaaggactggacgagatcgatcacgcagaaatggaacttagaaggggtcagattttatggttcagggggctgaacagaatccagactcagatcgatgtaatcaacactttccaaaccggcgcttctttcaagggcgtgttaaggcgacagaatatgggccagcatttggacgtgaagctggtccctagttcatcctacgtggcagtcgctcccgttaaaagctcacccactacctcagtgcccgccgtaagtagcccgcctatggggaatcagtcaggacagtctgtgccatag

SEQ ID NO: 108992 - DNA, 3405 bp, synthetic construct
  misc_feature 1..3405: note = Description of Artificial Sequence: Synthetic coding sequence
  source 1..3405: mol_type = other DNA
atgaccaatccttcggacagggtcctgcctgccaattcaatggccgagtcaagagagggcgattttggttgtaccgtgatggagttgcgaaagctgatggaactgcgcagccgagatgccctgacacagatcaacgtgcattatggcggggttcaaaatttgtgctcccggctgaagacctctccagtggaaggcctgtccgggaatcccgctgacttagaaaagcggcgacaggtctttggacacaatgtaatcccccctaagaagcccaagacattcctggaactggtatgggaggcactccaggatgtgacgctgataatcctggagattgccgcaatcatttccctagtgctaagtttttaccgccctgccggggaagaaaatgaattatgtggccaagttgccacaactccagaggacgaaaacgaagcacaggccggctggattgagggcgcagccatccttttctctgtgataattgttgtgttggtgactgccttcaatgactggagcaaagaaaagcagttccgcgggctccaatgtagaatagagcaggagcagaaattttcaattatcaggaacggtcaactgattcagctgcccgtagccgagatagtggtgggagacatcgcacaggtgaagtatggcgatctcctgccggctgatggaatcctgatccagggaaacgatctgaagatcgatgagtctagcctgacaggagaaagcgaccatgtgaagaagtcgctcgacaaggatccaatgcttctgagcggcacacatgtcatggaggggagcggcaggatggttgtgaccgctgtgggagtaaactctcagacggggattatcctgaccctgctgggcgtgaacgaggacgacgagggagaaaagaaaaaaaagggtaagaagcaaggagttcccgaaaataggaataaggctaaaacacaggacggtgtcgccctcgaaatacagcccttaaactctcaggaaggcattgacaatgaagaaaaagacaagaaggccgtaaaagtgccgaaaaaggagaagtcagtgttgcagggaaaattaactcgactggccgtccagatagggaaggccggactcctcatgtccgcccttaccgtatttatacttattctctattttgtgattgacaattttgtaattaaccgtagaccttggctgcccgaatgcacccctatctatatccaatacttcgtcaaattctttattatcggcattactgtgctggtcgtggcagtgcccgagggtttgccccttgccgtcacaatatcattggcgtactctgtgaaaaaaatgatgaaggataataatttagtaagacacttggatgcttgtgaaacaatgggcaacgccactgccatttgctctgacaaaactggcaccctcactatgaacaggatgaccgtagtgcaggcatacattgggggcatacactatcggcagatcccttcacctgacgtgtttctgccaaaggtcctcgacctcatcgtgaacgggatctctattaatagcgcttacacctcgaagatcctcccccctgaaaaagagggagggctaccccggcaagtggggaataaaacagaatgcgccctcctgggttttgtcaccgacctgaaacaggactaccaggctgtgagaaacgaagtgcccgaagaaaaattatataaagtttataccttcaactcagtgcgcaaaagtatgtccaccgtcatcagaaatccgaatgggggcttccgcatgtattcaaagggtgcatcagagataatactgagaaaatgcaatagaattttagaccggaaaggagaggccgtcccatttaaaaataaggaccgcgacgacatggttcgtaccgttattgagcccatggcttgcgacggtctaagaaccatctgcatcgcctatcgcgatttcgacgataccgaaccatcatgggacaacgaaaatgagattttgaccgagcttacctgtattgcagtggtgggtattgaggaccctgttcggccagaagtgccagacgcaatcgccaagtgcaagcaggctggcataaccgtgaggatggtgacaggcgacaacatcaacacagccagagcaatagctacgaagtgcggtattctcaccccaggggacgactttttgtgtctcgaaggcaaggaattcaatagattaatacgcaacgagaagggagaggtagaacaagagaaacttgacaaaatttggccaaagctgcgcgtactggcacgctcaagccctactgacaagcatactctggttaagggaatcatcgactccactgtgggcgaacaccgtcaggtggtcgcagtgacaggggatgggaccaacgatggccccgccctgaagaaggccgatgtgggttttgccatgggcatcgccggtacagacgtcgccaaagaagcttctgacatcatcctcactgacgacaacttcacgtccattgttaaagcagtcatgtggggcaggaacgtgtatgattccatatcaaagtttctgcagtttcagctgaccgtaaatgtcgtggccgttattgttgcctttaccggtgcatgcatcacacaggacagtcctcttaaagccgttcaaatgctgtgggtcaacctcattatggatacctttgcttcactagcactggccactgagcccccgaccgagagccttctcaaaagacgaccatacggccggaataagcctcttattagccggaccatgatgaaaaacatcctgggccacgccttctatcaactcatcgtgattttcatactcgtgtttgccggcgagaaattctttgacattgactctggccgcaaggcacccctgcattcacccccttcccaacattacaccattgtttttaacacatttgtgctgatgcagctattcaacgagattaacagtaggaaaattcacggtgaaaaaaatgtgttctctgggatctaccgcaatatcatcttttgctcggtagtgctgggtacgtttatctgtcaatttatctctgctatccccaccagaagcttaaaatttttgaaggaagcaggtcacggcaccacaaaagaggaaataacgaaggacgccgaagggctggacgaaattgatcacgcagaaatggaacttcggcggggacagatcctttggtttagaggtctgaatcggattcagactcagattgatgtaataaatacttttcagaccggcgcctcctttaagggagttcttcgccggcagaacatggggcagcacctggacgtgaagctggtgccatcatccagctacgtggccgttgccccagtcaaaagcagccccacgacctcggtgcctgccgtaagctcccctccaatggggaaccagagcgggcaatctgtgccctag

SEQ ID NO: 108993 - DNA, 354 bp, synthetic construct
  misc_feature 1..354: note = Description of Artificial Sequence: Synthetic coding sequence
  source 1..354: mol_type = other DNA
tagggcggaaagccgttctcgtgcacctctctcagcctgagccagtggctttggtgtttgttcatcgggatcggtgaattgttgtggggacagtttatttccgccattcccactaggagtctgaaattccttaaggaagccgggcacgggacaaccaaagaggagatcaccaaggatgccgaggggttggacgagattgatcacgcggaaatggagctgagaagaggccagatactatggtttcggggtctgaacaggatacagactcagcatctcctacaggactctgacctgttgcccgacaaggaggaagccataatcagcagtagtttgttcccttcatgtaatttttag

SEQ ID NO: 108994 - DNA, 2667 bp, synthetic construct
  misc_feature 1..2667: note = Description of Artificial Sequence: Synthetic coding sequence
  source 1..2667: mol_type = other DNA
atgaaggttgccaggtttcagaagatccccaacggagaaaacgagaccatgatcccagtgctcacctctaagaaagcttctgagttacctgtttcagaggtggcgagcatcctgcaggctgatctgcagaatggcctgaataaatgcgaagtgagtcaccgtagggctttccatgggtggaacgaattcgacatcagcgaggatgaacctctgtggaagaagtatatcagccagttcaagaatccactcatcatgctccttctggcttccgcagtcatctctgtcctaatgcaccagttcgacgacgccgtgtcaattactgttgccatcctcatcgtggtgaccgttgcattcgtgcaagagtacaggagtgagaagagtcttgaagaactgtccaaattggtgccacccgagtgtcactgcgtacgagaagggaagctggagcatacactcgcccgtgaccttgtcccaggcgacactgtatgcctatctgtcggagatcgcgttcctgctgatctgaggctcttcgaggccgtggatttaagcatcgatgagtcttcacttacaggcgagacaaccccctgcagtaaggttaccgcccctcaaccggcagctacgaacggcgacctagcatctagaagcaatatcgcgttcatgggcaccctcgttcgctgcgggaaggctaagggcgtggtgataggcactggcgagaactcagaattcggggaagttttcaagatgatgcaggcagaggaggcccccaaaaccccactgcagaagtcaatggatttattgggaaaacagctctccttttattccttcgggataattggaatcatcatgctcgtggggtggctacttggaaaagatattttggaaatgtttaccatatctgtgtcattggccgttgctgccattcccgagggtctgcccatagtagtgactgtaacactggccctgggggtgatgcgcatggtgaagaagcgggccatagtgaagaaattacccatcgtggaaacactcggatgttgtaatgtgatttgttctgacaaaactggaacactcaccaagaacgaaatgacggtcacccacattttcaccagcgacggattacacgcagaagtcactggggttgggtacaaccaattcggcgaggtgattgtggacggcgatgtagtccacggcttttataaccccgcagtgagtagaattgtcgaggccggatgcgtttgcaatgacgcagtgatccggaataataccctaatgggtaagccaactgagggagcgctgattgctctggcgatgaaaatggggcttgacggcttacagcaggattacatcagaaaagccgaatacccgttcagtagtgaacagaaatggatggctgtgaagtgcgtgcataggactcagcaggatagacccgagatatgcttcatgaaaggcgcctacgaacaggtgatcaagtactgtaccacgtaccagtccaaagggcagacgctcacgctgacgcaacagcagcgggatgtgtaccagcaggagaaggctcggatgggcagcgctggcctacgcgtgctggcgcttgcctcagggcccgagttgggacagcttaccttccttgggcttgtgggaatcatcgatccacccagaaccggcgtaaaggaggccgtgacaactctgatcgccagcggagtgagcataaaaatgattactggggattcccaggaaacagcggttgccatagcctcccgactggggctgtattccaaaacctctcaatccgtgagcggcgaagaaattgacgcaatggacgttcagcagctctctcagatcgtgccaaaagtagccgtattctatagagcatcccctagacataagatgaagattatcaaatcgctgcaaaagaacgggagtgtggttgccatgaccggggacggcgtcaatgacgccgtcgctctcaaggccgccgacatcggagtggccatgggccagacgggtaccgacgtatgtaaggaagccgccgatatgatacttgtggatgacgatttccagaccatcatgagcgcgatagaagagggcaagggcatctacaacaacatcaaaaacttcgtgaggtttcagctgtcgacttccattgccgctctgaccctcatcagtttggcaactcttatgaattttcctaatcctcttaatgctatgcaaatactgtggattaacatcattatggatggacccccggcgcagtctcttggggtggaacccgtggataaagacgtcattcggaaacctcctaggaactggaaagatagcatcctaaccaagaatcttatactgaagatattagtgtcgtcaattattattgtgtgcggtaccctgtttgtgttctggagggagcttcgtgataacgtcattacgcccagggacacaaccatgacctttacatgcttcgtcttcttcgacatgttcaatgccttgtctagtcggtcccagaccaagagtgtatttgaaatcggcctgtgttctaatcgcatgttctgttatgcagtattggggtcaatcatgggccaattgctcgtgatatactttccccctctacagaaagttttccagaccgagagcctttctatcttgggcctggccctgggcgaagagtggactgccgcaggatag

SEQ ID NO: 108995 - DNA, 2877 bp, synthetic construct
  misc_feature 1..2877: note = Description of Artificial Sequence: Synthetic coding sequence
  source 1..2877: mol_type = other DNA
aaggtagcacgctttcaaaaaatccctaatggagagaatgaaactatgatacccgtgttgacctcgaagaaggcatctgaactgccagtcagcgaggtcgcttctatattgcaggcagatctgcagaatggtctgaacaagtgcgaagtgagtcacaggcgcgccttccacggttggaacgagttcgacatatctgaggacgaacccttgtggaaaaaatacattagccagttcaaaaacccgctgattatgctgctgcttgccagtgccgtcattagcgtccttatgcatcagtttgacgacgcagtctctatcacagtggccattttaatcgtagtgacagtggccttcgtacaggagtacaggtccgaaaaatctctcgaagaactgagtaaactggtgcccccggagtgtcactgcgtaagggaaggcaagctggaacacactctggcgagggatcttgtacctggagataccgtatgtctgagcgtgggcgatagggttcccgcggatctgcgcctgttcgaggccgtggatctttccatcgacgaatcgagcttaaccggagaaacaaccccctgtagcaaagtgacagctccgcagcctgccgcaactaatggtgacctggcctcccgaagcaacatcgctttcatgggcacactggtgaggtgcggaaaggccaaaggtgtcgtgatcggaactggcgagaattcagaattcggtgaggtcttcaaaatgatgcaagccgaggaggcgcctaaaacaccacttcagaaatctatggatcttctaggtaaacaattgtccttctactcctttggtatcatcggaatcataatgctggtgggctggctgctgggtaaggacatcctcgaaatgtttactatctctgtgtccctcgccgtggcagctatccccgaggggctcccaatcgtggtgacagtgacgttagctcttggcgtcatgcgcatggtgaagaagagagctatagtcaaaaagctgccaattgtcgagacccttgggtgctgtaatgtgatctgtagcgacaagaccggtacactgactaaaaacgaaatgacggtgacccacatatttacctccgatggacttcacgccgaggtgactggggtcggctataatcagtttggggaggtgatcgttgatggtgatgttgtacatggcttctataatcctgccgtttcccgcatcgtcgaagccggatgtgtgtgcaacgacgcagtaatccgaaataataccttaatgggaaaaccaaccgagggtgcacttatcgccctggccatgaagatgggcctggacggactgcagcaggattatatccgcaaagcagaatatcctttctccagtgagcagaagtggatggcggtaaaatgtgtccatagaacacagcaggaccgacctgagatatgctttatgaagggggcttatgagcaggtaataaagtactgtaccacataccagagcaaggggcagaccttaactttgactcagcaacagcgtgatgtctatcaacaggaaaaggcacggatggggtccgctggcttaagggtgctggcactcgcctctggcccggagctgggccaactgacattcctcggcctggtcgggattattgatcctccgagaaccggtgtaaaagaggctgttaccaccctgattgcttccggcgtttccatcaagatgattaccggtgacagtcaggaaactgcagttgcgatcgccagccgactcggtttgtacagtaagaccagccagtccgtgagcggcgaggaaattgatgccatggacgtgcagcaactgtcccagattgtgcccaaagtcgccgtattctaccgcgcctcacctcgtcacaagatgaaaatcatcaaatcattacaaaaaaatggctccgtggtcgctatgacaggagacggtgtgaacgacgccgtggctttgaaagctgccgacataggtgtcgccatgggccaaacggggacagatgtctgcaaggaggccgccgacatgattttagtcgacgatgacttccagacaattatgtctgccatcgaggaagggaagggaatctacaataacatcaaaaactttgttagattccagctgtctacttccatcgccgccttaaccctcatatcattagcaacgctaatgaattttcccaatcctctaaacgccatgcaaatcctctggataaatataatcatggacggcccccctgcacaatccttgggcgtggagccagtagataaggatgttattaggaaaccacctaggaattggaaggactccattcttacaaagaacctgatcttgaaaatcttagtgtcctcaatcatcattgtgtgtggcacattgttcgttttctggagggagctgcgggacaacgtgattacacccagggatacgactatgaccttcacctgttttgtttttttcgatatgttcaacgccctttcttctcgctctcagactaaatctgtctttgagattggcctgtgtagtaatagaatgttctgctatgccgtcttaggcagtattatgggtcaactgcttgtcatctactttccacccctgcagaaagtgttccaaacagagtctttgtccattcttgatcttctgttcctactcgggctgacgtcctcagtctgcattgtagccgagattatcaagaaggtcgagcgcagtcgagagaaaatacaaaagcatgtcagcagtactagctctagctttttggaggtttcctcttccagtggcaactttgtcgccgtatggctgtgggaaagaagcggccagcagctggtggaaatccacccacatctggagacgggcttgccactgactgaggatgtgagctgtgtgtag

SEQ ID NO: 108996 - DNA, 2850 bp, synthetic construct
  misc_feature 1..2850: note = Description of Artificial Sequence: Synthetic coding sequence
  source 1..2850: mol_type = other DNA
atgaaggttgcaaggtttcaaaaaatccccaacggggaaaacgaaaccatgatacctgttcttacctctaagaaggcttccgaactacccgtcagtgaggttgcatccatcctgcaggctgatctccaaaatggtttgaacaagtgcgaagtatctcatcgccgggctttccatggatggaacgaattcgacatatcagaagacgagcccctgtggaaaaagtatatctcccaattcaaaaaccctcttataatgcttctcttagccagtgctgtgatatctgtgttaatgcatcagtttgacgatgccgttagcattacagtggctatcctgatcgtggtcacagtggcgtttgtgcaggaatacagatccgaaaagtctctggaagagttgagcaagctggtccccccagagtgccactgcgtacgggagggcaaacttgaacataccctggcacgtgacctggtgccgggagataccgtctgcttgtccgtgggggatagggtgcccgcagatttgagattattcgaggcagtggacctctccatcgacgagagttcactgacaggcgagaccacaccctgttccaaggtaacagcaccacaacctgcagccacaaacggtgacctggcaagtaggagcaacattgctttcatgggcactctggtgaggtgcggcaaggcaaagggagttgttatcggaactggagaaaattccgagttcggggaggtattcaaaatgatgcaggccgaagaggcccctaaaacccccttgcaaaaatccatggaccttcttggtaaacagctgtctttctattcctttggcatcataggtatcatcatgcttgttgggtggctgctagggaaggacattctggagatgtttactatttccgtaagcctcgctgtagccgctatacctgagggcctccccatagtcgttacagtgacgctggcccttggtgtgatgcgcatggtgaagaaacgcgctattgtaaaaaagcttcccatcgtggagactttggggtgctgtaacgtgatctgttctgataaaacaggtaccttaacgaaaaatgagatgactgttactcatattttcactagtgatggattgcacgcagaggtgacgggcgtggggtacaaccaatttggagaggtgatcgttgatggagacgtcgtgcatggattttataacccagcagtgtcaagaatcgtcgaagcgggctgtgtctgcaatgatgcagtgattaggaataacactctgatggggaaaccaacagaaggtgcactcattgccctggcgatgaagatgggcttggacggactccaacaagattatattcggaaggccgagtatcccttctcatcggagcaaaaatggatggccgtaaagtgcgtacatagaactcaacaagacaggcccgaaatctgcttcatgaagggagcgtacgaacaagtgatcaagtactgcacaacttaccagtcgaagggccaaactcttaccttgacccagcagcagcgggatgtgtaccaacaggagaaagcacggatgggcagcgccgggctgcgggtcttggcactcgcctctggacccgagctaggccagctcacgtttctgggactggtcggtattattgatccaccacggaccggcgtgaaggaagcagtcacgactttaatagcatctggagtcagtataaagatgattaccggtgacagtcaggagacagcagtggctattgcatcacgtctggggttgtactcgaaaactagtcagagtgtaagcggggaagagatcgatgccatggatgtgcaacaactctcccagattgtacctaaggtggccgtgttctaccgcgccagtcctaggcacaaaatgaagatcatcaagtccctacagaaaaatgggtcagtggtggctatgacaggggacggcgtgaacgacgcagtggccctaaaggctgccgatatcggtgtggcgatggggcagactggaaccgacgtttgtaaagaggccgcggatatgattctagtggacgacgacttccagactatcatgagtgccattgaggagggaaaaggaatatacaataatataaagaacttcgttcgatttcagctaagtaccagcatcgcagcactgaccctgatctccctggccacccttatgaactttccgaatcctctgaatgcaatgcagatcctgtggatcaatatcattatggacggcccccccgctcagtccctgggggtggaacctgtcgacaaggatgtgatcagaaagccgcccaggaactggaaggactctatcctgacgaagaacctgatcctcaagattctggtgtcaagcatcatcatcgtctgtggcaccctgtttgtgttttggagagaactaagagacaacgtgataacgcctcgtgacacgacaatgacttttacttgttttgtgttcttcgacatgttcaacgctctgtcatcaagaagccaaaccaagagcgtctttgagataggcctatgttcaaaccgcatgttctgctatgccgtattaggcagtattatggggcagttactggttatatatttcccacccctccagaaggtgtttcagactgaatccttgagcatcctagatctcctgttcctgcttgggctcacatcttcagtctgtattgtggccgaaattatcaaaaaagtcgaacgatcccgtgaaaagatccagaaacacgtttcttcgacttcatcaagtttcctggaggtgtggctctgggagcggagtggacagcagctcgttgagattcatccccatctggaaaccgggttgcccctgaccgaggatgtgtcatgcgtgtag

SEQ ID NO: 108997 - DNA, 2922 bp, synthetic construct
  misc_feature 1..2922: note = Description of Artificial Sequence: Synthetic coding sequence
  source 1..2922: mol_type = other DNA
atggacagtctcctgccaccatcaagatttagttatttcaaaaagtaccccttgcatgcgatacgcagatatctcagcacacttcggaatcaacgagccgaagaacaggtcgctcggttccagaaaatccccaacggggagaatgagactatgatccccgtgctaacatccaaaaaagccagcgaactccccgtctctgaagttgccagcatcctccaggccgaccttcaaaatggattgaataagtgtgaggtcagccatagacgtgcctttcacgggtggaatgaattcgatatttctgaagatgaacccttgtggaagaaatacatctctcagttcaagaatccactcatcatgctactattagcaagtgcagtgatttccgtccttatgcatcagttcgacgacgccgtttctataactgtggcaatccttatagtggtaacggttgcttttgtgcaagagtacaggagcgagaaaagcctcgaggaactgtctaagcttgtaccaccagaatgccactgcgtgcgcgagggtaagcttgagcacaccttagcaagggacctcgtgccaggtgacaccgtctgcctcagcgtgggagatagagtccccgcagacttgcggctgttcgaggccgtggatctttctatagatgagagttctttaactggtgaaacaactccttgcagcaaagtgaccgccccccaacctgctgccactaatggcgacctcgcctcaagatcgaacattgctttcatgggcacactggtgcgttgcggcaaagcaaagggagttgtaatcggaacgggggaaaattctgagtttggggaggtgttcaagatgatgcaggccgaagaagcccccaaaacccccctccagaaaagcatggacctactggggaagcagcttagcttctatagcttcgggatcattgggatcattatgctagtgggatggctgttgggcaaggacatactagagatgttcaccatctccgtgagcttagccgtcgcagccattcccgaaggactgcccatcgtggtgacggtgacgctggccttaggcgtaatgcggatggtgaaaaaacgggctatcgtgaaaaaacttcccattgtggagaccctaggctgctgcaatgtcatttgcagcgacaagacgggcacactgacaaagaatgagatgacagtgactcacattttcacctcagatggtctgcatgcagaggttacaggcgtcggctacaatcagttcggggaagtgattgtagacggcgatgtggttcatggtttctacaaccccgcagttagtagaatcgtggaagccggctgtgtttgcaatgatgcagttatccgcaataatactttgatggggaaacctaccgagggcgccttaatcgctttggctatgaagatggggcttgacggcctgcagcaggactatattcgcaaggcagagtatcctttttctagcgagcagaagtggatggcagtcaagtgcgtgcaccgaacgcagcaggaccgccctgagatttgctttatgaaaggcgcctacgaacaagtgatcaagtattgtactacctaccaaagcaagggccaaactctgactctgacacaacagcagcgggacgtgtaccagcaggagaaagcacggatgggctccgctggattaagggtcctcgccctcgcttcaggccctgagctaggccagctcaccttccttggcctggtcggcatcatcgaccccccacggaccggtgttaaggaagcggttactactcttatcgctagtggtgtgagtattaaaatgattacgggcgatagccaggagacagcagttgctattgcatcacggctggggctgtacagcaaaacctcacagagcgtgtctggcgaggaaattgacgccatggatgtgcagcagcttagtcagatcgtgcccaaagttgccgtgttttatcgagcttcaccccggcacaaaatgaaaatcattaagtctctgcagaaaaacggcagcgtcgtggccatgaccggagatggcgtgaacgacgccgtggccctcaaggcagcagacatcggagtcgcaatgggccaaactggcaccgacgtgtgtaaagaggctgctgatatgattttagttgacgatgactttcaaaccattatgagcgcgatagaggaaggtaaaggcatatacaataatatcaaaaactttgttcgctttcaactgtctacctctatagcagccctgacgctcatttctctggcgaccctaatgaactttcctaacccactgaacgcaatgcagattctgtggattaatatcatcatggacggcccgcctgctcagtccctgggagtggagccagtggataaagacgtgatcagaaaaccccctaggaattggaaagattcaatcttaacgaagaatttaatcctaaaaatcctagtatcttccatcatcatagtctgcggcaccctattcgtcttctggcgtgagctgcgagataatgtgatcacccctagagatacaacgatgacattcacgtgctttgttttctttgatatgttcaacgccctgtccagcaggagtcagactaagtctgtcttcgagatcggcctgtgttccaaccgtatgttctgctatgccgtgttagggtctattatgggacaactgctcgttatctacttccctcctctgcaaaaagtcttccagactgaatccctctctattctggatcttttgtttctcttaggcctgaccagtagtgtatgcatcgtggccgaaattattaaaaaggttgagaggtcacgggagaagattcaaaagcatgtgtggctctgggagcgaagtggtcagcagctggtggagatccatcctcacctggagacgggtctacccctgactgaggacgtatcttgtgtgtag

SEQ ID NO: 108998 - DNA, 2820 bp, synthetic construct
  misc_feature 1..2820: note = Description of Artificial Sequence: Synthetic coding sequence
  source 1..2820: mol_type = other DNA
atgaaggtggcaagattccagaaaattcctaatggtgaaaatgagaccatgatccctgttctgacctctaagaaggctagtgagctgccagtaagtgaggtggccagtattctccaggctgatttacaaaacggactgaataagtgcgaagtcagccaccgacgggcctttcatggctggaatgaattcgatatcagcgaagatgaaccgctgtggaagaagtatatcagccagttcaagaatccgctgattatgctgttactggcatctgccgtgattagcgtactcatgcatcagtttgatgatgccgtttcaatcacggttgccatcctcattgtggtgaccgtcgccttcgtgcaggagtatcgtagtgaaaaaagcctggaagagctgtctaagctggtcccacctgaatgccactgcgtgcgggagggaaagctggagcatactcttgctagagacctggtcccgggcgacaccgtgtgcttgagtgtaggtgaccgggtgccagctgaccttcggctattcgaagccgtagacttatccattgacgagtcttctttgaccggcgaaaccacgccttgtagcaaagtcacagctccccagccagccgctaccaatggagacctggctagcaggagtaatatagccttcatgggtaccttggtgcggtgcggtaaagcaaagggagtggtaataggaacaggagagaattccgagtttggggaggtctttaaaatgatgcaggccgaagaagcacctaagaccccactacagaagagtatggatctccttggcaaacagctgtcgttttattcatttggcattatcggaattattatgctcgtcgggtggttacttgggaaagatattctggagatgtttacaatatcagtctcactcgccgtcgctgccattcctgaggggctccctatcgtggtaacagtcacacttgcgctgggagtgatgcggatggtgaaaaagcgcgctattgtcaaaaagctgcccattgttgaaacactgggttgttgcaacgtgatttgctccgataagactggaacactgacaaagaatgaaatgacggttacacacatattcacatcggatggtctgcatgctgaagtgacaggagtggggtataatcagttcggcgaggtgatagttgacggtgacgtcgtgcacggattctacaatccagctgtatccaggatcgtcgaggccgggtgcgtctgcaacgatgccgtcatcagaaacaacacactcatggggaagccaactgagggggcgctgattgctctggctatgaaaatggggttggacgggcttcagcaggattatatcaggaaggccgagtatcccttcagctctgagcagaaatggatggccgtcaaatgcgtgcatcgcactcagcaagaccgcccggagatttgctttatgaaaggcgcctatgagcaagtgatcaaatattgcacaacatatcaatcaaaggggcagaccctcaccttaacgcagcagcaaagggatgtatatcaacaggagaaggctcgtatgggttcagctggtcttcgggtgttggccctcgctagcggccctgaactgggtcagttgaccttcctgggactcgttggaatcattgatccaccgcgcaccggagtgaaggaggcagtgactacactcattgcatctggggtgtccatcaaaatgatcaccggggacagccaggagacagctgtggccatcgcttcacggctcggactctacagtaaaacttcgcagagtgtgagtggggaggagattgacgctatggatgtacagcagctgtctcagatagttcctaaagtagcagttttctaccgggcaagccctagacataagatgaagattatcaaatctttgcaaaaaaacggcagtgtggtagcgatgacgggcgatggggtcaacgatgccgtcgcacttaaggccgcggatatcggcgttgccatgggccagacaggcacagacgtatgtaaggaggccgctgatatgatcctcgtagacgatgattttcaaacgatcatgagcgccatcgaggaagggaaagggatttacaacaatattaaaaattttgtacgattccagcttagtacgtccattgcagctcttacactgataagtctggcgacgctgatgaattttcctaaccctttaaatgccatgcaaattctttggatcaatatcatcatggatggaccgcctgcccagtcactgggtgttgagccagtcgataaggacgtcattcgcaaacctccacgtaactggaaagattccatccttaccaagaacttgatcctgaaaatcctggtgtcaagtatcatcattgtgtgtggaacactctttgttttctggcgtgagctgcgtgacaacgtgataacaccacgggatacaaccatgacattcacatgcttcgtgttctttgatatgtttaacgctctatcctcaaggtcccagactaagagtgtttttgaaatcggactgtgctcaaataggatgttttgttacgcagtcctgggctccataatgggccaattgcttgtcatatacttcccaccactccagaaggttttccaaacagagtccctgagcatccttgatcttctgtttttgctggggctcacatcatcagtgtgcatagtggccgaaataatcaagaaagtggagaggtcacgagagaaaattcagaagcacgtctggttgtgggagagaagcggccagcagttagtcgaaattcatccccaccttgaaactgggctgccactgaccgaagatgtgtcatgcgtgtag

SEQ ID NO: 108999 - DNA, 2760 bp, synthetic construct
  misc_feature 1..2760: note = Description of Artificial Sequence: Synthetic coding sequence
  source 1..2760: mol_type = other DNA
atgaaagtggcgcgttttcagaagatcccaaacggcgaaaacgagacgatgatccctgtgctgacgtcaaaaaaagctagcgaactgcccgtatccgaggtcgcctccatcttgcaagcagatctgcaaaatgggcttaacaagtgtgaggtgtcccacaggcgggctttccatggatggaacgaatttgatatctctgaagacgagcctctgtggaagaagtatatctcccagtttaaaaaccccctgatcatgcttttgctggcctctgccgtcatatcagtgctgatgcatcagtttgatgacgctgtgtcaattaccgtggccatccttatagttgtaacagtcgcttttgtgcaggagtatcgtagcgagaaaagcttggaggagttgagcaagctcgtcccccccgaatgccattgcgttcgcgaaggcaaactcgaacacacccttgcccgagacctcgtcccaggcgatacagtttgtttgagtgtgggcgacagagttcccgccgacctgcgtctgtttgaagcagtggacctgagcatcgatgagtcaagtctgaccggcgagaccaccccttgtagtaaggtgacagcacctcaacccgcagccaccaacggggatctggcatccaggagcaacattgctttcatgggaaccctcgtccggtgcgggaaggccaaaggcgtcgtcattggtaccggggagaattccgaattcggggaagtattcaaaatgatgcaggccgaggaggccccaaaaaccccactacaaaaatccatggatctccttggcaaacaactgagtttttattccttcggcataattggcataatcatgttagtaggctggctcttgggtaaggatatcctggagatgtttacaatttcagtttcccttgcggtcgctgctattcctgaggggctacctattgttgtgactgtcacactggcgctgggcgtgatgcgcatggttaaaaagcgtgcaattgtcaaaaagctgcctattgtggaaaccctgggctgttgcaatgtgatctgctctgacaaaactggcacgcttactaaaaacgagatgactgtaacacatatttttacaagcgacgggctgcacgccgaagtgacgggggtcggatacaaccagtttggagaggtcatagtcgatggcgacgtagttcacggcttctataacccagccgtcagccggattgtcgaagcaggctgtgtgtgtaacgatgccgtgattcgtaacaatacgttgatggggaagccgaccgagggagcactgatagccttagccatgaagatggggctcgacgggttgcagcaagactacattaggaaggccgagtacccattttcgtctgaacagaaatggatggctgtgaagtgcgtgcaccgaacacagcaagatcgccccgaaatttgctttatgaagggagcatatgaacaggttattaaatactgcacgacttaccagagcaagggtcaaacacttactttgactcaacagcagagagacgtgtaccagcaagaaaaagctcgtatgggttctgctggccttagagtcctggcactggccagcggcccagaactggggcagctgaccttcctgggtctggtgggaattatagatccacccagaacgggtgtcaaggaagcagtgacaaccttgatcgccagcggcgtttctattaagatgattaccggggattcacaggagactgccgtggccatcgcatcccgactgggactctacagtaagacatctcagtcagtgtctggagaagaaattgacgcaatggacgtgcagcagctgagccagattgttcctaaggtggccgtattctatcgcgcctccccccggcacaaaatgaaaatcatcaagagcctgcagaagaatggcagcgttgtggctatgactggcgatggagtcaatgatgccgtggctctgaaggccgccgacattggagtagcaatgggccagactggcacagacgtctgcaaggaggcagctgacatgatacttgtggatgatgacttccaaactatcatgtccgcaattgaggagggcaaggggatctataacaacattaagaatttcgtgaggtttcagctgagtaccagcatagcagcactgaccctgatttctctcgctacgttaatgaactttcccaatcctctgaatgcgatgcagattctgtggatcaatataattatggacggccctcccgctcagagcctgggggtcgagcccgtcgataaggacgtgattagaaagcctcccagaaattggaaggattccatattgaccaaaaacctcattctgaaaatcctggtctcttccatcatcatcgtgtgcggcacactctttgtgttctggcgtgaactccgtgacaacgtgattaccccacgggataccacgatgactttcacatgcttcgttttttttgacatgtttaatgcgctgagtagccgatctcaaacaaagtcagtttttgagatcggactttgctccaaccgcatgttctgttatgccgtattgggaagtatcatgggccagctgttagtcatctacttccctcccctgcagaaagtcttccagacagaatcactgtccatcctggatttactatttcttctggggctcacgagttctgtgtgtatcgtggctgaaatcatcaaaaaagtcgagagaagcagagagaagatccaaaagcatgtgtcctctacatcatcaagtttccttgaagtttag

SEQ ID NO: 109000 - DNA, 2712 bp, synthetic construct
  misc_feature 1..2712: note = Description of Artificial Sequence: Synthetic coding sequence
  source 1..2712: mol_type = other DNA
atgattccagtgctcacgagcaaaaaggcctccgaactccccgtgtcagaagtggcctcgattctgcaggcagacctgcagaatggattaaataagtgcgaagtgtcccacagaagggccttccatgggtggaacgaattcgacatatctgaagacgaacccctgtggaagaaatacatcagccagtttaaaaatcctctgatcatgctgctcctagcttccgccgtgattagcgtgttgatgcaccagtttgacgacgcagtgagcattaccgtggcgatactgatagtggtcactgtggcgtttgttcaggaatacagaagtgaaaaaagcctcgaggagttatccaagctggtccctccagaatgtcactgtgtgagagaaggaaagctagaacacactcttgcccgagacctggttccaggtgacaccgtctgtctatctgttggggatagggtgccagctgatctgcgtctgttcgaggctgtcgacctgtccatagacgaaagttctttgaccggagagaccacaccctgcagtaaggtaaccgcaccacagcccgcagctacgaatggcgaccttgcctcccggtccaacattgccttcatgggcacccttgtcaggtgcggcaaagctaaaggtgtggtgattggcactggagagaattcagagttcggcgaggtatttaagatgatgcaagcagaagaagcccccaagacccctcttcaaaaaagcatggaccttttaggaaagcagctgtctttttactcgttcggtattatcggcatcataatgcttgtcggctggttgctaggcaaagatattctcgagatgttcaccatatctgtgagcctggccgtggcggctatcccggaagggcttcccatcgtggttaccgtgaccctggcactgggagtgatgaggatggttaaaaaacgagcaatcgtcaagaaactgccaattgtggaaactctaggctgctgcaatgttatctgtagcgacaagacaggcactcttacaaagaatgagatgaccgtgacgcacatcttcacttccgatggccttcacgccgaggtgacaggagtcggatataaccaatttggggaggtgattgttgacggggatgtggtgcatggattttacaaccccgctgtgtcacggatcgtggaggcaggctgcgtgtgtaatgatgccgtgatcaggaacaataccctgatggggaagcccaccgaaggagccttgatcgctttagccatgaagatgggcctcgacgggcttcaacaagattacataaggaaagccgagtacccattctcaagcgagcagaagtggatggccgtgaaatgcgtgcacaggactcagcaagatcgacctgagatctgctttatgaagggcgcctatgagcaggtcatcaaatactgcactacgtatcagagtaagggccagactctcacattgactcagcaacagcgggacgtgtaccaacaggaaaaggctagaatgggctctgcaggactgcgggtactggcgctcgcgtcagggccggagctcgggcagttgacgttccttggactcgtgggcatcatcgatcctccaagaaccggcgtgaaggaggcagtcacaaccctgattgcgtccggcgtctctatcaagatgataacgggcgattctcaggagacagccgtggccatcgctagccggttaggactctactccaaaacatcccagtctgtgagcggtgaggagatcgatgccatggacgtgcaacagctttctcaaatcgtcccaaaggtggccgttttctatagggcctcaccacgtcacaaaatgaagattatcaagagtctccagaaaaatggctcggtggtcgcgatgaccggagatggagtcaacgatgccgtggctctgaaggcagccgacattggtgtggccatgggacagactggcacggatgtatgtaaggaggcagccgatatgatccttgttgatgacgactttcagaccattatgtccgcaatcgaggaagggaaaggcatttataacaacattaagaactttgtaagatttcagctgtccacttctatagcggcccttacccttatctcgctcgccaccctgatgaacttccctaatccacttaacgccatgcagatcctctggataaatatcataatggacggcccacccgcgcaaagtctgggagtcgagcccgtcgacaaggatgtcattcgcaaacccccacgaaactggaaggacagcatactgaccaagaatctgattttaaagatcttagtcagcagcattattatagtgtgcgggaccttatttgtgttctggcgcgaactgcgggataacgtgataaccccaagggacactactatgacattcacctgttttgtcttcttcgacatgtttaatgctttgagcagtagatctcaaaccaagtccgtgttcgagatcggattgtgtagcaatcgcatgttctgctatgccgtgctcggttcaattatgggccaacttctggtcatctattttcccccactacagaaagtgttccagacagagagcctatcaatcttggatcttttatttcttcttgggcttacatcatcagtttgcatcgtagcagagataataaaaaaagtagagaggagtcgggagaagatccagaagcacgtaagctccacttcatcttccttcttggaggtgtag

SEQ ID NO: 109001 - DNA, 363 bp, synthetic construct
  misc_feature 1..363: note = Description of Artificial Sequence: Synthetic coding sequence
  source 1..363: mol_type = other DNA
atgaaggtcgcaagattccagaagatccccaatggggagaatgaaacaatgatccctgttttgactagcaagaaggcatcagaacttcccgtctccgaagttgcctctattctccaagccgacttacagaacggcctcaataaatgtgaggtctcgcaccgcagagcgtttcatggatggaatgagtttgacatatctgaagacgagccactctggaaaaagtatatttcacagttcaagaacccattgattatgctcctgctcgcctccgctgtcatcagtgtgttaatgcatcaatttgacgatgccgtgtcaatcactgtggctatcttaatcgtagtgactgtcgcattcgtccagtag

SEQ ID NO: 109002 - DNA, 2712 bp, synthetic construct
  misc_feature 1..2712: note = Description of Artificial Sequence: Synthetic coding sequence
  source 1..2712: mol_type = other DNA
atgatccctgtgttaaccagtaaaaaagcttccgagttacctgtatcagaagtggcttcaatcctccaagccgatctccaaaacggcctgaacaaatgcgaagtgtcgcatcggcgagcctttcatggctggaacgaattcgacatttctgaggacgagcctttgtggaagaagtacattagccaatttaagaaccccttaatcatgctattactggcttccgctgttattagcgtcctgatgcaccagtttgacgacgccgtgtcaattacggtggccattttaattgttgttacagtggcttttgtacaggagtaccggtcagagaagagccttgaagagttatccaaactcgtcccacctgaatgccactgcgttagggagggaaaacttgagcacaccctggcaagggacctcgtccccggcgataccgtctgcctcagcgtgggagaccgagtgccagcagacctccggctcttcgaagctgtggaccttagcattgatgagagctcgctgacaggcgaaacaacaccatgctccaaagtgacagcgccacaacccgccgccaccaacggggatctggcatctcgctccaatatcgcatttatgggcactcttgtgcgatgtggaaaggccaaaggagtggtaattggcactggcgaaaatagcgagttcggcgaggtctttaaaatgatgcaggcagaagaggcccccaagacccctctccaaaaaagtatggatctgcttggcaagcagcttagcttctacagctttggcatcattggcatcatcatgttagtaggctggttactgggcaaggatatcttggagatgttcactatcagcgtcagtctggccgtggcggctatcccggagggcttgcccatcgttgtaaccgtcaccctggcgctgggggtcatgcgcatggtaaaaaaaagggcaattgttaaaaaactgccaatagtggaaactcttggatgttgcaatgtgatttgttctgataaaaccggcacactcactaagaacgaaatgaccgtgacccacatctttacatccgatggcttacatgcagaagtcactggcgttggctacaaccaatttggagaggtgatcgtggacggggacgtagtccacggcttctataaccccgcggtctcgcggatcgtggaggctgggtgcgtgtgcaacgatgccgtgatcaggaataacacattaatggggaaacctaccgaaggtgctctcatcgcactggcaatgaaaatggggttagacgggcttcaacaggactacatccggaaagccgagtacccattttcatccgagcagaaatggatggcggtcaagtgcgtgcaccgtacccagcaggatcgaccagagatctgctttatgaaaggggcctatgagcaggtcattaagtactgtacaacataccaatccaagggccagacactgaccctcacacagcaacagagagatgtgtaccaacaggagaaagcaaggatggggagtgccgggcttagagtgcttgccttggcctctggaccagagctgggacagctaacattcctggggttggttggcataatcgacccaccccgtaccggagtcaaggaagccgtcacaacacttattgcatccggggtgagcatcaagatgattactggggattcccaggagactgccgtggccatagccagccggctgggactgtattctaagaccagccaatcagtatccggggaggaaatcgatgctatggatgttcagcagttgagtcagatcgttcccaaggtggcggtcttctacagagcgagtccccgccataagatgaagataattaaatcactgcagaaaaacgggagtgttgtcgcaatgacgggggatggggtcaatgacgcagtcgcacttaaggcagctgatattggagtcgcaatgggtcagaccggcactgacgtgtgcaaagaggccgcagatatgatcctggtggatgatgattttcaaacaattatgtctgccattgaggagggcaaggggatttataacaatattaaaaatttcgtccggtttcagcttagtacaagcattgctgccctgactctcataagtctggccacccttatgaacttcccaaaccctttgaatgcaatgcaaatactatggatcaacataattatggatgggccacctgctcagtccttgggggtggaacctgtggataaagacgtgataaggaagcctccccgaaactggaaggatagcatcttaacaaaaaacctgatattaaagatcttagtcagttctattattattgtgtgcgggactctctttgtgttttggcgcgaactgcgagacaacgtgattaccccccgcgacaccacgatgacgttcacttgttttgttttctttgatatgtttaatgccctttccagtcggtcccagaccaaaagtgtatttgagatcggcctgtgctccaatagaatgttttgctacgccgttctcggaagcattatgggacagttgctggttatttactttccgccattacagaaggtgtttcaaacagagtccctgagcattctagacctcctgttcctgttagggcttacctcttccgtttgtattgtcgcagagatcataaaaaaggtggaaagatctcgggagaagatccaaaagcacgtatctagcacatcaagctcctttctggaagtgtag

SEQ ID NO: 109003 - DNA, 2772 bp, synthetic construct
  misc_feature 1..2772: note = Description of Artificial Sequence: Synthetic coding sequence
  source 1..2772: mol_type = other DNA
atgatccctgtgctgacttcaaagaaggcctcggagctcccggttagcgaggtagctagcatactgcaggccgacctccagaacggattaaacaagtgcgaggtgtcacatcgacgtgcctttcacgggtggaatgaatttgacatttccgaagatgagcctttatggaaaaaatatatcagtcagttcaagaacccactgatcatgctgctgcttgcatccgccgtgatctcagtactgatgcaccaatttgatgatgcggtcagtatcacagtggcaatacttatcgtggtgacagtggcttttgtgcaggagtataggtctgagaagagtctggaggagctgtccaaactggtgccccccgagtgtcactgcgtgcgggaaggcaagctggagcacaccctggcacgtgatctagtgccgggtgacactgtgtgtttgtcagtgggagacagggtgcccgccgatctgaggctgttcgaggctgtggatctgtctatcgatgagagtagcctcactggcgagaccaccccctgtagcaaggtgactgcaccccagccagccgcaacaaacggcgaccttgccagcaggtcaaacattgcatttatggggacgctcgtcaggtgcggaaaggctaaaggggtggtgatcggaaccggcgagaattctgagttcggagaggtttttaaaatgatgcaggccgaagaggcaccaaaaacgcccctgcagaagtcaatggacctccttgggaaacagctgtccttttacagtttcgggattattggaatcattatgttagtgggctggctgttgggcaaagatatcctggagatgtttaccattagtgtatcccttgctgttgccgccattccagaaggcctgccgatcgtggtgaccgtgactctcgccctgggcgttatgcgcatggtaaaaaagcgggcaatcgtcaagaaactcccgatagtagaaaccctgggctgttgcaacgtgatctgtagcgacaagaccggaaccctgacaaaaaatgagatgaccgtcactcatatatttacctctgacggactgcacgctgaggtaaccggggtcggctataaccagttcggagaagttatcgtggatggcgatgtggtgcacggattttacaaccctgctgtttctcggatcgtcgaggccggctgcgtttgcaatgacgccgtgattagaaacaacacattgatgggaaaaccaactgaaggagcactgatcgccttagccatgaaaatggggctggacggccttcagcaagactatattaggaaagctgagtatccgttttcatccgagcaaaagtggatggcagtgaaatgcgtgcatcgcacccagcaggatcgtcccgagatctgtttcatgaagggggcctatgaacaggttataaaatactgcaccacgtatcaaagtaaaggtcagaccctcaccctcacacagcaacagcgcgatgtatatcaacaggaaaaggccagaatgggatcagcaggtttgcgcgtgctggcacttgcctctggcccagagctcgggcagctgacctttcttggactggttggaattatcgatcccccccgcacgggagtgaaggaggcggtgaccacactcattgcctcaggagtgagcatcaaaatgatcactggggattcccaggagacagctgtcgccattgcgagtcgcctggggctgtattctaagacgtcccagtccgtatctggcgaagaaatcgacgctatggatgttcaacagctgtcacagatcgtgcccaaggtggctgtgttttaccgtgcgtcgcctcgccataagatgaagatcatcaagagccttcagaaaaacgggagtgtggtcgccatgaccggagatggggttaacgatgctgtagctctcaaggccgcagacatcggtgtggcaatgggtcagaccggtactgacgtgtgcaaggaagcagccgatatgatcttagtcgatgacgatttccaaacaatcatgagcgccatagaagaaggcaagggcatctacaataatattaagaatttcgttagatttcagctatctacgagtattgccgccctgacattaattagcctcgcaaccctcatgaacttcccaaatcccctcaatgccatgcaaatcctctggatcaacattatcatggatggccctcctgcacagagtctgggagtggaacccgttgacaaggatgtaattagaaagcctcccagaaattggaaggactccatcttaaccaagaatcttatcttgaagatactggttagttccattatcattgtgtgcgggactcttttcgtgttctggagagaattgagagataatgtaattacgccgcgggataccaccatgacgttcacgtgctttgtgttcttcgacatgttcaacgcgctgagcagccgaagtcaaaccaagagcgttttcgaaatcggcctgtgttcaaatcgcatgttttgctacgccgtcctgggctctatcatgggtcagttgttagtgatttacttccctcctttacagaaagttttccagactgagtccctgtctattctggacttactgttccttctcggcctgacctcaagcgtctgtattgttgccgaaattatcaaaaaggtcgagcgctcgcgagagaagatccagaagcatgtgtggttgtgggaacgcagtggacagcagctggtagagatccacccccatctcgaaactggtctccctctgactgaagacgtgagttgcgtatag

SEQ ID NO: 109004 - DNA, 249 bp, synthetic construct
  misc_feature 1..249: note = Description of Artificial Sequence: Synthetic coding sequence
  source 1..249: mol_type = other DNA
atgattcccgtgctgacctcaaagaaggccagtgaacttcccgtctccgaagttgcatccattctgcaggctgaccttcagaacggccttaataagtgtgaggtgtcgcaccggcgcgcttttcacggatggaacgaattcgacatctccgaggatgagcccctctggaagaaatatatcagccagtttaagaaccctctcatcatgctcctcctggcttccgccgtgatatcagtgctgatgcactag

SEQ ID NO: 109005 - DNA, 2760 bp, synthetic construct
  misc_feature 1..2760: note = Description of Artificial Sequence: Synthetic coding sequence
  source 1..2760: mol_type = other DNA
atgaaggtggccaggttccagaaaatcccgaacggggaaaatgaaacaatgattcccgtgcttacatcaaagaaagcgtctgaactgcccgttagtgaagtggcgagcattctccaggcagacctccagaacgggctgaacaagtgcgaagtgagtcatagacgtgctttccacggatggaacgagttcgacattagtgaggacgaaccactgtggaaaaaatatatctctcagtttaagaacccactgatcatgctcttgctggcttccgctgtgatttctgtgctaatgcatcaattcgatgatgcagtctccattacagtggccattctcattgtagtgacagtagccttcgtgcaagagtaccgctctgaaaagagcctggaagagctatctaagctcgtgcctcccgaatgccattgcgtccgtgaggggaaactggagcatactctggctagggatctggtacctggcgatactgtttgtctttcggtgggtgatcgggtgcccgcagaccttaggctgtttgaggccgtcgacctgtcaattgatgagtccagccttacgggtgagaccactccgtgcagcaaggttaccgccccccagcctgccgccaccaatggagatctcgcctctaggtctaacattgccttcatgggaaccctagtacggtgtggtaaggcgaaaggggtggtgattggtacaggagagaattcagagttcggcgaggtatttaaaatgatgcaagctgaagaagctcccaagactcctcttcagaagagcatggatctgctgggcaagcagctctctttctactcattcgggatcatcggcattattatgctggttgggtggctactggggaaggacatcctagaaatgtttacaataagcgtgagcctggctgtagcagctattcctgaaggcttacccattgtggtaaccgtgacacttgcgctgggtgtgatgcgcatggtgaaaaaaagagccatcgtgaaaaagctgcctattgtggagacactgggttgctgcaatgttatctgtagtgataagacaggcaccctaactaaaaacgaaatgacggtgactcatatttttacttctgatggtcttcacgctgaggtgactggggtgggatataaccaatttggggaggttatcgtggatggcgacgtcgtgcacggcttctacaatcctgcagtcagtaggatcgtcgaggctggctgcgtatgtaatgatgcggtcattcgcaataatactctcatggggaagcccactgaaggggcccttattgctctcgccatgaaaatgggcttggatgggctccagcaagactacataaggaaagcggagtacccattttccagcgaacaaaaatggatggccgtaaagtgtgtgcaccgtacgcagcaagacagaccagaaatttgttttatgaagggcgcctacgagcaagtgataaagtactgtaccacttaccaatcgaaggggcaaactctcaccctgacacaacagcaacgcgacgtttaccagcaggagaaggcgaggatggggtcagccgggttgagggtgcttgcattggcctcaggcccggagttaggacagctgactttcctcggtctggtgggtattattgatcctcctcggacaggcgtgaaggaagcagttacaacgttgatagctagcggcgtcagtatcaagatgatcacaggtgactcacaggaaactgctgtcgccatagcgtccaggctgggtctgtactcaaaaaccagtcagtccgtgagcggcgaggagatcgatgccatggatgttcaacagctgagccaaattgtgcccaaagtggccgttttctacagggcgtctccccgacataaaatgaagatcatcaagtctctgcagaagaatgggtcagtggtcgcgatgacaggcgatggggtgaatgacgcagtggcactgaaagcggctgatatcggggtggctatggggcagaccgggaccgacgtttgtaaagaggcagctgacatgatcctcgttgacgatgacttccagacaattatgtccgcgattgaggaagggaagggtatttataataatataaaaaatttcgtcagatttcaactctcaaccagcattgccgcgctcacgcttatatcattagccactctcatgaatttcccaaaccccctgaacgccatgcagatactctggatcaacatcattatggatggcccccctgctcagtccttgggtgtggaaccagtggataaagacgtcatccgcaaacccccccgcaattggaaggacagcatccttaccaaaaatttaattctgaagatcttagtatcttctatcattatcgtttgtggtacactgttcgtgttttggcgggagctgcgcgacaacgtaattacgccgagggatacaacaatgacttttacttgttttgtcttcttcgatatgttcaatgccttatcaagtcgttctcaaactaaatcagtgtttgaaattggcctctgttctaaccgaatgttttgttatgccgttctgggctcgattatgggacagctcctggttatttactttccgcccctgcagaaggtgttccaaaccgaatcactgagtatattggaccttcttttcctgttggggctgacctcaagcgtttgcattgtggctgagatcattaaaaaagttgaacggagccgggaaaaaattcagaaacacgtcagcagtacaagctcaagctttctggaggtctag

SEQ ID NO: 109006 - DNA, 309 bp, synthetic construct
  misc_feature 1..309: note = Description of Artificial Sequence: Synthetic coding sequence
  source 1..309: mol_type = other DNA
atgaaagtcgcaagattccagaagatccctaacggggagaacgagacaatgattcctgtgctcacaagcaagaaggcaagtgagctccccgtcagtgaggtcgccagcatactgcaagcagacttgcagaacggcctgaataagtgcgaagtcagccataggcgcgctttccacggctggaacgagtttgacatttccgaggatgaacccttgtggaagaaatatatttcccagtttaaaaaccctctcattatgcttctgctggcttccgcagtgatctccgtactgatgcaccaattcgatgattag

SEQ ID NO: 109007 - DNA, 2760 bp, synthetic construct
  misc_feature 1..2760: note = Description of Artificial Sequence: Synthetic coding sequence
  source 1..2760: mol_type = other DNA
atgaaggtggcaaggtttcagaagattcctaacggggagaatgagaccatgatccccgtccttacgagtaagaaggctagtgagctgcccgtctctgaggtggcgagtattctgcaggccgaccttcagaacggcctgaacaagtgcgaagttagccacagacgcgcctttcacggatggaacgagttcgacatctcagaggatgaacctctttggaaaaagtatatttcacagttcaagaacccgctgattatgctgttgctggctagcgctgttatatccgttctgatgcaccaatttgacgatgcagttagcatcacagttgctatcctgatcgtggtgactgtggcattcgtgcaggaatacaggtctgaaaaaagtctggaagagctatctaaacttgtcccacctgagtgtcactgcgttagggagggaaaactggagcataccctggctagagatcttgtgcccggagacactgtgtgtttgtcagtaggcgacagggtccccgctgatctgcgactcttcgaagccgtcgacctgagcatcgatgaatcttctctcaccggggaaaccaccccttgctcaaaagtcacagccccccagcccgcggcaactaatggagacctggcatcacggtctaatattgctttcatggggaccctcgtccgatgtggcaaagctaagggcgtggttattgggactggggaaaactcagagtttggggaagtgtttaagatgatgcaagctgaggaggctcctaaaaccccacttcaaaaaagcatggatttgttagggaaacagctgagcttctatagctttggaatcattggcattatcatgctggtcgggtggctactgggcaaggacatcctcgaaatgtttacaattagcgtctcacttgccgttgctgcaattcctgaagggctcccgattgtggttacggtcacactagcgcttggagttatgagaatggttaaaaaaagagccatcgtgaagaagctgcccattgtagagaccctgggctgttgtaatgtaatttgttctgataagaccggaaccttgaccaagaacgagatgaccgtgacgcatatttttaccagtgacgggctgcacgctgaggttactggagttggatataaccagtttggagaggttatagttgatggagacgtggtgcacggcttctacaatccagctgtgagccgcatagtcgaggcaggttgcgtttgtaacgacgccgtcatccggaataacacactcatggggaagcccacggagggggctctgatcgctttggccatgaagatgggcctggatggcctccagcaggactacatccgcaaggccgagtacccattttcatctgagcagaagtggatggcggtgaaatgtgtgcaccgtacacaacaggaccggccggagatctgtttcatgaagggcgcctacgagcaggtcataaagtactgcacaacataccaaagcaaagggcagacactcaccctgacacagcagcaacgggatgtctatcaacaggagaaagcccgtatgggatctgcaggcttaagggtcctggctttagcgtctggccctgaactagggcaattgacctttctgggcttggtgggcattatagatcctcctaggaccggtgtgaaggaagcagttacgacgcttattgccagtggcgtgagtattaagatgattactggggatagtcaggagactgccgtggccattgcttctagattgggtctgtatagcaaaaccagtcagtctgtgtccggcgaggaaattgacgccatggatgtgcaacagctgtctcagattgtgccaaaggtggccgtcttctaccgcgcctccccccgccataagatgaagattatcaaaagcttgcagaagaacgggtcagtggttgctatgacgggggacggtgtaaatgatgccgtcgccctaaaagcagccgatatcggagtcgctatgggccagaccggcactgacgtgtgcaaggaagctgcagatatgatcttagtcgatgatgacttccagaccattatgagtgcaattgaggaaggaaagggcatctacaacaatattaagaatttcgtccggttccagctttcaacctctattgcagcactgacactcatctccctggcaaccctgatgaatttccccaaccccttgaacgccatgcaaatcctctggatcaacattattatggatgggcctcccgctcagagccttggagttgaacctgttgataaggatgtcattaggaaaccacccaggaactggaaggacagtattctaaccaaaaacctaatccttaagattctggtttcctcaattatcatcgtgtgtggaactctttttgttttctggcgtgagctgcgcgataatgtcatcacccccagagacacgacgatgaccttcacatgttttgtattcttcgatatgtttaatgcactgtccagtagaagccagacaaagtctgtgttcgagattggactctgctctaacaggatgttttgctacgctgttcttggatcaattatgggccagcttctggttatttactttccacctcttcagaaagtcttccagacagagagtctctcaatactcgatctgctctttctgctgggcctcacctcttctgtttgcatagtggctgaaatcattaaaaaggtggaaaggtccagggagaaaatccaaaaacatgtgtcatccacctcgtcatccttcctggaagtctag

SEQ ID NO: 109008 - DNA, 2772 bp, synthetic construct
  misc_feature 1..2772: note = Description of Artificial Sequence: Synthetic coding sequence
  source 1..2772: mol_type = other DNA
atgattccagtgctgactagcaaaaaggcctcagaactgccagtctcagaggtcgccagcattctgcaggccgacctccagaatggcctcaataagtgcgaggtgtctcacaggcgcgcattccatggctggaatgagttcgatatctcagaggatgagccactctggaaaaagtacatctcacagtttaagaatcccctgattatgctgctccttgcgtctgccgtcatttcagtcttgatgcatcagtttgacgacgcagtcagtatcacagtggccattttgatcgtggttaccgtcgcgttcgtgcaagagtaccggagcgaaaagagcctggaggaattgtccaagctggtaccgccagagtgccattgcgtacgggaaggcaagctggagcacacactcgccagagacctcgtacctggcgacacagtgtgcctgagcgttggcgaccgcgttcccgcagatctccgcttgttcgaagccgtggacctttccatcgatgagagctcactgactggagaaaccacaccctgtagcaaggtgacagcacctcaacctgcggcaactaatggagatctagctagccgttctaatatcgcattcatgggaacgctcgtgcgctgcgggaaggccaagggagtagtgatcggcaccggcgagaactctgagttcggtgaggtgtttaagatgatgcaggccgaagaggcgcccaaaactcctctgcagaaatccatggatttacttggaaaacaactcagtttctattcatttggaatcattgggatcatcatgttggtcggatggctcttggggaaagacattctggaaatgttcactatttcagtgagcctggcagtggccgcgatcccagagggattgcctatcgtcgtgaccgttactcttgctctgggagtaatgaggatggtgaaaaaaagagctatcgtgaagaaattacccatcgtggaaacactgggctgttgtaacgtgatctgctctgacaagactggtacattaacgaagaatgagatgactgtgacacacatttttacctccgatggtttgcacgcagaggtcacgggagtcggatataatcagttcggcgaagtgatagttgacggagacgttgtgcacggtttctacaaccctgcagtgtcaagaatcgtggaagccggctgcgtgtgtaatgacgcagtcattaggaataacacgctgatgggcaaacccactgaaggtgctctgatcgcactggctatgaaaatgggtttagacggtttgcagcaggactacattcgaaaggccgaatatccattctccagcgagcagaaatggatggctgtgaaatgtgtccaccggacacagcaggatcgacctgagatctgcttcatgaagggcgcatacgaacaggtcattaaatactgtaccacctatcagtctaaaggccagactcttaccctaactcagcagcagcgggatgtgtaccagcaagaaaaagcaagaatggggtcagccgggctgagggttttggccttagcctcaggaccagaactcggccagctcacctttttgggcctcgtagggattatcgatccccctaggacgggcgttaaagaggcggttacaaccctgatcgcaagtggggtttccattaagatgatcactggggacagccaggaaacagccgtggctatcgccagcaggctcggactctatagcaaaacatctcagagcgttagtggtgaagagatcgatgcaatggacgtgcagcagctgtcgcagatagtccctaaggtcgccgttttctacagggcgtcgccacggcataagatgaaaatcattaagtctctccagaagaatggcagcgtggtcgccatgacaggagatggggtgaatgatgcagtggctctcaaggctgccgatatcggtgtggcgatggggcagaccgggacagacgtttgtaaagaagcagccgatatgatactggtcgatgacgatttccagactatcatgtctgctattgaggaggggaaagggatctataataacattaagaactttgttaggttccaactgtcaacgtctatcgccgcgcttacactcatcagcctcgcgaccctgatgaattttcctaaccccctcaacgcaatgcagatcttgtggattaacattatcatggacggccctccagcccagagcctgggggtggagccggtagacaaagatgtgattcggaagccccctcggaactggaaagactcaattctgaccaaaaatttgatactgaaaatcctggtctcctcaattatcatagtgtgcggaactctgttcgtgttctggagagagctgagagataacgttattactcctagagacaccacaatgaccttcacttgttttgtattttttgatatgttcaatgccctgagcagtaggagtcagacaaagtcagtgtttgagattggcctttgctctaacaggatgttctgctatgccgttctgggctctattatggggcagcttctggtgatctattttccccctcttcaaaaggtgttccaaactgagagcctgtccatcctcgatctgctgttccttttgggactgacgtcgtctgtgtgtatagtggccgaaattatcaagaaagtggaacggtcccgggagaagattcaaaaacacgtgtggctgtgggagaggtccggacaacagctggtggagatccacccccacctggagacaggcctgccacttactgaagacgtgagttgtgtgtag

SEQ ID NO: 109009 - DNA, 2835 bp, synthetic construct
  misc_feature 1..2835: note = Description of Artificial Sequence: Synthetic coding sequence
  source 1..2835: mol_type = other DNA
atggactctcttctgcctccaagcagattcagttacttcaagaagtatccgttgcacgccattcggcgctacctaagcactctgaggaaccagagggcagaagagcaggtggctcggttccagaaaatccctaatggggaaaacgaaacgatgatcccagtgctgaccagcaagaaggcctctgaactcccggtgtctgaggtggccagtattctgcaattcaaaaatcctctcattatgctgcttctcgcttctgctgttatcagtgtgctgatgcaccagtttgatgacgctgtgtcaattacagtcgccattctgattgtcgttactgtcgcatttgttcaggaatatcgctctgagaagtcccttgaggaactcagcaagctagtgcctcctgaatgtcattgtgtgcgtgaagggaagctagagcacacactcgcgcgtgacctggtaccaggagacacagtgtgtctgagcgttggagaccgggtacctgccgacttgagattattcgaggccgtcgacctgagtatcgatgaatcaagcctcaccggagaaacgactccgtgtagcaaggtgaccgccccacaacccgccgccactaatggggatcttgcctcccgctccaatattgcatttatgggaaccctcgtgcggtgtggtaaagccaaaggggtagtcattggaacgggcgaaaattctgaattcggggaggtatttaagatgatgcaggccgaagaggcacctaagaccccactgcaaaaaagcatggacctgcttggaaaacagctctctttctattcttttggtatcattggaattatcatgcttgtaggatggctgcttggcaaagacatcttggagatgttcacaattagcgtttctttagcagtggcagctattcccgagggactgccaatcgtggtaaccgttactctggccctgggagtaatgcggatggtaaaaaagcgagctatcgtgaagaagctcccaatcgtggagaccctcggctgctgtaacgtcatctgttccgataagactggaacactgacaaagaatgaaatgactgtgacacatatctttacgtccgatggtctccatgccgaagttacgggtgtgggatacaaccagttcggggaggtgatcgtcgacggcgacgtggtgcacggattctacaatccagcagtatcaagaatcgtcgaagcggggtgtgtgtgcaacgatgcagtgatcagaaataacacgctgatggggaagccaaccgaaggtgctctgattgcactcgcaatgaaaatgggcctggatgggctccagcaggactacatccgcaaagctgagtaccccttctccagtgagcagaagtggatggctgttaagtgcgtccaccgcacacaacaagatagaccagaaatttgcttcatgaaaggagcctatgagcaagtgatcaagtactgcacaacataccagtcaaaaggccagactttgacattgacccagcaacagcgagatgtatatcagcaagagaaggcaaggatgggttctgcaggtctcagagtcctggcactggcttcgggacctgaactaggacagttgaccttcctgggcctagttggcataatcgacccccctagaactggagttaaagaggcagtgacaacccttattgccagcggcgtgtccattaagatgataaccggagattcccaagaaactgccgtggccattgcaagcagacttgggttgtattcaaaaacgtcacagtcagtgagcggcgaagaaattgacgctatggatgtccagcaactcagccaaatagtgccgaaagtcgctgtgttctatcgagcatctcctagacacaaaatgaagatcatcaagtcccttcaaaagaatggaagtgtagtggccatgacgggcgacggcgtaaatgatgctgtggcactgaaagccgcagacataggcgtggcgatgggacagactggaaccgacgtctgtaaagaggccgctgacatgatcttggtcgatgacgattttcagactataatgtctgctattgaagaaggcaaggggatctataacaatatcaaaaacttcgtacgctttcagctctccacgagcatagccgccctcacactgataagcctggctactctgatgaatttcccgaatccattgaatgctatgcagattttgtggattaatatcatcatggacgggccacctgcacagtcactgggtgtggaacccgttgataaggatgtgatacggaagccacctcggaactggaaggactctattctaactaagaacctgatcctgaaaatcttagtatcttcaattataatcgtttgcggaacactgtttgtgttttggcgagagctgagagacaatgttattacgcctcgtgacaccacaatgaccttcacttgttttgtgttcttcgacatgttcaacgctctctcttctagatcacagaccaaaagcgtgtttgagattggattgtgctccaatcgaatgttctgctacgctgtactcggatctatcatgggtcagcttcttgtgatctactttcctcctctgcagaaagtcttccagacagagagcctgagtattctagatttactgttccttcttggcctgacaagtagtgtgtgtatcgtcgccgaaattattaagaaggtggaacgatcccgggagaaaatacagaaacacgtgagttcgacatctagcagcttcctcgaggtttggctgtgggagcggtctggccagcagttggtggaaatccacccccacctggaaactggactaccgctcaccgaagatgtgtcttgcgtgtag

SEQ ID NO: 109010 - DNA, 2841 bp, synthetic construct
  misc_feature 1..2841: note = Description of Artificial Sequence: Synthetic coding sequence
  source 1..2841: mol_type = other DNA
atggtcgaggggagagtgtctgagtttctcaagaaactgggctttagcggtggcggccggcaatatcaggcgctagagaaggatgaagaagaagcgcttattgatgagcagtctgagctcaaggccatagaaaaagagaagaaggtcacagccctcccccccaaagaggcctgcaagtgccaaaaagaagacctcgcccgcgccttctgcgtggatctccacactggcctatctgagttttcagttactcagcggcggttggcccatggctggaatgagtttgtcgccgataacagtgagccagtctggaagaagtatttagatcagtttaagaaccccctgattctgctactgttggggtcagccctcgtctccgtactgacaaaggagtatgaagatgcggtttccatcgccactgcagtactggtggtagtgactgttgcattcatacaggaataccggtccgaaaagtctctggaggaactgacaaaaatggtgcctccagaatgcaattgcctgagggaaggaaagctccaacacttactagcaagagaacttgtgcccggggacgtagtgtcactcagtataggcgacagaatacccgctgatataaggctcactgaggttaccgacctgctcgtggacgaaagctctttcaccggggaggccgagccatgcagtaaaactgatagccccctcaccggaggtggagatctgacgacgctttctaacatcgtgttcatgggcaccctggttcagtatggtcggggccagggggttgtgatcggtacaggggagtcttctcagttcggagaggtctttaagatgatgcaggctgaagagacaccaaagacacccctacagaaatcaatggaccggctaggtaagcagctcacgctattctccttcggcatcattgggctgatcatgctcataggctggagccaggggaagcagctgctgtctatgtttaccattggagtaagtcttgcggtcgccgctatacccgagggactgcccatcgtagtgatggtcacgctcgttctcggcgttctgagaatggccaaaaaacgcgtgattgtcaaaaagctcccaatagttgaaaccctaggttgttgcagtgtcctttgcagtgataagaccggcactctgactgcgaatgagatgactgtaacacagttggtcacttcagacgggctaagggcggaagtgtctggcgtgggatatgatgggcagggtacagtctgcctcctgccaagcaaggaagtgattaaagaatttagcaatgtgagtgtgggcaaactcgtagaagccggttgtgtggccaataacgccgtgatcagaaaaaacgctgttatgggccagcctaccgagggcgcattgatggctttggccatgaagatggatctctctgacattaagaattcctatatcagaaagaaggagataccattctccagcgagcagaaatggatggcagtgaagtgttccttaaaaacggaggatcaagaagatatctactttatgaagggcgccctggaggaggtcatccggtattgtacgatgtacaataatggggggatccccctcccgctgaccccacagcaacggtctttttgcctccaagaagaaaagagaatgggctcgttggggctcagggtgctcgccctggcttctgggcccgagcttggccggctgacctttctgggcctggtcggaatcatcgatcctcctcgcgtgggagtgaaagaggccgttcaggttctctctgaatcaggtgtatcagtgaaaatgattacaggagatgcattagaaaccgcacttgccatcggccgcaatataggtctctgtaatgggaaactgcaggccatgagcggagaggaggttgatagtgtagaaaaaggtgagctggcagacagagtggggaaggtctccgtcttctttaggacttctcccaaacacaagttgaagatcattaaagcattgcaggagagtggcgcaatcgtagcgatgacaggcgatggggtaaatgacgccgtggcgttgaaatccgcagacattggtattgccatgggacaaacaggaaccgacgtcagcaaagaggctgccaatatgatccttgtggacgacgatttttcggcgatcatgaatgccgtggaagagggcaaggggatattctataatatcaagaactttgtcagatttcagctgtctaccagcatctctgctttaagcctgattacattgagcacagtctttaatttacccagtccactcaacgccatgcaaattctttggattaacatcataatggacggtcccccagctcagtcactcggcgtcgaaccagtggataaggatgcttttcggcagcccccaaggtccgtgcgggatactatactgtccagggctctgattctgaaaatcctgatgagtgcagccatcataatctcaggcaccctgttcattttttggaaggagatgcctgaggatcgagcttccaccccgagaacaaccacgatgacctttacatgcttcgtgttctttgacctcttcaatgcgctgacatgcagatcccaaactaaactcatattcgagatcggattcctccgaaaccatatgttcctttactctgtgctcgggtctatcctcggccaattggccgttatctatatacctcccttgcagagagtattccagaccgagaacttaggcgccctcgatttgctgttcctgaccggactggcctcttccgtttttatcctttcagagttactgaagctctgtgagaaatactgctgcagtccaaagagggttcagatgcatcccgaagacgtctag

SEQ ID NO: 109011 - DNA, 2928 bp, synthetic construct
  misc_feature 1..2928: note = Description of Artificial Sequence: Synthetic coding sequence
  source 1..2928: mol_type = other DNA
atggttgaggggagggtgagtgaattcctaaagaagctgggcttttccggaggaggaagacagtaccaggctttagaaaaggacgaagaggaagctcttattgacgagcagagtgagctcaaagccattgagaaggagaagaaagtcaccgccttacctcccaaggaggcgtgcaagtgtcagaaggaggatctggctcgcgccttttgcgtggacctgcacaccggcctctcagagttttccgtcacccagcgacgtttggcccacggatggaacgagtttgtcgctgataatagtgaaccggtatggaaaaagtatctcgatcaattcaagaatccactcatcctgctcctcctcggctctgcccttgtctccgtgctcaccaaagagtatgaggatgccgtttccatcgcgactgcagtgctggtggtggtcacggtggcctttatccaagaataccggtcagaaaagagtctggaagagttaaccaagatggtgcctcccgagtgcaattgcctgcgggagggtaagttacagcacctgctggcaagagaattagtcccgggagacgtggtgagcctctccataggagacaggatcccggcagacatccgcttgaccgaggttacagaccttctcgtcgacgaatcctctttcaccggggaggcggagccctgctcgaaaactgactccccactaacaggggggggtgaccttacaaccctgagtaacattgtcttcatgggcacgctggtccagtacggtagaggccagggggttgtgatcggaaccggagaatcctcccagtttggggaggttttcaaaatgatgcaagcggaggagacaccgaagactcctctgcaaaagtctatggatagactgggcaagcagctgacgctgttcagttttggcatcattggccttataatgctgattggctggtctcaaggaaaacaactgttgagtatgttcacgatcggcgtgtctctcgcagtggctgcgatccccgaagggctgcccatcgtggtgatggtgacattggtgttaggagtgctgaggatggccaaaaagcgtgttatagtgaaaaagctcccaattgtggagactcttggttgttgcagcgtgctctgctctgataagacaggcactcttacagccaatgaaatgacagtgacacaactggtcacatctgacggcctgcgggctgaagtgtccggggtaggttatgacggccagggtacggtgtgtctgctgccaagtaaggaagtgatcaaagaattcagcaatgtgtcggtgggaaagcttgttgaagccgggtgcgtcgccaataatgctgtgatccgcaaaaacgccgtaatggggcagcccactgagggtgctctaatggctctggctatgaagatggatctgtctgacatcaagaactcctatatacgaaagaaggagatcccattctcatctgaacagaagtggatggcggtcaagtgttcactgaaaaccgaggatcaggaggacatctattttatgaagggggccctggaggaggtaataagatattgtactatgtacaacaatgggggcatacctctgcctttgacacctcagcagagatcattctgcctgcaggaggaaaagaggatgggaagcttgggcttgagggtgttggcattagctagcggtccagaacttggacgcctcacttttctggggctggtcgggatcatcgatcccccgagagtgggcgtaaaagaggcggtacaggttctgtcagagagcggggtctccgtgaaaatgatcactggtgacgcgttggagaccgccctcgcaattggccgaaacataggattgtgcaacggaaagttacaggccatgagtggagaggaggttgactctgtggaaaagggagagctcgcagaccgtgtgggaaaagtgtctgtattcttccgtacctcccctaagcataagctgaagatcattaaggccttgcaggagtccggagctatcgttgccatgaccggcgacggagtgaatgatgccgtggcacttaagtcagccgacatcggaatcgccatgggacagacaggcacagacgtgtccaaggaagccgccaatatgattctggtagatgatgatttctcagcgatcatgaatgccgtggaagagggtaagggcatcttctacaatattaaaaactttgtaagatttcagctctccacatccatttcagctctcagcctgataacattaagcaccgttttcaatctgcccagtcctctcaacgcaatgcagatcctgtggatcaatattatcatggatgggccgcccgcacaacgctcgtcgcagaaaactgaggtgtgctgtacggccgttagacttggagtggaggggaggggggaatccacttgggctggacgggcaggtctgggtgttgaacccgtggataaagacgcatttcgccagcccccccggagcgtcagagacaccatcttgtccagagcactgatcttgaaaatcctgatgagcgctgcaattatcatatctgggacactgtttattttttggaaggaaatgcccgaagacagggcttccactccacgaactacgaccatgacctttacatgtttcgtcttttttgacctcttcaatgcattgacatgcaggagccagaccaagcttatttttgaaattgggttcttgaggaatcatatgttcctatattctgtcctggggtcaattctgggacagttggccgttatctacatccctcccctgcagagagtcttccaaaccgagaatctgggcgccctggatcttcttttcctgacaggcctagctagtagtgtctttatattgagcgagttacttaagttatgcgagaaatattgctgctcacctaagcgggtgcagatgcaccctgaggatgtatag

SEQ ID NO: 109012 - DNA, 2388 bp, synthetic construct
  misc_feature 1..2388: note = Description of Artificial Sequence: Synthetic coding sequence
  source 1..2388: mol_type = other DNA
atgcggacaccgagcgcaagcccacggcagtgcctttcttggtctctgagtcctagttcatccctgcgcgaaggaaagctgcagcacttgcttgctagggaattggtgcctggagatgtcgtttccctcagcattggcgacaggattccggccgacattcgccttactgaggtcacagaccttctggttgatgaaagcagcttcaccggtgaagcagagccatgctctaagaccgacagtccactcacgggaggcggcgatctaactactttaagtaacattgtcttcatgggaacacttgtccagtacgggcgcggtcagggagtcgttattgggaccggagagtcttcccaattcggagaagtgttcaaaatgatgcaggcagaagaaaccccaaaaacacccctgcaaaagtccatggaccgactggggaagcagctcaccctgttctcttttggcatcatcggacttatcatgttgatcggctggtcccagggaaaacagcttctttcaatgtttaccattggagtaagcctagctgtcgccgccatccctgaaggcctccccatcgtcgttatggtcactcttgtcctcggagtgcttcggatggccaaaaagagagtcatcgtgaagaaactccccattgtggagactctggggtgctgcagtgtgctgtgctccgataagacgggcactttaacagctaacgagatgacggttacccagttagttacatctgatggcttgcgggctgaggtgtctggtgtcggctacgatggccaaggcaccgtgtgtctgttgcccagcaaagaggtaatcaaggagttttctaacgtgtccgtgggcaaactggtggaggcggggtgtgtggccaacaacgccgtgatcagaaagaacgcggttatgggacagcccaccgagggtgctttaatggccctggccatgaagatggatctgtctgatataaaaaattcatatatcaggaaaaaagaaatccccttctcctcggagcagaaatggatggccgtcaagtgctcactcaagaccgaagaccaagaggacatctactttatgaagggtgctctcgaagaagtcattcgctactgcacaatgtacaataatgggggcatccccctccccctaacgccgcagcagcgaagtttctgtctacaggaggagaagcgaatgggcagcctcggattgcgagtgttggcacttgcaagtgggccagaacttgggaggctcacttttttaggactcgttggcatcatcgatcctcctcgcgttggggttaaggaagccgtgcaggtcctgagcgaaagcggtgttagtgtgaaaatgattacaggtgacgccctagaaacagctttggccatcggtcgaaatataggcctatgcaatggaaagctgcaggctatgtccggggaggaggtggactcagttgaaaaaggagaattagctgaccgagttgggaaggtaagcgttttcttccggacgtcacccaagcacaaactcaagatcattaaagcactgcaggagtcaggagcaattgtcgcaatgacaggagatggggtgaacgatgctgttgcactgaaatccgctgacattgggattgctatgggacagaccggaaccgacgtatctaaggaagccgctaatatgatcctggtggatgacgatttctcggccattatgaacgctgtggaggaagggaagggaatcttttacaacatcaaaaatttcgtccggttccagctgtcaacaagcatttccgccctgtctctgataaccctctctacagtgttcaacctgccgtcacccctgaacgcaatgcagattctgtggatcaacattattatggacgggccaccagcacaaagcctcggagtggagccagtagataaggatgcgtttcgacagccaccgaggtcagtgagggataccatactttcacgagcgcttatcctcaagattttgatgtcggcagccattatcatctcaggcaccctattcattttctggaaggaaatgcctgaggaccgtgccagcacccccaggaccaccaccatgacctttacctgtttcgttttctttgacctgttcaatgccctgacctgtcggagtcagactaagctaatcttcgaaattgggttcctgcgcaaccacatgttcctgtatagtgtgctagggagcatacttggacagttagctgttatttatatcccgccacttcagagggtgttccaaactgaaaaccttggtgccctggacctgctcttcctcacaggtctggcaagcagtgtatttatcctttcagagttactcaagttatgcgagaagtactgctgcagcccaaaacgagtccagatgcatccagaggacgtgtag

SEQ ID NO: 109013 - DNA, 3090 bp, synthetic construct
  misc_feature 1..3090: note = Description of Artificial Sequence: Synthetic coding sequence
  source 1..3090: mol_type = other DNA
atggaagccgcccatctgcttcccgcagccgatgtcctacgccacttcagtgtcaccgcagagggaggcttgtctccggcccaggtgaccggcgccagagagcgatacgggccgaatgagctgccatcagaggaaggaaaatcactgtgggaacttgtgttggaacaatttgaagatctcctcgtcaggattctgctgttggccgcactcgtgtctttcgttctcgcctggttcgaggagggcgaggaaaccactactgcctttgtggaaccactagtgatcatgctcattctggtagccaatgctatagtgggggtctggcaggagaggaacgccgaatcagcaatcgaggcactgaaagaatatgagccagaaatgggcaaggtgatccggtccgatcgtaagggggtccagaggattagagcccgggacatcgtacctggggatattgtggaggtggctgtgggcgacaaagttccggctgatctcagattaatcgagattaaatctacaacactcagagtggatcaatcaattctgactggggaaagtgtttccgtcacaaaacatactgaggcgatcccagaccctcgtgccgtcaatcaggataagaagaatatgctatttagcggtacaaacatcacctccgggaaggcggtaggggtggccgtcgcaacaggtctgcatacagagctggggaaaatcagaagccagatggctgccgtggaaccagagcgtacccccctgcagcgaaagctggacgaattcgggcgacagctttcacacgcaatttctgtgatatgcgtagctgtctgggtgatcaacattggacattttgccgatcccgcccacggcggaagctggctccgtggtgcagtgtactattttaagattgcagtagcgctggcggtcgccgctattccggaaggcctgccagcggtgatcactacgtgccttgctttaggcacgagacgcatggcccggaagaacgcaattgtgcgctcacttccatctgtggaaacactggggtgcaccagtgtgatttgctccgacaaaaccggcacattgactaccaaccagatgtccgtgtgtcgcatgttcgttgtggccgaagcggacgctgggtcatgtctcctccacgagtttacaatcagcgggactacatacactcctgagggggaggtaaggcagggtgatcaacccgtcaggtgcggtcaatttgatggccttgtcgaactggctactatctgcgccttatgtaacgattcagctctggactacaatgaggctaaaggtgtctacgagaaggtcggagaagcaacagagactgccttaacctgcttggttgaaaaaatgaatgtgtttgacaccgatctgcaggcactcagcagagtggaaagggcaggtgcatgtaataccgtcataaaacagttgatgcgaaaggagttcacactggagttcagccgcgaccggaagtcaatgtccgtctactgtacccctacccgcccgcaccctacaggacaagggtctaagatgtttgtgaagggcgcgccagagagcgttatcgagagatgctcatccgtgcgggttgggtctcgcaccgcccctctgacacccacctctcgcgagcagatcctcgccaagatcagagactggggtagcgggtctgatacactgcgctgcctagcgctagcaacccgcgatgcacccccgaggaaagaggatatggaacttgatgactgctccaagttcgtgcagtacgagacagaccttacttttgtgggctgtgttggcatgctcgacccgccacgccctgaagtggctgcctgcatcactcggtgttatcaggccgggattagagttgtcatgatcactggtgataataagggaacagcggtagctatatgccggagactcggaatattcggggacaccgaggatgtggccggcaaggcctacaccggaagagaattcgacgatctgagccccgagcaacagcgtcaggcttgtcgaacagctagatgtttcgccagagtggaacctgcacacaagtcccgcatcgtggagaatctgcaaagcttcaatgagattaccgctatgactggcgatggagtcaatgatgctcccgctctgaagaaagcagagattggcatcgcaatgggcagcggcactgcggtggccaagtccgcagccgagatggtgctctccgacgacaattttgcgtccattgtcgctgcagtcgaggagggcagggcaatttactccaatatgaagcaattcatcaggtacctcataagctcgaatgtgggcgaggtggtctgtatcttcctaaccgccattttggggctgccggaggccctgataccagtccagctcttgtgggtaaatctggtcaccgacggactccctgctacagctctgggctttaatcctccagacctagacatcatggagaagctaccccgatcacccagggaggccctcatctcaggctggctattctttaggtaccttgccatcggcgtgtatgtgggcttagccaccgtagctgctgccacatggtggtttgtttatgacgcggagggaccacatatcaacttttaccaactgcgaaacttccttaagtgttctgaggataatcccctgtttgccggtatagattgcgaagtctttgagtcccggttccctaccacaatggccctcagcgtgttagtaaccattgaaatgtgtaacgctcttaattctgtctccgaaaaccagtctctactcagaatgccaccttggatgaatccttggctactggtggccgtagctatgagtatggccctgcactttttgattctgcttgtgcccccgctacccctcattttccaggtgactcctctctcaggccgccagtgggtggtggtcctgcaaatttctctacctgtcattctcctggatgaagcgttgaagtatctcagcagaaaccacatgcatgcttgtctgtatcccggtcttttacgtacggtgtcacaagcttggtcaagacagcctctaaccacatcatggactcctgaccacaccggactggcctccttgaaaaagtag

SEQ ID NO: 109014 - DNA, 3132 bp, synthetic construct
  misc_feature 1..3132: note = Description of Artificial Sequence: Synthetic coding sequence
  source 1..3132: mol_type = other DNA
atggaggccgctcacctgcttcctgccgccgacgtgctccgacatttcagcgtgaccgccgaaggaggtctcagtcccgctcaggtcacaggcgcgcgggagagatatgggcccaacgaactgccaagcgaggagggtaagtccctctgggagcttgtgctcgagcagtttgaagacctcctggtgaggatccttcttctggcagccctggtgtctttcgtcctcgcctggttcgaagaaggcgaggagaccaccaccgccttcgtagagccacttgtgattatgctaattctcgttgcaaacgccattgtcggggtgtggcaggagagaaacgctgagagcgcaatcgaagctctaaaagagtatgagcccgaaatgggcaaggtgatcaggtccgaccgaaaaggtgtccagcggattagagccagagatatcgtcccaggagatatagtggaggtggccgtgggtgataaagtccccgcagacctccgattgatagaaatcaaatcaacgaccctgcgggtggaccagtctattctgaccggcgaatcagtgtcagtaactaaacatactgaagccattccggacccacgggctgtcaatcaagataagaaaaatatgctattcagtggcacaaatataacaagtggcaaagctgttggtgtcgccgtagcgacaggcctccataccgaacttggtaagattagaagccagatggccgctgtagagcccgaacgcaccccccttcagcgcaaattggatgaatttgggagacagttatctcatgcgatctccgtcatctgtgtagcagtctgggtcatcaatatcggccacttcgcagatccagcacatggggggtcctggctacgtggggctgtgtactactttaaaatcgccgtggcccttgctgtggccgctatccccgaaggactcccggcagtcataaccacgtgtctcgccctcggtacgcggcggatggccagaaagaatgctatcgtcagaagcctgccgtcagtggaaacattgggctgtacttccgtgatctgttccgataagactggaacattgacgacaaaccaaatgagcgtgtgccgaatgttcgtagtggccgaggctgatgcaggatcatgtctgttgcatgagttcaccatcagtgggaccacttacacccccgagggagaagtccgccagggcgatcagccagtgaggtgtggacagttcgacgggctggtggagctcgccactatctgcgcattgtgtaacgactcagccttagattataacgaagctaaaggcgtttacgagaaagtaggcgaagccacagaaacggcattgacgtgcctggttgaaaagatgaacgtcttcgacactgacctccaggcattgagcagggtcgagcgtgccggagcctgcaacaccgtgatcaagcagttgatgagaaaagaattcactctggagttcagcagggatcgaaaatcaatgtctgtctattgcaccccaacacgtccacatccaacaggacagggcagcaagatgttcgtcaagggggcgccagaatcagtaattgaacgctgctcttctgtgcgggtcgggtcgcggacggcaccgcttacccccacatctagggaacaaatcctagccaagatcagagactggggctccgggtccgacaccctgcggtgcctagctcttgccactcgggatgctccacccaggaaggaggatatggagctggatgactgctcaaagttcgtgcagtacgaaacagacttaacgttcgtgggctgtgtggggatgctggatcctccacgccctgaggtggctgcctgcattaccaggtgctatcaggccggaatcagagtggtgatgatcaccggagacaataagggaacagccgtggcaatatgcaggagactgggtatcttcggagacacagaggacgtcgccgggaaggcttacacaggcagagaattcgatgacttatccccagagcagcagcgtcaggcgtgtagaaccgccagatgttttgctcgggtcgaacccgcccataagagtagaatcgtcgagaaccttcagagtttcaatgaaattactgcgatgaccggcgatggcgtaaacgacgccccagcactaaaaaaagcggagatcggtatcgcaatgggatccggaacagctgttgcaaaaagcgccgctgagatggtgctgagcgacgacaactttgcttccatcgtggccgcagtggaggagggccgtgctatttacagcaacatgaagcagttcattcgctatcttataagttctaatgttggtgaggttgtatgtattttccttactgctatccttgggctgcctgaggctctcataccggtgcaacttctctgggtgaacctagtcactgatggactgccagcaaccgctctcgggttcaacccacctgatttggacatcatggaaaaactgcctcggtcaccccgggaggccttgatttcaggctggctgttttttcgttacctggcaattggtgtgtacgttggccttgccaccgtggccgctgcaacctggtggttcgtctacgacgcagaggggccccacatcaatttctaccaactgcgcaactttctgaaatgttctgaagataatcctctgttcgcaggcattgattgcgaagtgttcgaatcccgcttcccaaccacaatggccttgtcagtgctggttaccattgagatgtgcaatgccctcaactcggtgtccgaaaatcagagcttgctccgtatgcctccatggatgaacccgtggctgttggtcgcagttgctatgtctatggcattacacttcctgatcttgctggtgccccccctgccactaatcttccaagtcacacccctgagcggaagacaatgggtagtcgtcttacagatatctctcccggtgatcctgctagatgaggccctcaagtacctgtctcgtaaccacatgcacgcatgcctttacccggggttgctccgcactgtgagtcaggcctggtcacgccagccattaacgacttcctggacccctgatcacacaggacgcaatgaacccgaggtcagcgccggtaatagagttgaatctccagtgtgcacgtctgactag

SEQ ID NO: 109015 - DNA, 3159 bp, synthetic construct
  misc_feature 1..3159: note = Description of Artificial Sequence: Synthetic coding sequence
  source 1..3159: mol_type = other DNA
atggaggccgcgcatctattgcctgccgccgatgttctgcgccatttctctgtgacagcagaaggcggcttgagccccgctcaggttaccggagcccgtgagcgatatggccccaacgaacttccttcagaagagggtaaaagtctgtgggagctggtacttgagcagttcgaggacctgctcgtacgaattctgctgcttgccgccctcgtgagctttgtgcttgcttggttcgaggaaggcgaggaaacaaccacagcctttgtggagccactggtcattatgctgatcctcgtggccaatgccattgtgggcgtgtggcaagagaggaacgcagaatctgctatcgaggccctgaaggagtatgaaccagaaatgggtaaagtcatacgctcagatcggaaaggggtgcaacgaatcagagccagggacatcgtgcccggcgatattgtcgaggtcgcagttggcgacaaagtgccagctgaccttagactaattgagatcaaatctaccacgctgcgagtggatcagagcatcttaaccggggaaagcgtgagtgtgacaaaacacacagaagccataccagatccccgcgcagtgaatcaggacaaaaagaatatgttgttcagcgggactaacatcacgagcggtaaggcagtgggggtggcggtcgcaacaggactccacaccgaactcggcaagatcaggtcgcaaatggcagcggtcgaacccgagagaacacctctgcagaggaaactcgacgaattcggcaggcagctctcccacgccatatccgtcatatgcgtggcagtatgggttatcaacatcggtcatttcgcagaccctgcccatggtggctcatggttacggggtgctgtctattatttcaagatcgccgtcgcgcttgcagttgcggccattcctgaaggtctgccagccgtcattaccacctgcttggccttaggcactcgccggatggctcgaaagaacgccattgtcagatccctgccatccgtcgaaaccttaggctgcactagtgtgatctgcagcgacaagaccggcaccctgacgacaaaccagatgtccgtctgccgaatgttcgtggtggcggaggcagacgccggatcttgtctgctgcacgagttcaccatttctgggacaacctatactcccgaaggagaagtgcggcagggcgaccagccggtgcgctgcggccagttcgacgggctggtcgaattggcaaccatctgcgccctgtgcaacgattccgccctggattacaacgaggcaaagggcgtctacgaaaaggtgggagaggcgaccgagacagccctaacctgtctggtggaaaaaatgaacgtgtttgatacagacttgcaagcgctgtcccgtgtcgaacgggctggcgcttgcaacactgtaattaagcagctgatgaggaaggagttcaccctcgagttctctcgcgatagaaagagcatgagcgtatactgcacccccacgcgacctcacccgaccggacaagggagtaaaatgttcgtgaagggtgctcccgaatccgtcattgaacgctgctcttcagttcgggtggggtcaaggaccgccccgctgacgcccacctccagagaacagatcctcgccaaaattcgcgactggggctcgggcagcgacaccctgcgctgcttggccctggcgactagagacgctccgccacgcaaagaagacatggaacttgacgactgcagcaaatttgtccaatacgaaacagacctgacttttgttggctgcgtcgggatgctggaccctccacgtcccgaggtggctgcatgtattaccaggtgttaccaggcaggcatccgagtggtgatgattactggcgataataaagggactgctgttgccatctgcagaaggctgggcattttcggggacaccgaggacgtggcaggcaaagcctatacaggcagagaattcgatgacctgtctcctgagcaacaacgacaagcttgccgtacagcaaggtgtttcgccagggtggaacctgcacataaaagtcgtatagtggaaaatctgcaatctttcaatgaaatcacagctatgactggtgacggtgtgaacgacgctcctgcgcttaaaaaggccgagatcggcatcgcaatgggtagtgggacagctgtggcaaagtccgccgccgagatggtattgtctgatgacaacttcgcttccatcgtggcagccgtcgaagagggcagagctatctactccaatatgaaacagttcattcgctacctgatttcttctaatgtgggtgaagtggtgtgtatcttcctgaccgctattcttgggctgccagaagcactaatccccgtgcaattactgtgggtgaacctggttaccgatggactgcctgccactgcactgggttttaaccctccagacctagacatcatggagaagctcccgcgatccccgagagaagcgctgatttctgggtggctgttcttccggtacctggccatcggggtatacgtggggcttgccaccgttgcagcggccacgtggtggttcgtatatgacgcagagggtccacacattaatttctaccagctgaggaactttctcaagtgctctgaggataatcccctattcgcgggcatcgattgtgaggtgttcgagtctcgctttccaaccactatggccttgtcagtgctcgtcaccatcgagatgtgcaacgctctgaattccgtatcggaaaaccagtcactgctccgcatgccgccttggatgaatccctggctacttgtagctgtggcaatgagcatggctctgcacttcctgattctgctggttccgcctctgcctctgatttttcaagtaacgccattgagcgggcgccaatgggtggttgtgcttcagatctccttacctgttatcctgttagacgaggctttaaagtatctcagcagaaatcacatgcatgcatgtttgtaccccggtctcttgagaaccgtgtcacaagcttggtcacggcagcccctgacaacatcttggaccccagatcacaccgggctggcttctttaggacaggggcactctatagtatctcttagtgagttgctgcgcgaaggcggtagtcgggaagagatgtctcagaagtag

SEQ ID NO: 109016 - DNA, 3090 bp, synthetic construct
  misc_feature 1..3090: note = Description of Artificial Sequence: Synthetic coding sequence
  source 1..3090: mol_type = other DNA
atggaggccgcacatcttttacctgcagcggacgtactgagacacttcagcgtaactgcagagggcgggcttagtccagcacaggtcactggtgcccgagagagatatgggcccaatgagttgccttctgaagaagggaagagtttgtgggagctggtgcttgagcagtttgaggacctgctcgtcaggattctgcttctcgccgcactcgtttctttcgtccttgcctggtttgaagaaggagaagaaactacaaccgcttttgtggagccccttgtcatcatgctcattttggttgccaacgcgatcgtgggggtatggcaagagcgcaacgcagagtccgccatcgaggcgctaaaagagtatgaacccgagatgggaaaggtaatccggtcagaccgcaagggggtccagcgcatccgtgcccgggacattgtgcccggggacattgttgaagtagccgtcggagataaagtgcccgccgacctgagacttattgaaatcaagagtactacactcagagtggaccaatctattctgaccggggaatcggtctccgtaacgaaacacaccgaagcaatccctgatcccagagctgtgaatcaggacaagaaaaacatgcttttttccggcacgaatataacctccggaaaagccgttggcgttgccgtcgctaccggtctgcacaccgaacttggtaaaatacgaagccagatggctgccgtggaacccgaaaggaccccattgcagagaaagctggacgaattcgggaggcagctgtctcacgctatctcagtcatatgcgtcgccgtatgggtgattaatattggccacttcgccgacccggcccatggagggtcgtggttgagaggggctgtatactacttcaagattgcggttgcgctggccgtggccgcgattcccgagggactcccagccgtaattaccacttgcctggccctggggacacggaggatggcccggaagaacgctattgtccgatccttgcccagtgtagagactctgggctgcacctccgtgatatgttcagacaagaccggaacccttacaaccaaccagatgtcagtgtgccgtatgttcgtggtggcagaagcagatgcagggtcatgtctcctgcatgagtttaccatctccggtacaacctacaccccagagggcgaggttaggcaaggcgaccagcccgttagatgtggacagttcgacggcttggtggaattagcaacaatctgcgctttgtgcaacgatagcgccctggattacaacgaagctaagggtgtgtacgaaaaagtgggagaagctaccgagacagcactgacgtgtctggtggagaaaatgaacgtcttcgacacggacttgcaggcactgtcacgggttgaacgcgcaggagcctgtaacactgttataaaacagctgatgaggaaggaattcacacttgaattttcccgcgatcggaaaagtatgtctgtgtactgtacgccaacccgaccacatccaaccggtcagggctctaagatgtttgtgaagggtgctccagaaagtgtgattgagcggtgtagctcagtgagagtggggagtagaaccgccccccttactccgactagcagggaacagatcctggctaagatccgcgattggggcagtggatcagatactctccgttgtctagcgctggccacaagagacgcaccccctcgcaaggaggatatggagctggatgactgttccaagtttgtgcagtacgaaactgacttgacatttgtcggctgcgtgggtatgctagatcctccaaggcctgaggttgccgcctgtatcactcggtgctatcaggctggcataagagttgttatgataactggggacaacaaaggcactgcggtagccatctgccgaagactgggcatcttcggagatacagaagatgttgccgggaaggcatacactgggagagagttcgatgatctgtctcctgagcaacaacgccaagcttgccggaccgcccgttgcttcgcgagagtggagcctgcacataaaagcagaatcgtggagaacctacagagtttcaatgaaattaccgcgatgacgggtgatggtgtcaacgatgccccagctctaaagaaagccgaaattggaattgcaatgggctccgggactgccgtcgccaaatccgctgcagagatggtgttgtctgatgataacttcgcttctatagtcgccgccgttgaggaggggagagccatctattcaaacatgaagcaatttattcgatatctgattagcagcaatgtaggtgaggtggtctgcatcttcttgacagcaatacttggcctgccagaggctcttataccggtgcagttgctgtgggtcaacttggtcacggatgggctgcctgcaactgccctgggctttaatcctccagacttagacataatggaaaagctccctcgctcccccagagaagccctgattagcggctggctgttcttcagatacttagcgattggcgtgtacgtgggcctcgcaacggtggcagcagccacatggtggtttgtgtacgatgcagagggtcctcatatcaacttttaccagctgaggaattttctaaaatgttctgaggacaacccactgttcgccggcatcgattgtgaagttttcgaatctcgattccctactaccatggcactgagtgtgctggtcactatcgaaatgtgtaatgctctaaatagcgtctccgagaatcaatccttactaagaatgccaccatggatgaacccctggctcctcgtcgccgtcgccatgagtatggctttacacttcctgatactcttagtgccgccattacccctgattttccaggtcacaccccttagtgggcgccagtgggttgtcgttctacagatttctctgcccgtcatcctgctggacgaagctttaaagtatctttctcggaatcatatgcacgcgtgtttgtatccgggactgctccggaccgtgtcacaggcgtggagtcggcagccactgacgacttcttggactcccgatcacaccggactcgctagcctcaagaagtag

SEQ ID NO: 109017 - DNA, 651 bp, synthetic construct
  misc_feature 1..651: note = Description of Artificial Sequence: Synthetic coding sequence
  source 1..651: mol_type = other DNA
atggagaagctacctaggtcaccgagagaggcattaattagtggatggcttttcttcaggtacttagccattggagtgtatgttgggctcgccactgttgcagctgctacatggtggttcgtttatgatgccgagggtcctcacattaatttttatcagctgaggaattttttaaagtgttccgaggacaacccactctttgcaggcatcgactgcgaagtgttcgagagcaggttccctacaacaatggcgctgagcgtcctggtcaccatcgagatgtgcaatgcactgaacagcgtcagcgagaatcagtctcttctacggatgccgccatggatgaacccttggcttctggtagcagttgcaatgtccatggctttgcacttcttaattctcttggtgccacccctgcctctcatctttcaggtcaccccactcagtgggcgtcaatgggtggtggtcctgcagattagcttgcctgtgattcttctggacgaggccctgaaatatctctcaagaaatcacatgcatggcccagggacacagcatagactcgccgtgcgagccgcccagcgcgggcgcaagcagggccggaatgagcctgaagttagtgccggcaatagggtcgagtcccctggcccaggaggatag

SEQ ID NO: 109018 - DNA, 3000 bp, synthetic construct
  misc_feature 1..3000: note = Description of Artificial Sequence: Synthetic coding sequence
  source 1..3000: mol_type = other DNA
atggaggctgctcacctgttacctgctgccgatgtgctgaggcacttctctgtcaccgcagaaggagggctctctccggctcaagtgacgggagcacgggagcggtatgggcctaacgaactgccatctgaggaggggaaaagtctttgggagcttgtcctggagcagttcgaggacttgctagtcaggattctgctgttagctgcactggtgagcttcgtcctcgcctggtttgaggaaggtgaggaaactaccacggccttcgtcgagcctctagtaattatgctgatcctggttgcaaatgctatcgtaggcgtttggcaggagcggaacgccgaatccgcgatagaggctctcaaggagtatgagccagagatgggaaaagtgatacgatctgaccggaagggcgtgcagcgaataagggctagggacattgtcccgggcgacattgtcgaggttgcagtgggagacaaggtgcccgctgacttgaggcttattgagatcaagtccaccaccttgagagtggatcagtccatcctgacaggcgaatctgtttcagtgaccaagcatacagaagctattccggatccaagagctgtgaaccaggacaagaagaacatgctattctccgggactaacattacgtcaggaaaggctgtgggggtggcagtggccaccggtctacacaccgagcttggaaagattcgtagccaaatggccgccgtggagcccgagcggacccccctgcagaggaagctcgacgaatttggacggcaactcagccacgcaatctctgtgatctgcgtggcggtctgggtcataaatattggacacttcgccgatcctgctcatggtggttcatggttacgaggggctgtgtactatttcaagatcgctgtcgccctggctgtggcagccatcccggagggcctgcccgccgttatcaccacatgcctggctctgggtacacgaagaatggcgagaaagaatgccattgtgaggagccttccgtccgtggaaaccctgggatgcacatctgtgatctgtagcgacaaaaccggtacactcaccaccaatcagatgtccgtttgcaggatgtttgtggtcgccgaggcagacgccggctcttgtctcctgcacgaattcactatttcgggcacaacatacaccccagaaggagaggtccggcagggcgatcagcctgtacgatgcgggcagtttgacggtctcgtcgaactagcaacaatttgcgctttgtgtaatgattcggccctggattataatgaagctaaaggggtctatgagaaggtgggcgaggctaccgaaactgcattgacttgtctggtcgagaagatgaacgtgtttgacacagacttgcaagccctcagccgggtcgaacgagcgggtgcctgtaacacagtgatcaagcagctgatgcggaaagagtttacgctggagttttcacgggatcgcaagtccatgtctgtttattgcaccccaactaggcctcatcccaccggacagggcagtaagatgttcgtcaaaggcgcgcctgagagcgtgatcgaacggtgcagctccgtgagagttggatctcgcacggcaccactgaccccgacgtcccgcgagcagatcctggcaaagatccgcgactgggggtccggaagtgacaccctgagatgtttggccctggctaccagagacgctccccctagaaaggaagacatggaattagacgattgctcgaagttcgtacagtacgagactgatctgacatttgtgggatgtgttggaatgcttgacccaccacgtcctgaggtggccgcgtgtatcacgagatgttatcaggctgggattcgcgtcgtcatgattacaggcgataataagggtactgcggtggccatctgcagacgactgggcattttcggcgatacagaggatgtggctggcaaggcctataccggccgtgaattcgacgacctgtcgcctgagcagcaacggcaagcctgtcggaccgcccgttgtttcgcaagagttgaacccgctcacaagagcaggatcgtcgagaacctccagtccttcaatgagatcacagccatgacgggcgacggggtaaatgacgcccccgctctgaagaaggccgagattggcatcgccatgggctcagggactgccgtggctaagagcgctgcagagatggttctatccgatgataattttgcctccatcgtggcagcagtggaggaggggcgagccatttattctaacatgaaacagtttattcgatacctgatcagttctaatgttggggaggtggtgtgcatttttctaacagctattctggggctgccagaggccctcatcccggtgcagctgctctgggttaacttggtgaccgatggtctgcccgccacagcacttggcttcaatccacctgacttggatatcatggaaaagctgccgcgctcgccccgcgaggccctgattagtgggtggttgttcttccgctatctggcaattggtgtctacgtgggcctggccaccgtggccgccgcgacatggtggtttgtctatgatgctgaagggccgcacattaatttctatcagctccggaattttctcaaatgctctgaggacaaccccttgtttgcgggcattgattgtgaggtgtttgagagccggtttcctacaaccatggccctgtccgtcctcgtaacaatcgagatgtgcaatgccttgaactcagtgtccgagaaccaatctttgttgaggatgccaccctggatgaatccctggctccttgtggccgtggccatgtcgatggcactgcatttcctgatcctcctagttccacctctgcccctgattttccaagtgactcctctgtccggacgtcagtgggtcgtggtcttacagatctcactgccagtaattttacttgatgaggccctgaaatatctgtccagaaaccatatgcatgaggaaatgagtcagaagtag

SEQ ID NO: 109019 - DNA, 2997 bp, synthetic construct
  misc_feature 1..2997: note = Description of Artificial Sequence: Synthetic coding sequence
  source 1..2997: mol_type = other DNA
atggaagccgcgcatctgctcccggctgctgacgtgcttcggcacttttcagtgacggccgagggaggcctgagtccagcccaggtcaccggcgctagggagcggtacgggcccaatgagctgccatcagaggaagggaagtccctgtgggaactggtgcttgagcagttcgaggatctgctggtccgcatcctgttgctcgccgcacttgtatctttcgtgctggcctggtttgaagagggcgaggagactaccacagcctttgtggaacctctcgtgattatgctcatactagtagccaacgcaattgtgggagtgtggcaggagcgcaatgccgaaagtgccattgaagccctgaaggagtatgagccagagatgggaaaggtcattagatcggatcgaaagggcgtgcaacgcattcgggcacgagacatcgttcctggagatattgtagaggtggctgtgggagacaaggtgcctgccgacctacggctcatcgagattaagagcacgactctgcgggtagaccagtcgatcctgacaggggaaagcgtgagtgtcaccaagcatacagaggccatccccgatcctcgagcagtgaaccaggataagaaaaacatgttattctctggtactaatattacctctggcaaggctgtcggtgtcgctgttgcaactggcctgcatacagaactgggtaagattcgaagccaaatggctgccgtggagcctgaaaggacgccattacaaagaaagttagatgaattcgggaggcaactttcgcatgccatttcagtgatctgcgttgctgtatgggttatcaacatcggacacttcgctgatcctgcccacggtggttcctggctgagaggagccgtctattactttaagattgccgttgctttagcggtcgcggccattcccgagggattacccgcagtgataacaacctgtctcgctctcgggactaggcggatggctcggaagaacgcaatagtgcgctccttgcctagtgtcgaaacccttggatgcaccagcgtgatctgctcggacaaaactgggaccctcacaaccaaccagatgtcagtgtgtcgaatgttcgtggtggcggaggcggacgcagggtcctgtcttctccatgagttcacaattagcggtaccacctacactccggagggcgaagtacggcaaggcgaccaacccgtgcgctgtggacagtttgacggcttggtggagctggcaaccatctgcgccctgtgtaatgactccgctctggactataatgaggctaagggagtttatgagaaggttggggaagcaaccgaaacagctctcacatgtctggttgagaagatgaacgtgttcgacacggacctgcaagcactgagtcgcgttgagcgagcaggcgcctgcaacaccgtgatcaaacagctgatgagaaaagagttcacacttgagttctctcgtgacagaaagtctatgtccgtgtactgtactcctactcgaccccaccctaccgggcaaggctctaaaatgtttgtgaaaggagcccccgaatcagtcatcgaacggtgctcatcagtaagagtcgggagccgaacagcgccgctgacacccaccagcagggagcagatattagctaagattagggattggggttctggcagtgacacgctgcgatgcctggccctagcaaccagggatgcgcccccgaggaaagaagatatggaactggacgattgctctaagttcgtgcagtatgaaaccgacctgacattcgtgggttgcgtcggcatgctcgacccacccagacccgaagtagccgcttgtattacaaggtgctaccaggccggcattagggtggtgatgatcacaggagataataaaggcaccgctgttgccatatgcagacgcctgggcatattcggagacacagaagatgtggccgggaaggcatacactgggcgcgagttcgatgacctgtcacccgagcagcagcggcaagcgtgccggacggctagatgcttcgcccgcgttgagcccgcacacaaatcacgtatcgtggagaatctacagtccttcaacgagattacagcaatgacaggagacggggtgaatgatgcccccgcactcaagaaggccgaaatcggcatagccatgggatccgggaccgcagtcgctaagagtgcagcagagatggtcctgtcggacgataattttgcaagcatcgttgccgcggtcgaggagggtagggctatctattcaaacatgaaacaattcatccgttatctcatcagctccaatgttggcgaggtcgtctgtatcttcctgaccgcaatcctgggtctgcccgaggccctgatcccagtccagctgctgtgggtgaacttagtgaccgatggtttgcccgccaccgctttaggttttaatccacctgatctggatatcatggaaaagctgccaagaagccccagggaggccctgatctcgggctggcttttctttcggtacctcgctatcggggtctatgtcggactcgcaacggttgcggcagccacatggtggttcgtttatgacgctgaaggtccacacattaacttttaccaactccgcaatttcttgaagtgtagcgaagataatccacttttcgcaggcatcgactgcgaggtctttgaaagccggttcccaactactatggccctgtccgtgttggttaccatcgagatgtgcaacgctttgaacagcgtgagtgaaaatcagagtctgctccggatgcctccttggatgaacccgtggctcctggtagccgttgcaatgtctatggccctacacttccttattttgttagtgccgcccctgccgctcatattccaggtgacaccactaagcggaaggcagtgggttgtggtccttcagataagtttacctgttatattactcgacgaggcgttaaagtatctgagtaggaatcatatgcatgggcatacccagagctag

SEQ ID NO: 109020 - DNA, 2997 bp, synthetic construct
  misc_feature 1..2997: note = Description of Artificial Sequence: Synthetic coding sequence
  source 1..2997: mol_type = other DNA
atggaagcggcacacctgctgccagcagccgatgtgctgcgccatttctccgttactgctgaaggaggccttagccctgcacaggtgacgggggcccgcgagcggtatgggccgaacgagctccctagcgaagaggggaaaagtctttgggaattagtattggaacagtttgaagacctgttagtccgcatcctgctgctcgcagcgctggtgtctttcgttctggcctggttcgaggagggcgaggaaactactaccgcattcgtggaacctcttgtcatcatgctgatcttagtggccaacgctatagtcggcgtgtggcaagagcgtaacgccgaatctgccatcgaagctctaaaagaatatgagcctgagatgggcaaagtaattaggagcgatcgaaaaggcgtgcagaggattcgggccagagatatcgttcccggcgacatcgtcgaggtggctgtgggcgacaaagtgcctgctgatctccgcctgatcgagattaagtcaacaacactccgggtggaccagtctatcttgacgggagagtccgtctcggtgactaagcacacagaggctatcccggacccgagagcagtaaaccaggataaaaaaaatatgctgtttagcggtacaaacataacgagcggcaaggccgtgggagttgctgtcgcaactggcctccacaccgagttggggaaaattcgctcccagatggcagccgtcgaacccgagagaaccccgctgcaaagaaagcttgatgaatttggtaggcaactgtcgcatgccataagcgtgatctgtgtcgctgtgtgggttatcaacattggccactttgctgatccagcgcatggggggtcttggctaagaggagctgtttactactttaaaattgcggtagccctagctgttgcagcgatccccgaaggtcttccagccgtcattacaacttgtctggcactcggaactcggagaatggctagaaaaaacgcaatcgtccggagcctgccatcagtggagacactggggtgtacttctgtgatttgttccgataagactggaactctcacgaccaaccagatgagcgtttgtaggatgttcgtcgtcgcagaggctgacgcagggtcatgcctgctgcatgagtttactattagtggcactacatatacccctgagggagaagtcagacaaggagaccaaccggtcaggtgtggccagtttgatggtcttgtggagttggccaccatctgtgccttgtgcaatgactcagccctcgactacaacgaagccaagggggtctatgagaaagtcggcgaagcgactgaaacggccctgacgtgcctggtggagaagatgaacgtgttcgacacagatctgcaggcgctctcccgcgtggagagggctggcgcctgcaatacagtgatcaaacagttgatgcgtaaggaatttactctggaattcagccgggatcggaagtctatgtcagtctattgcactcccactaggcctcacccaaccggccaggggagcaaaatgttcgtcaagggagcccccgaatccgtcatagagcggtgctcctctgtgcgggttgggtcccggactgcccctcttacgcccacctcaagagagcagatattggcaaaaattcgggattggggttcgggcagcgacaccctgcgctgcctggctctcgcaacaagagacgctccacctcggaaggaagacatggagctagatgattgtagcaagttcgtccagtatgaaaccgatctcactttcgtgggctgcgttggaatgctcgatcccccacgcccggaagtggccgcgtgcattacacgctgctaccaggccggtataagggtagttatgataacaggagacaacaagggtaccgccgtggctatctgtcggaggttgggaatatttggggatactgaagacgtggccggcaaagcctatacaggacgagaatttgatgatctttcccctgaacagcaaagacaggcctgcagaacagctcgttgttttgctagagttgagcccgcccataaaagtcgcatcgttgagaacctccaatcattcaatgagatcacagcaatgaccggtgacggggtgaacgatgcccccgccctcaagaaagctgaaattggtatcgccatggggagcggaacagcagttgccaagtctgctgccgagatggttctgtccgatgacaatttcgctagtatcgtagcggccgttgaagaggggagggccatctacagtaatatgaaacagtttatacggtacctgatttcgtccaatgtgggggaggtggtgtgcatcttcttaaccgcgattctgggactcccagaagctctcattccagtgcagctgctgtgggtcaacttggtaactgatggcctgcccgccaccgctcttgggttcaaccccccagatctcgatatcatggagaaactgcccaggagccctagagaggcactgattagcggctggctgttctttcggtatctggctataggggtgtacgtaggcttagctaccgtcgccgcggcaacatggtggtttgtatacgatgcggagggccctcacataaatttttaccaattacgcaattttttgaagtgctcagaggataacccactatttgctggcattgactgtgaagtctttgagtccaggttcccaacaacgatggctctttcagtgctggtgaccatcgaaatgtgcaatgccctcaactcagtgtcagagaatcagtccctgctcaggatgccaccatggatgaacccatggctcctagtagccgtagccatgagcatggccctccacttcttaattctattggttccaccgctgcccctgatatttcaggtaacccccctctctgggagacagtgggtggtggtactgcagatctcactaccggtgatcttgctggacgaggcactgaaatatctttccagaaatcatatgcatgagatgagccagaaatag

SEQ ID NO: 109021 - DNA, 1386 bp, synthetic construct
  misc_feature 1..1386: note = Description of Artificial Sequence: Synthetic coding sequence
  source 1..1386: mol_type = other DNA
atgactgtgccaaaagagatgcctgagaagtgggcgagagcgcaagcgcccccatcttggtctcgaaaaaagccgtcctggggaactgaagaggagagacgagcccgggctaatgatagggagtataacgagaagtttcaatatgcctccaattgcattaagacaagcaagtataacattctgacctttttacccgtcaacctgttcgagcagttccaggaggttgcgaacacttattttctgtttctgttaattttgcagctgataccccagattagtagcttatcatggttcacgaccatagttcctcttgtattggttctgacgatcacagccgttaaggacgccaccgatgattatttccgccataaatcggataaccaggtgaacaacaggcaatcccaggtcttgataaacggtattctgcagcaagaacagtggatgaacgtgtgtgttggagacatcataaaactggagaacaaccagttcgtagcagcagatcttttacttcttagctccagtgaaccacacggactttgttacatagaaacggccgaactggatggagaaaccaacatgaaggtccgccaggctattcctgtaacttcagagctcggggatatttctaaacttgctaagttcgacggcgaagtcatttgcgaacctcccaacaacaaacttgacaaattctccgggaccttatattggaaagagaacaaatttccccttagtaatcaaaatatgttactcagaggttgtgtgctacgaaacacagaatggtgttttggccttgtgatctttgccggccctgatacaaaactcatgcagaacagtggacgtaccaaatttaagaggacatccattgacagactaatgaacacacttgtgctgtggattttcggcttcctggtatgcatgggtgtcattctggcgattggcaatgccatctgggaacacgaagtaggcatgcggtttcaggtatatctgccatgggatgaggctgttgatagtgcattcttttcaggtttcctgtcattctggtcttatatcataatattaaatactgttgtaccaatctcactttacgtctctgttgaggttatcaggctcggccattcatatttcataaactgggacaagaagatgttctgtatgaaaaagcgaactccagcagaggcccgcaccacaactcttaacgaggagttgggccaggtggagtatattttctcagacaagaccggcactctcacacaaaatataatggtgttcaacaaatgcagtattaatggccatagttatgtcgggtccgaggggccgcgcaggaaagggcccagctggccagggaccgtggcccacgcttatagccatagcactctgggggggtag

SEQ ID NO: 109022 - DNA, 1164 bp, synthetic construct
  misc_feature 1..1164: note = Description of Artificial Sequence: Synthetic coding sequence
  source 1..1164: mol_type = other DNA
atggctgtatgtgcaaagaagcgacccccagaggaggaacgacgtgcccgggcaaatgaccgtgagtataatgagaagttccagtacgcaagcaactgtataaagacttctaaatacaatatcctgaccttcctacctgtgaatctgtttgagcagttccaggaggtcgccaatacatacttcctcttcctgctcatcttgcagctgatcccacagatatcctctctcagttggttcacaactattgtgcctttagtccttgttttgactattacagccgtaaaggatgctaccgacgattatttcaggcataagtctgacaaccaggtcaataaccggcagtcgcaggtgctcatcaatgggattctgcaacaagaacagtggatgaacgtttgcgtgggcgatataatcaaacttgaaaataaccaatttgtcgccgctgatcttctgctgttgagctcttccgagccacatgggctttgttatatcgagactgcagagctcgacggagagactaacatgaaagtgcggcaggccataccagtgaccagcgaactcggggatattagtaaactggccaagtttgacggagaggtgatctgtgaacctcccaataataaacttgacaaattttccggtacgctttactggaaggaaaataagtttccgttgagcaaccagaacatgcttctcagaggatgcgtgctgcggaataccgaatggtgtttcgggctggttatttttgccggtccagacactaagcttatgcaaaatagtggccgcaccaagtttaagcgtacgagcattgaccgactgatgaacactttggtgttatggatttttgggttcctggtttgcatgggagtgatcctcgccatcggcaacgccatctgggaacacgaggttggaatgaggttccaggtttaccttccatgggacgaagccgtagatagtgccttcttcagcgggtttctgtccttctggagctatatcatcatcctcaataccgttgtgcccatcagtttgtatgtgcgctacgtgccatcattgacctggggcctttctagagaatccggcgggcctatcgaattattcttctctatgaagatgaaatctctgaggtcaaatgaaaaaagcagttcttcctgtaccgtgaatatttag

SEQ ID NO: 109023 - DNA, 3672 bp, synthetic construct
  misc_feature 1..3672: note = Description of Artificial Sequence: Synthetic coding sequence
  source 1..3672: mol_type = other DNA
atggacaccctacgggccgttccactcttttctatcagcggcttattctcctttccttatcgagtgtcacatggcattgccgggattcttttgggggagatggccgtgtgcgcaaaaaagcgcccaccagaggaagagaggcgcgcacgggcaaacgaccgtgagtacaatgagaagttccagtacgcatccaattgcatcaaaacaagtaagtacaatattctgacatttctccccgtgaacctgtttgaacaattccaggaggtggccaatacctactttctgttcttgctcatacttcaactaattccacagatcagcagcctgtcctggttcaccaccatcgtcccactagtcctggtgctcacaatcacagcggtgaaggacgccaccgacgactatttccggcacaagtccgacaaccaagtgaataataggcagtcccaggtgctgatcaatgggatcctgcaacaggaacagtggatgaacgtgtgtgtgggtgacatcattaagctggaaaataatcagtttgtggctgctgacctgctccttctgagctcttccgagccgcatgggctttgctatatcgaaacagccgagctagatggcgagacaaatatgaaggtgcgtcaggccatccctgtaactagcgagctgggggacataagcaagctcgccaagtttgatggagaagtgatctgcgagccgcctaacaataagctcgataagtttagtggtaccctgtattggaaggagaacaaattcccattgtctaatcaaaatatgcttttacggggatgcgttctgcgcaacaccgagtggtgcttcggcctcgtgatcttcgcaggtccagatacaaaactgatgcagaactcaggtaggactaagttcaaacggacttcgatagacagactgatgaacacactagtcctttggatattcggtttcctggtttgtatgggagtgatcctcgcaattggcaatgctatttgggaacacgaagtaggcatgcgattccaggtgtacctcccgtgggatgaagctgtggatagcgcatttttcagcgggtttctatccttttggtcatatatcatcattctgaatacagttgtgcctatcagtctgtatgtctctgttgaggtgattagactggggcactcatactttatcaattgggacaaaaaaatgttctgcatgaaaaagaggaccccagcggaggctcgcaccacaaccctgaatgaagagctgggacaggtcgaatacatcttctccgacaaaacgggaacgttgacacagaacatcatggtgttcaataaatgttctataaacgggcattcctacggtgatgtgtttgacgtgcttggccacaaagccgaattgggagaaaggcccgaacccgtcgattttagctttaatccattggcagataaaaaattcctcttttgggacccttcactgctcgaggcagtgaaaatcggtgacccccatacacatgaatttttccggttgttatccctctgccacacagtgatgtcagaagagaagaatgaaggggaactctattataaagcccagagtccggatgaaggcgcactcgtgaccgccgcccggaattttggatttgtctttagatcccgaaccccaaagaccatcacggtgcatgaaatgggtaccgccattacttatcagctgctggccattctcgactttaacaacattaggaagcgtatgtccgtgatcgtgagaaaccctgaagggaaaatacgcttgtactgcaagggcgccgacaccattctccttgacagactgcaccatagcacccaggagcttctgaacacaaccatggaccacttgaatgaatatgccggcgaagggcttcgcactctggttttagcgtataaagatcttgacgaggagtactacgaagaatgggctgagcgtcggctacaggcatcgctcgcacaggacagtcgggaagacaggcttgcctccatctacgaggaagtggagaataatatgatgttattgggggccactgcgatcgaggacaaactacagcagggggtgcctgagaccattgcactgctgactctcgctaacattaagatctgggtgctgactggcgataagcaggagactgccgtgaatatagggtattcctgcaagatgttgacagacgatatgacagaagtgttcatagttaccggccatactgtactggaggtgcgcgaagagctccgtaaggcgagggagaagatgatggacagctctcggtcagtcggcaacggattcacatatcaggacaagttgtcgtcaagcaaattgacaagcgtgctcgaggccgttgcgggggagtacgccctggtgatcaacggtcactccctggcgcacgctttggaggcagatatggagctagagtttttagaaaccgcttgcgcatgcaaggctgtgatctgttgtagggtcacacccttgcagaaggcgcaggtggtggaactggtgaagaagtataaaaaggctgtgactctggccatcggcgatggggctaacgatgtcagtatgatcaagaccgcccatatcggggtgggcatatctgggcaggagggcattcaggctgtgctggcgtctgattacagcttttcccagtttaagttcttacaacgcctgctgcttgttcacggcaggtggagttatctgcgcatgtgcaagtttctctgttatttcttctacaaaaattttgcttttactatggtgcatttttggttcggctttttttgcggcttttcagcacagaccgtctacgatcagtatttcatcacgttatacaatatcgtgtacaccagtctgcccgttctagctatgggcgttttcgaccaggatgtccccgaacagagatccatggaatatcctaagctctatgagccgggccagttaaacttgctgtttaacaagcgcgagttctttatttgtatcgcgcagggcatttacacatctgtccttatgttctttatcccttatggcgtgtttgccgatgctacccgggacgacggcactcagctagcagattaccagtctttcgccgtcactgtcgctacaagtcttgtgatcgtagtgagcgtccagatcggcctagatacgggctactggacggcaattaatcacttctttatctggggctctctagctgtctacttcgccatcttgttcgccatgcacagcaacggcctgtttgacatgttcccgaatcagtttcgattcgtggggaacgcccagaacaccctagcccagcccaccgtctggttgacaattgtactgaccactgtggtgtgtattatgcctgttgtggccttcaggttcttgcgactcaacctgaagcccgacctgtctgacacggttagatatacacagctcgttagaaagaagcagaaagcacagcaccgctgcatgcggagagtgggcagaacaggcagccggcgctcaggctatgctttttctcaccaagagggtttcggcgagttgattatgtcagggaaaaatatgcgactttcatctctagcgctgtcttccttcactacaagatccagctcatcctggatcgaatcactcaggagaaagaaatctgatagcgcttcgagcccgagcgggggagccgacaaaccgctgaaggggtag

SEQ ID NO: 109024 - DNA, 3444 bp, synthetic construct
  misc_feature 1..3444: note = Description of Artificial Sequence: Synthetic coding sequence
  source 1..3444: mol_type = other DNA
atggcggaccaaattccgctgtatccagtgcggtcagccgccgccgctgcagctaaccgtaaacgagctgcttactacagtgcggcggggccgcgacctggagccgaccgtcatagccgataccagcttgaggacgaaagcgcgcacctggatgagatgcccctgatgatgtctgaggagggctttgagaacgaggagagtgactatcatacactgccccgggctcgtatcatgcaacgcaaacgcgggttggagtggttcgtttgtgatgggtggaagttcttatgcacaagctgttgtggttggctgattaatatatgccgtagaaaaaaggaactcaaggctagaactgtgtggctgggttgcccagaaaagtgcgaagagaagcatcctcgaaattctatcaagaaccagaaatacaatgtgtttacttttattcctggagttctgtatgaacaattcaaatttttcctgaacctctattttctggttatttcctgttcgcagttcgtgccggctctgaaaatagggtacttatacacatattgggcaccactgggatttgtattagccgtcaccatgacccgcgaggctatcgacgaattccggcgctttcagcgggacaaggaggtgaacagtcagttgtacagcaaacttactgtgcgcggaaaagtacaggtaaaatcctccgacattcaagttggtgatctgattatcgtggagaagaaccagcggatcccctcggacatggtttttctgaggacctcagagaaggcaggctcatgtttcatccgcacggatcaattggacggagaaactgactggaaattgaaggtcgcggtatcttgcacacaacaactgccagctcttggtgatttgttctccataagcgcgtatgtttatgcccagaaaccccagatggacatccattcctttgaaggcacattcactcgtgaagattctgacccgcccatccacgaatctttgagcatagagaatactctttgggcttctacaattgtcgcttctggcaccgtcatcggcgtggtgatttatacaggaaaagagactcgatccgtgatgaacaccagcaatccgaaaaacaaggtggggctcctagacctcgagctgaaccgactgaccaaagccttatttctggccctggtcgcactctctattgttatggtgaccctccagggtttcgtagggccttggtaccgcaacctctttcgcttcctgctactgttctcctatatcattcctatctccctccgggtgaatttggatatgggaaaggctgtgtacggctggatgatgatgaaggacgagaacattccaggcacagtggtgcgcacgtccacaattcccgaggaactgggccgcctcgtgtatctgcttaccgacaaaactggcaccctgacccaaaacgagatgatttttaaacgattgcatttgggaactgttagttatggcgctgacacaatggacgaaattcaaagccacgtgcgggattcctattcccagatgcagtcgcaggcgggcggcaacaacaccggatccactccactccgcaaagcacagtccagcgcccctaaagtccggaaatcagtctcttcaaggatccacgaggctgtgaaagcaattgtgctctgccataatgtcacaccggtctacgagagtcgggccggggtgacagaggaaactgaatttgccgaggctgaccaggatttcagcgacgagaacaggacctatcaggcctcttcacccgatgaggtcgcccttgttcagtggactgagagcgtgggcttgaccctggtaagcagagatcttaccagcatgcaactgaagaccccctctggacaggtgctctctttttgcattctgcaactcttcccgttcacctccgagtccaaacggatgggcgtcattgtacgggacgaatcaacggccgagatcacattctatatgaagggcgccgacgtggccatgagcccaatcgtccagtataatgattggctggaggaagaatgtgggaacatggcccgggaggggctaaggaccttagtcgtggccaaaaaagctcttaccgaagaacagtatcaagacttcgagagcagatacactcaagcaaagctttcaatgcacgatcgatctttaaaagtggccgcagtggtggagtccctggagagggagatggaacttctgtgcctgactggcgtggaagatcaactccaggctgacgtcaggcccaccctcgagatgctgaggaacgcgggaattaaaatatggatgcttaccggtgacaaactcgagactgccacttgcatcgccaaatccagccatcttgtaagtcgtactcaagacatccatatatttcggcaggtaaccagcagaggagaggcccatttggagctcaatgccttcagacgaaagcacgattgcgcgctcgttatttccggcgacagtcttgaagtatgtctgaagtactatgagcacgagttcgtcgaattagcatgtcaatgtcccgccgtcgtgtgctgtagatgctcaccgacccagaaagccaggattgtcactctgctgcagcagcacaccgggcgacgcacgtgtgccatcggagatggcggcaacgatgtgtcaatgatccaggccgcggattgcggcattggcatcgagggaaaagagggcaaacaggcatctctcgctgccgatttctctatcacccagttcagacatatcgggcgcctgttaatggtgcatgggaggaatagctataaacgatcagctgcgctcgggcaatttgtaatgcatagaggcctcatcatcagcacgatgcaggccgtcttttcctctgttttctacttcgcatctgtgcccttgtatcagggattcttgatggttggctatgctacaatttacacgatgttccccgtgttcagtctggttcttgaccaggatgtgaagcctgaaatggccatgctgtatcccgagctctataaggatttgacaaagggaaggtcactgagttttaagaccttcctgatctgggtcctcatcagcatatatcagggcggcatcctgatgtacggcgctctcgtgctgtttgagagtgagtttgtgcacgttgtggctattagttttaccgctctcattctcactgagctattgatggtggcacttacagtgagaacatggcactggcttatggtcgtggcagagttcctgtcactgggctgttacgtgagttccttggctttcctgaatgagtacttcgggattgggagggttagtttcggcgccttcttggacgtagccttcatcaccacagtgacctttctttggaaggtcagcgccattactgttgtgtcctgcttgcctctgtatgtgctcaaataccttaggcggaagttgagtcctccaagctattgtaaactggcttcgtag

SEQ ID NO: 109025 - DNA, 408 bp, synthetic construct
  misc_feature 1..408: note = Description of Artificial Sequence: Synthetic coding sequence
  source 1..408: mol_type = other DNA
atgcaagccgtgttctctagcgtcttctactttgcctctgttccactctatcagggattcctgatggtcgggtacgcgacaatctataccatgtttcctgtcttttcgctcgtgctcgatcaggatgttaaaccggaaatggctatgttgtacccagagctgtacaaggaccttacaaagagccagcaagacggtcgatctaatcggcggcagcatgaaaggctgacttccggtacatcagggcacgtttgggaccccggaagcttcttccgcatacgagtgagtggaaagggtgctagaaacgccggtaagattcttgtgcttcagaatttgcctcacctgggttttaacaagtacctcccaagacgccacccccatgtctggggacccggggccctaagggtctag

SEQ ID NO: 109026 - DNA, 3411 bp, synthetic construct
  misc_feature 1..3411: note = Description of Artificial Sequence: Synthetic coding sequence
  source 1..3411: mol_type = other DNA
atggccgaccagattcctctgtatccagtaagaagtgctgcagctgctgccgctaaccgtaagagggccgcctattattcagccgcggggcccaggcccggtgcagaccgacactcacggtaccagctggaggatgaatcagcccacttggacgagatgccccttatgatgtccgaagaggggttcgagaatgaagaatctgattaccacactcttccccgggctagaattatgcagcgtaaaagggggctcgagtggtttgtttgtgacggttggaagtttctttgcacctcttgctgcgggtggctgataaacatctgtcggcgcaagaaggagctcaaagcacgaactgtgtggttgggatgtccggagaagtgcgaggagaaacatcctcgcaacagcatcaaaaaccagaaatacaatgtattcacctttattccaggcgtgctgtatgaacaattcaagttctttctaaatctgtacttcttggtgatctcatgctcgcagtttgttcccgcgctcaaaattggctatttgtatacctattgggctcccctcgggtttgttctggcagttaccatgactcgggaagctattgacgagtttcgtcgctttcagcgggataaggaagtcaatagccagctctacagcaaactaactgtgcggggaaaggtccaggtgaaatcgagcgatatccaggtgggagaccttattatcgtggaaaagaaccagcggatcccctccgatatggtgttcctgcgtacctccgaaaaggccggctcatgctttataagaaccgatcagctagatggggagacagattggaaactaaaagttgcagtttcttgcacacagcagcttcccgcactcggagacttgtttagcatcagtgcctatgtttacgcccaaaagccccagatggacattcattcattcgaagggacttttacccgggaggactctgacccccccatccatgagtccttgtccatcgaaaacactctgtgggcctctaccatcgtggcgtccggtaccgtcataggagtggtgatctatacgggaaaggagacaaggagtgtaatgaatacgagcaatccgaagaataaggtggggctgctggacctagagttaaatcgcctgacgaaggcgctctttcttgcactcgttgctctgtctatcgtcatggtaaccctgcaaggattcgtgggcccctggtaccggaacctgtttcggttcttgcttttattttcatacattataccaattagcctaagggtgaatctggacatgggaaaggccgtttatggctggatgatgatgaaagatgagaacattcccggcacagttgtaaggaccagcactattcctgaggagctagggcgcctggtctacttactcactgacaaaacaggaacactgacacagaacgagatgatctttaaaagacttcacctgggcactgtgtcctacggggccgacactatggatgagattcagtcgcacgtccgagattcatactcccagatgcagtcgcaggccggcggcaataatactggcagcacccccctgcggaaggctcaaagcagcgctccaaaggtgcgcaaaagcgtctcgtcacgcattcacgaggccgttaaagccatcgtactctgtcataatgtgacccccgtgtacgagtccagggctggggttacagaggagactgagttcgcagaagcagaccaggatttctcagatgagaacaggacctatcaagccagctcaccagatgaagtggcactggtgcagtggactgagagcgttggcctgacacttgtttctcgcgatcttacctcaatgcagctgaaaaccccttctggtcaggttctctccttttgcatcctccaattgtttccatttacttctgaaagcaagcgcatgggagtaatcgtgcgggatgaaagcacagccgagatcacattctatatgaaaggcgccgacgtggccatgagcccaattgtccagtacaacgattggcttgaagaggaatgcggaaacatggccagagaaggattgaggacactggtggtggccaagaaagcactgactgaggagcaataccaggactttgagagccgatacactcaggctaagctttctatgcacgaccgttctcttaaagtggccgccgtggtcgagtctttagaacgagaaatggaactgctgtgcctgactggagtggaggatcagctgcaggctgatgtgcgccccaccctagaaatgcttaggaatgcaggaatcaagatttggatgcttaccggagacaagctcgaaacagcaacgtgcatcgcaaaaagctcacacctggtttcgcggacccaggacatacacatctttcgccaagtgacctccagaggggaggcccatctggagcttaatgcctttcggagaaagcatgattgcgctctggtgatttcaggtgattctctggaagtgtgtctgaaatattacgagcacgagtttgtagaactggcttgtcagtgtccagctgttgtttgttgccggtgctcaccaacccagaaagcacgcatcgtcacattacttcagcagcataccggtcgtcggacctgcgctatcggagatgggggcaacgacgtctcgatgatccaggccgctgattgcgggattgggatcgaggggaaagagggcaaacaggcttctctggcagctgattttagtatcacccagttccgtcatattggtagactccttatggtacatggaaggaactcctacaagcgttctgccgccttgggacagttcgtcatgcacagggggctgataatctcaactatgcaggccgttttcagcagcgtcttctactttgcctctgtgcccctgtatcagggtttcctaatggtcggctacgcaaccatttataccatgttccctgtgttttccctggtcctagatcaagacgtgaagccagagatggctatgctgtatcctgagctgtataaggacctgaccaagggtaggtcactgtcgtttaaaacctttctgatttgggtgctcattagtatctaccagggagggatcctaatgtacggcgctcttgtgctcttcgaaagcgaattcgtccacgtcgtcgccattagcttcacagcactcatcctgaccgaattattaatggtggccctgactgtacgtacatggcactggttgatggtggtggctgaatttctgtctctgggatgttatgtcagctcactggctttccttaacgagtacttcgacgtagcttttattacaaccgtgactttcttgtggaaggtatctgctatcaccgtcgtcagttgcttgccgctgtacgtgctcaaatacctgagaaggaagctctccccgcctagctattgtaaactcgctagctag

SEQ ID NO: 109027 - DNA, 411 bp, synthetic construct
  misc_feature 1..411: note = Description of Artificial Sequence: Synthetic coding sequence
  source 1..411: mol_type = other DNA
atgcctctcatgatgtcagaggagggatttgaaaacgaagagtctgattatcataccctgccaagggcgagaatcatgcaaagaaagcggggcctggagtggtttgtgtgtgacggatggaagttcctgtgtacttcctgttgtgggtggctgataaatatctgccggcgcaagaaagaattgaaagcccggaccgtgtggctggggtgtccggaaaagtgtgaagagaaacatcctcgcaattccataaaaaatcagaagtataatgtttttacattcatcccgggggtcttgtacgagcagttcaaattctttctcaacctgtacttcctggtgatctcatgtagtcagtttgtgcctgccttgaaaattggttacttgtacacgtattgggcgcctcttatgacttag

SEQ ID NO: 109028 - DNA, 609 bp, synthetic construct
  misc_feature 1..609: note = Description of Artificial Sequence: Synthetic coding sequence
  source 1..609: mol_type = other DNA
atgcaacgcaagagggggcttgaatggtttgtatgcgacgggtggaaattcctgtgcacttcatgctgtgggtggcttatcaacatatgccgacggaaaaaagagttgaaggcgcgcactgtgtggttggggtgtccagagaaatgtgaagagaaacacccacgaaactctattaagaatcagaagtacaacgtctttacatttatcccgggcgtgctatacgaacaatttaagttctttctgaatctgtatttcctggtgatcagctgtagccagttcgtgccagcgcttaagatcgggtacctttatacctattgggctccactgggttttgtgctagcggtcaccatgaccagggaagcaatcgacgagttccggaggtttcagcgagataaagaagtaaactcacaactatactctaagttgactgtgcgaggaaaagtccaagtgaaatcctctgacattcaggtcggcgatctaatcatcgttgaaaaaaaccagaggatccccagcgatatggtgttcctgcgcacatcagaaaaggctgtgtccaataatctcgactactgcagtcatctggtgttgtttattttttgttttttaaactag

SEQ ID NO: 109029 - DNA, 1374 bp, synthetic construct
  misc_feature 1..1374: note = Description of Artificial Sequence: Synthetic coding sequence
  source 1..1374: mol_type = other DNA
atggctcgtgaggggcttagaactctggtggtagcgaagaaagcattgactgaggagcagtatcaagacttcgagagcaggtacacacaagcaaaactgtctatgcatgatcgtagcctaaaggtggctgctgtagtggagtcgctcgagcgcgaaatggaattactgtgtttgactggggttgaggaccaactacaagctgatgtgaggccaaccctagaaatgctgcggaacgcaggcattaaaatctggatgttaacgggagacaagctagagactgctacctgcatcgcaaaatcctcacatttagtctctagaactcaggacatacacattttccgccaagtcacatctaggggtgaagcacatctggaactgaacgctttcagaaggaagcatgattgcgctctggtaatctctggcgattccctcgaggtgtgccttaaatactacgagcacgagttcgtggagcttgcatgtcagtgccctgcagtggtgtgctgtaggtgcagccctacccagaaagcccgtatcgtcacactgctgcagcagcacaccggcaggcgtacttgtgcaattggggacggcgggaacgacgtgtctatgattcaggccgcagattgtggaattggcatagagggcaaggagggtaagcaagcatctcttgccgccgattttagcattacacagttccgacacataggacgcctgctaatggtccatggccggaattcatacaagcggtcagcagcactcggacagttcgtgatgcaccgcgggctgataattagcacgatgcaggcagtgttttcatcagtcttctacttcgccagcgtccctctgtaccaaggattcctcatggtgggatacgctactatttataccatgtttccagtgttttctctggtgctggatcaggacgttaaaccggaaatggccatgctgtatcccgaactgtataaggatctgaccaaggggagatcactctccttcaagaccttcctcatttgggtgctcattagcatataccaagggggcattctgatgtacggggcactcgtgctcttcgaaagcgagttcgtgcacgtggtcgctattagcttcacggccctgatcctcacagagctcctgatggtcgctctgactgtgagaacatggcactggcttatggtcgttgccgaatttctttcactgggctgttatgtcagctcactcgctttcctgaacgagtacttcgacgtagccttcataacgaccgtgacatttttgtggaaagtgtccgcaattactgtggtgtcatgcctgcctctatacgtcttaaagtatttacggaggaagctcagcccgccctcatattgtaaactagcgagttag

SEQ ID NO: 109030 - DNA, 4500 bp, synthetic construct
  misc_feature 1..4500: note = Description of Artificial Sequence: Synthetic coding sequence
  source 1..4500: mol_type = other DNA
atggagagggaaccagctggcactgaagaaccggggccgccagggagacgtagaaggcgtgaggggaggacgcgtacagtcagatccaacctcctgccaccccctggagccgaagaccccgccgctggtgcggcaaagggagagcggcgccgcagacgtgggtgtgcgcagcatctggcagacaatcggctgaaaacaaccaagtataccttgctgagcttcctcccaaaaaacctatttgaacagtttcaccgacctgcgaatgtatatttcgtctttatcgctctgttgaattttgtccccgcagtcaatgcattccaacctggtctcgcattggcccctgtgttgtttatcctggccatcacagcgttcagggatctgtgggaagactatagccggcatcgtagtgaccacaagattaaccatcttggttgcctggtcttcagcagagaggagaaaaagtacgttaatagattttggaaggaaattcacgtgggtgactttgtgcggcttcgctgcaacgagattttccctgcggacatattgctgttatcatcgtctgacccggatgggctttgccacattgagaccgctaacctggatggggagaccaaccttaagcggcgtcaagtagtccgtggcttctccgagctcgtttccgaattcaatcctttgacgttcacttctgtgattgaatgtgagaaacccaacaacgatctgtcaaggtttagagggtgcatcatccacgacaatggcaagaaggcaggcttgtataaagagaatctcctcctacgtggatgcacactgaggaatacagacgccgtggtcgggatagtgatttacgcaggacacgagaccaaggcccttttgaacaattcaggcccacgctataaaagatccaagctcgagcgacagatgaactgcgacgtgctctggtgcgtgttgctactggtgtgcatgtccttgttttctgcagttgggcacggcctgtggatttggcggtatcaggagaaaaaatcactattttatgttcctaaaagtgatggaagtagcctgtccccggtcactgccgcggtgtactccttcttgactatgataatagtgctgcaggtgttgatacccataagcctatacgtgtctatagagatcgtcaaggcctgtcaagtgtatttcattaaccaagacatgcagctgtatgatgaggagactgatagtcaacttcagtgccgcgctcttaatatcactgaggacctcggccaaattcagtatattttcagcgacaaaaccggaaccttaacggagaacaaaatggtctttagaaggtgcactgtttcgggggtggaatatagccatgacgccaacgcacaacggcttgctcggtatcaggaagcggactctgaggaggaagaggtggtgcctcggggcggatcagtatcccagcgtggttccatcgggtcccaccaatctgttagggtcgtacaccggacccagtccacaaagagccaccggaggaccggatctcgggctgaagcaaagagagccagcatgctgtcaaagcacactgcattctcgtccccaatggagaaagacataacacctgacccgaaacttctcgagaaagtgagcgaatgcgacaaatcactggctgtagcgcgccatcaggagcatctactggctcacctgagtccggagttgtcagacgtgtttgacttctttatcgccctcaccatttgcaatactgtagttgtgacctcccccgaccaacctcgtaccaaggttagggtccgctttgaactgaaatcaccggtgaagaccattgaggatttcctgcgtagatttacaccctcgtgccttaccagcggctgcagctctatcggctccctcgccgccaacaaaagctctcacaagctagggtccagcttcccgtcaacaccatctagtgatgggatgcttctccgacttgaggagagattgggacaaccgacgagtgccatagcgtcaaatgggtattctagccaggccgacaattgggcaagcgagctagcccaggaacaggagtctgagcgggagcttagatacgaagcggaaagcccagacgaggcggcacttgtgtacgcagctcgggcgtacaactgtgtcttggtggaacgcttacatgatcaggtgtcggtggagcttccacacttgggcaggcttacattcgaattgctgcatactctgggcttcgactctgtgaggaaaaggatgtccgtcgtcataagacaccccctcacagacgaaattaacgtttacaccaaaggcgccgacagcgtcgtcatggatttgctccagccatgctctagcgtggacgcccgggggcggcatcagaagaagatcagaagcaaaacccagaactatctgaacgtatatgccgccgagggattacgcacactgtgtatagccaaaagagtactgagtaaagaagaatatgcctgctggctgcaatcccacctcgaagccgaatcgtccctcgaaaactccgaggaattattgtttcaatctgctatccgacttgagactaatttgcatttgctaggcgctaccgggattgaggaccggcttcaggacggggttccagaaaccatttcaaagttaagacaggccgggctgcagatttgggtactgacaggagacaagcaggagaccgctgtcaacatagcatacgcctgtaagttgctcgaccatgatgaggaggtcattacactcaatgcgacctcccaggaggcctgtgcagcattgctggatcaatgcttgtgttacgttcagtccaggggcttgcaacgtgctcccgaaaagacaaagggcaaagtctctatgcgcttttcttctctatgtccgccgagcacatccactgctagcgggaggcggcctagcctcgtgattgacggaaggtcacttgcttacgcattggaaaagaatctggaagataaattcttgttcctcgcgaaacagtgtcggtccgtgctatgttgccgctcgacgcccttacaaaaatctatggttgtgaaactggtgcgttcgaagctcaaagcaatgacactggccattggtgacggggccaatgatgtttctatgattcaggtggccgacgtgggggtcggcatctcaggacaggaaggcatgcaagctgttatggccagcgatttcgctgtgccaaagttccgctacctggagaggctgctgatcctgcacgggcattggtgctacagtcgtctggcaaatatggtgttgtattttttctataagaacaccatgttcgtcggcctgctgttctggttccaatttttttgtggtttcagcgctagcactatgattgaccagtggtatctgatattctttaatctcctgttttcctccctcccccccttagtcaccggagtactggacagggatgttcccgccaatgtactgctgacaaatcctcaactgtacaaatctggacagaacatggaagagtaccgaccacggacattttggttcaacatggccgatgctgcttttcaatctcttgtttgcttttctataccttatctggcctattacgactctaatgtcgatctatttacgtggggaacgcctatcgtgacaatcgccctcctgacgtttcttctgcatctgggcatcgagactaagacatggacctggctgaattggatcacatgcggtttttcagtactgctcttttttacggtggccttaatctataatgcgagctgcgccacgtgctatccacccagtaacccgtattggacgatgcaggcactgttgggcgatccagtcttttatctgacttgtctgatgacccccgtcgccgctttactgccaagactctttttcaggagtctgcagggccgtgtgtttcctactcagcttcagctggcacggcagttgaccaggaagtccccccggcgctgcagcgctcctaaagagaccttcgctcaggggcgtctgcctaaagatagtggaaccgaacacagttctggccggacggtaaagacatcagtaccgttgtctcaaccttcctggcatacccagcaaccggtgtgctctcttgaagcatcaggggagccctccacagtggacatgagtatgccggtccgcgaacatactttactcgagggattatctgcgccagctcccatgtcttctgccccgggagaagctgtgcttcgaagccccggtgggtgcccggaagagtcaaaggtccgcgccgccagtacagggagggtaacacccttgtcctctttgttttccctaccgacattcagccttttgaactggatctcctcgtggtccctggtcagccgactcggctccgtcctgcagttttcaagaaccgaacagttagccgacggacaggccgggcgcgggctgcccgtccaacctcactccgggcggagtgggctccaaggacccgatcaccgactgttgattggcgccagctctcgtcgttctcagtag

SEQ ID NO: 109031 - DNA, 3405 bp, synthetic construct
  misc_feature 1..3405: note = Description of Artificial Sequence: Synthetic coding sequence
  source 1..3405: mol_type = other DNA
atggattgttcccttgttaggactctagtgcatcgttactgtgccggggaggagaactgggttgacagtaggaccatttacgtcgggcatagggaacctccacctggggctgaagcctacattccgcagaggtatcctgataaccgcatcgtgagctctaagtatacattttggaacttcattcccaaaaacctgttcgagcagtttaggagagtggctaatttctactttctgataatcttcttagtgcaacttattatcgatactcccacatccccggtaacttctgggctacctctgttttttgtcattacggtcaccgctattaagcaaggttatgaagactggctaaggcacaaggctgacaatgcaatgaatcaatgtcccgtgcacttcatccagcatggcaagctcgtcaggaagcagtcaagaaagttgcgtgttggcgatatcgtcatggtgaaggaggatgaaaccttcccttgcgatttgatcttcctgtccagcaatcggggcgacgggacatgtcacgtcactactgctagcctggatggcgaatcctcccataagacacattacgccgtgcaggatactaagggttttcacaccgaagaagacatcggggggcttcatgccacaatagagtgtgagcagccccagccagacctttacaagttcgtcggccgtataaatgtctactctgacctgaacgacccagtggtaaggcctctcggaagtgagaatcttctgctacggggcgctacattgaaaaatacagagaaaattttcggtgtggctatctacaccggaatggagacaaaaatggctctgaattaccaaagcaaatcccagaaacggtccgcagtggaaaagtctatgaacgcctttttaatcgtctatctatgtatcctcatctctaaggcccttattaatacagtgctcaaatatatgtggcagagcgagcccttcagggatgaaccctggtataaccaaaagaccgagagcgagcgccaacgaaacctgttcctgaaagccttcacggatttcctcgctttcatggtcctgttcaactatattatcccagtgtccatgtacgtgaccgtggaaatgcagaaattcctggggtcatacttcatcacctgggacgaggacatgtttgacgaggagaccggcgagggtcctttagtgaacacttctgatttgaatgaggagctcggacaggtagagtatatcttcacagacaagacgggaaccctaaccgaaaataatatggaatttaaggagtgttgtatcgagggccacgtctacgtgccacacgtaatctgtaacggtcaggttctgccagaatcaagtggtattgatatgatagatagcagccctagtgtgaatgggagggagcgtgaggagcttttttttcgtgccttgtgcttgtgccacacagtccaggtaaaggacgatgacagcgttgatggtcctcgcaagagcccagacgggggtaagagctgtgtgtatatctcgagctcacccgacgaggtagcccttgtggaaggcgtgcagcgccttggatttacgtatttacgattgaaggataactacatggagatactcaatcgagaaaatcatatcgaacggttcgagctgctggagatcctctcttttgactctgtgagacggaggatgagcgtaattgtcaagagcgccaccggcgaaatttacttgttttgtaagggcgctgactcctcaatctttccgcgcgtgattgagggcaaagtggatcaaatccgggctcgggtggagaggaacgctgtggagggcctacggaccctttgtgtcgcctataagagactcattcaggaagagtatgaaggcatttgcaaactcttgcaggcagctaaagtcgccctgcaggaccgagagaaaaagctcgctgaagcatatgaacagatagagaaagatctgacgttacttggggctacagcggtggaggacagactgcaggagaaagcagccgatacgatagaggccctgcagaaagctggaataaaggtgtgggtgctgacgggcgataaaatggagaccgccgcagccacttgctacgcctgcaaactgtttcgacgcaacacacagctactggaattgaccaccaaacggattgaggaacagtccttgcacgacgtactgtttgagttatccaagacagtgctgcgtcactctggcagtctgacacgggacaacttgtcggggctgtctgccgatatgcaggattacggcctcatcatcgatggcgccgccctgtccctgatcatgaaacccagagaggacgggtcctcaggcaactacagggagctgtttcttgaaatctgtaggtcttgcagcgccgttttatgctgtcggatggcccctctccagaaggctcagattgtgaagctgataaaattttctaaggagcatcccatcacactggcgatcggggacggagccaacgacgtaagtatgatcctcgaggcgcatgtaggtataggcgtaatcggtaaagagggccgccaggcggcacgaaattccgattacgctattcctaaatttaaacacctgaaaaagatgctgttggtgcacgggcacttctattacattcggatttcagaactggtgcaatatttcttttacaaaaacgtgtgcttcatctttccgcagttcctgtatcagtttttctgcggattctcccagcaaaccctctatgacaccgcttacctgactttgtataacattagtttcaccagcctccccatcctcctgtactctctcatggagcagcacgtgggaatcgatgtcctgaagcgcgatcccaccttgtatagggacgtggcaaaaaatgccctgttgaggtggagagtgttcatttattggaccttgcttgggctgtttgacgcactagtgttttttttcggcgcttactttgtcttcgagaacacaaccgtgacaagcaatggccagatatttggcaactggactttcggaacattggtctttaccgttatggtctttactgtgactctcaagcttgccctggatacccactactggacctggattaaccactttgttatctggggaagcctactgttctacgtggtattttcgctcctctgggggggtgtcatctggccattcttgaactaccagcggatgtattacgtttttatccagatgttatccagcgggcctgcttggctggctatcgtgttgttggtgactatatcactgctgcccgatgtcttgaaaaaggtgctctgcagacaactttggcccactgccaccgagagagtgcaaactaaaagccaatgcctgtccgtggagcagtcaacaatcttcatgttgtctcagacctcctcttccctcagcttttag

SEQ ID NO: 109032 - DNA, 3576 bp, synthetic construct
  misc_feature 1..3576: note = Description of Artificial Sequence: Synthetic coding sequence
  source 1..3576: mol_type = other DNA
atggattgcagtctggtgcggaccctggtgcatcgttactgtgctggcgaagagaactgggtagactcccgaactatttacgtgggccatcgcgaaccccctcctggggcagaggcctacatacctcagcgctacccagataaccgaattgtaagctcaaaatacaccttttggaactttatccctaaaaatctctttgagcagttcagacgcgtagccaacttttatttcttgatcatttttttagtgcagctgattattgacacaccaacaagcccagtaactagcgggctgccattgttctttgtgatcaccgtcacagccattaaacagggatacgaggactggcttcgtcataaagcagataacgccatgaaccagtgccccgtgcacttcatccagcatggaaaacttgtgcggaaacagtccaggaaactcagggtcggggatatcgtcatggtgaaagaggacgaaacatttccctgtgatctgatctttctgagctccaatcgcggagacggtacctgtcacgtaactacagcctcactggacggtgaaagcagccataaaactcactacgccgtgcaagatactaagggttttcacactgaggaagatatcgggggcctgcacgccactattgaatgcgaacaaccacagcccgatttatataaattcgtgggtaggatcaacgtttatagcgatctgaacgatccagttgtgagaccgcttggttctgaaaatttgctgctgcgcggcgccactctgaagaatacggagaaaattttcggagtggccatatacacagggatggaaacgaaaatggctcttaactaccagtcaaagagccagaagcggagtgctgtcgagaagtccatgaacgcttttctgattgtatacctttgcattctgatctcaaaggcacttatcaacacagttctgaagtatatgtggcaaagtgagccttttcgggatgagccctggtataatcagaagaccgagtcagagcgccagcgaaacctcttcctgaaggcctttactgactttctggccttcatggtgctgttcaattacatcattccggtcagtatgtacgtcaccgtggagatgcaaaagtttcttgggtcgtacttcattacatgggatgaggacatgtttgacgaggagacaggcgagggaccgcttgtgaatacatccgacctaaacgaagaactggggcaggtggagtatattttcacagataaaaccgggaccctcaccgaaaataatatggagttcaaagagtgttgcatcgaagggcacgtctacgtgccccacgtcatttgcaatgggcaggtcctgcccgagtccagcggcattgacatgattgattccagtcctagcgtcaacggccgcgaacgggaagaactgtttttccgcgccctgtgtctgtgccatacggttcaagtgaaggacgatgattccgttgacggcccccgaaaatcccctgatggcggcaagtcatgcgtgtacatttcaagttctcccgacgaggtggctctagtggagggcgtacagcgcctgggattcacatacctgcggttgaaggacaattacatggagatccttaatcgagagaatcatatagaacgttttgaactgctggagattctcagctttgacagcgtgcggcggagaatgagcgttattgtgaaatcagcgaccggtgagatctacctattttgtaagggcgctgactcctccatttttcctagagttatcgaaggtaaagttgaccagataagagcccgcgtcgagagaaatgcagtggagggcctgagaaccttgtgcgtagcctacaagaggctgatccaggaagagtacgaagggatctgtaagctgctccaggccgctaaggtggctctccaggaccgggaaaaaaaactggcagaagcttatgaacaaatcgagaaggacctgacactgctcggggcaaccgccgtggaggaccggctgcaggagaaggccgctgacaccatcgaggcccttcaaaaagctgggattaaagtttgggtactcacaggggacaagatggagaccgctgcagccacatgctatgcgtgcaaactgttcaggagaaatactcaattactggaactgactacaaagcgaatcgaggaacagagcctgcatgacgtgctttttgagctgagtaagacagttctgcgccactcaggcagcctgactagagacaacctgtcagggctttcagctgatatgcaggactacggacttataatcgacggcgccgctttgagtctcatcatgaaaccacgggaggacgggtctagcggcaactatagggaactcttcctagagatctgtagatcctgctccgctgtgttatgttgcagaatggcccctctccagaaggctcagatcgtgaagctgattaagttttctaaggaacatcctattaccctggctattggcgacggcgccaatgatgtaagcatgatcctcgaagcgcacgtggggattggggtgatcggcaaggaggggcgccaggcagccaggaatagtgactatgccatcccgaagtttaaacatctgaaaaaaatgctcttagtccacgggcacttctattacatcaggatttctgagctggtacagtatttcttctataagaacgtgtgttttatcttcccgcagttcctctatcaattcttttgcggattctcacaacagacactgtacgataccgcctatctgaccctgtataatatctcgttcaccagccttcccatactactgtacagcctgatggaacaacacgttggcatcgacgtccttaagcgagatccaaccctctaccgggacgtcgccaaaaatgccctgctgcgatggagagtgtttatctactggaccctgctcggactctttgatgcccttgttttcttctttggtgcatatttcgtcttcgagaacaccaccgtgacttccaatggacagatattcggtaactggacatttggaaccctcgtcttcaccgtgatggtgtttacagtgacgctgaaactcgcactcgatactcactactggacctggatcaaccatttcgtcatttggggaagtctgttgttttatgtggtgtttagtttgctgtggggaggcgttatctggccgttccttaattatcagcgcatgtattacgtctttatccaaatgttgtcttcagggccagcttggttagccatcgttctgttggtcacaattagtctcctaccagatgtgctgaaaaaggtgctgtgtagacagctttggcctaccgccaccgagagggtgcaaaatggctgcgctcagcccagagatcgtgattctgagttcacaccactggcatcgctgcagagccctggctaccagtctacctgcccatccgcggcctggtactcttcacatagccagcaggtgactctggctgcctggaaggaaaaggtgtccactgaaccaccaccaatcctgggtggttcccatcaccactgcagctccattccgtcccattcatgtccacgctcccgcgtcggtatgttagtgtag

SEQ ID NO: 109033 - DNA, 3405 bp, synthetic construct
  misc_feature 1..3405: note = Description of Artificial Sequence: Synthetic coding sequence
  source 1..3405: mol_type = other DNA
atggactgcagcctggtgcgcaccctggtccatagatactgcgcaggcgaggaaaactgggtcgacagccgaacaatctacgttgggcacagggaaccgccccccggagccgaggcctacattccccagcggtaccccgacaacaggatcgtaagctctaaatacacattctggaatttcatcccaaagaatctattcgaacagttcagacgcgttgcaaacttttacttccttatcatcttcttggttcagctcataattgacacgcctaccagccctgttacttctggactgcccttattttttgttatcaccgtaacagccattaagcagggatacgaggactggttgaggcacaaggctgataatgcaatgaaccagtgccctgtccacttcatccagcacggtaagctggttaggaagcagagtcggaaactccgagtcggcgacatcgtaatggttaaggaggacgagacatttccttgtgatctaatattcctgagcagcaataggggcgacggcacctgtcacgtgacaacagcctctctcgacggagagtcatctcataaaacccactatgcagtacaagacaccaaaggatttcatactgaggaagacatcggcggattgcatgccactattgagtgtgaacagccacagcctgatctgtacaagtttgtgggccgcatcaacgtatacagtgatctaaacgaccctgtcgtccgcccgctgggcagcgagaacctactcctcagaggcgccacgctcaaaaacacggagaaaattttcggcgtagccatctacacaggaatggagaccaagatggcactgaattaccaaagtaaatcacagaagcggtctgccgttgagaaatccatgaatgctttcttgatcgtctatctatgtatcctaatctcgaaggccctgattaatacagtgcttaagtatatgtggcagagtgagcctttccgggacgagccttggtataaccagaagacagaaagtgaacggcaacgaaatttgtttctgaaggcttttactgatttcctggctttcatggttctatttaactatatcatcccggtatccatgtacgtgactgtggagatgcaaaaatttctcgggtcctacttcatcacctgggatgaagacatgtttgatgaagagacaggagaggggccactggtgaatacttctgatctcaacgaggaattggggcaggtggagtacatttttactgacaagactggcacactgacggagaacaacatggaattcaaagaatgctgcatcgaaggtcatgtgtacgtgcctcacgtgatttgtaacggccaagtacttccggagagctcgggaatcgatatgatcgattcaagcccaagtgttaacggaagggagcgggaggaattgttttttcgcgccctctgcctgtgccacacggtgcaagtgaaggatgatgactccgtagacgggccccgcaagtccccagatgggggaaagagctgcgtgtatatatccagctctccagacgaggtggctctggtggagggtgtacagcggttggggttcacttaccttcggttgaaagacaattacatggagattcttaaccgcgagaaccacattgagcgctttgaattgctggagatcctgagcttcgacagtgtacgacgccgaatgtctgtgatcgtgaagtctgccacaggcgagatttatttgttctgcaaaggagcggacagttcaatctttccgagggtgattgaaggcaaagtcgatcaaattcgggctcgcgtcgaaagaaacgcggtggaaggcctgaggacattgtgcgtggcctacaagcggctgatccaagaggagtatgagggcatctgcaagctactgcaagccgctaaagttgctttacaggaccgcgagaaaaaactggctgaagcatacgaacaaatcgagaaggacctaacactgcttggggctaccgcagtcgaagacagactgcaagagaaagctgccgataccatcgaggctctgcagaaagctggcattaaagtgtgggtgctcaccggggacaagatggagaccgcggctgctacgtgttacgcctgtaaactttttcgtagaaatacccaattgctagagttaactacgaaacgtatagaagaacagtccctgcacgatgtacttttcgaactgagcaaaaccgtgctgaggcattctgggagcctgactcgggacaacctgtctggtctctccgcagatatgcaggactacggactgattatcgacggtgcggccttatcattaattatgaaacccagggaagacggctcatctggtaactatcgggaactgtttctggaaatttgccgatcctgctccgccgtcctgtgctgccgcatggcccctcttcaaaaggctcagattgtgaaactgatcaaattctctaaagaacacccaatcacattggcgattggggatggggcaaatgatgtttccatgatcctggaggcacacgtgggcatcggcgtaataggcaaggaaggcaggcaggctgccagaaattctgactatgctatacctaagtttaagcatcttaagaaaatgctgctggtgcacgggcatttctactatataagaatctccgaactggttcaatactttttttacaaaaatgtctgttttatctttccgcagttcctttatcaattcttctgtggatttagtcagcagactctttacgatactgcgtaccttactctctataacatctctttcacctctctgccaatcctgctgtatagtctaatggagcaacatgtgggtattgacgttctaaagcgggaccctacattgtatcgcgacgttgccaagaatgctctgctgaggtggagggtgttcatttactggacactccttgggctcttcgatgcactggtgtttttttttggagcgtattttgtcttcgagaacactacagtgacttcaaacggccaaatttttgggaactggacttttggcaccctggtgtttacggtcatggtgtttacagttactctcaagcttgcactagacacccactactggacttggatcaatcattttgtgatctggggttccttgctgttttacgtcgtgttttccctgctgtggggtggcgttatttggccctttcttaactaccagagaatgtactacgtgttcatacaaatgttaagtagcggacctgcctggctggcaatcgtgctgctggtcaccattagccttctgcccgacgtgctgaagaaagttttgtgtaggcaactgtggccaacagctacagaaagagtccagacaaaatcgcagtgcctgtctgtggagcaaagcactatctttatgctgtcacagacctcatcgtcgctgagcttctag

SEQ ID NO: 109034 - DNA, 2808 bp, synthetic construct
  misc_feature 1..2808: note = Description of Artificial Sequence: Synthetic coding sequence
  source 1..2808: mol_type = other DNA
tagtatgtcggccaccgtgagccaccccctggcgcagaagcatacatcccacaacgctaccctgacaaccgtatcgtgtcatctaagtacaccttctggaacttcattcctaaaaacctcttcgagcaatttcgccgcgtcgctaacttttactttctcattatttttctggtgcaattgataatagacacgcccacctcacccgttacctctggactgcctctgtttttcgtgatcaccgtgaccgcaatcaagcagggttatgaggattggttgcgccacaaagccgacaacgcaatgaatcagtgcccagttcatttcatccagcacggcaaacttgtgagaaaacagagcaggaagctacgggtgggcgacattgtaatggtcaaagaggatgagacctttccatgtgacctcatcttcctcagtagcaaccgcggagatggcacatgtcacgttactaccgcctccctcgatggagagtcaagtcacaaaacacattatgccgttcaggataccaagggattccacacagaagaagatataggcggcctgcacgccactatcgagtgtgaacagccccagcccgacctgtacaagtttgttgggaggattaacgtgtactcagacctaaacgatccagtggtgagacccctcggatccgaaaatctgctgctgcggggagctaccttgaaaaacactgagaagatctttggtgtcgcgatatacactgggatggagactaagatggctctaaattaccagtctaagtcccagaagaggtctgccgtcgagaagagcatgaatgcatttctaattgtttatctgtgtatactgatctctaaggccctgatcaacacggtgctcaagtacatgtggcagtcggagccattccgggatgaaccttggtacaatcagaaaactgaatctgagcggcagagaaatctgttcctcaaggcgtttacagatttcttggcattcatggtcctcttcaattacatcattcctgtgtccatgtacgtgaccgtggaaatgcagaaattcctgggtagctatttcatcacttgggatgaggacatgtttgacgaggagactggtgaaggccccctcgtcaatactagcgaccttaacgaggagctcggccaagtggaatacatctttacagataaaactggtaccctgactgaaaataatatggaattcaaggaatgttgtatcgagggacacgtatacgttcctcatgttatttgtaacggacaagtcctgccggaaagctccggcattgatatgatagattcctccccttccgtgaatggtagggagcgcgaggagttgttctttagggctctgtgcctttgccacaccgtccaggtgaaagatgatgacagcgtagatggccccagaaagtcccccgatggggggaaatcttgcgtctacatttccagcagtccagacgaggtggctttggtggaaggcgttcagaggctgggattcacctatctgcgcctgaaagacaactacatggagatcctgaaccgagaaaaccatatagagcgattcgaactgctggagattctctccttcgactccgtgcgcagaagaatgagtgtgatcgtcaaaagtgccactggggaaatctatctgttttgcaagggcgcagatagttccatctttccacgcgtgatcgaggggaaggtcgatcagatccgcgcacgagtggaaaggaatgctgtggaggggcttagaaccctgtgtgttgcctataagcgtctcatacaggaggaatatgagggaatctgtaaattgcttcaggccgccaaggtcgccctgcaagaccgcgaaaagaagttggcagaagcctatgagcaaatcgagaaggatctcaccctgctgggggctaccgccgtggaggatcgccttcaggagaaggctgccgataccatagaagcattacagaaggctggcattaaagtgtgggtcttaaccggggacaaaatggagacggccgccgcgacatgctacgcatgtaaactatttcgtaggaatactcagctactggagcttaccaccaaacggatcgaagagcagagtttgcacgacgttctctttgagctgtccaagaccgtgctcaggcactccggctccttaacgcgagacaacctgtccggtctctccgcagacatgcaggattacggactgatcattgatggagcagctctaagcctgattatgaagcccagggaagatggttcgagcggcaattatagagagctgttcttggaaatatgccggtcctgtagtgcagtcctatgttgcagaatggccccactgcagaaagcccaaatcgtgaagctgattaaatttagcaaagaacatcccattacgctggccatcggggatggagccaacgatgtgtcaatgatacttgaggcccatgtgggcattggggtgatcggtaaggagggtaggcaggctgcccgcaactccgactatgccattccaaaattcaaacatctgaaaaaaatgctgctagttcatggccacttctactacattcggatctcggagttagtccagtattttttctataagaacgtctgttttatctttcctcagttcctgtaccaattcttttgcggattttctcagcagaccctgtacgatactgcatatctcactctttataatatcagcttcacctctctgcccatcctcttgtactcccttatggaacaacacgtagggatcgatgtgctgaaacgagaccctactctgtacagataccatccgcccaatagtttgtcctag

SEQ ID NO: 109035 - DNA, 1119 bp, synthetic construct
  misc_feature 1..1119: note = Description of Artificial Sequence: Synthetic coding sequence
  source 1..1119: mol_type = other DNA
atgtccgttattgtgaaatctgcaacaggggagatttacctgttctgcaaaggagcagacagctcgatcttcccccgtgtgatagaaggcaaggtggaccagattagggcgagggtcgaacgaaatgccgtggagggcctccggaccctttgtgtggcctacaaaaggctgattcaggaagaatacgaagggatatgtaaattactccaggcagctaaggtggcactgcaagatcgcgaaaagaaactggctgaagcatacgagcagatcgaaaaggacctgaccctgctaggcgcgaccgccgtggaggacagactgcaggaaaaagcagcagataccattgaagcattgcagaaggccggcattaaggtttgggttctgaccggggacaaaatggaaaccgcggctgccacatgctacgcctgcaaactttttagacgtaacacacaactcctggaactcacaaccaaaaggatcgaggaacagtcgttgcacgatgttctctttgagctgtctaaaaccgtgctacgtcattccggatcactgactcgcgacaacctgtctggcctgtcggcagacatgcaggactacgggttgataattgacggcgcagccctctcattgattatgaaaccaagggaggatggctcctccggtaactatcgagagctctttcttgaaatctgccggtcatgctcagctgtcctctgttgtcgcatggctccactgcagaaagcgcagattgtaaagcttatcaagttcagtaaggaacaccccatcaccctggcgattggagacggcgctaacgatgtatcaatgatcctggaagcccacgtaggaatcggcgtaataggcaaagagggcaggcaggcagctaggaacagtgattacgccatcccaaaatttaaacatctgaaaaagatgctactcgtccacggacacttctactacatccggatatcagaactcgtgcagtattttttctacaaaaacgtgtgctttatctttccccaatttttgtaccagttcttctgtggcttttctcagcaaggaaggcggcaggagtgtccagccgctttggccagggtccacttgctggatgcaccaggaaccgtgtag

SEQ ID NO: 109036 - DNA, 1059 bp, synthetic construct
  misc_feature 1..1059: note = Description of Artificial Sequence: Synthetic coding sequence
  source 1..1059: mol_type = other DNA
taatcaatcttcccccgcgtcattgagggtaaggtagatcagattcgagcccgggtcgaaagaaacgccgtggagggactgaggactctttgtgtggcctataagcggcttatccaggaagagtatgaagggatctgcaaactcctgcaagcagccaaagtggcgctgcaagatagagagaaaaaacttgcggaagcttacgagcagatagagaaggaccttactctcctgggggctacagcggtcgaagaccgtttacaagaaaaggcggccgacaccatagaagcgctccagaaggctgggattaaagtatgggtactcaccggggataaaatggaaaccgcagccgctacctgttatgcctgcaagctgttccgtaggaacacgcagctgctggagcttacgacaaaacggatcgaggagcaatcactgcacgatgtcttgttcgagctgagcaaaacagtgcttcggcacagtgggagtctgaccagggacaacttatcagggctgtccgccgatatgcaggactatggtctcattattgatggcgctgctctctctctcattatgaagcctagagaggatggctcctcagggaactacagggagctcttcctggaaatctgccggagttgctctgcagtgctttgttgcagaatggcgccactacaaaaggcgcagatcgtaaagctgataaaattctcaaaagagcaccccattactctagccattggggatggcgctaacgatgtgtcaatgatattggaagcacacgtcggcataggagttattgggaaagagggacgccaagccgccaggaattccgattatgccatcccaaaattcaaacaccttaagaagatgttactggtgcacggacacttttactacatcaggatcagtgagctggtgcaatatttcttctacaaaaacgtctgtttcatattccctcaattcctataccagttcttctgtggattctctcagcagggtcggcgccaagaatgcccggcagctctggctcgagtgcatctcctggacgctcccgggactgtgtag

SEQ ID NO: 109037 - DNA, 3405 bp, synthetic construct
  misc_feature 1..3405: note = Description of Artificial Sequence: Synthetic coding sequence
  source 1..3405: mol_type = other DNA
atggactgcagcttagtacgcacactggtccacaggtactgtgctggcgaagagaattgggttgactcacggaccatttacgtcggccaccgcgaaccgcctcccggcgccgaggcttacatcccccagagataccctgataacagaatcgttagctcgaagtacactttttggaatttcatccccaagaacctgttcgagcagttccgacgggtcgccaacttctactttctcatcatctttttagttcagttgatcatagataccccaacatcacctgtcacatctggcctgccactcttttttgtcattacagtgactgcaatcaaacaggggtacgaagattggctgagacacaaggctgacaatgctatgaatcagtgcccggtccacttcattcagcacgggaaactggtccgcaagcagtcccggaagctccgcgtgggggacatcgtcatggtgaaggaagatgagacatttccctgtgacttgatctttctctccagcaaccgaggcgacgggacttgtcacgttacgacagcttcactagacggggagtcaagccacaagacacactacgctgtccaagacacgaaggggtttcacacggaagaggacattggaggactccatgccaccatcgaatgcgagcagccccagccagacctctataagtttgtgggacgcatcaacgtttacagcgacctgaatgaccctgtcgtgagaccgcttggctcggagaacctgctgttgcggggcgccacgttaaaaaacactgagaagatattcggtgtggctatctacaccggtatggagacaaaaatggccctgaattatcagtccaagagccagaaacgcagcgcggtggaaaagtctatgaatgcttttctgatagtatatttatgtattctgatttctaaggctctgatcaatacggtgctcaaatatatgtggcagtcagaacccttcagagacgagccctggtataaccagaagactgagagtgagcgccagcggaacttattcttgaaggccttcacagatttcctggccttcatggtgctttttaattatattattccagtttcaatgtacgtgacagtcgaaatgcagaaatttttaggcagctactttatcacttgggatgaggatatgtttgacgaggaaaccggagaaggacctcttgtcaataccagcgatctgaatgaagaactcggccaggtggagtatatttttacggacaaaaccggcacccttactgagaacaacatggaattcaaggaatgctgcatcgaggggcacgtatacgtgccccacgttatctgtaacggccaggtgttacctgagagcagtggtatcgatatgatcgatagttctccatccgttaacggacgtgaacgggaggaattgttctttagagccttgtgcttatgtcacactgttcaagtgaaggacgatgactccgtcgatggacccagaaaaagccctgacggcggaaaatcatgtgtctacatatcatcgagccccgacgaagtcgcactggttgaaggggttcaacggttgggctttacctatcttaggcttaaagacaattacatggaaattttgaatcgagaaaatcacatcgaacggttcgaattactggaaatcctgagcttcgactccgtgcgacggcggatgtccgtcatcgtcaagagtgccactggcgagatttatctcttctgcaagggggcagactccagcatttttccgagagtgattgagggcaaagtggatcagatacgtgcccgcgtcgagagaaatgctgttgagggtcttagaacactctgtgtggcctacaagaggctaattcaagaggaatatgaaggaatctgcaagttgttgcaggcagccaaggtggccctgcaggaccgcgaaaagaaactggccgaggcttatgaacagattgagaaggacctaactctgcttggggctacagctgtggaggaccgattgcaggagaaggcggcagacacgattgaggccctccagaaagcaggaatcaaggtctgggtcctgactggagataagatggagaccgccgccgcaacctgctatgcctgtaagctgttccgaagaaacacccagcttcttgaactgacaacgaaacgaattgaagagcagagtctgcacgacgtgctcttcgagctctccaaaaccgtgttgaggcacagcggctccctgaccagggacaatctgagcggcttgtctgcagacatgcaggattacgggctaataatagacggagccgccctttcactgattatgaagccacgcgaggatggctcatccggaaattatagagagctgtttttagagatttgcaggtcctgctccgccgtcttatgttgccgtatggcgccactccagaaagcacaaattgtgaagcttattaagttcagcaaagagcatccaataacactggctatcggggacggcgcaaatgacgtcagcatgatactcgaggcccatgtcggaattggtgttatcgggaaggaggggcggcaggccgcccgcaactctgactacgcgattccaaagtttaagcacttaaagaaaatgttactggtccatggacacttctattatatcaggatctctgagttagtgcagtacttcttttataagaatgtatgcttcatattccctcaatttctttatcagttcttttgtggcttttctcagcagaccctatatgacactgcctacctgacactgtacaatatctcctttaccagtcttccaatcttgctttactctctgatggaacagcatgtgggtattgatgtcctgaagcgggacccaaccctttatagggacgtggcgaagaatgccctactacggtggcgggtctttatctactggactttactgggactgtttgatgcactcgttttctttttcggcgcgtacttcgtcttcgaaaatacaacagttacaagtaatggacaaattttcggcaactggacttttggcacactagtctttactgttatggttttcactgtgacacttaaattggctctggacacgcactactggacttggattaaccacttcgtaatttgggggtccctcctgttttatgtggtgttcagcctactttggggtggggttatctggccattcctcaattaccaaagaatgtattatgtatttattcagatgctatcctcgggccccgcttggttggcaatagtgctcctcgtgacaattagcctcctgccagacgttctgaaaaaggtgctctgcagacagctgtggcctactgccactgaacgggtccaaactaagtcccagtgcctgtcagtcgagcagtctactatatttatgctttctcagacttcctctagtctcagtttttag

SEQ ID NO: 109038 - DNA, 3534 bp, synthetic construct
  misc_feature 1..3534: note = Description of Artificial Sequence: Synthetic coding sequence
  source 1..3534: mol_type = other DNA
atgtggcgctggatccgccagcagctcggattcgaccccccccaccagtcagacacccgcaccatttatgtggccaatcgttttccacagaatggtctttatacgcctcagaagtttatagacaaccgtattattagctccaagtatacggtctggaatttcgtccctaagaatctgttcgagcaatttcgacgagtggccaatttttactttctgatcatctttctcgtccagctgatgattgataccccaacaagtccagtcaccagtggcctgcctctcttcttcgtgatcactgttaccgccattaagcagggttacgaggattggcttaggcacaactcggataatgaagtcaatggggcccctgtgtacgtcgtgcgctccgggggtcttgttaaaacccggagcaagaacatcagagtgggtgatattgtacgcattgccaaggatgagatctttccagcagaccttgttctcctctcgtccgaccggttggacgggagttgtcacgtgacgactgcatctctggacggcgagactaaccttaaaactcatgtcgcggtgccggagaccgccctgctgcagaccgtggcgaatttggacaccctggtggccgtcatcgaatgtcagcagccagaggccgatctatacaggtttatggggagaatgatcattactcagcagatggaggaaatcgtccggcccctgggaccagaatctcttctgctgagaggcgccaggctgaaaaataccaaagaaatttttggcgttgcggtatatacagggatggagacaaagatggccctaaattacaagagtaagtctcagaaacggtcagccgtagagaaatctatgaataccttcttgatcatctaccttgttatccttattagcgaagccgtgatctctaccatcctgaaatacacctggcaggctgaagagaaatgggacgagccttggtacaatcaaaagaccgagcaccaaagaaattcatctaaaattctcagattcatcagcgacttcctggccttcttggtgctgtataactttatcatccccataagcctttatgtcaccgttgagatgcagaaattcctgggctccttttttatcggatgggatctggatctgtatcatgaggaatccgatcagaaagcccaggtcaacacctctgatctcaacgaggagttgggccaagtggagtacgtctttacagacaagacaggcacactcacagaaaacgaaatgcagttccgggaatgcagcatcaatggcatgaaatatcaggagattaacggacgcctggtgcctgagggcccaacaccagacagtagcgaagggaatcttagttacctgtctagtttgtcacacctgaacaacctttcacacttgactacttccagctcattccggaccagtcccgagaatgaaaccgaacttatcaaggagcatgatctgttttttaaggctgtcagcctgtgccatacagtccagatttcaaatgtccagacagattgcaccggcgatggtccctggcagagcaacttagcacccagtcagcttgagtattatgcctcatcccccgacgagaaggcgctggtcgaagctgctgcccgcattgggatcgtgtttattgggaactctgaggaaacgatggaggtaaaaactttgggcaagttggaacgttacaaactgttacatatcttggagtttgactcagatagaagacgaatgagtgttattgtacaggctcctagtggcgaaaagctgctgtttgccaagggggccgagtcttccatcctccctaaatgcattggaggcgaaattgagaaaacccggatccacgtggatgagttcgccttgaagggtctcagaaccttgtgtatcgcctaccgcaaattcacctctaaagagtacgaggagatagataaaaggattttcgaagctcgaacagccttgcaacaacgcgaggaaaaactagctgccgtgtttcagtttattgaaaaggacctcatactgctgggagctaccgccgtagaagataggcttcaagataaagtacgagagaccattgaagccctacgtatggcgggaataaaggtatgggtgctaaccggggataagcatgaaaccgccgtttctgtgtcgctgtcatgcggacatttccatcgaaccatgaacatccttgaattgattaaccaaaagagcgattccgaatgcgcagagcaactccgccagctggccaggagaatcactgaggaccatgtaatacagcatggtcttgtcgtagatggtacctctctgtctctcgcgctgagagaacatgaaaagctgttcatggaagtttgtcggaactgcagcgcagttctgtgctgcagaatggcccccctgcagaaagccaaggtgattaggctcatcaaaatttccccagagaaaccaataacactggccgtcggtgatggcgccaacgatgtatccatgatccaggaagcacacgtcgggattggtataatggggaaggagggccgacaggctgcacgaaattcagactatgcaattgcccggtttaaattcctttcaaagcttctgtttgtgcatgggcatttctactatattcggattgccacactcgttcagtacttcttctacaaaaatgtctgctttataaccccacagtttctctatcaattttactgcctctttagccagcagacgctgtatgactcggtgtatctcaccctttataatatatgctttacctcgcttcccatacttatctactctttgttggagcagcatgttgatccccatgtgctccagaataagcccacgctctatcgggacatctccaagaaccgtttgctaagcatcaaaacttttctttattggactatcctggggttcagccatgccttcatcttcttctttgggtcttacctactgattggcaaagatacctcattgctgggtaacggacagatgttcggtaactggacattcgggacgcttgtgtttacagtcatggtgatcactgtgaccgtaaagatggcacttgaaacacatttctggacctggattaaccacttggtcacctggggcagcattattttttatttcgtgttcagcttattctacggtggaatcctttggcccttcctgggctcgcaaaacatgtattttgtcttcatacagctgcttagttccggttccgcctggtttgcaattatactgatggtggtgacttgtctctttctggacattatcaagaaggtgttcgatcggcatctccatccgacttccactgaaaaggcacaactgaccgaaactaacgctggcatcaaatgtcttgactccatgtgctgctttccggagggcgaagccgcctgtgcctcggtgggccgaatgctcgaaagagtgattggccggtgcagcccaacccacatctctaggagctggtcggcctcagacccattttacactaacgatcgctccatcctgacattgagcactatggattcatctacctgttag

SEQ ID NO: 109039 - DNA, 315 bp, synthetic construct
  misc_feature 1..315: note = Description of Artificial Sequence: Synthetic coding sequence
  source 1..315: mol_type = other DNA
atgtattttgtcttcatccaactgttaagcagtggatcagcgtggttcgcaatcatccttatggtagtgacctgtctctttctggacattatcaaaaaagtcttcgacaggcacctgcatccaaccagcactgaaaaagcacagatgtattccaatacagttgctctatccgacgagtttatcgcgctgcagcccctgtcaagggcccggaaccagctatctaagttacgttggaagaagatccgggtgcagagtgcacaacacatgaatctgttaaaagcatctactgagggacggactgttggtacttgttag

SEQ ID NO: 109040 - DNA, 4503 bp, synthetic construct
  misc_feature 1..4503: note = Description of Artificial Sequence: Synthetic coding sequence
  source 1..4503: mol_type = other DNA
atggatccatccatgggggtcaacagcgtgacgatttcagtggaggggatgacatgtaacagctgcgtgtggacaattgagcagcagatcggcaaagttaatggtgtccaccatattaaggtctcactggaggaaaaaaacgcaaccattatctatgatccaaagctgcagacaccaaagacactgcaggaggctattgatgatatggggtttgatgccgtgattcacaacccagatcctttgcctgtgctcaccgatacgctttttctaacagttactgcttccttaacgctgccatgggatcacattcagagcacattgttgaaaactaagggggtcacagacataaaaatctacccgcagaagcgaacagtggctgtgactattatcccctcaattgtcaacgctaaccagatcaaagaactcgtgccagagttgtcactggatactggcacacttgaaaagaaatcgggcgcttgtgaagaccatagcatggctcaggccggagaagttgtgctgaaaatgaaggtggaaggaatgacgtgccatagctgcacttctaccatagaggggaagataggaaaactccagggagtacagcgcataaaggtgagcttggacaaccaggaagccacaatcgtctaccagccacacctgattagcgtggaagaaatgaagaagcagatcgaagctatgggcttcccagccttcgtcaagaaacagcccaaatatctgaagttgggcgccatcgatgtggaaaggctaaaaaacactcctgtcaagtctagcgagggctctcagcaacggtccccatcttatacaaatgacagcactgcaacgtttatcatagacggcatgcattgcaaaagttgtgtgtcaaacatcgaaagcacgctgagcgccctgcaatacgtgtcgagcatagttgtgtccttggaaaatcgctccgcaatcgttaagtacaacgcctcctcagtcacgccagagtctctcaggaaggccatcgaggcggtgagcccgggcctgtaccgcgtatcaattacctccgaagtggagtctacttccaattctcctagtagctcttcactccagaaaatccccctgaatgtggtttcccagccattgacacaggagacagtcatcaatatcgatggaatgacttgcaactcctgcgtgcagtccattgagggagtaatcagtaaaaagccaggcgtgaagtccataagagtaagcctggccaattctaatggtacagtggagtacgatcccttgctgacgagtccagaaaccctccggggagcaatcgaagatatggggttcgatgctaccctgtcagataccaacgaacctctcgtggtgattgctcagccgagcagcgaaatgcctctactaacctccactaatgagttctataccaagggtatgacgccagtgcaagataaggaagaggggaagaactccagtaaatgttacatacaggtgaccggaatgacctgcgcctcttgtgtagctaatatcgagagaaatttacggcgcgaagaggggatttatagcatcttagtcgccctaatggccggaaaagccgaagtgagatacaatcccgccgtgatacaaccccccatgatcgcagaattcatcagggagcttgggtttggcgcaacggtgattgaaaacgccgacgaaggggacggggttctcgagctggtcgtccggggaatgacttgcgccagttgtgtgcacaagattgagagtagcctcaccaaacacagagggattctgtactgttcagtggcactggctacaaacaaagcccacatcaagtatgaccctgagattatcggacctcgagacattatccataccattgaatcccttgggttcgaggcttctttggttaaaaaggaccgctccgctagccatcttgaccacaaaagagaaattaggcagtggcgccgctcatttctggtatcactgttcttctgcattcccgtgatgggactcatgatctatatgatggtgatggatcaccactttgccacattgcaccataatcaaaacatgtcgaaggaggagatgattaacctccattcctccatgtttctcgagagacagattctcccggggctgagtgttatgaacctgctcagttttcttctttgcgtgcccgttcagtttttcggcgggtggtacttctatatccaggcttacaaagccctcaagcacaagaccgccaacatggacgtgctcatcgtattggctacaacaatcgccttcgcgtactccctgattatcctacttgtggccatgtacgaacgcgccaaggtgaacccaataacctttttcgacactcctcccatgctatttgtgtttatcgccctcgggcgctggctggagcacatcgcaaagggaaaaacctcagaagcacttgctaagcttatcagcctccaggccacagaggctactatagtaacccttgacagcgacaacatcctgttaagtgaagagcaggttgacgtcgaactcgtgcagcgtggagacataatcaaggtggttcctgggggaaaatttcctgttgacgggagggttatcgagggacatagtatggtggacgaatcattaatcactggcgaggctatgcccgtggcaaagaagccggggtctacagtgattgcaggatccattaatcagaacggaagcctgcttatctgtgccacgcatgtgggcgcagacacaaccctcagccagattgttaaactggtggaagaagcacaaacctcaaaggcacccatccagcagtttgcagataaactgagtgggtactttgtcccctttatcgtatttgtgagcatcgccacattgctcgtctggatcgtgattgggttcctcaattttgagattgtggagacctactttccagggtataaccgatccattagccggacagagaccatcatccgatttgccttccaggcttcaatcacagttctgtgtatcgcttgtccatgtagtctggggttggcaacccccacggccgtgatggtcggaacaggtgttggtgctcagaatggtattctcatcaagggtggcgagcctctcgagatggctcacaaagttaaggttgtggtgttcgacaaaaccggaactataactcacggtacaccagtggtgaaccaggtgaaggttctcacagaaagcaaccggatttctcaccacaagatcctcgccatcgtggggactgctgaaagcaatagcgaacatccactgggcaccgcaatcacgaagtattgtaagcaggagctggacactgaaacccttggtacatgtattgattttcaggtggtccccggatgcgggatctcttgtaaggtgacaaacatagagggcctgctccataagaataattggaacatcgaagataacaatattaagaatgctagcctggtacagatcgatgccagtaacgaacagtcctcaacctcttccagcatgattatcgacgcccagattagcaatgcactgaatgcccaacagtacaaggtcctcatcgggaacagggagtggatgatccggaacggcctggttatcaataacgacgtgaatgacttcatgactgaacacgaacgcaaaggacgcaccgccgttctcgtggccgtcgatgacgagctgtgtgggttaatcgcaatcgccgacaccgtgaaaccagaagccgagctagccatccacatccttaagtctatgggcctggaggtcgtgttgatgaccggggacaatagtaaaacagctaggtccattgcgagccaggtagggatcactaaagtcttcgcagaagtcctcccaagccacaaagtagcaaaagtgaagcagttacaggaggaaggcaaaagagtcgccatggtcggagatgggattaatgattcacctgccctcgctatggcaaacgtggggattgcaattggaaccggaaccgatgtcgcgattgaagccgccgatgtcgtactcattcggaatgacttactggacgtagtcgcctctattgatctgagcagagaaacagtcaaacggattcggataaattttgtttttgctctgatatataacctggtcggaattccaatagccgccggagtgttcatgccaatcggcttggtgctgcagccctggatgggatctgccgctatggccgcgtcatcggtgtcggttgtgctgtcctcattgtttctgaagctgtaccggaaacccacttacgagagctatgaactgccggcgagaagccagattggacagaagtcaccctccgagatttctgtccatgtcggcatcgatgacaccagtcggaactccccaaaactggggctactggacaggatcgtcaactactcccgggcaagtattaacagtctattgtctgacaaaaggagtttaaacagtgtcgttacgtcagagccagataagcattcattactggtcggcgacttcagagaagacgacgacacagctctgtag

SEQ ID NO: 109041 - DNA, 4269 bp, synthetic construct
  misc_feature 1..4269: note = Description of Artificial Sequence: Synthetic coding sequence
  source 1..4269: mol_type = other DNA
atggacccttccatgggcgtaaacagcgttaccatttccgtcgaaggaatgacctgtaacagttgtgtctggacaatcgaacagcagattgggaaggtgaacggagtgcaccacattaaagttagcctcgaagagaagaatgctactatcatttatgaccccaagttacagacccccaagacgctgcaagaagcaatcgacgatatgggcttcgacgctgtgatccataacccggatccactgccagtgttaactgacacactgtttttaacggttacggctagcctgacacttccctgggaccacatacagagcacacttttgaaaactaaaggggtgacagacatcaaaatatacccccagaagagaaccgtggctgtgactatcatcccgtccattgtcaatgctaaccaaataaaggagctcgtgccagagctcagtctggacaccggcacactggaaaaaaaatcaggtgcctgtgaggatcattctatggctcaggcgggagaagtggtcctaaaaatgaaggtggagggcatgacgtgccactcctgcaccagcactattgaaggaaagatcggcaaacttcagggagttcagcggatcaaggtctcactcgacaaccaggaggccacaatagtgtatcagcctcacttgattagcgtcgaagaaatgaagaagcaaattgaagctatggggttccccgcctttgtcaaaaaacagcctaaatacttaaagctgggcgccatcgacgtcgagcgcctcaagaacacccccgtcaagtcgagcgagggctctcagcagcgttctccatcatacacaaatgattcgaccgcaactttcattatcgacggcatgcactgtaagtcatgtgttagcaacattgagtccacactgtcagcactgcagtacgtgtcctccattgtggtgtccctggaaaacagaagcgctattgttaagtacaacgcaagcagtgtcacaccagagagtctccgaaaggctattgaggcagtaagccctggtttatacagggtgagcataacctccgaagttgaaagcacttctaactccccttccagctcatctcttcagaagatccctctcaacgtcgtcagtcagcccctgacacaagaaactgttatcaacatcgacggtatgacttgcaatagttgcgtccaaagcattgaaggagtgattagcaaaaagccgggagtgaaaagtattcgcgtctcactcgctaattccaatggaacagtggaatatgatcccctgctgacctcccccgagaccctcaggggcgctatcgaggacatgggcttcgacgccaccttgtccgatactaatgagccactggtggtcatcgcccagcccagttcagaaatgcccctgctaactagcacaaatgagttttatacgaagggtatgacacctgtacaggacaaagaagaaggaaaaaattcatcaaagtgttatatccaggttaccggaatgacatgcgcatcttgcgtagctaatatcgagaggaatttacgaagagaagaaggcatctacagtatcctggtcgccttgatggccggcaaggcagaggtgcgatataatcctgcagttatccagccccccatgatcgcagaatttatcagggaacttggattcggtgccaccgtgattgaaaatgcagatgaaggtgacggggtgctggagctggtggtcagagggatgacatgcgccagttgcgtgcacaaaattgaatctagcctgaccaagcatcgtggcatcttgtactgttccgttgcgctcgccaccaacaaggcgcacatcaaatacgacccagaaattatcggacctagagatatcatacatactattgagagcttaggatttgaagcaagcctggtcaaaaaagatcgttctgcgagccaccttgatcacaagagggagatcaggcagtggcgccggagtttcctggtgtctctttttttttgtatccctgtgatgggccttatgatatacatgatggtcatggaccatcacttcgcaacactgcatcataatcagaacatgagcaaggaggagatgataaatcttcactcatccatgttccttgaacggcaaattttaccaggcctcagcgtcatgaatctattatcctttctcctgtgcgttccagtccagggaaagacttccgaggctcttgctaaactgatctcgctacaagcaaccgaggctaccattgtaaccctggactcagacaacatactgctgagcgaagagcaggtggacgttgagcttgtacagcgtggggatataattaaggtggtgcctggagggaagtttccagtggacggtcgggtgattgagggccattccatggtggatgaatcccttataacaggggaggcaatgcctgtcgcaaagaaaccggggtcaactgtcattgcaggctccatcaaccagaacggttccttgcttatttgcgcgacacacgtgggtgccgatacaactctgtcgcagatcgttaagctcgtggaggaggcgcagacctctaaggctcccatacaacagttcgctgataagctgtccggatattttgtgcccttcattgtcttcgtttcaattgctaccctcctggtctggattgtgattggtttcctgaactttgaaatcgtagaaacttacttccccgggtataatagaagtataagtcggacggagaccattattagatttgcctttcaagccagcatcaccgtgctttgcatcgcatgcccatgctcactgggcctcgctacccccaccgcggtaatggtgggtacaggagtgggtgctcagaatggtattctgattaagggaggggagcccctggagatggcccacaaggtgaaggtcgtggtgtttgacaaaactggcaccatcacccatggcacacccgtagtcaatcaagtgaaggtgctaacagaatccaatagaattagtcaccacaagatcctggccattgtggggactgccgaatctaactctgaacatccgctcggcacggctattaccaagtactgtaagcaggaattagatacagagaccctgggtacctgcatcgattttcaggtcgtcccaggatgcggcattagttgcaaagtgaccaatatcgagggcttgctacacaaaaataattggaatattgaagataacaacatcaagaacgcctcactcgtgcagatagacgcatccaacgagcagagctctaccagctccagtatgatcattgacgctcaaatctcgaatgctctcaacgcccagcagtacaaggttctgatcgggaaccgggaatggatgattaggaatgggcttgtcattaataacgacgtaaacgacttcatgacagagcatgagcggaagggccgcaccgcagtgctggttgccgtggacgatgagttatgcgggctgatagcgatcgccgatactgtgaagcctgaggctgagctggctatccatattcttaagtccatgggactggaggtggttctgatgaccggagataacagtaagactgctcgatcaatagccagccaggtgggcatcactaaggtctttgcggaggtgctgccaagccataaggtcgctaaggtcaagcagctccaagaggagggtaagagggtcgccatggtaggtgatgggatcaacgactctcctgcgctggccatggctaatgtcggtatcgctattgggaccgggacggacgtcgctatcgaggccgccgacgtggttctaatcaggaacgatctgcttgacgtagtagcttccatcgacctctcccgggagacagtgaagcgcattcgtattaatttcgtgttcgctttaatttacaaccttgtgggaataccaatcgctgccggagtttttatgccaattggcttagtgctgcaaccatggatgggctccgcagctatggctgcctcttccgtgtctgtcgtactgtcctcgctgtttttgaagctctacagaaaacctacctacgaatcttacgaattgccagcacgttcacaaatcgggcagaagagcccctccgagatctctgtgcatgtcggcatcgacgatacaagccgcaattcccctaaacttggactgctcgatcgcatcgtgaactacagtagagcttccatcaatagcctgctttcagataagaggtccttgaacagcgtcgtcacttctgagccggataagcactctttgctggttggcgattttcgggaggacgacgatactgctctgtag

SEQ ID NO: 109042 - DNA, 264 bp, synthetic construct
  misc_feature 1..264: note = Description of Artificial Sequence: Synthetic coding sequence
  source 1..264: mol_type = other DNA
gaatgtaatgaggagatcaaaatggacccttcaatgggcgtcaattcagtcacaatctccgtggagggcatgacctgcaattcttgtgtgtggaccatcgaacagcagatcgggaaggttaacggagtgcaccatatcaaagtgtcactggaggaaaagaatgccacaattatcttttatgcgcattggttcggctttgccgcacttgacggcatttgctcaaatggctgtttcatttgcttttgcagtacttttttcagctag

SEQ ID NO: 109043 - DNA, 1512 bp, synthetic construct
  misc_feature 1..1512: note = Description of Artificial Sequence: Synthetic coding sequence
  source 1..1512: mol_type = other DNA
atggaccccagtatgggagtcaatagcgtcactatctcggtcgaagggatgacctgcaatagttgtgtgtggacaatagaacaacagattgggaaggttaacggggtgcaccacatcaaggtcaaggtcgtggtgttcgataaaacaggtacaatcacgcacggaacccccgtcgttaatcaggtaaaggtcctgactgagtcgaacaggattagccatcacaaaattcttgcaattgtgggcaccgccgagagtaacagcgaacacccgctcggaaccgcgatcaccaagtactgcaaacaggaacttgacactgagacactcgggacatgtatcgatttccaagtcgtaccgggatgtgggatctcctgtaaagtaacaaacatagagggtctgctgcataaaaataattggaatattgaggacaacaatatcaaaaatgcctctctcgtgcagatcgacgcctccaatgaacagagttccacctcttcctctatgatcatcgatgcccagatcagtaacgctctcaacgcgcagcaatataaggttcttataggcaacagggagtggatgattcggaatgggctggtaattaacaacgacgtcaatgattttatgacggagcatgaacgaaagggcaggaccgccgtacttgtggctgtggacgatgaactctgcggtctgatagccattgccgataccgttaagcctgaagcagagctcgcaatccatatactgaaatcgatgggcctggaggtggttctgatgacaggcgacaactctaaaacagccaggagcatcgcttcccaggtcggaatcactaaggtcttcgccgaggtgcttccttctcacaaagtcgccaaggtcaaacagctccaagaggagggcaagcgggtggcaatggtaggagacggtatcaatgatagcccggccctggctatggccaatgtgggcatcgctatagggacaggcaccgacgtggctattgaagctgccgacgtggtgctcattcggaatgatcttctcgatgtggtcgcttctatcgacctgtcgcgggaaaccgtgaaacggataagaattaattttgtctttgccctcatttataacttggtcgggatcccaatcgccgctggggtctttatgcctattgggctggtgctccaaccttggatgggatcagcagcaatggccgccagttccgtttcagtcgtcctctccagcctcttcttgaaactatatagaaaaccaacctacgaatcctatgagctccccgccagatctcaaattggccagaagagtccgtccgaaatcagcgtgcatgtggggatagacgacacatccaggaactcaccgaagctgggcctcttggacaggatcgttaactactcacgagccagcatcaactctctgctttctgataaacgcagcctgaattctgtcgtaactagcgaaccagataaacactcattgttggttggcgactttagagaggacgacgatactgcattgtag

SEQ ID NO: 109044 - DNA, 2049 bp, synthetic construct
  misc_feature 1..2049: note = Description of Artificial Sequence: Synthetic coding sequence
  source 1..2049: mol_type = other DNA
cgtaaccaggagtgcaacgaggagatcaagatggatccttcgatgggagtgaactccgttacaattagtgtagaaggcatgacctgtaatagctgcgtctggacaattgagcagcagatcggcaaagtcaacggcgttcaccacatcaaagtctcactggaagagaagaatgctaccataatttacgaccctaagctgcagacccctaaaacactacaggaagccattgacgatatgggattcgatgcggttattcacaatcctgatcctcttcctgtgttgacggacacacttttccttacagttactgcctccctcacactgccgtgggaccacatccagtccaccctgctaaagacgaaaggagtcacagacatcaagatttacccccagaagcgcaccgttgctgtgaccatcataccgtcaatagtcaacgcaaaccagatcaaggagctggttcctgagctctctctggatacaggcactctggaaaaaaaatctggagcatgcgaggaccactctatggcacaggctggggaagtggtcctgaagatgaaagttgaaggcatgacctgccatagctgcacttccaccatcgagggcaagatcgggaagctccagggcgtccagagaattaaagtttctctcgacaatcaggaagccacaattgtctatcagcctcaccttataagtgtggaggagatgaaaaaacagattgaggccatgggttttcccgcatttgtcaagaaacagcccaaatatctcaagctgggcgccattgacgtagaaaggcttaagaatactccagtgaagagttcagaaggctcccaacaacgatctccctcttacacgaatgatagtaccgccactttcatcatagacggcatgcattgtaaatcttgcgtgagcaacatcgagtcgacgctttccgccctgcagtacgtgagtagtattgtggtgtccctggaaaaccggagtgcgatcgttaaatacaatgcatcatctgtgacacctgaatctctaaggaaggccatagaggctgtcagtccgggactatatcgtgtctccattacctccgaagtggaatccaccagtaactcaccatcgagctcaagcttacaaaaaattcccctgaacgtcgtgagtcagccactgacgcaagagacagtaataaacattgacggcatgacatgtaactcctgcgtgcagtctatagaaggggtgatctccaaaaaacccggcgtcaagtccatacgggtcagcctggctaactccaacggaaccgtcgagtatgaccctctgctaacaagccccgaaactttacgaggggcaattgaggacatgggatttgacgccaccctgagcgataccaacgagccactcgttgtaattgcccaaccctcctctgagatgccattacttacgtcgaccaatgaattctacacaaaagggatgacccccgtccaggacaaggaggaaggtaaaaactcttccaaatgttatatccaggtcaccggcatgacttgtgcttcctgcgtggccaacatcgaacgaaacctgaggcgagaggagggaatttattccatcctggtggccctcatggctggcaaagctgaggtgagatataaccccgcggtgatccagcctccgatgattgcggagtttattagagaacttgggttcggggcgacggtgatcgaaaatgctgatgagggggacggtgtactggagttggttgtcagggggatgacatgcgcctcatgtgtccataagattgagagctcattaaccaaacaccgaggtatcctttattgctcagtcgcactggctactaacaaagctcatatcaaatacgaccctgagatcattggacctcgcgatattatacataccattgaagtgtctgccaagaacttgtgcttctgtgtactcacctaccttatttctacgccagtcaaccacttttggtttgcaagtgaccggggaaatgagaaaaagtcaaatagcttcgagcatttcaagcaggacctaagtcagaacctgatgtag

SEQ ID NO: 109045 - DNA, 825 bp, synthetic construct
  misc_feature 1..825: note = Description of Artificial Sequence: Synthetic coding sequence
  source 1..825: mol_type = other DNA
atggatccgagtatgggcgtgaatagtgtgacgatcagcgtggagggtatgacgtgcaacagctgcgtttggacaattgaacaacagattggtaaggttaacggcgtacatcatattaaggtctctctggaagagaaaaacgcgactatcatatatgatccaaagttacaaacccccaagacactgcaagaggccattgatgatatggggtttgatgccgtgatccataacccagatcctctcccagtactaacagacacactgttccttaccgtgaccgccagtctgacactaccgtgggaccatattcagtctacgcttcttaagactaaaggggtgacagatattaaaatttacccccagaagcggaccgtggccgtcaccataatccccagtattgtgaatgccaaccaaattaaggagctggtgcctgagttaagtctcgataccggaacccttgagaaaaaatcaggggcctgcgaggatcattcaatggctcaggctggagaggttgtgctaaaaatgaaagtggaaggcatgacctgtcattcatgcacctctacaattgaagggaagattggtaagctccaaggagtgcagaggattaaagtgagcctggacaatcaggaggcaactattgtctaccagccccacctgatctcagtggaggaaatgaagaagcaaatcgaggctatggggtttccggccttcgtaaagaagcaaccaaagtacttaaaactgggagcaatcgatgtcgaaaggctgaagaataccccggttaagtccagtgagggatcacagcaaagatccccttcctaccaatag

SEQ ID NO: 109046 - DNA, 546 bp, synthetic construct
  misc_feature 1..546: note = Description of Artificial Sequence: Synthetic coding sequence
  source 1..546: mol_type = other DNA
atgagaccctcaggcacctgcgcctcgtgcggttctgatcccccccctccaacacaagtccccagttcccggaacgattgtggttctacagtgcctgacaatcccttcgtgcgtaccctgcctcacaccaccatgagcggacatcaactaccacccgcaggcacccagcggccgggaccagccgcctgtctagtgcctggctcccttcctagtctcccatcacagccaggtccctggggcgcactgggcacagcggccgctgagggaatgtcttgttctaacacccggactgccctcgagttcgccttgtttccaaaagagatgctactagggtcatggtacggttggggtttgagcctgtataggcggggccggtgtcaggactctgctcatccagaagaagacacgtgtccccacggggagggcgcacccgcacaggcaggtgagtcagtaccaagccagcagctgtgccaccacccagcaggcaattggggcggtttgtattgggtgattggcaaggccttctctttggcctggaattgctag

SEQ ID NO: 109047 - DNA, 642 bp, synthetic construct
  misc_feature 1..642: note = Description of Artificial Sequence: Synthetic coding sequence
  source 1..642: mol_type = other DNA
atgagagttcggggacccgcgcgcctgattgcaagtggtgccaggctgttgctgcgaatgctgagcgccctgccaggatggggcccggcgcaccttcaacgccctctgctgggcccggccagctgtcttggaatccttaggccagcaatgactgcgcactctttcgctctgcccgtaattatttttaccactttctgggggctggtgggtatagccggtccttggtttgtcccaaaagggcctaataggggagtcatcatcacaatgctggtcgccacagccgtgtgttgctatttgctgtgtcctgcactgggcatgacagtggcaccactgagtttgaccacaccatcatccggcccgtcccctacccagctttgcctagttacatcaagtcttctcctggctcctagggaccctgaccctcagggcctgcccgggagctggaaatcatcacagagctcccagcctgctagggcgctcggatctccagggcactcttccggtaggggcgatgttctcctccagtatcctcactgctcaggcgtttgccctctttcacaaggggatgccgcaggtgagctagtgtgggttgggagcttccccttgcagacaggccagatgcccgggctctcaccatcatag

SEQ ID NO: 109048 - DNA, 495 bp, synthetic construct
  misc_feature 1..495: note = Description of Artificial Sequence: Synthetic coding sequence
  source 1..495: mol_type = other DNA
atgacggcacactcttttgcactcccagtcatcattttcaccactttctgggggctcgtggggattgccgggccatggttcgtacctaagggacccaatcggggcgtcattattactatgcttgtggctacagcagtctgttgctacttgctttgccccgctcttggaatgacagtagcgccactgagcctcaccactccgagttctgggccctctccaacccagctgtgtttggtgacatcgtcactactgcttgcacctcgggatcccgacccccagggactgcctggtagttggaagagctctcaaagctctcagcccgcacgggccctgggctcgccaggtcactcatcaggacgaggggacgtgctcctccagtatccacactgttcaggcgtatgccctctctcacagggcgatgccgcgggcgaactcgtgtgggtaggctccttcccccttcaaacaggtcagatgccagggctgagcccttcttag

SEQ ID NO: 109049 - DNA, 393 bp, synthetic construct
  misc_feature 1..393: note = Description of Artificial Sequence: Synthetic coding sequence
  source 1..393: mol_type = other DNA
atgcgggttcgggggcccgcccgtttgattgccagcggcgcccggctgctcctgcgtatgcttagcgcactgccaggatggggccctgcccacctgcagcgtcccctgctgggaccagcgtcctgcctgggcatcctccgtccggctatgacagctcactccttcgcactgcctgtaatcattttcaccacgttttggggcctcgtgggcattgcaggtccatggtttgtgccgaagggtccgaataggggagtgatcataacgatgctagtggcgactgcggtctgctgctacctgttttggctgattgctatcctcgcacagttgaaccctctgtttggaccccagctgaaaaacgagacgatttggtacgtgcgcttcctatgggagtag

SEQ ID NO: 109050 - DNA, 246 bp, synthetic construct
  misc_feature 1..246: note = Description of Artificial Sequence: Synthetic coding sequence
  source 1..246: mol_type = other DNA
atgacggcccactcttttgcattaccggttatcattttcacaacattttgggggttggttggtattgccgggccatggttcgtccctaaaggaccaaatcgaggtgtcatcatcaccatgcttgtggccacggcggtttgctgctacctgttttggctgatcgctattcttgcgcagctgaatcccttgtttgggcctcagcttaaaaacgaaacaatctggtatgtacggtttctctgggagtag

SEQ ID NO: 109051 - DNA, 564 bp, synthetic construct
  misc_feature 1..564: note = Description of Artificial Sequence: Synthetic coding sequence
  source 1..564: mol_type = other DNA
atgaccgcccatagcttcgccctgcccgtaattattttcaccaccttttggggccttgttggtatagctggcccctggttcgtacctaaggggcctaatcggggtgtcattatcacaatgctggttgccacagccgtgtgctgctacctgttttggttgattgccatccttgcgcaattaaacccattattcggcccccagctcaaaaacgagactatctggtgtcccgccctgggcatgaccgtggcacccttgtctcttacaacaccttccagtggtccaagccccacacagctgtgtctcgtcacatcctcactcctcctggctccaagagatcctgacccccagggcctgccagggagttggaaatcctcacagtcttcgcaaccagccagagctcttggttcaccagggcactctagcgggcgcggcgacgttttgcttcagtacccacattgcagtggagtgtgccctttatcacagggtgacgccgccggcgagctggtgtgggtgggcagcttccccctccagaccggccagatgcccggcctgtccccttcttag

SEQ ID NO: 109052 - DNA, 357 bp, synthetic construct
  misc_feature 1..357: note = Description of Artificial Sequence: Synthetic coding sequence
  source 1..357: mol_type = other DNA
atggcctcacagagccaggggattcagcaactgctacaggccgaaaagcgagcggcagagaaggtaagtgaggctaggaagaggaaaaatcggcgcctgaaacaggcaaaagaggaggcgcaggcagaaatcgaacaatatcgactccagcgggaaaaagagtttaaggcgaaggaggccgccgcactcggctcccgggggagttgtagtacggaggtggaaaaggaaactcaggagaagatgactatccttcaaacgtattttagacaaaaccgcgatgaagttctagataacctcctcgcttttgtctgcgacatacgcccagagatccatgagaactatagaatcaatggctag

SEQ ID NO: 109053 - DNA, 357 bp, synthetic construct
  misc_feature 1..357: note = Description of Artificial Sequence: Synthetic coding sequence
  source 1..357: mol_type = other DNA
atggcaagccagtctcaagggattcagcagctcctccaagccgaaaagcgagccgcagagaaggtagccgacgctcgcaagaggaaggccagaaggctcaaacaagccaaggaggaagcgcagatggaggtcgaacagtatcggcgagagagagagcatgagttccaatctaaacaacaggccgccatgggatcgcagggaaacctgtccgctgaggtggagcaggctactaggcgccaggtgcagggcatgcagtcttctcagcaacgaaatcgcgaaagggttctggcccaactgctgggaatggtctgcgacgtccgacctcaggtccatcccaattacaggatctccgcatag

SEQ ID NO: 109054 - DNA, 237 bp, synthetic construct
  misc_feature 1..237: note = Description of Artificial Sequence: Synthetic coding sequence
  source 1..237: mol_type = other DNA
atggccagtcagtctcagggtatccagcagctcctacaggccgagaagcgggcagctgagaaggtggcagatgcaagaaaacgcaaagctaggcgtctgaagcaggccaccagacggcaggtgcaaggcatgcagtctagccagcagagaaacagagagagggtgctggcccagttactcggaatggtgtgcgatgtaaggcctcaggtgcatcccaactatcggatcagtgcctag

SEQ ID NO: 109055 - DNA, 357 bp, synthetic construct
  misc_feature 1..357: note = Description of Artificial Sequence: Synthetic coding sequence
  source 1..357: mol_type = other DNA
atggcctctcagagccagggcatccaacagttactgcaggcagagaaaagggccgctgaaaaagtcgctgatgcacgaaagcgaaaagctcgccgactgaagcaggctaaggaagaggcacagatggaggtggaacagtacagacgcgagagagagcatgagtttcaatcgaagcagcaggcagctatggggagtcagggcaatctctctgccgaggtggagcaggccacgagacgccaggtgcagggaatgcagtctagtcagcaaagaaatcgggagcgggtgttagcccaactcctgggcatggtttgcgacgttaggccccaggttcaccctaattatcgaatttccgcctag

SEQ ID NO: 109056 - DNA, 477 bp, synthetic construct
  misc_feature 1..477: note = Description of Artificial Sequence: Synthetic coding sequence
  source 1..477: mol_type = other DNA
ggtgggcaacagcatgcggtaccatgccctcatggcggccctggagggcagggacagccccgggcagaagccgccgggaccggccagggacatcgagggggccataggcctggcgctgtcgtgggtgcggcacagcacctgcatagaggcctcggagtggctggaggtggacctggaccagggccggccgttctccagactaggaaggcacggcggcttaaacaggcaaaggaagaggcacagatggaggtggagcagtatagaagggaaagagagcatgaatttcaaagtaagcaacaggccgccatggggagtcagggcaacctttctgctgaggtcgaacaggccacaaggaggcaagtccagggcatgcagtctagccaacaaagaaacagggaacgggtactggcgcagcttctgggcatggtttgcgacgtgagaccgcaggttcaccccaactatcgaattagtgcatag

SEQ ID NO: 109057 - DNA, 237 bp, synthetic construct
  misc_feature 1..237: note = Description of Artificial Sequence: Synthetic coding sequence
  source 1..237: mol_type = other DNA
atggcctcacaaagccaaggcatccagcagctgcttcaagcagaaaagcgggctgctgagaaagtggctgatgccagaaagagaaaggctaggcggctgaagcaagccactcggagacaagtacagggaatgcaaagctcacaacagaggaaccgcgaacgggtgttggctcaactgcttggtatggtatgtgatgttcgaccccaagttcatcctaactatagaatttctgcgtag

SEQ ID NO: 109058 - DNA, 237 bp, synthetic construct
  misc_feature 1..237: note = Description of Artificial Sequence: Synthetic coding sequence
  source 1..237: mol_type = other DNA
atggcatctcaatcacagggtattcagcagctgctgcaggctgagaaacgggcggctgaaaaagtcgccgatgctcggaagcgcaaggctcggagactcaagcaagctacccggagacaagtccagggcatgcagtcatcccagcagcgcaaccgcgagagggtccttgcccagttgctggggatggtttgtgatgtccgaccacaagtacaccctaactaccggataagcgcttag

SEQ ID NO: 109059 - DNA, 357 bp, synthetic construct
  misc_feature 1..357: note = Description of Artificial Sequence: Synthetic coding sequence
  source 1..357: mol_type = other DNA
atggcgtcccagtcccagggtattcagcagctgctccaagcagaaaaaagggctgcagaaaaggtggctgacgcaaggaaaaggaaagcaaggcggttgaagcaggcaaaggaggaggctcaaatggaagtggaacagtaccgacgagagagagaacacgaattccaatccaagcaacaggcggccatgggttcgcagggaaatttgagcgccgaggtggagcaggcaaccagacgccaggtgcaaggaatgcagtcttcacagcagcgaaacagggaacgggttctggcgcagctgctgggcatggtctgtgacgtgaggccgcaggtccaccctaactaccgcatcagcgcctag

SEQ ID NO: 109060 - DNA, 237 bp, synthetic construct
  misc_feature 1..237: note = Description of Artificial Sequence: Synthetic coding sequence
  source 1..237: mol_type = other DNA
atggcatcgcagagtcaggggatacagcagttgctgcaagcggaaaaacgggctgctgaaaaagtggccgatgcgaggaaaaggaaagctaggagactgaaacaggcgactcggaggcaggtccaagggatgcagagctcccagcagaggaatcgagagagagtgctagcgcagctcctcggaatggtctgtgacgttaggcctcaggtgcacccaaattacagaatctccgcgtag

SEQ ID NO: 109061 - DNA, 357 bp, synthetic construct
  misc_feature 1..357: note = Description of Artificial Sequence: Synthetic coding sequence
  source 1..357: mol_type = other DNA
atggcaagtcagagccagggcattcaacagctgcttcaggccgagaaaagggctgcagaaaaagtggctgacgccaggaagaggaaggccaggagactgaagcaggctaaagaagaggcccagatggaggtggaacagtatcggagggaacgagagcatgaatttcagtcaaaacaacaggccgcgatgggatcccaggggaacctgagtgctgaggtcgagcaggcaacacgccgtcaggtgcaaggtatgcaatcatctcagcagaggaacagggaaagggttctcgctcagttgctaggcatggtttgtgacgtgagaccacaggtgcaccctaattaccggattagtgcctag

SEQ ID NO: 109062 - DNA, 237 bp, synthetic construct
  misc_feature 1..237: note = Description of Artificial Sequence: Synthetic coding sequence
  source 1..237: mol_type = other DNA
atggctagccagtcacaggggatccaacaactgctgcaagccgagaagcgagccgcagagaaggttgccgatgctcgcaaacgtaaggcccgccgtcttaagcaggctactcggcggcaggtgcagggcatgcagtcaagccaacaaagaaatcgagaacgtgtcctcgctcaactgcttggaatggtgtgcgacgtgcggccccaggtgcaccctaactataggatatctgcctag

SEQ ID NO: 109063 - DNA, 237 bp, synthetic construct
  misc_feature 1..237: note = Description of Artificial Sequence: Synthetic coding sequence
  source 1..237: mol_type = other DNA
atggcaagccagtcccagggcattcagcagttgcttcaggcagaaaagcgagccgcagagaaggtagcagatgcccggaagagaaaagcccgacgcctcaagcaagccaccaggcgtcaggtccagggcatgcaatccagtcagcaaaggaacagggaaagagtgttggcccaactgttgggaatggtgtgcgacgtccgcccccaagtgcaccccaattatcgtatttcagcttag

SEQ ID NO: 109064 - DNA, 357 bp, synthetic construct
  misc_feature 1..357: note = Description of Artificial Sequence: Synthetic coding sequence
  source 1..357: mol_type = other DNA
atggcttcccaaagtcagggcattcagcagctgctgcaagccgaaaaaagagcagccgagaaggtggccgatgctagaaagcgtaaagcgcgtcggctaaagcaggccaaggaggaagctcagatggaagttgaacagtacagaagggagagggagcacgaattccagagcaagcagcaagcggcaatggggtcccaggggaatctgagtgctgaagtcgagcaggctacccgccggcaggtgcagggtatgcagagcagccaacaacgaaacagggaacgagttcttgcccagctgctgggaatggtgtgtgacgtgaggccccaggtgcatcctaactatcgcatttctgcctag

SEQ ID NO: 109065 - DNA, 237 bp, synthetic construct
  misc_feature 1..237: note = Description of Artificial Sequence: Synthetic coding sequence
  source 1..237: mol_type = other DNA
atggcctcacaaagccagggaatccaacagttgctccaggcagaaaagcgcgcagcggagaaggtggcggatgccaggaagagaaaagctcgacgcttaaaacaggctacccggcgtcaggtgcagggaatgcaaagctctcagcaacgcaatagggagcgcgtgttggctcagcttctgggcatggtatgcgatgttcgacctcaggtacacccaaattacaggatttccgcttag

SEQ ID NO: 109066 - DNA, 357 bp, synthetic construct
  misc_feature 1..357: note = Description of Artificial Sequence: Synthetic coding sequence
  source 1..357: mol_type = other DNA
atggcaagtcagagccaagggatacaacagcttctgcaggcagagaagagggcggccgagaaagtggcagatgcacgaaagcgtaaagcaagaagactcaagcaggccaaggaggaggcccagatggaggttgaacaatatcggagagaacgcgaacatgaattccagagtaaacagcaggcagccatggggtctcagggtaacctgtctgcagaggtggaacaggccacacgccgacaggtccaagggatgcagtcatcacagcagaggaatagagaaagagtgctggcacaactgttgggcatggtctgcgacgtgagaccgcaggttcatcccaactaccgcatttcagcgtag

SEQ ID NO: 109067 - DNA, 357 bp, synthetic construct
  misc_feature 1..357: note = Description of Artificial Sequence: Synthetic coding sequence
  source 1..357: mol_type = other DNA
atggcttcacagtctcagggtatccaacagctccttcaggccgagaagcgggctgccgagaaagtagcggatgcgcggaagcggaaagcccgccgtttaaagcaggcaaaagaggaagcacagatggaggttgagcagtatcgccgagaaagagagcatgaattccaaagtaaacaacaggctgctatgggctctcagggcaacctatctgcagaagtcgaacaggcaactaggagacaggtccagggcatgcagagctcgcagcagcgcaaccgcgagagggtgcttgcacagctcctgggaatggtgtgcgatgtgcggccccaagttcaccctaattaccgcataagcgcatag

SEQ ID NO: 109068 - DNA, 234 bp, synthetic construct
  misc_feature 1..234: note = Description of Artificial Sequence: Synthetic coding sequence
  source 1..234: mol_type = other DNA
atggaggtggaacaataccggagggagcgggagcatgagttccaaagcaagcagcaggcggctatgggaagccagggaaacctgtcagctgaagtggagcaagcaactcgcagacaggtgcagggtatgcaaagcagccagcagcggaatcgggaacgggtgctcgcccagctgctgggaatggtttgcgatgtaagaccacaggtgcacccaaattacaggatctcggcttag

SEQ ID NO: 109069 - DNA, 348 bp, synthetic construct
  misc_feature 1..348: note = Description of Artificial Sequence: Synthetic coding sequence
  source 1..348: mol_type = other DNA
gtggagcctggaatccagcagcttttgcaggctgaaaagcgagccgctgagaaggtggcggatgctcgcaagaggaaggctcgcagactcaagcaagcaaaagaggaggctcagatggaggtcgagcaatatcggcgtgagcgggagcacgagttccagtctaagcaacaggctgctatgggatctcaaggaaatctgtctgcggaagtggagcaggctacccgaaggcaggtgcagggtatgcagagtagccagcaaaggaatagggaaagggttctggctcagctgctgggaatggtgtgtgacgtcagaccacaggtccacccaaactaccgcatttctgcctag

SEQ ID NO: 109070 - DNA, 468 bp, synthetic construct
  misc_feature 1..468: note = Description of Artificial Sequence: Synthetic coding sequence
  source 1..468: mol_type = other DNA
atgtccgaatccaagtccggcccagagtatgcaagcttttttgccgtgatgggagcatctgcagctatggttttcagtgcactgggcgctgcatacgggacagccaagtccggtaccggcattgccgccatgtctgtgatgcggccggagcaaatcatgaaaagcatcatacctgtagtgatggcagggatcatagccatttacggcctagttgttgctgttcttatagccaactctctcaacgatgacattagcctctataaaagtttcctgcagttaggcgctggtctcagtgtgggtttaagcgggctagccgccggctttgccatcggcatagtgggcgacgcaggtgtcaggggaacagcacagcagcctcgcctcttcgtcgggatgattctcatcttgatttttgccgaagtgctggggctctacggactgatcgtggccctcattctctccacaaagtag

SEQ ID NO: 109071 - DNA, 477 bp, synthetic construct
  misc_feature 1..477: note = Description of Artificial Sequence: Synthetic coding sequence
  source 1..477: mol_type = other DNA
atgtggtctaacctcggaatcgggctggccatctctctctcagttgtgggcgccgcttggggtatctatattaccggctcgagcatcatcggtggcggagtcaaggcccctcgcataaagacaaagaatctggtgtcaatcatattctgcgaggcggtagcaatatacggaatcataatggcaatagtgatatctaacatggccgaacctttttcagccactgatccaaaggccatcgggcaccgaaattaccacgccggttatagtatgttcggagccggcctgacagtgggccttagcaatcttttctgcggcgtttgtgtaggaatcgttggatccggagctgccctcgccgacgcccagaacccaagcttattcgtcaaaatcctgattgttgagatattcggcagcgccattggactatttggggtcattgttgcaatccttcagacttcccgcgtcaagatgggggactag

SEQ ID NO: 109072 - DNA, 129 bp, synthetic construct
  misc_feature 1..129: note = Description of Artificial Sequence: Synthetic coding sequence
  source 1..129: mol_type = other DNA
gtggggtccggagcagccttggcggatgctcagaacccaagcttgttcgttaaaattctcatcgtagaaatttttgggtctctcgcatctctgggcagttccagccaattctttagaccacctgaatag

SEQ ID NO: 109073 - DNA, 759 bp, synthetic construct
  misc_feature 1..759: note = Description of Artificial Sequence: Synthetic coding sequence
  source 1..759: mol_type = other DNA
atgacgggcctggcattactttactcgggagtgtttgtggcgttttgggcctgcgccctagccgttggtgaagccggctcatggagagccggtgccgccagccgcccctcgtggccaggccgaaatagcgctggaaagtggcccgctggaaacacaggcccaccacgcgcgctccatcccagactttggggcctcgcccctgccagggcttccgactctgataaaggtgatccggactttcagctgctcgaagaagggtttttgactgagacatccccatttatgtggtccaacctaggaatcggtctcgctataagcctgtctgtggttggggcggcttggggcatttatatcaccggctcctctatcataggtggaggggtgaaggcccctcgcatcaagaccaaaaacctggtgagcataatcttttgtgaagctgtggctatttatggaatcatcatggcaatcgtgatttccaatatggccgaacctttcagcgccaccgacccaaaggccatcgggcatagaaattatcacgccgggtatagcatgttcggcgcaggattgaccgtgggattgtcgaacctgttttgtggagtctgtgtggggattgtgggtagtggtgccgctctcgccgatgcacagaacccatcactattcgtcaagatcctgattgtagagatatttggatcagctattggactgttcggtgtgattgtggcaatcctgcaaacgtcccgcgtgaagatgggtgactag

SEQ ID NO: 109074 - DNA, 618 bp, synthetic construct
  misc_feature 1..618: note = Description of Artificial Sequence: Synthetic coding sequence
  source 1..618: mol_type = other DNA
atgactggacttgctctgctgtacagcggtgttttcgtcgccttctgggcatgcgctctagctgtgggtgtgtgctatacgatcttcgacttgggctttcgatttgacgtggcatggttcttgaccgagacctctccctttatgtggtcaaaccttgggatcgggttggctatctcgttgtcagttgtgggagccgcctggggaatctacattacaggcagctcaattattggaggtggcgtaaaggcgccccgaattaaaacaaaaaatctggtttccatcattttctgtgaggccgtcgccatttatggtattatcatggcgattgttatttctaatatggccgaacctttctccgctactgatcctaaggctattggccacaggaactaccacgcaggttatagcatgttcggggcagggctgacagtgggattgtctaatttattctgcggcgtttgcgtgggaatagtaggttccggtgccgcattggcggacgcacagaatccgtctcttttcgtgaagattctgatcgtggaaatctttggatctgctattggcctgtttggagtcattgtcgctattcttcaaactagtcgggtaaaaatgggggactag

SEQ ID NO: 109075 - DNA, 261 bp, synthetic construct
  misc_feature 1..261: note = Description of Artificial Sequence: Synthetic coding sequence
  source 1..261: mol_type = other DNA
atgtggtccaatctgggaataggcctggctatctccctctctgtggtgggggctgcctggggcatctatattacaggttcttcaattatcggtgggggcgtcaaggcaccacgcattaaaaccaagaatctggtatccatcatcttttgcgaagcagtcgcgatctacggtatcattatggccattgtgatcagtaacatggccgagcctttttcagcgaccgatcccaaggcaattggacaccgcaattatcacgcgtag

SEQ ID NO: 109076 - DNA, 477 bp, synthetic construct
  misc_feature 1..477: note = Description of Artificial Sequence: Synthetic coding sequence
  source 1..477: mol_type = other DNA
atgtggtccaatttagggattggcctggcaatcagtctatccgtggtcggcgcagcgtggggaatttatattactggctcctcaatcatcgggggaggagtgaaggccccccggattaaaacaaagaatttagtctctatcatattctgcgaagctgtggccatctacggaatcatcatggctattgtgattagcaacatggccgaaccattctcagcaaccgatcctaaggctatcggccaccggaactaccacgccggttatagcatgtttggcgcgggcctgaccgtcggcctatccaatttattctgtggcgtgtgcgttgggatcgtcggatccggggctgctctggccgatgcgcagaaccccagtctatttgtaaaaattctgatcgtcgagatattcggatctgccattgggttgttcggggtcattgtggcaatcctgcagacctccagagtgaagatgggcgactag

SEQ ID NO: 109077 - DNA, 786 bp, synthetic construct
  misc_feature 1..786: note = Description of Artificial Sequence: Synthetic coding sequence
  source 1..786: mol_type = other DNA
atgacaggcctcgccttactgtactcgggcgtatttgtggctttttgggcatgcgctctggcagtgggcgtttgctacaccatctttgacctgggcttccgatttgatgtggcgtggttcctgacagagacctcgcctttcatgtggtcaaacctagggattgggctcgccataagcttgagcgtcgtgggggccgcctggggcatctatataacaggaagctcaatcatagggggcggcgtgaaggctccccggattaaaacgaagaatctggttagtataatcttttgtgaagccgtggccatttacggtataataatggccatcgttatcagcaacatggccgaacccttctccgccaccgatccaaaagctattgggcaccgcaattatcatgcaggttacagcatgttcggcgccgggctgaccgtgggactttctaacttgttttgcggggtatgcgtgggtattgtggggtcgggagccgccctggctgacgctcaaaatccctcactgtttgtcaagatacttatcgttgagattttcggaagtgctatcggcctgtttggggtcatcgtggcgattctgcaagttatgaatcccttaggcaagccactgtgcccctgtccgcagccctcacttaccttgctactcgaaaagttgaagtgttccccctctctaccaataactatagactcacctaagcagctgccaccccctcactttcatcttcttgttttttcatacagagggtccctcttcctctcgctgatttggtgccactag

SEQ ID NO: 109078 - DNA, 681 bp, synthetic construct
  misc_feature 1..681: note = Description of Artificial Sequence: Synthetic coding sequence
  source 1..681: mol_type = other DNA
atggcactgtcagacgccgatgtgcagaagcagattaaacatatgatggccttcatcgagcaggaagccaatgagaaggcagaagaaatcgacgccaaagccgaagaagaatttaatatcgagaaggggagactggttcagacccaaaggctgaagattatggagtactatgagaagaaggagaaacagatcgaacagcagaagaaaatccagatgtcaaacctgatgaatcaagctcgattgaaagtactcagggctagagatgatctgatcaccgacctactgaatgaagctaaacagcgtctcagcaaagtggtgaaggacaccactcggtaccaggttctgctggacggcctggtgctacagggtctctaccagctgctggaacccaggatgatcgtaaggtgtaggaagcaagactttcccctggtgaaggcagcagtccagaaggccattcccatgtacaaaattgcaaccaagaatgacgtcgatgtgcagattgaccaagaatcctacctgcccgaagacattgccgggggagttgagatctacaatggggatagaaagatcaaagtgtctaacactttagaaagcagactggatctaatcgcccagcagatgatgccggaagtcaggggtgccctcttcggtgcaaacgccaaccgtaagttcctggattag

SEQ ID NO: 109079 - DNA, 591 bp, synthetic construct
  misc_feature 1..591: note = Description of Artificial Sequence: Synthetic coding sequence
  source 1..591: mol_type = other DNA
atggctctgtcagacgccgacgttcagaagcagatcaagcatatgatggcatttatcgagcaagaggctaatgagaaagcagaggagattgatgcgaaggcggaggaagagtttaatattgaaaaaggtcgcctggttcagactcagcgtctgaagatcatggaatactacgaaaagaaagaaaagcagattgaacagcagaaaaagattcagatgagcaacctgatgaaccaggctcggttaaaggtgctccgggcgagggacgacctcattaccggcctgtaccagctgctagaacctagaatgattgtgcgctgtcggaagcaggactttccactcgtgaaggccgctgtgcagaaagcaattcccatgtacaaaatagcaaccaaaaatgacgtggacgttcagatagatcaggaatcttatctccctgaggatatagccgggggcgtggaaatttataacggcgatagaaaaataaaagtgtcaaacactctcgaatctcggctggacttaatcgcccagcagatgatgccagaggttagaggagccctgtttggggccaacgctaaccgcaagtttttggactag

SEQ ID NO: 109080 - DNA, 615 bp, synthetic construct
  misc_feature 1..615: note = Description of Artificial Sequence: Synthetic coding sequence
  source 1..615: mol_type = other DNA
atggctctgtctgacgccgacgtgcagaaacaagcggaggaagagtttaacatcgagaaaggaaggctcgtacagacacagaggcttaagattatggagtattacgagaagaaagagaaacagattgagcagcagaagaagatacagatgtcaaacctgatgaaccaggcgcgcctcaaggtgctcagggctcgcgatgatctgatcacagacctactgaatgaagcaaagcagaggctgtcaaaggtcgtgaaggacactactcgctaccaggtcctactagatggactcgtcctccagggtctctatcagctgctggaaccacgaatgatagtgagatgtagaaagcaagacttccccttggtgaaagccgccgtgcagaaagcaatcccaatgtacaagattgcgaccaaaaatgatgtggatgtacagatcgaccaggaaagttatctaccagaagatatagctggtggcgtcgaaatttacaacggtgaccgaaaaattaaggtatctaacactctggagagtcgactggacctgatagcacagcagatgatgccggaggtgcgcggtgctctgttcggggctaatgccaataggaagtttctcgattag

SEQ ID NO: 109081 - DNA, 1056 bp, synthetic construct
  misc_feature 1..1056: note = Description of Artificial Sequence: Synthetic coding sequence
  source 1..1056: mol_type = other DNA
atgtcattttttcctgaactttattttaacgtcgacaacggatatttagagggtctcgttcgtgggctgaaggcgggcgttctttctcaggccgattacctaaacctcgtccaatgtgaaacactggaagacctgaaactgcacctccagtcgaccgattatggaaattttctcgctaacgaagcctctcctcttacagtatccgttatcgatgataggttaaaagaaaaaatggttgtggaattcagacatatgagaaaccacgcctatgagcccctggcatccttcctggatttcataacttacagctatatgatcgacaacgttattctgctgatcacaggcaccctgcatcagcgaagtatagccgaacttgtgcccaaatgtcatccactgggctcctttgaacaaatggaggcagttaatattgctcagacccctgccgagttgtataacgccattctggtcgatacacctctggccgctttctttcaggactgtatatcagagcaggatctcgatgagatgaacatcgaaattattaggaacactctgtacaaagcctatctagaatcgttttacaaattttgtacgcttctgggtggcactactgctgatgcaatgtgccctatcctcgaatttgaagccgatcgcagagcatttatcatcaccatcaatagttttggcacggagctcagcaaggaggatcgcgccaagttgttcccccattgtggtcgtctctaccccgagggactcgctcaactcgcacgcgcggatgattacgaacaggtcaagaatgtggcggactactatcctgaatataagttgctctttgagggcgcaggatcaaacccgggcgacaaaaccctggaggaccgttttttcgaacatgaagtgaagttgaacaaactcgcctttctcaatcagttccactttggagtattctatgcctttgtgaaattgaaagaacaggagtgccggaatattgtctggattgccgagtgtatcgcccagcggcaccgcgccaaaatcgataattacatacctattttctag

SEQ ID NO: 109082 - DNA, 825 bp, synthetic construct
  misc_feature 1..825: note = Description of Artificial Sequence: Synthetic coding sequence
  source 1..825: mol_type = other DNA
atggtggtggaattcaggcacatgagaaaccacgcctatgaacctcttgcctcctttttggatttcataacttactcatatatgattgataacgtcatactgctcatcacaggcactctccaccaaaggagcatcgctgagctggtgccaaaatgtcaccctcttggtagtttcgaacagatggaagctgtaaacattgcacagactccagccgagctctacaacgcaatactcgttgatacacctctggcagcatttttccaggactgtatttccgaacaggaccttgacgagatgaatattgagattattcggaatacactctataaggcctatctggaatccttttacaagttctgtacgttgctgggcggcactacagctgacgccatgtgcccaatcctggagtttgaggctgaccgcagagcttttatcattaccattaattcatttggtaccgagttatcgaaagaggaccgtgcaaagttattcccccactgtggccgactttacccggagggtcttgcccagctggccagggccgatgactatgagcaggtgaagaacgttgcagactattatcccgagtacaaactgctgtttgagggagccggatccaatccaggggataagacactcgaagacaggtttttcgaacatgaggtgaagctcaataagctggcatttcttaatcaattccactttggcgtgttttacgcatttgtcaagctaaaggaacaagagtgtagaaatatcgtctggattgctgagtgcatagcccagcgtcacagagcgaagatcgacaactatatacccattttctag

SEQ ID NO: 109083 - DNA, 1179 bp, synthetic construct
  misc_feature 1..1179: note = Description of Artificial Sequence: Synthetic coding sequence
  source 1..1179: mol_type = other DNA
atgtccttcttccccgagctgtacttcaacgttgacaatggatacttggaaggacttgttcgtggcttgaaagctggggtgctatcccaagccgattaccttaacctcgttcagtgcgaaaccctggaggacctgaagttgcacctccagagtactgactatggaaatttcctggccaatgaggcctctccactaaccgtcagcgtcattgacgatcggctgaaagagaagatggtggtggagtttagacacatgaggaaccatgcctacgagcctctcgcgtctttcctagactttatcactcaggagagcgaggctggaacccccgagggcccgggaaacatgccaaaactgggtagccgcccctctcctggccacaggccacctttcctgagggtgagtctgctgccttggccaccttcgagctattcctacatgattgataatgtgattctgcttatcacgggcacactccaccagaggtcaatcgccgagctcgtcccgaagtgtcacccactcggctcatttgagcagatggaggccgtgaacatcgcacagacccctgccgaactatataatgcaatcctcgtagatacccctttggccgcctttttccaggactgcatttcagaacaggaccttgatgagatgaatattgaaatcattagaaataccctgtacaaagcttacctggagagcttttacaagttttgcacattattaggtgggacaacagcagacgccatgtgccctatccttgaattcgaagctgacagacgggcctttattatcacaatcaacagtttcgggacagaattgagcaaggaagatcgagccaagctgtttcctcattgcggccgactatatcccgaaggcttagcacaactcgcgcgggccgacgactacgagcaggtgaagaatgtggccgattattaccctgaatataagttactattcgaaggagccggaagtaaccccggggacaagacattggaggatcgcttcttcgagcacgaggtcaagcttaataagttggcgttcctaaatcaattccactttggggttttctacgccttcgtgaaactgaaggagcaggaatgtcggaatatcgtgtggatagcggaatgcatcgcccaacgacatcgcgcaaagatcgacaactatatcccgatcttttag

SEQ ID NO: 109084 - DNA, 1149 bp, synthetic construct
  misc_feature 1..1149: note = Description of Artificial Sequence: Synthetic coding sequence
  source 1..1149: mol_type = other DNA
atgaccgaattctggcttatttctgccccaggggagaagacctgccagcagacctgggagaaactgcatgctgcaacttccaagaacaataatctggcagtcacctctaaattcaacatccctgatctgaaggtcggcactcttgatgtactggttggtctgagcgacgaattggccaaattggacgcatttgttgaaggagtagtgaagaaggtcgctcagtacatggccgatgtactggaagactccaaagataaagtccaagagaatttgctagccaacggcgtggatctagtcacatatataacgagattccagtgggatatggcaaagtatcccattaagcagagcttgaaaaatatctcagagattattgccaaaggcgtgacacagattgacaacgatcttaagtcgcgtgcgtccgcatataataatctcaagggcaatctccagaacttagagcgaaagaacgccgggagcttgcttacgaggtccctggcggaaattgttaagaaagacgatttcgtgcttgactcagaatacctggtgaccctgctggtggtcgtgcctaaactcaatcacaacgattggattaaacaatatgagacccttgctgaaatggtggtgccacggtcctctaatgtgctgtcggaggatcaagactcttatctgtgtaacgtgacactgtttaggaaggcagtggatgattttcgacataaggccagagaaaacaaatttattgtgagagattttcagtacaacgaagaggagatgaaagcagataaggaagagatgaacaggctgtcgacggacaagaagaagcaatttggccccctcgtgaggtggctcaaagtgaacttttctgaggcattcattgcatggatacatgtcaaagccctcagagtttttgtggaaagcgttttgcgctacggcttacctgtaaatttccaggcgatgctgctgcagcctaataaaaagacgctgaagaagctacgtgaagtgctccatgagttgtataagcacctggacagttcggctgcagcgattattgacgcacctatggatattcccggtctgaatctgtcccaacaggagtattacccttacgtgtactataagatagattgcaaccttttggagttcaagtag

SEQ ID NO: 109085 - DNA, 1149 bp, synthetic construct
  misc_feature 1..1149: note = Description of Artificial Sequence: Synthetic coding sequence
  source 1..1149: mol_type = other DNA
atgaccgagttctggcttattagtgcaccaggggagaagacttgccaacaaacctgggagaaattacacgctgcaacatcaaaaaataacaacctggcagtgaccagtaaattcaatatccctgacctgaaagtgggcacactggatgtcctggttgggctgagcgatgaactcgccaagttggacgctttcgttgagggcgtcgttaagaaggttgcgcagtatatggcggacgtactcgaggactcaaaggacaaagtgcaagaaaatctgttggcgaacggcgttgacctggtcacttatatcacccgctttcaatgggatatggctaaatacccaatcaagcaatccttgaaaaacatctctgagatcattgcaaagggtgtgactcagattgataacgatctcaagtcacgcgcctctgcgtacaacaatctcaagggtaacctgcagaatctggagaggaagaacgcaggaagcttgctaacacggagcctggccgagattgtcaagaaagatgacttcgtactcgatagcgagtacctggtcactctgctggtcgtggtgccaaagctgaaccacaatgactggattaaacagtatgaaaccttagccgaaatggtggttcccaggagcagcaatgttctgtctgaggaccaggacagctatctctgtaatgtaacactctttcggaaggctgtcgacgactttcgtcataaggccagagaaaataagttcatcgtcagagactttcaatacaacgaggaggaaatgaaggctgataaggaagagatgaataggctgtcaaccgataagaaaaagcaatttggccctctggtgagatggctcaaagtcaatttctcagaggctttcatagcgtggatccacgtcaaagcgctgagagtgttcgtggagtccgtgctccggtacggtctgcctgtcaactttcaggcaatgctcctacagccaaataagaagacccttaaaaaactccgggaagtgttacatgagctttacaaacacctggattcatctgctgcagccataatcgacgcccccatggatatacctggactgaatctgagccagcaggagtactacccctacgtgtactacaaaattgattgtaatctcttagagttcaagtag

SEQ ID NO: 109086 - DNA, 1053 bp, synthetic construct
  misc_feature 1..1053: note = Description of Artificial Sequence: Synthetic coding sequence
  source 1..1053: mol_type = other DNA
atggcagtcttcgtcgtcttgctggctctcgtggccggtgtcctggggaatgagttttccatccttaagagcccaggcagtgtggtattcaggaacggcaactggccgattcccggtgagcgaattccagatgtagccgccttaagtatgggatttagtgtcaaagaggacctttcctggcctggtctggcggttggaaacctgttccataggccgcgggctactgtcatggttatggtgaagggggtcaacaaactcgcattgccccccgggtccgtgatctcctaccccctggagaacgctgtgcccttctcgctcgacagtgttgccaattccatccactctctgttttccgaagagaccccagtggttttgcagctggcgccgtctgaagagcgtgtctatatggtcgggaaggctaattccgtgtttgaggatctatcggtcactctgcgacaactgagaaaccgcctgttccaagaaaattcggtactctcgtctctgcctctaaactctttgagccgtaataacgaagttgaccttctcttcctctctgagttgcaggtcctccacgacatctcctcattactgtcgcggcacaagcacctggccaaagatcacagtccagacctctacagcctggagttggccggactcgacgagattggtaaacgctacggcgaggatagcgaacaattccgggatgcaagcaaaatccttgtcgatgccctgcagaaatttgccgatgatatgtatagcctgtacggtggcaatgccgtcgtggagctggttactgtgaagagcttcgatacatccctgattcggaaaacacggacgatactggaggctaagcaagctaaaaatcccgctagcccctataacttggcctacaagtataacttcgagtacagcgtagtgttcaacatggttctatggataatgatcgcccttgccctagctgtgattattacttcttacaacatctggaatatggatcctgggtatgattccataatctatcgtatgaccaatcagaaaattcgcatggattag

SEQ ID NO: 109087 - DNA, 732 bp, synthetic construct
  misc_feature 1..732: note = Description of Artificial Sequence: Synthetic coding sequence
  source 1..732: mol_type = other DNA
tgatgccctgccggcccatttagggtcgcccctcagtgctgcgggcgtcgagggacaatggccgtattcgtggtgctcctggcacttgttgccggggttttgggaaatgaatttagcattctgaaatcccctggaagcgtggtttttcgaaacggcaactggccaatccctggtgagcggatccccgacgtggcggctctgtccatggggttttccgtgaaagaggacctctcctggcctggccttgcagtgggcaacctgtttcaccgccctagagccacagtgatggtcatggtaaaaggggtgaataagctggcgctccccccaggttccgtgatatcttaccccctcgagaacgtcgaccttcttttcctgtctgaacttcaggtattgcacgatatttcaagcctgctgtctagacacaagcacctcgcaaaagatcacagcccagatctttatagcttggagttggccggactggatgagattggaaagcgctacggcgaggatagcgagcagttccgcgacgcatctaagatccttgtagatgcattacagaaattcgcagatgacatgtacagtctttatggaggcaatgctgtggtggagttagtcactgtcaaaagcttcgatacatcgttaattcgaaagacacgaactattctcgaggccaagcaggccaagaaccctgcctcaccctataatctggcatataaatacaacttcgaatag

SEQ ID NO: 109088 - DNA, 612 bp, synthetic construct
  misc_feature 1..612: note = Description of Artificial Sequence: Synthetic coding sequence
  source 1..612: mol_type = other DNA
gaatccgagagggttactagttcacggtgtggctgtcgaccttgcccagctggccctttcagagtcgcaccacagtgttgtggccggagaggaactatggcggtgtttgtggttttgttggccttagtagccggggtgctgggaaatgagtttagcatcttgaaaagtcctgggagtgtggtcttcagaaacggcaactggcccataccgggtgagagaatccccgacgtcgctgccctctcaatgggttttagtgtgaaagaggatttgtcatggccaggcctcgctgtcggcaatctcttccacagaccaagagcaactgtcatggtgatggtcaaaggcgttaataagcttgccctgccacctggctcagtgatttcatatcccctcgaaaacagggtttacatggtcgggaaagccaatagcgtgtttgaggacctgagcgtgactctgcggcagctgcgcaaccggttgtttcaggaaaatagtgtcctttcctcactgcccttgaactctctctcgcggaataatgaggtggatcttctgtttctgtccgagctccaggtactccacgatatatccagcctgctgagtcgccacaagcacctgtag

SEQ ID NO: 109089 - DNA, 780 bp, synthetic construct
  misc_feature 1..780: note = Description of Artificial Sequence: Synthetic coding sequence
  source 1..780: mol_type = other DNA
tgagtacctcccgcccgctccgtcagcccacgcagcgctgccgccgctgccgccccctggctttgcctctcatgttcctggagatggtggcgtgatctcagctggccgggcctggcagtaggtaacttgtttcatcgcccgcgggcaaccgtgatggtgatggtaaaaggcgtgaacaaactggctctgccccccgggagcgtgatctcctatccactcgaaaatgcagtgcccttcagcctggattctgtggctaattcaattcatagccttttctcagaagagacccccgttgtcctgcagctcgccccttccgaagaaagagtctatatggtcgggaaagccaacagtgtgttcgaggatttaagcgtcacacttaggcagttgagaaatcggctcttccaggagaactcagtgctatcctcgctgcccctgaattctctgagcaggaacaatgaagtggatctgttgtttctgagcgagctccaggtgctccacgatatttcgagcctcttgtctaggcacaaacacctggcaaaagatcatagccccgacctgtatagcctcgagctggcggggttggatgagatcgggaaacggtacggcgaagacagcgagcagtttcgtgatgcctctaagatattggtcgatgcattacaaaaatttgccgatgacatgtacagtctgtacggggggaacgcggttgtggaacttgtgactgtaaagagcttcgacacctctctgatcaggaagaccagaacgattctcgaggccaagtag

SEQ ID NO: 109090 - DNA, 957 bp, synthetic construct
  misc_feature 1..957: note = Description of Artificial Sequence: Synthetic coding sequence
  source 1..957: mol_type = other DNA
atggccgtgtttgttgtgctgctggccctggtcgccggcgtgttaggaaatgagttcagcatcctgaagagtccggggtcggtcgttttcaggaacgggaattggccaatccccggtgaaagaatacccgatgtagccgcactctcaatgggcttttctgtcaaagaggacctctcttggcccggacttgcagtggggaacctgttccatcgccctagagccaccgtaatggtcatggtgaaaggcgtgaacaagcttgccctccctcctggcagcgtcatctcttacccgctggagaaccgggtatatatggtagggaaagcgaacagtgtttttgaggacctgagtgtgactctgaggcagctgcgcaaccgactgttccaggagaattccgtgctgtccagtctccctctgaacagcctatcccgtaataacgaagtggatctactcttcctgtctgaactccaggtcctgcatgacatcagtagcctgctgagtcgacacaagcacctggccaaggaccattcacccgacctgtactctctcgaattggctggattagacgagattgggaagaggtatggcgaagacagtgagcaattcagagacgcttctaagatattagtggacgctctgcagaagtttgccgacgatatgtacagcctttatggcggcaatgccgtggttgagttggtgacagtgaagtcattcgatacttccctgatcaggaaaacgagaacaattctggaagctaagcaagccaaaaaccccgcctccccatataatctggcctacaagtataactttgaatactctgtagttttcaacatggtgctctggattatgattgctctggctctggcagtgatcataaccagttataatatttggaatatggatcctggttatgattctatcatatatcgtatgacaaatcagaagatccgcatggactag

SEQ ID NO: 109091 - DNA, 819 bp, synthetic construct
  misc_feature 1..819: note = Description of Artificial Sequence: Synthetic coding sequence
  source 1..819: mol_type = other DNA
atggccgtgttcgtggttctgcttgccctcgtggctggggtgcttgggaacgaattctccatcctgaaaagccccggttccgtggtgtttcggaatggaaattggccgattccgggcgagaggatccccgacgttgccgctctgagcatgggcttctcagtgaaggaagacttgtcctggcccggcctcgccgtagggaacctattccaccgtccacgcgccacagtcatggttatggtgaagggtgttaacaaactggcgttgccccctgggagcgtgatcagttacccactggagaatgtggatttgcttttcctatccgaactccaggtcctccatgatatttcgtctttactaagtaggcataaacatctggcaaaggaccactcgccagatctttattctctggaattggccggcctggatgagatcgggaagcggtacggtgaggattcagagcagtttcgggacgcttcgaaaattctggttgacgctttacagaagttcgcagacgacatgtattctctttacggggggaatgccgtggtggagcttgtgacagttaagtcgttcgacacaagtctcataagaaaaacccggacgatcctggaagccaaacaggccaaaaatcctgcttccccatacaatctggcctataaatataattttgagtattccgtcgtgtttaatatggtgctctggattatgatcgcattggcccttgccgtgatcatcacgtcctataacatctggaacatggacccagggtacgattctattatatacaggatgacaaaccagaagatccgaatggattag

SEQ ID NO: 109092 - DNA, 498 bp, synthetic construct
  misc_feature 1..498: note = Description of Artificial Sequence: Synthetic coding sequence
  source 1..498: mol_type = other DNA
atggccgtattcgtggttttgctggccctggtggccggcgtgctgggtaacgagttttcaatcctaaagtctcctgggagcgtagtttttagaaatggcaattggcctatccccggagagaggatacccgacgtggcagccctgtcgatgggcttttccgtgaaagaggacctctcatggccaggccttgctgtcggcaatctgttccacagacctcgcgccactgtcatggtaatggtgaaaggtgtgaacaaattagctctgccccctggaagcgtcatctcctaccctcttgagaacgccgtgccattctccctggacagtgtggccaactcaattcactccctttttagcgaggaaactcctgtagtgctgcagctagccccctccgaggaacgcgtgtacatggtcggaactatgaagctgacctgcagcttttttcttaactgcaaatgctacatgatttttcaggcttgctgtttggtgatttccatttag

SEQ ID NO: 109093 - DNA, 825 bp, synthetic construct
  misc_feature 1..825: note = Description of Artificial Sequence: Synthetic coding sequence
  source 1..825: mol_type = other DNA
atggtgatggtcaagggcgtgaataagctcgctctcccccccggttcagtcataagttaccctctggagaatgccgtcccgttttcactggactccgtcgccaactcaattcactcgctcttctccgaagagacacccgtggtactgcaattggccccctccgaagaacgtgtctacatggtaggaaaagcaaattcggtgtttgaagacctgagcgttacattgcggcagctgagaaataggcttttccaggagaactccgtgttgtcctcgttacctcttaattccctgtctcgaaataatgaagtcgatctattattcctcagcgagctccaagtcctacacgatatctcctcgctcttgagtcgacataaacaccttgcgaaggatcattcccccgacctgtattcattagaacttgccggactggacgagattggcaaacggtacggcgaggactccgaacaatttcgggacgcttccaaaatccttgtggatgccttgcaaaagtttgccgacgatatgtactctctctacggcggcaacgccgtcgtggaactagtaactgttaagtctttcgatacaagcttaatccgcaagacccgaaccatactcgaagcgaagcaagccaagaatcctgccagcccttacaatttggcttacaaatacaattttgagtacagcgtggtttttaacatggtgttgtggatcatgatcgctcttgccctcgctgttatcattacttcctacaatatatggaatatggaccctggctacgacagcatcatctaccgaatgacaaatcagaaaatcagaatggactag

SEQ ID NO: 109094 - DNA, 2517 bp, synthetic construct
  misc_feature 1..2517: note = Description of Artificial Sequence: Synthetic coding sequence
  source 1..2517: mol_type = other DNA
atgggagaactctttagaagcgaagagatgaccctggctcagctgtttctccaatcggaagcagcttactgctgcgtttctgagctgggcgagttgggtaaggtccagtttagggacctgaatccagacgtgaacgtgtttcagagaaaatttgtgaatgaggtccggaggtgtgaggaaatggaccgcaagctgaggttcgttgagaaagagatccgaaaagcaaatattccgataatggacacaggggagaacccggaggtgcctttccctcgagatatgattgatttggaggccaatttcgaaaaaattgaaaacgaactgaaggagatcaacacaaatcaagaagcgcttaagagaaactttctggagctgaccgagcttaagttcatactgagaaagacccagcagtttttcgatgaagcagagctgcatcatcagcagatggcagatcccgacctgctagaagaatcttcttcgctgcttgaaccgtctgagatgggacgaggcactccccttagactcgggtttgttgcaggggtgatcaatcgagagagaattccaactttcgagcgcatgctgtggagagtctgccgcggaaacgtttttctccggcaggccgaaattgagaacccactcgaagatccagtgaccggagactatgtgcataaatctgtatttatcatattttttcagggagatcagctgaaaaatagggtcaagaaaatctgtgaaggattccgcgcaagtctttatccttgtcctgaaacaccccaagaaaggaaggaaatggcttccggagtcaatacccgaatcgatgacttgcagatggtccttaatcaaactgaggatcatcggcagagagtgctgcaggctgcagctaagaatatccgggtttggtttataaaggtccgaaagatgaaagcaatctatcacactctcaatttatgcaatatcgatgtgactcagaagtgcttaatcgccgaggtgtggtgtcctgtgaccgacttagattccatccaattcgcactgagacggggcacagaacattcagggagcaccgtccctagcatcttaaaccggatgcagactaatcagacccccccaacatataacaagacgaacaagttcacctacgggtttcagaatatcgtagacgcgtacggcattgggacttaccgagagataaaccctgccccttatacgatcatcacatttcctttcctgttcgcggttatgtttggcgacttcggacatgggatactcatgaccctctttgccgtgtggatggttcttcgagagagcagaatcctatcacagaagaacgaaaacgaaatgttttctaccgtgttctccgggaggtatattattctgctgatgggggttttcagtatgtatactggactgatctacaatgattgtttttccaaatccctgaacatattcggttcctcctggagcgtcagaccaatgtttacatacaattggacggaagagaccctaagaggcaatcccgtgctccagctcaatcctgctctgcccggagtattcggcggcccctatcctttcggcatcgacccgatatggaatatcgctactaacaaattgacgttcctcaattccttcaagatgaagatgtccgtcatcctgggcatcattcacatgctgttcggagtgtcactctcactctttaatcatatatactttaaaaaaccattgaatatatactttgggtttatccccgagattatttttatgacctccctttttgggtacctcgttatactcatattctacaagtggacagcatatgacgcgcatacttctgaaaacgccccttcactccttatacacttcatcaatatgtttctgtttagttacccggaatcaggttacagcatgctgtatagtggacaaaaaggtatacagtgttttttggtggtagtggccctattatgcgtaccatggatgttactctttaagccactcgtgttgagacggcagtacctcaggagaaaacacttgggcaccttgaattttggaggcatacgagttggcaatggtccgaccgaggaagacgcagagataatccagcatgaccaattgtccactcattctgaggatgccgacgagttcgactttggcgatactatggtgcatcaggctatccatacaattgaatactgcctgggttgcatcagcaacaccgcaagctatttgaggctgtgggccctctccttggcccacgcacagttatccgaggtcctgtggacaatggtgattcacataggcctctccgtgaagtccctcgcagggggcttggtgctgtttttcttttttaccgcattcgctaccctcacagttgctatcctcctgatcatggaggggttgagcgccttccttcatgcattgaggttacattgggttgaattccagaataagttttacagtgggactgggtttaaatttctgccctttagctttgagcatatccgcgagggcaagtttgaggagtag

SEQ ID NO: 109095 - DNA, 2514 bp, synthetic construct
  misc_feature 1..2514: note = Description of Artificial Sequence: Synthetic coding sequence
  source 1..2514: mol_type = other DNA
atgggcgagctgtttaggagcgaggaaatgaccctggcacagctctttctccagtcagaggccgcttattgctgcgtgtccgaacttggcgaactaggtaaggttcagttccgcgatctgaatcctgatgtcaacgtttttcagagaaagtttgttaacgaagtgcgaagatgtgaagagatggaccggaagcttagatttgtggaaaaggagattcggaaggctaacattcccataatggatacaggggagaacccagaggtcccctttccacgagacatgatagatcttgaggctaactttgagaagatcgagaacgaactcaaggagattaatacgaatcaagaggccctgaaaagaaacttcctggagttaactgagctgaagtttattcttaggaagacccagcaatttttcgatgagatggctgaccctgacctacttgaggaaagttcctctctacttgaaccttcagaaatgggccgcgggaccccccttagactgggtttcgtggccggggtgataaaccgcgaacgcattcctacattcgaacgaatgctgtggcgggtctgcagaggcaatgtgttcctcagacaggcggagattgaaaacccactagaggatccagtgacaggtgattatgtccacaaatcagtgttcattatttttttccaaggagaccaactgaaaaacagggtcaagaaaatatgtgaagggtttcgagcctctctttatccctgtcctgagaccccacaggaaagaaaggaaatggcgtccggagtaaatacacgaatcgatgatctgcagatggtcttgaatcagaccgaggaccatcggcagcgtgtgctgcaggctgccgcaaaaaatatccgcgtctggtttataaaagttaggaaaatgaaggccatttatcacacactgaatctatgtaacatcgatgtgacccagaagtgcctgatcgcggaggtctggtgcccagttaccgatcttgatagcatccagtttgccctgcggcgtgggacagagcactccgggtccacagttccctcaatattaaatcgtatgcagactaaccagaccccaccgacatataacaaaaccaacaaatttacgtacggctttcagaacattgtggacgcatacggaattggtacttaccgggaaattaacccggctccgtataccattataacatttcccttcttgttcgcagtgatgtttggcgactttggtcacggcattctgatgacgctgttcgcagtgtggatggttctgcgcgaatctaggattctaagtcaaaaaaatgaaaacgaaatgttttcaactgtcttttccggccggtatataattctgttgatgggcgtctttagtatgtacactggcctaatctacaatgattgtttcagtaagtctttgaatatcttcgggagctcatggtcagtcaggccaatgtttacctataactggacagaagagacactgcgcgggaacccagtcctgcagcttaacccagccctaccgggcgtttttggaggtccctaccctttcggaatcgaccccatttggaacatcgccaccaacaaattaacatttctgaacagttttaagatgaagatgtccgtgattttagggatcatccacatgttgttcggagtgagtttatctctcttcaatcatatctacttcaagaagcccctaaacatatacttcggattcattcctgagattatattcatgacgagcttgttcgggtacctagtaatcttgatattctataaatggaccgcttatgacgctcacacatccgaaaacgccccatctctcctaattcatttcattaacatgtttcttttcagctacccagaaagcggctactccatgctttactctggtcagaaggggattcaatgcttcttggtggtagtcgcactgctctgcgtcccttggatgctccttttcaagccgcttgttcttaggaggcagtatctgagacggaagcacttagggactctgaattttggagggatccgggtgggcaatgggcctacagaagaagatgccgagatcattcaacacgatcagctcagcacccactcagaagacgccgacgaaccctccgaggatgaggtgtttgactttggggacacaatggtacatcaggccattcacactattgagtactgtcttgggtgcattagcaacactgcttcctacctccgcttgtgggccctgtcactcgcccatgcccagttaagcgaggttttatggactatggtaattcacatcggcctgagcgtcaaaagtttagcgggcggcctggtcctttttttcttctttacggcgttcgcaacccttaccgtggctattctgctgataatggagggactgagcgccttcctgcacgccttgaggcttcactgggtggagtttcagaataagttctatagcggcacgggcttcaaatttctcccctttagttttgagcatatacgcgaaggcaaattcgaggagtag

SEQ ID NO: 109096 - DNA, 2496 bp, synthetic construct
  misc_feature 1..2496: note = Description of Artificial Sequence: Synthetic coding sequence
  source 1..2496: mol_type = other DNA
atgggcgaattgtttaggtctgaggaaatgaccctcgcacagctctttcttcagtccgaggcagcctactgttgtgtgagcgagctgggggaactggggaaggtgcagttcagagacttgaatcctgacgttaacgtttttcagaggaaatttgtcaacgaggtcaggagatgtgaggagatggaccggaagctaagattcgtggagaaggagattcgcaaagctaacatccctatcatggataccggggaaaacccagaagttcctttccctcgagatatgatcgatctcgaagccaatttcgagaaaatcgagaacgagctgaaggaaatcaacaccaaccaggaagcactgaagaggaatttcctggagctcaccgaattgaagttcattcttcgcaaaacacagcaattcttcgatgagatggccgaccccgacctgctcgaagagagctccagtctgctagagccttccgaaatggggcggggtaccccactacggctgggcttcgttgctggggtgatcaatcgagagaggatccccacgttcgagagaatgctatggagggtatgccgcggcaacgtcttcctgagacaggctgagatcgaaaacccgttagaagacccagtcactggcgactatgttcataaatctgtatttattatcttctttcagggagatcaactgaaaaatagagtcaagaaaatttgcgaaggctttcgggcctctctgtacccctgccccgagactcctcaagagagaaaggagatggccagcggagtcaacactcgaattgatgatctgcagatggtgctgaatcagacagaggaccaccggcagagagtgctgcaggctgccgcaaaaaacatacgtgtgtggtttatcaaggtcagaaagatgaaagctatctaccatactcttaacctctgtaacatcgatgtaactcagaagtgtttgattgccgaagtatggtgtccggtgactgatcttgactcaatacagtttgctctgcggcggggcactgagcactctggcagtaccgtgccctccatcctaaatcgtatgcagaccaatcagacccctccaacatacaataaaacgaacaagttcacgtacggcttccagaacatagtggacgcttatggtatcggcacctacagagaaatcaatccagcgccctacacaatcattacttttccctttctgtttgccgttatgtttggcgactttggccacggcatactaatgaccctgttcgccgtatggatggtgctgagggaatctcgtattctcagtcaaaaaaatgaaaatgagatgttttctactgtcttctcaggaaggtacataatcctccttatgggagtttttagcatgtacacaggattgatatataacgactgtttttccaagtcactcaatatttttgggagtagctggtccgttaggcctatgttcacctacaactggacagaagagacattaaggggaaatccagtgttgcagctgaatcctgcgttgcctggggtcttcggaggaccttaccctttcggtatagaccctatctggaatatagccacaaacaaactcacttttcttaactctttcaaaatgaagatgagcgtgatcctgggtattattcatatgttgttcggtgtgagtctgagtctgttcaatcacatctactttaagaagccactgaacatctatttcggctttattccagaaatcatattcatgacctcactcttcggatatctggtcattctgatcttctacaagtggacagcctatgatgcccacacatccgaaaatgcaccctccctgcttatccactttattaacatgtttctgttctcatatccggaaagcggctactcaatgctgtactctggccagaagggaattcaatgctttcttgtggtggttgccctgttgtgcgttccatggatgcttttattcaagcctctcgtcctgcgtcgtcagtatctgcgcaggaagcacttggggacccttaacttcggcggaattagggtgggcaacggccctacagaggaggatgccgaaataatccagcatgatcagctatctactcatagtgaggatgcagacgaattcgactttggggatactatggttcaccaggctatccacaccatcgagtactgtctcggttgtatcagcaacaccgcctcctacctcagactgtgggctctctccttagcccacgcccagctgtccgaagtcttatggacaatggtgatccatattggtctgtccgtcaaatccctagccggcggccttgtcctgttcttcttctttacggccttcgctaccctgacggtggccatcctgctgatcatggagggcctctcggcatttctgcacgcccttcgactgcactgggttgaattccagaataaattttacagtgggaccggattcaagtttctacccttctcatttgaacacatcagagagggcaagttcgaggagtag

SEQ ID NO: 109097 - DNA, 2367 bp, synthetic construct
  misc_feature 1..2367: note = Description of Artificial Sequence: Synthetic coding sequence
  source 1..2367: mol_type = other DNA
atgggagagctgtttcggtccgaggaaatgaccctcgcacagctcttcctgcaaagcgaagctgcttattgctgtgtgagtgagctgggggagctgggtaaggtgcaatttcgagatttaaatcctgacgttaatgtgtttcaaaggaagtttgtcaatgaggtccggaggtgtgaagaaatggataggaagcttagatttgtcgagaaagagatccggaaagctaatattccaatcatggacactggcgaaaaccccgaggttccatttccgcgagacatgatcgacctagagatggccgatcctgatctcctagaggagtcatcatctctcctcgagccctcagaaatgggcagagggacgcctttacgcctcggcttcgtcgcaggggtcatcaaccgggagaggataccaacttttgagagaatgctgtggcgggtttgccgcggaaacgtcttcttaaggcaagctgagattgaaaaccctctagaggaccccgtgacaggcgattatgtccacaagagcgtttttattatcttctttcagggggatcagctgaaaaacagagttaaaaaaatctgtgaagggttcagagccagcttatatccttgccccgagaccccacaggaacgcaaggagatggcatctggtgtgaatacaaggatcgatgatctccaaatggttctgaatcagactgaagatcacaggcaacgggttctgcaggcggcggccaagaatattcgagtgtggttcatcaaagtgcggaagatgaaggctatctatcacacactcaatctatgtaatatcgatgtgacacagaaatgccttatcgcggaagtatggtgccctgtgactgacctcgatagcatccaattcgcgcttcgtcggggaaccgaacatagtggatctacagtcccttcaatcctgaaccggatgcagacgaaccaaaccccacccacttacaataaaacaaacaaatttacctatggcttccaaaacatagtagacgcctatggcataggaacatatcgggagatcaatccagccccatacacgatcattacattccctttcctctttgcagtcatgtttggcgattttggccacggtatcctcatgacgctgtttgccgtttggatggtccttcgagagtccagaatcctgtcccagaagaacgaaaatgagatgtttagtaccgtttttagtggccgttacattatcttactcatgggcgtcttcagtatgtatactggactcatatacaacgactgcttctcgaagagtctgaacatttttggaagttcatggagcgttagaccaatgttcacttataactggaccgaagagacacttcgaggtaaccccgtgctccaactgaatccggcccttccgggcgtttttggcggtccctaccccttcggaatagatccaatttggaacattgcaaccaataaactgacatttttgaatagcttcaagatgaagatgagtgtgattctcgggataatccacatgttgttcggggtgtccctctctctttttaaccacatctacttcaagaagcccctcaatatttactttggcttcatccccgagatcatctttatgacgtctctgtttggttatttggtgatcctcattttttataaatggaccgcttatgacgcccacaccagtgaaaatgcgcctagcctcctgatccactttataaatatgttcctgttcagttacccggaaagcgggtactctatgctttatagtggacaaaagggcatccagtgtttcttagtggtggtagctctgctgtgcgtcccctggatgctcttgttcaagccccttgttcttcgtaggcagtacttgcggaggaagcatcttggcacactcaatttcggcggcatacgggttggcaacggccctactgaggaggatgcggagataattcagcatgatcaactctccacccacagtgaggacgccgacgagtttgacttcggtgacacaatggtgcaccaagccatccacaccatagagtactgcctgggctgcatttcgaacactgcttcataccttaggctctgggctctgagcctcgctcatgcacaactgtccgaggtgctctggaccatggtgattcatatcggcttgagcgtgaagtcgctagccgggggccttgtgctgtttttttttttcactgctttcgcaaccctgaccgttgctattctgctgattatggagggattaagcgccttcctgcacgcgcttcgtctgcattgggtggagtttcagaacaagttttatagtgggacgggctttaagttcctcccttttagtttcgagcacattcgcgagggtaagttcgaagaatag

SEQ ID NO: 109098 - DNA, 1452 bp, synthetic construct
  misc_feature 1..1452: note = Description of Artificial Sequence: Synthetic coding sequence
  source 1..1452: mol_type = other DNA
atgcagaccaaccagacgccaccgacatataacaaaacaaacaaattcacttatggatttcaaaacatcgttgatgcctatgggatcgggacatacagggagattaaccccgccccttacacaattatcacgtttccattcttgtttgccgtgatgtttggcgactttggccacggcatcctgatgactctttttgcagtctggatggtcctgagagaatctcggatcctgtcacaaaagaatgagaacgagatgttctccactgtgtttagtggtagatacatcatcctgctcatgggtgtgttctctatgtatactggactgatttataatgattgcttttccaaatcccttaacattttcggctcctcctggtcggttcgacccatgtttacgtacaactggacggaggaaacccttagaggaaaccccgttctgcagctcaatccggctctgccgggggtcttcggaggcccctacccttttggaattgatcccatttggaacattgctacgaacaagctgacgttccttaactccttcaagatgaagatgagtgtaattctgggcattattcacatgctgttcggtgtgtccctgtcactgttcaaccacatatatttcaaaaagccgttaaatatctattttggcttcatccctgagatcattttcatgacgtccctcttcgggtacctggttatcctgatattctacaagtggactgcttatgatgcccatacgtctgaaaacgcaccatcacttctgattcactttataaatatgttcttgtttagctacccagagtcagggtattccatgctgtactccggccagaaagggatccagtgcttccttgttgtcgtcgccctcctttgcgttccgtggatgttgctctttaagccactcgtgctgcgtcgccaatatcttcgccgaaaacaccttggcacacttaactttggagggatccgcgttggcaatggtcccaccgaggaggacgccgagatcatccaacatgaccagctgtccacccactctgaggacgccgatgaacctagcgaggacgaggtcttcgactttggtgacaccatggtgcatcaagccatccatacgatcgagtactgcttgggctgcatctcaaacacagcatcctatctgcgcctgtgggctctgtcactcgcacacgcccagttatccgaggtgctctggaccatggtgattcacataggactgtcagttaaatcgctggctggagggctggtgttgttcttcttctttacagctttcgccacccttaccgtcgcaatcctgctgatcatggaaggcctctcggcattcttacacgctctgcgcttgcactgggtagaattccaaaataaattctacagcggcacagggttcaagtttctgcctttctcatttgaacacatcagagagggaaagtttgaggagtag

SEQ ID NO: 109099 - DNA, 2514 bp, synthetic construct
  misc_feature 1..2514: note = Description of Artificial Sequence: Synthetic coding sequence
  source 1..2514: mol_type = other DNA
atgggcgagctgttcagatcagaggaaatgacacttgcgcaactgttcctgcagtctgaagctgcatactgctgtgtttccgaactcggagagctcggcaaagtccaattccgcgatctcaaccccgatgtgaacgtgtttcagcgcaaattcgtgaatgaagtccgcagatgtgaggagatggatagaaagctccgtttcgttgaaaaagagataaggaaggcaaatattcctattatggatacaggtgagaaccccgaagtaccctttcctagggatatgatcgatctcgaagctaatttcgaaaagatagaaaatgagctgaaagaaattaacacaaaccaggaggcattaaaacgaaatttcctggaactgactgagttgaaatttatattgcgaaaaacccagcagttttttgatgagatggctgatcctgaccttctggaggagagtagctcactgctggagccctccgaaatgggccggggaactcctctccgactcggttttgttgccggcgttatcaatcgggaaagaatccctactttcgagcggatgctctggcgggtgtgccgaggcaacgtgttcctgcggcaggcggagatagagaatcccctcgaggatcctgtgaccggagactatgtccacaagagtgttttcataatatttttccaaggagatcagctcaaaaatcgggttaaaaagatctgcgaaggcttcagggcttccctgtacccttgccccgaaacgcctcaagagcggaaagagatggcgtccggagtaaatacgagaatcgacgatttacagatggtgctgaatcagacagaggatcaccggcagcgagtcttacaggctgcagctaaaaatatacgggtgtggttcatcaaggtaagaaaaatgaaagcaatctatcatacattgaacctctgtaacatagatgttacacagaaatgtctaatcgcagaagtctggtgtccagttaccgatctggatagcatccagttcgccctgcggcggggtacagaacatagcggctcaaccgttccttccattctcaatcgtatgcagacaaatcaaacccctccgacatacaacaagaccaataagttcacttatgggttccaaaacatagtcgacgcctacggcattggcacatacagagagattaatccggctccttacaccataattacattcccgtttttgtttgccgtaatgttcggcgactttggacacggcattctgatgacgctgttcgcggtctggatggtactgcgcgaatcaagaatcttgtcacagaagaacgagaatgagatgttttccaccgtcttttctgggcggtacataatcctcctgatgggcgtcttttccatgtatactggcttaatttacaacgattgcttcagcaagtccctcaacatatttggtagcagttggtctgttcgacccatgtttacttacaattggacggaggaaactctcagaggcaatcctgtattgcagctgaatcccgccctgccaggtgtattcggcggcccttatccttttggcatcgaccctatttggaatattgcaacaaataagcttacatttcttaactcatttaagatgaaaatgtccgtgatcttaggaattattcacatgctgttcggtgttagcctctccctgttcaaccacatctatttcaagaagccgctgaatatttactttggcttcataccggagataattttcatgacaagccttttcggatatctggtgatcttgattttctataagtggacggcatatgacgcccacacctctgaaaacgctcctagtttgttgatccactttattaatatgtttctgttttcttacccagagtccggttattccatgctttattccggccagaaaggcatccagtgcttcctagtcgtggtcgcgctgctttgtgtcccatggatgttgctctttaagcctctggtgcttcgaagacaatatttgaggcgtaaacaccttggaacacttaatttcggaggcatacgggtgggtaatggtccaaccgaggaggacgccgagattattcagcatgaccagcttagtacccatagtgaagatgctgatgagccatcaacaagcgggcagttcgatttcggcgatactatggtgcaccaggcgatccacactatcgagtattgtctgggatgcataagcaacacagccagctatttacgtctgtgggccctgtctctggcacacgctcagctctcggaggtgctgtggactatggtgatccatattggactgagtgtgaagtctctggccggcgggctggtgctttttttcttctttacagcgtttgccaccctaactgtggccatactgctgatcatggaaggactgagcgctttcctgcacgcactgcgtcttcattgggtggaatttcagaataagttctactccgggacaggctttaaattcctcccattctctttcgagcacattcgcgagggcaagtttgaagagtag

SEQ ID NO: 109100 - DNA, 2571 bp, synthetic construct
  misc_feature 1..2571: note = Description of Artificial Sequence: Synthetic coding sequence
  source 1..2571: mol_type = other DNA
atggggtctctgttccggagtgaaacaatgtgccttgcgcagctgttcctgcagtctgggaccgcctatgagtgcctgtctgcccttggggaaaaaggactggttcaattcagagacttaaatcagaacgtctcttccttccagaggaaatttgttggcgaagtgaaacggtgcgaagagctggaacgcatcttagtgtatctggtgcaggagatcaaccgcgccgacattcccctacctgagggggaggcctctcccccagccccacctctcaagcaggtcttggagatgcaggagcagcttcagaaactagaggtggaactcagggaagtgaccaaaaataaggagaaactgcggaagaatctgctggagttgatagagtatacccacatgctgcgggttacaaagacgttcgtgaagagaaacgtggagtttgagccgacttacgaggagtttccctccttagagagcgattctttacttgattacagctgcatgcagagattaggcgcaaagctcggtttcgtgagcggtctcattaaccagggaaaggtggaggccttcgagaagatgctgtggagggtttgcaagggctacaccatcgtctcctacgcagaacttgatgaaagcctcgaagatccagagactggagaggttatcaaatggtacgtcttcctaatctctttttggggagagcagatagggcacaaagtcaaaaaaatttgcgactgctaccattgccacgtgtatccctatccaaatacggccgaagaacgcagggagatccaggaggggcttaatactcgaatccaagatctctataccgtattgcacaagacggaagactaccttcgtcaggtactgtgcaaggccgctgaaagcgtttatagtagagttatacaagtaaagaagatgaaggccatctaccacatgttaaatatgtgttccttcgatgtcacaaacaaatgtttgatcgctgaagtttggtgtcctgaagccgatctgcaggatcttagaagggcgctggaggagggatccagagagtccggcgcgacaatccctagcttcatgaatatcatccccaccaaagagacacccccaactagaataagaacgaacaagttcaccgaaggatttcagaatatagttgatgcctatggagtcggttcttaccgagaagtcaatccagccttgtttactatcattacttttcccttcctgtttgccgtgatgtttggtgattttgggcacggttttgtgatgtttctgttcgctttattactggtgcttaatgagaaccaccctcgtttgaatcaaagtcaggagatcatgaggatgttctttaacgggcgttatatcctgttgctcatggggctgttttccgtgtataccggactgatttacaatgactgcttcagcaagtcagtgaacctcttcgggagcgggtggaacgttagcgctatgtacagcagtagtcaccccccggccgagcacaaaaaaatggtgctgtggaatgactcagtggttcggcataactccatcctccagctggaccctagtatacccggagtgttcaggggcccatatccgttagggatcgaccccatctggaacctcgcaacaaaccgcttgaccttcctcaatagcttcaaaatgaagatgagcgtgatactgggcatcatacatatgacttttggggtgattctgggcatttttaaccatctccactttagaaaaaagtttaacatttacctagtgagcatccctgagctcctttttatgctgtgcatttttgggtacctgattttcatgatattttacaaatggcttgtcttttctgctgagacgtcaagagttgcgcctagcatcctgatagagtttattaatatgtttctctttcccgcgagtaaaacgagcgggctttacacaggtcaggaatacgtgcagagagtgctgctggtggtcactgctctgtctgtgcctgtgctttttctcggaaagcccctgtttttgttgtggctgcataatggtcgaagctgctttggcgtgaatagaagcggctacacgcttatccggaaggacagcgaggaggaagttagtctgttgggatcccaggacatagaagaggggaaccaccaggtagaagatggctgtcgggaaatggcctgtgaggaattcaatttcggggagatccttatgacgcaagtgatccattccatcgagtactgtctgggctgtatctcaaacacagcttcttatctccgcctgtgggcactgtcattggctcacgcgcagctgtccgacgtactgtgggcaatgctcatgcgcgttggcctcagggttgacactacgtatggagtgctactgctgctcccagtgattgccctatttgctgtgctcaccatttttatcctgctgatcatggaaggcttgtcggctttcctgcatgccattcgcctccattgggtagaattccagaataaattctacgtaggggcaggcactaaatttgtgccatttagcttttccttactgagttccaagtttaacaacgacgattctgttgcttag

SEQ ID NO: 109101 - DNA, 1119 bp, synthetic construct
  misc_feature 1..1119: note = Description of Artificial Sequence: Synthetic coding sequence
  source 1..1119: mol_type = other DNA
atgggctccctcttcaggagcgaaacgatgtgtctggcccagctgttccttcaatcaggaacagcctacgagtgtctgagcgcccttggcgaaaagggtctcgtccagttccgcgacctgaatcagaatgtatctagctttcagagaaagtttgtgggcgaagtgaagaggtgcgaggaactggagaggattctggtttatctagtacaggaaattaaccgcgccgacatccccttaccagagggagaggccagcccccccgcacccccgctgaaacaggttttagaaatgcaagaacaactgcagaaactggaggtcgagctccgggaggtgaccaaaaataaagagaaactgcgcaagaatctactggaacttatagaatacactcatatgctcagggtcacaaaaactttcgtgaaacggaacgtggaattcgagccaacatatgaagagtttccgtcgcttgagagcgattccctcctggactatagttgcatgcaacgtttaggtgcaaagttgggattcgtttcaggacttataaatcaggggaaagtggaagcctttgagaagatgttgtggcgggtctgcaagggctacaccatagtgagctacgccgagctagatgaaagcctggaggacccagagacaggcgaagtgattaagtggtacgtatttcttatttctttctggggcgagcaaatcggacacaaagttaaaaaaatatgcgattgctatcattgccacgtgtacccttaccctaataccgctgaagaacgacgggaaatccaggagggcttgaatacccggatccaagacctgtacacagtcctgcataaaaccgaagactacttgcggcaggtgctctgcaaagccgcagagagtgtgtactcccgagtcattcaggtgaagaaaatgaaagcgatttatcacatgctgaacatgtgtagcttcgacgtaacgaataagtgcctcatagccgaggtgtggtgtcctgaggctgatcttcaagatctccgcagggctttagaagagggttctgtgcgcctgccctcttctccgctgcctggaaccgaggaacgccttatggagctgattaattccgagaagaagagaaagtag

SEQ ID NO: 109102 - DNA, 2523 bp, synthetic construct
  misc_feature 1..2523: note = Description of Artificial Sequence: Synthetic coding sequence
  source 1..2523: mol_type = other DNA
atggttagcgtatttcggagtgaagaaatgtgtctgtcccaattattcttacaagtagaagcggcctattgctgcgtcgccgagttgggcgagttgggtctggtgcagttcaaagacctcaacatgaacgtgaattccttccagcgaaagtttgttaacgaggtccgacgttgcgaatccctcgagcgcatcctgaggttcttagaagacgagatgcagaatgagattgtggttcagctgttggagaaatcgcccttgacacccctgccccgggaaatgatcacactggaaaccgtacttgaaaagctcgaaggcgagctgcaggaggctaatcaaaaccaacaggcactcaaacaatcttttctggagttgacggaactgaaatacctactcaagaaaacccaggatttctttgagacagaaaccaatctggccgatgacttttttaccgaggataccagcggacttctcgagctgaaggccgtacctgcgtatatgacaggcaaactgggatttatcgcaggcgtgataaatagggagaggatggcttccttcgagcggctactatggaggatttgtcgtggcaatgtgtatctcaagttttccgagatggatgcgccgctggaagaccccgtaactaaggaagaaatacaaaaaaacatctttatcatcttttaccagggtgagcagctgagacagaaaattaagaagatctgcgacgggtttcgcgctacagtgtatccatgtcctgaacctgctgtagaacgcagagagatgctagagtcggtcaatgttcgactggaagatttgattacggtgattacacagactgaatcccatagacaaaggctgctacaggaagcagcagctaactggcattcctggctgattaaggtgcaaaaaatgaaggcggtctaccatattctaaatatgtgcaacattgatgttacacaacagtgcgtaattgccgagatatggtttcccgtggctgacgcaactaggatcaaacgggctttagagcaggggatggaactgtctggaagttctatggcaccaatcatgacgacggtccagagtaaaacagctccacccacctttaacagaacaaacaagtttaccgctggcttccagaatatcgtggatgcttatggtgtaggttcctaccgcgagataaatccggcaccctacaccatcataaccttcccattcctgttcgcagtaatgttcggcgactgcgggcatggaactgttatgctgctggccgccttgtggatgatactcaacgagcgaaggctcctcagtcaaaagactgacaatgaaatctggaacaccttttttcatgggcggtatttaatcctattaatgggaatctttagcatctacacgggcctcatctacaatgattgcttcagcaaatctctgaatattttcggttctagttggtcagttcagcccatgttcagaaacggcacctggaacacacatgtgatggaagaaagcctctatctccagttagaccccgctatcccaggcgtctatttcgggaatccgtacccatttggcatcgatccaatctggaacctggctagtaataaattgacatttctgaactcttacaagatgaaaatgtccgtgatcctcgggatcgttcagatggtttttggcgtgatcctgtccctgttcaaccacatatattttagacggacgctgaatattatcctccagtttataccagagatgatctttatactgtgtctgttcggatatctagtgtttatgataatctttaagtggtgttgctttgatgtccacgtgtcccagcacgccccttccattctcatccactttataaatatgttcttgtttaattatagtgatagctccaacgccccgctgtataaacaccaacaggaagtgcagtccttttttgtagtgatggccctgatcagcgtaccttggatgctcctgatcaaaccctttatactcagagcatctcatagaaaaagtcagctccaggcctcaaggatccaggaggacgccaccgaaaatatcgaaggagactcctcgagcccttctagcaggagcggccagaggaccagcgccgacactcacggtgccctggacgatcatggcgaggaattcaactttggggatgtcttcgtacaccaggccatacatacaatcgaatactgcctgggctgtatctctaacaccgcctcgtatctgcgtctgtgggccctgagcttagcccatgctcagttgagtgaggtcctgtggacaatggtgatgaacagcgggctacaaacacgggggtggggcggaatcgtgggcgtgtttatcattttcgccgtttttgccgtcctgaccgtagctatcttacttatcatggagggtctgagtgccttcttacacgcactgcggctgcactgggtggaatttcagaataaattttatgtcggggacgggtataaattctctcctttttcatttaagcacattctggatggtactgcagaggaatag

SEQ ID NO: 109103 - DNA, 2523 bp, synthetic construct
  misc_feature 1..2523: note = Description of Artificial Sequence: Synthetic coding sequence
  source 1..2523: mol_type = other DNA
atggttagcgtgtttaggagtgaggagatgtgcttgtcacagctcttcctgcaagtagaagccgcctactgttgcgtagcagagctgggtgagctgggcctggttcagtttaaggatctaaacatgaacgtcaatagcttccaaaggaagtttgtgaatgaggtgcggaggtgtgagagcctcgagaggattctccgcttcctcgaggacgagatgcaaaacgaaatcgttgtgcagttgctcgagaaaagtccactgacaccccttccgagggagatgatcaccttagaaaccgtgttagaaaagctcgaaggcgagttgcaggaggccaaccagaatcaacaggctctcaaacagagtttcctggaattgactgaactcaagtacctcctcaagaagacacaggattttttcgaaacggaaacaaatctggcagatgacttctttactgaagacacaagtggtctcctagagctcaaggctgttccagcttatatgaccgggaaactggggtttatcgccggggtaatcaacagggagaggatggcctcttttgaacgcctgctgtggcggatatgtcgaggcaacgtgtatctcaagttttccgagatggatgcaccacttgaagatccagtgacaaaggaggaaatccagaaaaacattttcatcatcttttatcagggggaacagctccgccagaagatcaagaagatctgtgatggattccgtgctacagtgtatccctgtcccgagcccgcagtggaaagacgggaaatgctggaatctgtcaacgtgcggttggaggatctcattacggtcatcacgcagacagagtctcatcggcaaagattgcttcaggaggcagccgcaaattggcactcctggctgataaaggttcagaaaatgaaggcagtctatcacattctgaacatgtgtaacattgatgttacacagcagtgcgtaatagctgagatctggtttcctgtggccgatgctactagaattaagcgggcactggaacaaggcatggaattgtctgggtcttccatggcacccattatgacaactgtgcagtccaagaccgcccccccgaccttcaacagaaccaataaatttaccgccggttttcagaacatcgtggatgcatacggcgtgggtagctaccgtgaaataaaccccgccccgtataccattatcacattcccctttctgttcgcagtcatgttcggcgactgtggacatggcactgtcatgcttctggctgctctgtggatgatcttaaatgagcgcaggctactctctcagaaaacggataacgaaatttggaacactttttttcacggacgatatctgattctactcatgggtattttcagcatctatacaggattaatctataatgattgtttctctaaatctctgaatatctttggaagcagctggtcagtacagccaatgtttcgaaacggcacctggaatacacacgttatggaggagagtctctacctgcagctagatcccgctatacccggcgtttatttcggcaacccctacccttttggaattgatccaatttggaatttagctagcaataagttgaccttcctcaatagttataagatgaaaatgagcgtgatcttaggtatcgtgcagatggtcttcggcgtgatcctctcattatttaatcacatctattttaggcggacactcaacataatcctgcaattcatccccgagatgatttttatcctttgtctgtttggatacctcgtttttatgattatctttaagtggtgctgcttcgatgtgcacgtatcccagcacgccccaagtatcttgattcactttatcaacatgttcctattcaactatagcgattccagcaacgcacccctttacaaacatcagcaggaagtccagtcattcttcgtggtgatggctctcatttcagtgccatggatgctgctgattaaaccgtttatcctccgggcctcgcacagaaaaagccagctgcaggcctctcggatccaggaagacgccaccgagaatatcgaaggagattcctcaagtccgtcctcccgcagtggccagagaaccagtgctgacacacacggcgctcttgacgaccacggtgaggagtttaattttggcgatgtattcgtccaccaggccattcatacaattgagtattgtctcggttgcatttcaaacactgcatcttacctgagattgtgggcattgtctctggctcatgcccaactgtccgaggttctgtggactatggtcatgaacagcggcctgcagaccaggggatggggcggtattgtgggcgtgttcatcatctttgcggtctttgcggttctaacggttgctatactgcttattatggagggactaagcgctttcttgcatgcactgcgtcttcactgggtcgagtttcaaaacaagttctatgtaggggatgggtataaattcagcccgttcagtttcaaacatatcctagacggcacagcagaggagtag

SEQ ID NO: 109104 - DNA, 2523 bp, synthetic construct
  misc_feature 1..2523: note = Description of Artificial Sequence: Synthetic coding sequence
  source 1..2523: mol_type = other DNA
atggtgagcgtgtttcgctccgaagagatgtgcctctcccagttgttcctgcaggtggaagcggcttattgctgcgtcgccgaactaggggagctcgggctcgtgcagttcaaagatctgaacatgaacgtaaatagcttccagcgcaagtttgtgaatgaggtacgacggtgcgagtcacttgagcggattctgaggttcttggaagatgagatgcaaaatgaaatcgttgtacagctgctcgaaaagagccccctgacgcccctcccgcgtgaaatgataactcttgaaactgtcctcgagaaactggaaggggaactacaggaagccaaccagaaccagcaggccctaaagcagtctttcttggagctgactgaactcaaatacctgctaaaaaagacccaggatttctttgaaacagaaaccaatttggccgatgacttctttactgaagacacctcaggtcttttggaactgaaggctgtcccggcatatatgactgggaagctcggctttatcgccggagtcatcaacagagaacgcatggcatccttcgagaggttgttgtggagaatctgccggggtaatgtgtatttgaaattttcagaaatggatgcacccctagaagacccagtgacaaaggaagaaatacagaagaacatctttataatcttttatcaaggcgaacagctgagacagaagatcaaaaaaatctgcgatgggttccgggcgacagtgtatccgtgccctgagccagcggtggagaggagggagatgctggaaagtgtgaacgtgaggcttgaggacttgataaccgtcatcactcagacagaaagtcacaggcaaagattgctacaggaggcagcagcaaactggcatagctggctgatcaaggtacagaagatgaaggccgtgtatcatatcctgaatatgtgtaacatcgacgtcacccagcagtgcgtcatcgccgagatttggtttccggtggcagatgcaacccgtatcaagagggccctggaacagggcatggagctgtccgggagctctatggcgccaataatgacgactgtgcagtcgaagactgcccctccaacgtttaacagaaccaataagtttacagcgggatttcaaaacattgtcgacgcctacggcgttgggagttatcgtgaaatcaatcctgcaccgtatacaattattaccttcccgttcctctttgccgtgatgtttggggactgcggacatggcacagtcatgttactggctgccctctggatgatattaaatgagcggagactgttgtctcagaaaaccgataatgagatctggaatactttcttccacggaagataccttatcctgctgatgggcatcttctctatctacaccggactgatctacaatgattgcttttctaagtctctgaatatctttgggtcttcatggagtgtgcagcccatgttccggaacggaacatggaatacccatgtcatggaagaaagtctgtacctacaactggatcctgcgatccctggagtgtattttgggaacccatatccattcggaattgaccctatttggaatctggcttcaaataagctcacattcctgaactcttataaaatgaagatgtccgtgatcctgggcattgtccagatggtgttcggtgtgatactctctctgtttaaccacatctatttcagacgcactctgaatatcatcctccagtttatcccggagatgatttttatcttatgcctgtttggatatctcgtctttatgataattttcaaatggtgctgtttcgatgtgcacgtttctcagcacgccccttccatactcattcacttcataaatatgtttctttttaattacagcgacagttctaatgccccgctatacaagcaccaacaggaagtacagtccttttttgtggtaatggctctgattagtgtgccttggatgctgctaataaagccgttcatcctccgagcgagccacaggaagtcacagttgcaggcctcccgcatccaggaggacgctacagagaatatcgaaggggactcatcatccccttcttcccgctcaggacagcgcacaagtgcggacacccacggagccctggacgaccacggtgaggagttcaattttggtgatgtatttgtgcatcaggccatacataccatcgagtactgtctagggtgtatcagcaataccgcgtcctacctcaggctgtgggctctctctttggctcacgcccagctgtcagaagtcctgtggacaatggttatgaattcgggcttgcaaactcgcggttggggggggatcgtcggggtgttcatcatcttcgctgtttttgcagtgctgacggtcgcaatcctgctgattatggaaggcctatccgccttcctgcacgctctgagattacattgggtcgaatttcaaaacaagttctacgtgggtgatggatacaagttttcaccatttagttttaaacatattcttgacggcacggccgaggaatag

SEQ ID NO: 109105 - DNA, 3108 bp, synthetic construct
  misc_feature 1..3108: note = Description of Artificial Sequence: Synthetic coding sequence
  source 1..3108: mol_type = other DNA
atggggaaggccgagaactacgagctgtactctgtggagcttggaccagggcctgggggagacatggccgccaagatgtccaaaaagaaaaaagcaggcggaggcggaggcaaacggaaagagaaactcgaaaatatgaaaaaagaaatggaaattaacgaccatcagcttagtgtagcagaacttgagcagaaataccaaacgtctgctactaaaggcctgagtgcgagtcttgcagctgagctgctcctcagagatggccctaatgcacttcgtcctccgaggggaacacccgagtacgtgaaattcgcccggcaactggccggcgggctccaatgcctgatgtgggtggccgcagcaatatgtctcatagcattcgccatccaggcatctgaaggggacttaaccactgatgataatctgtacctggcgatcgccctgattgctgtagttgtggtaaccggctgcttcggctattaccaggagttcaagagcactaacataattgcttcttttaagaatctggtgccgcaacaagctactgtgattcgcgatggagataagttccagatcaacgccgatcaattggtggtcggcgatctggttgaaatgaagggaggggaccgtgttcctgcagacatccgtatactggccgcccaaggatgtaaggtagataactcaagcttaaccggcgaaagcgagccacagacgcggagtcccgagtgtactcacgaatccccgctggaaactcgcaatatagcctttttttctaccatgtgtctcgaaggtaccgtgcaaggattagtggtgaacacgggcgaccggactataatcggaaggatcgcttccctggcgagcggtgttgagaacgagaagaccccgattgcaatcgagatcgagcattttgtcgacattattgcaggtctggccatattatttggtgctaccttcttcatcgtcgccatgtgcattggatacacattcttgagagcaatggtattttttatggccatagtcgtggcctatgtcccagagggcctcctggcaactgtgacagtttgcctgagtctgaccgccaagcgtctggcgtctaagaattgtgtggttaagaatctagaagcagtagagacgcttgggagtacatcagtgatttgtagtgataaaaccggtacgctgacgcagaacagaatgaccgtgtctcatctgtggttcgacaaccatatccatacagccgataccaccgaggaccagagtggacaaacattcgatcagtcttctgaaacctggagggcactgtgccgcgtgctgacactgtgcaacagggctgccttcaagagtgggcaagacgccgttcctgttcctaagcggatcgtcatcggagatgcctctgagacagctctgctcaaattcagtgagttaacactggggaatgccatgggctacagagataggttccctaaagtctgcgagattccatttaacagtaccaacaagtttcagttgagcattcacactttggaagaccctcgtgacccccgccacttattagtgatgaagggagccccggagagggtgctggagcgatgcagctcgatactcattaaaggacaggagctacctctggacgaacagtggcgtgaagcttttcagactgcttatttgagcctaggcggcctgggagagagagttctggggttttgtcaactgtacctcaacgaaaaggactatcctccaggctacgcctttgacgtggaggccatgaacttccctagttctggcctctgtttcgccggactggtgtccatgatcgatcccccgcgggctaccgtccctgatgccgtgctgaagtgtagaacagctggcatccgcgtgattatggtaacaggcgatcaccccattactgctaaagctatcgcagcctccgtgggtatcatctcagagggatccgagaccgtagaggatattgccgcgcggttacgcgttcccgtcgatcaggtaaaccggaaagatgcacgcgcgtgcgttattaacggcatgcagctgaaggacatggacccatcggagctggtggaagcgctgcggactcatcccgaaatggtctttgcccggacgtcaccgcagcagaaactagtaattgtcgagtcttgccagcgcctaggcgctattgtagctgtaaccggggatggtgtcaacgactctcccgccctcaagaaggccgatattggagtggccatgggcatcgctgggtcagacgcagccaagaatgctgctgatatgatattactggacgataatttcgcaagcatcgtaaccggagtggaacagggccgtttaatttttgataacctgaagaaaagcatagcatatacattaacaaagaatatcccggagctgacaccttacttgatctacataactgtgtccgtgccactccccctcggatgtatcacaatattattcattgaactctgtaccgacatttttccctccgtatctctggcctacgagaaggcagaaagcgacattatgcacctgagacccagaaatccaaagagggaccgtttggttaatgagccattagcagcctattcttacttccaaattggagctatccagagtttcgcaggctttactgattatttcactgcaatggcccaggagggctggtttcctctgctctgtgtaggcctgcgtgctcagtgggaagatcatcacctccaagacctccaggactcctatgggcaagaatggacctttggacaacgcctataccagcagtacacctgctacaccgtctttttcatttcgatcgaggtctgccagattgccgacgttctgattagaaagaccagacgtttgtctgcattccagcaggggttctttcggaacaaaatcctcgttattgcaattgtcttccaggtttgcattgggtgcttcctctgttattgtcccggaatgcctaatatcttcaatttcatgcccattcgcttccagtggtggttagtgcccctgccatatggaatactaatttttgtgtatgatgaaattcggaaactgggggtgaggtgctgccctggttcctggtgggaccaggaactgtattattag

SEQ ID NO: 109106 - DNA, 876 bp, synthetic construct
  misc_feature 1..876: note = Description of Artificial Sequence: Synthetic coding sequence
  source 1..876: mol_type = other DNA
atggcagctctgcaagaaaagaagacatgtggacagcgaatggaggagttccagcggtactgctggaaccccgatactgggcagatgctcggccggacactaagccggtgggtgtggatcagcctgtactacgtagcattctacgtggtgatgacaggcctgttcgcgctgtgtctgtacgtactcatgcagactgttgacccatacactccagactatcaggatcagctgcggtcccccggggtcactctgcgccctgatgtctatggcgagaagggactggagatcgtgtataacgtatccgataatagaacttgggccgatcttactcagactctgcacgcttttctcgctggatattcacctgcagcgcaagaggatagcattaactgtacctctgagcagtacttcttccaggagagttttagagctccaaaccacaccaaattctcctgtaaattcacagccgatatgctgcagaactgctctgggctcgcagatcctaactttggatttgaggagggcaaaccttgttttatcataaaaatgaatcggattgtaaaattcttaccctccaacggatctgcaccaagggtggactgcgccttcctcgatcaaccacgtgagctcggacagcccctgcaagtgaaatactacccccctaacggcactttctctctgcactattttccgtattatggtaagaaagcacagccccattattcaaatccacttgtggccgcaaaactgctgaatatccctcggaacgctgaagtggccatcgtgtgcaaggtcatggccgagcacgtgacttttaataatcctcatgatccatatgagggcaaagtggagtttaagctgaagattgaaaaatag

SEQ ID NO: 109107 - DNA, 1290 bp, synthetic construct
  misc_feature 1..1290: note = Description of Artificial Sequence: Synthetic coding sequence
  source 1..1290: mol_type = other DNA
atgcagcttaggaaccccgaactccacttagggtgtgccctcgcccttagatttctcgcactggtctcttgggacatccctggcgcacgcgccctcgacaacggacttgcccgaactcccacaatgggctggctgcactgggagcgcttcatgtgcaacctcgactgtcaagaagagccagacagttgcatcagcgaaaagcttttcatggagatggcggaactaatggtgtcggaagggtggaaagacgcgggttatgaatacttatgcattgacgattgttggatggcaccacaaagggactccgagggaaggttacaggccgaccctcaacggtttcctcacgggattaggcagcttgcaaactatgtccactccaaaggcctcaaactgggtatttatgccgatgtcggaaacaaaacctgtgcaggctttcccggcagttttggatactatgatatagacgcccaaactttcgctgactggggtgtggatttattgaagttcgatgggtgttattgtgatagtctcgagaatctcgccgatggatataagcacatgtccctggccttgaaccgaacagggagatctatcgtttatagctgtgaatggcctctttacatgtggccatttcagaagcccaactatacggaaatcaggcagtattgtaaccactggcgcaacttcgctgacatcgacgattcctggaagtctattaaatcaattctggattggacaagtttcaaccaggagcgcatagtcgatgtagcaggcccaggtgggtggaatgatcccgatatgttggtgatcggtaatttcggactgtcatggaatcagcaggtgacccagatggcactgtgggccatcatggcagccccactgttcatgagtaatgatttgagacacatatcaccacaggcaaaggcccttttgcaggacaaagacgtcattgctataaaccaggatcctctcgggaagcagggctaccagttgcgccagggggacaactttgaagtgtgggagaggcccttgtccgggctcgcatgggctgtcgccatgatcaacagacaggagattgggggtcctcgttcctacactatcgcggtggcatcactgggcaagggcgttgcttgcaaccccgcctgttttatcactcagctcctcccggtcaagcggaaactgggcttctacgaatggacatccagattacggtctcatatcaaccccacaggaactgttctactgcagctagaaaataccatgcaaatgagcctgaaagatctactttag

SEQ ID NO: 109108 - DNA, 3120 bp, synthetic construct
  misc_feature 1..3120: note = Description of Artificial Sequence: Synthetic coding sequence
  source 1..3120: mol_type = other DNA
atgcatcagaagacgcctgagatttacagcgtggagctgagtgggaccaaggatatagtcaaaaccgataaaggcgatggcaaggaaaagtatcggggtctgaaaaataactgccttgaattaaagaaaaaaaatcacaaagaagagtttcagaaggagcttcatctcgacgaccacaagttatccaacagggagctagaggaaaagtatggaaccgacattatcatgggactctctagcaccagggccgcagagctgctcgcccgggacgggcccaatagcctgaccccgcccaagcagactccagagatcgtgaagttcctgaaacagatggtgggcgggttcagtattctgctctgggtgggggccttcctgtgctggatagcttacgggattcagtactcctccgataagagcgcttccctgaacaatgtttatttggggtgcgttctaggactggttgttatcctgacgggtatctttgcgtattaccaggaggcaaaaagcacaaacattatgtcctcatttaacaagatgattcctcaacaagctttggtgatccgcgacagcgaaaagaagactattccttccgagcagctggttgtcggggacatcgttgaagtaaaagggggcgaccagatcccagctgacatcagggtcctttccagtcagggctgccgtgtagacaacagctccctcaccggtgagagtgagcctcagccaagatcaagtgagtttacacatgaaaacccgttggagaccaagaatatttgcttttacagcacaacatgccttgagggaacagtgacaggtatggtgatcaatacaggcgacaggacgatcatcggccacatagcatctctagcttctggcgtggggaatgagaagacccccatcgccatcgaaatcgaacacttcgtgcacatcgtggccggtgtggccgttagtatcggtatcctgttcttcatcattgccgtgtcccttaaatatcaggtcctggatagcataattttcctgattgggattattgttgcaaatgtgccagaggggctcctggctactgtcactgtgaccctctcgctgaccgcgaaacgcatggcaaagaaaaactgcctggtcaaaaatctggaggcagtagagacgttaggaagcacctcgattatttgcagcgataaaaccgggacactgactcagaataggatgactgtcgcacacctgtggttcgataaccagatctttgtggctgatacatccgaggaccattccaaccaggtgttcgaccagagctcccggacgtgggcctcactttctaagatcatcactctgtgcaatcgggccgagtttaaaccggggcaggaaaatgtgcctattatgaagaaagcagtgataggagatgctagcgaaacagctctgctgaagtttagtgaggtgattctgggagacgtcatggaaatcagaaaaaggaacagaaaggtggctgagattcccttcaacagcacaaacaagttccaattgtcaattcatgaaatggacgatccacacggcaagcggtttctcatggtgatgaagggtgctcctgagagaattctcgaaaagtgctccaccatcatgatcaacggagaggagcaccctctcgacaagtctaccgcgaaaacttttcacactgcttacatggagcttggtgggcttggggagcgcgtgcttggcttttgccacttgtacctgcctgcagacgagttccccgaaacatattcatttgatattgacgctatgaactttcccacaagtaatctgtgttttgtcggtcttctctccatgattgatcctccgagatccaccgtgcccgacgctgtaaccaaatgcaggtccgcaggcatcaaggtcattatggtcacaggagaccacccgatcacagcaaaagccatcgccaagagcgtcggcattatatccgctaatagtgagaccgtggaggatatcgcccacaggctgaatattgcggtcgaacaggtcaataaacgagacgccaaggccgccgtggtcacagggatggagctaaaagatatgtcaagtgaacagctcgacgagattctggccaattatcaggaaatcgtgttcgcacgcacttcccctcaacagaaactgattatcgtggaagggtgccagcggcaggacgcggtggtggcagttactggagatggcgttaatgattccccggccctaaaaaaagcagacatcgggattgccatgggcatcgccggttcggacgccgcgaagaatgcagctgacatggtgctgctggacgacaatttcgcaagcatcgtcacaggggtcgaagaaggacgtctgatttttgacaacctcaaaaagactatagcctactcacttacaaagaatattgctgaactgtgccccttcctgatctacatcatcgtcgggctcccactgccaattggaaccatcacgatcttgttcattgacttaggcaccgacattatcccttccattgcgctggcctacgaaaaagccgagtctgacattatgaaccgcaagcctcgtcacaaaaataaggataggcttgttaaccagccgctggccgtatattcctacttacatataggcctcatgcaggcccttggagcctttctcgtttacttcacagtgtacgcccaggagggatttctgccgcgaactttgatcaacctacgagtggaatgggagaaggattacgtgaatgacctcaaagattcctacggtcaggagtggacaagatatcagagagagtacctggaatggacagggtatactgccttcttcgtggggattctggtccaacaaatagcagatctcataattcggaagacaaggcggaacagtatatttcagcaggggcttttcaggaacaaggtgatctgggtcgggatcaccagccagatcatcatcggcctgatacttagctacggtctgggttcagtgacagcgttaagctttaccatgctgagggcccagtactggttcgtcgcagttccccatgctatactcatctgggtatatgatgaagttagaaaactttttattcggttgtacccaggctcatggtgggacaaaaacatgtactactag

SEQ ID NO: 109109 - DNA, 3072 bp, synthetic construct
  misc_feature 1..3072: note = Description of Artificial Sequence: Synthetic coding sequence
  source 1..3072: mol_type = other DNA
atgggcaaaggcgttgggcgtgacaagtatgagcccgctgcagtgtctgagcagggtgacaaaaaggggaaaaaaggaaagaaagatcgtgacatggacgagctgaagaaagaggtttctatggacgatcataagctgagcttagacgagctccaccggaaatatggaactgacctgagtagaggcctcacctcagccagggcagctgaaatcctggcacgcgatgggcctaatgctctgacaccacctccaacaaccccagagtggatcaaattctgtaggcagctgtttggcgggttctccatgctgctctggatcggcgccattctttgttttctagcctatagcatacaggcggcaactgaagaggagccccagaacgataacctctacctgggagtggtgctcagtgccgtggtcattatcaccggctgcttttcttattatcaggaggctaagtctagtaagattatggagtcttttaagaatatggttccccagcaagccctggtgatccgaaacggggaaaaaatgagcataaatgctgaggaggttgtggttggtgacttggtggaagtgaagggaggcgatagaatccctgccgatttaagaataatctcagcaaatggctgcaaagtggataatagctctctgacaggggaatccgaaccacagacacggagtccagatttcacaaatgagaaccctctggaaacacgtaacatcgcatttttcagtaccaactgcgtcgaaggcaccgccagaggaatcgtggtgtatactggagacagaactgttatgggccgcatcgcaaccctagccagtggtctggagggaggccaaacccctattgcggctgagatcgagcacttcatccacattatcacaggggtagcagtgtttctgggcgtgagcttctttattctttctctaatcctggagtacacatggctggaggctgtcatctttctcataggcatcattgttgccaatgttccggagggacttctcgccaccgtaactgtatgcctgacactcactgccaaacgtatggcaaggaaaaactgccttgtgaagaaccttgaagcagttgaaactctggggtcaacatccaccatttgcagtgacaaaaccggtacactcactcaaaaccgtatgaccgttgctcacatgtggttcgataaccagatacacgaggctgataccacagaaaaccaaagcggagtgagcttcgataagacatcggccacctggcttgctctctccaggatcgctggcctctgtaaccgggcagtattccaggccaaccaggagaacttgcccattctgaaacgagccgtagctggagatgcctcagaatctgcgctgcttaaatgcattgaattatgctgcggcagcgtcaaggaaatgagggagcgttacgcgaaaattgtcgaaattccgtttaacagcactaataagtatcagctgtccatacacaagaatcccaacacctcggagccacagcacctgcttgtaatgaaaggcgctccagagcggattctggatcgatgttcctcgatcctcttgcacggtaaagagcagcccctggacgaggaactgaaggacgcctttcagaacgcctatctcgagttaggcggcctgggtgagcgcgtcctgggcttctgtcatctgttcttacccgatgagcaattcccggaaggcttccagttcgacaccgacgacgtgaatttcccgatagacaatctctgcttcgtgggcctgatcagtatgattgatccaccccgcgctgcggttccagatgctgtggggaaatgcagatccgctggaattaaagttattatggtgacaggcgatcacccgatcaccgctaaggctatcgcaaagggtgtgggcattattagtgagggtaatgaaacggtggaagacattgcggcccgcctcaatatccccgtatcgcaggtcaacccccgagacgccaaagcttgtgtggtgcacggctcagacctcaaagacatgacctccgaacagctagacgatatcctcaaataccacaccgaaattgtgtttgctcgcacctctcctcagcaaaagctgattatcgtggaggggtgtcagcgtcaaggagccattgtagccgtaaccggcgatggcgtcaacgactccccagccttgaaaaaggcggatataggcgttgccatgggaattgccggcagcgacgtgagtaagcaggcagccgacatgatccttcttgatgacaatttcgcgagcatcgtgaccggcgtagaggagggccgtctcatcttcgacaatcttaaaaaatctattgcttatactctcacatctaacatcccggagatcaccccatttctgatattcatcatagccaacatcccgttaccactagggaccgtgaccatcctgtgtatagaccttggaacagacatggttccagcaatctccctggcttacgaacaagcggagtccgatatcatgaagagacagccacggaacccaaaaactgacaagctcgtgaacgagagactgatttctatggcctatgggcagatcggaatgatccaggccttaggagggtttttcacttatttcgttatacttgcagaaaacggtttcttaccaatccacttactgggactgcgggtggattgggacgacagatggatcaacgacgtggaggacagctatggacagcaatggacgtatgaacagaggaaaatcgtggaatttacttgccacactgccttcttcgtttcgatcgtggtagttcaatgggccgatctggtaatctgtaaaacccgaagaaactctgtattccagcagggcatgaaaaacaagattctgatttttgggctgttcgaggaaaccgcattagccgcatttctgtcctactgcccaggtatgggcgtggcacttagaatgtaccctttaaaacctacatggtggttctgcgcgtttccatatagcctgcttatttttgtgtatgatgaggttagaaagctgatcattcgacgacgacctggcggatgggtggagaaggagacctactactag

SEQ ID NO: 109110 - DNA, 2043 bp, synthetic construct
  misc_feature 1..2043: note = Description of Artificial Sequence: Synthetic coding sequence
  source 1..2043: mol_type = other DNA
ggtaaggaagtggggcgggataagtatgagccagccgctgtaagcgaacagggggataaaaagggcaagaagggcaagaaggaccgggatatggacgaactcaaaaaggaggtgtcaatggacgatcataaactcagccttgatgagctgcaccgcaaatacggaaccgacctgtcccgaggattaaccagcgcccgcgccgccgagatactcgctagggacggaccgaacgctctgacccctccccccacaacacccgagtggatcaaattctgtagacaactgtttggggggttctccatgctcctttggattggcgcgatcctgtgcttcctggcttatagtatacaggccgccaccgaagaggagccacagaatgataatctctacctgggggtcgtcctgtctgccgttgtgattatcacaggctgctttagttattatcaggaagcaaagagctccaagattatggaaagcttcaaaaacatggtcccccagcaggctctagtcatcaggaacggagagaagatgtcgattaatgccgaggaggtcgtggtcggggatcttgtggaagtgaaaggcggggatagaattccggccgacctaagaattatttctgccaacggttgcaaggtggataattcatcactgaccggtgagtccgagccccagacacgctctcccgattttacaaatgaaaacccattggaaaccaggaacatcgcgttttttagcacaaactgcgttgagggtactgctcgcggaatagttgtatatacaggcgacagaacagtgatgggacggatagcaactctggcctctggcttagagggaggtcagacaccgatcgcagccgagattgagcattttattcatatcattacaggggtggctgtattccttggcgttagcttcttcatcctatctctgatcctggaatatacatggttggaagcggtgatttttctgattggcatcattgtagctaatgtgccggagggtctactggccactgttactgtttgcctgaccctcacagctaagaggatggcccgcaagaactgccttgtgaagaatttggaggccgtggagacgctgggcagcacttctacgatctgctctgataagaccggaaccctgactcagaatagaatgaccgtggctcatatgtggttcgacaatcaaattcacgaagcagatactacagaaaatcagtcaggggtgtcattcgataaaacatctgcgacatggctggctctctctcgcatcgctggactctgcaatagagccgttttccaggctaaccaggagaaccttcctatcctgaagcgcgcagtggccggcgatgcatctgagtccgcactgttgaaatgtatcgagctgtgttgtggcagtgtgaaggagatgagggagcgctacgccaagatcgtggaaatcccttttaacagtaccaataagtaccaattatctattcacaagaacccaaatacatccgagccccagcatctattggtgatgaagggggcaccggagcgcatcctggacaggtgctcctccatcctcctccacggcaaggaacagccattggacgaggaactcaaggacgcgtttcagaacgcctatttagagcttggcggtcttggagagcgtgtattaggcttttgtcacctgtttctgccagacgagcagttccccgaagggttccagttcgacaccgatgacgttaattttcccattgacaatctgtgcttcgtgggactcatctcgatgatcgacccgcctcgcgccgcagtgcccgacgctgtaggcaagtgcaggtccgccggcatcaaagttattatggtgacaggcgatcatcccatcacagccaaggctattgctaagggggtcggcataatctccgaggggaacgagccgatgtcacgtgggaagtcgtggtctagtccagctacacagcctagttctagtgtgtcttggtggtgcagcggccccacttggtcttccgtgcggcctggcggcattaggagttcttcacggggatag

SEQ ID NO: 109111 - DNA, 435 bp, synthetic construct
  misc_feature 1..435: note = Description of Artificial Sequence: Synthetic coding sequence
  source 1..435: mol_type = other DNA
atggatgaattaaaaaaggaggtgtccatggacgaccataaactgtcattggacgaattgcatagaaaatacgggacagatctgtctaggggtctcacaagcgccagagcagccgagatattggcgcgggatggacccaacgccctgacacccccacctacaacaccagaatggataaaattctgcaggcaactgttcggtggtttctctatgctcctgtggattggcgccatcctgtgtttcttggcttactccattcaggctgccactgaagaagaaccccaaaacgacaatctgtatttgggagttgtgctatcagcggttgttatcatcactggctgcttctcatactatcaggaggccaagtctagcaagatcatggagtcctttaaaaacatggttccgcagcaggctttggtgattcgaaatggctag

SEQ ID NO: 109112 - DNA, 2979 bp, synthetic construct
  misc_feature 1..2979: note = Description of Artificial Sequence: Synthetic coding sequence
  source 1..2979: mol_type = other DNA
atggatgagctgaaaaaggaagtgtcaatggacgatcataaattgagtctcgacgagctccatagaaagtacgggacagaccttagtcggggccttacatctgcacgtgctgccgaaatcctcgcacgggacggtccgaacgctttaacacccccgcccacgacacccgagtggatcaaattctgtcgccaactgtttgggggattctctatgcttctgtggattggcgcaattctctgtttcctagcttattccattcaagctgccaccgaagaggaaccgcaaaacgacaatctctacctcggagttgtcctgtcagcggtggttatcattacagggtgtttctcatattatcaggaggccaaaagctctaagataatggaatctttcaaaaatatggtccctcagcaagcacttgtaattcgcaacggcgaaaaaatgagcataaatgccgaggaggtggtggtgggcgacctggtagaggtgaaaggaggcgaccggattcctgccgacctgaggattattagtgctaacggatgcaaggtcgacaatagttccctcacaggagaatctgaaccccagacaaggagccccgacttcacgaatgagaatccgttagagacccgcaatattgccttcttctcaacaaattgcgtggagggcaccgcccgcggtatagtggtgtacacaggtgaccggactgtgatgggtcgcattgctacactggcttcaggactggagggcgggcagactcccatcgcagcagagattgagcatttcatccatataatcacgggggtggccgtattcctgggtgttagcttttttattctgagcctgatcttggaatatacatggctggaggccgtgatttttcttattggcataatagtcgcgaacgtgcctgaaggtctgctggctacggtaacagtctgcctgactctgactgctaagagaatggcgcgcaagaactgcctggttaaaaacctggaagccgtcgagacactcggatctacttcaaccatctgttctgataaaaccggtacacttacgcagaacagaatgaccgtggcgcatatgtggttcgataaccagattcatgaggcggatacaactgagaatcagagcggcgtaagtttcgataaaacatccgctacatggcttgcactctcccgcatcgctggactttgcaatcgtgccgttttccaagcaaatcaggaaaatttacccatcctcaagagggcagtcgcaggagacgcaagcgagtcagcgttgttgaagtgcattgagctctgttgtggaagcgtgaaagagatgagagaacgatatgcaaagatcgttgagattccattcaattccactaacaaatatcagctcagtatccacaaaaatcccaacacatcagagcctcaacacctgcttgttatgaagggggcaccggaacggatcctcgatagatgctcttctattctcctgcacgggaaggagcaacccctggatgaggaattaaaagacgcattccagaacgcgtacctagaattaggcggcctgggcgaaagagtgctcggattttgccatctgttcttaccggatgaacaatttcctgaagggttccagtttgacacagacgatgtgaacttccccatagacaacctttgctttgttggcttgatctcaatgattgaccctcctagagctgctgttcctgatgcagtgggaaagtgcagatccgcgggcataaaagttatcatggtcacaggggatcatcccatcaccgccaaagctatcgcaaagggggtggggattatcagcgaagggaacgaaaccgtcgaagatattgccgcccgtttgaacattcctgtcagtcaagtaaatcctcgagacgctaaggcttgtgtagtgcacggctcagatctgaaggatatgacttcagaacagttggacgacattctgaagtatcataccgagatcgtatttgcccggacgtccccccagcaaaagctgataattgttgaaggatgccagcggcaaggagctattgttgcagtgactggcgacggggttaatgactccccagctctcaagaaggcagatatcggcgtagccatgggaatagccgggtctgacgtgtccaaacaagcggccgatatgatcctccttgatgacaacttcgcctcaatagtcaccggtgtggaagagggtaggttaatcttcgataacctcaagaagtcgatcgcttatactttgacaagcaacatacctgagattacaccttttctgatattcatcatcgccaacataccactaccgctggggaccgtgacaattctctgtattgacctggggactgatatggtcccggcaattagtcttgcctacgagcaggcagaatctgacattatgaaacgccaacccaggaatcctaagacagacaagctggtgaatgagaggctcatttcgatggcctacggccagattggcatgatccaggccctggggggattcttcacctacttcgtcatactggctgagaatggattcctgccaatccatttgttgggtctgcgggtcgactgggacgacaggtggattaacgatgtagaggacagttatggacagcagtggacttacgagcagcgcaagatcgttgaattcacctgccacaccgcattcttcgtatcgatcgtggtggtgcagtgggccgatctggtaatctgcaagaccaggcgtaactcagtgttccagcaggggatgaagaacaagatattgatctttggccttttcgaagaaaccgccctcgccgcatttctaagttattgcccaggcatgggggttgccctgagaatgtacccattgaaacccacatggtggttctgcgcgttcccatactccctactgatcttcgtttacgacgaggtgaggaaactgattataagaaggcggcccggagggtgggtggaaaaagagacatactattag

SEQ ID NO: 109113 - DNA, 321 bp, synthetic construct
  misc_feature 1..321: note = Description of Artificial Sequence: Synthetic coding sequence
  source 1..321: mol_type = other DNA
atggacgaactcaaaaaggaagtgagtatggacgatcacaagttgtcgttggatgaactccacaggaagtatggcaccgacctcagtaggggactgacgagcgcacgggccgcagagattctcgccagagatggtcccaacgcgctgacaccgccccctactacccccgaatggatcaaattctgtagacagctcttcggtggattttccatgttgctgtggatcggagcaatcctctgctttttggcctactccatccaggccgctacagaggaagagccgcaaaatgataacttatacctgggcgtggtactgagttag

SEQ ID NO: 109114 - DNA, 474 bp, synthetic construct
  misc_feature 1..474: note = Description of Artificial Sequence: Synthetic coding sequence
  source 1..474: mol_type = other DNA
cgtcagccccggaacccaaagaccgacaagctggtcaatgagagactgatctctatggcatatggccagatcgggatgatccaggccttggggggatttttcacatacttcgtgatccttgcagaaaatggattccttcctatccatctcctgggacttagggtggactgggacgatcgctggatcaacgacgtcgaagactcttacgggcagcagtggacctatgagcagcgtaagatcgtcgagttcacttgtcacactgccttttttgtttcgatcgtggtcgtgcagtgggccgacctggttatttgcaaaacaagacgcaatagtgtgtttcagcagggcatgaaaaacaagatcctaatctttggcttattcgaggaaaccgccctggccgcctttctgtcatattgcccagggatgggcgtcgcactacggatgtaccctttaaaaaccttgacacagtatagttag

SEQ ID NO: 109115 - DNA, 480 bp, synthetic construct
  misc_feature 1..480: note = Description of Artificial Sequence: Synthetic coding sequence
  source 1..480: mol_type = other DNA
atgaagaggcaaccaagaaaccccaagacagacaagcttgtaaatgagagactgatttctatggcttacggtcagattggtatgattcaagccctggggggattctttacctattttgtcatcctcgcagagaacggctttcttcctatacacttacttgggctgcgcgtggactgggatgatcgctggattaatgacgtggaagacagctatggacaacagtggacttacgagcagcgcaaaatcgttgaatttacctgtcacacagctttctttgtcagcatcgtcgttgttcaatgggccgatctcgttatctgtaagactaggaggaattctgtgttccagcaggggatgaaaaataaaatattgatatttggactgtttgaggagaccgctcttgccgcctttctctcgtattgcccggggatgggagtggccctgaggatgtatcccttgaagactctgacccagtattcttag

SEQ ID NO: 109116 - DNA, 3072 bp, synthetic construct
  misc_feature 1..3072: note = Description of Artificial Sequence: Synthetic coding sequence
  source 1..3072: mol_type = other DNA
atggcgttcaaggtcggccgggataagtacgagcccgctgctgtttctgagcagggggacaagaaaggaaagaagggcaaaaaggatagggacatggatgaattgaaaaaggaggttagtatggacgatcacaaattgagcttagacgagctccaccggaagtacgggaccgacctgtcccgggggcttacaagcgcccgagccgcagagattctcgcacgagacggacccaacgccttgacccctccacctactaccccagagtggattaaattctgtcgtcagttgttcggaggattttctatgctcctgtggatcggcgccattctgtgcttcctggcctactcaatccaggctgccactgaagaagagccacagaacgataatctgtacctgggggtggtgctatccgctgtggtgattatcaccggttgctttagctactatcaggaagctaagagcagcaagatcatggagtcgtttaagaatatggtaccacagcaggctcttgtgattagaaacggggagaaaatgtccattaatgcagaagaggtggttgtcggggatctggtggaagtcaaaggcggtgatcgaatcccagcagacttaaggatcattagcgctaatggctgtaaagttgataatagctccctcacaggagaaagtgaaccacagacaagatctcccgattttactaatgagaatcccctcgaaaccagaaacattgcttttttttccactaattgtgtggagggtactgccagaggcatcgtggtctataccggagaccggactgtgatgggcagaattgccacccttgctagcggtttggaaggtgggcagacgccaattgctgccgagatagaacatttcatccatattatcactggagtcgccgtcttccttggagttagcttctttattttaagtctaattctggagtatacctggctcgaagccgtaatctttctgatcggaattatcgtagccaacgtcccggagggattattggccactgtgaccgtgtgtttgacacttactgccaagaggatggcccgaaaaaactgccttgtgaagaacctggaggccgtggagactctgggaagcacttccaccatctgttccgataagacaggtaccctcacgcagaatcggatgaccgtggctcatatgtggttcgacaatcagattcacgaagccgataccaccgaaaaccagtctggagtttcattcgacaaaacatccgctacgtggttagccctaagcagaattgctggtctctgcaaccgtgccgttttccaggccaaccaagagaacttgcccattctgaagcgagccgtggctggagacgccagtgagagcgcccttttaaaatgcattgagctctgctgtggcagcgtcaaggagatgcgggagagatacgccaaaatcgttgagattccctttaattctacaaacaagtaccagttgtccattcacaaaaaccccaatacatccgaaccacagcatctcctcgtaatgaagggtgcccccgagcgaattctcgataggtgcagttctatcttactgcatggaaaagagcagcctctggacgaagagcttaaggatgctttccagaacgcttacttggagctcggcgggttgggagaaagggtcttaggattctgccaccttttcctcccagacgaacagtttcccgaagggtttcaattcgataccgatgacgtcaatttcccaatagataacctgtgtttcgttggactaattagtatgattgatcctccacgagcagccgtgcccgacgcagtgggcaagtgtcggtccgcgggcataaaagtgatcatggttacaggcgaccatccgatcaccgcgaaggctatagcgaaaggagtgggtataatctccgaggggaatgagaccgtagaagatatcgccgcccgacttaacattcctgtgtctcaggtgaatcctcgagacgctaaggcctgtgtagtacacggctctgacttgaaggacatgacctccgagcagttagatgatatcctgaaataccacacggagatcgtcttcgctagaacatccccccagcagaagctgataatagtcgagggctgccagcggcaaggagcgatcgtggcagtcacaggggatggcgtgaatgactcaccagcactgaaaaaagccgacattggggtggccatgggtatcgccgggagtgacgtgtctaagcaggcagcagacatgatccttctggatgataatttcgcaagtatcgtcaccggggtggaagaagggcgattaattttcgacaacctgaaaaagtcgatcgcctatacgctcacttctaatattcccgagatcacacctttcttgatattcattatagccaacattcctctgccgctcggcaccgtaaccatactgtgcatcgatctcggcaccgatatggtcccagcaatctccttggcctatgagcaagccgaatctgatatcatgaaacggcagcccaggaatcccaagactgacaagctcgtgaatgagaggctaattagtatggcttacgggcaaattggcatgattcaagccttgggaggttttttcacctatttcgtgatattagctgagaacggtttcctgccaattcacctgctgggcctgcgagtcgattgggatgatagatggatcaacgatgtggaggactcttatggtcagcagtggacctacgagcagagaaaaattgtggaattcacttgtcacaccgcttttttcgtgagtatcgtggtcgtgcaatgggcggacttagtgatctgcaaaaccagaagaaatagtgtgttccagcagggcatgaaaaataagattctgatttttggcctgttcgaagagactgccctcgccgcttttttaagttattgccctggaatgggtgttgctcttcgaatgtatcccttgaagcctacctggtggttttgtgcgtttccttacagcctactgatcttcgtgtacgacgaggtaagaaagctgattattagacgtcggcctggtgggtgggtcgagaaggaaacatactactag

SEQ ID NO: 109117 - DNA, 3063 bp, synthetic construct
  misc_feature 1..3063: note = Description of Artificial Sequence: Synthetic coding sequence
  source 1..3063: mol_type = other DNA
atgggcaggggcgccggtcgcgaatacagcccggccgctaccaccgccgaaaatggaggtgggaagaagaagcagaaggagaaagagctagacgaattaaagaaagaggtcgcgatggatgaccataaactgtctctggacgagctgggcaggaaatatcaggtcgacctctctaaggggcttactaatcagcgcgcccaagacgtgctcgccagagacggaccgaatgccctgacccctccaccgaccacccctgaatgggttaagttttgtaggcagctgtttggcgggtttagcatcctattgtggatcggcgccatactgtgtttcctggcctacggcatccaagcagccatggaagatgaaccatccaatgataatctctacctgggagtggtcctagctgcggttgttatcgtgacgggctgcttctcatattaccaagaagcaaagtctagcaagattatggatagctttaagaacatggtgcctcagcaggcccttgtcattagggaaggcgagaaaatgcagatcaacgccgaggaggtggttgtgggggatttggtggaagtgaaggggggagacagagtgccggccgacttgcggatcattagttcccatgggtgtaaggttgacaactcgagcttaactggggagtctgaacctcaaactcgttctcctgagttcacacacgaaaatccactggagacacgaaatatctgttttttcagcacgaattgtgtggagggtacagctcggggcatcgtcatcgcaaccggtgacaggacggtgatgggacgcattgcgaccctcgctagtgggctcgaggtcggcaggactcctatagctatggagatcgagcacttcatccagctgataacaggcgtggcagtgttcctaggagtatccttttttgtgctctccttgatcctgggatactcttggctggaggctgtgatttttctgatcgggattatagtcgcgaacgtccctgagggcctcctggcgaccgttaccgtctgtctgaccctgactgccaagcgtatggcgagaaaaaattgcctggtgaaaaatctggaggccgttgaaactctgggcagcacttcaaccatctgctcggataagacggggacactgacacagaacagaatgacagtggctcacatgtggttcgacaaccagatccatgaagctgacaccacggaggaccagtctggtgccacgtttgacaagcgcagccccacctggacagccctgtctcgcatcgccggactttgcaaccgcgcagtgtttaaggcgggacaggaaaatatcagcgtgtcaaagagagataccgccggagatgcgtctgaaagtgcactgttgaagtgtattgaattgtcctgcgggtccgttaggaagatgcgcgacagaaatcccaaagttgccgaaatcccctttaactctacaaacaagtaccagctcagcatccatgagagggaggacagtcctcagagccacgtgttggtgatgaagggggcacctgagcggattctcgaccgatgctcgacaatcttggtgcaaggcaaggagattcctctggacaaagaaatgcaggatgcattccagaatgcctacatggagctcggcggcctgggtgaacgtgttctcggcttctgccagcttaatctcccctccggcaagttccctagaggtttcaaattcgataccgacgaactgaatttccctactgaaaaattgtgctttgttggcctcatgtccatgatcgacccacccagagctgccgtgcccgacgcagtcggaaaatgccgttccgccggtatcaaggtgatcatggtaacaggggaccaccccatcaccgcaaaagccattgctaagggggtagggattatcagcgaaggaaacgagacagtcgaggacatcgccgcgcgcctaaatataccaatgagccaggtgaacccgcgtgaggcaaaggcatgtgttgtccatggttcggacctgaaggacatgacctcagaacagctggatgagatactgaagaatcataccgaaatcgtttttgctaggacgtcccctcagcagaagctaatcatagtcgagggctgccagagacaaggcgctatcgtggcagtgacgggtgacggggttaacgacagtcctgcactcaaaaaagctgacataggcattgctatgggtatttccgggtctgatgtcagcaaacaggcagcagacatgattttgttggacgacaactttgcctcaatcgtgaccggcgtcgaagagggcaggctgatctttgacaacttgaaaaaatctatcgcttacactttaacgtccaatatacccgaaatcacaccttttctactgttcatcattgccaacatccccctacctctgggtacagtgaccattctgtgtatcgacttggggaccgatatggtaccggccattagcctcgcatacgaagcggcagaatcagacataatgaagcgccaacccaggaatagccagaccgacaaacttgtcaacgagcgcttgatcagcatggcatacgggcagatcggcatgatacaggcactaggcggtttctttacttatttcgtgattttggcggagaatggatttctgccctctcgcctactggggattcggttggactgggatgaccgcaccatgaatgatctagaagattcatacggacaggaatggacctatgagcagagaaaagtcgtggaattcacttgtcacaccgccttctttgcttccatcgtggtggtgcagtgggcggatttaattatctgcaaaactcgtcgtaattccgtatttcaacagggtatgaagaacaaaatactaatctttgggctattagaggaaaccgcccttgccgccttcctctcgtactgcccagggatgggcgttgctctgcgcatgtaccctctcaaggtgacctggtggttctgcgcctttccctacagcctcctgattttcatttacgacgaggtgcgcaaattgattcttagaaggtatcccggtggatgggttgaaaaggaaacatactactag

SEQ ID NO: 109118 - DNA, 3030 bp, synthetic construct
  misc_feature 1..3030: note = Description of Artificial Sequence: Synthetic coding sequence
  source 1..3030: mol_type = other DNA
atgggtagaggggccgggcgagagtacagtcccgccgccacaacagctgagaacggggggggcaaaaagaaacagaaagagaaggaactggacgaattaaaaaaggaggtggcgatggatgaccataagttgtccctggacgaacttggtcgaaaatatcaggtcgacctctcgaaggggctcaccaaccagagagcccaagatgttctggcccgtgatgggccgaatgcgctgacacccccacccactacccccgagtgggtgaagttctgccgtcagttgtttggaggcttctctatacttctctggattggcgccattctctgcttcctggcctatggcatacaggccgctatggaggacgaaccatctaatgataacctttatctaggcgtagtcttagctgccgtggtgatcgtgaccggatgttttagttattatcaggaagcgaagtcgtcgaaaattatggacagcttcaagaatatggtaccccagcaagccctggttataagggagggagagaagatgcagatcaacgcagaggaagttgtcgtgggtgatttggtggaggtaaagggtggagatcgggtccccgctgacctcagaatcattagctctcacggctgcaaggttgacaacagctctcttactggggaatccgaacctcagacaagatctcccgaatttacccatgagaatccactcgagacccggaacatttgctttttttcgacgaattgtgttgaggggacagccaggggcattgtgatcgctaccggagaccggacagtaatggggcgtattgcgaccctggcctcggggctggaggtggggcgcacaccgatcgcaatggaaattgagcattttatccaactgattacaggtgtggccgtgttcctcggcgtgagtttctttgtcctaagcctaattctaggctattcatggctcgaggctgtcatcttcctgatcggcattatcgttgcaaatgtgcctgagggcttgctggctacagtaacagtgtgcctgactttgaccgccaagcggatggccagaaagaactgtctggtgaaaaatcttgaggccgtggagaccttaggctccacttcgaccatctgctccgacaagactggtactcttacccagaatcgcatgaccgtcgcacacatgtggtttgacaatcagatacacgaagccgacacaaccgaagaccagtccggcgccacatttgataaaagaagtccaacgtggaccgcgctaagcagaattgccggcttgtgtaacagagccgtgtttaaagccggccaggaaaacatctctgtgtccaagagagatacagccggagacgcatcagagagtgccctcctgaagtgcattgaactgtcttgtggcagcgtgagaaaaatgcgggacagaaacccaaaagtggccgagattccctttaatagtacaaacaagtatcaattgtccatacacgaacgagaggattctccacagtcccacgtcctcgtcatgaagggcgctccagagcgcatcctggaccggtgttcaaccatcctggtccaggggaaagagatccccttggacaaggagatgcaggatgcctttcaaaatgcgtatatggaattgggggggttgggggagagagttttgggattttgccagttaaatcttccctctggcaagtttccacggggcttcaaattcgacactgacgagctgaattttcccaccgaaaagctgtgctttgtaggcttgatgtccatgattgatcctccacgggccgccgtcccagacgctgtgggaaaatgtcggtctgctggcatcaaggtcattatggttaccggggaccatccgatcaccgctaaggctatcgccaagggagtggggatcataagcgagggcaatgaaaccgtggaggacatcgccgcacgactgaacattcccatgtcccaggtgaacccccgcgaggcaaaggcctgcgtggtgcacggctcagacctgaaagacatgacaagcgaacagctggacgaaattctgaaaaatcacaccgagatcgtcttcgcccggacatccccacagcagaagctgataatcgtggaggggtgtcaacgccagggggcaatcgtcgctgtgaccggtgacggcgtgaatgatagcccagcattgaagaaggctgacatcggaatagccatgggtatctccggttcggatgtttcgaaacaagcagcggacatgatcctgctggacgacaacttcgctagtatcgtgaccggcgtcgaggagggccgccttatcttcgacaatttgaaaaaaagtattgcgtacaccctgacaagtaacattcccgaaatcaccccctttttactgtttattatcgctaacattccactaccactgggtaccgtgaccattctgtgtatagacctgggcacagacatggtgccagccatatcactggcctacgaggctgctgagtctgacatcatgaagcgacagcctagaaactctcagacagacaagcttgtcaatgagcggcttatcagtatggcctatggtcagatcggcatgatccaggccctgggggggttctttacgtacttcgtaattctggccgagaatggcttcctacctagccgtctgctgggaattcggctggactgggacgaccggacaatgaatgacctagaagatagctacggacaggagtggacatacgaacagcggaaagtggtggagtttacgtgtcacaccgctttcttcgccagcattgtggtggtgcagtgggccgatctcatcatttgtaaaacaaggcggaactccgtgttccagcaagggatgaagaacaagatacttatctttggccttcttgaggagaccgctcttgcggccttcttgagttactgtccaggtatgggagtggccctgcgcatgtatccgctgaatctcttgatattcatctacgatgaggtgcgaaagctgatcctgcggcggtaccctgggggctgggttgagaaggagacctactattag

SEQ ID NO: 109119 - DNA, 2172 bp, synthetic construct
  misc_feature 1..2172: note = Description of Artificial Sequence: Synthetic coding sequence
  source 1..2172: mol_type = other DNA
atgctgtcctccgcactggccttgagtggagcgctggtcaagcgtctcaagcctcccaatggacactttattctgactgacacccacgatctcaacaccagtaagattgagcactctctgttcacggtttgtctcaccctcaccgccaaaaggatggcgaggaaaaactgtttagtcaagaacttggaggcagtagaaacattaggaagcacctcaaccatctgtagtgacaaaactggtacccttactcagaatcggatgacagttgcacacatgtggtttgacaaccagatacatgaagcagataccactgaagatcagagcggggctacctttgacaaaagaagtcctacatggacagcactgagccggattgcaggcctgtgtaaccgcgctgtgtttaaggccggccaagaaaacattagcgtatcaaagagggataccgccggtgacgcttctgagagtgcacttctgaagtgcattgagctctcctgtggctctgtgcggaaaatgagggacagaaatccaaaggtcgccgaaatccccttcaacagcaccaataagtatcagctcagcattcatgaacgggaggatagcccacagagccatgttttggtgatgaaaggggcccccgagcggatacttgacaggtgcagtacaatcttagtccaggggaaggaaatacccctcgataaggaaatgcaagacgcttttcagaacgcctacatggaactcggggggctcggagagcgcgtcctgggcttttgccaattaaacttgccatctggcaagttcccacgcggattcaaattcgataccgacgagctgaactttcccactgaaaagctgtgcttcgtgggccttatgagcatgatcgatcctcctagggcggccgtccccgatgcagtgggcaagtgccggtcagccggcattaaggttataatggtcacgggagatcacccgattaccgccaaggccatcgccaagggcgtgggtatcatctccgagggaaacgaaactgtggaagatatcgccgcccgactaaatatccccatgtcccaggtgaatccccgcgaggccaaagcatgcgtggttcacggcagcgacctgaaagatatgaccagtgaacagctggatgaaatcctcaagaaccacacagaaatcgtgtttgctagaacatcccctcagcaaaaattgattatcgtggaaggttgccagaggcaaggcgctatcgtcgcagtaaccggagacggcgttaatgatagtcccgccctgaaaaaagccgatattggaatcgcaatgggtatatccggtagcgatgtgagcaagcaggcagcagatatgattctgttagatgataacttcgcctcgatcgttactggagtggaagaggggcgccttatcttcgacaatcttaagaaatccatcgcatacactctgacctcaaacataccagagatcacccccttcctgctgttcatcatcgcaaacataccccttccgcttggaacagtgacaatcctctgcattgacctagggaccgatatggtccctgcgatttctttagcctacgaggccgctgaatccgacatcatgaaaagacagcccaggaacagccagaccgacaagttggttaacgaacgcctgatctctatggcatatggacagattgggatgatccaggccctggggggcttcttcacttactttgtgattctagccgagaatggcttcctgccctcaagattactgggaatccgattggactgggatgaccggactatgaacgatctggaggatagctatgggcaggaatggacgtatgagcagcgcaaggtcgtggagttcacttgtcacacggctttctttgccagcatcgtggtggttcagtgggccgatcttataatatgcaaaactcgccgaaactctgtcttccaacagggcatgaagaacaaaatcctgatattcggcctccttgaggagacagcactggcggccttcttatcatactgccctggcatgggagtagcgctgaggatgtaccctctaaaagttacatggtggttttgcgctttcccctactcattacttattttcatttacgatgaagtgaggaagttaatcttacgaaggtatcctggcggctgggtcgagaaagaaacctattactag

SEQ ID NO: 109120 - DNA, 2145 bp, synthetic construct
  misc_feature 1..2145: note = Description of Artificial Sequence: Synthetic coding sequence
  source 1..2145: mol_type = other DNA
tgacaactcataactggcgtggctgtctttctgggcgtgagcttcttcgtgttatccctgatcttggggtacagctggcttgaggctgtcattttcttgattgggatcatagtagccaatgttcccgaagggcttttagcaactgtcaccgtgtgtctcaccctgactgctaaacgcatggccagaaagaactgtcttgttaaaaacctggaagccgtcgaaacgctgggcagcactagcacaatttgctctgataaaacaggcacattgacccagaatcggatgacagtggcacacatgtggttcgacaaccagatccacgaggctgacaccacagaggatcagagtggagccacttttgataaacgttcccccacttggaccgctctttctagaatcgctgggttgtgtaatcgagctgtcttcaaggccggtcaggagaacatttcagtctccaagcgcgatactgctggtgatgcctcagaatctgcccttctcaaatgtattgagttgagttgcgggagcgttagaaaaatgcgggaccgcaaccccaaggtcgccgaaatcccgttcaacagtaccaacaagtaccagctctctattcacgaacgtgaggactcaccccagagtcacgttttggtgatgaaaggagcccctgaacgcatactggaccgatgcagcacgatcctagtgcaaggaaaggagattcctcttgataaggaaatgcaggatgcgttccagaacgcctatatggagctgggggggctgggcgaacgggtgttagggttttgccagttgaacctgccatcaggtaagtttcctcgagggtttaaatttgacactgacgaactcaatttccctacagaaaaattatgctttgtgggtttaatgtccatgattgatcctcctcgcgccgcagtgcccgacgcagtgggaaagtgtcgaagcgcaggcataaaagtgattatggtcacgggcgaccatcccatcaccgccaaagcgattgctaagggggtggggattatcagtgaaggcaacgaaaccgtggaagatattgcagctaggcttaatatccccatgtctcaagtcaatccacgggaggcgaaggcctgtgtggttcacgggtccgatctgaaagacatgacctctgagcagcttgatgagatactgaagaaccacactgaaattgtgtttgctcgtaccagtccacaacagaagctgatcatcgtggagggttgtcaaagacaaggagctatagtcgctgtaaccggggatggagttaacgattctccggctctgaaaaaagctgacataggcatcgctatgggcattagcgggagtgacgtaagtaagcaggccgctgacatgatccttctggatgataattttgcctcaatcgtaactggagtcgaggagggacgacttatttttgacaaccttaagaaaagcatagcatatactctgacctcaaatatccccgaaatcaccccctttctgcttttcataattgctaatatcccactacctctcggaacggtgacaattctgtgtattgatctcggcacagatatggttccagccataagcctggcctacgaggccgccgaatccgacatcatgaagcgccaaccccggaattcccagaccgacaagttggtgaacgagaggctgatctcgatggcttatggccagatcgaaaatggctttctgcctagccgcctgctcggaatcaggctggattgggacgataggacgatgaatgatttagaggacagctatggccaggagtggacatacgagcagcggaaagttgtcgaattcacctgtcacacagcctttttcgcatccatcgtggtggtgcagtgggcggatttaatcatatgtaagacacgccgtaatagtgtgtttcagcaaggcatgaaaaataagatccttatttttggcctgctcgaggaaactgcgttggctgcattcctgtcatactgccctggcatgggcgttgccctgcgtatgtacccgcttaaagtgacctggtggttctgtgcgttcccatatagtctactgatattcatctatgatgaggttcgcaaactcatccttcgtcgctatccaggaggctgggtcgagaaagagacttactactag

SEQ ID NO: 109121 - DNA, 819 bp, synthetic construct
  misc_feature 1..819: note = Description of Artificial Sequence: Synthetic coding sequence
  source 1..819: mol_type = other DNA
atggactctttcaagaacatggtgcctcagcaggcgcttgtcattcgagagggagagaagatgcagatcaatgccgaagaagtggtggtgggtgatttggtagaggtgaaaggaggggatcgagttccagcagatttgcgtattatttcaagccatgggtgcaaagtcgacaattcaagcctgaccggtgagagcgagccccagacgcgcagcccagagtttacgcacgagaaccctctggagactcggaatatctgtttcttctccaccaactgtgtcgagggaaccgctcgcgggattgttattgctacaggcgatagaaccgtgatgggccggatcgccactctggcgtccggacttgaggtggggagaaccccaattgccatggaaattgagcacttcatacagctcattaccggtgtggcggtatttctcggcgtttctttttttgtgctcagtcttatacttgggtattcctggttggaggccgttatcttcttaatcggaataattgtagccaacgtgcccgagggactcctcgccacggtaaccgtgtgcctgacacttaccgctaagcgcatggccaggaaaaattgtctggtcaaaaatctcgaggcagtggagacattaggatccactagtaccatatgttctgataaaactgggacactcacccaaaatcgcatgacagttgcccacatgtggttcgacaatcagatacacgaagctgatacgaccgaggaccaatcaggcgattgggtgttgcaaagaggttggatcggcctggaagaggcggaaggatcgggggtggttggttag

SEQ ID NO: 109122 - DNA, 3042 bp, synthetic construct
  misc_feature 1..3042: note = Description of Artificial Sequence: Synthetic coding sequence
  source 1..3042: mol_type = other DNA
atgggtgacaagaaggatgataaggacagccccaagaaaaataagggcaaggaacgtcgggacctcgatgacctgaagaaggaagtggcaatgacagagcataaaatgagcgtggaggaggtgtgcagaaagtacaacaccgattgtgtacagggtttaacccacagtaaggctcaggaaattctcgcaagggatggcccaaatgcactgacccccccacctaccacccccgaatgggttaaattttgccgacagctgttcggaggtttttcaattctgctgtggatcggtgccattctgtgctttttggcatatggaattcaggctggtaccgaggacgacccgtctggcgacaatctctatttgggcattgtcttggctgctgttgtgatcataacaggatgcttctcatattatcaggaggccaagagctctaagatcatggaatccttcaagaatatggttccccagcaggccctggtcataagggagggggagaagatgcaggtgaacgccgaagaggttgttgtgggagacctcgtcgaaatcaagggaggtgacagagtgcctgcggatctgcgtataatcagcgcccatggctgcaaggttgacaactcctctcttacaggcgaaagcgaaccacaaaccagatcacctgattgtactcacgacaatccgctagagacaagaaacatcacctttttctccactaattgtgtggagggcactgctaggggcgtggtagtcgcgactggagaccggacagtgatgggcaggatcgcaactctggctagcggtctggaggttggtaagactcccatagcgattgaaattgaacattttatacagctcatcacaggggtcgctgtctttcttggtgtgtccttcttcatactgtctctgattttgggctacacttggttagaggccgtcatattcttgatcggtataatagtggctaacgtacctgagggtctgctagccacggtaacggtctgtctaacactgacagcgaagaggatggccaggaaaaattgtctggtgaagaatctggaggcagtggagactctcggtagtacgtcaaccatctgctctgacaagaccgggacgctcacacagaaccggatgacagtagcccacatgtggttcgataaccaaattcacgaagccgacactaccgaggaccagtctgggacatctttcgataaaagcagtcacacctgggttgctctcagtcatattgcaggtttatgcaaccgtgctgtcttcaagggcgggcaggacaacattccagtgctcaaacgggatgtagccggtgacgcgtcagaaagtgctttgttaaagtgcatcgagctgtcatccggttctgtgaagctgatgcgcgagcgcaataaaaaggtcgctgaaattccatttaactctacaaataaataccagctgagcattcacgagacggaagacccaaacgacaatagatatctcctcgtgatgaaaggggcaccagaacgaatcctggaccggtgttctaccatactcctccaaggcaaggaacaaccgttggatgaggagatgaaagaggcctttcagaacgcctatcttgagctggggggcctgggagaaagggtgctgggcttttgtcactattatctacctgaggaacaatttcccaagggctttgcttttgactgtgacgatgtgaatttcaccacagacaacctctgcttcgtgggactgatgtcgatgattgaccctccaagggctgcagtccccgatgcagttggaaagtgcagaagcgccggcatcaaagttattatggtgactggcgaccatccaataaccgccaaggccattgcaaagggcgtgggaataattagtgaagggaacgagaccgtggaggacatagctgcccgtctcaacattccagtgagtcaagtgaatccaagagacgctaaggcgtgtgttatccacggaactgacctgaaggattttactagtgaacagattgacgaaatcctccagaatcacaccgagattgtatttgcaagaacatcccctcagcaaaagctgatcatcgtagaagggtgccagagacagggcgccatcgtggcagtgacaggggatggcgttaacgacagccctgccttgaaaaaagctgacatcggtgtcgccatgggcatcgcaggctccgatgtatctaagcaagccgccgacatgatcctccttgacgataacttcgcatccatcgttacaggcgtagaagagggaagactgatcttcgataatcttaaaaagagcatagcatacaccctgacctctaacattcccgaaattaccccattcctgctcttcatcatggctaacattcccttaccattgggaaccattacaattctctgcatcgatttgggtactgacatggtccctgccatttccctggcatacgaggcagctgagtccgacataatgaagagacagcccagaaatcctagaactgacaaattagtgaatgagagacttatatccatggcatacggacagatcggcatgatccaggcacttggggggttcttttcctacttcgtgatcttggccgagaacggatttcttccagggaatttggtgggcatcagactgaactgggatgacaggacggttaatgacctggaggacagctacggacagcagtggacttatgaacaaagaaaggtggtagaattcacgtgccataccgcatttttcgtgagtatcgtggttgtccagtgggccgatctgatcatatgtaagactcgcagaaatagtgtgttccagcagggaatgaaaaataaaatcttgatcttcgggctgtttgaggagacagcattggcggctttcttaagttattgcccgggcatggacgtcgcactgcggatgtaccccctgaaaccaagctggtggttttgcgcgtttccatatagtttcttgatatttgtgtatgatgaaattcgaaagctgattctgcggaggaatcctggcggatgggtcgagaaagaaacctactattag

SEQ ID NO: 109123 - DNA, 2952 bp, synthetic construct
  misc_feature 1..2952: note = Description of Artificial Sequence: Synthetic coding sequence
  source 1..2952: mol_type = other DNA
atgaccgaacataaaatgtctgtggaagaagtttgccgaaaatacaataccgattgcgtgcagggcttaacccacagtaaggcccaagaaatacttgcccgagacggtcccaatgccctcacacctccaccaactactccagagtgggtgaaattttgcagacagctgtttggcggatttagtatcttgctatggatcggcgcaattctgtgctttctggcctacggcatccaagcaggcacagaggacgacccatcgggcgacaatctgtacctgggaattgtgttggcggccgtagtcatcattacaggctgctttagttactaccaggaggctaaatctagtaaaataatggagagcttcaaaaatatggtgcctcagcaagccctggtcatacgggagggggaaaagatgcaggttaatgccgaggaggttgtagttggcgatcttgtcgagattaaaggcggcgaccgcgtgcctgcagacctgcgcattatcagcgcacatgggtgtaaggtcgataatagctccctgactggggaatcggaaccacagacgcggagtcccgactgtacacatgataatccgttagaaactcgcaatattactttcttctccacaaactgtgtggaaggcactgctcggggcgtggtcgttgccactggcgataggaccgtgatgggccgaatcgccacccttgctagcggtctcgaggtcggcaagacaccgatcgccattgaaatcgagcactttatccagttgattaccggggtggccgtcttcttgggcgtcagtttttttatcttatctttaatcctgggatacacatggcttgaagctgtgatcttcttgattggcataatcgttgctaacgtccctgaggggctgctggcaacggtgacggtgtgcttgaccctgaccgctaaaaggatggcacgtaaaaattgccttgtgaagaatttagaagccgtggaaacactgggctccacatcaactatctgttctgataagaccggcaccctcacccagaatcgcatgaccgtcgctcatatgtggtttgacaaccagatccacgaagccgatactacggaggatcagagtggaacatcgttcgataaatcatcccacacttgggtagctctgtcacatattgctgggctatgcaatagagccgtcttcaaaggaggccaggacaatatcccagttttaaaaagagacgtagctggcgatgcaagcgagtctgcactgttgaaatgcattgagttgtcctctggtagcgttaagctgatgcgcgagcggaataaaaaggtggcagaaatccctttcaacagtacaaacaaataccaattatcaatccacgagactgaagatcctaatgacaaccgctacctgctggtcatgaagggcgctcctgagaggattctcgaccgctgtagtacgatactccttcaaggtaaagagcagcccctggatgaggaaatgaaggaagccttccagaacgcatacctcgaactgggcggtctgggtgaaagagtcttaggcttctgtcactactatttgccagaagaacagtttcccaaaggatttgccttcgattgtgatgatgtgaattttactacggacaacttgtgtttcgttgggctgatgagcatgatcgatccaccgcgcgccgccgtgcctgacgcagtgggaaaatgccggtctgcagggattaaggtcataatggtgaccggagatcaccctatcacagcgaaggccatcgccaagggagtcggcataatttccgagggaaatgaaaccgtggaggacattgcagctcgtctgaacatccccgtgtctcaagtgaatccacgcgacgccaaagcctgcgtgatccacgggacagatcttaaggatttcacatccgagcaaatcgatgagatcctacagaaccacaccgagatcgtgttcgcacggacatcacctcagcagaaactgataatcgtcgagggctgccaacggcaaggagccatcgtggccgtaacaggcgatggtgtgaacgactcccctgccctcaagaaagccgacatcggcgtggccatgggcattgctggaagcgacgtgtcaaaacaagccgcggatatgattctgttagatgacaattttgcatctatcgtgacgggcgtcgaagagggccgtctcatatttgataatctgaagaagtccatcgcttataccctgacttcaaacatccctgagatcactcccttcttacttttcatcatggccaatatccccctgccgttgggaacaattacgattctttgcattgatctgggcacagacatggtccctgcaatctccctggcatacgaggctgctgaaagtgacataatgaaacggcaacctcgaaacccacgtaccgacaagttggtcaatgagcgactgatctcgatggcatacggccaaatcggaatgatacaagcactggggggatttttttcatacttcgtgatcctggccgagaacgggtttctgcctgggaatctggtaggaatcaggctcaattgggacgaccggactgtgaatgacctggaggatagttacggtcagcagtggacttatgaacagaggaaggttgtggaatttacatgtcacactgctttcttcgttagcattgtggttgtgcagtgggcagatctcatcatctgcaagactcgtagaaatagtgtgttccagcaggggatgaaaaataagatcctcatcttcggcctcttcgaggagacagcactcgccgcatttctgtcttattgtccgggtatggatgtcgcattaagaatgtacccactcaaaccttcttggtggttctgcgcttttccctactccttcctcatattcgtgtatgatgaaatcagaaaactgatcctcagaagaaaccccggcggatgggtggaaaaggaaacttattactag

SEQ ID NO: 109124 - DNA, 3681 bp, synthetic construct
  misc_feature 1..3681: note = Description of Artificial Sequence: Synthetic coding sequence
  source 1..3681: mol_type = other DNA
atgggagacaagaaagatgataaagattcccctaagaagaacaaaggaaaggagcgccgggacttggacgaccttaaaaaggaagtggccatgacggaacataagatgtccgtcgaggaggtctgccggaaatacaataccgactgcgtccaaggattaacccattccaaggctcaagaaattctagccagagacggaccgaacgctcttacacccccaccgacaaccccagaatgggtgaaattctgccgtcaattatttggagggttcagtatcctgctgtggatcggcgccatcctttgcttcctggcctacggaatccaagccggcactgaggatgaccccagcggggataatttatatcttgggatcgtgcttgctgctgtggttattatcaccggctgttttagctattatcaagaagctaaatcaagtaagatcatggagtccttcaagaatatggtcccgcagcaggctctggtgatcagggaaggggagaaaatgcaagtcaatgcggaagaggtggtggtaggagatctagtagagataaagggcggcgaccgcgtgccagctgacctcaggatcatatccgcccatgggtgcaaagtagacaactcctccttaacaggcgaaagcgaacctcagacacgctccccagattgtactcacgataaccctctcgagacccggaacattacgttcttctctacgaactgtgtggagggcacagctaggggcgtggttgtcgccaccggggacaggaccgtcatggggcgaattgccacattggccagcggcctcgaagtaggaaagactcctatagcgatcgagatcgagcacttcatccagttaatcaccggagtggctgtctttctgggagtgtcttttttcatcctctctcttatcctaggctatacatggctggaggccgttatatttctgataggcatcatcgtggcaaacgttcctgagggattgttggcaaccgtaaccgtctgcctcaccctgacagccaaacgcatggcgcggaaaaattgcctcgtgaagaacttggaggccgtggagaccctgggctccacgtccacaatttgctccgacaagaccggaaccttgacacaaaaccggatgactgtagcacatatgtggttcgacaaccaaatccacgaggccgacacaaccgaagaccagtcaggcacatcattcgataagagctctcacacttgggtggccctgtcacatattgccggcctttgtaaccgggccgtcttcaagggaggtcaggataacattccagtgctgaagcgtgacgttgccggggatgcatctgagtccgccctcctcaagtgcatcgaactctcttctgggagcgtaaagttaatgcgggagcgaaacaaaaaagtggctgaaattcctttcaatagcaccaacaagtaccagctcagtatccacgaaaccgaggaccctaacgacaatcgttatctgttggtgatgaagggggccccagagcggattctggacaggtgcagcactattctgcttcagggaaaggagcagcccctggacgaggaaatgaaggaggcatttcagaatgcctatctggaactgggcgggttaggtgagagagtactaggattctgccactattatttacctgaggagcaattcccgaagggctttgcgtttgattgcgacgatgtaaatttcactacggataatctctgttttgtaggcctgatgagcatgatcgaccctccacgggcagctgttcccgatgccgtcggcaagtgccgtagcgctggcattaaagtgatcatggtcaccggcgaccacccaatcacggccaaagctatagccaaaggggtcggaatcatttcggagggcaacgagaccgtggaggacattgccgccagactgaatatccccgtgtctcaggtgaatccccgcgatgccaaggcctgtgttatccacggtaccgatctcaaggattttactagcgagcagattgatgaaatcctgcagaatcatacggaaatagtgttcgctcggaccagcccacagcaaaaactcatcattgtcgaagggtgtcaacggcagggtgccattgtggcagttaccggagatggtgtgaacgacagtcccgcactgaagaaagctgatatcggggtggctatggggattgccggatccgacgtatcgaagcaggccgcggacatgatattgctcgatgataactttgccagtattgttaccggggtagaagagggcagactgatatttgacaaccttaagaaatcaattgcttatacactcacctccaatatccccgaaatcacacctttcctgttgtttattatggctaatatccctctgcccctgggaactatcacaattttgtgcatcgatctgggcacagacatggtacccgctatatccttggcttacgaggcagccgaaagtgatattatgaaaaggcagcctcggaaccccaggactgacaagctagtgaacgaaaggcttatctccatggcctatggacaaatcggaatgattcaggcgctgggcgggttcttcagctactttgtgatcctggccgaaaacggttttctgccgggtaatctcgtgggaataaggctgaattgggatgatcggacagtgaacgatctggaagattcctatgggcagcagtggacctacgaacagcgcaaagttgttgagtttacttgccataccgcattctttgtcagcatcgtagtcgttcagtgggccgatctgattatatgcaaaacccggagaaattcagtgttccagcaggggatgaaaaataaaattctcatcttcggtctgttcgaggagacagcactggcagcctttctgagctattgtccgggcatggacgtggctcttagaatgtacccgttaaaaccatcgtggtggttttgcgcctttccctactcattcttaatatttgtgtacgatgagatccggaagttgattctaagaaggaacccagggggggaaggagcaagacagggttcccgcggcgggaggggcgcggccggctcacaggccgcagggcctcgccttccttccccttgttggatggccctacctccagggtcccattcaagcctgtcatcccatctgtctggccatcccttgtgtctactgacaggtctgtgtctttgtgggtttctggtctccttgccactgtgcccatcactgtgctgggcggcccgcctggcctgcctctcccccagcttgactctgtccctgtccttcttactttgcctatctaggctggggggagagggtaacctgttgctgaccagtgccccacctcatcgtccgagtttgcctagacctcccggacctggcccacctctgtccgttccccctatactgtatagcggtggcaggagccctttgttcctgtggccacacctggggccccatcccctgcattacttactgcccccacctctgtggctggcttctttaccctgcccaaaaccactgtcaagcctcttttccgtgtctgtaagccttccactactgacccccctctctatccctcctgcaccggctaccagcttgggctcttttttactgcctttctcaccaccagcggatgccatcagtggttctggacagctctccaacatttccgttggtcgggaatag

SEQ ID NO: 109125 - DNA, 444 bp, synthetic construct
  misc_feature 1..444: note = Description of Artificial Sequence: Synthetic coding sequence
  source 1..444: mol_type = other DNA
atggggagtgggggttccgattcataccgcatagctaccagccaggataagaaggacgataaagacagccccaagaagaacaagggaaaggaaaggagagatctcgatgacctgaaaaaggaggtggcgatgacggagcataagatgagtgtcgaggaggtatgccgcaagtacaacaccgattgtgtgcaaggcttgacacactccaaagctcaggaaatactcgcccgcgatggcccgaacgcactaacaccaccacctacaacacctgagtgggtcaagttctgcagacagctgtttggagggttttcaatactgctgtggattggcgctattctttgcttcctcgcctacgggatccaggcaggcacagaggacgacccttccggcgacaacttgtacctgggtatcgtgctcgcagctgtggtgataataacagggtag

SEQ ID NO: 109126 - DNA, 2049 bp, synthetic construct
  misc_feature 1..2049: note = Description of Artificial Sequence: Synthetic coding sequence
  source 1..2049: mol_type = other DNA
atgggaagaatcgccacactggcctccggactcgaggtcggcaaaacgcccatcgccattgaaatcgagcacttcattcagctcataaccggcgttgctgtctttcttggggtgtctttttttatcctgtccttgatcttaggttacacatggttggaggcggtgatcttcctgattggaattattgtggccaacgtcccggagggcctgctggctactgtgacagtgtgcctgactctgacagccaaaaggatggcgaggaaaaattgccttgtgaagaatctcgaggccgtggagaccctggggagcacaagcaccatttgttccgataaaacgggcacattgacacagaacaggatgacagtagcgcatatgtggttcgataatcaaattcacgaggccgacaccactgaggaccaaagcggtacaagcttcgacaagtccagtcatacctgggtggcgctgagccacatcgctggactctgtaaccgcgccgtctttaagggcggacaggacaacatacctgtgctgaagcgagacgtcgctggtgacgccagcgaatccgctctcctgaagtgtatcgagctgtcttccggctctgtgaagttgatgcgcgagagaaacaagaaagtggccgaaatcccctttaactccaccaataaatatcagctttctatccacgagaccgaagaccccaatgataatcgctacctgctggttatgaagggagcaccagagcggatacttgatcggtgttccacaattttgcttcaaggcaaagagcaaccccttgacgaggagatgaaggaggccttccaaaacgcctacctggaattaggtgggttaggggagagggtactcgggttctgccactactacttgcccgaagagcagttccccaagggtttcgcattcgactgcgatgacgtcaatttcaccaccgacaacctatgttttgtgggactcatgtccatgatcgatcctcctcgtgccgcggtgcccgacgccgtggggaagtgtcggagtgccgggatcaaagttatcatggtgacaggagatcacccaattacagccaaagccatcgctaagggcgtcggcatcattagtgaaggaaacgaaacagtggaggatatcgctgccaggcttaacattccagtgtcccaggtgaatccgagagatgccaaagcgtgcgttatccacgggactgacctgaaggactttacctcggagcagattgatgagatactgcagaaccacaccgagatcgtgtttgctagaacctcaccacagcagaagcttattattgtggaaggctgccaaaggcagggcgccatagtggccgtgactggcgatggagtcaacgattccccagcattaaaaaaagccgacatcggggtcgccatgggaatagccggaagcgacgtttccaagcaggccgctgacatgatcctgctcgatgataactttgcatcaatcgtgaccggagtggaagaggggaggttgattttcgacaacctcaaaaaaagtattgcctacacattgacctctaacatccccgagatcacaccctttttgttattcatcatggccaatattcctctacctctcgggacaattaccatattgtgtatcgatttgggtactgatatggtccctgctatatcccttgcctacgaagctgccgagtccgatatcatgaaacgccaaccacggaaccctagaaccgacaaactggtgaacgaaagattaatcagtatggcttacggacagatcgggatgatccaggctctcggtggtttcttctcctattttgtgatcttagctgaaaacggtttcctccctggtaatctcgtcggaatccgattaaactgggatgacagaaccgtgaacgacctcgaagattcctatgggcaacaatggacatatgagcagcggaaagtagtagagtttacctgccatactgcattttttgtgagtattgtggtggtccagtgggcagacctaataatatgtaaaactcgtagaactcgtagcagctcgagggcctag

SEQ ID NO: 109127 - DNA, 3075 bp, synthetic construct
  misc_feature 1..3075: note = Description of Artificial Sequence: Synthetic coding sequence
  source 1..3075: mol_type = other DNA
atgggcggctgggaggaagagcgcaaccgccgagccaccgacaaaaaagatgataaggatagtccgaaaaaaaacaagggcaaggaacgcagggacttagacgacctgaagaaggaagttgccatgaccgaacataagatgtccgttgaagaggtttgtagaaagtataacacagactgcgtgcagggtctaacacattctaaagcccaagagatcctggcacgggacggtccaaatgcactgactcccccgcctaccacacctgagtgggtaaagttttgtaggcagctgtttggcggcttttcaatattgctctggattggcgcaatcctctgtttcctggcatacggcattcaggcaggcacagaggacgatccctcaggagataacctctacctcggcatcgtcctggcagctgttgtgataatcacaggctgctttagttattatcaggaggcgaaaagcagcaagatcatggagtcctttaagaacatggtcccccagcaggcactggtgattagagagggcgagaaaatgcaagtgaatgcagaggaggtggtggtgggggacttggtggaaatcaaggggggtgaccgagtccctgcagacctgagaattatttcagctcacggttgcaaagtcgacaacagctccctgaccggtgagtcagaaccacagacacgctccccggattgtacacacgataatccccttgaaacacgtaacatcacgttcttttctacaaattgcgtggaagggacagctcggggggttgtagtggctacaggcgatcggaccgtgatgggaaggattgctacccttgcctccggtctcgaagtgggtaaaacccccattgctattgagattgaacacttcatccagttgataacaggagtggccgtattcctaggcgtgtcattcttcatcctctcgttgatcttaggatacacatggttggaagctgttatttttctgatcgggatcattgtagcgaacgtgcccgaaggcttgttggctacagtgaccgtttgcctcaccctgactgccaaacgcatggcgcggaagaactgtctcgtgaagaacttggaggctgtggaaacccttggatctacatcaaccatctgttccgacaaaaccggaaccctgacccagaatagaatgaccgtcgctcacatgtggttcgacaatcaaattcacgaagctgataccacggaggatcagtcaggcacctcgttcgataaatccagtcatacttgggtggctttaagtcacattgcaggcctctgtaaccgcgccgtgttcaaaggcggccaagacaacattccagtcctgaaaagggacgtggccggagatgctagcgagtcagccttactgaaatgcatcgaactgagctccggttccgttaagctgatgagagaacggaataaaaaagtcgccgaaattccctttaatagcaccaataaatatcagctatctatccatgagactgaggaccctaatgacaatcgctacctgttggttatgaagggagcaccggagaggatcctggatcgttgcagtacgatactgttgcagggaaaggaacagccactcgatgaggaaatgaaagaagccttccaaaatgcatatcttgagctgggcggtctgggagagcgtgtgctcggattttgccattactatctgcccgaagagcagttccctaagggattcgcctttgactgtgatgatgttaattttacgactgataacctttgttttgttggtctgatgagcatgattgatccacctcgcgcggctgtgcccgatgccgtgggaaagtgtagaagcgccggaatcaaagttattatggtcacaggcgatcacccaatcaccgcaaaggctattgcaaagggggtcggtataatatccgagggcaacgagaccgttgaagacatcgccgctcgccttaacatccccgtgtctcaggtgaacccccgggacgctaaggcttgtgtaatccacggaacagatcttaaagactttacttcggagcaaattgatgaaattctacagaaccacactgagatagttttcgcccgtacttcaccacagcagaagcttattatcgtcgaaggatgccagaggcaaggagccatagttgccgtgactggtgacggcgtgaatgatagtccagctttgaaaaaggcggacataggcgtggccatgggtattgccggaagcgacgtttctaagcaggctgccgatatgattctactggatgacaatttcgcctctatcgtgaccggtgttgaggaaggccgactgatcttcgacaatctaaaaaaaagcattgcatacactctcacatccaacatcccggagattaccccgtttctcctctttatcatggcgaatattcctcttcccctcggtaccatcaccatcttatgtatcgacctcggtactgatatggttcccgctatctccctcgcttacgaagctgccgagtcagacatcatgaaaagacagcccaggaatccacgaaccgataagctggtgaatgagcggctcataagtatggcctatgggcagattggtatgatccaggcccttggtggctttttttcatatttcgtcatcctggctgaaaatggctttctccctggtaatctggtggggattcgcctgaactgggatgatagaaccgttaatgatctggaggattcttacgggcagcaatggacctatgaacagcgtaaagtagtcgaattcacatgccacacggcgttcttcgtgagcatagtcgtggttcagtgggcagatcttatcatatgcaagactcgccggaacagtgtgtttcaacagggtatgaaaaacaaaatcctgatttttgggctgttcgaagagactgcccttgccgcgtttctgtcatattgtccaggtatggatgttgctttgcggatgtatccattgaaaccctcctggtggttctgcgcattcccttacagcttcctcattttcgtttacgatgagatcaggaagttaatacttcgaagaaaccctggtgggtgggtcgaaaaagaaacctactattag

SEQ ID NO: 109128 - DNA, 3081 bp, synthetic construct
  misc_feature 1..3081: note = Description of Artificial Sequence: Synthetic coding sequence
  source 1..3081: mol_type = other DNA
atgggctccggcggatccgacagctatcgcatcgcgacatctcaggacaagaaagatgacaaagacagcccgaagaaaaacaaaggaaaagaacgcagggacttggacgatctgaaaaaggaagtggcaatgacagagcacaagatgtctgtggaggaggtctgccggaagtacaacactgactgcgtccaaggactgacccactcaaaggcccaagaaatcctagccagagacggcccaaatgcgctcacacccccgcctacgacacccgagtgggtgaaattttgtcggcagctcttcggtggctttagcattctactttggattggggccatactgtgctttctcgcctacggtattcaggccggcactgaggatgacccttcgggtgacaatctctatctgggcattgtcttagcggcagttgtcatcattactggttgcttctcctattaccaggaggccaagagctctaagatcatggagtccttcaagaacatggtaccacagcaagctcttgtcatcagggagggagagaaaatgcaagtgaacgcagaagaagtcgtcgttggcgacctggtggagatcaagggtggcgatcgagtgccagctgacctcagaattatttctgcacatggatgcaaggtcgacaactcaagcctcacaggtgagtcagaaccacagacacgatctcccgattgtacccacgataatccactggagacccgaaatatcacttttttttcaactaattgcgtagagggcaccgctcgcggcgtcgttgtggctactggggacagaaccgtgatggggagaatcgcaactctggcttccgggctcgaagttggcaaaactcccattgcaatagaaatagagcattttatccagctaattaccggcgtggctgttttcttgggagtgagcttttttattctctcactgatactcggctacacctggctcgaagctgtgatctttctcattggcataatagtggcaaatgtgcccgaggggttgttggccaccgtgactgtgtgcctgaccctaactgctaaaaggatggcacgcaagaactgcctggtgaagaacctggaagccgtggagacgctggggtcaacatctaccatctgtagtgacaagactggcacactcactcaaaatcggatgaccgtggctcacatgtggttcgacaaccaaatccatgaagctgacactaccgaagatcagagtggaacaagctttgataagtctagccatacttgggttgcactctcccatatcgcaggactgtgtaaccgggcggtgtttaagggaggtcaggacaacataccggtgctgaaacgtgatgtcgccggggacgcaagtgaaagcgccctgttaaaatgcattgagctgagcagtggcagtgtgaagcttatgagggagcgcaataaaaaagttgctgagataccatttaacagcactaacaaataccaattgagcatacatgaaacggaggatcctaacgataacagatacctgctggtgatgaagggagcccctgaacgcatactggataggtgcagtactatcctgctccagggcaaagagcagcctttggacgaagagatgaaggaagcgttccaaaacgcataccttgaacttgggggcctgggggagagggttctcgggttttgccactattatctgcccgaagagcagttccccaaaggcttcgcattcgactgcgatgacgtcaacttcacaacggataatctgtgctttgtggggctcatgagcatgatagacccaccaagggccgccgtgccagatgccgtgggcaaatgccggtctgccggaattaaagtgattatggtgacaggcgaccacccaatcaccgcgaaggcgatcgcaaagggcgtcggaattatctccgaggggaatgagacggttgaggatatagcggcaagacttaacatccccgtgagccaggtgaatccacgcgacgccaaggcgtgcgtgatccatgggacggacctgaaagatttcacctcggagcaaatagatgagattctccagaatcatacggagatagtcttcgcacgcacctccccccaacagaagctcatcattgtggagggctgccagcgccagggtgccatcgttgccgtaaccggcgatggagtgaacgactcccccgctctgaaaaaagccgatattggcgttgcgatgggcattgctggctcggacgtaagcaaacaggctgctgacatgattctgttagacgacaattttgcttcaatcgttaccggggtcgaggaagggaggctgatattcgataacctgaagaagtctatcgcctatactttgacctccaacatccccgaaataaccccattcttgctgtttatcatggcaaatatccccctccccttggggacaatcacgatcttgtgtatcgatctgggcacagatatggtgcccgcaatcagtctggcttacgaggctgcagaaagtgacattatgaaacgtcagccaaggaatccccgcactgataagctggtgaacgaacggcttatatccatggcatatggccagattggaatgattcaggctctgggaggcttcttttcttatttcgtgatcctcgcagagaatggtttcttgccaggcaacctggttggtattcgattaaactgggatgaccgcacggtcaacgatctggaggactcttatggacagcagtggacttatgaacagcgtaaggtcgtggagtttacctgtcacaccgctttcttcgtcagcatcgtcgtggtgcagtgggccgatctgattatttgtaagacacggaggaattccgtgtttcagcagggtatgaagaacaagattctgatattcgggctgtttgaggaaactgcattagctgcttttctgagctactgccccggtatggatgtggccctaaggatgtacccactcaagccttcctggtggttttgtgccttcccgtattctttcttaattttcgtgtatgatgaaatccggaagctgattctcagaaggaatccgggcggctgggtcgagaaggagacatactactag

SEQ ID NO: 109129 - DNA, 3090 bp, synthetic construct
  misc_feature 1..3090: note = Description of Artificial Sequence: Synthetic coding sequence
  source 1..3090: mol_type = other DNA
atgggcctctggggaaaaaaagggaccgtcgctccacacgaccaatcccctaggcgccgtccgaaaaaaggcctaatcaagaagaagatggtgaagagagaaaagcagaagagaaacatggaagagttgaagaaagaggtggtgatggatgaccataagcttacattagaggaactctccactaagtattctgtggacctgacaaaagggcacagtcaccagcgagctaaggagatactgaccagaggtgggcccaacacagtcactccccccccaacaactcccgaatgggttaagttctgcaaacagctgtttggcgggtttagcttgttactctggactggcgcaatactctgcttcgtggcttactcaattcagatctacttcaacgaggaacctaccaaagataatttgtatttaagcatcgtgctctctgttgtggttattgtgacaggttgtttctcttactaccaggaggctaagtcaagcaagattatggagtcattcaaaaatatggtgccgcagcaagccttggtgataagagggggggagaagatgcagatcaacgtgcaggaggtcgtgctgggagatctcgtggaaattaagggtggggatcgcgtgccggccgatcttcggctgatttcggcacaaggctgcaaggtggacaactcctctcttaccggcgaatctgagccccagtcacgcagcccagattttacgcatgagaaccctttggagacccggaacatatgtttttttagtacaaactgcgtcgaaggcaccgctaggggtattgtgatagcgaccggcgacagcaccgtgatgggccgcatcgctagcctgaccagtggactggccgtgggtcaaacccctatcgccgcagagatagaacattttattcatttaatcacggtcgtagccgtgttcctcggagtcacattctttgcccttagcctgttattgggttacggttggctcgaggcaattattttcctgattggcatcattgttgccaatgtgcctgagggtctcttagccaccgtcactgtgtgtttgaccctgacagccaagcggatggctaggaaaaactgcctcgtgaaaaatttggaggccgtggagactctcggcagcaccagtactatctgctctgataaaactggcacactaacccagaacaggatgacagttgcacatatgtggtttgacatgactgtctacgaagcagataccactgaagagcagacaggaaagacattcaccaagtcctctgacacttggttcatgctggctcgtattgcggggctctgcaaccgggcggattttaaggctaatcaggaaatcctccccatcgctaaaagggccaccaccggcgacgctagcgaatcagcactgctgaagttcattgaacagagttacagctccgtggcagaaatgcgggaaaaaaatcccaaggtagcagaaattccattcaatagcaccaataagtaccagatgagcattcacctacgagaggattccagccaaacacatgtcctgatgatgaaaggcgctcccgagaggatcttggaattctgcagcaccttcttgctgaatggacaggagtactctatgaatgatgagatgaaggaagccttccagaacgcctatcttgagcttggggggcttggcgaacgagtgcttgggttttgctttctgaatctgccatcatcgtttagtaaggggttcccattcaacaccgacgaaataaatttcccaatggacaacctgtgctttgtcggattgatctctatgattgaccctcctagggccgccgtgccggacgccgtgagcaagtgtagaagtgctggcatcaaagttatcatggtgactggggatcacccaataacagccaaagctatagccaaaggggttggcatcatcagcgaggggaccgagacagctgaggaagtcgcagctcggctcaaaatccctatcagcaaagtggacgcatcagcggctaaagccatcgttgtgcacggcgctgaactgaaggacatacagtctaaacagctagaccaaattttacaaaatcaccccgaaattgtattcgctcggactagtccccagcaaaagctgattatcgttgaaggttgccagcggctcggggcagttgtcgctgtcactggggatggcgtgaatgacagcccggcactcaagaaggcggacatcggaatcgcgatgggtataagtgggagcgatgtctctaagcaggcagccgacatgattctgctggacgacaactttgcatcaattgtgacaggagtcgaagagggacggctgatattcgacaacctaaaaaaatccataatgtacactctgacgagcaatattcccgaaattacgccattcctgatgtttataatcctgggaatccccctccctctaggcaccatcactatactgtgcattgatctcggtaccgatatggtgcctgcgatcagcctggcttatgagtccgcggagtcagatattatgaaaaggcttccgcgcaacccaaagaccgacaatcttgtaaaccacaggctgataggaatggcttacggccagatcggcatgatccaggccctggcaggcttctttacctactttgtgattttagcagaaaacggatttaggcccgtggatctcttgggcatacggttacattgggaggacaaatacctgaatgatctggaagactcatatggccaacagtggacctacgaacagagaaaggtggtggaatttacttgtcagactgcctttttcgtcacaatcgtcgtggttcagtgggccgacctaattatctcaaagacaagaagaaactcactctttcaacaaggtatgagaaacaaagtcctcatttttggtatcttggaggagactctgctggctgcatttctgtcctacaccccagggatggacgtggccctgcggatgtaccccttaaaaatcacgtggtggctgtgcgcaataccttattcaatacttatatttgtctacgatgagatccgcaagctgcttatccgccagcatccagacgggtgggtggaacgcgagacctattactag

SEQ ID NO: 109130 - DNA, 498 bp, synthetic construct
  misc_feature 1..498: note = Description of Artificial Sequence: Synthetic coding sequence
  source 1..498: mol_type = other DNA
atgatacaggcgctagcaggattttttacttactttgtcatactggcagaaaatggctttagacccgtagaccttctgggaatcaggctccactgggaagacaaatacttgaatgatctagaggattcatacggccagcagtggacttatgaacagcgaaaggtcgtcgagtttacctgtcagaccgccttcttcgtcaccatcgtagtggtccagtgggccgacctcatcatatcgaaaacaagaaggaactcactttttcagcagggcatgagaaacaaagtgcttatttttggtatcctcgaagagacgcttttggcggcattcttatcctatacccctgggatggacgtcgcactgagaatgtaccctcttaaaatcacttggtggctgtgtgcaatcccatatagtatcttgatctttgtgtacgatgaaattcgaaagctgctgattaggcaacacccagacggatgggtggaaagagaaacatactattag

SEQ ID NO: 109131 - DNA, 888 bp, synthetic construct
  misc_feature 1..888: note = Description of Artificial Sequence: Synthetic coding sequence
  source 1..888: mol_type = other DNA
atgggtaaacgtaaatgcagcccggcaagtcagtcactgtttctatttcagttccagaagatggaactgaagtttaagatcttactgttctatgtgatattctatggctgccttgctggtatttttatagggacgattcaggtcatgcttctcacaattagcgaattcaaacccacttatcaggaccgcgttgcaccacccggcctgacgcaaattccccagatacaaaagactgagattagttttcggcccaacgatcccaaatcctatgaggcctacgttttaaacatcgtcaggttcctcgagaaatacaaagacagcgcccaacgcgacgacatgattttcgaagattgcggggatgtacctagtgaacctaaagaacggggagacttcaaccacgaacgcggcgaaagaaaggtgtgtcgcttcaagctggaatggttagggaactgctctggcttgaacgatgaaacctacggttacaaggaagggaaaccttgcataatcatcaagctgaatagagtcctcggctttaaacctaaaccccccaagaatgagtctttggagacgtacccggttatgaagtacaatcccaacgtgctgcctgtacagtgcaccggcaagagggacgaagataaggataaagtggggaacgtggaatactttggattgggaaatagccctgggtttcctcttcaatactacccgtactatggtaagctgctacagccgaaatatctgcagccactgcttgccgtgcagttcaccaatttgaccatggacaccgaaattagaatcgagtgcaaggcctacggcgaaaatattggctattcggagaaagaccgcttccagggacggttcgacgtgaagattgaggtgaagagttag

SEQ ID NO: 109132 - DNA, 912 bp, synthetic construct
  misc_feature 1..912: note = Description of Artificial Sequence: Synthetic coding sequence
  source 1..912: mol_type = other DNA
atggcccgagggaaggccaaggaggagggatcttggaaaaagttcatctggaattcagagaagaaggaattccttgggagaacgggaggctcctggtttaagatcctgctgttctatgttatcttttacgggtgccttgcaggcatctttatcggaaccattcaagttatgctcctcacgatctccgagtttaagcctacctaccaggatcgtgtggcaccccccggactgacacagattcctcagatccagaagacagaaattagttttaggcccaacgatccaaaatcttatgaggcctacgttctcaacattgttcgattcctggagaaatacaaggactcagctcaacgagacgacatgatttttgaagactgtggggatgtgccctctgagccaaaggaacgaggagacttcaaccatgagcgcggtgagaggaaagtatgtagattcaaactcgagtggctgggaaattgcagtggccttaacgacgagacttatggatataaggaggggaaaccttgcataatcatcaagctgaacagggtgcttgggttcaagccaaagccccctaagaatgaaagcctggagacctatccagtgatgaaatacaatcctaacgtcttacccgtgcagtgcactgggaaacgagatgaggataaagacaaggtaggcaatgtggagtactttggattgggtaattcccctgggttccccttgcagtactacccttactatggaaagctgttgcagccgaagtacctccagcccttgcttgccgtacaattcacaaatctcaccatggacaccgaaattcggattgagtgtaaagcttacggcgagaatattggatacagtgaaaaagatcgattccaaggacgatttgatgtcaagatcgaggttaagtcatag

SEQ ID NO: 109133 - DNA, 912 bp, synthetic construct
  misc_feature 1..912: note = Description of Artificial Sequence: Synthetic coding sequence
  source 1..912: mol_type = other DNA
atggcccgcggcaaagctaaagaggagggaagttggaagaagtttatttggaacagtgagaaaaaagagttcctgggccggactggtgggagttggtttaagatcctgctgttttatgtcattttctacgggtgccttgctggtattttcataggaaccatccaagtgatgctgcttaccatcagcgagttcaaacctacataccaggaccgcgtggccccccccgggctgacccagataccacagatacagaaaaccgaaatcagttttcgcccaaacgaccccaagtcttatgaggcatatgtcttgaatatcgtgcgatttctagaaaagtataaggatagcgcccagcgagacgacatgatctttgaggattgtggcgacgttccatcagaaccaaaggagcgaggcgacttcaaccatgaacggggggaacgtaaggtctgccgctttaaactcgagtggctgggcaattgtagcgggttgaatgatgagacctatggttataaggaggggaagccttgcatcataatcaaactgaatcgggtgctgggatttaaacccaaaccgcctaaaaatgagagccttgagacctaccctgtgatgaagtacaatccaaacgtcctaccggtgcaatgtacgggcaagagggatgaagataaagataaagtagggaacgtggagtacttcggtctggggaactcccctggattcccccttcaatactatccctactacggcaaactgcttcagcctaagtacttgcaaccccttttagccgtgcaattcacaaatctgacaatggatacagaaatccggattgaatgcaaggcttatggtgagaacataggttattctgaaaaagacagattccaaggccgttttgatgttaagatcgaagtgaaatcctag

SEQ ID NO: 109134 - DNA, 744 bp, synthetic construct
  misc_feature 1..744: note = Description of Artificial Sequence: Synthetic coding sequence
  source 1..744: mol_type = other DNA
atgctgctgactatctccgagtttaagcccacctatcaggatcgggtagcccctccgggtctaactcaaattcctcagattcaaaagaccgagatcagtttccgccccaatgacccaaaaagctacgaggcttacgtattgaacattgtgcggttcttggaaaaatataaggacagcgctcagcgcgatgatatgatttttgaggactgtggagatgtacccagcgaaccaaaagaaagaggcgatttcaatcacgagcgtggcgaaaggaaggtctgcagattcaagctggaatggctgggaaactgttccggcctgaacgacgaaacttacggttacaaagagggcaagccctgtatcataatcaagctcaatagggtgttgggattcaagccgaagccacccaaaaacgaatctctggagacctatcccgtgatgaagtacaatccaaacgtcctccccgtgcagtgtactggcaaacgtgatgaggacaaggacaaggtgggtaatgtggagtacttcggattggggaatagccctgggttccctctccagtattacccatactacggtaagttgctccagccaaagtacctgcaacccttattagccgtgcagtttactaacttgaccatggacaccgaaatcagaatagaatgcaaagcctatggagaaaatattgggtattctgagaaagaccgctttcagggaaggttcgacgtgaagattgaggttaaatcatag

SEQ ID NO: 109135 - DNA, 873 bp, synthetic construct
  misc_feature 1..873: note = Description of Artificial Sequence: Synthetic coding sequence
  source 1..873: mol_type = other DNA
atggttattcagaaagaaaagaagagctgcggtcaagtcgttgaggagtggaaggagttcgtgtggaacccccgaactcatcaattcatgggaagaacgggcacgagttgggccttcattctactattctacctcgtgttttatgggttcctcaccgccatgttcacactgacaatgtgggtgatgctgcaaaccgtgtctgatcacaccccaaagtaccaggatcgcctggcaaccccaggcttgatgataaggcctaagaccgaaaatctcgatgtcatcgtcaatgtctccgacacagaaagctgggatcagcatgtgcagaagttgaacaaatttctggagccatacaacgattctatccaggcacagaagaacgatgtctgtcgcccgggccgctactatgaacagccagataatggggtattaaattaccccaaacgggcttgccagttcaacagaacacagcttggcaattgctcgggcattggagacagcacacactacggatattctacaggccagccctgcgtcttcatcaagatgaaccgtgtgattaatttctatgcgggcgcaaaccagtccatgaacgtgacttgcgcggggaagagagatgaggatgccgaaaacctggggaacttcgtcatgttccccgccaatgggaatatagacctcatgtattttccctattacgggaaaaaatttcacgtgaattatactcagccacttgtggcggtgaaatttttgaatgtaacccccaatgtggaagttaatgttgagtgccgaattaatgcagccaacattgccacagacgatgagagagacaagttcgccggccgcgtcgcgttcaagctgagaatcaataagacatag

SEQ ID NO: 109136 - DNA, 840 bp, synthetic construct
  misc_feature 1..840: note = Description of Artificial Sequence: Synthetic coding sequence
  source 1..840: mol_type = other DNA
atgacgaagaacgagaaaaaaagcctgaatcaaagtttagcagagtggaagctgttcatttacaaccccactacaggggaattcctcggacggacagcgaagagctggggcctgatcctgctgttctaccttgtgttctatgggttcctagccgcactgttctcctttacaatgtgggtgatgctccagacactgaacgatgaggtgcccaaataccgcgaccaaattccgagtccaggattgatggtgtttcccaagccagtaaccgcattggagtatacgtttagtcgatctgaccccacctcatatgctggctatatcgaggaccttaagaagtttctcaagccatataccctcgaagagcagaagaatctcactgtctgcccagatggagctctgttcgagcagaagggaccagtttatgttgcctgccagtttcctatcagtctgcttcaggcatgttccggcatgaacgacccggattttggctattctcaaggcaacccatgcatcctagtgaaaatgaatagaattatcggcctcaagcctgagggagtgcccagaatcgactgtgtctcaaaaaatgaggacatccctaacgttgccgtatatccacacaacggcatgatcgatctgaagtacttcccatactatggaaagaagctgcatgtcggatatctccagcctctggtggcagtacaggtttccttcgcccctaataacactggaaaggaggttaccgtggagtgtaagatcgacggatcagcaaacctcaagagtcaggacgaccgtgacaaatttttgggcagagtgatgtttaagattacggcaagggcctag

SEQ ID NO: 109137 - DNA, 582 bp, synthetic construct
  misc_feature 1..582: note = Description of Artificial Sequence: Synthetic coding sequence
  source 1..582: mol_type = other DNA
atgctgtcagaaggagacatcttattttcttctctcctgtcttctccatcgcttttctggccccccgggctgatcctactcttttatctggttttctatggcttcctggccgcattgttttcctttactatgtgggtcatgctccaaacactgaacgatgaagtgcccaagtacagagatcagatccctagccccggcttgatggtcttccccaaaccagtaactgcactggaatacactttctccaggagtgatccgacttcatatgcaggctacattgaggatttaaagaagtttctgaagccgtataccttagaagaacagaagaacctgacagtctgtcccgatggcgcattgtttgaacagaaagggcctgtctatgttgcctgtcagttcccaatcagcctcctccaggcatgctctggcatgaacgaccccgactttggctacagccaaggtaacccatgtatcctcgtcaagatgaacagaatcatcggactgaaaccagagggagtgcctcgaattgactgtgtttctaagacaaacaatgtcaaagatggaatgaagatctaccagatgtag

SEQ ID NO: 109138 - DNA, 2139 bp, synthetic construct
  misc_feature 1..2139: note = Description of Artificial Sequence: Synthetic coding sequence
  source 1..2139: mol_type = other DNA
atggccttgcttgcaatgcatagttggcggtgggccgcagccgccgcggcattcgaaaaacggagacacagtgccatcctgattcgccccctcgtgagcgtgtccggaagtggtccgcaatggcgacctcatcaactgggagcacttggtacggcgagagcatatcaaatacccgaatctcttaaaagcattacctggcagcgcctgggaaaggggaactctgggcagtttctggacgctgcaaaagcactccaggtgtggcctctgatcgagaagcgcacctgctggcacggccatgcgggtggtggcctccatacagaccccaaggaaggtgccatgaatatcgtcgtgcccttcatgttcaaatatgctgtcgactctcttaatcagatgagcggcaatatgctgaacctctctgatgcaccaaatacggtggccacgatggcaacagccgtactgatagggtatggcgtgagcagagctggagcggccttctttaatgaggtccgcaatgccgtgttcggaaaagtggcacaaaatagtatcaggagaatagctaagaacgtttttttacatttgcacaatcttgatctcggttttcatctgtctcgccagacaggagcccttagcaaggctatcgaccgtggcactagaggtatttcgttcgtgctgagcgcgctggtttttaacctgttgccgatcatgtttgaagtgatgctggtgagcggagtgttgtactacaagtgcggagcacagttcgcactcgtgaccctgggcactctcggcacatacaccgcctttacggttgctgtgaccagatggcgtactaggttccggattgaaatgaataaggctgacaatgatgctggcaacgctgccatagattccctgcttaattatgaaaccgtgaaatatttcaataatgaacggtacgaagcacaacggtacgacgggttcttaaagacctacgaaactgcgagtctgaagtctacctctactctggcaatgctaaattttggccagtctgccatcttttcagtaggacttacagcaattatggtgttggccagtcagggaatcgttgccggaactctgaccgttggagatctggttatggtgaatggcctactgtttcagctttcattgcccctgaattttcttgggacagtttatcgggaaaccagacaggctctcatcgacatgaacacactcttcactcttttgaaggtcgatacacagatcaaggacaaggtgatggcgtctcctctccagataacaccacagacagccaccgtggcgtttgacaatgtgcatttcgaatacatcgagggacagaaagtactctcgggaatatcttttgaggtgcctgctggaaagaaggtggccattgtgggaggctccggcagtggcaagagtacaattgtgcgcttgctcttcagattttacgaaccccagaagggatccatatacttggctggccaaaacatacaggacgtttctctggagtcgctaagacgcgcggtgggcgtggtgcctcaagatgccgtcctgtttcacaatacgatctactataatctactctatggcaacatcagcgccagtccggaagaggtatatgcagtggcgaagctagctggcctgcatgatgccattttaagaatgccacacggatatgatacacaagtcggagaacgtggattgaaactgtccggcggcgaaaagcagcgggtagccatcgcaagagctattctcaaagatccgcctgtgatactgtatgacgaggctaccagttcactggacagtatcacagaggagaccattctcggtgccatgaaggacgtggtgaaacaccgtacaagcatttttattgcccatagactgagcactgttgttgatgcagatgagataattgtgcttgatcaaggaaaagtcgccgaaagaggcactcatcacgggttgctggctaacccccattctatttacagcgagatgtggcatacacaatcgagcagggttcaaaaccacgataaccccaagtgggaggccaagaaggagaatattagcaaggaggaggaacggaaaaagctgcaagaagagatcgttaattcagtcaaaggttgcggcaattgttcttgctag

SEQ ID NO: 109139 - DNA, 2046 bp, synthetic construct
  misc_feature 1..2046: note = Description of Artificial Sequence: Synthetic coding sequence
  source 1..2046: mol_type = other DNA
atgcgcctgtggaaggccgtggtcgttacactggctttcatgagtgttgacatctgcgtgaccaccgctatttacgtattttctcacctggaccgaagccttctggaggacatcaggcatttcaatatctttgactctgtgctagatctgtgggccgcatgtctgtacaggtcatgtctgctgctgggggccacaatcggcgtcgccaagaacagcgcactgggccccaggaggttacgggcctcctggctagtcatcacattggtgtgcctgttcgtcgggatttatgccatggtgaagttgctgctcttctcggaagtcagacgacccataagggacccctggttttgggccctcttcgtgtggacgtacatctccctcggagcctcctttctactctggtggttgctgagcacagtacggcccggcacacaggcattagagcctggcgctgctaccgaggctgaaggttttcctggttcaggaaggcctcctcccgaacaggcctccggagcgacattacaaaagctcctttcctacacaaagccagatgtggccttcctggttgcagccagtttcttcttgattgtcgccgctcttggtgaaacgttcctaccttactacactgggagggcaattgacggaatcgtgatccagaagtctatggaccagttctccaccgccgtcgtcatcgtgtgtctgttggccattggctcctccttcgctgcaggtataagaggaggtatatttactctaatatttgcccgattgaacattaggctgcggaactgtctcttcaggagcctggtctctcaggaaacgtctttcttcgacgagaatcggaccggagaccttatcagcagacttacctcggacactacaatggtctcggatctcgttagtcagaatatcaatgtgttcctcagaaacaccgtcaaagtcactggtgtggtcgtgttcatgttctctctaagctggcaactgtctctggtgacctttatgggatttccaataatcatgatggtctccaacatctatggaaaatactataagaggttgtctaaagaagttcagaacgccctggcccgtgcctcgaacacggccgaggagacaatctcagccatgaaaacagttagatctttcgcgaatgaagaggaagaggcggaggtgtatttgcgaaaactgcagcaagtctataagctcaaccggaaggaagccgctgcatatatgtattatgtgtggggatccgggttgactctgctggtggtacaagtgtcaatattgtattatgggggccatctcgttatctctggccaaatgacctccgggaacctcattgcttttattatttatgaatttgttttgggtgattgtatggaatcagtggggtcagtctacagtggactgatgcagggcgttggggccgccgagaaagtgtttgagtttattgatcgtcaacctaccatggtccatgatggcagtcttgctccagaccacttggaaggccgggtggacttcgagaacgttaccttcacatatagaacacgtccccacactcaggtcctgcagaatgttagcttcagtcttagcccaggcaaagtcacagcacttgtcgggccaagcggctcagggaaaagctcttgtgtgaacatattggaaaacttctatcctttggagggcggcagagtactgcttgacggcaagccaatcagcgcttacgatcacaagtacctacacagggtgattagtctcgtgagccaggaacccgtgcttttcgcaagaagcatcacggacaacataagctatggactgcccacagtgccctttgagatggttgtggaggccgcccagaaagctaacgctcacggctttatcatggagctgcaggacggttacagcactgagaccggggagaagggtgcccagctctcgggcggccaaaaacagcgggtcgctatggcaagggctctcgtacggaatccccctgtgctcatcctggatgaggccacctctgcacttgacgctgagtcagagtaccttatctag

SEQ ID NO: 109140 - DNA, 2052 bp, synthetic construct
  misc_feature 1..2052: note = Description of Artificial Sequence: Synthetic coding sequence
  source 1..2052: mol_type = other DNA
atgaggttgtggaaagccgtggtggtgacgctggcatttatgagtgtagacatatgtgtgactactgccatctacgtcttttctcatctcgatcggagcctgttagaagacatcagacattttaacatttttgatagcgtccttgatttatgggccgcatgtctctacagatcatgcctactcttgggcgccactatcggagtcgccaaaaattccgccctgggacctcggcgtctgagagccagttggttggtgataactctagtctgcctctttgtgggcatctatgcgatggtaaaactgctattgttttcagaagttcgcagacccatcagagacccctggttttgggccttgtttgtttggacatatattagcctcggggcctcatttcttctgtggtggctgctgtcaacggtccgcccggggacacaggcactggaacccggcgccgccaccgaggccgaggggttccccggatcaggacgccctcccccagaacaagcttcaggagcaactctacaaaagttgcttagctataccaagcctgacgtggcattcctcgttgctgccagcttctttctcatagttgccgcattaggagaaaccttcctcccttactacacaggccgggccatcgacggcattgtgatccagaaatcgatggaccagttttccacggcagttgtgatcgtatgtctgctcgcgatcggtagttcctttgcagcaggtattaggggcgggatttttaccttgatatttgctagactgaatatacggctacgcaactgtcttttccgaagcctggtgagccaggaaacatccttctttgatgagaataggactggcgaccttatttctcgccttaccagtgataccaccatggtttctgacctggtcagccagaatattaacgtcttcctcagaaacactgtaaaggtgacaggtgtggtagtcttcatgttttcgctttcctggcagctgtctttggtaacattcatgggttttccgatcattatgatggtgagtaatatctatgggaagtactacaagaggcttagcaaagaagttcagaacgcccttgctcgggcctccaatacagctgaggagactatctcggccatgaagacagtgcgctcttttgcgaacgaggaagaggaggccgaggtctacttacgtaagctgcagcaggtctacaaactgaaccggaaagaggccgccgcatatatgtactacgtatgggggagcggcctcaccctgctcgtggttcaggtgtcaatcctgtattacggaggccatctcgtgatctcagggcaaatgactagcggtaacctgatcgccttcataatctatgagtttgtcttgggagactgtatggagtctgtcgggtcagtatatagtgggcttatgcaaggagttggcgcagctgagaaggtctttgaattcatagacagacagcctaccatggtgcacgacggctctctggcccccgatcacctcgaagggagagtggacttcgagaacgtgacattcacctatcggacccgaccacacacacaggtgttacagaacgtttccttctccttatcccccgggaaggtcacagcactggtcgggcctagtgggtctggcaagagcagctgtgtgaacattctggagaatttctacccccttgaagggggaagagtgctgcttgatggaaaacccatctccgcatacgaccacaaatacttacatagagtcatctcgttggtcagccaagagcctgtcctcttcgctcggagcattacggacaatatcagctacggcctacctacggtgccctttgaaatggtagtggaggccgctcagaaggcaaatgcccacgggttcattatggaacttcaggatggctactccaccgaaaccggcgagaagggagcccagttgtccggaggtcagaagcagcgtgtggcaatggcgagggccttagtgaggaacccccccgttcttatcctggacgaggccacatccgcgttggacgccgaatcagaatacctgtgtgcaggttag

SEQ ID NO: 109141 - DNA, 300 bp, synthetic construct
  misc_feature 1..300: note = Description of Artificial Sequence: Synthetic coding sequence
  source 1..300: mol_type = other DNA
atggcagcgccagccgagccttgcgctggacagggcgtctggaatcagacagaaccagagccggccgccaccagccttctatccctttgcttcctgcggaccgcgggggtgtgggtgccccccatgtatctgtgggttctgggacccatttatttactgttcatccatcaccacgggaggggctatctgcggatgagccctctgttcaaagcgaaaatggtcgcggccatccctggcagtcttgagcccggaaacgtgcggggcaggcagggaaccggatggaacctggtaaagtcctag

SEQ ID NO: 109142 - DNA, 372 bp, synthetic construct
  misc_feature 1..372: note = Description of Artificial Sequence: Synthetic coding sequence
  source 1..372: mol_type = other DNA
atgccttctgccggaaccctaccatgggtccaggggatcatctgcaatgccaacaatccttgcttccggtacccgactccaggagaggcacctggcgtggttggaaacttcaataagtccattgttgcacggttgttctcagacgcacggcggctgctgctatacagtcagaaggacacatcaatgaaagatatgagaaaagtcttgagaactctgcagcagattaaaaagagctcgtctaatctgaagttacaagatttccttgtggacaatgagacattcagcggctttttgtaccacaatctttccctgccgaagagtacagtggataaaatgctccgagccgatgtcattctgcacaaggtatcttag

SEQ ID NO: 109143 - DNA, 6786 bp, synthetic construct
  misc_feature 1..6786: note = Description of Artificial Sequence: Synthetic coding sequence
  source 1..6786: mol_type = other DNA
atggcgtgttggccacaattgagactactgctgtggaagaacttgactttccggaggcggcagacttgccagctgctgcttgaagtggcctggcccctgttcatttttttgatccttatttcagtgcgactatcataccccccatacgaacagcatgagtgtcatttccccaacaaagctatgccgagtgccggaaccctcccctgggtccagggaatcatttgcaacgcaaataacccatgctttcggtatcccacacctggcgaagcgcctggcgttgtcgggaatttcaataagagtatcgtggcccgcctgttttcggacgctagaagactcctgctgtactcccagaaagatactagcatgaaggatatgagaaaagtacttcggacattacagcaaatcaagaagagctcttccaacctgaagctccaggactttctagttgacaatgagactttttcgggcttcctgtaccacaacttgtctttacctaagagcaccgttgacaagatgttgcgagctgacgttatcctgcataaagttttcctccagggctatcagcttcatttaaccagcctgtgtaacggttcgaaatcagaggagatgatccaacttggagatcaggaagttagcgaattatgtgggctgcctcgcgaaaaactggccgctgctgagcgagtgcttcgctctaatatggacattttaaagcctattctgaggactctgaacagtacctctccatttccctctaaggaactggcagaggctactaaaacgctgctgcactctctcgggaccctggcccaggaattgtttagcatgcggtcttggtctgacatgagacaggaggtcatgttcctgaccaatgtgaattcatccagtagcagcactcagatctatcaggctgtatcccgtatcgtctgtggccatccagaaggtggcggcctcaaaatcaagagcctgaactggtacgaagataacaattacaaagcactgtttgggggcaacggtactgaggaagacgctgagacattttatgataattctaccacaccatactgtaacgatttgatgaaaaatctcgaatcatcaccgctctcgcggatcatttggaaggctctcaaacccttactggtggggaaaattctgtatacacctgataccccagcaacacggcaggttatggcagaggtcaataaaactttccaagaactggccgtgttccacgatctggaaggcatgtgggaggaactcagtccaaaaatctggacatttatggaaaattcgcaggaaatggacctcgttcgcatgcttctggacagccgcgacaacgatcatttctgggaacagcagttggatggtcttgactggactgctcaggatattgtcgcatttctggcaaagcacccggaggacgtacaatcctcgaacgggagcgtttacacttggcgcgaggcattcaacgagacaaatcaggctattcgcaccatctcccgatttatggaatgcgttaacctgaataagctcgaacccatcgccactgaagtgtggctgatcaacaagagcatggagctgttggacgaaagaaaattttgggccggcatcgtgttcaccggcatcacacccggaagtatcgaactccctcatcacgtcaagtacaagatccggatggatatagataacgttgaaaggaccaacaaaataaaagacggctactgggatcccgggcctcgtgctgacccatttgaggacatgcggtatgtgtgggggggcttcgcttaccttcaggatgttgtggagcaggccatcatcagagtgctgacgggaacggagaaaaagacaggggtgtacatgcagcagatgccgtacccctgctacgttgacgatatcttcttgcgggtcatgagccgcagcatgcctttgttcatgacactagcgtggatttattctgtggctgtgatcataaagggcattgtgtatgaaaaggaggcccgtttgaaggagaccatgagaataatgggcctcgacaattccatattgtggttttcctggtttatcagcagcctcatcccattgctggtgtctgctggactcctggttgtaatcctcaagctgggcaacctcttgccttacagtgacccctccgtggtgttcgtgtttctgagtgtgtttgcagtcgtcaccatcctccagtgtttcctgatcagcactctgttctcaagggccaatctggctgcagcgtgcggggggatcatctactttaccctctatcttccatatgttctgtgtgttgcatggcaggactacgtgggatttactctgaaaatcttcgcaagtttattaagcccagtcgcatttggcttcggatgtgaatattttgctctgtttgaggagcagggcattggcgtgcagtgggataacttgtttgagagtccagttgaggaagatggtttcaacctaacgacttctgtgtctatgatgctctttgatacctttctgtatggggtgatgacttggtatatcgaggccgtgtttcctggtcaatacggaatcccaaggccttggtacttcccttgtaccaagtcttactggtttggggaagagtcagatgagaagtcccatccgggcagtaaccagaaaagaatctcagagatctgcatggaggaggaacccacccatcttaaactgggggtgagtatccagaacctggtgaaagtctaccgggacggtatgaaagttgccgtggatgggttggctcttaacttctatgaaggccagatcacctctttcctgggccataacggggccgggaaaacaaccaccatgtccatactgacagggctgttccctcctacctccggcacggcctacatactggggaaagacatacgatccgaaatgagcaccatccgccaaaacctcggagtatgccctcagcacaacgtcttgtttgacatgctgacagtcgaagagcatatctggttctacgcccgcctcaagggtttgagcgagaagcacgtaaaagcagaaatggaacagatggctcttgacgtggggctcccctcgtctaaactgaagagcaagacctcacaactatcagggggtatgcagaggaaattgtccgtcgctctggcttttgtcggaggatccaaagttgtcattctagacgagccaacggctggcgtcgacccgtatagtcgcaggggcatctgggagctgctcctcaagtatcgccagggccgaaccatcatcttgagtacccatcacatggacgaagccgacgtcctgggcgatcgtatcgctataatcagtcacggcaaactgtgctgtgtgggatcatccctcttcttaaagaatcaattgggcacggggtactatctgaccctagtcaagaaggacgtggagtcatcactgtccagctgccgtaattcttctagtacagtttcctatctaaagaaagaggactcggtgagccagtcctctagcgacgccggtctgggctctgatcacgagagcgatactctgacaatcgacgtgtctgccatatcaaatctgatccgtaagcacgtttctgaagctcggctggtggaggatatcggacacgaactgacatatgtgctcccctatgaagccgcaaaagaaggggcattcgtcgagctgttccacgagatcgatgacagattatccgatctggggatctcatcttatggcatatccgaaactacactggaagaaatctttttaaaggttgccgaggaaagcggcgtggacgcagaaacctctgatggcacattgcctgcaagacggaatcgccgcgcgtttggtgataagcagtcctgcctgaggccgtttactgaggacgacgcagccgaccccaacgattcagatatcgatccagaatcccgggaaacggatctcttatcaggtatggacggcaaggggtcctatcaggtgaaaggttggaagctcacacagcagcaattcgtagcactactgtggaagcggctgctgattgcccgaaggtctagaaaggggtttttcgcccagatcgtgcttcccgccgtatttgtgtgcattgctttggtcttttccctgattgtgcctccattcgggaagtatcctagtctcgagctccagccatggatgtataacgaacagtacactttcgttagcaatgatgcgccagaagacacgggaacactcgaactgctgaatgccctgactaaggatccgggctttggtactcggtgcatggaggggaaccccattcctgataccccgtgccaagctggggaggaagaatggaccacagctcctgttcctcaaaccatcatggaccttttccaaaacgggaactggacaatgcagaacccgagtcccgcttgtcagtgcagcagcgacaaaatcaagaagatgttacccgtctgtccccccggagccggcggcctgccccctcctcagagaaaacaaaatactgctgatatcctacaggacctgacaggccggaacattagcgattacttggtgaagacatacgtacagataatcgcgaaaagcctgaaaaacaagatctgggtcaatgagtttcggtacgggggatttagcctaggggtctcaaacacgcaggccctgcccccaagccaggaggtaaatgacgcaatcaagcagatgaaaaagcaccttaagttggcaaaagactcaagtgccgacaggtttttgaatagtctcggcagatttatgacaggactggacaccaagaataacgttaaggtttggtttaataacaaaggatggcacgcaatttcaagttttctgaacgttatcaacaatgcaattttgagggctaacttgcagaagggagaaaatccgagccactacggtataaccgctttcaaccaccccctgaatctgaccaagcagcagctgagtgaggtagccttaatgacaacctcggtagacgtgctcgtctccatttgcgtgatcttcgccatgtcattcgtgcccgcatccttcgtggtttttttgattcaagaacgtgtgtcaaaggccaaacatctgcagttcataagtggggtcaagcccgtgatctactggctttctaatttcgtttgggatatgtgcaactatgtggtccctgccacccttgtaattataatcttcatctgtttccagcagaagtcatatgtatccagtaccaatctgccagtgctggccctgctcctgttgctgtacggctggagcatcacaccactaatgtaccctgcaagctttgtgttcaagatacccagcaccgcttatgtggtgttaacttctgtgaatctgttcattggaatcaatggatctgtcgcgacattcgtactcgagctctttaccgataataaacttaacaatatcaatgacattctgaagtccgtgtttctgatttttcctcacttctgcctgggccgcggcttgatagacatggtcaagaatcaggccatggcagatgcacttgagagattcggggaaaaccgattcgtctcgcccctgagttgggacttggttggtcgcaacttgtttgccatggctgtcgagggcgtggtcttcttcctgatcactgtgctgatacaataccgattctttatcagacctagacccgtaaacgccaagctcagccccctgaatgatgaggacgaggacgttagacgggagcgtcagcgcatccttgatggaggtggacagaatgatatcctggagataaaggaactcaccaagatataccgtcgcaagaggaaacctgcagttgacaggatttgcgtgggcatcccccctggggagtgcttcgggctactgggcgtcaacggggccggcaaatcctctacctttaagatgctcacaggggataccaccgtgacccgtggcgacgctttcctgaacaaaaattccatactgagcaacattcatgaagtccaccagaatatgggatactgcccccaattcgatgctataacagagcttttgaccggacgggaacacgtagaattctttgcattattgagaggggtaccggaaaaagaagttggcaaggtgggggagtgggctatccgaaagctgggcctggtcaagtatggagagaagtatgccggtaattactctggggggaacaaacggaagctgtcaacagctatggcccttattggcggcccgccggttgttttcctcgatgagcctacaacgggtatggacccaaaggcgaggagattcttgtggaactgcgccctgagtgtggtgaaagaaggccgctctgtcgtcctgaccagtcactccatggaggagtgcgaggccttgtgtactcggatggccatcatggtcaacggccggtttcggtgcctcggttcggtccagcatctgaagaaccggtttggcgacggatatactattgtggtccggattgccggatctaatcctgatttaaaacctgtccaggacttctttggcctggctttccccggatcagttttaaaggaaaagcacaggaacatgttacaatatcagcttccctcttcgctgtctagtttggcccggatcttcagtatactcagccagagtaaaaaacggttgcacatcgaagattattcggtgtctcaaacaacactcgaccaggtcttcgtgaacttcgctaaggaccagtctgacgatgatcacctaaaggatctgtcactgcataaaaaccagaccgtcgtggatgtggccgttctaacatcttttctgcaggacgagaaggtgaaagaatcttacgtctag

SEQ ID NO: 109144 - DNA, 1092 bp, synthetic construct
  misc_feature 1..1092: note = Description of Artificial Sequence: Synthetic coding sequence
  source 1..1092: mol_type = other DNA
atggcttgctggcctcaactgaggctgcttctgtggaaaaatcttacctttcggagaagacagacctgtcagcttctgttggaagtagcttggcctctgttcattttcctgatcttgatttcagttagattaagctaccccccgtatgagcagcatgagtgtcatttccctaataaggccatgccaagcgcgggcaccctcccttgggtacaaggaataatctgtaatgctaataacccgtgcttccgctaccctacaccaggtgaagcccctggggtcgtggggaattttaacaaatcaatcgtcgcccgcctgtttagcgatgcccgacggctcctgctctacagtcagaaggataccagtatgaaagatatgaggaaagttttaaggactctgcagcagatcaaaaagagcagttcgaatctaaagctgcaggatttcctcgtggataatgagaccttcagcggcttcctgtaccataacctctctctgcctaaatccacagtggacaagatgctccgggcagacgtaatcctgcataaagtttttctgcagggatatcagctgcatttgacttcactgtgcaacggatcaaagagcgaggaaatgatccagctgggagatcaggaggtatccgaattgtgtggtttgccccgggagaaactcgctgctgcggagagggtactgcgctcgaacatggatattctgaaaccaattctcatggacgtaacgtgcgatgatattgcacacggccagctgacagtgcctaggtccgcagccgtagcagccacaggagatgccaagccaaatatgatgggcagggagacactgctcagcatttgcgccagtgtccccaaggtggaatttcacgaacgccatatactgaagcacttttctttttgcgtctgtgtgtcagtgagcctgtttcccgccaagggcatcgtgagcttttcttgggccagcttccgcatctgggtcctgtggaaggccgttttttggcaacacggggaatcaatggctgtttgggagggccagctggggctgggactgaacatcgcttttgagtacttcacttccatcgatgtcggatag

SEQ ID NO: 109145 - DNA, 4632 bp, synthetic construct
  misc_feature 1..4632: note = Description of Artificial Sequence: Synthetic coding sequence
  source 1..4632: mol_type = other DNA
atgaacaagatggccctcgcctctttcatgaaaggaaggacagtgatcgggacccctgacgaagaaaccatggacatagagctgccaaagaaataccacgagatggtaggggtgatctttagtgacaccttctcttaccggttgaagttcaattggggatacaggatccccgtgattaaggaacattcggaatacactgagcactgttgggcaatgcatggggagattttttgttacctcgcgaaatactggttaaaagggttcgtggcatttcaagctgctatcaatgcagctatcattgaggtaacaaccaaccactccgtaatggaagagctgacctccgtcataggcattaatatgaagattcccccattcatcagcaagggcgagattatgaacgaatggtttcattttacctgtctcgtgtctttctccagttttatctatttcgcttcactaaacgtcgctagagagcgtgggaaatttaaaaaactgatgacggtgatggggctgagagagtcagctttctggttgagctggggactgacctacatttgttttattttcatcatgtccatatttatggccctagtcattacctccataccaattgtgtttcatactggctttatggtcattttcacactttacagtctgtacgggctgagtcttattgctctcgctttcctgatgagcgtgctcattaggaaacccatgttggctgggcttgctggattcctgttcaccgtattttgggggtgcctgggcttcactgtgctctaccggcagctgcccctttccctgggatgggtcctttcactgctcagccctttcgcctttaccgccggaatggctcagattacgcatcttgataattatttgtcaggcgttatattcccagatccgagcggggactcttacaaaatgatcgcgactttttttattttggctttcgacacgctgttttaccttatatttaccctgtatttcgagagggtcctgcctgacaaggatgggcatggtgactctccattgttctttcttaaatcatcattctggtctaaacaccagaatacacatcatgagatatttgagaatgagattaatcccgagcacagtagcgacgattctttcgagcccgtcagcccagaattccatggaaaggaagcaattaggattcgcaacgtgatcaaagagtataacggcaaaaccggcaaagtggaggcccttcaggggatcttcttcgacatctatgagggccagatcacagccattctgggccacaacggcgccggaaagtctactctgttaaatatcctgagcggcctgtccgtcagtacggaaggctctgcaactatttataatactcagctgtcagagatcaccgacatggaggaaattcgcaaaaacatcggattctgcccacagtttaatttccagttcgatttcttgactgttagggagaatctcagggtgtttgcgaaaatcaagggaattcagcctaaggaagtggagcaggaggtcaaacggatcatcatggagttagacatgcagtctatccaggatatcatagccaagaagctcagcggcggtcagaagcggaagctgacactcggcatcgccatattaggagaccctcaggtcttgcttctggacgagccaaccgccggcctagaccctttctctcgccatagggtgtggtctctgctgaaggagcacaaagttgatcgacttattctcttctctactcaatttatggacgaagctgatattttagccgaccgaaaggtgttcctttccaacggcaagttgaagtgcgcaggctctagcctttttctgaaacgcaaatggggaatcggctatcatctctctttgcaccgcaacgagatgtgtgatacggagaaaattacttctctcattaagcagcacattcccgatgccaaactcacgactgagagtgaggagaaactcgtgtacagccttccccttgagaagactaacaaattccctgatttgtactccgatttggacaagtgtagcgatcaggggatcaggaattacgccgtcagtgtcacatctcttaacgaggttttcttgaacctggaggggaagtcggccatagacgaaccagattttgatattgggaagcaggaaaaaattcacgtaacccgcaatactggagacgagagtgagatggaacaagtgttgtgttcccttccagaaaccaggaaggctgtgagctctgcggctctctggcggaggcagatctatgctgtggctacgttacgcttcttgaaacttagacgcgagcgaagggctcttctctgcttattactggtcctgggcatcgctttcatccctattattctcgaaaaaatcatgtataaggtcacgcgagaaacgcattgttgggagtttagcccttcaatgtactttctgtctttagagcagataccaaagactcccctaacatctctgttgatcgtgaataatacaggatcaaacatcgaagatttagtgcatagtctaaagtgccaggacatcgtactggaaattgatgacttccggaaccgcaacggcagcgacgacccaagttacaacggggcaatcattgttagtggcgaccagaaagactacagattcagtgtcgcatgcaacacaaagaagctgaactgctttccggttcttatggggattgtaagcaatgctctgatgggtatcttcaattttacggagctgatacaaatggagtcaacgagcttctcaagggatgacatcgtgttggacctaggcttcatcgacggttcaatatttctgctgcttataacaaactgcgtctcccctttcatagggatgtcatcaatttcagactataaaaagaacgttcaatctcagctgtggatatccggactgtggcctagcgcatattggtgcgggcaagccctggtcgacatacccttgtactttctcattctcttttccattcatttgatttattacttcattttcctcggcttccagttgagctgggagctgatgtttgttctggtggtgtgtattatcgggtgcgccgtgagcttgatctttttgacgtacgtgctgagctttatatttaggaagtggcgcaaaaacaacggattctggtctttcggattctttatcattttgatctgtgtgtccacaattatggtttctacccaatacgagaaactgaatttgatactctgtatgatctttatacccagcttcacccttctcggatacgtcatgctgctgatccagctcgatttcatgagaaacttggacagcttggataatcgaatcaacgaggtgaataaaacaatcttgttaactaccctgatcccctacttgcagagcgtcatctttctgttcgtaattcgctgcctggagatgaaatatggcaatgagataatgaataaagacccagtatttcgcatttcccctcgcagccgtgagactcatcctaaccccgaggaacccgaagaggaggacgaggacgtccaggccgaacgtgttcaggccgccaatgctcttacagcgcctaatttagaggaggaacccgtgattaccgccagctgtcttcacaaggagtactacgagaccaaaaagtcttgcttctctacccggaagaagaaaatcgctatccgcaatgtttccttctgtgtgaagaagggcgaggtgctgggcctgctcggtcataacggtgctgggaaatccacctctattaagatgatcaccggctgcaccaaacctaccgctggcgtagtggtattgcaggggtcacgtgcgagcgttagacagcagcacgacaacagtctcaaatttttggggtactgtcctcaggagaactctctatggcctaagttaacaatgaaggagcatctggagttgtacgctgcagttaagggtctcggtaaggaagacgctgcactgagcatctctagactcgtagaggcactgaaactccaggagcagcttaaggcccccgttaaaaccctgtcggaaggaataaaaaggaagttgtgctttgtgctctcaatactcgggaaccctagcgtggtgctgctggacgagcccttcaccggtatggaccctgaaggacagcagcagatgtggcagatcctccaggccactgtcaagaacaaggagcggggcactctactgaccactcattatatgtcagaggccgaagccgtgtgcgacagaatggcaatgatggtctctggcacacttcgctgcatcgggtccatccagcatcttaaaaacaaattcggtcgggactatctcttagaaataaaaatgaaagaacctacacaagtcgaagccctgcatactgaaatcctgaaattgtttccacaggcagcctggcaggagcggtacagcagcctgatggcatacaagttgccggttgaagacgtacatcctctaagcagagcttttttcaagttggaagcaatgaaacagacatttaatttggaggagtactctctatctcaggccactttggaacaggtgttcctggagctgtgtaaggagcaagaattgggcaatgtggatgataaaatcgacacaactgtggaatggaagttgctacctcaggaggacccctag

SEQ ID NO: 109146 - DNA, 1401 bp, synthetic construct
  misc_feature 1..1401: note = Description of Artificial Sequence: Synthetic coding sequence
  source 1..1401: mol_type = other DNA
atgaacaagatggctttagcaagttttatgaaagggaggacagtcataggtactcctgatgaagagacaatggacatcgagctgcccaaaaagtaccatgaaatggtgggggtgatctttagtgacactttttcatatcgcctgaagtttaattggggttaccggattcccgtcataaaagaacattctgaatacacagaacactgctgggcgatgcatggcgagatcttctgctatctggcgaagtattggctgaaaggatttgtcgcttttcaggctgcaattaatgcggccataatcgaagttaccaccaatcattcggtgatggaggaactgactagtgtgattgggattaacatgaagattcctccttttatcagtaaaggggagataatgaacgagtggttccattttacctgcttggtctctttcagctcgtttatttactttgcctcccttaacgtggcaagggaaaggggaaagttcaagaaactgatgactgtgatgggactgagagaatccgcgttctggctatcctggggccttacctacatatgtttcatcttcatcatgagtatcttcatggctctagtgatcacatcaataccaatagtattccacacaggattcatggtcattttcactctctactcgctctatggactctccctgatcgctctcgcgttcctgatgagcgtgctgatccgaaagccgatgctggcaggcttggcggggtttctattcaccgtcttctgggggtgcctcggctttaccgtgctgtaccgccagctccctctgtcattgggttgggtcctatccttgctgtctccgttcgctttcacagctgggatggctcagatcacccatctcgacaactacctttcaggcgtgattttccctgatccttcaggcgactcctataaaatgattgctaccttcttcatactcgcattcgatacgctgttttatctgattttcactctctattttgagagagtcttacccgacaaagacggccatggtgattctccgttgttctttctaaaatctagcttctggagcaagcatcagaatactcatcacgagatcttcgagaacgagattaatcctgagcactcgagcgatgactcctttgagcccgtctcacccgaatttcatggcaaggaggccatccggataagaaatgttatcaaggaatacaacggaaagaccgggaaggttgaggctctccagggtattttctttgatatttacgaggggcagattacagcaatcctgggccataacggagccggaaaaagcaccctcctaaacatactgagtgggctttctgttagcacagaggggaaaaaaaactacaatggaattaggcacgcgaaacattcccgacactattgctag

SEQ ID NO: 109147 - DNA, 279 bp, synthetic construct
  misc_feature 1..279: note = Description of Artificial Sequence: Synthetic coding sequence
  source 1..279: mol_type = other DNA
atgaataaaatggcgctggcatcctttatgaagggcaggaccgtcataggcacccctgatgaggagacaatggatatagagctccccaaaaaatatcatgagatggtgggtgtaatattcagcgacacattctcctaccgcctgaagttcaattgggggtacaggattcccgtcattaaagaacactctgaatacacaggacacaataagagcttttgcaatggtggtgtcgatatttcttactggaataaatatgaggatacaacatttcacttctag

SEQ ID NO: 109148 - DNA, 1359 bp, synthetic construct
  misc_feature 1..1359: note = Description of Artificial Sequence: Synthetic coding sequence
  source 1..1359: mol_type = other DNA
atgaacaaaatggctctcgcatctttcatgaagggacgaaccgttattggcaccccggacgaggagaccatggatatcgagctgcccaagaagtatcacgagatggtgggcgtcattttctctgacaccttctcttatcgcttgaagttcaattggggttatagaattcccgtgatcaaggagcattccgagtacaccgagcactgctgggcaatgcacggtgagattttctgctacttagccaaatattggcttaaggggtttgtcgccttccaggctgcaattaatgccgccataatcgaagtgactactaaccattccgttatggaggagctgacctccgtgataggcatcaatatgaaaattcccccgttcatctccaaaggagaaattatgaacgagtggttccacttcacttgtctggtgagtttttcatctttcatctatttcgctagcttaaatgttgctcgggagcggggcaagtttaagaaattaatgaccgtgatgggacttcgggaatctgccttttggcttagttggggcttgacatacatatgcttcatttttattatgtccatctttatggctttagtgataacaagcatacccatcgttttccacactggctttatggtcatcttcaccctctacagcctatacggattgtctttgattgctctggcatttctcatgtccgtgcttataagaaaacccatgctagccgggttggcgggatttctattcaccgtgttttggggttgcctgggctttactgttctctaccgacaactcccccttagcctagggtgggttctgtccctactctctcccttcgcctttacagccgggatggcgcagatcactcacttggataattatctgtccggcgtcattttcccagacccctccggagactcctataagatgattgccactttctttatccttgctttcgataccctcttctatctgattttcaccttgtatttcgaacgggtgctgcctgataaggatgggcacggagattcccctctttttttcttaaagtcttccttctggagtaagcaccagaacacacaccacgaaatctttgagaacgaaataaatcccgagcactctagtgacgatagtttcgaacctgtaagccctgagttccacggtaaagaggcaataagaatccgaaatgtgatcaaagaatacaacggcaaaaccggcaaagtcgaggctcttcaggggagcgaggaacgcctgtgccccgcagctcacaggttacgctgtggtgagcggctttgtcccgcggctcatcatctgggatgcgaggagaggccttgccctgcagcgacacccagcggcaattag

SEQ ID NO: 109149 - DNA, 7788 bp, synthetic construct
  misc_feature 1..7788: note = Description of Artificial Sequence: Synthetic coding sequence
  source 1..7788: mol_type = other DNA
atggctagcttgttccaccagctgcagatcctggtgtggaaaaattggctgggagtgaagcgccagcctctctggactttggtactcatcctgtggcccgtgattattttcatcatcctagccatcaccagaacgaaatttccaccaacagccaaaccgacgtgttacctcgcacctcggaatctgccatctacgggattctttccctttctgcagactcttctgtgcgatacggactccaagtgtaaggatacaccctacgggccgcaagacttactgaggagaaaagggattgatgatgcgctgttcaaggattctgaaatcctgcgtaaatcaagtaatttggacaaagattcttcgctgagcttccagagcacccaggtccccgagaggaggcatgcttctctggcaactgtgttcccaagccctagttccgatcttgagatcccaggtacgtacacctttaatggctcccaggtgctggccaggatcctagggctggagaagctactgaaacagaactcaacctccgaggatatccggcgagaactgtgtgatagctacagtggatatatagtagacgatgccttttcctggacatttttgggccggaacgtattcaataagttttgtctctccaacatgaccctccttgagagctcactacaggagctgaacaaacagttttcccagctgagtagtgaccccaacaatcagaagatcgtcttccaggagatcgtgcgaatgctgtctttcttctcccaggttcaggagcagaaggccgtctggcaactgctgagctctttccccaacgtattccagaacgacactagcctgtccaacctgttcgatgtgcttcggaaggctaattccgtgcttcttgtggtccaaaaagtgtatcctaggttcgccacaaatgaaggtttccgcacactgcagaagtctgtgaaacatttactgtacaccctagattccccggctcagggagacagcgataacatcacccatgtttggaatgaggatgacggacaaactctgtctccaagcagcctcgcggcccagttgcttatacttgagaactttgaggatgcactactgaatatctctgccaactctccatatatcccctatctagcgtgtgtgcggaacgtaacagacagcctggctagaggatcaccggaaaatctgagattactacagagtactatcaggtttaaaaagagttttctgcgcaacggcagttatgaggattatttcccccctgtgccagaagtgctaaaatccaaattgagtcaactccggaatttaaccgagttgctgtgtgaatccgaaacgttttccttgatcgaaaaatcttgtcagctttccgacatgtccttcggtagcttatgcgaagaatccgagtttgacctccagctgctagaagccgccgaactaggcacagagatagcagctagcctgttatatcacgataacgttatatccaaaaaggtgagggatctgttgacaggtgatccgagcaaaattaaccttaatatggatcagtttcttgaacaggccctgcagatgaactatctcgagaacattactcagttaatacctatcattgaagcaatgctgcacgtcaacaacagtgccgacgccagtgagaaacccggccagctccttgaaatgttcaagaacgtcgaggaactcaaggaggatctgagacggacgactggcatgagcaataggaccattgataagctactcgcaattcctatccccgataacagggcggaaattatctcacaagtgttttggctgcattcctgcgatacaaacatcactactcctaagctcgaggacgctatgaaggagttttgcaatctgtcactttctgaacgctcccgtcaatcctatctcattggtctgaccttgctgcactatctgaacatctataacttcacttacaaagttttctttccacggaaagatcagaaacccgttgagaaaatgatggagctgttcatcagactcaaggagatccttaaccagatggcttccggcacacaccctctgctggataagatgaggagcctaaagcaaatgcatctaccacgttcagtccctctgacacaagccatgtacaggtcaaatcgcatgaacaccccccagggatccttctccacaataagtcaggctctgtgtagccaaggaattaccaccgaatatctgactgctatgctcccttcgtcccaacgacccaaaggcaatcataccaaagactttctgacttacaagctgaccaaggagcagattgcctccaagtacgggattcctatcaatagtacccctttttgtttcagtctgtacaaggatataatcaacatgcctgcagggccagtgatttgggccttcctgaaacccatgttgctgggcaggatcctgtatgcaccctacaatcccgtgaccaaagcaataatggagaagagcaatgtgaccctgagacaactggcggagttgcgggagaaatcccaggagtggatggacaagtccccgctgttcatgaattcgtttcacttacttaatcaagctatccccatgttacagaatactctgagaaatccttttgtgcaagtatttgtcaagttctccgtcgggctggatgcagtcgaattgctcaaacagatagatgagctggatattctgcgactgaagttagaaaataatattgatattattgaccaactcaacacactttccagcctgactgtgaatatttcctcatgcgtcttgtacgaccgaattcaggccgctaaaaccatcgacgaaatggagcgcgaggcgaaacggctttacaaaagtaacgagcttttcggctccgtaatcttcaaactcccttctaatcggtcttggcaccgcggctatgactctgggaacgtgttcctgcctcctgtgatcaaatacacgatcaggatgtccttaaaaacagcccaaaccactcgctctctgaggaccaaaatctgggctccggggccccacaattccccatcacacaaccagatctacggcagagctttcatttatctgcaggattcgattgagagagccataatcgaattgcagactggtcgtaactcccaggagattgctgtgcaggtgcaggctatcccttatccctgttttatgaaggataactttttaacaagtgtgtcctatagcctgccaatcgttctcatggttgcatgggtggtatttatcgccgcttttgtcaaaaaactcgtgtacgagaaagatctgagactgcatgagtacatgaaaatgatgggcgtcaattcctgttcacatttttttgcgtggcttattgaatcggtcggatttttgttagtgaccatagttattctgatcatcattttaaagttcggcaacatcttacccaagaccaacggttttattctctttctgtatttcagtgattacagcttttccgtcatagccatgagctacttgatttcagtcttcttcaacaacaccaacattgccgcgctgatagggagtcttatttacatcatcgccttcttccctttcatagtactcgtgacagtcgaaaacgaattgtcgtacgtgctcaaggtgttcatgagcctcctttcccccaccgccttcagttacgccagtcagtacatcgcccgctacgaggagcaggggataggactccaatgggagaacatgtatacaagtcccgtacaggatgacaccacaagctttgggtggttgtgctgcctaatacttgcggactccttcatttattttctgatcgcatggtacgtgagaaatgtgttcccgggcacatatggcatggcagcaccatggtatttcccgatcctgccaagttactggaaggaacggttcggctgcgccgaagtgaaacccgagaaatcaaacggcctgatgttcaccaatataatgatgcagaacacaaatccatctgctagtccagagtacatgttttcctccaatatagaaccggagccaaaggacctgaccgtcggagtggccttacatggagtgacaaagatctatgggagcaaagtcgcagtggataatttgaatcttaacttctatgagggccacattacgagcctcttagggcctaacggggcaggcaagactaccactatctctatgctgacaggactgtttggtgcatccgcaggcactatctttgtgtacggaaaggacattaagaccgacctccacactgttcgtaagaacatgggagtgtgcatgcaacacgacgtactgttctcctatctgacgacaaaagagcatctcctgctttacgggtccatcaaagtgcctcattggacgaagaaacaacttcatgaggaagtcaaacgaaccctgaaagacactgggctttatagccatcggcataaacgcgtgggaacactctcggggggaatgaagcgtaaactgagtatttctatagcactgattgggggaagcagggttgttatattagacgaacccagtaccggagtggacccttgctcaaggagatcaatttgggacgtgatctccaagaacaaaacagcgcgcactattatactgtccacgcaccacttggacgaggccgaggtcttgagcgaccgtatcgcttttctggagcagggtggccttcggtgctgcggatcacctttctaccttaaagaggccttcggagatggatatcaccttaccctgactaaaaagaagtcgcccaatttgaacgcaaatgcagtttgtgatactatggccgtgaccgccatgatccagagccacctgcccgaagcctatctgaaagaggacattggcggggaacttgtttatgtcctgccgccattctccaccaaggtctccggggcttatctttcccttttgagggctctggataacgggatgggcgatcttaacatcggatgttatggcatatcagacactaccgttgaggaggtattcctgaacctcacaaaggaatcgcagaagaatagtgcgatgagcctggagcacctcacccagaagaagatcgggaatagtaatgcgaacggaatcagtacacccgacgatttaagtgtgagcagctccaactttactgaccgggatgataagatattgactaggggggagagactcgatgggttcggcctgctgctaaaaaagattatggcgatcctcataaaacgctttcaccacacacgtagaaactggaagggcctgattgcccaagtcatactacctatcgtttttgtgactacggccatgggcctgggaaccctacgcaattccagcaactcctatcccgagatccagatctcaccttcactgtacgggaccagcgaacagaccgctttctacgccaactatcatcccagtacggaggccctggtttccgccatgtgggatttccccggcattgataatatgtgtttgaatacctcagatctccagtgcctcaataaggactccctcgagaagtggaacaccagcggggagccgatcactaattttggggtgtgctcatgcagcgaaaacgtgcaggagtgtcccaaatttaactattctcctcctcatcgaaggacatactccagccaggttatttataatctgaccgggcagcgtgtcgagaattatctcatatcaacggcgaacgaattcgtgcagaagcggtacggtgggtggtcctttgggctccctttgactaaggacctgcggtttgatattaccggtgtcccagctaacagaacactggctaaggtgtggtatgaccccgagggatatcactccttaccggcttatctcaacagccttaataatttcctcctgcgggtaaatatgagcaagtatgatgccgccagacacggcattatcatgtattcccatccttaccctggcgtacaggaccaagaacaggccaccatttcctcgttgattgacatcttggtggctctgtctattctcatggggtactccgtaactacagcttcatttgtgacttatgtggtgcgtgaacaccagacaaaagctaaacagctgcaacatatctctggaataggcgtcacatgttactgggtgaccaattttatatatgacatggttttctatctggttcctgtggcattttccattggtattatagctattttcaagctccccgctttttattccgagaataacttgggcgccgtttcccttctgctcctcctctttgggtatgccacgttcagctggatgtacctactcgctggactcttccatgaaacaggcatggcattcatcacatatgtctgcgtgaatctatttttcgggatcaatagtattgtatcactctcagtggtctacttcctgtccaaggagaaacctaatgaccctaccctggagctgatcagtgaaaccctcaagcgcattttcctgatcttcccgcagttctgtttcggatatgggttgatcgaactgagccagcaacagagcgtccttgatttcctaaaagcgtacggggtcgagtaccctaatgaaacattcgagatgaacaaactgggggccatgttcgtggcactggtcagtcagggaactatgttcttttcactgaggcttcttataaatgaatccctgataaaaaagctgcgtctgttcttccgcaagtttaattcatctcatgttcgagaaactatcgacgaggacgaggacgttcgggctgaaagactgagagtggaatccggagctgctgagtttgacttggtgcagctttactgtctgaccaaaacctaccaactgatccataagaaaataatcgccgtcaataatatttcgataggcatcccagcgggcgaatgctttggcctgttaggagtgaatggggcaggaaaaactaccattttcaagatgttgactggagatattatcccgagttctggaaatattcttatcaggaataaaacaggcagtttaggtcacgtcgactcccacagttccctggtgggatattgtcctcaagaggatgcactggatgatctcgtgactgtggaggagcatctgtatttttatgccagggtccacggtatccctgagaaagacattaaggagacagtccacaagctgcttcgcaggttgcatcttatgccatttaaggacagagctacttcaatgtgctcatacggaacaaaacggaaactaagcaccgcccttgctctgattggaaagccatcgatcctgttactggatgagccgtcctcaggcatggaccccaaatccaagcgtcacctctggaaaattatctccgaggaggtgcagaacaagtgttccgttatccttacaagtcacagcatggaggagtgcgaagctctctgtacccggctcgcgatcatggtgaacggtaagtttcagtgcataggatcactgcagcacattaagtctaggtttggcagagggttcaccgttaaagtgcatcttaaaaacaataaagtgacaatggaaacccttacgaaatttatgcagctgcatttccccaagacatacttaaaggatcagcatttgtctatgttagaatatcatgtgcctgtgaccgccgggggagtggccaacatctttgacttgctcgaaacgaataagactgcgttgaacatcaccaatttcctcgtctcccagactactctggaagaagtctttattaattttgctaaggaccaaaagagttacgagaccgcagacacaagctctcagggcagcactatttccgtcgattcacaagacgaccaaatggagtcctag

SEQ ID NO: 109150 - DNA, 6834 bp, synthetic construct
  misc_feature 1..6834: note = Description of Artificial Sequence: Synthetic coding sequence
  source 1..6834: mol_type = other DNA
atgtttacctatattaaaatcataacgagtggcgattctgataatattacccatgtgtggaatgaggatgacgggcaaacgctctctccgagtagcttagctgcccaactgctgatcctggagaattttgaggacgccctcttgaatatatcagccaattccccgtacatcccgtatctggcttgcgttagaaacgtgactgactctttagcacgcgggtcccctgaaaaccttcggcttctacaatccaccatccgcttcaaaaagagtttcctacgcaatgggagctatgaggattattttccaccagtccccgaagtcctgaagagcaaactgtctcaactgaggaatttaaccgaactgctctgcgaaagtgaaaccttctcgttaatagaaaaatcctgtcagctatctgatatgtcatttggcagtctttgcgaggagagtgagttcgatctgcaattattggaggccgctgaacttggaaccgagatagctgccagtctcttgtaccacgacaacgtcatcagcaaaaaggttcgggacttgctgacgggggaccctagtaagatcaacctgaatatggaccagttcctggagcaggcccttcagatgaactatctggagaacatcactcaactcatacctatcatcgaggccatgctgcacgtgaacaacagcgccgatgccagcgagaaaccgggtcagctcctcgaaatgtttaagaatgtcgaggaattgaaagaggacctgagaagaaccaccggtatgagtaatcgtactatcgataaactcctggctatcccaatacccgataatcgggctgaaataatttcacaggtgttctggctgcattcttgtgacactaacatcacgaccccaaagctggaagacgccatgaaggaattttgcaacctgtcactgagcgagcgaagcaggcaatcttacctcattggattgacactgctgcattatctcaacatctacaattttacgtacaaagtgttttttcctcggaaggaccagaaacccgtagaaaagatgatggaactcttcattagactaaaggagatcctgaaccagatggcatcgggcacccatcctctgctggacaagatgcgctcattaaaacagatgcatttaccccgctccgtacccttaacccaggccatgtacaggtccaatcggatgaatacaccacaaggatcattttctactatcagccaagcactgtgtagccaagggataaccaccgaatatctgacggcaatgctcccgtccagtcagcggcccaaaggtaaccacacaaaggactttctaacatataagctcacaaaggaacaaatcgctagtaagtacggcatccccattaattctacccccttctgcttcagtctttataaggacatcatcaacatgcctgccgggcccgtgatttgggcttttctaaagccaatgttgctcggccgaatcctgtacgccccgtataatcctgtgaccaaggcaatcatggagaaaagtaatgtgaccctgcgacaattagcagaattaagagagaagtcccaggagtggatggataaaagccccctgttcatgaatagttttcacctcctgaatcaggctattccaatgctgcagaacacccttcggaaccccttcgtgcaggtgttcgtgaaattttccgtcgggctggatgcggtggagctacttaaacagattgacgaattagacattctgagactgaagttggaaaacaacatcgacattatagaccaactgaacactctgagctccctcacggttaatatctcctcatgcgtgctgtacgaccgcatccaggctgccaaaacaatcgacgaaatggaaagagaagccaagcgactttataagtccaatgagttgtttggtagcgtgatttttaaactgccgagcaaccgctcatggcaccgcggttacgattcaggcaatgtctttctccccccagtaatcaagtatactattaggatgtctctgaagaccgcacagaccacacggtcactcagaacaaagatatgggctcccggcccccacaatagcccctcacacaaccagatttatggacgagctttcatatatttgcaggacagcattgagcgcgcaattatcgagctgcagaccgggagaaatagccaggagatcgcagtccaggtgcaggctattccgtatccatgctttatgaaggacaacttcctcacatcggtgagttattcactcccgattgtgctgatggtcgcttgggttgtgtttatagccgcctttgttaagaagctggtttatgaaaaagacctgaggctgcatgagtatatgaaaatgatgggcgtgaatagctgcagccacttttttgcttggttaatagaatctgtggggttcctgctggtcaccatcgtgatcctgattattatcctgaagtttggtaatattctgcccaaaaccaacggctttatactcttcctgtatttctcggactacagcttctctgtgatagctatgtcttacctcattagcgttttctttaacaacactaatattgctgcactaatcggatcacttatttacattatcgctttcttcccgtttattgttctcgttacagtagaaaacgagctgtcgtacgtcctcaaggtgtttatgagccttctgagcccaaccgccttctcgtacgctagtcaatacatcgccagatatgaagagcagggaatcggactgcagtgggagaatatgtatacatccccagtacaggacgacactaccagctttggctggctctgctgcttaattttggcagattcattcatttactttctcatagcatggtatgtccggaacgtatttcctggaacatacggaatggccgccccgtggtacttccccatcctcccctcctattggaaggagcgcttcggatgcgcagaggtgaagcccgagaagtcaaatgggttgatgttcacaaatatcatgatgcagaataccaacccatcagcgagcccggagtatatgttctcctccaacatcgaaccagagcccaaagacctgactgtgggagtggccctgcatggagtgactaagatttacgggagcaaggtggctgtcgacaacctcaatctgaatttttacgagggccacattacatcgcttctcgggccaaatggcgctggaaaaaccacaacaatctccatgttaaccggcctatttggagcaagtgcgggaacgatttttgtctatgggaaggatattaagaccgacctgcacactgtaaggaagaatatgggagtttgtatgcagcacgatgtgctgttcagctacctcaccaccaaagaacacttgctgctgtacgggagcatcaaggtaccgcactggactaagaaacagctgcacgaggaagtaaaacgaacactgaaggatacgggactgtactcacacagacacaagcgggtcggcacgctgagtggcggcatgaaaaggaagctcagtatctcaatcgcattaattggtggaagcagggtggtgatcctagacgagccctcaactggggtggacccatgtagtcgaaggtctatatgggacgtcattagtaagaataaaaccgcccggaccatcatcttgtcgacacatcacctggatgaggcagaggtgttgagcgaccggatcgcttttctcgagcagggcggcctccgctgttgtggaagcccattttatttgaaggaggcctttggggacgggtaccatttaacgctcaccaagaagaagtccccaaatctgaacgcaaacgcggtgtgtgatactatggccgtaactgccatgatacaaagtcatctccctgaggcatacttaaaagaagacattggtggagagctcgtatatgtactgcccccattctctactaaagtgagtggtgcctacctgtcccttttgagggccttggacaacgggatgggggatctgaatatcggttgctacgggatttctgacacgaccgtggaggaagtttttctgaacctgacaaaggaatcccaaaagaatagtgccatgtctttagagcacctgactcagaagaagatcgggaacagtaatgctaatggcattagcacacccgatgatctgtctgtgtcgtcttctaacttcaccgaccgggacgacaaaatactcactcgcggcgagaggttggacggattcggactcctgcttaagaaaatcatggcaattctaataaagcggtttcaccataccaggaggaactggaaggggctcattgcccaagtgattttgccaatcgtattcgtgactacagcaatgggtctgggtactttgaggaactccagtaatagttatcccgagatccagatctccccatctctctatggcacctcagagcagacagcattttatgctaactatcatccctcaaccgaagctctcgtctctgcgatgtgggatttccccgggattgataatatgtgcctgaataccagcgatcttcagtgtctaaataaagatagtctggagaagtggaatacctcgggggagcctatcacaaatttcggcgtatgtagctgttcagaaaatgtgcaggagtgcccaaaatttaactattctccaccacataggcggacctacagttcccaagtgatctataatctaacaggacaacgggtggagaactatcttatatccacggccaacgaattcgtgcagaaaagatacggggggtggtcttttgggcttccgcttacgaaggaccttcggtttgatatcacaggagtgcccgccaaccgaaccctggccaaagtgtggtatgaccctgaagggtatcacagcctgccggcctacctcaatagtctaaataattttctgctgcgggtgaacatgtcgaaatatgacgcagcccggcacggaatcatcatgtatagccacccttaccctggggtccaggaccaggaacaagcaaccatttcaagtctcatagacattctggtagctctgtcaattctaatgggctacagcgttactactgcttcctttgtcacctatgtcgtgcgcgaacatcagacgaaggcaaagcagttgcaacacatctctggcatcggggtgacatgttactgggtgacaaattttatatatgacatggttttctatctggtgccagttgctttcagtatcgggatcattgctatttttaagctgccggcattttatagtgaaaataatctcggcgctgtatcactcttgctcctgctttttgggtacgccactttctcctggatgtacctgcttgccggtctgttccacgaaacgggtatggctttcattacttacgtctgtgttaacctcttcttcggaattaactccattgtgagcctgtccgtcgtttacttcctgagtaaggagaagcccaacgacccgaccctggaattaatcagtgagacacttaagcgaatctttctgatttttcctcaattctgtttcggctacggactaatagaattatctcagcagcaatcagtattggactttctcaaagcctacggagttgagtaccctaacgagacattcgagatgaacaaactcggcgcaatgttcgttgcgttagtctcacagggcaccatgttcttctctttgcgcctacttatcaatgaatctctcattaagaagcttcgtctgttcttccgcaagtttaactccagccacgtgagggagactatagatgaagatgaagacgtgagggccgaacgactaagagttgagtccggggccgccgagtttgaccttgtgcagctgtactgccttactaaaacttaccagctgatccacaagaagatcatcgctgttaacaatatctccatagggattccagccggagagtgcttcggactgttgggtgtgaatggcgctgggaagacaacaattttcaaaatgctcacaggagatatcatccccagctcaggaaacattttaatccgtaacaaaactggatcactgggccatgtcgattcccattcaagtcttgttgggtactgcccacaggaggacgccttggacgatcttgtcactgttgaagagcacctgtatttttatgcacgcgtgcacgggatcccggagaaggacataaaggagactgtccacaagcttctgcgccgcctacacctgatgcccttcaaggacagagcaacgtcaatgtgctcttatggcactaagcggaagctctccaccgcactagccctaatcggcaagccaagtattttgctccttgatgagccatcttccggcatggaccccaaaagtaagaggcacctgtggaaaattatcagcgaagaggtgcagaataaatgtagcgtgatcctgactagtcactcaatggaggaatgcgaggcgctatgtactagactcgccattatggtgaacggtaagttccagtgcatcgggtctctgcagcatattaaatcgcgattcggccgaggatttaccgttaaagtccacctgaaaaacaataaggtcactatggaaacattgactaagttcatgcagctgcacttccccaagacttacttaaaggatcagcatctgtctatgcttgaataccacgtgccagtgaccgcgggaggcgttgcgaacatatttgatttgctggagacaaacaaaaccgcacttaacatcaccaattttctggtgtcacagactaccttagaggaggtttttattaatttcgccaaagaccagaaaagctacgaaaccgccgatacctctagccaaggctctaccatcagcgtcgacagtcaggacgaccagatggaatcttag

SEQ ID NO: 109151 - DNA, 15177 bp, synthetic construct
  misc_feature 1..15177: note = Description of Artificial Sequence: Synthetic coding sequence
  source 1..15177: mol_type = other DNA
atggggcatgctggctgtcaattcaaggctttgctgtggaagaattggctgtgtcgcctgcgtaacccagtgctgtttttggcggaatttttttggccttgcattctttttgtgatcctaacagtactacggtttcaggagcctccacggtatagggatatctgttaccttcagcctcgagacctcccctcatgtggcgtcattcccttcgtccaatcccttttgtgtaacaccggaagtcggtgcagaaacttttcgtatgaaggatctatggaacaccatttccggctatccagatttcagacagccgccgaccccaaaaaggttaataacctggccttcctcaaagagattcaggatctggccgaggagatccatgggatgatggataaagcaaaaaacctgaaacgactgtgggtcgagagatctaatacaccggactccagttatggttcgtccttcttcaccatggacctcaataaaaccgaggaggtcatcttaaagcttgaaagcctccatcagcagccgcacatctgggatttcctgctgttactcccaagattgcatacttcgcacgatcatgttgaagatggaatggacgtagcagttaacctactgcagacgatcttgaactctctgatctcactggaggacctagactggcttccccttaatcaaaccttttcacaggtaagtgagctggtgctgaatgtgaccatctccaccttgactttcctacagcagcacggagtggcagtgactgagccagtgtaccacctctctatgcagaacattgtgtgggaccctcagaaagtacagtatgatttgaagtctcagttcgggtttgatgacctccacaccgagcagatcctcaattctagcgccgagctcaaagagatcccaaccgatacgagtctggaaaaaatggtatgtagtgtgctctctagcacttctgaagacgaagccgaaaagtgggggcatgtcggaggttgtcatcctaagtggtctgaggccaaaaattacctagtgcatgccgtcagttggctccgcgtgtaccagcaagtgtttgtccagtggcagcagggaagcctactgcagaagactctgacagggatgggccatagcctcgaggctctgcgaaaccagtttgaagaagaatcaaaaccttggaaggtagtagaggccttgcacaccgcgctattgctgttgaatgactccctgtctgcagacggacctaaggataatcatacatttccaaagatactgcagcacctgtggaagctgcagagcctcctccagaatttaccacagtggcccgctctgaaacggttcctgcagctcgacggggcattgaggaacgctattgcacaaaatctacacttcgttcaggaagtcttgatatgtttggagacctcagccaacgattttaaatggttcgagctgaaccaactcaagctcgagaaagacgtattcttctgggagcttaagcagatgttggccaagaatgccgtttgtcccaatggtcgattttccgaaaaggaagttttcctgccccctgggaactcctccatctggggcggtctgcagggcctgttgtgttattgcaacagctccgagactagcgtgctgaacaaattattgggttctgtcgaagacgctgaccgaatcctacaggaagtgattacctggcataagaatatgtccgtacttattcccgaagagtatctggactggcaagagctggaaatgcagctctccgaagcttctttgtcctgtaccaggctgttccttttgttgggcgccgacccatccccagagaacgacgtctttagtagcgattgcaagcatcaattggtgtctaccgtgatttttcacacactcgagaaaactcaattcttcttagagcaagcttactactggaaagctttcaaaaagttcattagaaaaacctgcgaggtggctcagtatgtgaacatgcaggagtccttccagaatcgtctcttggcttttcccgaggaatccccatgcttcgaagaaaacatggattggaagatgatatcagataattatttccagttcctcaacaacttactgaagtcacccacagcgagtatttcccgagctcttaatttcacaaagcatctgttgatgatggaaaagaagttacatacactggaagatgagcagatgaacttcctcctgtcctttgtagagtttttcgagaagttgctgctccccaacttatttgactcctcaatcgtcccatccttccactcactgccttcattaaccgaggatatcctcaatatctctagtctgtggaccaaccacctgaagtcacttaagcgtgacccctcggctacagacgcccagaagttgctggagttcggtaatgaagtgatctggaagatgcagacactcggctctcactggatcagaaaggagcccaagaatttgctacgtttcattgagttaatcctattcgaaattaatccaaagttgctcgagctttgggcttacggaatttctaagggcaaacgtgcaaagttggagaatttcttcaccctgctgaattttagtgtacccgaaaacgaaatcttatcaacttcttttaatttttcacagctgttccattcagactggccgaaaagcccagcgatgaatatcgatttcgttcgactgagtgaagccatcatcacgagcctgcatgaattcgggttcttggagcaggaacagatctccgaggctctgaacacggtctacgcaataaggaacgcatccgacctgttttctgcgctctccgagccccagaagcaagaggtcgataaaatccttactcatatccacctaaacgtgtttcaagataaggatagtgctctgctgcttcagatatactcttctttctatcgttacatctatgaactccttaatatccagtcgcgcggctcctccctgacttttttaacacaaatctccaagcacatcttggacattatcaagcaattcaactttcagaacatcagcaaggcgtttgcctttttgttcaagactgccgaagttctgggagggataagcaacgtgagctactgccagcagctgttatctatctttaattttcttgaactgcaagcacaatctttcatgagcaccgagggccaagagctcgaggtaattcatacaactctcaccggactgaaacaactccttattattgatgaggattttcgaatctcccttttccagtacatgtcccagttctttaattcatccgtggaggatttgcttgacaataaatgtctcatttctgacaataagcacataagcagtgtcaactattcaacttcggaggagtccagctttgtgtttcccctcgcacagattttttcaaacctgagcgcaaatgtgtcggtctttaacaagtttatgagtattcattgcacagtatcttggctccaaatgtggactgaaatctgggagaccattagtcagctctttaagttcgacatgaatgtgttcacgtccttacatcacggcttcacgcagctgctcgatgaacttgaagacgatgtaaaagtctcaaagtcttgccaggggattctcccaacccataatgtcgcacgcctgattctcaacctgttcaagaacgtaacacaggccaatgattttcacaactgggaggactttcttgatctacgcgacttcctggtcgcgctgggcaatgcccttgtgtcagtcaagaagttaaacctagaacaagtggaaaaatccctgttcaccatggaggctgcccttcaccagctcaaaacatttccgttcaacgagagtacctctcgggagtttctcaactcacttttggaggtcttcattgagttctcgtccacatctgagtatattgttcgaaatctggattccattaacgatttcctgagtaataacctcacaaactacggtgagaagtttgaaaatattattacagaactgagggaggcaatcgtattcctccggaatgtgtcgcacgatcgtgacctgtttagctgcgcggacatcttccaaaatgtgaccgagtgcatcctagaggatggcttcctctatgtgaataccagccaacgcatgttacggatccttgacacactgaactctaccttctcctccgagaacaccatatcttcacttaaaggctgtattgtgtggctcgatgtgattaatcatctctatctgttgagcaacagcagcttctctcaagggcatctccagaacattctcgggaattttcgagatatcgagaacaagatgaatagtatcctgaaaattgtcacctgggtactcaacatcaagaaaccactctgttctagcaatggcagccatataaattgcgtaaacatatatctgaaagacgtgacagattttctgaacatagttctcaccactgtgttcgaaaaagagaagaagcctaaatttgagatccttctcgcattactgaacgatagcaccaaacaggtgaggatgtccatcaataatctgaccactgattttgactttgcttctcaaagcaactggaggtacttcactgaactgatactgaggcccattgagatgtcagacgaaattcccaatcagttccagaacatatggttgcatctcatcaccttggggaaggagtttcagaagttggtgaaaggtatctacttcaacatcctggagaacaactcttcttcaaagactgagaaccttttgaacatctttgccaccagccctaaggaaaaggatgttaactccgtaggcaattctatttaccatcttgcctcctatctggcctttagtctcagccatgacctgcagaacagccccaagatcattatttcaccagagataatgaaggccactggactgggtatacagctcataagagatgttttcaattcccttatgcccgttgtccatcacacaagcccacaaaacgcagggtatatgcaagccttaaaaaaggtgacttcggtaatgcgaactttgaaaaaggccgacattgatctgctagtggatcaactggagcaggtctccgtgaatcttatggatttctttaagaatatttccagcgtgggtaccgggaacttggtcgttaatcttttggtgggcctgatggagaaattcgccgactcatctcactcttggaatgtaaaccacctactgcagctgtctaggctgttccccaaagacgttgttgacgcggtcatcgacgtttactacgtgctcccccatgctgtaagattactccagggcgttccagggaaaaacatcaccgaaggactgaaagacgtgtactcctttaccctgctgcacggcataacgattagtaatattaccaaggaagattttgccatcgttataaagattctgctcgacaccatcgagctcgtgtctgataagcctgacatcatctccgaagctctggcgtgcttccctgttgtttggtgctggaaccacactaattccggcttcagacagaattcaaagattgacccctgtaatgtccacggtctcatgagctcctctttctacggcaaggtagcctcaattcttgaccactttcacctgtctcctcagggtgaggatagtccttgctctaatgagagctcccgtatggaaattactagaaaggtggtctgtatcatacacgaattggtcgactggaactccatattgcttgaattaagcgaggtgtttcatgtcaacatcagtttagtgaaaaccgttcagaaattctggcacaagattttgccttttgtccccccttccatcaaccaaacccgagattctatctcggagttatgcccttctggcagcattaagcaggtggccttgcagatcatcgaaaaactgaaaaatgtgaactttaccaaggttacttccggagaaaatatattggataagttaagcagtcttaacaaaatcctgaacatcaacgaggatacagagacaagcgtgcagaacatcatctctagtaatctggagagaactgtacagctgatatcggaggactggagtctcgaaaagagtactcataacctgctcagcttgttcatgatgctgcagaatgccaacgtcacggggtcatcactggaggccctttccagctttatcgaaaagtctgagactccatacaactttgaagagctttggccaaaatttcagcagattatgaaggatctaacgcaagactttaggattcggcacctgctatccgagatgaataagggtatcaagtccatcaactccatggccctgcagaagatcaccctgcagtttgcccacttcctcgaaatcctcgattctccctcattgaagactctggagatcatcgaagatttccttctggtgaccaagaactggctccaggaatacgccaatgaggattactctcgcatgatcgagaccctgttcattcccgtgacaaatgagagcagtaccgaggatatcgcgttacttgctaaggcgattgccactttctggggtagtctcaagaatattagcagagctggcaatttcgacgtggcatttctgacccaccttctcaatcaggaacagctcaccaatttttcggtggtgcagttgctgttcgagaatatattaatcaatcttatcaataaccttgccgggaactcccaggaagccgcctggaacctaaatgacacagatcttcagatcatgaactttattaacctgatcctgaatcatatgcagagcgagacttctcgaaagaccgtgctgtccctgcgatctatcgtagacttcaccgagcagtttcttaaaacatttttcagcctttttctcaaggaggacagcgaaaataaaatatcgctgcttctgaagtattttcacaaagatgtgattgccgagatgtctttcgttcccaaagataaaatcctagaaatcctgaaactggatcagttcctgaccctgatgatccaggaccgcctcatgaatatattttctagtctcaaagaaaccatctatcacttgatgaagtcatcttttatactcgacaatggagaattctactttgatacgcaccaggggctcaagttcatgcaggacctttttaacgcgcttcttagggagacgtcgatgaaaaataaaacagaaaacaacattgactttttcactgtggtgtctcagctgttttttcatgtcaacaagagtgaggatttatttaagctgaatcaggacctcggctccgccctacacttggtgcgcgaatgttccacggagatggcccggctgctcgacactatcctgcacagtccaaacaaggacttttacgcactatacccaaccttgcaagaggttattctcgccaacctcaccgacctcctgttcttcatcaacaatagctttcctttgcgcaacagagcgaccctggaaattactaaaagattggtgggcgctatcagtcgagcctctgaggagtcccacgtgttgaagcctttactggaaatgtcggggactttggtcatgttgctgaacgattctgctgaccttcgcgacctggccacgagcatggactcaatcgtgaagctgttgaagttggtgaagaaggtgagcgggaaaatgagcactgtcttcaaaacccactttatcagcaatacgaaagactctgtaaagttcttcgatactctatatagcatcatgcagcagtccgtgcagaatctagtcaaagaaatcgccaccctcaagaagatcgaccactttactttcgaaaaaattaacgacctgttggtacctttcttggacctcgcgtttgagatgattggggtcgaaccctatatatcgagtaactccgatattttcagtatgtcgccctccatcctttcatatatgaaccagtccaaagatttcagcgacattctcgaggagattgcagagtttctaaccagcgtgaaaatgaacctggaagacatgcggtcactcgcagttgcgtttaataatgagactcaaacattctccatggattctgttaacctgcgagaagagattcttggctgcttggttcctatcaacaacatcaccaaccagatggacttcctctaccctaaccccatttcaacgcatagtggcccacaggatatcaagtgggagataatccatgaggttattccttttctggacaagatcttgtcacagaatagcacagaaatcggtagttttctgaagatggtgatttgtctgacactggaggccttgtggaagaacctgaagaaggacaattggaacgtgtcaaatgtcttaatgacctttacacaacaccctaacaacctcctgaagacaattgagaccgtgctggaagcttccagcggtattaagagcgactacgaaggcgatcttaataagtcactgtactttgacactcccctgtcacagaatatcacccaccaccagctggagaaggccatccataacgtgcttagccgcattgccctctggcgcaaaggattactgttcaataacagcgaatggataaccagcacacgcactctgtttcagcccttgttcgaaatcttcatcaaggccactacagggaagaacgtgacctctgaaaaagaggagcgaactaagaaggaaatgatcgatttcccctactcattcaagcccttcttctgtcttgaaaaatacctgggcggcctgtttgttctgaccaaatattggcagcagatccccctgactgatcaatcagtagttgaaatctgcgaagtttttcagcagaccgtgaagccatctgaagccatggagatgctgcaaaaagtgaagatgatggtggttcgagtgcttaccatcgtcgctgagaatccgtcttggaccaaagatatactctgtgccacactctcctgtaagcaaaatggaatccgccatcttatcctgtccgccattcagggcgttacactcgcccaggatcacttccaggagatcgagaagatatggagcagccctaaccaactaaactgtgagtcactaagcaagaacttaagctcgaccctcgaatcctttaaatctagtctggagaacgccaccgggcaggactgcacgagtcagccacggctggaaacagtacaacagcacctgtatatgcttgcaaagtctctggaagagacatggtcttccggcaacccaatcatgactttcctgagtaatttcacggtgaccgaggacgttaagattaaggatcttatgaagaacattacaaagctaaccgaggaactacgtagctcaatacagattagcaatgagaccattcatagtattctggaggctaacatctctcactcaaaagtgctttttagcgctttgaccgtcgctctttccggtaagtgcgaccaggagatactgcatttactgttgacattccctaaaggggaaaaatcttggattgcagctgaagaattgtgtagcttgcccggctccaaagtgtattccctcattgtgctgctgtcgcgaaacctggatgtgagggccttcatctataaaacactgatgccctcagaagccaacgggctgctgaatagccttttggacatagtgagtagtctgtccgcgctgctcgccaaagcacagcatgtctttgaataccttcccgagttccttcacacatttaagattactgccttacttgagactctggatttccaacaggtgtcccagaacgtgcaggctaggagcagcgctttcggctccttccagttcgtcatgaagatggtgtgcaaagaccaagcatcttttctgagcgatagcaatatgttcatcaacttgccacgggttaaggagctgctcgaggatgataaggagaaattcaacatccccgaagactccacccctttctgcctgaagttataccaggaaatacttcagctgcccaatggcgccttggtctggacatttctgaagcccattctgcacggcaaaattctttacactcctaatactcctgaaattaataaggtgattcagaaggccaattataccttctacatcgtcgacaagcttaagacactgtcagaaaccctgcttgagatgtcctcactgttccaacgcagcggtagtggtcaaatgtttaaccagctgcaggaggccctcaggaacaaattcgtgcgcaattttgtagaaaatcagctgcacatcgatgttgacaagctgaccgagaagctccagacgtacgggggactgctggacgagatgttcaaccacgccggagctggtcgattccgttttctgggctccattctcgttaacctgagtagttgcgttgccctaaatcgcttccaggctctgcaatccgttgacatcctggaaactaaagcacacgagcttctgcagcaaaattcattcctggcctccatcatcttcagcaactctttgttcgacaagaatttccggtctgaaagcgtcaagctgcccccacatgtgtcctacaccattcgaacaaacgtactctattccgttcgaaccgacgtggtcaaaaatcctagctggaagttccacccccagaacctgcccgcagacggctttaaatataattacgtttttgcccccctgcaggatatgatcgagcgggcaatcatcctcgtgcagacaggccaggaagcactggagcctgccgcacagacacaagccgcgccgtatccgtgtcataccagcgatctgtttctgaataatgtcggcttctttttccctctcataatgatgcttacttggatggtgtccgtagcatccatggtgcgaaaactggtctatgaacaggagatccaaatcgaagaatacatgcgtatgatgggagtccatcctgtgattcactttcttgcttggttcctcgagaacatggctgttctgacaattagctcagccacgctggctatcgttctgaagacctccggcattttcgcacactccaatacctttatagtatttctgttccttctggacttcgggatgagtgtggtgatgctctcgtatttactgtccgccttcttttctcaagccaacacagccgccctttgtacctcactggtgtacatgattagtttcctcccctatattgtgctactcgtgcttcataaccagctgagtttcgttaaccaaacttttttgtgccttctctccactaccgcttttgggcagggggtttttttcatcacatttctggagggccaggaaacggggatccaatggaacaatatgtatcaggccctagaacagggggggatgacatttgggtgggtatgctggatgatcctatttgatagttccctctactttctgtgtgggtggtacttaagcaacctgattcctggcacatttgggcttcgaaagccatggtactttccttttaccgcttcttactggaagtcagttggattcttggtggaaaaaagacagtactttctgagttcaagtctgtttttctttaatgagaactttgacaacaaagggtcttccctgcagaatcgggagggggagttagaaggctcagcacccggcgtcacacttgtgagcgttaccaaagagtatgaggggcacaaggctgtggtccaggacctgagtctgaccttctaccgagaccagataaccgcgctcctcgggacaaatggggccggtaagacgacaatcataagcatgctgactgggctccatccccccacgtcgggcacaataattattaacggcaagaacttacaaactgatctctctcgcgttagaatggaactgggtgtttgtccacagcaggacattctcctggacaacttgactgtgcgcgaacacctgttactgtttgctagcatcaaggccccacaatggacaaagaaggagctgcaccagcaggtgaaccagacgcttcaggacgtcgatctcacccagcaccaacacaagcagacccgtgctctgtccggcggcttgaagcgaaagctctctttaggtattgcattcatggggatgtcaaggacagttgttttggatgagccaaccagcggagttgacccctgcagccgccattccctgtgggacatattgctgaagtaccgggaagggaggaccattatctttactactcaccacctggatgaggccgaagccctctccgaccgggtggcggtgctgcagcatgggaggctgcggtgctgcgggccgcccttctgcctgaaggaagcctacggccaggggttaaggctgactctgacgcgccaaccctccgtgctggaagcccacgacctgaaggatatggcttgcgtcacttctctgatcaaaatctacatcccgcaggccttcctgaaggactcctcaggctccgagctcacctacacaatccctaaagacacagacaaggcgtgtctcaagggactcttccaggctcttgatgaaaatctgcaccagctccacctgactggatacggaattagtgataccacgctggaggaggtctttcttatgctgctccaagattctaataagaaatcccatatcgccctgggaaccgaatccgagctacaaaatcaccggcctacaggacatctgagcggctactgcggaagtttggctcgccccgccacagtgcagggtgtgcaattgttaagagcccaggtggcagccattctggcccgacgactgcgccggactctgagggccggaaaaagcactctagccgatctgctcctgccagttctatttgttgccctcgctatggggttattcatggttagacctttagctacagagtacccgcccctgaggctgactccgggccattaccagcgtgcagaaacatactttttcagcagcggcggggacaacttggatcttacccgagtcctgttacgcaagttcagagaccaggacctaccctgcgcagacctcaacccccggcaaaagaactccagctgttggcggacggatcccttttcccatccagaatttcaggacagttgcggatgtctgaaatgtccgaatcggtcagcctcagcaccctacctgactaaccatctgggtcataccctgctgaacctatctggattcaatatggaagagtacctgctggctccctccgagaaacccaggctgggaggatggagcttcggactgaaaatcccctccgaggcgggcggtgctaatggtaacatctctaagccccctaccctggccaaagtgtggtacaatcaaaaaggatttcatagtctaccttcttaccttaatcatctcaacaatcttattctctggcagcacttaccgccaacggtcgactggcgccagtacggcattaccctctattctcatccttatgggggcgccctgctgaataaagataagattcttgagtcaatacggcagtgcggcgtggcgctgtgcatagtactgggttttagcatcctctcggcctcaattgggtcctctgtagtgcgcgaccgcgttattggggccaaacgtctccaacacatttccggactaggctacaggatgtattggtttacgaactttctgtacgacatgttattctacctcgtgagtgtctgtttatgtgtcgccgtgatagtggctttccaactcaccgccttcacattccgaaagaaccttgcagcaactgctcttcttttgagcttgttcggctacgccacactcccatggatgtacctgatgtcaaggatcttctcatcaagtgatgtggctttcatctcatatgtgagcctaaatttcattttcggactctgcaccatgctcatcacgataatgcctcgccttctggcgataatctcaaaggctaagaatcttcagaacatatatgacgtgttgaagtgggtctttactatattcccacagttttgtctaggtcaaggcctagttgaactgtgttacaatcagattaaatacgatctgacgcataacttcgggatcgattcctacgttagccccttcgaaatgaatttcctggggtggatcttcgttcagttggcctcacaggggaccgtgttgctgctgctacgggtgctgctgcactgggatctactgcggtggcctcgcggccatagcacactgcaaggcaccgttaagtcttcaaaggataccgacgtggaaaaggaggaaaagagagtttttgaggggcgtacaaacggcgacatcctggtcttgtataatctgtcgaaacactataggagattctttcagaacattatcgcggtccaagatataagcttagggatcccgaaaggtgaatgtttcggactcctgggcgtgaatggcgcaggcaagtcaaccacgtttaagatgctgaatggagaagtatccttgacgagcggacacgcaatcattcgtacccccatgggggacgctgtggatctaagctcagcaggcacagcgggagtgctcatcggttactgtccgcagcaggatgcgctcgatgagctcttgacagggtgggaacacttgtattactactgctccctccggggcattccgcgtcaatgcattccagaggtggccggggacctgatccgtagactccatctggaggcccacgctgacaagcctgtggctacttattcaggaggtaccaagagaaaactgagtacagccctcgctctcgtgggcaagccagatatcctgctgttagacgaaccatctagcggcatggacccttgcagcaaacgctatctgtggcagactataatgaaggaagtgcgagaaggatgtgcagccgtgctgacctctcacagtatggaagaatgtgaggcactgtgtacccggttagcgattatggtgaacgggtccttcaaatgcctgggtagcccgcagcacatcaaaaatcggtttggggacggctacaccgttaaggtgtggttatgcaaggaagccaatcagcactgcacagtgagcgaccacttgaaactgtactttccgggaattcagtttaagggccaacacctcaatcttctcgagtaccacgtgcccaagcgctggggctgtcttgctgacctgtttaaagtcattgagaataacaagacttttctgaacataaaacactatagcattaaccaaaccactttggaacaggtttttataaactttgcctctgagcaacaacagaccctccaatctacactggacccatccactgacagtcaccatacccatcaccttcctatttag

SEQ ID NO: 109152 - DNA, 2367 bp, synthetic construct
  misc_feature 1..2367: note = Description of Artificial Sequence: Synthetic coding sequence
  source 1..2367: mol_type = other DNA
atgggcctgttcatggtgcgacccttggcgaccgagtacccacccctgcgacttacccccgggcactaccagagggctgagacctacttctttcgcaagaattctagctgttggaggaccgaccccttttctcaccccgaatttcaggatagctgtgggtgcttaaagtgtcccaacaggtccgctagcgctccttaccttaccaatcatctgggtcacacactccttaatctttctggatttaatatggaggaatacttattggcccccagtgagaagccccggctgggagggtggtcatttggattgaagatccccagtgaggcaggcggagcaaatggtaatatttctaaacctccaaccctcgccaaagtgtggtacaatcagaaaggcttccacagtctcccctcttacctgaaccacctgaacaatctcattttgtggcagcacttaccccccaccgtcgactggcgacaatacgggatcacactatatagccatccatatgggggggcattattgaacaaggataagatcctcgaatctatacggcaatgcggcgtcgctctgtgtattgtgctggggttctccatcctgagcgctagtatcggatcaagtgtcgtcagagaccgggtgattggcgcaaaacggctgcagcatatctctggcttgggctaccgcatgtactggttcaccaacttcctctacgatatgctgttctacttggtgtcagtgtgcttgtgcgtggctgtcatcgtggcgttccagctgacagccttcacctttcgcaaaaatctagccgctaccgcattgcttctctcactttttggctacgcaaccttgccttggatgtatttgatgtctcggatcttttcctcttctgacgtggctttcatcagctatgtgagtctcaactttatttttggattatgcacgatgttgattacaattatgccccgactgcttgctataatcagcaaagcgaaaaatctgcagaacatctacgatgtcctgaagtgggtctttacgattttcccccagttttgcctggggcaagggctagtggaactttgctataaccagatcaaatatgatctcacgcacaacttcgggattgattcatatgtttctccattcgagatgaattttctcggttggatttttgtgcagcttgcatctcaaggaactgttctgctactcctgagagtgctgctccactgggatctgctccggtggccacgaggccattctacactacagggaacggtgaagagctcgaaggacacagacgtcgaaaaagaagagaaacgagttttcgagggtcggacaaatggcgatatcctcgtgctgtataacctctccaaacattaccggagattcttccaaaacattattgctgtccaggacatatctttgggaatcccaaaaggcgagtgcttcgggttgttgggcgtgaacggagccggaaagtctactacattcaaaatgcttaacggggaagtgagtctgacctctggccacgctatcatacgcactcctatgggcgacgccgtcgacttaagtagcgcaggcacagctggcgtgctgattggatactgcccacaacaggacgcactggacgagttgctgacagggtgggagcacctgtattactactgctctctgcgggggatccctcgccaatgtatcccagaggtggcgggcgacctcatccggcggctacatctggaggctcacgccgataagccagtggctacatacagcgggggcacaaaacgtaaactgtccaccgcactcgccctggttggcaaacccgatatcttgctcctggatgagccatcgtccggtatggacccttgctcgaagagatatctctggcagacaatcatgaaggaggtccgggagggatgtgccgctgtactgacttcgcactccatggaagagtgtgaagcgctgtgtaccagactcgctatcatggtgaatggctcattcaagtgcctaggatctccacagcacattaagaacagatttggcgacggctacactgtgaaggtgtggctctgtaaggaggccaatcagcactgtaccgtctctgatcacctgaaactgtattttcccggaattcagtttaagggtcagcaccttaatctgctggagtaccacgtccccaaaaggtggggatgtcttgctgaccttttcaaagttatcgagaacaacaaaacatttctaaacattaagcattactctatcaatcagacaacactagaacaggtgttcatcaactttgctagcgagcagcagcagacactacagtcaaccttggaccccagcaccgacagtcatcacacccaccacctgccaatttag

SEQ ID NO: 109153 - DNA, 7311 bp, synthetic construct
  misc_feature 1..7311: note = Description of Artificial Sequence: Synthetic coding sequence
  source 1..7311: mol_type = other DNA
atgggtttcctgcaccagcttcaactcctcctgtggaaaaatgtgacactgaaacgacgctccccttgggttctagcttttgagatcttcatcccattggtgcttttttttattctgttaggcctgcggcagaaaaagcccacgatctcagtgaaggaagtcgcattttacactgccgctcctctcacatctgccgggatcctgccagtcatgcaaagtctgtgtcccgacggacagcgagacgagttcggatttctgcagtatgccaatagcacagtgactcagttgcttgaaaggctggaccgggttgtggaagaggggaacctatttgatcctgcccggcccagtctagggtccgagttagaagctctccgccagcacctagaggccttgtctgccggtcctggtacgtcaggcagccacctggatcggagcaccgtgtcttctttttccttggactccgtcgcacgtaacccgcaggagctgtggcggtttctgacccagaacctgagtctccctaactcaacggcgcaggcgctgttagcagcccgtgtagacccacccgaagtgtatcacctgcttttcgggcctagcagtgccctggattcacaatccggtctccacaagggccaagagccctggagccgactcgggggaaaccctctcttcagaatggaggaactgttgttagctcccgctctgttggagcaactcacttgtactcccggaagtggtgaactaggccgtattttgacagtgcctgaatcacagaaaggcgcactgcagggatacagagatgccgtttgtagcggtcaggcagccgcacgcgcccgaagatttagcggactgagcgcagaactgcgcaaccagctggacgttgctaaagtgagtcagcagttaggactggatgcgccgaacggatctgactccagccctcaggcgcctccgcccaggcggctccaagcgctcctgggggatctgcttgacgcgcagaaggtactgcaggatgttgacgtgctgtctgccctggcgctgctcctgccacagggagcttgtaccggacgaacacctggacccccagctagtggcgctgggggcgctgccaacggaaccggagcaggagctgtgatgggccccaacgcaactgccgaggaaggagctccatcagccgctgcactagccacaccagatactctgcagggccagtgttctgccttcgtgcaactgtgggccgggctgcaacctatcctgtgcggcaataaccgtaccatcgagcccgaggctcttcggcgcggcaacatgagcagcttgggttttacgagcaaggagcaaaggaacctgggacttctggtccacctcatgacatctaacccaaaaatcttatacgcgccagccggtagcgaagtggatcgagtcatcctgaaagccaacgaaactttcgcctttgtgggcaatgtgactcattacgcgcaggtatggcttaacatttccgccgagattagatcctttttggagcaagggcgattgcagcagcacctaagatggctgcagcagtacgtggccgaactcaggctgcatcctgaggcactgaacttgagtctggatgaactgccccctgcgttgaggcaagacaatttcagtctgcccagcggtatggcccttctccagcaactcgacactattgataacgctgcctgcggctggattcagtttatgagcaaggtttccgtggatatcttcaaaggattccatgacgaagagagtatcgtgaactacacccttaatcaggcttatcaggacaatgttaccgtgtttgcctccgtcatcttccagacacgtaaagatggctcacttcctcctcacgtgcactacaaaatcagacaaaatagcagttttactgaaaagactaacgaaatccggagggcttattggaggcctggccccaatacaggggggagattctattttctttatggatttgtttggatccaagatatgatggaaagggccattattgacacctttgtggggcatgacgtggtggaacctggtagctatgttcagatgtttccatatccatgttacactagagacgattttttatttgtaattgagcatatgatgccactctgtatggtcattagttgggtatacagcgtcgcaatgaccattcagcatattgtcgccgagaaggagcaccgcttgaaagaggtaatgaagaccatgggcttaaataacgctgtacactgggttgcttggttcattaccggatttgtgcagctctccatcagtgttactgctctgactgctatattgaagtatggccaggtactcatgcattctcacgtggtcattatctggctgtttctagctgtatacgcggtagccacaatcatgttctgctttttggtgagcgtcctatacagcaaggccaaactcgcctcagcctgtggcggtataatctactttcttagctacgttccctatatgtatgtggcaatccgcgaggaggtcgcccacgacaaaatcacagcctttgagaaatgcattgctagtctgatgtctacaacagcattcggcctgggaagcaagtattttgccctgtacgaggtcgcaggcgtaggaatccagtggcatacattttcacaaagtccagtggagggggatgactttaacttattgctggcagtgactatgctgatggtcgatgccgttgtttacggaatcctgacgtggtatattgaagccgttcaccctggtatgtatggccttcctagaccctggtattttcctctccagaagtcatactggcttggcagcgggcgcaccgaagcctgggagtggagctggccatgggcccgtaccccacgattgagcgttatggaggaggatcaggcatgtgccatggagagccggcggttcgaggaaaccaggggaatggaggaagagccgacccacctacccctggtggtgtgtgtggacaagctgactaaggtgtataaggacgacaaaaaacttgcacttaacaaactctcattgaatctgtacgaaaaccaagtggtcagctttctggggcacaatggggccggaaaaaccacaaccatgtcgatacttactggtctctttccccccacttccggatcagccaccatctatggccacgacattaggactgaaatggatgagattcgcaagaatcttggaatgtgcccccagcataatgtcctgtttgacaggctaaccgtggaggagcatctctggttctacagccgcttgaagtcaatggcccaggaagaaatacgtagagagatggacaaaatgattgaggacctcgaattatccaacaagcggcactcactggttcagacactgagtggcggcatgaaaaggaagttatccgttgcaatcgctttcgtcggaggctcccgggccataattctggatgaacccaccgcaggggtcgatccatacgcccgccgggcaatctgggacctcatcctgaaatacaagcctggccgcactatcctcttgtccacgcatcacatggacgaagcagacctgcttggggaccgtattgcgattatttcccacggcaaactaaaatgctgcggaagtcccttattcctcaaagggacctatggcgatggatataggctgacactcgttaagcgtccagcagagcctggagggccacaagaacctggactagcgagtagtccccctggtcgagcccccttgtctagctgctccgaactgcaagtctcccaatttatccgtaagcatgtggcatcgtgcctgcttgtgagcgatacgtccaccgagctctcttatatcctgccgtctgaagctgccaagaaaggcgcttttgaacggttgttccaacacttagaaaggtcactggacgccttacatctctcctctttcggcctgatggacaccacccttgaggaagttttcctcaaggtgagcgaggaggaccagagcctggaaaactcagaagccgatgtaaaagagtccaggaaggacgtattgcctggcgctgaagggcctgcctcaggagagggccatgcgggtaacctggcccggtgttcagagctgacacagtctcaggcatccctgcagtcagcctccagcgttggatccgccagaggtgacgaaggcgctgggtacaccgacgtgtacggagattaccgaccgcttttcgataatccgcaggaccctgacaatgtgtcccttcaggaagtcgaggctgaagccctcagtagggtcgggcaggggtcacgcaagttagatggggggtggctgaaggtgcgccagttccacggtctgttagtgaaaaggtttcactgcgccagacggaacagcaaagccttgttttcccagatcctactgcccgcatttttcgtctgcgtagcgatgactgtcgcattgtctgtgccagaaataggtgacctacccccactggtcctgtctccatctcagtaccacaactacactcaaccaagggggaactttatcccttacgctaacgaagaacgaagagagtacaggctgcgcttatcaccagatgcctcaccacagcagctggtgagtacattcaggctgccaagcggggttggggccacatgtgtcctcaaaagccctgccaatgggtcacttgggccaactctgaacctgtctagcggcgagtcaagactcctcgcagctagattcttcgactctatgtgtctggagtcttttactcagggactcccactctctaacttcgtcccaccgcctccttcacccgctccctctgactctcctgctagcccggacgaagacctgcaagcatggaacgtttccctaccccccactgcgggcccagagatgtggacctccgctcctagtttgcccagactggtccgagagcctgtgcgctgtacatgcagcgcacaagggactggattcagttgtccctcttcagtaggcggacatcctccacaaatgcgggtcgtgacaggcgacatactgacagacattaccggtcacaacgtgtctgagtatttattgtttacctctgacagatttcgcttacaccgatacggtgcaattactttcggtaacgtgctgaaatccatacctgcctcctttggtactagggccccacctatggtgcggaagatcgcagttagaagagccgcacaggtattttacaataataagggctatcatagtatgccaacgtatcttaacagcctgaataacgcgattcttcgcgccaatctcccaaagtctaaaggaaaccctgctgcatatggaatcacggtgactaatcaccccatgaataaaacttccgccagtctttcgttggattacttactgcaaggcacagacgttgtgatcgccatctttattatcgtagctatgtcttttgtccccgcttccttcgtggtttttcttgtggccgaaaagtccactaaagcaaagcatctccagtttgtcagcggctgcaaccctattatatactggttggccaactacgtctgggatatgttaaactacctagttcccgccacttgttgcgtcattattttgtttgtgttcgacctgcctgcctacacctcgcccaccaattttcccgctgtcctgagcctgttcctcctgtacggatggtcaatcactcccataatgtaccctgccagtttctggtttgaagttccctcctccgcctatgtttttcttatcgttattaacctgttcatcggaataacagctacagtggctacgtttctgcttcagttgtttgaacacgataaggacctgaaggtggtcaactcatatctgaagagctgctttctgatttttccgaattataatcttggacacggcctgatggagatggcctacaatgagtatatcaatgagtattatgcaaagataggccagtttgataagatgaagtcccccttcgaatgggacatcgtgactaggggccttgtagccatggcagtggagggcgtggtcggttttcttttgaccatcatgtgtcaatacaacttcttaaggcgcccccagcgcatgcccgtttccacaaagcctgttgaagacgacgtggacgtggcatcggaacgtcagagagtgcttcgtggagatgccgacaacgacatggtcaaaatcgagaacctgaccaaggtgtataagtcccggaaaattggtagaatcttggccgtggatagactctgcctgggagtccggcccggggaatgttttggtctgctgggggtgaatggcgccggaaaaacatcgacttttaaaatgctaacaggtgatgagagtaccaccgggggcgaagcattcgttaacggccactcagtgcttaaggaactcctacaggtccaacaaagtctcgggtattgtccacagtgcgatgccctcttcgatgagctaaccgctcgagagcacctgcaactgtacacacgactccgcggtatctcttggaaggatgaagcccgcgttgtgaaatgggccctagaaaaactagagctcactaaatatgccgataagcctgcaggcacgtacagcggcggcaacaagaggaagctgagcactgcaattgctctgatcggctatcctgcttttatcttcctcgacgaacccactaccgggatggatcccaaagctaggcgcttcctgtggaacctgattttggacctgataaagacaggcaggtccgtggtactgaccagtcactctatggaggaatgcgaagccctctgtactaggctggccatcatggtaaatgggagattgcgttgcctggggtccatccaacatctgaagaaccgcttcggcgatggatatatgatcactgttcggaccaagagctcccaaagcgtgaaagacgtggtgcgtttttttaatagaaactttcccgaggccatgctgaaggagagacatcacactaaggtacaatatcagctgaagtcggagcacatcagcttagcccaagtgttttctaaaatggagcaggtgagcggtgtcttagggatcgaggattattccgtgtcacagactaccctggacaatgtctttgtgaattttgccaagaagcagtcagataacctcgagcagcaggagactgagcctccatctgctctgcagtcacctctgggatgcttgctctctctcctccgaccacggagcgcaccgacagaactgcgcgcacttgtggctgatgaacccgaggatcttgacacagaagatgagggattaatctccttcgaggaggaaagggcgcaattaagcttcaacacggacaccctctgttag

SEQ ID NO: 109154 - DNA, 7311 bp, synthetic construct
  misc_feature 1..7311: note = Description of Artificial Sequence: Synthetic coding sequence
  source 1..7311: mol_type = other DNA
atggggttcctgcaccagcttcagcttctgctgtggaagaatgtgacactgaagagaagatccccatgggttctcgccttcgaaatctttattccattggtattatttttcatactgttggggttgcgccagaaaaaaccaacgatctcagtaaaggaggtctccttctacacggctgcccctctgacctctgctgggatcctcccagtcatgcagtctctatgcccagatggccagcgcgatgaattcggatttctccagtacgcaaattcaaccgtgacacagctcttggagcgcttggaccgggtggtagaggagggcaacctgttcgaccctgccagaccatcactgggctccgagctcgaggcgttgagacagcacctggaggctctgtcagctggtcctgggactagtggttcacatctcgacaggtcaaccgtgagctccttttcacttgatagcgtggcccgtaatccccaagaactatggaggttcctaacacagaacctgtctctgccgaattccacggctcaggccctgctggccgctcgcgtagaccctcccgaggtgtatcatctgctgttcgggcctagctctgcgctggattcccagtctggcctgcacaaggggcaggagccttggtccaggctgggtggcaaccccctgttccgcatggaggagctgctcttggcccccgcccttctggagcagctgacctgcaccccaggttccggggaactggggcgcatattgacagtcccagagtcacagaagggtgctctacaaggatacagagacgctgtgtgctccgggcaggcagcagccagggcccgccgattttctgggttgtcagcagagctgagaaaccagcttgatgtggctaaggtgtcccagcaactgggtctggatgccccaaatggcagtgattcatctccacaggcacctcctcctaggaggttacaagccttgctcggtgacctcctggatgcccagaaggtgctacaggacgtggatgtgctttccgctcttgccttgctcctgccccagggggcctgcactggaagaacccctggcccacccgcaagcggggcgggcggcgctgctaacgggacaggggccggcgctgtcatgggcccaaacgctacagccgaagaaggcgccccatccgctgcagctctggcaacgcccgatactctgcaaggacaatgcagcgcctttgtgcaactgtgggccggccttcagcccatcctgtgcggtaacaataggactattgagcccgaggcgctgagacggggcaatatgtccagtctgggcttcacttccaaggaacagcggaacttggggctgctggtacatctgatgactagtaaccccaaaatcctctacgctccggcaggctcagaagtcgatagggtgatccttaaagccaatgaaaccttcgctttcgtgggcaacgtgactcactatgcccaggtttggttgaatatcagcgctgaaatccggtccttcctcgaacaaggccgccttcaacagcacctgagatggctgcagcaatatgtggccgaactgcgcctgcatcctgaagctctcaatctgtcgcttgacgagctgccaccggcccttcgacaggataacttcagcctgccatccggcatggcactcctgcagcagctcgacaccattgataatgctgcttgtggttggatccagtttatgtctaaggtgtccgtggatatcttcaaaggattccacgatgaggaaagcatagttaactatacactcaaccaggcctatcaggataatgtgacagttttcgcctctgttatctttcagacgcgcaaggacgggagtctaccgccacatgttcattataaaatcagacagaactcatcattcaccgaaaagaccaatgagataaggagggcatattggcgccccggaccaaataccggcggacggttctacttcctttacgggttcgtgtggatccaggatatgatggagagggcaatcatcgacactttcgttggccatgacgtggtggaaccaggctcttatgtccaaatgtttccttacccctgttatacaagagacgacttcctcttcgtcatcgagcacatgatgccactgtgtatggtcatcagctgggtctatagcgttgcaatgacaattcaacacatagtggccgagaaggaacatcgcctgaaagaggtgatgaagaccatgggtctaaataatgccgtgcattgggtcgcttggtttattaccggatttgtgcagctgagcatatcagtgaccgcactgaccgccattttgaaatacggtcaagtacttatgcattcccacgtcgtaattatatggttatttctggccgtatacgcagttgcaaccatcatgttctgcttcctggtatccgtgttatacagcaaggcgaaattggcctctgcatgtggaggcatcatctatttcctgtcatatgtgccatatatgtacgtcgcaatccgcgaggaggtggcccatgacaagatcaccgcctttgagaaatgtatcgcttccctcatgtccacaactgcgttcggcttgggtagtaagtattttgctctgtatgaggtggccggagtggggatccagtggcacacattttcccagtctccagtcgaaggagatgatttcaatctgctgcttgcagtgacaatgctgatggtagatgccgtggtatacggaatactcacttggtacattgaagctgtgcatccaggtatgtacggtctgccgaggccctggtacttcccattgcaaaaaagctactggctcggctctgggcgaactgaggcttgggagtggagctggccttgggccagaacacctcgactgagcgtgatggaagaggatcaggcctgtgcaatggaaagtagacgcttcgaagagacaaggggcatggaagaggagccgacacacttacctctcgtggtgtgtgtggacaaattgacgaaagtgtacaaagacgacaaaaagctggctctgaacaaactgtctctcaatctgtatgagaaccaggtagtctcctttctgggccataacggcgctgggaagacaacaactatgtccatcctcaccggcctgttccctcccactagtggcagtgcaactatctatggccatgacatacgaaccgaaatggacgaaatccggaagaacttaggtatgtgcccacagcataatgtgctctttgataggctaaccgtggaggaacatctgtggttttattccagactgaagagcatggcccaggaggagattcgcagagagatggataaaatgatagaagacctggagctatcgaacaagcgccatagcttagtccagacgctttcaggcggtatgaagagaaaactgagcgtggctatcgccttcgtgggtggttcaagggcaatcatcttagacgaacccaccgccggggtggatccctatgcaaggcgggccatctgggatctgatcctgaaatataagccaggaagaacgattttgttgtccacccaccacatggatgaagcggatctgctgggcgatagaattgcaattatcagtcacggaaaacttaaatgttgtggttcccccttattcctcaagggtacatatggtgacggttatcgattgacgttggtgaaacgtcctgctgaacctggcggcccacaggagcctggtctggcgagtagccccccaggccgagctcccctaagttcctgtagcgagttacaggtgtcacaattcatccgcaagcatgtggcatcatgccttctggtgtccgatacatcaacagaactgtcttacatcctgccatctgaagctgccaagaaaggggcgtttgagaggctgtttcagcatctagagaggagcctcgacgcccttcatctgtcatctttcggccttatggacaccactttggaggaggtgttccttaaggtctccgaagaagaccagtcactagagaacagtgaggcagacgttaaggagtcaaggaaagacgtgctccccggagcagaaggaccagcctctggcgagggccacgccggtaacttggccaggtgttcagagcttactcagagtcaagcttctctccagtcagcttcgtctgtcgggagtgctcggggtgacgagggggcaggttatactgacgtgtacggagactatagacctttattcgacaacccgcaggacccggacaatgtaagcctccaggaggtggaggcagaagctctaagtcgggtgggccagggtagccgaaagctggacggagggtggttgaaagttcgccagtttcacggactgctcgtgaaaaggttccattgcgcgcgccggaattctaaagcgttatttagccagatattgttaccagcattctttgtttgtgtggccatgactgttgctctttccgtccccgagattggagatttacctccactcgtgttgtctccatcccagtatcataactatacccagcctcgcgggaattttataccatacgccaacgaagaaagacgggagtatagattgagactgtcaccagacgctagtccccaacagctggtgtccacgttccggctgccttcaggcgttggggctacatgtgtcctaaagtctcccgcgaatggatccctgggccctacactgaacctgtcctcaggcgagagtcgcctactcgccgccagattctttgactctatgtgtctcgaatccttcacccaaggtctaccactgtcgaatttcgtccctcctccgccctcccctgcaccttctgacagccctgcttctccagacgaagacctgcaggcctggaatgtttcgttacctcccactgccgggccggaaatgtggaccagtgctcccagtctgcccagacttgtaagagagcccgtgcggtgtacatgttctgcacagggcacaggtttctcttgtccaagctctgtcggcggccaccctcctcaaatgcgagtagtcactggagatattctcaccgacatcaccggacataatgtctccgagtatctgctcttcacatctgatcgttttcgattacacagatatggtgccatcacgtttggcaacgtcctgaaaagcatcccagccagtttcgggacacgcgcaccgcccatggtacggaaaatcgccgtgcgacgagcagcacaggtgttctacaataacaagggctaccactctatgcctacataccttaattctctcaacaatgctattctcagggccaatttacctaagagcaaaggtaatcccgctgcctacggaatcacagtgacgaaccatccaatgaacaaaacttccgctagcctttctttggactacctgcttcaaggcacagacgtggtcattgccattttcattatcgtcgcaatgtctttcgttccagcaagtttcgtcgttttcctggtcgccgagaagagtaccaaggccaaacatttacaattcgtttcaggctgcaatccgatcatctactggcttgcaaactatgtgtgggacatgcttaactacctggtgcctgctacatgctgcgtgataattctttttgttttcgacctgcctgcctatacgtccccaacaaattttcctgctgttttgtcactgtttctgctgtacggctggagcattacaccaattatgtatcccgcttctttttggttcgaggtgccatcttccgcgtacgtgtttctgatcgtgatcaatctgtttattgggatcaccgccaccgtcgcaacttttctcctgcagttatttgaacacgacaaagacctcaaagttgttaacagctacttgaaaagctgttttcttatcttcccgaactacaacttaggccacggacttatggagatggcctataatgaatatataaacgaatattacgccaagattggccagttcgacaagatgaagtccccgttcgagtgggatatcgtcactcggggcctggtggcaatggccgtggagggggttgtcgggttcctactcaccataatgtgccaatataactttctgcggagaccacaaaggatgcccgtaagtaccaagcctgtggaggatgacgtcgatgtggccagcgagaggcaaagggtgctccggggagacgctgataatgacatggttaaaatcgaaaatctgaccaaagtctataagtcaagaaagataggccggatccttgcagtcgatagactgtgcctcggcgtgagacccggtgaatgcttcgggctgttaggagtcaatggcgccgggaaaaccagtacctttaaaatgctgaccggcgatgagagcaccactggtggggaagccttcgtgaatgggcattccgttctgaaggagcttttacaggtgcaacagtctctcggctactgccctcagtgcgacgctctgtttgatgaactaaccgccagagaacatctgcagctctatactcgccttaggggaatctcttggaaggacgaagccagggtagtgaaatgggccctagagaaactcgagctgacgaagtacgcggataagcccgctggtacatattcgggcggcaacaagcgaaagcttagtacagccatcgcgttaatcgggtaccctgcgtttattttcctggacgaacccacaacaggaatggatccgaaggctaggaggttcctctggaaccttattctggacctaattaaaaccggtagaagcgtggttcttacttcccactccatggaggagtgcgaggccttgtgtactaggctggcaatcatggtgaatggtaggctccgctgcctggggtccatccagcacctgaagaaccgctttggtgatggatacatgatcaccgtccggaccaaatctagccagtccgttaaggatgtggtgcgctttttcaataggaacttccccgaggcgatgttgaaggaaagacatcacaccaaggtgcaataccagttgaaatctgagcatatttcactggcacaggtcttcagtaaaatggaacaggtttcaggcgtcctaggcattgaagattacagcgtaagtcaaactacactggataacgtgtttgtcaattttgctaagaagcagagtgataatctggaacaacaagaaacagagccacccagcgccctgcaaagtcccttgggctgcctattgtctctgctgcgccccagatccgcacctacagagcttagggctctggtggcggacgagcccgaagatctcgacacggaggacgaagggttgataagcttcgaggaggagagggcgcagctgagttttaatactgataccttatgctag

SEQ ID NO: 109155 - DNA, 7401 bp, synthetic construct
  misc_feature 1..7401: note = Description of Artificial Sequence: Synthetic coding sequence
  source 1..7401: mol_type = other DNA
atggggcggaaaacgtccagagtgcagcagggtccgcccaggtctcctgcatgttccgcccacggtgaacgttcctggggcctggagttccccccctttcggtggttgctgggtatagcgggccgcacacacctggcggccctgccacccttccagtgggtactggctttcgagatctttatccctcttgtcctgttcttcatcctcctcggtcttaggcagaaaaagccaaccatcagcgtgaaggaggtggccttttacacagctgcacctttgacgtcggctggcatcttgccagtaatgcagagcttgtgtcccgatggtcagagggacgaattcggattccttcagtatgcaaattcgacagtcacacaactgttggagcgcctggacagagtggtggaagagggtaacctgtttgatccggcaagacctagtctgggcagcgaacttgaggctttgcggcagcacctggaggctctgtctgccggacccgggaccagcggaagtcacctggaccgctcaacggtgtccagcttcagtctggactctgtagccagaaacccccaggagctctggaggtttcttacacagaatctgagcctgcccaacagcacagcgcaggcactgctcgccgccagggtcgatcccccagaggtgtaccacctgctgttcggcccaagttcggccctggactcgcagagtggccttcataaggggcaggagccctggtctcgcctgggcggcaatccattgttccggatggaagagctcctactggctccggctctgctggagcaactgacctgtacaccgggttctggagagttgggaaggatcctcaccgtcccggaatctcagaaaggcgcgctgcaggggtatagagacgccgtgtgtagcggacaggccgctgctcgcgccagacggttctccggactctcggcggaactccggaatcagcttgatgtcgctaaggtgtctcagcaactgggccttgatgctccaaacgggagcgactcatctccacaagccccccctcccaggagacttcaggccctcttaggagacctgctggacgcccagaaagtgctgcaggacgtggatgtcttaagcgcactcgccctgctgctgccacagggcgcctgcacagggaggaccccaggcccccccgcaagtggcgccggaggggccgccaatggtaccggcgcaggagctgtcatggggcccaacgcaactgctgaagagggtgctccctccgcggccgcactggcaacacccgacacactgcagggtcagtgttctgctttcgtgcagctgtgggcaggcctccagccaattctgtgcggaaataaccggacaatagaacctgaagctttgagaagagggaatatgagttctctgggctttacatctaaggaacagcgcaatctggggctgttggtccacctgatgacctcgaatcccaagattctttacgcccctgcgggatccgaagttgacagggtgatcctgaaagcgaacgaaactttcgcctttgtggggaatgtgacgcactatgcccaggtctggctgaacatttcagctgagattcgcagttttttggagcagggcagactccaacaacacctgaggtggttgcaacagtacgttgctgaactccgactgcacccggaggccctaaatctgagcctggacgaactgccccctgcgctccgacaggataactttagtttgccatcgggcatggctcttctgcagcagctcgacactatcgacaatgccgcctgcgggtggatccagtttatgtctaaggtatctgttgatatttttaaggggttccacgacgaggagtcaatagtaaactacaccctgaatcaagcctaccaggacaatgtgacagtgttcgccagcgtgatcttccagacacggaaggacggctctctccccccccacgtgcactacaagatccgccagaactcctcttttacagagaagacaaatgagattcggcgagcctactggagacccggtcccaatacagggggcagattttatttcctatacggctttgtgtggatacaggatatgatggaacgtgcaatcatcgacacattcgttggccacgatgtggtcgaacccggatcttatgttcagatgttcccatacccttgctacaccagggatgacttcctgtttgtaattgagcatatgatgccactctgtatggtaatttcttgggtgtacagcgtagctatgacaattcagcatattgtggcggaaaaggagcatagactcaaggaagtgatgaaaaccatgggactgaacaacgccgtgcattgggtcgcttggtttatcaccgggttcgtgcagctcagcatttcagttactgctctcactgccattctcaaatacggacaggtgttgatgcacagccatgtcgtgataatctggctgtttctcgcagtctacgcagtggctaccattatgttctgctttctggtatcggtgctgtattctaaggccaaactagccagcgcatgtggcggcataatatatttccttagttatgttccctatatgtacgtggccatcagggaggaggtggcccacgataaaataaccgcttttgaaaaatgcatcgcttcactgatgagcactactgcctttggtctcggaagcaagtacttcgctctttacgaagttgcaggggtcggaatacagtggcatacattcagtcagagcccagtcgaaggcgacgatttcaatcttctccttgcggtcaccatgcttatggtggacgctgtagtgtacggcattctcacctggtatatcgaggccgtccacccaggcatgtatggactgccccgaccctggtattttcccctccagaagtcctactggttaggatctggccgcaccgaggcgtgggagtggagctggccgtgggctaggacacctcgactcagtgtaatggaggaggatcaagcctgtgccatggagagccgacgctttgaagaaacacgcggcatggaggaggaaccaacccacctgcccctggtggtatgcgtggataagctgacaaaggtgtacaaggatgataaaaaactggcactcaacaagctgtccttaaatctttatgagaatcaggtggtgtcgttccttggtcataatggcgccggaaaaacaacaacgatgagcatactcacgggactgtttccacctactagcggatcagcaactatctatggacacgatatacgcaccgagatggatgaaatccggaaaaatctggggatgtgtcctcaacataatgtgctctttgacagattgactgtcgaagagcacttgtggttctatagcaggctgaagtccatggcacaggaagaaattcggcgagagatggacaaaatgattgaagacttggagctctccaataagagacattccttggtgcagaccctttcgggggggatgaaacggaagctttccgtggccatcgcctttgtagggggctcccgagctataatcctggatgaacccactgccggcgtggacccgtatgcgcggcgagccatctgggatcttatactgaaatacaagcccggaaggactatacttctgagtacgcatcacatggatgaggccgacttgctgggggatagaattgcaatcatatcacatggcaaactgaagtgctgtggcagcccattgttcttgaagggtacttacggtgatggttacaggctgacgcttgtaaaacggcccgctgagcccggtggcccacaggaaccaggtcttgcttcatcgccccctggacgcgccccactgtcttcctgctcagaactgcaggttagccagttcatccgtaagcatgtggcctcttgtcttctggttagtgacacatccactgaattgtcttatattctgccctctgaggcagctaaaaagggcgctttcgagcgactgttccagcacttggaacggtcactggacgctctgcatctgtcaagcttcggactgatggacacaacattagaggaagtcttcctgaaagtgagcgaagaagaccaatcactggagaattccgaagcagatgttaaagaaagccggaaagacgtgcttccaggtgcagagggccccgccagcggcgaggggcacgcaggaaatctggctcgttgttccgagctcacccaatctcaggcttctctccagagtgcgtcatcagtgggcagcgctaggggagacgagggcgccggctacactgatgtgtatggagattacaggccactgtttgataatccccaggatccagacaatgtgtccctgcaggaagtcgaggcagaggccctgagccgtgtcgggcagggctcccggaaactagatggaggttggctcaaggttcgtcaattccatggcctgctcgtgaagcggtttcactgcgcccgccggaattcaaaggccctgttctcccaaatacttctacccgcattttttgtctgcgtagccatgacggtggctctttcagtacctgaaatcggcgatctcccacctctagtgctgtccccctcccaataccataattatacacagccaaggggtaacttcattccctacgctaacgaggagcgtagggaataccgattgaggctaagtccagacgcatcaccccagcaacttgtgagtaccttcaggctccctagcggcgttggggccacgtgcgtgctgaaatccccagcaaacggaagcctgggccccactttgaacctgtcttccggggagagccgtctgttggccgcgcgcttttttgattctatgtgcttagaatcctttacgcagggattgcccctgtcgaacttcgtcccacctcccccatctcctgcacccagcgactcacctgccagtcccgacgaggacctccaagcctggaacgtctctctgccgcccaccgctggaccagaaatgtggacctcagcaccgagcttgcctagacttgtaagagaacctgtgcgctgcacttgcagtgcccaaggaaccggcttctcatgcccttccagtgttgggggccatccgccacagatgcgggttgtcacaggggatatcctgacagacataaccggccacaatgtctctgaatacctgctgtttacatcagatcggtttcgtctacacaggtacggcgctataacattcggcaacgtgctgaagagtatcccagcctccttcggaacccgcgctccacccatggtacggaagattgccgtccgacgcgccgctcaagtgttttataataacaaaggctaccactccatgccgacataccttaattcactgaataacgccatcctacgtgcaaacctcccaaagtccaaggggaacccagcggcatatggtatcacagtgactaatcacccaatgaacaagacatcagccagcctcagcctagattacctgcttcaggggactgatgtagttatcgccatatttattattgtcgccatgtcattcgtgcccgcgtcattcgtggttttcctggtggccgagaagagtacaaaggcgaagcatctccagttcgtgagcgggtgtaacccaattatctactggctggccaactatgtctgggatatgcttaactatctggttcctgctacttgctgcgtcattatcttgtttgtgtttgatctccccgcttacacctcccctacgaacttcccggcggtcctgagtttgttcctcctgtacggctggtctataacacctataatgtacccagcgagcttctggttcgaggtgccgtccagcgcctatgtctttctgatcgtcatcaacctgttcatcggaattaccgccaccgttgctactttcttactgcagttgtttgagcacgacaaggacttgaaagtcgtgaatagctatctgaagagctgtttcttaatttttcccaattataatttgggtcatggcttaatggagatggcatataatgagtacattaacgagtattatgcgaaaatagggcagttcgataagatgaaatcaccatttgaatgggacattgtcacacgcgggctggtcgcgatggctgtggaaggagtggtgggcttccttctgactataatgtgtcaatacaatttcctgagaaggcctcagcgaatgcctgtgtccaccaagccggttgaggatgacgtggatgtggcgagtgaaaggcagcgtgtgctgcgaggagatgccgacaacgacatggtcaaaatagagaacttgaccaaagtgtataaatcccgcaaaattggacgaatcctggcagttgatcggctgtgcctaggcgttcggccaggcgagtgctttggtcttctgggagtgaacggcgccggaaaaacctctacttttaagatgctgactggagacgaatcaacgacaggaggggaggcattcgtcaatggccacagtgtgctcaaggaactactgcaagtgcagcagtctctgggctactgcccccaatgcgacgccctgttcgacgagctaaccgcccgggaacaccttcagctatacactagactacgtggaatttcttggaaggatgaagcccgggtagttaagtgggctctggaaaagctcgaactgacaaaatatgctgataaaccggctggaacttactctggaggcaataagcgaaaactcagcacagcaattgcactaatcgggtacccagccttcatatttctggatgagccgacaaccggaatggatcccaaagcacggcggttcctgtggaacctgatcttggatctcatcaagaccgggcgcagtgtggtgcttacatcacatagcatggaggaatgcgaggcactatgtacgagacttgctattatggtgaacggacgtctacgttgtctcggctcaatccaacacctgaagaacagattcggagacggctatatgatcacggttcgtaccaagagtagccagtccgtgaaagacgtggtgcgattcttcaatcggaacttcccagaagcgatgcttaaagagagacaccataccaaggtccagtatcagttgaaaagcgaacacatcagcctggcccaggtgttttctaagatggaacaagtgtccggggtcctgggtatcgaggactactctgtgtctcagactaccctcgacaatgttttcgttaacttcgccaagaaacagtctgataacctcgagcagcaagagaccgaacctccaagcgccctgcaatctcctttagggtgcctgttatctctgttgaggcctaggtcagctcctaccgaacttcgagcattggtcgccgatgagccagaggatttagacaccgaggacgagggactaatctccttcgaagaagaacgcgctcagctgtcctttaacaccgacactctctgctag

SEQ ID NO: 109156 - DNA, 7308 bp, synthetic construct
  misc_feature 1..7308: note = Description of Artificial Sequence: Synthetic coding sequence
  source 1..7308: mol_type = other DNA
atgggctttttgcaccagctgcagctcttgctatggaagaatgttaccctgaaaaggagatccccatgggtgctcgcatttgagatcttcatcccactggtattgtttttcatcctcttgggactcagacagaagaagcccaccatatccgttaaggaggcattttacacagccgctccactgacaagcgctggtatcctgcccgtgatgcaaagcttgtgtcctgatgggcagcgcgatgagtttggattcctgcagtacgccaacagtacggtgacacagctcctcgagaggttagatagagtcgtagaggaggggaacctttttgaccccgcaagaccctcactcgggagcgagctcgaggcattacgtcaacacctggaggcgctttcagccggacccggcacttccgggtctcatctggataggtccacagtgtcctctttctccttggacagcgtggccaggaatccccaggaactttggcgattcctgactcagaaccttagcctgccgaattcaacggctcaggcgctcctggctgcacgagtggatcctcccgaggtttaccacctactcttcggcccttcaagcgccctggactctcaatccggactgcataaagggcaagaaccttggtctcgtttgggcggaaatcctctgtttaggatggaggagttgctgctcgcacccgccctgttggagcagttgacatgcactccagggtccggtgaactggggagaattctgactgtaccagaatctcagaagggcgctctgcaggggtacagagacgccgtttgtagtggccaggcggccgcccgagcccggagattcagtggcctaagtgctgaactgagaaatcagctggatgtggccaaagtgtctcaacaattgggtctagatgcaccgaatggttccgactccagtccccaggctcccccgccgcggcgattgcaggctctgctcggagacctgttggatgctcagaaggtgctccaggatgttgacgtcttgtctgctctggctctgctgttgcctcaaggagcttgtacaggcagaactcctggcccacctgcatcaggagctggcggagctgcaaatggaactggcgcaggcgccgtgatgggccctaacgcaacagctgaggagggggccccttccgctgctgccctggctacacccgatacgctccaagggcagtgcagcgcgtttgtgcagctttgggccggcctccagcctatcctgtgcgggaacaatagaacaattgagcccgaagccctgcggcgcggtaatatgtcctctttgggattcactagtaaggaacagaggaacctgggcctactcgtccacttgatgacaagcaacccgaagattctgtacgctccggcaggttctgaagtggatcgggtcattctcaaagccaatgaaactttcgctttcgtgggcaacgtgacacattacgcacaagtctggttgaatatctctgcggaaatccgaagctttttagagcaaggacgcctacagcagcacttgcgttggctgcagcagtacgtcgcagagctcaggctccaccctgaggccctgaacctgagtctcgatgagctgccgccagctctccgtcaagacaacttcagtctgccgtccggcatggcgctgctgcagcagctcgacaccatagacaacgcggcctgtggatggatccagttcatgtctaaggttagcgtggatatttttaaggggtttcatgacgaggagtcaatcgtcaactacactctcaatcaggcgtatcaggacaatgtaacggtcttcgcttccgtgatcttccaaacaaggaaggatggatccctgcctccccacgtgcactataaaattcgccaaaacagtagcttcactgagaagaccaatgagattagacgggcatactggcgcccagggccaaatacagggggcagattttatttcctgtacggattcgtctggatccaagacatgatggaaagagccataatcgacacatttgttgggcatgatgtggtagaacctggatcctacgtacagatgttcccttatccgtgttacacacgggatgatttcctgtttgtgattgagcatatgatgccattgtgcatggtgatttcctgggtctatagcgtggccatgacaattcaacacatcgtggccgaaaaagagcatcgcttgaaagaagtgatgaagacgatggggcttaacaacgctgttcactgggtcgcatggttcatcaccggtttcgtccagttgtccatctcagtgaccgcactgacagccattctgaagtacggtcaagtactgatgcacagccacgttgtcatcatctggctgttcctggccgtctatgccgtggctacaatcatgttttgttttctcgtatccgtgctctactccaaagctaagttggcctccgcctgcggaggaattatctatttcctgtcatacgtaccctatatgtatgttgccataagggaggaggtggctcacgataagataacagcttttgagaagtgcatcgcctctcttatgtctactacagcattcggcttgggttccaaatatttcgcgctgtatgaagtggcaggagtgggcatccagtggcataccttcagccagtcacccgtcgagggggatgatttcaatctgttgttggccgtgactatgctgatggttgatgccgtggtttacggtattttgacctggtacatcgaggcagttcaccctggcatgtacgggctgcctaggccatggtactttcccttgcagaagtcttactggcttggctcgggtcgtaccgaggcctgggaatggtcttggccctgggcccgcactcctaggctctccgtgatggaagaggatcaagcatgtgccatggagagcagaagattcgaggaaactcgcggaatggaggaggagccaacacacttaccgcttgtggtctgcgtggacaaactgactaaggtatataaagatgacaaaaagctggcactgaacaagttgtctctgaacttgtacgaaaatcaagtagtctcattcctgggccacaacggcgccggcaaaaccactaccatgtctatactcactggcctctttccaccaacatcaggatccgccactatatatggtcacgacatacggacagaaatggatgaaattagaaaaaatcttggcatgtgccctcagcacaatgtcctgtttgatagattgactgtcgaagagcacttatggttctatagtcgactcaagagcatggcccaggaagaaatccggagggaaatggacaaaatgatcgaagacttggagctgtctaacaaaaggcacagtcttgttcagacactcagcggcgggatgaagcgcaagctctcagtcgctatcgcctttgttggagggtctcgcgccatcatcctggacgaacccacagcaggggtcgacccctacgctaggcgggcgatttgggacctcatccttaagtataagccagggaggactattcttctctccactcaccatatggatgaggctgatttgttaggagatcggattgccattatttcccatggcaaactaaagtgctgcggatcgcccctcttcctgaagggaacatatggcgatggatatcgccttacactggtcaagaggccagccgagcccggcggcccccaagagcctgggctggcctcgagtcctccaggccgagctcctctgagctcttgctccgagctgcaggtttctcaatttattagaaagcacgttgccagctgtctgctcgtctcagacactagtaccgaattgtcctacatcctaccctcggaagccgccaagaagggcgcatttgaaaggctctttcaacacttggagcgttctctggacgcactccacttaagttcttttggcttaatggataccaccttggaggaagtgtttcttaaagtgagcgaggaagaccagtcccttgaaaactccgaagcagacgttaaagagagcagaaaggatgtgctccccggggcagagggccctgcatcaggtgagggacatgcgggaaatctcgccaggtgcagtgagctcacacagagtcaagcttctctgcaatcagcatccagcgtaggctcagctcggggggatgagggagccggttacacagacgtgtatggggattatcgacccctttttgacaaccctcaggaccccgataacgtcagcttacaggaagtggaggccgaagcactgtctcgggtcggtcaggggtcgcgcaagttggacggcggatggctgaaggtgagacaattccacggacttctggtgaaacgattccattgtgctagaaggaacagtaaggccctcttttcccagattctgctgccggcattcttcgtctgcgtggccatgacggttgctctttcagtgcccgagattggtgatcttcctccactggtcttgtctccttcacagtatcataactatacacaacctcgagggaacttcataccctatgccaacgaggaacgaagagagtatcgcctccgtctttcccccgatgcctcccctcagcagctagtgtcaacttttcggttaccctctggagtcggcgcaacatgtgtccttaaatcaccagccaatggcagcctcggccccacacttaacttgtcaagtggagaatcgagactgttagctgcccggttcttcgactctatgtgcctcgaatccttcacccagggcctgccgctgagcaattttgttcctccgccacccagccccgcgcctagcgatagcccagcctctcctgacgaggacttacaggcatggaacgttagtctcccccccacagctggcccagaaatgtggacgtcagccccgtctctccccaggctcgtcagagagcccgtgagatgcacgtgttcagcacagggcaccggcttctcttgccctagttcagtgggcggtcatcccccccagatgcgcgttgttacgggggatatactgaccgacatcaccgggcacaacgtctccgagtacttactgttcaccagcgaccgcttcaggctccaccgttacggcgccatcacctttggcaacgttctcaagtccattccagcgtcgttcggtactcgagctcctcccatggtacgcaaaatcgcggtgaggcgtgccgcacaggtgttttataacaacaaaggctaccatagcatgcccacatacttaaactctcttaataacgccatcctaagggcgaatcttcctaagtcaaaaggaaatcccgctgcctatgggatcacagtcacaaaccatcctatgaataaaacaagtgctagcctctctctcgattacctgctccagggcaccgacgttgtaattgctatattcatcattgttgccatgtcctttgtacccgcctcgtttgtcgtgttcctggtggcagagaagtccacaaaggctaaacatctgcagttcgtgtcgggttgtaaccctataatttattggctagcaaactacgtttgggacatgctgaattacctggtgccagcaacatgttgtgtaattatattgtttgtttttgacctgccggcgtacacgtctcctaccaactttcccgctgtgcttagtctgtttctcctgtacggatggtctattactcccataatgtatccagcaagcttctggttcgaggtcccatctagtgcatacgtctttctgatagtgattaacctgttcatcgggattaccgcaacagtagccactttccttctgcaattatttgagcacgacaaggatctgaaggtagttaacagctacctgaagtcatgctttctgattttccctaattataaccttgggcatggtctgatggaaatggcatacaacgagtacataaacgaatattatgcgaaaatcgggcagttcgataagatgaagtctccattcgagtgggacattgtcaccagggggcttgtggcaatggcagttgagggggtggtgggctttctgctgaccattatgtgccagtacaatttcctgagacgccctcagcgcatgccagtgagcactaaacctgttgaagatgatgttgacgttgcttcagaacgccagcgcgtgctccgcggcgatgcagataacgacatggtgaaaatcgaaaatctcacaaaagtgtacaagagccgcaaaatagggagaatactggccgtggaccgactgtgtctgggagtcaggccgggcgaatgttttggcctgttaggggtgaacggggcaggaaagacaagtactttcaaaatgctcaccggggatgaatctactacaggtggagaggcctttgtcaatggtcatagcgtcctgaaggaactgttgcaggttcagcagagcctgggttattgtccacagtgcgatgctctgttcgatgagttgacggcccgcgaacatctccaactgtatacaagattaagagggatttcctggaaagacgaagcgagggtggttaaatgggcccttgaaaagctcgagttaactaaatacgcagacaaaccagctgggacctattcaggaggcaataagcgaaagctaagcacagctatcgccctcattggctatcctgcctttatcttcctagatgagcctacaactgggatggacccaaaggcgcgcaggttcttatggaatctgatcttagacctcatcaagaccggccgctccgtggtgttgacaagccactccatggaagagtgtgaagctctctgtactagactggccattatggtgaacgggaggctgcgctgtcttggcagcattcagcacctcaagaaccggttcggtgacggatacatgataacagtacgcacaaaatcatctcagtccgtgaaagatgtggtgcgctttttcaatcgaaacttccccgaggctatgctgaaggagcgtcaccacaccaaagtgcagtatcagctgaagtccgaacatatttccctggcacaggtatttagcaaaatggagcaggtttctggtgtactgggtatcgaagactattccgtgtctcagaccaccttggataatgtctttgtgaacttcgccaagaaacaatctgataatttggagcaacaggagactgagcctcccagtgccttgcaatctccactggggtgcctgctgagcctgctgagacctcggtcggcccctaccgaactaagggctctggtagcggatgagcccgaggacctggatacggaagacgaagggctgattagctttgaagaggaaagagctcagctttctttcaacacagacacgctttgttag

SEQ ID NO: 109157 - DNA, 591 bp, synthetic construct
  misc_feature 1..591: note = Description of Artificial Sequence: Synthetic coding sequence
  source 1..591: mol_type = other DNA
atgctgactggtgacgagagcaccaccggtggggaagcattcgtcaatggacattctgtattgaaggaattgctgcaggtccagcagtccctgggatactgccctcagtgcgacgcactcttcgacgagctcactgctcgcgagcacctgcagttatatactagattaagaggaatttcatggaaggacgaggcccgggttgtcaaatgggccttagaaaaactggagctgacaaaatacgcagataagccggcgggcacctatagtggcggtaataagcggaaactgtctacagcaattgccttgataggctatcctgcatttatcttcctggacgagccaaccactggcatggaccccaaggcccggcggttcctatggaatctcatactggatttaatcaagacaggtcgaagcgtcgtgctgacctcacactcaatggaggagtgtgaggccctttgcacccgccttgcaataatggagcggtcacccgctgtacctggccagcatcccgcacccgaagaacctgtatggagatggctgcacgatcatggtgcggaccaggagcagcctgaatgtgagggcaggtag

SEQ ID NO: 109158 - DNA, 5115 bp, synthetic construct
  misc_feature 1..5115: note = Description of Artificial Sequence: Synthetic coding sequence
  source 1..5115: mol_type = other DNA
atggcagtgctacggcagttggcactcctgctgtggaagaattacactctccaaaaacgcaaagtgttggtgaccgtcctggaactgtttctcccattgctgttcagcggcatcctgatttggctaaggttaaagatccagtcggagaacgtgcccaacgcaacaatctacccggggcagagcatccaggagctgcctctctttttcaccttccctcctcctggggatacctgggagctggcatacatcccaagtcactccgacgccgccaagacggtgaccgagaccgtccggcgggctttagttattaacatgagagtgagaggcttcccaagcgaaaaagactttgaggattacatcaggtacgacaactgctccagctctgtactcgctgcagttgttttcgaacatcctttcaaccacagcaaagagccactacctctggccgttaagtatcatctgaggttttcttacactagacgtaattatatgtggacacaaactggcagcttcttcttgaaggagaccgaaggatggcatactacatctctgtttccactatttcctaaccctggacctcgagagccgacatcccccgacggtggagaaccagggtatattagagagggttttctggctgttcagcatgccgttgatcgcgctatcatggaataccacgcagacgcggctacacggcaactgtttcagagactgaccgtcaccattaaacggttcccctatccacccttcatagcggatccattcctggtggcaatacaatatcagctgccactgctactcctgttgtcctttacctacaccgctttgacgattgcaagggcagtggtgcaggaaaaggagagacgactgaaggaatatatgcgcatgatggggctttctagctggttacactggtctgcttggttcctgctgttcttcttgtttctgctcatcgcagcgtcctttatgacccttctgttttgtgtgaaagttaagccgaatgtggccgttctctccagatccgatccctccctggtattagcctttctgttgtgcttcgctattagcactatatcattctcctttatggtaagcaccttcttctctaaggcaaacatggccgctgcctttggcggcttcctgtacttcttcacatacattccttactttttcgtggcaccgcgttacaactggatgactctgagccagaaactctgttcctgcttactttcgaatgtggccatggccatgggtgcccaattgattggcaaatttgaggccaaaggcatggggattcaatggagggacctgttatcgcctgttaacgtcgatgacgacttttgctttggtcaggtgcttggcatgctactgctggattcggtgctttacggcttagtcacatggtatatggaggccgtgttcccaggtcagtttggagtgcctcagccctggtatttttttattatgccctcatactggtgcgggaaaccacgtgcagtggccgggaaggaggaggaagacagtgaccccgaaaaagccctcagaaacgagtatttcgaggctgaacccgaggacctagtagccgggattaagatcaagcatctgtctaaggttttcagagtcggtaacaaggatagagctgccgttcgcgacctgaatctgaacctctacgagggacagatcaccgttctgctcggccacaacggcgcaggcaagacaacaactttaagcatgctgaccggcttatttccccctacctcaggccgcgcctatattagcggttacgagatttcacaggatatggttcaaataagaaagagcttagggctctgcccccagcatgacatcttgttcgataacctcactgttgcagagcatctttacttctacgctcagcttaaaggactgagtagacagaagtgccctgaggaagtgaagcagatgttacacattatcggcctggaggataaatggaacagccggtcacgatttttaagcggagggatgcgacgtaaacttagcattggaatcgctctgatcgcaggcagtaaagtgctcattttagacgagcccacatctgggatggatgcgatttcgaggagagcaatctgggacctgctccagcgacaaaaaagtgaccgaaccattgtgttgactacacactttatggacgaggcagatctgctaggtgacagaattgccattatggctaagggggaactgcagtgctgcggcagctctctctttctgaaacaaaagtacggcgccgggtaccacatgactcttgtgaaggaaccacattgcaatcctgaggatattagtcaactagtgcaccaccacgttccaaatgccactctcgagtccagtgctggagctgaattaagtttcatccttccacgtgaatcaacacaccgttttgaggggctctttgccaagctggagaaaaagcagaaggagttgggcatcgcctcttttggggcctcaatcacgactatggaagaagtctttctgcgcgttggcaagctagtcgattcttctatggacattcaggccatccagctgccagcattgcagtatcagcacgaaaggagagcttccgattgggccgtggatagcaatctgtgcggggcaatggacccgtctgacggaattggcgcgttaatcgaggaggaaaggacagccgtaaaattaaataccggattggccctgcactgccagcagttctgggctatgttcctcaagaaggcagcctactcctggagggaatggaagatggttgctgctcaggttctggtacctctcacttgcgtgactttggcactgctggcaatcaactattccagtgaactcttcgatgaccctatgctcagacttactctgggtgaatatgggagaactgtagtgcccttcagcgtaccgggaactagccagctgggccagcagttgtccgagcacttaaaggatgcgttgcaagcggaaggacaagagccccgtgaagtgctaggcgacttagaggaatttctaatattcagagcctccgtggaaggaggaggttttaatgagcgctgtctggtagcggcaagctttcgggacgtcggtgagcgcaccgtggttaacgcgttgtttaacaatcaagcataccacagccctgcgacagcccttgccgtggtggataacttgctgtttaaactcctgtgcggcccccatgcttctatcgtggtctcgaatttcccccagccaaggtcggccctccaagctgctaaggatcagtttaatgagggacgaaaaggcttcgacattgccctgaatctgcttttcgcaatggccttcctggctagcacattctctatcttagcagtctcagagcgtgcagtacaggccaagcatgtgcagttcgtaagtggggtgcatgtggcttctttctggctcagcgcgctgctctgggatctcattagcttcctgatcccttctctgcttctcctggtggtgtttaaagctttcgacgttcgggcattcacaagagatggccacatggccgacacccttttactgcttctgctctatggctgggcaattatcccactcatgtaccttatgaattttttttttcttggcgctgctactgcatacacccgtctgaccatcttcaatattttgtctggaatcgccacctttctgatggtgacaataatgaggatccctgctgtgaagctggaagagttgtccaaaactctcgatcacgtgtttctggtcttgccaaaccattgtttaggaatggcggtaagttcattttacgaaaattatgagacacggcgctattgtacctcgtccgaggtcgctgcccattattgtaagaagtacaacattcaataccaggagaatttctatgcatggagcgcccctggcgtcggaaggtttgtcgcttctatggctgctagtggctgtgcctacttaatactcttgttcctcatcgagactaacctccttcagcggcttcggggaattctctgtgccctccgcaggcgaaggactctaacggaactttatacccgcatgccagttctaccagaggaccaggacgtggctgatgaacggacacgtatcctggccccttcccccgattctctcctgcatactccactgataatcaaagagctgtcaaaggtatatgaacagagagtaccactacttgccgtcgaccggctgtccttggctgtgcagaagggtgagtgcttcggattgctcgggttcaatggggccggaaaaacgacgacgtttaaaatgctcacaggtgaggaaagcttaaccagcggggacgctttcgtcggcggtcaccggattagtagcgacgttggaaaagtgaggcagaggatcggctattgcccccaattcgacgcccttctggaccacatgaccggtagagagatgctggtcatgtatgcccgtctcagaggaatcccagagcgacacattggtgcctgcgtggaaaataccctgaggggtttgctgcttgagccgcatgcaaataagctggttcggacctatagcggagggaataagcgcaagctctctactggaattgctctaattggggagccagcagtgatattcctcgacgagccttccaccggcatggaccccgtggccagacggctgttgtgggatacagttgctcgtgcccgcgagtcaggcaaagccattatcatcacgagccattctatggaggagtgcgaggccctatgcacacggctagcaattatggtccagggtcagttcaagtgcctaggttcaccacagcaccttaaaagcaaatttggttccggatatagtttgcgtgccaaagttcagtctgagggacagcaggaggctctggaagagttcaaagccttcgtggacctcacttttcccggaagtgtcctcgaggatgagcaccagggaatggtacactaccacctaccaggtagagacctcagctgggccaaagtgtttggaattttggagaaggccaaggagaaatacggagtagacgattactctgtgtcccagatcagtctagaacaggtgtttctctctttcgctcacttacagccaccgaccgcagaggagggtcgctag

SEQ ID NO: 109159 - DNA, 5127 bp, synthetic construct
  misc_feature 1..5127: note = Description of Artificial Sequence: Synthetic coding sequence
  source 1..5127: mol_type = other DNA
acggctccaccaccctctccatcgcttccactgcaggatagggcagcgacatcggcccatctggcacttttcacactatcatttcagagtaccttcctgctgtttcccgctggctgctccgcctacctgaatctgctgcgcccaccgacctccctggcagccctcggcgtgcctttttccaaaaccatggctgtgttgcgccaacttgctctactgttatggaagaattacacgcttcagaagcgaaaggtgctggtcacagtgctggagctcttcttgccattgctttttagcggcatattgatatggctgagactcaagatccagagtgaaaacgtgcctaatgcaactatatatccagggcagtctatccaagagttgcccctgtttttcacatttcctcctcccggggacacgtgggaacttgcttatatcccctcacactctgatgcagctaagactgtaaccgagacagtacgacgagcgctcgttattaatatgcgcgtccggggtttccccagtgagaaagattttgaagactacatccggtatgacaattgctcaagtagtgtcctggctgctgttgttttcgagcatcccttcaaccacagcaaggagccgcttcccctggccgtcaaataccacctccgattctcctatacacgaagaaattacatgtggacacagacaggctccttctttttaaaagaaacagaggggtggcatacgaccagcctcttccccctgttccccaatcccggccccagagaacccacctcccccgacgggggcgaacccgggtacatcagggaaggattcctggccgtgcagcacgccgtggatcgggctatcatggagtatcatgcggatgcagccacccgacagttgttccagagactgacagttaccatcaagcggttcccctaccctcccttcatagctgatccattcctagtagccattcagtatcagctgcccttgctgttattgctctcattcacctatacagcgctgacaattgcaagagcagtcgtgcaggaaaaagagcggcgcctcaaggagtatatgcggatgatgggattatcctcgtggctgcattggagcgcctggttcttgctttttttcctgtttctgcttatagccgccagttttatgaccctgttattttgtgtgaaagtcaaacctaacgtggctgtgctttcccggagcgatccgtccctggtgctggcctttcttctgtgttttgcgatcagcaccatctcttttagtttcatggtgagtacatttttctctaagggaatggggatacaatggcgggacttgctgtcacccgttaacgttgatgatgacttttgtttcggtcaggttctcggaatgcttctgctagacagtgtgctgtatggcctcgttacatggtacatggaggccgtgttccctgggcagtttggtgttccacagccctggtattttttcattatgccttcctactggtgcggaaaaccgcgggccgttgcagggaaagaggaggaggactctgaccccgaaaaagccctcagaaatgagtattttgaagctgagcctgaggatctagtggccggtatcaaaatcaaacacttgagcaaagtgtttcgtgtcggaaacaaggaccgggcagctgtaagagacctgaacttgaacctgtacgagggtcaaattacggtgctcttgggtcataacggagcagggaaaacaacaactctctctatgctcactgggttatttccgcctacgtccggcagggcttatatcagcggttacgaaatatctcaggacatggttcagatcaggaagtcacttggtctgtgtcctcaacatgatatattgtttgacaatctgaccgtggcagagcatctgtatttctatgcacagctcaagggtctctctcgccaaaagtgccccgaagaggtcaaacaaatgttgcatatcataggattagaagacaagtggaactccaggagtaggtttctctctgggggcatgcgccggaagcttagtatcgggattgcactaattgccgggtccaaggtgttgattctcgacgagccgacatctggcatggacgcaataagtcggagggcgatttgggacctgctgcagagacagaagtccgatcgtaccatagtgctgaccacacatttcatggacgaggctgatcttttaggggatcggatcgccataatggcgaagggcgaactgcagtgttgcgggtccagtctttttctcaagcagaagtacggggccggctaccatatgactctggtgaaggaacctcactgcaacccagaggacattagccagctggtgcatcaccatgtgcccaatgccaccctggaaagttccgccggagccgaactgtcgtttatactgcctcgggagtcaacccatcgcttcgagggtctgtttgcaaagctcgaaaaaaaacagaaggaactgggtattgctagtttcggagcaagcattaccacaatggaagaagtgttcctgcgcgttggcaaactcgtggatagctccatggacattcaggctatccaattgcccgccctgcagtatcagcacgagaggcgagcatcagattgggccgtggattccaatctttgcggggctatggaccccagcgacggaataggagcactgatcgaggaagaacggacagccgtgaagctaaatacaggactggccctgcactgtcagcagttctgggcaatgttcctgaagaaagccgcctacagttggagagagtggaagatggtcgctgcccaagttctggtgcctcttacatgcgtgacattggctctcctcgctattaattacagctctgaacttttcgatgatcccatgcttaggctaacactgggagagtacgggcgtactgtagtaccatttagtgtgcctggcacctctcagctgggtcaacagctgagtgagcacttaaaagatgctctacaggcggaagggcaagagcctcgcgaggtgctcggggatcttgaggaattcctaatctttagggccagcgtggaaggcggcggatttaacgaaagatgcctggtggcggcctccttccgggacgtgggcgaacgaaccgttgtaaatgccttgttcaataatcaggcataccattctcccgccacagctctcgccgtggtggacaatttgctctttaagctcctctgtggcccacacgcctccattgtggtatccaacttcccacaacccagaagtgctctgcaggctgctaaggaccagtttaacgaaggccgtaaaggattcgatatcgctctgaatctgctcttcgccatggccttcctcgcatccacattctctatcctagccgtgtctgaacgggctgttcaggctaagcacgtgcagtttgtttcaggggtccatgtggccagtttctggctgtcagctctgctttgggatttgatcagcttcctaatacccagcttacttctgctcgtggtgtttaaagctttcgacgttcgggcattcaccagggacgggcatatggccgacacacttcttcttctgctactgtacggttgggccatcatccccctgatgtacctgatgaactttttttttctaggggccgcaacagcttacaccagactaactatcttcaatattctttccggaatcgccacgttcttaatggtcaccatcatgcgtatccctgctgtgaaactcgaagaactgagtaagaccctcgaccacgttttcctcgtcctgcctaatcattgtctaggaatggccgtgagcagtttctacgaaaactacgagaccagaaggtactgtacctcatcggaagttgctgcccactactgcaagaagtacaatatacagtaccaggaaaacttctacgcatggagcgctcccggcgtaggcagatttgtcgccagtatggcagcttccggatgcgcttacctgatcctactgtttttgattgagactaatctgctccagcgcctgagaggtatcctgtgcgcacttcggcggaggcgaaccctcaccgagttgtacacgagaatgcccgtcttaccagaggatcaggacgtggcagatgagcggacccggattttagccccttctcccgactccttattgcatacaccccttataatcaaagaactgtcaaaggtatatgagcagcgcgtcccgcttctcgctgtggatagactatctttggcggtgcaaaaaggggagtgtttcggactgcttgggttcaatggagcaggcaagactaccacatttaagatgctcaccggtgaagagtcactgacatcaggggacgccttcgttgggggccaccgcatttcatctgatgttggcaaggtgcgtcaacgaatcgggtattgtcctcagtttgacgccctgctggaccacatgactggccgcgagatgctggtgatgtacgcgcgcctgcgcggtatccctgagcggcacatcggcgcctgcgtggagaacacgctaagggggcttctgttagagccacacgctaataaattggtgcgtacttacagtggaggtaataagaggaaacttagcactggcatcgccctgattggagagccagctgtgatcttcctggacgaaccttcaacagggatggatcccgtcgcaaggcgcttattgtgggataccgtggcccgtgccagagagagcggaaaggctataatcatcacctcacactccatggaagagtgtgaagcgttgtgcacccgcttggccataatggtccaaggtcagttcaagtgcctcggctctccccagcatttaaagtccaagtttggtagcggttattctctgcgagccaaggtccagtccgaggggcagcaagaagcactggaggagttcaaagcattcgtggatttaacgttcccgggttcggtgctcgaagatgagcaccagggtatggttcattatcacctgcccggcagagacttaagttgggctaaagtgtttggcatactggaaaaggccaaggaaaagtacggggtggacgactattccgtgagtcagataagtctcgagcaggtgtttctcagttttgcccacctacaaccccccacggctgaggagggcagatag

SEQ ID NO: 109160 - DNA, 6822 bp, synthetic construct
  misc_feature 1..6822: note = Description of Artificial Sequence: Synthetic coding sequence
  source 1..6822: mol_type = other DNA
atgggctttgtacggcaaatccagcttttattgtggaagaactggaccctgcgaaagcggcagaagatccgctttgtggtcgaactcgtttggcccctgtccctgtttttggtgctgatttggctgaggaacgctaatcctttgtattcacaccatgagtgccatttcccgaacaaggccatgccctctgccggcatgttaccatggctgcaagggattttctgcaatgttaacaacccatgttttcaatctccaactccaggcgaatctcctggtatcgtgtccaactacaataacagcattttggctcgcgtgtatcgggatttccaggagctcctgatgaacgcccccgaatcacagcatctgggtcgaatctggacagagctgcacattctgagccagttcatggacaccttgcgaacgcacccagagcgcattgcaggacgcggaataaggatccgcgacatcctgaaagacgaggagacacttaccctgttccttattaagaacatcggtctctccgactcggtcgtttacttgcttattaacagccaggttaggcccgagcaattcgcacacggggtgccggatctggccctcaaggacatcgcctgctccgaggctttgctggaaagattcattattttcagtcagcgaagaggggctaaaacggttaggtatgccctttgctctctatcccagggcaccctccagtggatcgaggatactctgtacgctaatgtggatttctttaaactgttcagagtccttcccacgctgctggatagccggtcccagggtataaatttgcggtcttggggcggcattttaagtgacatgagtccccgaatccaggagttcatacatcgcccatctatgcaggatctgctgtgggttactaggccactcatgcagaatggagggccagagaccttcaccaagctcatgggaatcctcagtgaccttctgtgcggatacccagagggcgggggctcacgcgtcctttcattcaattggtatgaagataacaattataaggctttccttgggattgattctactaggaaggaccccatctattcttacgatcgccggaccactagcttctgcaatgccctaatccagtcactggagagtaaccccctgaccaaaattgcctggagggccgccaagccactcctgatgggcaagatcctgtatactcctgattcaccagcagcccgccggatcttaaaaaacgcgaactctacttttgaggagctcgagcacgtgcgtaagcttgtcaaagcttgggaagaagtaggcccgcaaatctggtacttcttcgataactctacccagatgaacatgatccgcgatactcttggcaacccgaccgtgaaagacttcctgaacaggcaacttggggaagaagggatcactgccgaggccattttgaactttttatataaggggcctcgtgaatcccaggcagacgacatggctaacttcgactggagagacatatttaacataaccgatcgaaccctgcgcttagtgaatcagtatctcgagtgcttggtacttgataaattcgagtcatacaatgatgaaacacaactcactcaaagggccctgtcactgttggaggaaaacatgttttgggcaggagttgtgtttccagacatgtacccatggacttcctccctcccaccacatgtcaaatacaaaatcagaatggacattgacgttgtggaaaaaacgaacaaaatcaaagatcgctactgggacagcgggccacgcgccgatcctgttgaagattttagatatatatggggagggtttgcctacctgcaggatatggtggaacagggtattactaggtcccaagtgcaggctgaagcccccgtggggatctatctgcagcagatgccttatccctgcttcgtggacgattcttttatgattatcctgaatcgatgtttccccatctttatggtcctagcctggatctacagtgtctctatgacggtaaaaagtatagtgttggaaaaggagttgaggctcaaggagaccctgaagaaccagggagtgtcaaacgccgtgatttggtgtacctggttcctcgatagtttctccatcatgagtatgagtattttcctcctgacaatcttcatcatgcacgggaggattttgcactactcagacccatttatactcttcctctttctcttagccttttccacagctacaatcatgctctgcttcctgctgtcaacatttttttcaaaagcatctctagcagccgcgtgttccggggtgatctactttaccttatacctacctcatattttatgctttgcatggcaagacaggatgactgccgaactaaaaaaagctgtgagcctcttgtctcccgtggcgttcggcttcggcaccgaatatttagtcaggtttgaggaacagggcctggggctgcagtggtcgaacataggcaattcccccactgagggcgatgaattttcttttctcctttccatgcaaatgatgctattagatgccgctgtatacggactgttggcttggtatcttgatcaggtgtttcccggagattatggcaccccgttaccttggtactttctcctgcaggagagctattggctcggtggagagggatgtagcacgagagaagaaagagccctcgaaaagacagagcccctcaccgaggaaaccgaagatcccgaacatcctgaaggcatacatgactcttttttcgaaagagaacacccgggctgggtgccaggcgtgtgcgtgaagaacttggtcaagatcttcgagccatgcggacggccagcagttgatagactgaacatcacattctacgaaaatcagatcactgcctttctgggtcataatggtgcagggaagacgaccacactgtcaatcttgactggccttctgccacctacgtccggcactgtgctggtgggggggagggacattgaaacttcattggacgcggttcgccaatctctcggcatgtgcccacagcacaatatcctcttccaccatctgaccgtggctgaacacatgctgttttacgcacagttgaaggggaagtcacaagaggaggcacagctcgaaatggaagccatgctggaagacacaggcctacaccacaaacgaaatgaggaagcccaggacctgagcggaggaatgcagaggaaactgagcgtggccattgcctttgtcggggacgcaaaggtggtgattctggacgagccgaccagcggcgtcgacccatattcacgccggtcgatctgggacctgctcctcaagtatcggagcggccgaaccatcatcatgtccactcatcatatggatgaagcagatctgctcggcgatcgcattgcaatcatcgcacagggcaggctctattgcagcgggacccctctgttcctgaagaactgcttcggcacaggtctgtacctgacactggtgcgaaagatgaagaatatccagtcccagcgtaagggatcggagggtacctgtagctgcagctccaagggtttttcaacaacatgccccgcccatgtggacgatttgactcccgaacaggttctggatggcgatgtgaatgagttgatggacgtggtgctgcatcacgtcccagaagccaagttggtcgaatgtattggccaggaactgatctttctgctgcccaacaagaatttcaagcaccgggcctacgcatcactctttcgagaactcgaggaaaccttggcggatctcggcctctcatccttcggaatcagtgacacccctcttgaagaaatctttttgaaggtgaccgaggattctgatagtggcccactcttcgcaggaggcgcccagcagaaacgcgagaatgtcaatcccaggcatccctgtctggggccccgggaaaaagcaggacagactccacaagacagtaacgtgtgttcaccaggggctccagctgcccaccccgagggccaacctcccccggaacccgagtgccctggaccacagctgaatactgggacgcagctcgtgctgcaacatgtgcaggccctgctggtgaagcggttccagcacactattaggtctcataaggatttcctcgcccagattgtcttgccagctacattcgtgtttctcgccctcatgctgtccatagtgatcccgcccttcggtgagtaccccgccctaacccttcatccttggatttatggtcagcagtacacatttttttcaatggacgaaccaggaagcgagcaattcactgtgctcgccgacgtccttctgaataagccgggtttcggcaatagatgtctgaaggaaggctggcttcccgaatatccatgcgggaactccacaccttggaaaaccccatcggtgtctccaaatattactcagctgtttcaaaagcagaaatggacccaagtgaaccccagcccctcatgtaggtgcagcacacgagagaaactgacgatgctaccagagtgtccagaaggtgccggcggactgcctccaccccagaggacccagagaagcacagagatcctgcaggacttaacagacagaaacatttcagactttctggtgaaaacttatccagcattaatccggagctctctgaaaagcaaattttgggttaatgagcagagatatggcggaatctctatagggggcaagctgcccgtcgtcccgattacgggggaagctctcgtgggattcttatctgatcttggtcggatcatgaatgtgagcggcggccctatcacacgagaagcaagcaaggaaatccctgattttttaaagcacttagaaaccgaggacaacattaaggtttggttcaataataaaggatggcacgctcttgtaagcttccttaacgtggcccataatgctattttgcgggcgagtcttccgaaagaccggtcacctgaggaatacgggatcacggtgatctcccaaccactcaatctgaccaaagaacaattatcagagataactgtccttacgaccagtgtggatgcagtggtggcaatctgtgtgatctttagcatgtcatttgttccggcatcgtttgtcctgtaccttatacaagagcgggtcaacaaatcgaaacacttgcaattcatctcaggtgtcagcccaaccacatactgggttacaaacttcctgtgggatatcatgaactacagtgtctccgctggcctggttgttggaatcttcatcggctttcagaaaaaggcttataccagccccgaaaacctcccggcgctggtggcgctactcctgctgtatggctgggcagtcatacccatgatgtacccggcgtcctttttgttcgatgttccaagcacagcatacgttgcactgtcctgtgctaacctctttatcggcattaacagttccgctatcacattcattttagagctttttgaaaataacagaactttgcttcgattcaacgcagtgctccgaaagctgctgattgtatttcctcatttttgtttaggaagagggttaatagatctagcactgagccaggcggttactgatgtgtatgcgcggtttggggaagagcactccgcgaacccatttcactgggatctcataggcaagaatctttttgccatggtggtagaaggcgtggtgtattttctgctgacccttctggtgcaacgccacttcttcttaagtcagtggattgctgaaccaaccaaggagcctattgtcgacgaggacgacgatgtggctgaggagcgacagagaattattacaggtggcaacaaaacagatatacttcgcttacacgaattaaccaagatctatcccggcaccagcagtccagccgttgaccggctgtgtgttggcgtgcgccctggcgaatgctttggactgctgggagtgaatggcgcaggcaaaacgaccacgttcaagatgctgactggagatactactgtgactagcggagatgccaccgttgcgggtaagtcaattctgacgaacatcagcgaagttcaccagaatatgggatactgtccccagtttgatgccatcgacgagctcctgactggacgagagcacctttatctctacgccaggctgcgaggcgtgccggcagaagaaattgagaaagtcgctaactggagtataaaaagccttggcctcaccgtttacgccgattgcctggcaggtacctactcaggcgggaacaaacggaagttgagcaccgccatcgcactaattggatgccctccgcttgtcctgctcgacgaacctacaaccgggatggatcctcaagcccggaggatgctctggaacgtcatcgtatctatcatccgggaaggccgcgcagtggtcttgacttcccactcaatggaagaatgcgaggccctctgtaccagattggctatcatggtgaagggggcatttaggtgtatgggcacaatccagcacttgaagtcgaaattcggtgacggctacatcgtgaccatgaaaattaagtctccaaaagatgatctgcttcccgatctgaaccccgtggaacagttctttcagggtaatttcccagggtccgtgcaacgcgaacgtcactacaatatgcttcagttccaggtcagttcttcctcactcgctcgcatttttcagttgctgctctcacacaaggactctcttctcattgaagagtactctgtgactcagactacactagaccaggtcttcgtcaacttcgccaagcagcagactgagagtcacgacctgccactacaccccagggcagcaggcgcgtctcgccaagcccaggactag

SEQ ID NO: 109161 - DNA, 2940 bp, synthetic construct
  misc_feature 1..2940: note = Description of Artificial Sequence: Synthetic coding sequence
  source 1..2940: mol_type = other DNA
atggggttcgttcgacaaatacagttgctcctgtggaaaaactggactctccgaaagcggcaaaagatccggtttgtggtagagctggtgtggcccctttcgttatttctagtgctgatctggctccggaatgcgaaccccttatactcacatcacgagtgccacttccccaacaaggctatgccatctgccggaatgcttccttggctgcaaggtattttctgtaatgtgaataacccatgctttcagagcccaacacccggcgagtcccctggtatagtgagcaactataacaattcaattctggccagggtttacagggatttccaagagttactgatgaacgcacctgaaagtcaacacttgggacgtatttggaccgagcttcatattctctcacagttcatggatacacttagaacccatcctgaacggattgcggggaggggaattcggattcgtgatattctgaaggacgaggagaccctgaccctgttcctaattaagaacatcgggctttcggactccgtcgtgtacctcttgatcaacagccaagtgaggcccgaacagtttgcacatggtgtcccggacttggcactgaaagacatcgcttgcagtgaggccttactagaacgctttattatcttctcccagaggcgaggagctaagaccgtgaggtatgccctgtgctcccttagtcagggtaccctgcagtggattgaagacacattgtacgctaatgtcgacttctttaaactgtttcgcgtattacccaccttactcgactcacggtctcaaggcatcaatctccgctcgtggggaggcatcctttcagatatgagcccacggatccaggaatttatccataggccttctatgcaagatctgctctgggtaactcgccctttaatgcagaacggcgggcccgagactttcacaaaactgatgggaatcttgtcagacctcctatgcggctatccagagggaggtgggtcccgagtattgagtttcaactggtatgaggacaacaactataaggccttcttggggattgattccacccgaaaagatccaatttattcctatgacagacgcaccacatctttctgtaatgccctcattcagtccctggaaagtaacccccttacgaagatcgcttggcgagccgcaaaacctttactgatgggcaaaatcctatataccccagatagtcccgccgctagacgcatcctgaaaaatgccaattctactttcgaagagctggagcacgtgaggaagctggtcaaagcgtgggaggaggtgggcccacagatctggtacttctttgataactctacccaaatgaatatgatccgcgatacactgggcaacccgacggtaaaggattttctcaaccgccagctgggcgaggaagggattaccgctgaagcaatcctgaattttctgtataaaggcccccgtgaaagtcaggccgatgacatggccaactttgactggagagacatcttcaatattactgatcgcacgctgcggttagtgaaccagtacctagaatgcctggtgctagataaattcgagagctacaatgacgaaacacagctgacacagagagctttatctctcctggaggagaatatgttttgggctggggtagtttttccagacatgtacccgtggacctcttcactgccccctcacgtgaaatacaagatccgcatggacatcgacgtggtggagaagacaaacaagatcaaagacagatattgggactccggtccaagagcagacccggtagaagactttaggtacatctgggggggcttcgcgtacctccaggacatggtggaacaggggatcacccgtagtcaggtccaggcagaagcccccgtgggaatatatctgcagcagatgccatacccctgcttcgtcgacgattcattcatgattatcctaaatcgttgttttccaattttcatggtcctggcgtggatttactctgtgagcatgaccgtcaagagtattgtgcttgaaaaggagctccggctcaaagaaacattaaaaaatcagggagtcagcaatgctgtcatctggtgcacctggtttctggattctttctctataatgagcatgagtatctttcttcttaccatattcatcatgagcctcctttctccggtggcattcggctttggaacagagtacctcgtgcggttcgaggagcagggccttggcctccagtggtccaatatcgggaatagtcccaccgaaggcgacgagttctcattcctcctgagcatgcagatgatgttactcgatgcagcagtgtatggcctgcttgcctggtatctggaccaggtctttcccggggactatgggacgcccttaccctggtactttctgctgcaggagtcttactggttgggaggggagggttgttctacacgcgaagagagggcccttgaaaaaacggaacctctgacggaagagactgaggatcctgagcaccctgagggaattcacgactccttcttcgagagggagcatccaggctgggtgccaggcgtatgcgtaaagaatttggttaagatcttcgaaccttgtggcagacccgcagtcgaccgtctaaacatcacattctacgaaaatcagataactgccttccttggtcacaacggtgcgggcaaaaccacgactttcagcgctggagcccctctatccagcaagggaccggaacggcatttgcttcgtggagaacatggacccccatggttccctaaagagcagcagacacggactagccagggagctgctaatccacgcgacaccgtgtttaagagctttggggaaccccaagaaggcacaacggcttgcacgccttgtgatggaatgttctcacgcgcggttcagtgtgaatggaatgtgggccctgtgcccttctag

SEQ ID NO: 109162 - DNA, 1179 bp, synthetic construct
  misc_feature 1..1179: note = Description of Artificial Sequence: Synthetic coding sequence
  source 1..1179: mol_type = other DNA
atggtcgtggagggcgttgtttacttcctcctgacactcctggtccagcggcatttcttcttatctcagtggatcgccgagccgacaaaggaacctatcgtagatgaggacgacgacgtggctgaagaacgtcagagaatcataacaggggggaacaagacagatatcttacgcctccatgagttaaccaagatatatcccggcacttcttcacccgctgttgacaggctctgcgttggagtgcgcccaggagagtgttttggcctgcttggagtgaatggggctgggaagaccacaacgtttaaaatgctgacaggcgacaccacggtcaccagcggcgacgccactgtggccggcaaaagtatactaacgaacatcagcgaggtgcatcagaacatggggtactgtccccagtttgatgcaatcgacgagctgctcaccggacgggagcacctatatctatacgcacgattgcggggcgttcccgcagaggagatcgagaaggtggcaaattggtctataaaaagcctcgggctgaccgtctatgccgattgcttggccggaacttatagtggaggcaacaagagaaaactctcaacagcaattgctcttattggctgtccccctctggtgctgttggacgagcccaccactggcatggatccgcaggcaagacgcatgctgtggaacgttatcgtgtccattatacgagaagggcgggccgtggtcttgacaagtcattccatggaggaatgtgaagcgctctgtacacggttagctattatggtcaagggcgctttcagatgcatggggacaattcagcatctaaagagcaagttcggagacggatacatcgttacaatgaaaattaagagtcctaaggatgacttgctgcccgatctgaacccagtggagcagtttttccagggtaatttccccggaagcgtacagcgcgagcggcattacaacatgctgcagttccaggtgtctagtagctccctagcccggatatttcaactgctcctcagtcataaagactcactgttgatcgaggagtactccgtgacacagactaccttggatcaagtgtttgtgaacttcgctaaacagcagaccgagtcccatgacttgcctttacatcctcgagctgctggtgcctcacggcaggcccaggactag

SEQ ID NO: 109163 - DNA, 1632 bp, synthetic construct
  misc_feature 1..1632: note = Description of Artificial Sequence: Synthetic coding sequence
  source 1..1632: mol_type = other DNA
atgatgatgaattatagtgtgtccgctggactcgtcgtcgggatttttattgggttccagaaaaaggcttatacaagcccagaaaaccttccagcgctcgtggctctgctgttactgtacggatgggccgtcatcccaatgatgtaccccgcttcttttctgttcgatgtcccatcaactgcatatgtggctctatcttgtgctaatttgttcatagggattaactctagcgcaatcacgttcatattggaactgttcgaaaacaacagaactttattgcggttcaatgcggtgctacgaaagttgttgatagtgttcccccatttctgcctcggtcgcggcctgatagacctcgccctctcccaggcagtgaccgatgtttatgcgcgattcggcgaggagcattcggctaatccgttccactgggatctaataggaaaaaatctattcgcaatggtggtggagggagtggtgtatttcctcctgaccttactggtccaaaggcatttctttctctcccagtggatagccgagcccacgaaggagcccatcgtggacgaggacgatgatgtggccgaggagcgacagcgcatcatcaccggaggcaacaagaccgacattctccggctgcatgagctgacaaagatctaccctggcacgagcagtccggctgtcgatcggttatgcgtgggtgtccgccctggagagtgttttggcctactgggcgtgaatggcgccggcaagaccacaactttcaagatgctcaccggtgacacaacagtcacctctggggatgccactgtcgccgggaagtccatcctgacaaacatttccgaggtacaccaaaacatggggtactgtccccaatttgacgctattgacgaactgctgacaggtcgcgaacacctctatttatacgctcgcctgcgaggcgtacccgctgaggaaattgagaaggttgccaactggtctatcaagtctctcggtttaacggtttacgccgattgcttggccggcacctacagtggaggcaataaaaggaagttatccaccgcgatcgcactaattggatgcccacctctggtcctcctggatgaaccaacaactggaatggatccccaggcgcggcggatgctgtggaatgtgatcgtctctattatcagagagggtagggccgtagtcctcacgtcacacagtatggaggaatgcgaggccctgtgtaccagactcgcaatcatggtcaaaggcgcttttcgatgtatggggactatccagcaccttaagagcaaattcggagacggttatatagtgacaatgaagattaagtcacccaaggacgaccttctgcccgatcttaacccagtggaacaattcttccagggtaattttcctggatctgtgcagcgagagaggcattataacatgttacagttccaagtcagtagctcctctctcgcgcggatattccagttacttctgtctcacaaggacagtttgttgattgaggagtatagtgtgactcagactaccctggaccaagtgttcgtaaactttgccaagcagcagaccgaaagtcacgacctcccattgcaccccagggctgccggtgcaagcagacaggctcaggattag

SEQ ID NO: 109164 - DNA, 3198 bp, synthetic construct
  misc_feature 1..3198: note = Description of Artificial Sequence: Synthetic coding sequence
  source 1..3198: mol_type = other DNA
atggacgtcgtgcttcatcacgtgcctgaagcaaagctggtggagtgtattggccaagaactcatctttttactgccaaataagaatttcaaacacagggcctacgcgtccttattcagggagctagaagaaaccctagcagatctgggcctgtcgagcttcggcatctccgacacaccacttgaggaaatattcctgaaagtgacagaggacagcgatagtggtccactgttcgccggcggcgcgcagcagaaaagggagaatgttaacccacgacatccatgcctgggtccaagggaaaaggccggccagacgcctcaggatagcaacgtttgctcacctggggcacctgctgctcatcctgagggccagccacccccagagccggagtgtcccggcccccagcttaacacaggtacgcagctggttctgcagcatgtccaggcattacttgtgaagcggttccagcacacaatccggtcacacaaagactttttagcacagatagtattgccagcaacctttgtgtttctggcactcatgctgagtatcgtcatacctccctttggagagtaccctgcactgaccctacatccttggatttatggccagcaatacacctttttctccatggatgagccggggtctgaacagtttacagtgttagccgacgtgctgctgaataaaccaggctttgggaaccgctgcttgaaagagggttggttgcctgaatatccatgcggtaactcgacgccttggaaaacaccatccgtttcacccaacatcacccagctgtttcagaagcaaaagtggacgcaagtcaacccctccccttcttgtcggtgctccaccagggagaagctgacaatgttgcctgaatgccctgagggcgctggaggcctgcccccccctcagcgcacccagcgcagcactgaaatactgcaggaccttaccgaccgtaacatttcagactttctggtgaagacctaccctgcgctcatcagatcgagcttaaagagcaaattttgggtcaatgaacagcggtacggtggaatcagtatcggcggtaagctgcccgtggtgccaattaccggagaggcccttgttggattcttaagcgacctgggtcggattatgaatgtatccggaggaccaattacccgggaggcctcgaaagagattccagactttctaaagcacttggagaccgaggacaacataaaagtctggtttaacaacaagggttggcacgctctggtgtcttttttaaatgtcgcacacaatgctatcttgcgcgcttctctccccaaagaccgcagtccggaggaatacggtataaccgtcataagccaaccgctgaatctgacgaaagagcagttgtcggaaattaccgtgctaacgacctccgtcgatgctgtcgtggccatttgtgtgattttcagcatgagttttgtccccgcaagctttgtgctttacctaatacaggagagagttaataagagcaagcaccttcagtttatttccggtgtaagtccaacgacgtactgggtgacaaatttcctgtgggacatcatgaactattccgtgtcggccggtctagtggtgggaattttcatcggctttcaaaaaaaagcatacaccagtcccgaaaatttgcctgctctggtggcattgctcttattatatgggtgggccgtgatacccatgatgtatccggcctcttttctgttcgacgtgccctccaccgcatacgtggccctgagctgcgccaacctgttcataggtatcaactcttccgctatcactttcattctggaactgttcgagaataaccgcacattgctcaggttcaatgcagtcctaagaaaattgctaatcgtgttcccacacttctgcctagggaggggactgatcgacctggccctctcacaggccgtcaccgacgtgtacgccaggttcggcgaagagcattctgcaaatccctttcactgggacctgatagggaagaaccttttcgccatggtcgtggaaggagttgtgtacttcctgttaaccctcctggtccaacggcactttttcctgtcccagtggatagccgaacccacaaaggagcctatcgttgatgaagatgacgacgtggccgaagagcgtcagaggatcatcactggtgggaataagacagacatcttacgtttgcacgaattgactaagatatacccagggaccagttcccctgccgtcgacaggctttgtgttggagtaagacccggagagtgctttggactcctgggtgtgaacggtgctggtaaaaccacaactttcaagatgctcacaggagacactacagtgacgtccggtgacgccaccgtcgccggtaaatccattcttactaacatctcagaggtccatcagaatatgggctactgtccacagttcgacgcaatagacgagttgctgacaggacgggagcatctgtatttgtacgctagattgaggggtgtgccggcagaggagattgagaaggtggcgaactggagcatcaaaagcttgggcctgactgtgtacgccgattgcctcgccggaacttattctggggggaataagagaaagcttagcactgccattgcgcttatcggctgcccacccctcgtcttgttagatgaacctaccaccggcatggatcctcaagcaagaagaatgctttggaatgtgatcgtgagcatcatcagggaaggcagagccgtcgtcctgactagccatagcatggaggagtgcgaggcactgtgtactaggcttgctatcatggtcaaaggcgcctttcggtgcatgggcacaatccagcatctgaagtcaaagttcggggacggatacatcgttaccatgaagattaagtctcccaaagacgacctcctgcctgatttgaaccctgtggaacagtttttccagggcaattttccaggaagcgttcagagggaaagacattataacatgctgcagttccaggtgagcagcagctccctggctcggatctttcaactgttgctgagccacaaggattccttgcttatcgaagaatattccgtgactcagacgacccttgatcaggtcttcgtgaattttgccaagcagcagaccgaatcacacgacttacccctgcatccccgcgccgccggcgctagcaggcaggcccaagattag

SEQ ID NO: 109165 - DNA, 4929 bp, synthetic construct
  misc_feature 1..4929: note = Description of Artificial Sequence: Synthetic coding sequence
  source 1..4929: mol_type = other DNA
atgtctacagccattagggaagtgggggtctggagacagacccggaccctactgctcaagaactatctgataaaatgcaggaccaaaaagtcgtctgtccaggaaattttgtttcctctcttctttcttttttggctgatattgatttccatgatgcacccaaacaagaagtatgaagaagtgcccaacatcgagctgaatccaatggacaaatttacgttgtccaacctgatactgggatataccccagtgaccaatatcacctcttccataatgcagaaagtctcaaccgaccacttaccggacgtgattataacagaagaatacaccaacgagaaagagatgctgacctccagcttgtccaagccttccaatttcgtcggtgtggtctttaaggactcaatgtcatacgaacttaggttttttcccgacatgattcccgtgtcatcaatctacatggattctagggcgggctgttctaagtcttgcgaggccgcacagtactggagctccgggttcactgtgttacaagccagcatcgacgcagctataatacaactcaaaacaaatgtcagcttgtggaaagaactggagtccacaaaagcggtgataatgggagagacagccgttgttgaaatagacactttccccagaggcgtgatcctgatttatctggtcatagctttctctccattcggttatttccttgccatccacattgtagcggaaaaggagaagaaaatcaaagagtttctcaagatcatgggcttacacgacacggcattctggctgagttgggtgctcctgtacaccagcctgatcttcctaatgtccttactaatggctgttatagctaccgcttcgctgctgtttccacaaagttcatcgatcgtgattttcttgttatttttcctatacgggctgtcgtccgtgttttttgccctgatgctgactcccctgttcaaaaaaagcaaacatgtgggcatcgtggagttttttgtaacagtggcattcggcttcattggcctgatgatcattctcatcgaatcctttccaaagtcgctggtctggttatttagccctttttgtcactgcacatttgtgattggcatcgctcaggtcatgcatctggaggactttaatgagggagcaagtttttctaatctaactgccggcccataccctttgatcatcaccattattatgctgactctgaacagtatcttctatgttctgctggctgtgtatcttgaccaggtcattccaggtgagttcgggcttcggaggtcatcattgtactttcttaagccctcttactggagtaagtctaaacgtaactatgaagagctaagtgaaggtaatgttaatggaaacatttctttttccgaaattatagaacccgtttcctcagaatttgtcgggaaggaggctattcgcatatctggcatccagaagacttacaggaagaaaggtgaaaacgtggaggcattgcggaatctctccttcgatatctacgaagggcagatcactgcactactgggacatagtggcaccggcaaatcaacattgatgaatatcttgtgtggcttgtgtccaccctcggatgggtttgcatcaatatacggtcatcgagtctcggagatcgacgagatgttcgaggcccggaaaatgataggtatatgtccacagctcgatatccatttcgatgtgctgacagttgaggagaatctcagtattctggctagtataaagggcatccccgcgaataacatcattcaggaggtccagaaagtgctgcttgacctagatatgcagactattaaggataaccaggccaaaaaactttctggaggtcagaaacgcaagcttagtctcggcatagcggtgttggggaacccaaagatcctccttctagacgaacctacagctgggatggatccttgttcgaggcacatcgtgtggaatttgctcaaatatcgcaaagctaaccgtgtgaccgtgtttagtacacacttcatggatgaggccgacattctggctgaccggaaagccgtgattagccagggcatgctgaaatgcgtgggaagtagcatgttcctgaagtccaaatggggcatcggttacaggctttccatgtacattgacaagtactgtgctacggagagtctgtcatctctggtcaagcagcacatccccggggccaccctgctgcagcagaacgatcagcagttagtgtactccctccccttcaaggatatggataaattttcaggactgttctcggcccttgactcacattcaaatcttggtgtgatttcatatggcgtgagtatgactacactcgaggatgttttcctcaaactggaggtggaggccgaaatcgatcaggccgactactcagtatttactcaacagccacttgaggaggagatggattccaaatccttcgatgagatggagcagagtcttttaatactgagcgaaactaaggcagctctggtgagcaccatgtctctgtggaagcagcagatgtacactatcgccaagttccacttcttcactctgaagagggaatccaagtctgtgcgatccgtgttgctgttgctgctgattttctttactgtgcaaatatttatgtttcttgtccatcactcatttaaaaacgctgtggtcccaattaagctggtgcccgacctttatttccttaagccaggcgataaaccccacaagtataaaactagcctgctgctgcagaattccgcggattccgatataagtgacttgatatccttttttacatctcagaatatcatggttaccatgattaacgacagcgattatgtttcggtcgcaccccactcggcggcgctgaacgtgatgcactctgagaaggattacgtttttgcagcagtctttaacagcacgatggtctactcccttccaatcttagttaatattatctcaaactattacctctatcacctcaatgttaccgaaaccatacaaatatggtctaccccgttcttccaggaaataaccgacattgttttcaagatcgagctatactttcaggcagccttactggggattattgtgaccgctatgccgccctatttcgctatggagaatgctgaaaaccataaaataaaggcctatacgcagctgaaactgagcgggctcctaccctccgcctactggatcggccaggccgtggtcgatattcctctcttcttcatcatcctgatactaatgctgggcagcctgcttgcctttcactatggtctctacttctatacggtgaagtttcttgccgtggtcttctgcctgatcggatatgtccctagcgttatcctctttacgtacatcgccagtttcacgttcaaaaaaatcctgaataccaaagagttttggagttttatctatagtgtagccgctctggcctgcattgcaataaccgagatcactttttttatgggctacaccattgccactattctgcactacgctttctgtatcatcattcccatatatcccctgcttggatgtttaattagcttcatcaagatttcctggaaaaacgtccgaaaaaatgtggatacctataacccctgggaccgtctctcagttgctgtgatatcgccttacctgcagtgtgtgctgtggatcttcttactccagtactatgagaaaaagtatggggggaggagcattcgcaaggatcccttcttcagaaatctgtccaccaagtcaaagaataggaagctccccgaaccccccgataatgaggatgaggacgaagatgtcaaagcagagaggttgaaagtcaaggaactcatggggtgtcagtgttgtgaagagaagccctccatcatggtctctaatcttcacaaggagtatgacgacaaaaaggacttcctgttgagtcggaaagtgaagaaggtggccaccaagtacattagcttttgtgttaaaaaaggtgaaatcctgggtctactgggacccaacggcgccgggaagagtactataataaatattctggtcggcgatattgagcccacctccgggcaagtcttcttgggagattactcatctgagacatccgaagacgacgacagccttaaatgcatgggctactgtccccaaatcaatcctttatggccggataccactctgcaggaacattttgaaatttacggcgccgtgaaaggcatgtccgcatctgatatgaaagaggttatttctagaataacccatgccctcgatttaaaagagcacctacaaaaaaccgtgaagaagttgcctgcaggcattaagagaaagctgtgcttcgcgctgtctatgctggggaatcctcagattacccttctggacgagccgtctactgggatggatcccaaagcaaaacagcatatgtggagggccatccgaactgctttcaaaaaccgcaagagagccgcaatactcaccactcactatatggaagaggctgaagctgtgtgtgaccgggtcgccataatggtgagcggccagctgaggtgtatcggtacagtacagcatctcaagtctaaattcggaaagggctattttctggagattaagctaaaggattggattgaaaatctggaggtggataggcttcaacgggagatccagtacatattccctaacgcaagtcggcaggaatccttctccagcatcttggcatacaagattcccaaggaagatgtgcagtctctatctcagtcgttctttaaactcgaagaggccaagcatgctttcgctatcgaggaatactcattctcccaggctaccctggaacaggttttcgtcgagctgacaaaagagcaggaggaggaggataacagttgcgggaccctgaatagtaccctgtggtgggagaggacacaagaagaccgcgtcgtattctag

SEQ ID NO: 109166 - DNA, 4932 bp, synthetic construct
  misc_feature 1..4932: note = Description of Artificial Sequence: Synthetic coding sequence
  source 1..4932: mol_type = other DNA
atgtctaccgccattcgggaagttggagtttggagacaaacgcgaactctgttgctgaaaaattacttgattaagtgcagaacaaagaagtcttccgttcaggagattctgttcccattatttttcttgttttggctcatcttgatctccatgatgcatcccaacaaaaaatacgaggaggtgcccaatattgaactgaatccaatggacaagtttaccttgtctaatctgatacttgggtacacgcccgttactaatatcaccagcagcatcatgcaaaaagtgagcactgatcacttgcccgacgtgatcattacggaggagtatacaaatgagaaagaaatgctcacatcaagcctgagtaaacctagcaattttgtgggagtggtgtttaaggacagtatgagctacgagttgcgattttttcccgacatgattcctgtgtcatctatctacatggactctagagcaggatgttctaaaagttgcgaagctgcccagtactggagttccgggttcaccgtgctgcaggcgtcgatcgatgctgccatcattcaattgaaaactaacgtatctctttggaaagaactggagagtactaaggcagtgattatgggtgagacagctgtcgtggagatcgatacttttccacgaggtgtaattctgatttacctcgtgattgcctttagccccttcggatacttcctggctatacatatcgtggcggagaaggaaaaaaaaatcaaagagttcctcaaaatcatgggactgcacgacactgcattttggttgtcctgggtcctgctgtatacaagtctgatttttctcatgagtctcctcatggccgtcatagcaacagccagcctgctcttcccccaaagttcctcaatcgtgatcttcttgctgttctttttgtacggtttaagtagcgtgttcttcgctctgatgctcacaccgctattcaaaaagagcaagcacgttggcatcgttgaattcttcgtaaccgttgcttttggctttatcggactgatgattatcctgatcgaatcgtttcctaagtccttggtgtggttgttttcaccattttgccactgtacatttgtcatcggcatcgcccaggttatgcacctggaagacttcaatgagggcgctagtttctcaaatctgaccgcagggccgtaccccctgatcatcactattatcatgctgacgctgaattctattttctacgttcttttagctgtgtacttggatcaggtcatacccggcgagttcggccttagaagatcaagtctctacttcctcaaaccctcttactggtccaagtctaaacggaactacgaggagcttagcgaggggaatgtaaacggcaacatcagtttttcagaaattatagaacccgtttctagtgagtttgtcgggaaagaggctatccggattagtggcatacagaaaacttaccggaaaaagggagagaacgtggaggccttaagaaacttatcattcgacatctatgaggggcagattactgcgctcttggggcactctggcaccggtaagagcaccttaatgaatatactgtgtggactctgccctcctagcgacggctttgcaagcatctatggtcaccgagtgtctgagatcgatgaaatgttcgaagcccggaaaatgatcggcatatgcccacaactggatatccacttcgacgtgctgaccgtggaagaaaatctatcaattcttgcctctatcaaaggcatccccgcaaataacatcattcaggaagttcagaaggtgctgctggatctggatatgcagaccataaaagataaccaagccaagaaattgagcggcggacagaagaggaagctatctctgggtattgccgtgctcggtaaccctaaaatcctgctgctggacgagcctaccgctgggatggacccttgttctaggcatatcgtgtggaatctgctgaaatacagaaaggcaaaccgggtgaccgtcttcagcacacacttcatggacgaggctgacatccttgcggaccgcaaggctgtgatatcccaagggatgcttaaatgcgtcggcagcagcatgtttctcaagagcaaatggggtattggctatcggttatcaatgtacatcgacaagtattgcgccacagagtctctgagcagtctggtgaagcagcacatccctggggctaccctcctacagcagaatgaccaacagttggtctattctttgcccttcaaggatatggacaaattttcgggtctattctcagctctggacagccactcaaaccttggcgtaatatcctatggggtgagtatgaccactctcgaagacgtatttctgaaactggaggttgaagccgaaatcgatcaggccgattactccgtgtttacacagcagcctcttgaggaggaaatggactcaaagtcatttgacgaaatggaacagtcattactcattctctctgagaccaaagcagccctcgttagcactatgtcattgtggaagcaacagatgtacacaatagcgaagttccattttttcacgctcaaaagagagtcaaaatctgtccgcagtgtgctgctgctgctgctgatattcttcaccgtgcagatctttatgtttctggttcatcactcctttaaaaacgccgtcgtgcctattaagctagtgccagacctgtactttctgaagccgggtgataaaccccacaaatacaagacatcactgctgctgcagaattctgccgccgacagcgatattagcgacctgatcagcttctttacatcgcagaatattatggtaacaatgatcaacgattccgattacgtgagtgtggctcctcacagcgcggcgttgaacgtcatgcatagcgagaaagactacgttttcgcagcggttttcaacagcacaatggtgtactccctgcccattctcgtgaatattattagcaattattacctatatcacctgaacgtcacagagaccattcaaatctggagcactcccttttttcaagaaattacagacattgtgtttaagatagaactttacttccaggccgccctgttaggtataatagttacagccatgcccccctatttcgctatggagaatgcagagaaccataagattaaagcttatacccaactgaagctctcgggcctcctgcccagcgcttactggattggtcaggccgtggtcgacatccccctcttctttatcattctgattctaatgttaggcagtcttttggccttccactacgggctgtacttctacacggtgaaattcctagccgtggtgttttgcctgatcggctatgtgccatcagtcatcctgtttacgtatatcgcgtctttcactttcaagaagatcttgaacaccaaagagttctggtctttcatatattccgtcgccgcattggcctgcatcgctatcacggagatcacattctttatgggctatactatcgcaaccatcttacattacgccttttgtattatcataccaatctaccctctgctgggctgtttgatctcattcatcaagatcagttggaagaacgtaaggaaaaatgtagatacatacaacccttgggatcggctcagcgtagctgtcatttccccatatctacagtgtgtcctgtggatttttctcctacaatattatgaaaaaaagtacggaggaagatctattaggaaagaccccttcttccgcaacctgtccacaaagagcaagaatcgcaaactgcccgagccgcctgataatgaagatgaggatgaagatgtaaaagcagagcgactcaaagtgaaggaactcatgggctgtcagtgttgtgaagagaagccttcaatcatggtgtctaatctgcataaagaatacgacgacaagaaagactttctcctgagccgcaaagtcaagaaggtagctaccaaatatatcagtttctgtgttaaaaaaggagaaattctgggtttgcttggtccaaatggggctggcaaatccacaatcattaatatcctggttggcgatatagagccaacctcagggcaagtctttctgggcgactactcctccgagacgagcgaggatgacgattctcttaagtgcatgggatattgtccccagatcaacccgttgtggcctgatactaccctccaagagcacttcgagatttacggggcagtcaaaggcatgtccgcctcagacatgaaggaggtgatctcaagaattacccacgcattggaccttaaggaacatctccaaaagacagtcaagaagctgccagcagggatcaagcggaagctctgctttgccttatctatgctaggaaatccacagatcaccctactggatgagccgtccactgggatggatccgaaggctaagcagcatatgtggcgcgccatccggaccgctttcaagaacagaaagcgggcggctatcctgactactcactacatggaagaggcggaagccgtttgtgaccgcgtggccattatggtgtccgggcaattacgttgtataggaacagtccaacatctgaagtccaaatttgggaaaggctattttctggaaatcaaactgaaagactggatcgagaatctggaggtcgacaggctgcaaagggagatccaatacatctttcctaacgcatctagacaggaaagcttttcttccattctagcatacaaaattccgaaagaggatgttcagtctctgtctcaaagctttttcaagttggaggaggcgaagcacgcgttcgctattgaggagtacagtttttcccaggccacccttgaacaggtgtttgtagagctgacgaaggagcaggaggaggaagataactcatgcggcacgctgaactcaaccctgtggtgggaaaggacccaggaggaccgagttgtcttttag

SEQ ID NO: 109167 - DNA, 4854 bp, synthetic construct
  misc_feature 1..4854: note = Description of Artificial Sequence: Synthetic coding sequence
  source 1..4854: mol_type = other DNA
atgaatatgaaacaaaagagtgtataccaacagacaaaagcgctgctttgcaagaactttttaaaaaaatggagaatgaagagagagagcctgttggagtggggattatccatcctgcttggtctttgcatcgctctgtttagctcctccatgcggaacgtacagttcccagggatggcgccacaaaatctggggagggttgacaaatttaattcttcatcgctgatggtcgtttatacacccatctctaacctcactcagcagatcatgaacaaaaccgctctggcacccttgctgaagggtacgtctgttataggcgctcccaacaagacccatatggacgagatccttctggagaatctcccgtatgccatgggaattatcttcaacgagaccttcagctataagctgattttcttccagggatacaattctcctctgtggaaggaagacttcagcgcacattgctgggatggttacggggaattttcttgcacactgacaaaatactggaatagggggttcgtggcgctacagactgctataaacaccgcaatcatcgagataacgaccaatcaccccgttatggaggagctcatgtccgtaacggccatcactatgaaaacgctgccttttatcaccaaaaatctgttacacaacgaaatgttcatcctgttttttctgcttcacttttcgcccctggtatattttattagccttaacgtgaccaaagaacggaaaaagtctaagaaccttatgaagatgatgggccttcaggacagcgcattttggctgagctgggggcttatctacgccggattcatcttcattataagtatctttgtcacgatcatcattacctttacccaaattattgtaatgacagggttcatggttatatttatcttgttcttcctctatggcttatccctagtggctctagtgttcttgatgtcagtcttactgaagaaagctgtccttaccaatctcgtggtctttctactgacactgttttgggggtgcctggggtttacggtgttttacgagcagttgccatcttccctagaatggatcctcaacatctgttctccctttgccttcactactggcatgatccaaattataaagctcgactataatctcaatggggtgattttccccgacccgtcaggagactcttacaccatgattgcgacattcagcatgctcctgctggatgggctgatctatctgctgctcgcgctctactttgacaagatccttccatacggggacgaacgacactattcgcctctgttctttctgaacagctcctcgtgcttccaacaccaaaggacaaacgcaaaggtgatcgagaaagaaattgatgctgagcacccctccgacgattactttgaaccagtggccccagagttccagggcaaggaagctatcaggattagaaacgtgaaaaaagaatacaagggaaagtccggtaaggtggaggctctaaagggactgttatttgatatatacgagggccagattactgccatcttgggccactccggtgctggcaaatcttccctcctgaacattctcaacggcctctctgtgcctaccgagggtagcgttaccatatacaacaaaaacctcagcgagatgcaagaccttgaagaaatccgcaagatcaccggagtttgtccccaattcaacgtccagtttgacatattgacagttaaagagaacctgagcttgtttgccaagataaaaggcatccacctgaaggaggttgagcaggaagtccagaggatattgctggagctagacatgcaaaatatacaggacaatctagccaaacacctgtccgagggccaaaaacggaaactaacattcggtatcaccatcctgggcgatccccagatcctccttctcgatgaaccaactacaggcctggaccccttttcacgtgatcaggtctggtctttgttgagggagaggcgtgcggaccatgtaattttattttcaacccagagcatggacgaagctgacattttagccgacagaaaggtcataatgtccaacggcagacttaagtgtgctggatcttccatgttcctaaagaggaggtggggccttgggtatcacctgtcccttcaccggaatgagatttgcaatcccgaacagatcacttccttcatcacacaccatatccccgatgccaagctgaagaccgagaacaaggagaagctggtgtacacactgcccctcgagcgcacaaacaccttcccggatttattctcggatcttgacaagtgtagtgaccagggagttacaggttacgacatcagtatgagtactctaaacgaggtgttcatgaagctcgagggccagtctactatcgaacaggattttgagcaagtcgagatgataagggattccgaatccctcaacgaaatggagctggctcactccagcttctccgaaatgcaaactgcggtttcagatatggggctgtggagaatgcaggtctttgcaatggcccgcctgcgattcttgaaattgaagcgccagacgaaagtcctgttgacactgctccttgtgttcggcattgccatcttccctctcatagttgagaacattatgtacgctatgctgaacgagaaaatagactgggaatttaaaaatgaactatactttctgagtcccggacagttaccccaggagccacgtaccagcctgctgattatcaacaacactgagtccaacatcgaggatttcatcaaaagtctgaaacaccaaaatattctgcttgaggtcgatgactttgagaatcggaacgggaccgacggattatcctataacggggcaattattgtgtccggcaaacagaaagattatcgattcagtgtggtctgtaatacgaaacgtcttcactgctttcctatcctgatgaacattatttctaacgggcttctgcagatgtttaaccacacacagcacataagaattgagtcatcaccctttcctctgagtcatattggtctgtggacaggtcttcctgacggttcttttttcttgtttctggtcttgtgcagtattagtccctacattaccatgggaagtattagtgactataagaaaaatgcgaagtctcagctgtggattagtgggttatacacctcagcttactggtgcggtcaggccctggtcgatgttagcttttttattcttatcctgctactaatgtacctcatcttttacatcgaaaacatgcagtatcttcttattacatcccaaattgtgtttgctctcgtaatagtgacacccggctacgccgccagcttggttttttttatctacatgattagctttatcttcaggaagagaaggaaaaactctggcctctggtccttctattttttctttgcctctactatcatgttctcaataactctgatcaatcattttgatctttcaatattgatcacgaccatggtgctggttccctcatacaccctcctgggcttcaagacgtttctggaagttcgcgatcaggagcactaccgcgagttccccgaagccaatttcgagctaagtgcaaccgattttctggtatgtttcatcccctacttccaaacactgttgtttgtctttgtgctgcggtgtatggaactaaaatgcgggaaaaaacgtatgaggaaggacccagtgtttagaatctctccacagtcaagagatgccaagcctaacccggaggaaccaattgacgaagacgaggacatccagacggagaggattagaacagccactgccctgactaccagcatcctggatgaaaagcccgtcataatcgcctcatgcctgcacaaggagtacgctgggcagaaaaaatcctgcttctcaaagaggaaaaaaaaaatcgccgcccgaaacatatcattctgcgtacaagaaggagaaattcttgggctgctgggtccgaacggagctggtaaatcctcttctatccgtatgatatctggcattactaaaccaaccgccggagaggttgaattaaaggggtgcagcagcgttcttgggcacctagggtactgcccccaggagaatgtgctgtggcccatgttgaccctgagggaacatctggaggtctatgcagcagtgaaaggactgcggaaggcggacgccaggctcgctatagctcgactggtcagcgcctttaaattacacgaacagctgaacgtgccagtgcagaagctgaccgccggaattacacggaaactctgttttgttttgagtctgctgggcaattccccagttttgttattagatgagccaagcacagggatagaccccacaggccaacaacagatgtggcaagcaattcaggccgtcgtgaaaaacaccgagaggggagttctgttgacaacacataatttggctgaggctgaggcactctgcgatcgcgttgcaatcatggtatctggcagactaagatgtatcggcagcatccagcacttaaaaaataagcttgggaaggattacatcctcgaattgaaggtcaaggagacaagtcaggtcacgctagtgcatacagagattcttaagttatttcctcaggccgccggtcaggagcggtactccagccttctgacatataagcttccagtggctgatgtttacccactcagtcaaacatttcacaaactcgaggctgtcaagcacaatttcaatctggaagagtactccctgagccagtgtaccttggagaaagtttttcttgagttatctaaggaacaggaggtgggaaacttcgacgaggagatagacactaccatgcggtggaagcttctgcctcacagcgatgaaccgtag

SEQ ID NO: 109168 - DNA, 1434 bp, synthetic construct
  misc_feature 1..1434: note = Description of Artificial Sequence: Synthetic coding sequence
  source 1..1434: mol_type = other DNA
atgttttctattaccttgatcaaccactttgacttgagcatcctcatcacaacaatggtgctggtgcctagctatacgcttctcggcttcaagacattcctcgaggttagggaccaggagcactatcgcgaattcccagaggccaattttgagcttagtgccacagatttcttagtctgtttcattccatacttccagacacttctctttgtgttcgtgcttcgctgtatggaacttaaatgcggtaaaaaaagaatgcgaaaggaccctgtgtttagaatctctccccagtccagagacgccaaacctaatcctgaagaaccaatcgatgaggacgaggatatccaaactgagagaatacgaacagctacagcactcacgaccagtattctggatgagaagcctgtcatcattgccagctgtctccacaaggaatatgcggggcagaagaagagctgcttctccaaacggaagaagaagattgctgcaagaaatatttccttttgcgtacaggaaggagagatactagggctgctgggccccaacggcgcaggcaaaagtagctctatacggatgatctcgggcattacaaaaccgaccgccggtgaagtcgaactgaaaggttgtagttccgttctagggcatctggggtactgtcctcaagagaacgtgctgtggcctatgcttacattgcgggagcatttggaggtttacgcagcagtgaaggggctaagaaaggccgacgctaggttagccattgctcgcctggtgtctgcctttaagcttcatgagcagcttaatgtccctgtacagaagctgacggccggcattactcggaagctctgctttgttctgtccctactggggaacagccccgtactgcttctggacgaaccctctactggaatcgacccaacagggcaacaacaaatgtggcaggccatccaagctgtggtgaagaacaccgagcggggcgttctactcaccacccataacttggccgaagcggaggccctgtgcgacagggtggccatcatggtgtccggcagattgcgctgtatcggctctattcagcacctgaaaaacaaacttggaaaagactacattctggagttgaaagtgaaggaaaccagccaggttactcttgtgcatactgagatactcaaattatttcctcaggcagctgggcaggagcgatattcatcccttttgacttacaagcttccagtagccgatgtttacccgctgtcccagacctttcacaagctagaagccgttaaacacaatttcaacttggaagagtacagtttatcacagtgtacactcgagaaggtgttcttagagctgagcaaggaacaggaggtaggtaacttcgacgaggaaatcgacacaactatgcgctggaaactcttgccgcatagcgacgaaccatag

SEQ ID NO: 109169 - DNA, 6441 bp, synthetic construct
  misc_feature 1..6441: note = Description of Artificial Sequence: Synthetic coding sequence
  source 1..6441: mol_type = other DNA
atggccttttggacccagctgatgttactgctgtggaaaaactttatgtaccgtcgcagacagccggtccaactgctggtggaattactgtggcccctctttctgttttttatcttggtcgccgtccggcactcccaccccccactggagcaccatgaatgccacttccccaacaagcctctgccaagcgccggaacggtgccttggctacaggggctgatatgtaacgttaacaacacgtgtttccctcagctcacaccaggggaagagccaggtagattgagtaattttaatgacagtctggtctcacgtctcctagctgacgccagaacggtcctgggtggtgcttccgcacataggaccctggcgggcttgggtaagctcatagccaccttacgggccgccaggtccaccgcccagccacagccgaccaagcagtcaccactggagcccccaatgctcgacgtggctgagctgctcacatccctcctgagaaccgaaagtctcggcctagccctgggacaggcccaggaacccctacacagcctcctggaagctgccgaggacctcgcccaagaattgctggctttaaggagtctcgtagaactcagggctctgcttcaacggcctaggggcacgtccggacctctggagttgctctcagaagcactttgcagcgttagagggccatcatcaaccgtgggcccctcgctgaactggtacgaggcttctgatctgatggaactggttggacaggagcctgagagcgccctcccagacagcagtctgtcacccgcgtgcagcgagttgataggtgccttggattcacatccactttccagactgctatggcggagactcaaacctctgattctcggtaagctccttttcgcacctgatacaccgtttacacggaagctcatggcccaggtcaaccgaactttcgaggagctgacactgctcagggacgtgcgtgaggtgtgggaaatgcttggccctaggatctttaccttcatgaatgacagctccaatgtggctatgttgcaacgccttctgcagatgcaagatgaaggcagacggcagccccgccccgggggccgagaccacatggaggcgcttagaagttttttggaccctggctccggaggatacagttggcaggatgcccatgctgatgtggggcatctggtgggcacgctcggccgagttaccgagtgcctatccctggacaaactggaggccgctccctcggaggcagcccttgtgtccagggccctacaactcctggccgaacaccggttctgggccggagttgtgttcctggggcctgaggacagttctgacccgactgaacacccgacccccgatctgggtccgggacatgtgcgaataaagatacggatggacatcgacgtggtgacaagaactaacaagatccgggaccgattctgggaccctggtccggctgccgacccgctcaccgacctccgctacgtctggggcgggttcgtttatctgcaggacttagtcgaacgtgctgctgtgagggttttgagcggcgctaatcctagggccggcttatacctgcaacagatgccatacccatgctacgtggatgatgtgtttttaagggtgttgtcgagaagtttgccattgttccttacactcgcctggatttacagtgttacactgactgtgaaggccgtggtgcgggagaaggaaaccagactgcgggataccatgcgcgcaatgggtctcagcagagcggtgttgtggttgggatggttcttgagctgtctggggccattcctcctgtctgctgcccttcttgtcctggtgctgaagctgggcgatattctgccatatagtcaccccggcgttgtcttcctgttcctagccgcttttgcagtggctactgtgacacagagctttctgctgtctgcctttttttcaagagccaacttagccgcagcgtgtgggggactggcctatttttccctatacctgccctacgttttgtgcgtggcctggcgagacagactaccagctggcggccgggtggcggcatcactcctctctcccgtggcattcggcttcggctgtgaatccctggcactgttagaggaacaaggcgaaggtgcacagtggcacaacgttggaacacgaccgactgccgatgttttctccttggcgcaagtgtctggcctccttttgctcgatgctgcattgtacgggctggcgacctggtacctggaggcggtttgtcccggacagtatggaatccctgagccctggaacttcccctttcgccgctcctattggtgcgggccacgtcccccgaagtcgccagccccttgccctacccccctggatcctaaagtgcttgtggaagaggcaccaccaggcctaagcccaggagtttcagtgcgtagtctcgagaagaggttccctgggtcaccccaaccagccctacgcggtctctcactcgacttttatcagggacacatcactgccttcttgggtcacaacggagccggtaagaccactacgttgagcattttgagtggactcttccctcccagtggaggaagtgcctttattctgggacacgacgtgagaagtagcatggcagccattcgcccgcacctgggagtatgcccacaatataacgtccttttcgacatgcttacagtagatgagcacgtgtggttctatgggcggttaaagggtctgagtgctgcagtggtgggaccggaacaggaccggctcctgcaggatgtaggcctcgtctccaagcaatctgttcagacacgccatctttctggtggcatgcagcggaagttaagcgtggcaatcgcatttgtcgggggctcacaggtggttattctggatgagcccaccgccggtgtcgacccggcatcccggagaggtatttgggagctgctcctcaaatacagggaaggacgaacacttatcctgtcaacacatcacctggacgaagccgagttgcttggcgaccgcgttgccgttgtggctggcggacgcctgtgctgttgcggatcaccgctcttccttcggcggcacctcggaagcgggtactacctcaccctggtcaaggcacggcttccattgacaacaaacgagaaagccgacaccgatatggaaggctcggtggacaccagacaggagaaaaagaacggctctcagggctcccgggtgggaacccctcaactgctggcactcgttcagcactgggtccccggggcacggctggtagaggagctaccccacgagctggtcctggtcttaccctatacaggcgcccacgacggttcatttgctacactgttcagggagctggatacgcggctggccgagctccggctgaccggctacggaatcagtgacacctccctggaagagatatttctgaaagtcgtggaagaatgtgctgcggatacggacatggaggacggcagttgcgggcaacacctgtgcaccgggatcgctggccttgacgtaacactcagactgaagatgcccccccaggaaacagcccttgagaatggcgagccggctggatctgcacccgagaccgatcagggcagcggtcccgatgccgtgggacgcgttcagggttgggccctaaccaggcagcagctccaggcattactgcttaagaggtttttgttggcccggagatctcggcgagggctcttcgctcagattgtgcttccagcccttttcgtcggcctcgccctggttttcagcctgatagtccccccctttggccactaccccgccctgcgactgtcccctacaatgtatggcgcacaggtgagcttcttcagtgaagatgccccgggggatcccgggagggcccggttgctagaagcactccttcaggaagctggtttagaggagcccccagtccagcattcatctcatcggttctccgcacccgaggttcccgcagaagtggccaaggtgctggcctctggaaactggactcccgaaagtccttcacctgcctgccagtgtagcagaccaggcgctagacgcctgctgccagattgtcctgcagctgcaggagggccccctcctccgcaggctgtcaccgggtccggtgaagtggtgcagaatttaacaggtagaaacctttccgatttcctggtcaagacttatcctaggctggtgcggcaaggcctgaaaacgaagaagtgggtcaacgaggttcggtacggcgggttctctttaggcggacgcgacccaggccttcccagtggacaggagctgggacgtagcgttgaagaactgtgggcattgttaagtcctctgccaggaggcgcactggaccgtgtcttgaagaacctaacagcttgggcccacagccttgacgcacaggattcgttgaaaatttggttcaataacaagggatggcacagcatggtcgcctttgttaaccgcgcatcaaacgctatcctgcgtgcccatcttcctcccggacctgctagacacgcacactctattaccacattaaatcatccactgaatcttacaaaggagcagcttagcgaaggcgctctcatggcgtcgagcgtcgatgtgctggtgagtatttgtgtggtgttcgcaatgagcttcgttccggcgtccttcacccttgtgctgatcgaggaaagagttacccgagccaagcatctgcagctgatgggcggactgagtccaactctgtactggctgggcaactttctttgggatatgtgcaattacttggtgccagcttgtattgtggtgctcattttcttggcgttccagcagagggcttatgtcgctcctgccaatctgccggcactgcttctgcttctgctactgtatggctggtctataacacccctgatgtaccccgcttcttttttcttctctgtgcctagcacagcgtacgtagtgttgacctgcatcaacctgttcattggcatcaacggctcaatggcaacgtttgtcctagaacttttcagtgaccaaaaactgcaggaggtctctcggatcttgaaacaggtgtttttaattttcccccacttctgtctgggacgagggctgatcgacatggtgaggaatcaagccatggccgacgccttcgagaggctcggtgatcggcagttccagtctcctcttcgatgggaggtggttggcaagaacctgcttgcaatggtgatacagggcccactcttcctgttgtttaccctgctgctccagcataggtcccagctgttaccgcagcctcgggtcagaagtctgccccttctgggggaggaggatgaggatgtcgctcgcgaacgtgaacgcgttgtgcaaggggccacacagggcgacgtactagtacttcgaaatcttaccaaagtgtacagaggtcagcggatgcccgccgtggaccgcctgtgccttggaatccccccaggtgagtgctttggcttacttggcgtgaacggcgctggaaagacatccaccttccgcatggtgaccggtgacaccttggcctctagaggtgaagccgtcctggcgggccactccgtggctagggagccttctgccgctcacctgtctatgggatactgcccacaaagcgatgctatcttcgagctgctgactggccgcgagcacctcgagcttctggcccggttgcgtggggtgcctgaggcgcaagttgcccagacggctggcagcggactggcccggctcggcctgagttggtacgccgatcgccctgccggtacctactcaggtggtaataagcgcaagctggccacggccctcgcactagtcggggacccagccgtggtttttttagatgaaccaaccactggcatggacccttccgcacggcgattcttgtggaattcactcctcgcggttgtccgggaaggcaggtctgtgatgctgaccagccatagcatggaggagtgcgaagccctctgctcccgcctagcaattatggttaatggaaggtttcgatgtttgggcagcccacagcacttaaagggtaggtttgctgccggccacaccctgactttgagggtacccgcagctcgtagccagcccgccgctgccttcgtggcagctgaatttcctggagccgaacttcgcgaggcacatgggggccgcttgagattccagttacctccagggggacgctgtgctctagccagagtattcggcgaactggcagtgcacggagctgaacacggagttgaggactttagtgtgagccaaaccatgctggaggaggtgttcctgtactttagcaaggatcagggcaaggatgaagacacggaggagcaaaaggaggcgggagtgggcgttgaccccgctcccggccttcaacatcccaaacgcgtgtctcagtttctcgacgacccatctacggcagaaacagtcctctag

SEQ ID NO: 109170 - DNA, 6441 bp, synthetic construct
  misc_feature 1..6441: note = Description of Artificial Sequence: Synthetic coding sequence
  source 1..6441: mol_type = other DNA
atggccttttggactcagctgatgctcctgctgtggaaaaattttatgtatcgaaggaggcagccggtgcagctgctggtggaactgttatggcccctcttcctttttttcattctcgtggccgttagacatagccacccccctctcgaacatcatgaatgccactttccaaacaaacccctacctagtgctggcacggtgccctggctgcagggccttatctgtaatgtaaataatacatgtttccctcaactcacacctggagaagagccagggcgactgagtaacttcaacgattccttggtaagcaggctgctcgccgacgcccggaccgtcttaggcggggcctccgcccataggacactggctggcctgggcaaactaatcgcgacattaagagccgcaagatcaacagctcagccccagcctaccaaacagtcacccctcgaaccccccatgttggacgtggctgagctgctgacaagtcttttgagaaccgaaagcctagggttggccttaggccaggcacaggaacctttacacagccttctggaagccgctgaggatcttgcacaggaactgctcgctcttaggtccctggtggaactccgggctttactgcagcgcccgagaggcaccagcgggcctctggaactgctgtctgaggctctctgctcagtgcgcggccctagctcgacagtggggccaagcctaaattggtacgaagcgtctgatctgatggaattggttgggcaggagcccgagagcgctctccccgacagcagcttgtccccagcctgcagtgaactgatcggggcacttgactcacacccacttagtcgacttttatggcgtagactgaaacccctgatcttgggcaaactactgtttgcccccgatactccattcactagaaagctgatggcccaggtgaaccggacatttgaagagctcaccctattgagggacgtgagagaggtgtgggaaatgctgggaccgcggatctttaccttcatgaacgattcctcgaacgtggcgatgctccaacgcctcttacagatgcaggatgaagggcggcggcagccccgccctgggggccgcgatcatatggaagccctgaggtcctttctcgaccctggtagcggaggatactcctggcaagatgcgcatgctgacgtcgggcatctcgtcggaacactgggcagggtgacggaatgcctgtccctggataagctagaggccgccccttccgaggctgctttggttagcagggctctgcagctcctggcagagcatcgtttctgggccggagtggtttttctcgggcctgaggactccagcgaccccaccgagcaccctacacctgacttaggccccggccacgtccggattaaaatacggatggacattgatgttgtgacacggactaataagatccgagaccgtttctgggatcctggaccagccgcagacccactgaccgacctgcgatatgtctggggggggttcgtgtatctgcaggacctggtcgaaagggctgcagtgagagtcctgtccggcgcaaatcctagggccggactgtatcttcaacaaatgccatacccatgttacgtggatgacgtcttcctccgggtcctctcccggagcctccctctcttcctcacgcttgcctggatttatagcgtaaccttgaccgtgaaagcagtggtgcgggagaaggagaccagattacgggacaccatgagggcaatgggactttcgcgagccgtgctgtggctggggtggttccttagctgtctgggcccatttctgctgtctgccgctctgctggttctggtcctgaaactcggagacatcctgccatacagccacccgggcgttgtgtttttattcttggcagcctttgctgttgccacagtgacccagtcctttctgttgtcagctttcttcagtagagcaaatctggccgcagcctgtgggggcctggcctacttttcgctctacctgccatacgtgctctgcgtggcctggcgcgacaggctgcctgccgggggcagggtggccgcttctttgctatcaccggtcgcattcgggtttgggtgtgaatctctggctctcttagaggaacaaggtgagggcgcccagtggcacaatgttggaacccgacccactgctgatgtcttttctctggcccaggtctctggcctcctactcctggatgctgctctatatggactggccacctggtatctcgaagcggtgtgtccgggccagtacgggatcccagagccttggaatttccctttccgccggagttattggtgcggacctcgtcctcccaagagtccagcaccatgccccaccccactcgaccctaaggtgcttgtggaggaggcacctcccggactgagcccaggagtcagtgtgaggtctctggaaaagaggtttcccggcagcccccaacctgccctcagaggtctcagcctggacttttaccagggccacatcaccgctttcctcgggcataatggggccggcaagactacaaccttatccatactgagtggactcttccccccgtcgggcggcagtgctttcattctcggacatgacgtgcggtcctccatggctgcaatcaggccccacctcggagtttgcccacagtacaacgttttgtttgatatgctcacggtcgacgagcatgtctggttctacggacgcctgaaaggcttatctgccgcagtcgttggtcctgagcaagatcggctgctgcaggacgttgggctggtatctaagcagagtgtgcagactagacatttatccggtggaatgcaaagaaagctgagcgtggccattgcatttgttggaggaagccaggtcgtaatcctggacgagccaacagcaggcgtggatcctgcatctcgacgagggatatgggagctactgttgaagtacagggagggcagaactcttatactgtctacccatcatctggatgaggccgaacttctgggggatcgcgttgcagtggtggccggagggcgcctgtgctgttgcgggtctcctctgtttctgcgaagacatctgggtagcgggtactacctgacgcttgtgaaggctcggctgccattgacgacaaacgagaaagcggatacggatatggaggggagcgtggatactagacaggagaagaaaaatgggtctcaagggtctcgtgtgggaacgccccagcttcttgccctggtgcaacattgggttcctggcgcccgtcttgtcgaggaattgccccacgagctggtcttggtgctgccctatacaggtgctcatgatggatctttcgccacattatttagggagttggatacacgactggcggagctccggcttaccggatatggtatttcagatacttccctggaggaaatttttttaaaagtggtggaggaatgcgctgccgataccgacatggaagatgggagttgcgggcagcatctgtgtactggcatagcaggccttgacgtcacgctccgattgaaaatgccaccacaggagactgccctggagaatggagaacccgctggctcggcccccgaaacggaccagggcagcggacctgacgccgtgggacgggtacaaggatgggcccttacgagacaacagctccaggcattgctcctgaaacggtttttgctagcgcggaggtccaggagagggctattcgcacagatcgtcctgccagcgcttttcgtggggcttgcccttgtgttttccctcatcgtgcctccattcggtcattaccctgccctgaggctttccccgacaatgtacggcgcccaggtgtcctttttcagcgaggacgcaccaggcgatcccggccgcgcccgactgttagaagcattgctgcaagaggccggcctcgaggaacctcctgtgcaacacagcagccatcgcttcagtgctcctgaggtcccagccgaagtggccaaagtgttagccagtggcaattggacgcccgaatctccatcacccgcatgccagtgctctcgccctggagcccggcggctcctgcctgattgccccgccgcagcaggggggccacctcctcctcaagcagtaaccggctctggcgaagtggttcagaacctgaccgggcgcaaccttagcgacttcttggttaaaacctacccacgactcgtgagacaggggctgaaaacgaagaagtgggtgaacgaagtgagatacggaggcttctctctgggggggcgggatccagggctgcccagtggccaggagttgggacgcagtgtagaagagctttgggcactgctctctccactaccggggggtgccctggaccgggtcctgaagaatctgaccgcctgggcccactctctggatgctcaggactctttaaagatatggttcaataataaaggctggcacagtatggttgcttttgtgaatagggcgtccaacgccatcctgcgcgcccaccttcccccaggccctgcgcgccacgcccatagcattaccacgctgaaccatccgctgaacttgactaaagaacagctttccgaaggcgccttgatggcctcttcagtggatgtactggtgagcatttgtgtggtgttcgctatgagcttcgtgcccgcaagcttcactctcgtattaattgaggaaagagtaactagggccaagcacctgcagcttatgggcggactgtccccaaccctttattggctaggaaattttctgtgggatatgtgtaattatctcgtgcctgcttgtattgtcgtgctgatcttcctggcgttccagcaacgtgcctacgttgcccccgccaatctgccagcactgctgttactgctacttttgtacggatggtctatcacgcctctgatgtaccccgccagctttttcttctctgtgccctcgactgcttatgtggtgctgacctgtatcaacctgtttatcgggataaacggatctatggctacattcgttttggaactcttctccgaccaaaaattacaagaggtttccaggattctcaagcaggtgtttctgattttcccgcacttctgcctgggccggggccttatcgacatggttcgaaatcaggcgatggccgacgctttcgagagactcggcgacagacagtttcagtcccctttacggtgggaggtagttggaaagaatctgctggctatggtaatacagggccccttattcctcctgttcactctgctgcttcagcacagatctcagcttctaccacagcctcgcgtccggtctttgcctttattgggggaggaagatgaggatgttgcccgcgaaagggagagggtagtacagggagccacccagggggatgttttagtgctaaggaacctgactaaagtttatagagggcaaagaatgcctgcagtcgaccggttatgtctggggatcccgcctggagaatgttttgggctgttgggcgtaaacggagcggggaagacatccacatttagaatggtcactggcgacaccctcgcttctcgcggagaagcagttctagcgggccactctgtggcaagagaaccgtctgctgcacatctgagcatggggtactgcccacagtcagatgccatctttgagctgcttacaggacgggaacacctggaactcctggctcgcctgcgaggcgtgcccgaggctcaggttgcccagactgctggaagcgggctggcaaggctgggcctgagctggtatgccgacagacctgccggaacctattccggggggaacaaaaggaagctggccacagctctggcacttgtgggcgacccggccgtggtctttttggacgaacccaccaccggcatggatccgtccgcccggcggtttctgtggaacagcttactggccgtggtaagggaagggaggagtgtcatgctcacttctcactcaatggaggaatgtgaggctctgtgcagcaggctagccataatggtcaacgggcggtttcggtgtctgggatctccacagcaccttaaaggtagattcgctgcaggacacacactgacccttagggtgccggctgccaggtcacaacccgcagctgctttcgttgcagccgaatttccaggagccgagctccgagaggcacatgggggccgactgcgcttccaacttcctccaggcgggaggtgcgcgctggccagggttttcggagaactggcagtgcacggagccgagcacggcgttgaggatttctctgtcagccagaccatgcttgaggaagtattcctgtatttcagcaaggatcaggggaaagatgaggatacagaggagcaaaaagaagcaggggtgggtgtagaccccgctcccggtctgcagcatcctaaacgggtcagccaatttcttgatgatccctccactgccgaaaccgtcctatag

SEQ ID NO: 109171 - DNA, 495 bp, synthetic construct
  misc_feature 1..495: note = Description of Artificial Sequence: Synthetic coding sequence
  source 1..495: mol_type = other DNA
atggctttctggacccagctcatgctgctgttatggaaaaattttatgtatcgccgccggcagccggtgcagctgttagtggaactgctctggcctctttttctcttcttcatcttggtcgcagtgagacatagtcacccgcccctggagcaccatgagtgccacttccctaataaaccgttaccctcagccggaacagtgccctggttacagggcctcatttgcaatgtgaataatacgtgttttccgcagctgacccccggagaggagcccggccggttaagcaattttaacgatagcttagtgagtcggctgctagcagacgctcggaccgtcctgggcggtgcctccgctcaccgaacgctagctggcctgggaaagctcatagcaacgcttagagcggcacgcagtacagcacagccccagccgacgaaacagtctccacttgaaccacctatgctggacgttgcggaactgcttacatccctgctgtag

SEQ ID NO: 109172 - DNA, 4746 bp, synthetic construct
  misc_feature 1..4746: note = Description of Artificial Sequence: Synthetic coding sequence
  source 1..4746: mol_type = other DNA
atgcgtaaacgtaaaatttcagtgtgccaacaaacatgggccctactctgtaagaattttctcaaaaagtggcgaatgaagcgggagagcttgatggagtggctgaatagcttgctgcttctgctctgcctctacatatatccacacagtcaccaggtgaatgatttttctagtcttcttaccatggatctcggcagggtggacaccttcaacgagtctcgattctccgtcgtctacacaccagttaccaacacaacgcagcaaatcatgaataaggtagcctctaccccttttctcgcgggcaaggaggttctgggcttaccagacgaagagtcaatcaaagaatttactgcgaattaccctgaagaaatcgtacgcgtgacttttaccaacacttactcataccacctcaaatttttattaggccacgggatgccagcaaaaaaggaacacaaggaccacacagcccattgctatgagaccaatgaggatgtctattgtgaagttagtgttttctggaaagaggggtttgttgccctccaggcagctatcaacgcagctatcattgaaatcacgactaaccactccgtaatggaagagctgatgtctgtcactggcaagaatatgaagatgcacagcttcattggtcaatcaggcgtcatcacagatctgtacctatttagttgcatcatttcctttagctcatttatttactatgcttccgtcaacgtcacaagggagcgcaagagaatgaaagcgttgatgaccatgatgggcctccgcgattctgccttttggttgagctggggtttgttgtacgctggctttatttttatcatggccctgttcctagcactcgtcatccgtagcacccaatttatcattctgtctggcttcatggtggtgttctcactgttcctactgtatggcttgagcttggtggcactggcgtttctcatgagcatactggtaaaaaagagctttctaaccgggctggtggtgtttctgttaaccgtattttgggggtgtttgggctttacctcactctatagacacctgcccgctagcctggaatggatcctgtctctgctctctcccttcgctttcatgcttggcatggcccaattactgcatctcgactatgacctaaattccaacgccttccctcacccttccgacggatccaacctcatcgtcgccacaaactttatgctggcattcgacacctgcttgtacttggcattggccatatatttcgagaagatcctgcctaatgaatacggtcaccggcgtccgccactgttcttcctgaagtcctcattctggtcccagacccagaagacagatcatgtagcactggaggacgagatggacgcagatccgagcttccatgactcgtttgagcaagcccccccagagtttcagggcaaagaagcgataagaatccggaatgtgaccaaggagtacaagggaaagcctgacaaaattgaggcccttaaggatctagtgttcgatatttacgagggacagatcaccgctattttaggccatagcggggccggtaagtccaccctcctcaatatactatctggactctctgttcccacaaagggaagcgtgacaatctataataacaagcttagtgagatggcggacctggaaaatctcagcaaactgacaggcgtttgtccacagtctaacgttcagttcgacttcctgacagttagggaaaatcttcggctgttcgccaaaatcaagggcatccttcctcaggaggtagacaaggagatatttcttttggatgaaccaaccgctgggctggatccattctccagacaccaggtgtggaacttgctgaaggaacggaaaaccgacagggtgatcctgttttccactcagttcatggacgaggcagacatcctggctgaccggaaagtttttctgtcccaaggtaagctcaagtgcgccgggtcttcactctttttaaagaaaaagtgggggatcggataccacctttcccttcaacttaacgaaatttgcgtggaagaaaacattacgtcgctggtgaagcagcacatccctgacgccaagctatcagcaaagagcgagggcaaacttatttacaccctccctcttgaaaggacaaacaagttcccagagctgtataaagacttggactcatatccggacctggggattgaaaattatggcgtgagcatgacgacactcaacgaggtgttcctgaaattagagggaaaatccacgatcaacgaaagcgacatcgcaattttgggggaagtgcaggccgagaaagccgatgacaccgagcggctggttgaaatggagcaggttctgtcgagcctgaacaaaatgagaaagacgataggaggtgtggctctgtggaggcagcagatctgtgcaatcgcgcgggtgaggcttctcaaactgaagcacgagcggaaggccctgcttgccctgcttttgatcctcatggcaggcttttgcccgctcctcgtggaatatacgatggtaaagatttaccagaacagttacacgtgggagctgtctccgcatctctacttcctggcacccggtcagcagccccacgaccccctgactcagttactgatcattaataagacaggcgccagcatcgatgacttcattcagagcgtggaacatcagaatatcgcactggaagtggatgcctttgggactcgcaatggaacggatgatccaagctacaatggggccatcacagtctgttgcaacgagaagaactacagttttagcctggcctgtaatgctaagcggctcaattgctttcccgtactgatggatatcgtgagcaacggtctgctcggcatggtgaaaccctccgtgcacattagaactgaacggtcgacattcctggaaaacggtcaagacaaccctatcgggtttctggcgtacatcatgttttggctggtgctaacctcttcctgccccccttatattgctatgagctcaatagacgactacaagaatcgggctcgctctcagctgcgcatcagtggtttgagtcccagcgcttattggtttggacaagctcttgtcgatgtatctctgtacttcttagtctttgtgttcatatatttgatgtcttacatctccaattttgaagatatgctgcttacgataatccacataatccagattccttgcgcagtgggctacagcttttctcttattttcatgacctacgtgatctctttcattttccggaaggggcgcaagaactcaggtatatggagtttctgtttctacgtggtgacagtattcagcgtggccgggttcgcgttctcaatttttgagagtgatatacccttcatcttcaccttcctgattccacctgccactatgataggctgcctcttcctgtcatcacatctcctgttctcaagcttattcagtgaggaaagaatggatgtccaaccgttcttagtgtttctgatcccctttctgcactttattatcttcctgttcactctgagatgtctggagtggaagttcggtaaaaagtcaatgagaaaggaccctttcttccgtatctctccgcggtcctctgatgtctgtcagaatccagaggagccggaaggagaggacgaagacgtacaaatggaacgggtccggacagccaatgcgctgaatagcaccaacttcgacgagaagcctgtgatcattgccagttgcctgaggaaggagtatgcaggcaaacgcaagggctgtttctccaagcggaagaataagattgcaacgcgcaatgtgagcttctgcgttagaaagggcgaagtgctgggactgctgggacataacggggccggaaaatcaactagcattaaagtgatcactggcgatactaagcctaccgccggccaggttctgctaaaagggagcggtggaggggacgcgttagagtttttgggctattgccctcaggaaaacgccctgtggccaaacctgaccgttcgacagcatcttgaagtgtacgcagccgtcaagggcctacgcaaaggcgatgctgaagtagctataacaaggctcgttgacgccctaaagttacaggaccaactgaaatcccccgtcaaaacattaagtgagggcatcaagcgaaaattgtgctttgtgttgtccatacttggtaacccttctgtagtgttgttggacgaacccagcaccggaatggaccccgaggggcagcagcagatgtggcaggccattagggccacattcaggaacacagaacggggcgctttgctgactacccactatatggctgaagccgaagcagtctgcgacagagttgcaattatggtatcaggccggctgaggtgtatcggcagtatccagcacttgaagagcaaattcgggaaagattatctcctggaaatgaaagtcaaaaacctggcacaagtcgaaccactgcatgcagagatccttcgcttgttccctcaggcggctcggcaggagagatacagctctttgatggtctacaagctgcctgtcgaagacgtgcagcccttagcgcaggccttctttaagttagagaaggtgaaacagtcatttgacctcgaggagtattccctgtctcaatctaccttggagcaggtcttcttggaactcagcaaagaacaggaactgggggatttcgaggaggacttcgaccccagcgtgaaatggaagttgctgcctcaggaggaaccttag

SEQ ID NO: 109173 - DNA, 801 bp, synthetic construct
  misc_feature 1..801: note = Description of Artificial Sequence: Synthetic coding sequence
  source 1..801: mol_type = other DNA
atgaggaaaaggaagatcagtgtgtgtcaacagacatgggccctactatgcaagaactttcttaagaaatggcgtatgaaacgagagtccttgatggagtggttgaattccctgttactacttctatgtttgtacatctatccccactcacaccaggtgaacgacttcagcagtttactgaccatggatctcgggcgagtcgatacattcaatgagagcaggttttccgttgtgtatactcccgtgacaaataccactcagcagattatgaacaaggtcgcctctacccccttccttgcagggaaagaagtgctggggttgccagacgaagagtccattaaagagttcactgctaactacccagaagagatcgtgcgcgtcacattcaccaatacatacagttatcatctcaaatttcttctgggtcacggaatgcccgcaaagaaggagcataaggatcacacggcccactgctatgaaactaacgaagatgtgtactgtgaggtgtcagtattctggaaggaaggtttcgtggccttgcaggcagctatcaacgctgccattatcgagattactacaaatcactctgtcatggaggaattgatgagtgtgaccgggaagaacatgaaaatgcattctttcattgggcagagcggggtcataacggacctctacctcttctcatgtatcatcagcttcagcagctttatctattacgctagcgttaatgtgaccagggaacgcaagagaatgaaagcccttatgactatgatggggttaagggactccgctttctggtag

SEQ ID NO: 109174 - DNA, 4866 bp, synthetic construct
  misc_feature 1..4866: note = Description of Artificial Sequence: Synthetic coding sequence
  source 1..4866: mol_type = other DNA
atgagaaagcgcaagatcagtgtgtgccagcaaacatgggctctcttatgcaagaactttctcaaaaaatggaggatgaaacgcgaaagtcttatggaatggctcaacagcctcctcctgttactgtgcctgtatatctaccctcattcacatcaggtcaatgacttctccagccttcttactatggacctggggagagtagatactttcaatgagtcgcggttttctgtggtttacactcccgttactaatactacacaacagatcatgaataaggtcgcctccactccgtttctggccgggaaggaagttctgggtttgccggacgaagaaagcattaaggagttcaccgcaaactacccagaagagatcgtccgggttacgtttactaatacatattcctatcaccttaaattcttgctcggtcatggcatgcccgctaaaaaagagcacaaggaccatacggcccactgctacgagaccaatgaggatgtgtattgtgaggtgtccgttttctggaaagaaggatttgtcgcacttcaggccgccatcaacgcggccatcattgagatcactacaaatcactccgtgatggaggagctaatgtcagtgacagggaaaaacatgaagatgcacagcttcattggtcagagcggcgtcatcaccgatttataccttttttcctgcatcatttcttttagcagttttatttactacgcctccgtaaacgtgaccagagaacgaaagagaatgaaggcacttatgactatgatgggattgagggatagtgctttctggctctcatggggtttgctctacgctggattcattttcatcatggccctcttcctggccctcgtgataaggagcacccagttcatcatcctttccggattcatggtggtgttttccttgttccttctgtacggcttgtcacttgtcgcattggcctttctcatgtccatcctagtgaagaagagctttcttactgggctggtggttttcttgttaactgtgttttggggctgcctagggtttacttctctctaccgtcaccttccagcaagcctggagtggattttgtcactgctttccccattcgctttcatgctgggaatggcgcagctacttcatttggactacgacctaaattcgaacgcgttccctcacccctcagacggctcaaacctcatcgtggccaccaactttatgcttgccttcgacacctgcctataccttgctctggccatttattttgaaaagatcctacccaatgaatacggtcatcgacggcctcctctgtttttcctcaaaagcagcttttggagccagacccagaagactgatcacgtcgctctggaagacgaaatggacgctgaccccagctttcacgattcttttgagcaagcacccccagaatttcagggcaaagaagcaatcaggatccgcaacgtcactaaggagtataagggaaagccagacaaaattgaagcactaaaggacttagttttcgatatatacgaagggcaaattacagctatcctgggccactccggtgcaggaaaatctaccctgctgaacattctgagtggtctgtcagtaccaactaaaggctctgtgaccatctacaataataagctgagcgagatggccgaccttgagaatcttagcaaactgaccggcgtgtgtccacagagcaacgtgcaatttgacttcttgactgtgcgagagaatctcagattgttcgccaaaattaagggtattctccctcaggaagtggacaaagagattcagcgggtgctgctagagctggaaatgaaaaatattcaggatgtgctggctcagaatctgagtggcggccagaagagaaagctgacttttggcatagccatcctgggtgatccgcagattttcttgctggacgagcccacagcagggctggatcccttctctcgccaccaggtctggaacctcttaaaagagaggaaaacagatcgggttatcctgttttcgacccaattcatggacgaggccgatatccttgccgataggaaggtgtttttatcccaggggaaactcaaatgtgccggctcctcactgttcctgaagaagaagtggggcatcgggtaccacctgtccctccagctgaatgaaatttgtgtagaagagaacatcacatcactggtgaagcaacatatccctgacgctaaattatctgcaaaatcagaggggaaactaatttacacattgccattagagaggactaacaagtttcctgagctttacaaagacctggactcctaccccgatcttggcatcgaaaactacggggtgtctatgacaacgctgaatgaggtctttctgaagttagaaggtaaaagcacaataaatgagtccgacatcgcgattcttggtgaggtccaggccgagaaggccgatgatactgagcgcctggtggagatggaacaggtattgtcctcgttgaacaagatgcggaagacaatcggcggtgtagccctttggcggcagcaaatctgcgctattgcaagagtccggctactgaagctgaagcacgaaagaaaggccttgctagcactgttgttaattctgatggccgggttttgccctcttctggtggaatacacaatggtgaagatctatcaaaacagttatacatgggagctgagcccgcatctgtactttctcgcccccggtcagcagccacatgatcctttgacccagctcctcatcatcaacaagactggagctagtatcgatgactttatccagtccgttgaacaccagaacattgccctagaggtcgacgcattcgggacaaggaacggcaccgacgatccctcatacaacggagctattacagtttgctgcaacgagaagaactatagtttcagccttgcctgtaatgcaaagcgcctgaattgctttcccgtcctgatggacatcgtttctaacgggctcctagggatggtaaagccaagcgtgcatatccgtaccgaacggagcacttttctggaaaacggtcaggataaccccatcggattcctggcctacattatgttttggcttgtgctcacatctagttgcccaccctatatcgccatgagcagtatcgacgattataaaaaccgggcacgcagccagttgcgaatcagtgggctgtcaccctctgcttactggttcggtcaggccctagtggacgtgtcactttacttcctggtgttcgtttttatttacctcatgtcatatatctcaaactttgaggacatgctactaaccatcatccacattatccagattccatgcgcggtcggctattctttttcccttatttttatgacatatgtgatcagtttcattttccgcaaaggtcggaagaattccggtatttggagcttctgcttctacgttgtgacggtgttctcagtggcaggttttgctttctccatattcgagtcagacattccattcatttttacttttctgatccctcccgccacaatgattgggtgtcttttcctgtcctcacacctgttattttcttccctcttcagcgaagaacgtatggacgttcagccctttctcgtgtttctcatccctttcctgcacttcataatcttccttttcacgctccggtgcctcgagtggaagtttggaaagaagtcaatgaggaaggatcctttttttcgaatttctccgagaagcagtgatgtatgtcagaatcctgaagagcccgagggcgaagacgaggatgtccagatggagagggtcagaacagccaatgccctcaacagcacgaactttgacgagaaaccagtcatcatcgcttcctgcctgcggaaagagtatgcgggcaagaggaaagggtgtttttccaaaagaaagaacaagatcgcaactcgcaacgtctccttttgcgtgaggaagggggaggtgctcggtctgctggggcacaacggcgcgggaaaaagtacgagcattaaggtgatcacaggagacacgaaacctacagccggacaagtcctgttaaagggaagcggcggtggtgacgctttggagtttttgggctactgccctcaggagaatgccctttggcctaacctgactgtgcggcagcatctggaagtttatgccgccgtgaagggacttcgcaaaggggacgctgaggttgcaattacccgcctggtggacgccctgaaattgcaagatcagttgaaatcgccagtgaagacactctccgaaggcatcaaacgcaagctctgtttcgttttaagcatacttggaaaccctagcgttgtattgttagatgagccaagtacaggcatggaccctgaagggcagcaacagatgtggcaagccatacgagccacatttcggaataccgaacgcggagccctcctgacaacccactatatggccgaggccgaagcagtgtgtgacagagtcgccatcatggtttcaggacggttgcgatgcatcggctcaatacagcacctcaaaagcaaattcggtaaagattaccttctggagatgaaagttaaaaacctggcacaagtggaacctttgcatgcagaaatactgcggctgttcccacaagcagcgcgtcaggaaaggtacagcagcctcatggtgtacaagctgcccgtggaggatgtgcaaccactggctcaggcctttttcaaactcgagaaagtgaaacaaagctttgatctggaagaatacagtctcagccagtcaacgttggaacaggttttcttggaactgtctaaggagcaggagctgggcgactttgaggaagacttcgacccttcagttaagtggaaactcctgccccaggaggagccctag

SEQ ID NO: 109175 - DNA, 3312 bp, synthetic construct
  misc_feature 1..3312: note = Description of Artificial Sequence: Synthetic coding sequence
  source 1..3312: mol_type = other DNA
atggacctagggcgagtggacacttttaatgagtctcgcttcagtgtagtgtacacacctgttaccaacactacacagcagattatgaacaaggtggcttccactccattcctggccggcaaggaggtgctggggctccccgatgaagaatctattaaggagttcaccgcaaattatccagaggaaatcgtgcgcgttacctttactaatacgtatagctatcacttgaagttcctactggggcacggtatgcccgctaagaaggagcacaaagatcatacagcgcattgttatgagactaatgaagatgtgtattgtgaagtctcggtgttctggaaagaaggtttcgtcgccttgcaggccgcaatcaacgctgctatcattgagatcaccacaaaccactctgtgatggaggaattaatgtcagtcacagggaagaacatgaagatgcactcttttattggccaaagtggcgtgatcaccgacctgtacctcttctcgtgcatcatctcctttagctccttcatctactatgccagtgtgaacgtgactagagagcgaaagcgtatgaaagcattgatgacaatgatgggcctgagagacagcgccttttggctgagttggggcctgctgtatgcgggcttcatattcatcatggcgctcttcctggccctggttattcgaagcacccaattcattatcctaagcggcttcatggtggtgttctccctgtttctgctttacggtttgtccctcgtagcccttgcttttctgatgagcattctggtgaagaagagcttccttactggcctggtcgtattcctcctaacggtgttttggggatgcctgggattcaccagcctctacaggcatctccctgctagtctggagtggattctgagcctgttgtccccatttgctttcatgctcggaatggctcaactgctgcacctcgactatgaccttaattcaaatgcttttcctcacccgagcgacggatccaatctgatcgtagctacaaacttcatgctggcctttgatacttgcttgtatctggccctggctatatattttgaaaaaattctgccaaacgagtatggccacagacgaccacccctcttttttcttaagtctagcttctggtcgcaaacacagaaaaccgatcacgtcgccctcgaagatgagatggacgcagacccttcttttcacgattcattcgagcaagctcctccagagtttcagggcaaagaggccatcagaattcgcaacgtaaccaaggagtataaggggaagcccgacaaaattgaggctcttaaggacctggttttcgacatttacgaaggacagatcaccgccatccttgggcattctggtgccggtaagtccaccttgctgaacattctcagtggactgagcgtgcctaccaaaggaagtgttacaatctataacaacaaattgtccgaaatggctgatcttgagaacctgtctaagctgacaggtgtttgtccacaatcaaatgttcagttcgactttcttaccgtccgggaaaacctgcgcctcttcgcaaagatcaagggcatcttgccacaggaggttgataaagagatccagcgcgtgctcctcgagttggaaatgaagaacattcaggacgtactcgcccagaatctttccggcggccaaaaacgaaaattgacatttggaatcgccatcctgggagacccgcaaattttcttgcttgacgagcccactgccgggttagaccccttcagtcgccaccaggtctggaaccttctgaaagaaagaaagaccgatcgcgttatcctttttagcacacagtttatggatgaagctgatattcttgcggatcgaaaggtgttcctctcacaggggaagctgaaatgtgctggatcctcactctttcttaaaaagaagtggggcattggttatcatttgagtctgcagctgaacgagatctgcgtcgaagaaaacattacgagcttggtcaaacagcatattcccgacgccaaattatctgcaaagtctgaaggaaagctaatttatacactaccactggaacggacaaataaatttccagagctctacaaggatctagacagctatccagacctgggcatcgagaattatggcgttagcatgacaacacttaacgaggtgtttctgaaattggagggcaaaagcactatcaatgagtccgatatcgccattttgggtgaggtgcaggcggagaaggcagatgacaccgagagacttgttgaaatggagcaggttctgtctagcttaaataagatgcggaagaccattggaggcgtcgccttatggcggcagcaaatctgcgcaatagccagagtccggcttctcaagctgaagcacgaaagaaaagctcttctggcgttgctgctcattctcatggccgggttttgcccacttctggttgaatatacaatggtcaaaatttatcagaatagctacacgtgggagctctccccccatctctatttcctcgccccaggacagcaacctcatgatcctttaacacagctgctgatcatcaacaaaaccggcgcttccatagacgacttcatacaatcagtggagcaccagaatatcgcactggaggtggatgcgttcggcacaagaaatgggaccgacgatccttcttataacggcgctattactgtttgttgcaatgaaaaaaattatagctttagtctcgcttgcaatgccaaaaggctcaactgttttccggtcctcatggatattgtctccaacggtctgctcgggatggtgaagccatctgtgcacataaggaccgaacggtccaccttcctggaaaacggacaggacaaccctattggcttcctcgcttacatcatgttttggctggtccttacttctagctgccccccatacatcgctatgtcctccatcgatgactacaaaaacagagccagaagtcaactccggattagcgggttgagcccgtctgcctactggtttgggcaggcactcgtggacgtctctctatactttctggtattcgtgttcatctatttgatgtcctacataagcaacttcgaggacatgttactcaccattattcacataatccaaataccttgcgcagtgggttactcattctcattgattttcatgacatatgtgatttccttcatctttagaaaagggcgtaagaactcaggcatttggtccttctgcttttacgtggttagcatattcctggtggacgtgtattgtatttatttgatctataatagtgaactgatcctatag

SEQ ID NO: 109176 - DNA, 471 bp, synthetic construct
  misc_feature 1..471: note = Description of Artificial Sequence: Synthetic coding sequence
  source 1..471: mol_type = other DNA
atgttgggtatggcccagctgctgcaccttgactacgatctgaacagcaatgcctttccccatccaagcgacggatcaaaccttatcgtcgcgactaactttatgctagccttcgacacttgtttgtacctggctcttgcaatttattttgaaaaaattctgcctaatgaatatgggcatagacgcccacctctgttcttcctcaaatctagcttctggtcccagacacagaaaaccgaccacgtggcgctggaagatgaaatggacgctgatccatccttccacgacagcttcgaacaagccccccccgagtttcagggaaaggaggctatcaggatcagaaatgttacaaaagaatataagggcaagccagataaaatcgaggctctcaaagatttggtctttgatatctatgaggggcaaatcaccgcaattctggttacagtggagcttgagtcacagcactgctag

SEQ ID NO: 109177 - DNA, 4875 bp, synthetic construct
  misc_feature 1..4875: note = Description of Artificial Sequence: Synthetic coding sequence
  source 1..4875: mol_type = other DNA
atgtcgaagagacggatgagcgtggggcagcagacctgggccctgttatgcaagaattgcctgaagaaatggcgcatgaagaggcagacccttctggaatggttattctctttcctcctggtattattcctctacctgttttttagcaacctgcaccaggtgcatgacactccacagatgagcagcatggaccttggcagagttgacagctttaacgacactaactacgttatcgccttcgcacccgagtctaagacaacacaggagatcatgaacaaggtcgcttcagccccttttctgaaaggtcgcactatcatgggttggcctgacgaaaaatcaatggacgaactggatcttaactactctatcgacgccgtcagggtgatctttaccgacacattcagttaccatctcaagttcagctgggggcacaggattcccatgatgaaggagcaccgagaccactcagcgcactgccaggcagttaacgaaaaaatgaagtgtgaaggctcagagttctgggagaaaggattcgtggcgttccaggccgcaatcaatgcagccataatcgagatcgccactaatcacagtgttatggagcagctcatgtctgtgactggagttcatatgaagatcctgccctttgtcgcccagggcggagtcgctaccgacttcttcattttcttctgcattatttcattctctacattcatttactacgtctcagttaacgtgactcaagaacgacagtacatcactagcttaatgaccatgatgggtctccgggaaagcgccttctggctgagctggggactcatgtacgcaggatttatcctgatcatggccacactgatggctctgattgttaagtccgctcagatcgtcgtgttaaccggttttgtgatggtgttcacactgtttctactttatgggttgagcttaatcacacttgctttcctcatgagtgtgctcatcaagaaacccttcctgacaggcctggtggtgttcctcctaatcgttttctggggcatcttgggatttcccgcgttatatacacgattaccagccttccttgaatggacactctgtttgctgtcaccctttgctttcactgtgggtatggcccagctaattcacttagattatgatgtgaacagtaacgctcacctggatagtagccagaatccctatctgattatagctactctcttcatgctggtgttcgatacactgctatacctcgtcttgaccttgtatttcgataagattcttcccgccgaatatggccatcgctgttcccccctgtttttcctcaagtcttgcttttggttccagcatggccgcgctaatcacgttgtacttgagaacgagacagactccgaccctacccctaatgattgctttgagcctgtcagccctgaattttgcggtaaagaagcgattcgcatcaagaaccttaagaaagaatacgcggggaaatgtgaacgtgttgaggctctgaaaggtgtcgtcttcgatatttatgaaggacagattaccgctttactggggcactctggagccggcaagacaaccctgctcaacattttgtccggcctgagcgtgcctacctcagggtcagtgacggtgtacaaccatacactcagcagaatggctgacattgaaaatatttctaaattcacgggcttctgtccccagagcaacgtacaatttggcttccttactgtgaaggaaaatttgaggctgtttgcgaagattaagggcatcctccctcatgaggtggagaaagaagttcagcgcgtagttcaagaactcgaaatggaaaacattcaggacatcctggcccaaaatctgtccgggggacaaaatcggaaactcacattcggtattgctatccttggagacccacaggtgctgctattagacgaacccaccgcaggtcttgacccgcttagccgccatcgaatttggaatttactcaaggagggaaaatcagaccgcgtcatcctgttttcaacacagttcattgacgaagccgacatccttgccgataggaaagtcttcatcagcaatggcaaactcaagtgcgcaggcagctctctgttcctcaagaaaaagtggggtatcggataccatctgtcactgcatttaaacgagaggtgtgatcccgagagcatcaccagtcttgttaagcaacatatatccgacgcaaagcttacagcacagtcagaggagaagttagtttacattctacccctagaaagaaccaataagttcccggagctgtatcgagaccttgaccggtgcagtaaccagggaattgaagactacggagtgtctatcacaactctgaacgaagtctttctgaaactggagggtaagtcaacaatagacgagtctgatattggaatctgggggcagctgcagacagatggcgcaaaagacataggatctctagtcgaacttgagcaggtcctgagctcatttcacgagactcgcaagactatcagcggagtggccttgtggcgccagcaggtgtgcgctatcgcaaaggtgagatttctgaagctgaagaaggagcggaaatccctctggactattctcctccttttcgggataagcttcatcccccagctgcttgaacatctgttctacgagtcttaccagaagtcctacccctgggagctctcacctaatacatacttcctctcccccggccagcagcctcaggaccctttaacccatcttttggtgattaataaaacagggtctaccatcgataatttcttacattcactccggagacaaaatatcgctatcgaggttgatgctttcgggactaggaatggcaccgatgaccctagctataatggcgccatcattgtttctggggacgaaaaggatcacagattctcgatcgcttgtaataccaagcggctaaattgcttccctgtgctcctggatgtcatctctaacggcctgctgggtatttttaattctagtgagcacatccagacggatagatcaactttctttgaagagcacatggactacgaatatgggtatcgctccaacacgttcttctggatcccaatggccgccagctttacgccctatatagctatgtcatctatcggagactacaaaaaaaaggctcacagtcagttgaggatctctgggctctatccgtccgcctactggttcgggcaggcattggtcgatgtttcactatatttcctcatcctgttactgatgcaaattatggattatattttttccccagaggaaatcattttcatcatacagaatctactgattcagatattgtgttcgatcggttacgtgagttccttggttttcctgacctatgttattagttttatctttaggaacggcaggaaaaattccggcatctggtccttctttttcctgatcgtcgtaatcttttctatcgtggcgacagacctgaacgagtacgggtttctaggattgttcttcggtacgatgcttatccccccattcacgcttatcggatctctgtttattttctctgagatttctcccgactcaatggactacctcggtgcttcagaaagtgagatcgtatacttggccctgctgatcccctacctgcatttcttaatcttcctgtttattctccggtgcttggaaatgaattgcaggaagaagctcatgcggaaggacccggtgttccgcatcagccctagatcaaacgccattttcccaaaccccgaagagccagaaggagaggaagaggacatccagatggagaggatgcgaaccgtcaatgcaatggcagtgcgggacttcgacgagacacccgtgataatcgccagttgtcttagaaaggaatacgccggtaagaagaaaaactgtttttctaaacggaaaaagaagatcgctacacggaatgtttcattttgtgtcaaaaaaggggaagtgatcggactgctcggccataatggagcaggaaaaagcactacaatcaaaatgattactggggacactaaacctaccgctggacaggttatccttaagggctccggcggaggagagcctcttggttttttaggctattgccctcaggaaaacgcgctgtggccgaacctgacagtgcgtcaacaccttgaagtgtatgccgccgtcaagggactcaggaaaggagacgctatgatcgctattacccgattggtggatgcgctgaaattgcaggaccagctgaaggccccagttaagacactttcagaggggatcaagcgcaagctgtgtttcgtgctatccatcttgggtaacccctctgtggtactgctggatgagccgagcacaggtatggatccagaggggcagcagcagatgtggcaggtcatccgagccacctttcgtaataccgaaaggggcgcattactgactacgcattacatggctgaggcagaggccgtgtgtgatagagtggctattatggtgagcggccgtcttagatgcatagggagcattcagcatctgaaaagtaagttcggcaaagactacctcctagagatgaaactaaagaacctcgcgcagatggaaccactacacgcggaaatcctgagactgtttccacaggcagcacagcaggaacgattctcaagtctaatggtgtataaattaccagtggaggacgtccggcctctcagtcaggcctttttcaaactggaaattgttaaacagagcttcgacttagaggagtatagcctttcccagtcaactctggaacaggtgttcctggagctgtcaaaggagcaagaacttggcgatctggaggaggactttgatccatccgtgaagtggaagcttctgctgcaggaggagccgtag

SEQ ID NO: 109178 - DNA, 4308 bp, synthetic construct
  misc_feature 1..4308: note = Description of Artificial Sequence: Synthetic coding sequence
  source 1..4308: mol_type = other DNA
atgagcaagagaaggatgtccgttggtcagcagacttgggcactgctctgtaaaaattgtctgaagaagtggcgcatgaaacggcagacacttctggagtggttgtttagcttcttactggtgctatttctgtacctattcttctctaacctgcaccaggttcatgacacaccccagatgtcctcaatggatcttggccgggtggactcgttcaacgacaccaactatgtaatcgcattcgctccagagtccaaaaccacacaggagatcatgaataaggttgcctcggcccccttcctgaaaggcaggaccatcatggggtggcctgatgaaaaaagcatggacgagttggatctgaactactccatcgatgcagtcagggtgatatttaccgataccttcagttaccacctgaagttttcgtgggggcaccgaatacctatgatgaaagagcatcgagaccactcagcccactgccaagcagtgaacgagaagatgaaatgtgaaggcagcgaattctgggagaaaggctttgtggcattccaggccgccatcaacgcagccataatcgagatagctacaaaccactctgtaatggagcagctcatgtctgtcacgggagttcacatgaagatccttccattcgtagcgcagggaggggtagccacagacttcttcatttttttctgcataataagcttctcaactttcatatattacgtgagtgtgaacgtgacacaagagcggcagtacattacgagcctgatgacaatgatggggctgcgggaaagcgctttctggctctcctggggacttatgtacgcgggttttatcctaattatggcaaccttaatggccctcatcgtgaagtccgcacaaattgtagtgctgacagggttcgtgatggtgttcacccttttcctgctgtacggacttagtctcatcactctggctttcctcatgagtgtcttaatcaagaagccttttttgaccgggctggttgtgtttcttctgattgttttttggggcattctgggatttcctgccctctatactcggctgcctgctttcctcgagtggacactctgtctcctgtctccattcgcattcactgtcggcatggcccaattaatccacctggattacgatgtcaattccaacgctcacctggattcgagccagaacccttatctcattatcgctaccctgttcatgttggtcttcgataccttgctgtatctggtgttgacgctctactttgacaagatcttgccagctgaatatggtcatagatgctcgccgttgtttttcctcaagagttgtttttggttccaacacggccgtgctaaccatgtggttttagaaaacgaaaccgactctgaccctactccgaatgactgtttcgaacccgtctccccagagttttgcgggaaagaggcgatccggattaaaaacctaaaaaaggagtatgctggcaaatgcgaacgggttgaagcgttgaagggtgtggtcttcgacatttacgaaggacagataacagccctcctcggacattcaggcgccggcaagactaccctgctgaacatactgtctgggcttagcgtgcccactagcggatctgtcacggtgtacaaccacacactgtctaggatggccgacattgaaaatatcagtaaatttaccggattctgcccccagagtaacgttcagttcggatttctgaccgttaaggagaatcttaggctgtttgcaaaaatcaaggggatcctgcctcatgaagttgagaaagaggttcaaagggtcgttcaggagctggagatggagaacatccaagacattctggcccagaatctctcgggtggacagaacaggaagctgaccttcggaattgccatcttgggtgatccccaggtgctcttgcttgatgaacctacggcaggacttgacccactctctaggcatagaatatggaatcttctcaaggaaggcaaaagcgatcgggtgatcctgtttagtacccagttcatcgatgaagctgacatcctggccgacaggaaagttttcattagcaatgggaagttaaagtgcgcaggctcttcgctgtttttgaagaagaagtggggcatcggatatcacctttccctccacctgaatgaacggtgcgatcccgaatccatcacctccctggtaaaacagcatatcagcgacgctaagctgaccgcccaatcagaagagaagctggtgtatatactgccgctagagaggacaaacaaattccctgagctatatagggacctcgataggtgcagtaaccagggcattgaagactacggtgtctccattaccactcttaacgaggtattcttgaagcttgaaggtaaatctacaatagatgagagtgatatcggaatctgggggcagctgcaaaccgatggtgccaaggacatcggttcactagtggagctggaacaggtgctatccagctttcacgagacgcggaagacaatcagtggtgtggccctgtggcggcagcaagtgtgcgctattgccaaagtgagatttctcaaactaaaaaaggagagaaaaagcctctggactattcttctcctgtttggcatatccttcatccctcaactgctagagcacctcttttatgagtcgtaccagaagtcatacccgtgggagctcagtcccaacacctacttcctcagtcctggacagcagccacaggaccctctcactcacctgttggttattaacaagacggggtctacaattgacaatttcctgcattcactccgaaggcaaaatattgcgatcgaggtcgacgcattcggcacacggaacggaaccgatgatcctagctataacggggctatcatcgtgtccggggacgagaaagaccaccggttcagtattgcttgtaatactaagaggttgaactgttttccagttcttctggacgtcatctctaatgggctactagggatcttcaatagcagcgaacacatacagaccgacagatccactttctttgaggaacatatggactacgaatatggttatcgatctaacaccttcttctggattcccatggccgcatcttttaccccctatattgccatgtcctctatcggagattataaaaagaaggcccactcccaactgagaatctccggactctatcctagtgcttattggttcggtcaggcgcttgttgatgtgtccttatattttcttattctgttattgatgcagatcatggactatatcttcagtccggaggaaattatattcatcatccagaaccttcttatccagatcctgtgtagtattggctacgtgagttcacttgtgttcctgacatacgtgatctcgtttatatttcgcaatggaagaaagaacagcggcatttggagcttcttctttctaatagtggtaattttcagcatcgtggccacagacttgaatgagtacggcttccttggcttgttcttcggaacaatgttgatccctccatttaccttaattggatcactgtttatttttagtgaaatatcacctgactccatggactatctgggcgccagcgagagtgagatcgtctacttggccttgcttatcccttacctgcactttttgatcttcctctttattctgcgttgcttggaaatgaactgtagaaagaagctcatgaggaaggacccagtttttcgcatctcaccacgctcaaacgccatcttccctaatcccgaagagcctgaaggagaggaggaggacatccaaatggaacgcatgcggactgttaatgctatggccgtgcgggacttcgatgaaacaccagtaataattgcaagctgtctgcggaaagaatacgccggcaagaagaaaaattgttttagcaaacggaaaaaaaagatcgccacaagaaatgtatccttttgcgtaaaaaaaggggaagttataggtctattgggccacaacggggccgggaaaagcaccacaatcaaaatgatcacgggggacacaaagccgaccgccggccaggtcattctcaagggctccggtggcggagaacctcttggatttctgggatactgtccccaggagaatgctctatggccgaatctcacagtccggcagcacctggaggtatatgccgcggtcaagggcctgcgtaaaggtgatgcaatgatcgccattacacgccttgtagacgctctaaagctgcaggatcaattgaaggcaccagtgaagaccttatccgaagggatcaaaagaaaagccggtgatagcggccatctgtag

SEQ ID NO: 109179 - DNA, 3423 bp, synthetic construct
  misc_feature 1..3423: note = Description of Artificial Sequence: Synthetic coding sequence
  source 1..3423: mol_type = other DNA
atgagcgtcgggcagcaaacgtgggctctgctgtgtaagaactgcttaaagaaatggcgaatgaagcggcagaccttgctagaatggctctttagtttcctgctggtgcttttcctgtatctgttcttttctaacctccatcaagtccacgacaccccgcagatgagctctatggacctcgggcgggtagactctttcaacgataccaactacgtgatagcgttcgccccagagagtaaaactacccaggaaatcatgaataaggtagctagcgctccatttctcaaggggaggaccattatgggctggccagatgagaagtctatggatgaactcgatctgaactacagcatagacgccgtcagagtcatttttactgatacattcagttatcatctcaaattcagctggggtcaccgcatccccatgatgaaggagcacagggaccactcagctcactgccaggcagttaacgaaaaaatgaagtgcgaaggttccgaattctgggagaaaggcttcgtcgctttccaagccgctatcaatgcagctatcattgaaattgcgacaaaccattccgtaatggaacagcttatgagtgttacaggtgtacacatgaagatacttccatttgtagcgcaggggggagttgcgaccgacttttttatattcttttgtataatctccttctcaactttcatttactacgtgtccgtgaatgtgactcaggaacgtcagtacataacaagcctgatgactatgatgggtctcagggaatccgcattttggctgtcttgggggctcatgtacgctgggtttatcctcatcatggcaacacttatggctctgattgtgaaatctgcacagattgttgttctcaccggcttcgtgatggtcttcactctctttcttttgtacggactcagcctaattacactggcctttctgatgtctgtcttgataaaaaaacccttcctgactgggttagtggtattccttctcatcgtcttctggggaatcctgggatttcctgctctgtacactaggctccccgcttttctagaatggacgctgtgtctcctctctccttttgcttttactgtgggcatggctcagctgatccatctggattacgatgtcaatagcaacgcacacttggattcttcacagaatccatatttaatcatcgccacactcttcatgctcgtgtttgacaccttgctgtacttagtcttaacgctgtactttgacaaaatcttgcccgccgagtatgggcaccggtgttctcccttattcttcctgaagtcttgtttttggtttcagcatggccgggccaatcacgtggtgctggagaacgagacagatagtgacccgacacctaatgactgctttgagccagtctcgccagagttctgtggtaaggaggccatccgcataaagaaccttaaaaaggaatatgctggaaaatgcgagcgggtggaggctctcaagggcgtggtgttcgacatctatgagggccagataacagctcttttaggccacagcggcgccggcaagactaccctgctgaatattctcagcgggctgtccgtaccgacatcaggatcggtgactgtgtacaaccacacactgtccagaatggcggatattgaaaacattagcaaatttacagggttctgccctcagagtaacgtgcagtttgggttccttaccgttaaagaaaatctgagactgtttgctaaaattaagggcatcctgccgcatgaagtggagaaagaagtgcagcgagttgttcaggagctggagatggaaaacatccaggacatacttgcacagaatttaagcggaggccagaacaggaaactgacctttgggattgctatccttggcgacccacaggtactcctcctcgacgaaccaacagccgggctggatcctctcagtcgacaccgcatatggaacctactcaaagaggggaagagtgaccgcgttatcctcttttctacacagttcatagacgaagcggacatactggcagaccgcaaggtgttcatcagcaacggtaagctaaaatgcgccgggagttcactatttctgaagaagaagtggggcattggttatcatctgagtttgcatctgaacgaaaggtgtgatcccgagtccataacctctctggttaaacagcatattagcgatgccaagcttaccgctcagtcagaagaaaagttggtctacatacttcccctggagagaacaaacaaattccctgagctttaccgagatttggatagatgctccaatcagggtatcgaggattacggagtatccatcaccactctgaacgaagtcttcctaaagctcgaaggcaaatccacaatcgatgaaagtgatattggaatctgggggcaattgcagacagacggcgccaaagacatcggatcactcgtggaattagagcaggtgcttagttcctttcatgagactagaaagaccattagcggcgtggccctttggcgccagcaggtgtgcgctatagccaaggtgcgctttctgaagctcaaaaaggagcgcaagtcactgtggaccatccttctgctgttcggaatcagctttattcctcagctactggagcacctcttttatgaatcataccagaaatcatacccttgggaactgtcacccaacacttactttctgtccccgggacagcagcctcaggaccctcttacccatctcttagtgataaacaagacgggatctacaatcgataatttcttacattcactccggagacagaatatagcgatcgaagttgatgcatttggaactagaaacggtacagatgatcccagctataatggagctatcatcgtctctggtgatgagaaagatcaccgattctctatagcctgcaacacgaaaagactaaattgctttccggtcctgctggatgtaatttctaatgggctcttaggcatcttcaattcctctgaacacatccagaccgaccgcagcacattttttgaggagcacatggactacgaatacggctacaggtctaacaccttcttctggatcccaatggcagccagttttacgccctacattgctatgagctccatcggagattataagaaaaaggctcactcccagctgcgcatttcaggcctgtacccgagtgcctactggttcgggcaggcgctcgtcgacgtctcactctactttctgatccttctgttgatgcagattatggactacattttctcccccgaggaaattatttttataatccagaatctgctgattcaggtcgttatcttttcaattgttgctaccgacttaaatgaatatggattcctgggtctgttctggcatcacgtaaatacgagccttcacatcgattggttatctatacattttttttag

SEQ ID NO: 109180 - DNA, 2217 bp, synthetic construct
  misc_feature 1..2217: note = Description of Artificial Sequence: Synthetic coding sequence
  source 1..2217: mol_type = other DNA
atgcggggaccccctgcttggcccctccgtcttctcgagcctccctcgccagctgagcccgggcggttgctgccagtcgcttgcgtgtgggcagcagcgagcagagtcccaggctcgctcagccctttcacagggctgagacctgcacgcctgtggggtgccggtccagctctcctgtggggcgtgggggccgccaggcgttggcgcagcggatgcaggggcggcggtccaggcgcctcccggggcgtgttaggcctggcccggctgttgggcttatgggccaggggccccgggtcttgccgatgcggcgctttcgcaggtcccggtgcgcctagattgccccgtgcaagattccctgggggtcccgcggctgcggcctgggcaggagacgaagcctggagaagaggcccggcagctccacccggggacaagggaaggctccgtcctgcggccgccggtctgccagaagccagaaagctcctaggtcttgcctaccccgagaggaggagactcgcagccgctgtcggttttctcaccatgtccagtgtcatcagcatgagtgctcctttctttttgggcaaaatcatcgacgtcatatatactaaccccacggttgactatagcgataacctgacaagactgtgcttgggtctgtctgccgtgtttctctgcggtgcggccgctaacgcgattcgagtgtaccttatgcaaacctctgggcagagaatcgttaataggctgagaactagtctgttctcctcgatactgcggcaggaagtcgcatttttcgacaaaaccaggactggtgaactcattaaccggctctcttccgataccgcgctcctgggcagatctgtaactgaaaatcttagtgacggcctccgggctggcgcacaggccagcgtcggcatttccatgatgttctttgtctctccaaacctggcgacctttgtgctgagtgtcgtcccccccgtgagcattatcgccgtgatatatgggcgatacttgcgcaagctgaccaaagtaacccaggattccctagcccaggctactcagctggcggaagaaaggattggcaacgtgagaacggtgagggccttcgggaaggagatgacagagatcgaaaagtacgcatcaaaggttgatcacgtgatgcagctcgccagaaaagaagccttcgcccgtgccggcttcttcggggccaccggtctgtccgggaatttgatcgtgctaagcgtactctataaaggcggcttgctgatgggcagcgctcatatgacagtaggcgagctgtcatccttcttgatgtacgcgttctgggtgggaatttccatcggcggcctcagtagtttctacagcgaactgatgaaagggctgggagcaggcgggaggctgtgggaactactcgagcgcgagcctaaactgccatttaatgaaggcgtcatattgaatgagaagtctttccagggggcgttggaatttaaaaacgttcatttcgcctatcctgctagaccagaagtgccaattttccaggacttttccctgtctatcccatctggatcagttaccgccctggtcggtccgagcggctccggaaagtccacagtgctttctctgcttctgaggctgtacgacccggcctcagggaccatcagtctggatggtcacgacatcagacaactgaacccagtatggctacgcagcaagatcggcactgtgagccaggagcccattctgttctcctgctccatcgccgagaatatcgcctacggagcagacgatccaagcagcgttaccgccgaggaaattcagagggttgccgaagtcgcgaacgctgttgcctttattcggaacttccctcaggggttcaataccgtggtcggggagaagggagtgctgttgagcggaggccagaagcagcgaatcgccatcgctcgcgccctgctgaaaaacccaaagatactgttactggatgaagccacctcagctctcgacgcggaaaacgagtacctcgtacaagaggcacttgatcgcctcatggacggacgaacggttctggtgatcgcccaccgcctgtcaaccatcaaaaacgccaacatggttgccgtgctggatcaagggaagatcacagagtacgggaaacatgaggagctgctctccaagccaaatgggatctataggaagcttatgaataagcaatccttcatctcagcttag

SEQ ID NO: 109181 - DNA, 2529 bp, synthetic construct
  misc_feature 1..2529: note = Description of Artificial Sequence: Synthetic coding sequence
  source 1..2529: mol_type = other DNA
atggtcactgttggcaattattgcgaggctgaagggccagtgggccctgcttggatgcaggacggattatccccctgtttctttttcacactggtgccgtctaccaggatggccctgggcacgttagccctggtgctggccctgccttgcagaaggagggagcgccctgccggcgctgactctctgtcttggggcgccggtccccgcatctcaccctatgtgcttcagctactattggccactctgcaggcggcactgcctcttgcgggcctggcaggacgtgtgggcacagctcgcggggcgcccctgcctagttatttactactcgcttccgtgctggagtctctggccggggcctgcgggctgtggttacttgtagtggagagatcccaggcacggcaaaggctggccatgggaatctggattaagttccggcactccccagggctcctgctgctctggaccgtagccttcgccgcggaaaaccttgctctggtgtcgtggaatagtccccagtggtggtgggctcgcgctgatctcggtcagcaggttcagtttagcctttgggtcttaagatatgtcgtgagtggcggcctctttgtcctcggcctctgggctcctggattgcgcccccaaagttacacattacaggtgcatgaagaagatcaggacgtggagagaagccaggtccgatctgcagcacaacaatccacctggcgtgattttggcagaaaattgcggttgttgtccgggtatctgtggccccgaggctcccctgccctccaattggtggttctgatctgcttgggactcatgggactcgagcgtgccctcaatgtgttagtccccatcttttacagaaatattgtgaacctgctgaccgagaaggccccctggaattctcttgcctggaccgttacctcatatgtttttttgaaattcttgcaagggggcgggacagggtccacaggctttgtgagcaacctcaggacattcctgtggatccgggtccaacagttcacctcacgtcgcgtggaacttctgatcttctctcacctccacgagctttccctgcgatggcacctagggaggaggacaggcgaggtcttaaggatcgccgaccgcggaacgtcttcagtgactggcctgctgtcttacttggtgttcaatgtgattccgacactggcagacattattattggcattatatatttctccatgtttttcaacgcctggttcggcctgattgtcttcctgtgtatgtccctatacttaacactgactattgttgtcaccgagtggcggactaagttccgcagagcaatgaacacccaagaaaacgccacgcgggcgcgcgcagtggattctctactgaacttcgaaactgtcaaatactacaatgccgagagctacgaggtggaaaggtaccgtgaggctatcatcaagtaccagggtctggagtggaagagctcagctagtttagtcttgctcaatcagactcagaatttggtgatcggcctgggcctgcttgccgggtctcttctgtgtgcatatttcgtgactgagcagaagctgcaagtgggcgattatgtgcttttcggaacttacattatacagctctatatgcccttgaattggttcggcacatactaccgtatgattcagacaaacttcattgatatggagaacatgtttgatctcttgaaagaagaaactgaagtgaaggacctccccggtgcgggacccctgcgcttccagaaaggacggattgagtttgagaacgtgcattttagctatgctgacggacgagagaccctgcaggatgtgtccttcacagtgatgcctggacaaaccctcgcattggtgggcccctctggggcggggaagtcaactatcctccggctcctttttagattctatgatattagcagcggctgcatacggatcgatggacaagatatcagccaagtcacccaggctagcttgcgatctcacataggcgtggtaccacaggataccgtgctgttcaatgacactatcgctgacaacattcgatatggcagggtcacagcaggcaatgatgaggttgaagcggccgcgcaggccgcaggcattcacgacgccataatggcatttccagagggataccgaactcaggtgggagagcgcggactcaaactctctgggggggaaaaacagagagtggcaatcgcccgtacgatccttaaggctccagggatcattctgctggacgaagcgaccagtgccttagataccagtaatgaacgggccattcaggcttctttggccaaggtctgtgccaatcgcaccacaatcgtggtcgcacatcggctctctaccgtggtcaatgccgatcagattctggtgattaaagatgggtgcatcgtggaacgtggcagacatgaagctttgctgagtcggggcggagtctacgccgacatgtggcaattgcagcaggggcaagaagagaccagtgaggatacaaaaccgcagactatggaacgctag

SEQ ID NO: 109182 - DNA, 636 bp, synthetic construct
  misc_feature 1..636: note = Description of Artificial Sequence: Synthetic coding sequence
  source 1..636: mol_type = other DNA
atggttacagtgggcaattactgtgaggcagagggacctgtcggccccgcctggatgcaggacggactttcgccttgctttttttttaccttggtgccctccacccgcatggccctgggtaccctcgcgctggtcctggctctgccctgtcggagacgggagagacctgccggtgccgatagcctctcctggggcgccgggccccgaatcagtccatacgctctccccgggggaccccattgtcaggccatctacttttggcccccctgttggagagtgtggcccgcaccggttgcctgcggctgcctgagctggtctggggctcggcacggatcggtgtggcagtgggcgtcgggctcctcatcagggaccgccctggtttcttgctccagtggtctgtggagactacagctgaggacatggccctggtgtttaggcaccgcccacagcggtgggggacaaggccaaacgtgggcttcccgattcagtctggcctgcggatgctgcggtatgtggtcccttgaagggtgtttgagctgggtttccggcccacttgattttgtgccgagcccaattcactgcagattcatgaagcgcacaaagatgtggaagggggcctcagaactcgcagactag

SEQ ID NO: 109183 - DNA, 2391 bp, synthetic construct
  misc_feature 1..2391: note = Description of Artificial Sequence: Synthetic coding sequence
  source 1..2391: mol_type = other DNA
atggtgaccgtgggcaactattgtgaggccgagggccctgtcgggcccgcatggatgcaggacggactgagcccatgcttctttttcacactcgtgccttctaccagaatggcgctgggaacactcgccctggtcttagctctcccctgccgccgccgtgagagaccagccggggcagatagtctgagctggggcgccgggccaaggatcagtccctacgttttgcagctactgctggcaaccctccaggcagccctgcccctcgctggacttgctgggagagtgggcacagcacgtggggctcctcttccatcttacctcctcctagcaagtgtgctggagagcctcgccggcgcatgtggactgtggctgctagtggtcgaacgatctcaggcacgccagcggctcgctatggggatttggatcaagttcagacatagccccggtctccttctactctggacagttgccttcgcagctgagaatttggccctggtgtcatggaacagcccccagtggtggtgggcgcgcgccgatctcggacaacaggtgcgatccgccgcacaacagtctacttggagagacttcgggcgcaagctaaggctcctttccggttacctgtggcctaggggctcccccgccctccagctggtcgtgctgatctgcctgggtctgatggggctcgagagagccctcaacgtcttggtaccgatcttttacagaaatatcgtgaacctcctgacagagaaggccccttggaactctctggcctggacagttacttcttatgtgttcctgaaatttctgcagggcggcggtactggttctaccggatttgttagtaacctccgcacattcttgtggattcgggtacaacaattcacttcgcgccgggttgaactcttaattttctcacatctccacgagttatcgttgcggtggcatttgggcaggaggacaggcgaagttctacgtatcgccgaccgagggacatcaagcgtgaccggcctcctgagttacctagtgtttaacgtgatcccaacactcgccgacatcattatcggaatcatttactttagcatgttcttcaacgcttggtttggactgatagtgtttctttgtatgagtctatacctgacccttaccattgttgtgacagaatggcgcacaaagtttcgcagggcaatgaatacccaggagaatgctacccgggcccgcgcagttgactctctcttgaattttgagactgtaaagtactataacgccgaaagctacgaggtggagcggtatcgtgaggctattatcaaataccagggacttgaatggaaaagctccgcgagcctggtgctgctaaaccagactcagaacttggtcattgggcttggactcttagcaggtagtctcctttgcgcctactttgtcactgaacagaagctccaggtaggggactatgtgctgtttggcacttatatcatccaactgtacatgccattgaactggttcggcacctattaccgcatgatccagaccaacttcattgatatggagaacatgttcgatcttctgaaggaggagaccgaagtgaaagacctgccgggcgccggcccccttcggttccaaaaaggtagaattgaattcgagaacgtccacttctcttatgcggatggacgcgagaccttgcaggatgtaagtttcacagtgatgcctggtcagaccttggccttagtaggaccctccggtgcgggtaagagcacaattctcaggctattattccgattctatgatatttccagcggatgcatccgtatcgatgggcaggatataagtcaggttactcaggcatccctcagatcccatatcggggtcgtgccccaagacaccgtcttatttaatgacaccatcgccgataacattagatatggccgagtaacagccggaaacgatgaggtcgaggccgccgctcaagccgccggcatccacgacgccatcatggctttcccagaagggtatcggacccaagttggcgaacgaggcctgaaactttctggtggagagaagcaacgggtggctatcgcacgcacgattctgaaggcccccggaataatactgctggatgaggcaacttccgccttggacacgagcaatgaaagggctatccaggcatccctcgccaaagtctgtgcaaatagaacaactatcgttgtggcacaccggttaagcactgtggtaaacgcagatcagatcctcgtgataaaggacggctgtatagtggagcgtggaagacatgaggccctgctgtcaaggggtggagtttatgcggatatgtggcagctgcagcagggccaggaggagactagcgaggacacgaaaccgcagaccatggagagatag

SEQ ID NO: 109184 - DNA, 2262 bp, synthetic construct
  misc_feature 1..2262: note = Description of Artificial Sequence: Synthetic coding sequence
  source 1..2262: mol_type = other DNA
atggcactgctggccatgcattcctggcggtgggccgccgccgcagctgctttcgaaaaacggaggcattccgcaatcctgattcgccccctcgtgtctgttagcggtagcggacctcaatggagaccacaccagctcggggccctgggtaccgcccgagcatatcagcagattcctgaatcattgaagtccatcacttggcaacggttagggaaaggcaactccggtcagttcctggacgccgctaaggctctgcaagtgtggcccctgatcgagaaacgcacctgctggcatggccacgccggcggcgggctgcacaccgatccaaaggaggggctgaaggatgttgacactcgtaagattattaaggccatgctttcctacgtatggcccaaggacaggccagacctgagggcaagagttgctatatcactgggatttttggggggagccaaagcaatgaatatagtggtcccctttatgttcaaatatgccgtcgattctctcaatcagatgtcaggtaatatgctgaacctgtccgatgcacctaacacggtggcaaccatggcaacagcggtcctcataggatatggggtgtcacgtgccggagctgcgttctttaacgaggtgaggaatgcagtgtttggtaaggtcgcccagaattctataaggagaatcgccaagaatgttttcctacacctgcacaacctcgatttggggttccacctcagtcggcagactggcgccctctccaaagctatagacaggggcaccaggggaatttctttcgttctctccgctttggtttttaacctgctccccatcatgttcgaagtgatgctagtgtccggcgtgctctactataaatgcggcgcccaatttgcgcttgtgacactgggaactctcggcacctacactgcattcacggttgcagtgacaagatggcggacaaggtttagaatcgagatgaataaggccgacaacgacgcagggaatgccgctattgactcccttcttaactacgaaaccgtcaagtattttaataacgaacggtacgaggcacagcgctatgatgggtttctcaagacctatgagactgcctctttgaaatctactagcaccttggcaatgttgaatttcggccagagtgctattttctccgtgggcctgactgcaattatggttctggcaagtcagggaatcgtcgccggcacgctgactgtcggggacttggtgatggtgaacggcttgctattccagctgagtctgcctctgaactttttgggcaccgtgtacagggagaccaggcaggcactcatcgatatgaatacactgttcacattgcttaaagtcgatacccagatcaaagacaaagttatggcatctcctctgcagatcacaccccagaccgcaacagtggcattcgataatgtgcatttcgagtacatcgagggccagaaggttctcagcggtatctctttcgaggtgccagctggaaaaaaggtggcaatcgttggcggatctggcagcgggaagtcgaccatcgttcgtctactgttcagattttacgagccccagaagggaagcatctatcttgccggccagaacatccaggacgtatcacttgaatctctgaggagggctgtcggagtcgttccgcaggacgccgtcttgtttcacaacacaatttattacaatctcctctatgggaatatcagtgccagtcccgaagaagtgtatgcagttgccaaactcgcaggactgcacgatgcaattctacgtatgccccacggatacgacacccaggtcggagagcgtgggctaaaactgagtggtggagagaagcaacgggtcgcaatagcgcgagcaattctaaaggaccctcccgtaatcttatacgatgaggctacttcctccttggatagtatcactgaggagactattcttggggccatgaaagacgtagttaagcacagaaccagtatcttcatagctcatagactatccactgtagtggacgccgacgagatcattgtccttgaccagggcaaggtagcagaaaggggcacgcaccatggcctgcttgctaaccctcacagcatctatagtgagatgtggcacactcagtcaagtagagtgcagaaccatgacaacccaaagtgggaggcgaagaaggagaatatcagcaaggaagaggagagaaaaaagttacaagaggaaatcgtcaacagcgtcaaagggtgtggcaattgctcttgttag

SEQ ID NO: 109185 - DNA, 2259 bp, synthetic construct
  misc_feature 1..2259: note = Description of Artificial Sequence: Synthetic coding sequence
  source 1..2259: mol_type = other DNA
atggcattgctggccatgcacagctggcggtgggcagcagccgccgcggccttcgaaaaaagacggcacagcgctatcctgattcgccccctcgtcagcgtgagcggaagcgggcctcagtggcgtccacaccagctaggagcattagggaccgcgagagcctatcagattcccgagtctctgaagtctatcacttggcagaggcttggtaaaggcaacagcggccagttcttggacgccgccaaggccctccaggtctggccgctcattgagaagcggacgtgctggcacggccacgccggtggcgggctgcatactgaccctaaagagggcctgaaggatgtcgatacccgtaagattatcaaggctatgctcagttacgtctggcccaaagacaggcccgacttacgggctcgcgtagccatcagcctgggattcttaggaggggctaaggctatgaacatagttgtgccttttatgttcaagtacgccgtggactccctgaatcagatgtctgggaacatgctcaatttgtctgacgcaccgaataccgtggccactatggccacagccgtactgatcggctacggcgttagtagggctggagctgccttctttaacgaagtcagaaacgccgtgttcggcaaggtggctcaaaactctattcgtcgcatcgctaagaacgtctttttgcacctccacaatcttgatctggggtttcacctctcgaggcagacgggggctctgtccaaagccatcgatcgaggcactcgtggtatctcctttgtgttgagtgccctcgtgttcaaccttctgcctatcatgttcgaagttatgctcgtgtctggggtgctgtattacaaatgcggggctcagttcgccctagtcactttaggaactctgggtacctacactgcctttacagtcgcagtcactcggtggcgcaccaggtttcgcattgagatgaacaaggctgacaacgacgccgggaacgccgccatcgatagccttctgaattacgagaccgtgaagtatttcaacaatgagcgctatgaagctcagcggtacgacgggttcctgaagacctacgaaacggcatctctcaagtcgactagcactcttgccatgctgaacttcggccagtccgcaatcttcagtgtcggtctcactgccatcatggtgcttgcctctcagggcatagtggctggaacacttactgtcggtgacctggtaatggtcaatggcctcttatttcagctctcactccccctcaatttcctcgggaccgtttaccgggagactcggcaggcattgatcgatatgaacactctgttcaccctgctcaaggtagatacccagatcaaggacaaggtgatggcatctcccctccagattacccctcagacggcaacagtggccttcgataatgtgcatttcgagtacattgagggtcaaaaagtgctgagcggcattagcttcgaggttcccgcgggcaagaaagtggccattgtgggaggcagtggatctggcaagagcactatcgtccgactgctgtttagattctacgaaccacagaaaggatccatctatctcgccggccagaacatccaggacgtcagtttggaaagtctgagacgcgccgtgggcgtggtgccgcaggacgctgtgctctttcacaatacaatttattacaatttgctgtacggcaatatcagtgccagccccgaggaagtctacgcggttgcgaaacttgcagggttgcacgacgccattctgcgaatgccacacggctatgatactcaggtcggcgagaggggccttaagctctccggaggcgagaagcagcgcgtcgctatcgcccgtgccatactgaaagatcctcccgtcatactgtacgacgaagcaacgagcagtctcgacagtatcaccgaggagaccatccttggcgcaatgaaggacgtggtaaaacaccgcactagcattttcatagctcacaggctctccactgttgtggacgctgatgagatcatcgtcctggaccaaggaaaggtggctgagaggggaacacatcacggccttctcgcaaaccctcattcaatttattccgaaatgtggcacacccaaagcagccgagtgcaaaaccatgacaaccccaaatgggaggccaaaaaggagaatattagcaaagaagaagaacggaaaaaactccaggaggagattgtgaattcagtcaaaggatgcggtaattgttcttgttag

SEQ ID NO: 109186 - DNA, 2109 bp, synthetic construct
  misc_feature 1..2109: note = Description of Artificial Sequence: Synthetic coding sequence
  source 1..2109: mol_type = other DNA
atggcccttctcgcaatgcattcctggaggtgggccgctgctgcagctgccttcgagaagcgtagacactccgccatattaatcaggcccctggtctcagtgagtggttccggaccacagtggcgaccacatcagctcggtgcactaggaaccgccagggcttatcaggccctgcaggtatggcctcttattgaaaagcggacctgctggcacggccatgcaggaggcggactgcacacggaccctaaagaaggcctgaaagatgtagatacacggaaaattatcaaagcaatgctgtcttatgtgtggccgaaagacagacctgatctgagagcccgtgttgcaatctcgctcgggtttctagggggggccaaagctatgaacattgttgtgccgttcatgttcaagtatgctgtggatagccttaaccaaatgtccggaaacatgctgaatctgtctgacgcccccaatacagtggccactatggctacagccgtgctgattggatatggggtgtccagagcgggagcggcatttttcaacgaagtgcggaacgcagtgttcgggaaagtcgctcagaattctatcaggcgcattgccaaaaacgtcttcttgcatctacacaacctggatctgggcttccatttgtctcgccaaacaggcgccttatcaaaagcaatagaccgaggcaccagggggatctcatttgtgctcagcgctctggtcttcaatcttctaccgatcatgttcgaggttatgctggtatcaggtgtcctctattacaagtgcggggcacaattcgcgctggttactcttggtaccttagggacttacactgcatttactgtggctgtgactcgttggcgtacccggttccgcatcgagatgaataaggctgacaacgatgccggcaacgcggctatcgactctttgctcaactacgagaccgtgaaatatttcaataacgagaggtatgaagcacagcgttacgatggattccttaaaacatacgaaaccgcatccctgaagagcacctccactctggctatgctgaactttggccagtctgccattttttcagttggcctgactgctattatggtcctggcctcccagggaatagtggctggaactctgacagtgggtgacttggtcatggttaatggactgctgtttcagctgtcccttcctctgaatttcttgggtaccgtttatcgcgaaaccaggcaggccttaattgacatgaatacgctcttcacattgctgaaggtcgatacccagatcaaagataaggtcatggcatctcccctgcagatcaccccccaaacagccactgtagcattcgacaatgtgcattttgagtacattgagggacagaaggtgctttccggcatctcgtttgaagttcccgcagggaaaaaagtggccatcgtgggcggatcaggatcgggaaaatcaaccatcgtgcgactgttgtttcgattttatgagcctcagaagggatcgatttacctagccggccagaacatccaagacgtgagcctcgaaagcttgcggagggcggtcggcgttgtcccgcaggacgccgtactgtttcacaataccatttactataacctgctgtacgggaacatcagtgctagccccgaggaagtctacgccgttgcgaagctggccggtctgcacgacgccattctccgtatgccacatggatatgatactcaggtgggagagagaggcttaaagttgtcgggcggcgagaagcagagagtcgcaatagcccgggcaattctgaaagacccccccgttatcctgtacgacgaggccacatcatcactggattccataaccgaggagaccattctgggggctatgaaggatgtagtgaaacatagaacctccatcttcattgcacaccgactgtccaccgtggtggacgcggacgaaatcatagtcctagaccagggcaaggtggccgaacgggggacccatcatgggctgctggccaaccctcattcgatctatagcgagatgtggcacacccagtcctcaagggttcagaaccacgataatccaaagtgggaggcaaagaaggagaacatctcatag

SEQ ID NO: 109187 - DNA, 2181 bp, synthetic construct
  misc_feature 1..2181: note = Description of Artificial Sequence: Synthetic coding sequence
  source 1..2181: mol_type = other DNA
atggcactactggccatgcactcttggcgttgggctgccgctgctgccgccttcgagaagagacgtcacagtgccatcctaatccggccgctcgtctcggtgagcggcagtggtccacagtggaggccgcaccaattaggggccctcgggacagcccgggcataccaggctctccaagtttggcccctgattgagaaacgcacttgctggcatgggcatgcgggcggaggactacacactgatcccaaagaaggcctcaaggacgtagacacgcgaaaaatcatcaaagccatgttgtcctatgtgtggccaaaagatcgcccagatcttagagctcgggtcgccatttcattaggctttctcggaggggcaaaggccatgaatatcgtcgtcccatttatgttcaagtacgctgtggacagcttaaaccaaatgagcggcaacatgctgaacctcagtgacgctcccaacaccgtagctacaatggccaccgctgtgctgatcggatatggcgtgtctcgcgccggggctgccttttttaacgaggtcagaaacgctgtgttcgggaaggtggctcagaacagcatccggcgcattgccaaaaatgtgttccttcatctgcacaatttggacctcgggtttcacttgagccgtcaaactggcgcattgtcaaaggcgatcgaccgaggcactagaggcatctcattcgtcctcagtgctttggtgttcaacctcctcccgattatgttcgaggtaatgctggtgtccggtgtactctattacaaatgtggggcacagtttgccctggtgactttaggcactctggggacctacactgcattcaccgtagctgtgacacggtggcggaccagatttaggatcgagatgaataaggcggacaatgatgccgggaatgccgcaattgacagcctactgaactacgagactgtgaaatacttcaacaacgaacgctatgaggctcaacgatatgacggatttctaaaaacatacgaaacagcgtccctgaaatccacctctaccctggccatgcttaactttggacagagcgccatttttagtgtggggctgacagctatcatggtgttggcaagccagggaattgttgcaggtacattgacagtgggcgaccttgtgatggtcaacggccttctgtttcagctctccctccccttaaacttcctgggcacggtgtaccgtgaaacaagacaggcgctcattgatatgaacaccctgtttacactgctcaaagtggatactcaaatcaaggacaaggtgatggctagccccctccagataactccccaaaccgctacagttgcttttgataacgtacactttgaatacattgaaggacagaaggtgctcagtggaatatccttcgaagttcccgctggaaaaaaagtggccatcgttggtggaagcggcagtggaaaaagcactatagtgcgtctgttgttccgattctatgaaccacaaaaaggctcaatatacctcgccgggcagaacatccaggatgtcagcctggagtccttgcgtcgcgccgtgggggtggttcctcaggacgcggtcttgtttcacaacacgatatactacaaccttctttatggtaacatcagcgcatcaccggaggaggtctacgcagtggccaagttagctggattgcacgacgcaatcctaaggatgccacacggctacgatactcaggtgggcgaacgcggactgaagctctccggaggagagaagcagcgcgtagctatcgcccgagcaatcctgaaggatcctccagtgatactctatgacgaagcaacttcctccctggacagcattaccgaagagaccatccttggggccatgaaagacgtggttaagcaccgcacaagcattttcattgcccacaggctgagcactgtggttgacgcagacgagataattgtgctggatcaagggaaggtggcagaaagaggcacccaccatggcctgctggcaaaccctcatagcatttacagcgaaatgtggcacacacaaagttcaagggtgcagaatcacgacaatccaaaatgggaggccaagaaggagaatataagcaaagaggaggagagaaaaaaactgcaggaggagatcgtgaattcagtgaagggatgtgggaattgcagctgctag

SEQ ID NO: 109188 - DNA, 2208 bp, synthetic construct
  misc_feature 1..2208: note = Description of Artificial Sequence: Synthetic coding sequence
  source 1..2208: mol_type = other DNA
atgttagtgcacttattccgagtcgggatccgcggaggtccttttcccgggcgcttactaccaccccttcgcttccagaccttctctgcagttagaaatacctggcggaacgggaagacaggccagcttcataaagcggaaggggagtactcagatggatatcgaagctcatctctgttacgcgctgtggcccacctccgcagtcagctgtgggctcatctcccacgcgctcccctggccccaagatggtctccatcggcctggtgctgggttgggggagcactgctgggccctatggtgcttagcaagcacccacatctgtgtttggtcgctctctgcgaggctgaggaggcaccaccggcatcatccacaccacacgttgtcggctcccgcttcaattggaagctcttctggcagttcctgcatcctcacttactcgtgctcggggtcgccgtggtcctggcgctgggtgccgcgctcgtcaacgtgcagatccccctgctactcggccaactcgttgaggtcgtggcaaaatatacccgtgatcatgtgggatcgtttatgacagagagccaaaatctgagtactcatttgctaattctgtacggcgtgcaaggcctgctgaccttcggatatcttgtcctcttaagtcacgtgggcgaacgaatggccgtcgacatgagaagggcgttgttctctagcctgcttagacaggatatcaccttctttgacgctaataaaaccggccagctggttagtcggctgactacagatgtccaggaatttaaatctagcttcaaattagtaatcagtcaggggcttcggagttgcacacaagtcgccggatgccttgtaagcctctccatgcttagcactcggctgacgctcctgctgatggtggctactcccgccttaatgggcgtcggtacacttatgggcagtggcttgagaaagctaagtaggcaatgtcaggaacagattgcaagggcaatgggcgtcgctgacgaagccttaggcaacgtccggaccgtgcgcgcttttgccatggaacaaagagaagaggagcggtacggggcggagctcgaagcctgtcggtgtagagctgaggagctcggccggggcattgcgctgtttcaggggctgagtaacatcgcctttaattgtatggtgctcggcactctctttataggtggaagcctggtggcggggcagcaactaaccggcggggacttgatgagctttctggtggcatctcagaccgttcagcgttctatggcaaaccttagtgtcctttttggccaggtggtgcgtggcctctctgcgggcgctagggtattcgaatatatggcgctcaacccttgcatccccctctcaggaggttgttgcgtgcccaaagagcaactgagaggctcagtgacgttccaaaacgtctgtttcagttatccttgccgtccaggatttgaggtgctgaaagattttaccctgaccctgccccctggtaaaatcgttgctctcgtcggacagagcgggggcggtaagaccacagtcgcctcgctcttagaacgcttctacgatcctacggcaggtgtagtgatgcttgacggtagggatttaagaacattagacccgagctggctgcgaggccaggtcgtgggttttatcagccaggagccagttctgttcgggacaaccattatggagaatatccgcttcggcaagctcgaagcaagtgacgaggaagtctacacagctgcccgtgaggcaaacgcccacgagtttattacctccttccctgagggttataataccgttgtcggggagaggggtacaacattgtcaggtggtcagaagcagagactggccattgcgcgagccttaatcaagcaaccaactgtcttgatcttagatgaggcgacaagcgccttggacgctgaatctgagcgcgtcgtacaggaggcgctggatcgagcttctgctggccggaccgtcctcgtcattgcgcatcgactgtccacggtgagaggcgcacattgcattgtcgtgatggcggacggacgggtctgggaggcggggacgcacgaggagctcctgaagaagggtggactgtacgcagagctgatccggaggcaggctctggacgccccaaggacagctgctcctccgccaaaaaaacccgagggtcccagatcccaccagcacaaaagctag

SEQ ID NO: 109189 - DNA, 1404 bp, synthetic construct
  misc_feature 1..1404: note = Description of Artificial Sequence: Synthetic coding sequence
  source 1..1404: mol_type = other DNA
atgctcgttcacctttttcgtgtcgggatccgggggggaccgtttcctgggcgcctgctccctcctttacgcttccagacgttttcagccgttaggaggctattgcggctgcagccacgggtgtcccagaaggaaggtaccctcggggtgagcgaccatgcccagtccgccctgcccacgggtggacccctctcctggccttggagatatagcgatgggtatagatcctcgagcttgcttcgcgccgttgctcatctgagatctcagttgtgggcccatctgcctagagcacccctggcgccccgttggtccccgtctgcatggtgttgggtgggcggagctctgctgggtccgatggtactatccaagcatcctcacttgtgtctggttgccctatgcgaggccgaggaagctccacctgcctcctccacaccccatgtggtaggctcgagatttaactggaagcttttttggcagttcctacatcctcatctcttggtgttaggcgttgccgttgtgttggctttaggggccgcgctggtgaacgtgcagatcccacttctcctcggccagttagtggaagtcgtcgcaaaatacactcgggaccatgttgggtctttcatgaccgagtctcagaatctgtctacccatctgcttattctgtatggggtgcaaggtctcttgacattcgggtatctggtgctcctgtcccacgttggggagagaatggccgtggatatgcgcagggccctgttttcaagcctgttaaggcaggacatcactttctttgacgctaacaagacagggcagcttgtaagcagacttactacagacgtgcaagagttcaaaagctcgttcaaactggtcataagccagggacttcgctcatgcacacaggtcgcgggctgcctagtgtctctgtctatgctcagtacccgtctgacgttgctgctcatggtggccaccccagccctaatgggtgtcgggacactaatgggtagcggtcttaggaagctctctagacaatgccaagagcagattgctcgggctatgggggtcgctgacgaagcactcggaaatgttagaacggtgcgggcttttgctatggaacagcgtgaggaagaacgttacggcgctgagctggaggcttgtaggtgtagagcagaggaactcggcaggggcattgccctgtttcagggtctttccaatatagctttcaactgcatggtcctgggaactctctttattggcggcagcctcgtggcaggccagcaactgactgggggagacttgatgtccttcctggttgcctcacagaccgtgcagagacaagtccacgggcagccattatgccctgtctgggcaggaggccccggagcagagtgtagatgccccggcctgtag

SEQ ID NO: 109190 - DNA, 2157 bp, synthetic construct
  misc_feature 1..2157: note = Description of Artificial Sequence: Synthetic coding sequence
  source 1..2157: mol_type = other DNA
atgttggtgcatttattccgtgttgggattaggggtggcccgttcccaggaagactactgccacctcttcgtttccagacattttctgcagtccggtactccgacggctacagaagctccagcctgctgagggccgtcgcgcacctgcgaagtcaattatgggctcacctgccaagggcacctctggccccccgatggagccccagcgcctggtgctgggttgggggagcactcctggggcccatggttttgtctaaacatcctcacctttgcctcgtcgccctatgcgaggccgaagaggctcctcccgcctcatccaccccccacgtcgtcggatcgcgctttaactggaagctattttggcagttcctgcatccacacctcctcgttttaggagtcgccgttgtcttagctctgggcgcagccctcgtgaacgtgcagattccactgttgctgggacagctggtggaggtggtcgccaaatacacccgggatcatgtcggctccttcatgacggagtctcagaacctgtctacccatctgctgatcctgtacggagtgcagggcctgcttacgttcgggtacctggtgctactgtctcacgtgggggaacgaatggctgtggatatgagaagggcccttttcagttcactgcttaggcaagatattactttttttgacgcgaacaaaaccggccaactggttagcagactgaccactgacgtacaggaattcaagtcatcctttaagttagtgatcagccaggggctgcgatcctgcactcaggtagctggttgcctggtaagtttgtccatgctctctactcggctgacactcctgctgatggtggctaccccagctctaatgggcgtgggcaccctgatgggcagtggactgcgaaagttatcaagacagtgtcaggaacagatcgcccgcgctatgggggtcgccgacgaggctttaggcaacgtcagaacagttagagcttttgccatggagcagagagaagaggagcgttacggggcagagctggaagcttgtcgatgtcgtgctgaggagctgggacgtggcatcgccctctttcaaggcctctctaacatagctttcaattgtatggtgcttgggaccttgttcatcggcggctctctggtggccggccagcagttgacaggtggcgacctgatgtccttcctagtggcttcgcagaccgtacaaaggagtatggccaacctctcagttctctttggacaggtggtgcgaggtctctcggcaggagcacgggtcttcgagtacatggctctgaacccgtgcatccctctctctggaggatgttgtgtgcctaaggaacagcttcgcggctctgtgacttttcaaaatgtgtgcttcagttacccgtgtcggcctgggttcgaggtcctcaaagactttacgttgaccctcccccctgggaagatcgtagctttggttggtcagagtgggggcggcaagaccaccgtcgcctcccttttagagaggttttacgatcctactgccggggtcgtgatgctggatggccgggaccttcgtactctggacccatcctggctgcggggccaagtcgtgggcttcatctcgcaggaaccagtcctttttggaaccacaattatggagaatataaggtttgggaagctcgaggcaagtgatgaggaagtctatacagccgcccgtgaagcaaatgcccacgagttcattacgtcctttccagaggggtataacaccgtagtcggtgagcggggcactactctcagtgggggccagaagcaaagactggcaatcgccagggccttgatcaagcaacccactgttctaatcttagacgaggcaacctcggcgctcgacgcagaatctgaaagagttgttcaggaagcgctggacagggcaagtgcaggtaggaccgttttagtaattgcacaccgtcttagcaccgtccgaggagcccactgtattgtagtgatggctgatggacgggtttgggaagcaggaacgcacgaggaacttttgaaaaagggtgggctgtatgcagagcttatccgaaggcaggccctggatgcgccacggacggctgctccgcccccaaagaagcccgagggtccacggagtcatcaacataaaagctag

SEQ ID NO: 109191 - DNA, 2106 bp, synthetic construct
  misc_feature 1..2106: note = Description of Artificial Sequence: Synthetic coding sequence
  source 1..2106: mol_type = other DNA
atgctagtacacctctttagggtggggatcaggggcggtccattccccggcaggctcttgccccccttacgattccaaactttctcagccgttcgctactctgacgggtaccggagcagctcactgctgcgggcagtggcccatcttcggtcccagttgtgggcccatctgcctcgagccctgctggggccaatggttctcagcaaacacccacatctttgcttggtagctctgtgtgaggcagaggaggccccccctgcgtccagtacaccgcacgtggtcggcagcagatttaactggaagcttttttggcagttcctccacccacacctgctcgtgcttggggtggccgtggtgcttgccctaggtgcagcactggtcaatgtccagatccccttgttgttaggacagctggtggaggtggtcgcaaagtatacccgggaccacgttgggtcttttatgactgaaagccagaacctgagtactcacctgttaatattatacggcgtgcaggggctgctgacgttcgggtacctggtgctcctctcccacgtcggggagcgcatggctgtagatatgcgtcgagctctcttcagtagcttgcttcgtcaggatataacttttttcgacgcgaacaagacagggcagctggtgtccaggctcaccacagatgtccaggagtttaaaagctccttcaagcttgttataagccagggactgagatcctgcacccaggtggccgggtgtctcgtgtccctttctatgctgtcaaccaggctgactttgcttttgatggtggctacacctgcgctcatgggggtggggaccttgatgggcagtggcttgcgaaagctgtctcgccaatgtcaggagcagatagcccgggcgatgggcgtggctgatgaagccctgggaaacgtccgtacggtccgggcattcgcaatggaacaaagggaggaggagcgatacggcgctgaactggaggcatgcagatgccgcgccgaagaactgggtagaggtatcgccctcttccaaggcctgtctaacatcgccttcaattgtatggtactggggaccctgttcattggtggatctctggtagcagggcagcagctgactggaggcgatctcatgtccttcctggtggctagtcagactgtgcagaggtcaatggccaatctcagtgttctgttcgggcaagttgtgcgaggactaagcgccggcgcgagagtttttgagtatatggccctgaatccctgtatcccacttagcggcggctgttgcgttcctaaggagcaactgagaggatccgttacctttcagaatgtttgcttcagctacccgtgtcgcccaggttttgaagtgcttaaagacttcacacttaccctgccccctgggaaaatcgtggcgttagtgggacagtccgggggaggaaagaccactgtcgcctctttgctggagcgcttctacgaccctacagccggcgtcgtgatgttggatggtcgggatctacggacactggacccaagttggctgcggggccaggtggtgggctttatatcccaggagccagtgctcttcggcacaacaataatggaaaacattcgatttggcaagctggaggccagtgatgaggaagtttacactgctgcgagagaagccaacgcccacgagttcatcaccagttttcctgaggggtacaacaccgtggtgggtgagaggggcaccactctctcaggagggcagaaacagcgcctggctattgcgagagcgttaatcaaacagcctactgtactgatcctcgatgaggcgacctcagccctggacgctgaaagcgaacgcgtggtacaggaggcactcgatagagcatctgccggtaggacagtgctggtcatcgcccatagactcagtaccgtacgcggagcacactgcattgtcgtcatggctgacggtagggtgtgggaagccggcacacacgaggaattgctgaagaaggggggactatatgcggaattgattagacgccaggcattggacgccccaaggaccgccgcccctccacccaaaaagcccgagggccctaggtcccatcagcacaagtcctag

SEQ ID NO: 109192 - DNA, 1296 bp, synthetic construct
  misc_feature 1..1296: note = Description of Artificial Sequence: Synthetic coding sequence
  source 1..1296: mol_type = other DNA
atgctagtgcacctcttccgggttggaatccgaggcggtcccttcccgggtcgcctattgccccctctccgctttcagacatttagcgccgtgaggtatagtgacggctacagatccagttccctgcttcgcgctgtggcacatctcagaagccagctgtgggcacatctcccccgggcccccctcgccccaagatggtcgccttctgcttggtgctgggtcggaggcgcactactgggacccatggtcctatctaaacaccctcacctctgtctggttgcactctgtgaagccgaggaggcccctcctgctagcagcacacctcatgtggtgggtagccgatttaattggaagcttttttggcagtttttacaccctcatcttctcgtgctgggcgtggctgtcgttctggcattgggtgccgccttggtcaacgtccagattccactcctcctagggcagttggtggaagttgtggccaagtatactcgggatcacgtcgggtcttttatgacagagtcacagaacctctccacccatttgctgatactttatggtgtgcaggggttgctaacatttggatatctcgtcctcctaagccatgtcggagaacgcatggcggttgacatgcggcgtgccctgttctcatcgttgctcaggcaagacatcacattttttgacgccaacaaaactgggcaactagtctcacgtctgacaacggatgtgcaggaattcaagagctccttcaagctcgtgattagccagggacttcggtcatgcacccaagttgccggctgtctggtgtcattaagtatgctcagcacccgcctgaccctcctgctgatggtggcgactcccgctctgatgggagttggtacgctcatgggaagcggtctccgaaagttgtcgagacagtgccaagaacagattgcccgcgccatgggggttgccgacgaggccctgggaaacgtacggactgtgagggctttcgctatggagcagcgcgaagaggaacggtacggcgccgagctcgaagcctgtcgctgtagagctgaggagctcgggcggggaatcgccctgttccagggattgtctaatatcgcctttaactgtatggtcctcggtacactgtttataggcggcagcctggtagcgggtcagcagctcaccggcggagatctcatgagctttcttgtggctagccagacagtccagtccttcctgcgtgtggctccctgccccaacagcctgccactccaggccgtaacattccatgcctggaaggatcatccgtag

SEQ ID NO: 109193 - DNA, 2082 bp, synthetic construct
  misc_feature 1..2082: note = Description of Artificial Sequence: Synthetic coding sequence
  source 1..2082: mol_type = other DNA
atgctggtgcacctgtttcgcgttggcattaggggagggcccttccctggccgcctgttaccacccctccgattccaaaccttctctgctgtccggtattctgacggctacaggtctagctctcttttaagggctgttgcacacctcagatcccagctctgggctcacctgccacgggctccactggcccctcggtggtctccttccgcttggtgctgggtcggaggcgcattgttaggtcctatggtgctgtctaaacatccccacctttgtttggttgcgctctgtgaggctgaagaggcccctccggcgagtagcactccgcacgtcgtggggagccgcttcaattggaaattgttctggcagtttcttcacccacacctgctagtgctgggggtggcagtggtgctggccctgggtgccgccctggttaatgttcagatcccactgttacttggccaattggtggaagtggtggcgaagtacacacgggaccacgtggggtcctttatgaccgagtcgcaaaatttgagcacacatctgctcatcctgtacggggtgcagggactcctaacatttgggtatctggttctgctaagtcatgtgggcgaaagaatggccgttgatatgcgtagggcactgttcagcagcctgttacgccaggacataaccttttttgatgctaataagaccggacagctggtgtcgcgcctcacaacggacgtgcaggaattcaaatcctctttcaaactggtgatcagccagggtttgcgtagttgtacacaggtcgctggctgtttggtgagtctctccatgctgtcaacccgcctgactcttctgttgatggtcgctaccccggcgctcatgggcgttggaacgctgatgggcagtggattacgaaagttgtctcggcagtgtcaggagcagatcgcccgtgctatgggcgtagccgatgaagcactggggaacgtccgtaccgtaagggctttcgccatggagcagcgggaggaagaacgctatggagccgagctggaggcttgtcggtgcagggccgaagagcttggacgcggaatcgctctcttccagggcctgtccaatatcgccttcaattgcatggttctgggaactctgttcattggaggtagcctggttgccggccagcagctcacaggaggcgatcttatgtcgtttctcgtcgccagccagaccgtacaaagatccatggcaaatttgtccgtgctattcggtcaggtggttagaggcctgtcagctggcgccagagtcttcgagtatatggcactgaatccttgtattcccttgtcagggggatgttgtgtgcctaaggagcaactccgcggaagcgtcacttttcagaatgtatgcttttcatatccctgccgacctggattcgaagtattaaaagactttacccttactctgccacctggcaagattgtggccctggtgggccaaagtggggggggcaagaccacagtggcgtctctcctagagcgcttttatgatcctactgcaggggtcgtgatgctcgacggacgagacctacggaccctggatccgagctggctgagagggcaggttgtgggcttcatcagccaggaacctgttctgtttggcactacgatcatggagaacattcggttcggaaagctagaggcaagtgacgaggaggtctataccgccgcacgagaagctaacgcccacgagttcatcacctccttcccagaaggatacaacactgtagtgggcgaacggggcaccactctctctgggggccagaagcagcgccttgccatcgcaagggctctgattaaacagcccaccgtactgatcctggacgaggccacttccgccctcgatgccgagtcagaaagggtggtgcaagaggcgttagacagagcatctgctggacgcaccgtgttggctggaacgcacgaagagcttttgaagaaggggggactttacgcggagctgataaggaggcaggccttggacgcccctcgcacagctgctccccctcctaaaaagcctgagggaccacgttcccatcagcataaatcgtag

SEQ ID NO: 109194 - DNA, 1893 bp, synthetic construct
  misc_feature 1..1893: note = Description of Artificial Sequence: Synthetic coding sequence
  source 1..1893: mol_type = other DNA
atgagggtgaagcttctcctccctgccgcgcccgtgctgcctcggcagcatgcaggcgctttcatctccggacgggactcgggctggccaatccctcgccaagcggctaccgcacctccccttccagacatcctgtcctgccagctcgcattaggcgccgctttggtgaatgtacagatacccctactgcttgggcagctagtcgaggtggtagcgaagtacactcgggaccacgtggggagtttcatgacagagtcccagaacctgtctacgcacctgttaatcctgtacggtgtgcagggcctgctgactttcggctacctggttctgctgtcccacgtgggagaaagaatggccgtcgacatgcgacgcgccctgtttagctctctgctgagacaggatatcactttctttgacgcaaataaaacaggccagctggtttcacgcctcaccaccgacgtacaggagttcaaatccagctttaagttagtgatcagccaaggacttaggtcttgtactcaggtggcggggtgcctggtgagtctatccatgctgagcacaagactgacactgctgttaatggtggcgacgcctgctctcatgggagtgggaacactgatgggcagcggcctgcgaaaattatctagacaatgtcaggagcagatcgcgcgagccatgggcgtagcagacgaggcactgggcaatgtgcgcacagtcagagctttcgctatggagcagagggaagaggagagatatggcgcggagctagaagcctgtcggtgcagggcagaagagctcggccggggaatcgccctctttcagggcctgagtaacatcgcctttaattgcatggtgctcggaacattgtttataggcgggtccttggtggccgggcaacagttgaccggcggggatctgatgagctttctggtggcctcccagactgtacagcgatccatggcaaatctatctgtgttatttggacaagtcgtaagaggattgagcgctggtgctagggtcttcgaatacatggctcttaatccttgcattcctcttagcgggggctgttgtgttccgaaagaacaactccgcgggtccgtgacgttccagaatgtctgtttctcatatccttgccgtccaggttttgaggtcctcaaggactttacactgaccctccctccaggaaagattgtggccttggtaggccagagcggcggaggcaaaaccacagttgctagtctcttagagcgtttctatgaccctaccgctggggtcgttatgctagacggacgggaccttcggaccctggacccttcctggctgaggggacaagttgtgggcttcatttctcaggaaccagtgctgttcggcaccaccattatggaaaatatacgtttcggaaaactcgaggccagtgacgaggaagtgtacacagcagcgcgagaagccaatgcgcacgagttcatcacttcattccccgaaggttacaatacggtggtcggcgaacgagggactactctcagtggcggccagaagcagcgtctcgccatagctagagcactgataaagcagccaaccgtcttaatcctggacgaagctacttcagctttggatgcagagtctgagcgtgtcgtgcaggaggcgctggatagagcctctgctggtaggaccgtgctcgtgatcgcacaccgcctgagtaccgttcggggtgctcactgtatcgtggttatggctgacggccgtgtttgggaggcgggcacccatgaagagctgttgaaaaagggcggattatacgccgagctcattcgtcggcaggcccttgatgcccccaggacagctgctccgccaccaaaaaagcctgagggaccacggtcccatcaacataagagctag

SEQ ID NO: 109195 - DNA, 2301 bp, synthetic construct
  misc_feature 1..2301: note = Description of Artificial Sequence: Synthetic coding sequence
  source 1..2301: mol_type = other DNA
atgcggctgtggaaggctgtcgttgtcacgcttgcttttatgtcggtggacatctgtgtgacaacggccatttatgtcttctcgcacctggatcggtccctccttgaagatatcaggcattttaatattttcgactccgtgctcgatctgtgggcggcttgcctgtaccgttcttgcctgctcttaggggccactatcggggtcgccaagaactcggcccttggcccacgtcggttgcgggcctcatggctagttatcacactggtgtgtttgtttgttggtatctacgccatggtaaaactgctgctgttttcagaggtacgcaggccgattagagacccttggttctgggctctcttcgtgtggacctatatcagtctcggggcctcttttctcctatggtggctgctctccactgtgcggcctgggacgcaggctttggagcccggagccgcaactgaagccgaaggttttccaggatccggaaggccaccgccagagcaggcgtctggtgcaacactccagaaactgctgtcctacacgaagcctgatgtcgcgtttttggttgctgcatcatttttcctgatcgttgctgcgctgggcgaaacatttctgccgtactacacaggaagggccatcgatggaatcgtcatccagaagtccatggaccaattttccaccgcggtggtcattgtctgtctactagctatcgggtcctctttcgcggctgggatccgcggcggaatatttactcttatctttgcccgactcaacattaggctaaggaactgccttttccgcagtctggtgtctcaggaaacatcattttttgacgaaaaccggaccggggatctgatcagccggctgacaagcgacacaacgatggtgtccgatttggtgagtcagaacatcaatgtgttccttcgtaacaccgtgaaggtgactggtgttgtggtcttcatgttcagcttatcatggcagctaagtctggtgacatttatgggcttcccgattatcatgatggtgtccaatatttatggtaagtattacaagcgtctgagtaaggaggtgcagaacgccctggctagagcctctaataccgctgaggagaccatatccgcgatgaagacagtgagatcctttgccaatgaggaagaggaagccgaagtatatctgcgtaagctccagcaagtctataaactaaaccgtaaagaagcagcggcctacatgtactatgtctgggggagtggattgacactgctcgttgtgcaagttagtatcctgtattatggcgggcacttggtcattagcgggcagatgacatcaggcaatctcattgcctttattatttacgaatttgtgcttggggactgcatggaaagcgtcgggtccgtttacagtgggctgatgcagggcgtgggggcagctgaaaaagtgtttgaatttatagatagacaacccaccatggtgcacgacggctcgcttgccccggaccatttggaggggcgagtggatttcgagaacgtgacattcacgtaccgaaccaggccgcacacacaggtcttgcagaacgtcagttttagtctgtctccagggaaggtgaccgcactcgtggggccctccggttctgggaaatcgtcttgtgtgaatatcctggagaatttttaccctttagaggggggccgggtactgttggatggaaagcccatttcagcatacgatcacaagtacctgcatagagtcatttctcttgttagtcaagagccagttttattcgctaggtctattactgacaatattagttacggactgccaacagtccctttcgagatggtcgtggaggccgcccaaaaggcaaatgcccatggctttattatggagctgcaggacggttacagcactgagactggggaaaaaggggctcaactgagcggcggccagaagcagcgggttgcaatggctagagctctggtgaggaatcccccggttctcattttagacgaggctacctccgcactggacgccgaaagcgaatatctgattcaacaggcaattcacggcaacttgcagaagcacacagtactcatcatagcacacaggctctccactgttgaacacgcacatctcatcgtggtgctggataaagggagggtcgtgcagcaaggaacccatcagcagctgctggcccagggtggactgtatgcgaagctggtgcagcgacaaatgctcggactgcagcccgccgcagatttcactgccggacacaacgaacctgttgcgaatggcagccataaagcctag

SEQ ID NO: 109196 - DNA, 2172 bp, synthetic construct
  misc_feature 1..2172: note = Description of Artificial Sequence: Synthetic coding sequence
  source 1..2172: mol_type = other DNA
atgcgcctctggaaggccgtcgtggtcacattggccttcatgtcagtggatatttgcgtaaccactgcgatttacgtgttcagtcacttggatagatctctgctcgaagacattaggcacttcaatatctttgattcagtgttagacctgtgggccgcttgtctgtataggagctgtctgctgctgggtgccaccatcggcgtcgctaagaattctgcactgggaccgaggcggctgagggccagctggctggtcatcacactggtgtgcctgttcgtcgggatatatgcgatggtaaagctgcttttgttctccgaagttcgacggcctataagggacccatggttctgggccttatttgtgtggacatacatttctctgggggcatccttcttgttgtggtggctgttgagtacggtgcggcctggcactcaggccctcgaacccggagccgcaactgaagccgagggatttccaggaagtggtcgacccccacccgaacaggcttctggagcaacactccagaagctgctgagttataccaaaccggacgtggctttcctagtggccgcctcctttttccttattgtagctgcactcggtgagaccttcctaccatactatacaggtagggctattgatgggatagtgatccagaagtccatggatcaattttccactgcagttgtcatcgtgtgtttattggctattgggtcctcttttgccgcaggaatccgcggaggaatcttcaccttaatcttcgctcgcttgaatatacgactccgtaactgccttttccggagccttgtgtcccaagagacctccttctttgatgaaaaccgcacgggggatctgataagccgtttgacaagcgatacaacgatggtgagcgacctcgtgtcacagaacattaatgtctttttgcgcaacacagtgaaagtgacgggggtggtggtgtttatgttttctttgtcatggcaactctcactggtgacctttatgggatttcccataatcatgatggtgtctaacatctacgggaagtattataagcgtctgagtaaggaagtgcaaaatgctctggctcgggccagtaataccgccgaggagaccatctctgcgatgaaaacggtgcgatcctttgcgaacgaggaagaggaggcagaggtatatctgagaaagctccaacaagtgtacaaattaaacaggaaggaggccgctgcctacatgtactacgtatgggggtcagggtccgtgggaagcgtgtactctggattaatgcagggtgtcggggctgctgagaaagtctttgaattcatcgaccgacagcctactatggttcacgacggcagtctggcacccgatcacctggagggtcgcgtcgacttcgagaatgtgacttttacatacagaactcgcccccatacccaggtgctgcaaaatgtctccttcagcctgtctcccggaaaggtgactgctcttgtgggaccctcagggtcgggtaagtcaagctgcgtcaacattctcgaaaatttctaccctctagagggcgggcgtgtactgttggatggaaaaccgatatccgcatatgatcacaagtacttgcatcgagttatcagtctggtgtcccaggagccagtactcttcgcccggagcatcacggataatatctcatacggactaccgacagtgccatttgagatggtcgtcgaagccgcacagaaggccaacgcccacgggttcattatggaactgcaggatggatacagtacggagaccggggaaaagggagcgcagctgtccggtggtcagaagcaaagagttgccatggcccgagctctagtgcggaacccacctgtgctcatcctggacgaagccacatcagccttggatgccgagagcgagtacttgattcaacaagcaatccacgggaaccttcaaaaacacacagtgttgattatcgcccacagactgtctactgtcgaacacgctcacctcattgtggtgctggataaaggacgcgtagtacagcaagggactcaccagcagctgcttgctcagggggggctgtatgccaagctggtccagagacagatgttgggtcttcagcctgccgccgacttcacagctggtcacaatgaacccgttgccaacggtagtcacaaggcctag

SEQ ID NO: 109197 - DNA, 2301 bp, synthetic construct
  misc_feature 1..2301: note = Description of Artificial Sequence: Synthetic coding sequence
  source 1..2301: mol_type = other DNA
atgagactatggaaggcagtcgtagtgacactcgcctttatgtctgtggatatctgcgttacaacggcgatctacgttttcagtcacctggacaggtcgttactggaagacattcgccactttaatatttttgattccgtacttgacttgtgggctgcgtgtctctatcggagttgccttctgttgggggctactattggcgtggctaagaattcggctcttggacctcgtcggttgagagccagctggctggtgattactctcgtatgtctgttcgtgggtatctacgcgatggtcaaactactgctgttctctgaagtgagaaggcctatccgcgacccttggttctgggcactattcgtctggacgtacataagtttaggtgcttcgtttcttctgtggtggctgctttctacggttagacccggtacgcaggcgctggagccaggagccgctaccgaggcggagggcttccccggaagtggaagaccccctccagagcaggcctctggtgcaacgcttcaaaagcttctgtcatatacaaaaccggatgtggcctttctcgtggccgcttctttttttttaattgttgcagcactgggggaaactttcctgccatattatacggggcgcgctatcgacggaatcgtgattcaaaagagtatggaccagttttcaacagctgtggtaatcgtgtgtctcctggcgattgggtcctcatttgccgcgggcatccggggcggaatctttacgctgatttttgcaagacttaacatccgcctgcgcaattgcctttttcggagtcttgtctcacaggaaacatcatttttcgatgagaaccggacaggggatcttatctcaagattgacaagcgatactacaatggttagcgacctcgtctcacagaacatcaatgtattcttgcgaaatacagtgaaagtgacaggagtagtggtcttcatgttcagtctgtcctggcagctcagtctagttacgttcatggggttccccattatcatgatggtttctaacatatatgggaagtactacaaacgactgtctaaagaggtgcagaacgctctcgctcgcgcgtccaacacggctgaggaaactatttccgccatgaagaccgttcgcagttttgcaaatgaggaggaagaggcagaggtctacctgaggaagttgcagcaagtgtacaaattaaaccgcaaagaagccgcggcctatatgtattatgtctggggctccggcctgactctgttagtggtccaggtctctattttgtactatggcggccatttagtgatatccggccagatgacaagcggtaacctcattgccttcattatatatgagttcgtactgggcgattgtatggagagcgtcggctctgtgtactccggattaatgcaaggtgtcggcgcggccgagaaggtgtttgaatttattgatcgccagcctaccatggttcacgacgggagcctcgcccctgatcatctggaaggacgggtagactttgaaaatgtgacgttcacatatagaacaaggccacacacccaggtgctccagaacgtgtctttctctctgagccccggcaaggtgactgccctggtgggcccctccggaagtgggaagagcagttgcgtgaacattctggagaatttttatcccctggaaggcgggcgggtacttctggatggaaaacctataagtgcctatgaccacaagtatcttcacagggttatcagcctcgtgtcacaggagcccgtgctgttcgcccgcagcattactgataatatcagttacggcttacccactgtacccttcgagatggtcgtggaagcagcgcagaaagctaacgctcacggctttatcatggaactgcaggacggttattctaccgagacaggagaaaagggtgcacagctgagcgggggacagaaacaacgggttgctatggcgcgggcactggtccggaatcctccggtgcttatcctggacgaggcgactagcgcactggacgcagaatcagagtacctcattcagcaagctatccatggcaaccttcagaaacatacagtcctgataattgcccacagactgtccacagtagagcatgcccacctgatcgtagttctggacaagggacgagttgtgcagcaaggaactcaccaacagctgctggcgcagggggggctgtacgcaaagctggtgcaacgccagatgttgggcctccagcctgcagctgatttcaccgctggtcacaatgagcctgtggctaacggtagtcataaggcctag

SEQ ID NO: 109198 - DNA, 2310 bp, synthetic construct
  misc_feature 1..2310: note = Description of Artificial Sequence: Synthetic coding sequence
  source 1..2310: mol_type = other DNA
atgcggctgtggaaggcagtggtggtcaccctggccttcatgtctgtggatatctgcgtgacgacagctatctatgtgtttagccatctggacagatctcttctcgaggatattagacacttcaatatcttcgatagtgttctggatctgtgggcagcctgtctgtatcgtagctgcttgctactgggtgcgaccattggcgttgctaagaatagtgccctcggcccacgacggctgcgggcctcctggctcgtgatcaccctcgtctgtctgtttgttggcatttacgctatggtaaaactgctgctgttttccgaggtccggagaccgatacgagacccttggttttgggccctgttcgtttggacatacatttctctgggtgcatcctttctgctttggtggttactgtccactgtgagaccaggtacacaagccctggagcccggcgccgctaccgaggccgagggctttccaggatccggaagacccccacctgagcaggcctccggtgcaacactccaaaagctcctgagctataccaagccggacgtagcttttctggtggcggctagcttctttttgatcgtcgccgcactcggagagacatttcttccttattacaccggcagagcgatcgatgggattgtgatccaaaaatctatggaccagttcagtaccgccgtagtgatcgtgtgcctgcttgctattggatccagcttcgcggcaggcatccgtggaggtattttcacgctgatttttgccaggctcaatattcgcttaagaaactgtttgttccgatctttagtttctcaggagacttccttttttgatgagaatcgaactggtgacttgatcagtagactcacctccgacacgacaatggtgtctgacttggtcagccaaaatataaacgttttcttgcgcaataccgtgaaggtgaccggagttgtggttttcatgttttctctgagctggcagctctctttggtcacatttatgggcttccccataataatgatggtgtccaatatttacggtaaatactataagagactgagcaaggaggtccagaacgcactggctcgggcttccaatacagctgaagaaaccatctcagcaatgaaaacagtgaggtcctttgccaatgaggaagaggaagccgaggtctatctgcgcaagctccagcaggtttacaagcttaatcgcaaagaggctgccgcatacatgtattacgtctgggggtccggccttacattgctggttgtccaggtttctattctgtattatggcggccatttggtgatctcaggacaaatgacctccggaaacctcatcgctttcataatttacgagttcgtgctcggtgattgtatggagtccgtcgggagtgtttattctgggctgatgcagggggttggcgccgctgagaaggtgttcgaatttattgatcggcaaccaacaatggtgcacgatggaagtctcgcccctgaccatttggaggggagagtggattttgaaaatgttacatttacgtaccgaacccgaccacacacccaggtgctccagaatgtgtctttctcgctatcacctggcaaggtgaccgccctcgtaggaccaagcggttcagggaagtcttcctgtgtcaatatcctggagaatttttatcctctggagggtggtcgggtgctcctggatggaaaacccatttctgcctacgatcacaaatatctgcatcgcgtaattagcttagtctctcaggagcccgtgctgttcgcacgaagcataaccgacaatatcagctacgggttgcctacagtgccattcgagatggttgtggaagcagcgcagaaagccaatgctcatgggttcatcatggagctgcaggacggatattcaactgagactggcgaaaagggagctcagctgtcagggggccagaaacagcgcgtcgcaatggctcgcgccctcgtgcgcaacccacccgtcttaatcctcgatgaggccactagcgctctagatgcagaaagcgaatatctgagtccccagatccagcaagcgatccatggaaacttacagaagcacaccgtcctcatcatcgcccaccggctctcgacggtcgagcatgctcacctcatcgttgttctcgataaaggcagagtagtgcagcagggcacgcatcaacagctgctggcacagggaggactttacgcgaaactcgtccagcgccaaatgttaggactgcagcccgcggccgatttcaccgcgggccacaatgaacctgtagctaatggctctcacaaggcctag

SEQ ID NO: 109199 - DNA, 2112 bp, synthetic construct
  misc_feature 1..2112: note = Description of Artificial Sequence: Synthetic coding sequence
  source 1..2112: mol_type = other DNA
atgcgcctctggaaggccgtggtggtgacccttgcatttatgtctgtggacatttgcgtgacaacggctatttacgtttttagtcacctggatcgcagtctgctcgaagacattcggcacttcaatatctttgactctgtactcgacttgtgggccgcctgtctgtacagatcttgtctgttactgggggcaacaattggtgtggccaagaactccgcactcggcccaagacggctgcgggcctcatggttagtgataaccctggtgtgtttgtttgtagggatttatgcgatggtaaagctgttgctcttctctgaggtcaggcggccaatcagagacccatggttttgggcgctgttcgtgtggacatacattagcctgggcgcttcctttctgctttggtggcttctgtcaaccgtgagacctggaactcaggccctagaacccggcgctgcgactgaggccgaagggtttcccggaagtgggcgtcctcctcccgaacaggcgtctggggccaccttacagaaactcctgagctataccaagcctgacgtcgcctttctggttgccgcttccttcttcctgattgttgcagctcttggcgaaacattcttaccctactacacgggaagggccatcgacggcatcgtgatccagaagtcaatggaccagttttccaccgccgttgttattgtgtgtctcctggctattggatccagcttcgccgctggcatcaggggaggcatttttacattgatattcgcccgactcaatatcagactgcgcaactgtctgtttcgcagtctggttagccaggagacctctttctttgatgaaaacaggacgggagatctcatatcccgactgacatctgatacaacgatggtgtccgatctcgtctctcaaaatattaatgtatttctaagaaataccgttaaggtgacgggggtggtggtattcatgttctcactgagctggcagctatcactggtgaccttcatggggttcccaatcatcatgatggtgagcaatatatacggtaagtactataaacgtctgtctaaggaggtgcagaatgcgctggctcgggcctcgaatacagcagaggaaacaatctctgccatgaaaaccgtgcggtcgtttgccaacgaggaagaagaggctgaggtctacctgagaaagcttcagcaggtctataagctaaaccggaaggaggctgcagcttatatgtattacgtgtggggcagtggcctgaccttacttgtggtacaggtcagcattctttattacgggggccacttggtgatttccggacagatgacatccggcaaccttattgccttcatcatatacgagtttgtgctgggcgactgcatggagaacgtcagtttttcactgtccccaggaaaggtgaccgctctggtcgggccctctggcagtggcaaatcatcctgcgtaaatatcctggagaatttctatcccctggagggcgggcgcgtcctgttagatggcaagcccatttctgcatacgatcataaatatttacacagagtaattagccttgtgtcacaagaacctgtgctgttcgctagatctattaccgacaacatttcttatggcttacccacagtgccattcgaaatggttgtggaagcagcacagaaagctaacgcccatgggttcatcatggagctgcaggatggctactcaacagagaccggggaaaagggagcccagctgtcgggcgggcagaagcagcgagtcgcgatggcaagggccttggtgcggaatcctcctgtcctgatcctggacgaagccacttcagccctcgatgcggagagcgaatacctgattcagcaagcaatccacggcaacctgcagaaacatacggttcttatcatagcccataggctgtctacagttgagcacgcccacttaatcgttgtgcttgataaaggtagagttgtccagcagggtacccaccagcaactgttggcacagggtggactgtatgccaaacttgtccagagacagatgctaggcctgcaacccgccgctgattttacagcaggtcataacgaaccagtggctaatggatcacacaaggcttag

SEQ ID NO: 109200 - DNA, 2301 bp, synthetic construct
  misc_feature 1..2301: note = Description of Artificial Sequence: Synthetic coding sequence
  source 1..2301: mol_type = other DNA
atgcgattgtggaaagctgtcgttgtaacactcgcgtttatgtcggttgacatatgtgtgacaacggccatctatgtgttctcacatctggacaggtcattgctagaggacattcggcatttcaatatattcgacagtgtcctcgacctttgggccgcatgcttgtaccgcagttgtctcctgctgggggcgaccatcggagttgccaagaactcggcacttggccccaggcggctgagagcctcctggctagtgattacacttgtgtgcctgttcgtcggaatctacgccatggtcaaattattgctgttttcagaggtgaggcgccccataagggacccttggttttgggccttatttgtgtggacttatatcagtttaggagcttcgtttctgctgtggtggttgctgtcaacagtgagacccgggactcaggctttagaacctggcgcggcaactgaagccgaaggattccctggttctgggcgccctcctcctgagcaggcaagtggcgctacgttgcaaaagctgctctcttacaccaagcctgacgtcgccttcctggtggctgcgtccttcttccttatcgttgccgctctgggcgagacatttcttccctactatacaggccgcgccattgatgggatcgtaatccaaaagagtatggaccagttctcgaccgctgtggtaatcgtgtgtcttctggctattggcagcagttttgctgcgggaattcgtgggggtatattcacacttatcttcgcccgcctgaacatcaggcttcgaaactgcctattcagatcattggtatcccaggagacttcattttttgacgagaatcgcacaggcgacctcatatcccggctcacttctgataccaccatggtgagcgatttagtgagtcagaacattaacgtcttcctgagaaatacagtgaaagtgacgggggtggtcgtgttcatgttctctctgtcttggcaactatctttggtgacttttatgggctttcccatcatcatgatggtttcaaacatttacgggaaatattacaagaggttatctaaggaagttcagaacgcactcgcccgagcctctaataccgccgaagagacaatttcagccatgaaaacagtgcggtcgttcgcgaacgaagaggaagaggctgaagtctacctgcgcaaactgcagcaggtgtacaagctcaaccgcaaggaggcagctgcatacatgtattacgtgtggggatctggcctgacactcttggtggtgcaggtgtctatcctgtactatggagggcacctggtcatctccggccagatgacgagcggaaatttaattgccttcattatttatgaattcgtcctgggcgactgtatggagtctgtcggaagtgtatattctggcctaatgcagggtgtgggagctgctgaaaaagtttttgaatttatcgataggcaacccacgatggtgcatgatggatccctcgccccggaccacctcgaaggtcgggtggactttgagaatgtcaccttcacctacaggacaagaccacatacacaagtcctgcagaatgtatccttctccctctctccaggtaaagtcacggctctggtaggcccctcaggaagcggaaagagcagctgcgtgaatatcctcgagaacttctatcccctcgagggcggacgcgttctcctagatggaaagcctatctcagcctatgaccacaagtacctgcaccgagtgatctctctcgtctctcaggaacctgtcctctttgcaaggagcatcaccgacaacatcagttacggcctgccgaccgtcccatttgaaatggtagtggaagcggcacagaaggcaaacgcgcacggcttcatcatggaactccaggatgggtacagcactgaaactggggagaagggagcacagctgtctggcgggcaaaaacagagggtcgccatggctcgcgccctggtgcgcaatccccctgttttgattcttgatgaggccacgagtgcgctcgacgccgaaagtgagtaccttatccaacaggcaattcacgggaacttgcagaagcataccgtgctcattattgcacaccgcctctccacggtcgaacacgcacatctgatcgtggtattggacaaaggaagagtggtccagcagggcacccatcagcaattattggcgcaaggcggcctgtacgctaaactcgtccagagacagatgcttgggctacagcccgcagccgatttcaccgcgggtcacaatgaacccgtcgctaacgggtcccataaagcttag

SEQ ID NO: 109201 - DNA, 4395 bp, synthetic construct
  misc_feature 1..4395: note = Description of Artificial Sequence: Synthetic coding sequence
  source 1..4395: mol_type = other DNA
atgtgtctgctggtgttcccgctagtcccgaggtcccctgactatatccttccgtgcagcccaggctggagacttcgcttagccgcttcatttcttctctctgtattccccctcctggacttgctgcctgttgccctgccgccgggggctggccccggccctatagggctcgaggttcttgcaggctgcgttgcagcagtggcatggatatcccatagcttggcgttgtgggtactggcccacagcccacatggccattcacgaggccccctggccctggctcttgtggcgctactacctgcacccgccctggtcttgactgtcctctggcactgccagcgcggcacccttttaccaccacttctccccggaccgatggcccgcctgtgcctgctcatattacagttagcagcgctattagcctatgcattaggatgggccgctccaggcggtcctagggaaccatgggctcaagagcccctcttacccgaagaccaggagcccgaggtcgccgaggacggtgagtcatggctgagccgcttctcctacgcttggctggccccgctcctcgcccgaggggcctgcggtgagttaaggcagccccaggatatttgtagattgcctcaccgactgcaaccgacgtatctggctcgagtatttcaggctcattggcaggagggagcacggctctggcgagcactctacggggccttcggaaggtgctatctggccctcgggctgctgaagctggtgggcaccatgcttggattttcagggccgttattgctcagccttctcgtgggattccttgaggagggtcaggagccactctctcatgggctcctgtatgccctggggttggccggtggcgccgtcttgggcgcggtattacagaatcagtacggttacgaggtctataaagtgaccttgcaggcccgtggcgccgttctcaatatcctgtactgtaaagccctgcaactgggaccctctcgacctccaaccggcgaggctctcaatctgctgggtacagactctgagagacttcttaacttcgcagggtctttccatgaggcttggggcctgccactccagctggcaattacactttacttgctctatcagcaggtcggcgtggcctttgtcggcggcctgatactggctcttctgcttgtgccggtaaacaaagtgattgccacccgaatcatggcaagtaatcaggaaatgctccagcataaagacgctagggttaaattagtgacggaacttttgagcgggatcagagtgattaaattttgcggatgggagcaggcactgggtgctcgcgtggaggcatgcagagcacgggagttaggcagactcagagtgataaagtatctcgacgcagcctgcgtgtacctctgggccgccttgccagtcgttataagcatcgtgattttcatcacctacgtcctaatgggacatcagctgaccgccaccaaggtcttcacagcactggccctggtgagaatgttgatccttccattgaataatttcccttgggtcatcaacggcttgctggaggctaaagtatcactggaccgaatacaactgtttcttgatctgccaaatcataatccacaagcgtactactctccggactgcggcagactcggcgctcagatcaagtggttactttgttctgacccccccgcagagccctctaccgtgctggaattgcatggggccctattctcctgggatcccgtgggcacctcattagaaacctttatctctcatctggaagtgaagaagggaatgctggtaggcatagtggggaaagtcggttgcggaaagtcctcattgctcgcggctatagccggggagttacaccgtctgaggggtcacgtggccgtgaggggtcttagtaaaggatttggacttgcaacgcaggaaccatggatccagttcgcgacaattcgggataacatcttgtttggaaagacttttgatgcgcagctgtataaggaggttctggaagcttgcgcccttaatgacgacctaagcatattaccggcaggcgaccagaccgaagtgggcgagaagggcgttacactcagtgggggccagagagcccgcattgccctcgcacgtgctgtgtaccaggaaaaagaattgtatttactcgacgacccactcgccgctgtggacgccgatgtggctaatcatctattacatagatgtatcttgggcatgctgagctacaccactcgactcctatgcacccataggaccgagtatctggagagggcggacgctgtgttactgatggaagcaggtcgtctgatccgcgcaggcccccccagcgaaatattgcccctagtccaggccgttcccaaggcttgggccgagaatgggcaggaatctgactcagccaccgcccagagcgttcaaaacccagaaaagacgaaagaaggtctcgaggaggaacagagtacgtctgggcggttactccaggaggaaagcaagaaggagggcgctgtagccctgcacgtgtaccaggcctattggaaggccgtcgggcaaggccttgctctggcgattctgttctctctactactaatgcaggctacacgaaacgccgctgactggtggctgtctcactggataagtcagttgaaggccgaaaactctagccaggaggcacagccctcaaccagtcccgcatccatgggactgttctcaccgcagctcctgctcttttcccccggtaatctatatatcccggtgtttccattaccaaaggcagccccgaacgggagctccgacattcggttctacctgacagtgtatgccactatcgccggcgtgaattctctctgtaccttattgcgggctgtgttattcgctgcaggtacactccaagccgctgcgaccctgcacaggaggcttctacatagggttctcatggcgcctgtgaccttttttaatgccacccccacaggccgcatcctgaatcggttctcctcagacgtggcatgcgcagacgatagccttcccttcatacttaatattttgttggccaacgctgccggcctgctgggccttttagccgtcctcgggtctggcctgccttggctgttgctgctgctgccccccttgagcatcatgtattatcacgtgcagaggcactaccgcgccagttctcgcgagctacgaagattaggcagcttaacattgagcccactgtactcacatttggccgataccctggccggattgtccgtattacgcgctaccggtgccacttataggttcgaagaggaaaacctgagacttctggagctcaatcagcgctgccagtttgcaaccagtgcaacgatgcagtggctggacattagactccagctgatgggggcagcagtggtatcagcgatagccggaatcgctctggttcagcatcaacagggcctggccaatccgggattggtaggcttgtcattatcctacgccttatcattaaccggcctgcttagcggcctggtgtcttcctttacccagaccgaagcaatgttggtttccgtggagagactggaagaatacacctgcgacttgcctcaggagccccagggacaacccttgcagctgggtactggatggctgactcagggaggtgtggaatttcaagacgtagtgctagcttaccggcctggcttgccgaatgctttggatggcgtgacattctgcgtgcagccgggtgaaaaactgggaatcgtgggtagaacagggtccggtaaatcttctctcctgctcgtgctctttcgtctcctggagccctcctctggaagagtcctgctggatggggtggatacctctcagctcgagctggcccagctccgaagccagctcgccattatcccccaagaaccctttctgttttccggaaccgtgcgcgagaatctggatccgcaagggctacataaggacagagccctgtggcaggcgctgaaacagtgccacctgtcagaagtgatcacttcgatgggcggcctcgatggcgaactgggcgaggggggacggtctttgtctctgggacaacggcagttgctctgcttagctagagccctgcttactgacgccaaaatactgtgcattgatgaggcgaccgcctctgtagaccagaagactgatcagctgctgcaacagacaatttgcaaacggtttgccaataagactgtcttaactatcgcccaccgccttaacactattctcaacagtgaccgagtacttgtgctgcaggccggcagagtagtggagctggactcccctgctacactgcggaaccagccgcactcactctttcagcagctccttcagagtagtcagcaaggagtccccgcttcgctcgggggcccttag

SEQ ID NO: 109202 - DNA, 4479 bp, synthetic construct
  misc_feature 1..4479: note = Description of Artificial Sequence: Synthetic coding sequence
  source 1..4479: mol_type = other DNA
atggagcgactgctggcacagctgtgtgggagctcagctgcgtggcctctgccactgtgggaaggagatacaactggccactgcttcacacagctcgtcctgtctgcccttccacacgctctcttagccgtgctctctgcctgctacctgggtacccctagatccccagactatatcttaccctgttcaccaggatggaggctgaggttggcagctagcttcctgctgtcggtctttccgctgttggaccttctgcccgtggcactgcctcctggcgctggacccgggcccattgggctggaagtcctcgctggctgtgtagcggcggtagcttggatctctcactccctggccttatgggtcctggcccattccccccatgggcactccagaggacctctcgcactcgccctagtggctctcttgcctgccccggcactggttctaaccgtgttatggcactgtcagcggggcaccctgctgccccctctactccccggccccatggcgaggctgtgtctcctcatactgcaactggcagctctcttagcctacgctctgggctgggccgccccgggcggcccaagagagccctgggcccaagaacctctgttaccggaagaccaagagcccgaagtggccgaggacggagagtcgtggctatctagattttcgtatgcgtggctggctccgctgttagccagaggcgcctgcggtgagcttcgccagccacaagacatctgccgcttgcctcacagactgcagcccacctatctggcaagagtctttcaagcccattggcaggaaggggcccgcctgtggagggccttgtatggagcctttggccggtgttaccttgcgctgggcttgttaaagcttgttggcaccatgctaggtttcagtgggcctctcttactctcgctgctcgtggggtttttggaagagggacaggagcctctgagccacggactcctatatgccctaggcttggccgggggtgcggtgctcggcgcagttctgcagaaccagtacggatacgaggtctataaggtgaccctgcaggctcggggcgccgtcttgaacattctgtattgcaaagccctgcagcttgggccttcccgccctcccaccggcgaggccctaaacctgctggggacagatagcgagaggctgctcaactttgctggttccttccacgaggcctggggcctcccactacagctggcaataaccctgtacctgttatatcagcaggtgggcgtggccttcgtggggggtttaattctagccctactgctggtcccagtcaataaggtcattgccacgaggatcatggcctctaaccaggagatgctacagcataaggacgccagggtgaagcttgtcaccgagctcctttcagggatcagagttataaaattctgcggttgggagcaagccctcggagcacgggttgaggcttgtcgggcgcgcgaactcggccggttgcgtgtaatcaagtatcttgatgccgcctgtgtatacttgtgggccgcccttcccgtggtgataagcattgttattttcatcacatatgtgctgatggggcatcaactaaccgcaaccaaagtctttactgcactagccctcgttagaatgcttattctgcccctgaataatttcccctgggtgatcaacggattgctagaagctaaggtatccctggataggattcaactatttctggacctgccaaatcataaccctcaggcctactattcaccagacccgcccgcagaaccatccactgtactggaactccacggagccctgttctcctgggacccggtggggacctccctggagacattcatttcacacctggaggtgaaaaagggcatgttagttggaatcgtgggaaaggtaggatgtggcaaatcaagtctcctggccgccatcgcaggggagctgcacagattgcgcggacacgttgccgtgcgcgggctaagtaagggatttggcctagcaacacaggagccttggattcagttcgcaacaattagagacaacatcctctttggcaagaccttcgatgcccagctgtataaggaagtgctggaagcatgtgcccttaacgatgatttgtcaatcctcccagcaggagaccaaacggaggttggagagaaaggtgtgacgctgtccggggggcaacgggcgcggatagccctcgcccgagctgtctaccaagagaaagaactgtatctacttgacgatccgctcgcggccgtagacgcagatgtcgcaaaccatctgcttcatcggtgcatcttggggatgctgtcttataccacccggcttttatgcactcaccggactgagtatctcgagcgggcggatgcggtgctgttaatggaagcaggcaggctgatccgtgctggcccaccaagtgagatcctgcctctggtccaagcagtaccgaaagcttgggctgagaatggccaggaatccgacagtgccactgctcagagtgtgcagaaccccgaaaaaacgaaggagggactagaagaagagcagagcacttccggcaggctgttacaggaggaatcaaagaaagagggcgcagtagctcttcatgtctatcaggcttattggaaagccgtgggacagggacttgcactggcaatcctgttcagtctgctgctgatgcaagcaacacgcaatgcggccgattggtggctgtctcactggatcagtcagctgaaggctgaaaactcttctcaagaagctcagccttcaacatcgccagcctcaatgggtctgttttcaccccaattgctcctgttctcgccgggcaatctctatatcccagtattcccgctgcctaaggccgcacctaatggcagttccgacattcgattttacttgacagtctatgccaccatcgccggcgtcaacagcctctgtacgctcttaagagccgtcttatttgctgcaggtacacttcaggcagcagcgaccctgcaccgccggctcctccaccgcgttctgatggccccagtgaccttctttaatgccactcctactgggagaatcctaaatcgcttttcatctgatgtggcctgcgccgatgatagtctccccttcatcttgaacatcctcttggccaatgccgcaggactccttggtctcctggctgttttggggagtggtctgccatggctgttgcttctgctgccaccgctttctatcatgtactaccacgtccagagacattatcgagcctcttcacgagagctgcgccgattgggtagcctaaccctgagccccctttattctcatctggccgacacactcgccggcttaagtgtgctgcgggccactggagccacttacagattcgaggaagaaaatttacggctgctggagctcaatcaaagatgccagtttgccacttctgcaaccatgcaatggctggacattagactccagctcatgggagcggccgttgtgagtgccattgcaggtatcgcgctagtgcagcatcagcaaggtctggccaacccaggattggtggggctgtccctaagctacgctctctccctgacgggactgctgagtgggttggtgtccagtttcactcagacggaggccatgctggtgtcagtcgaaagactcgaggaatacacatgcgacctgcctcaggaaccacaaggtcaacctctgcaattggggaccggctggctgacacagggcggtgtcgaattccaggacgtggtccttgcctatagacctgggctcccgaacgccctggacggcgtcaccttttgtgtgcagcctggtgaaaaactgggcatcgtggggcgcactggctctggcaagagttccttactcttggttctgttccgactgctggaaccgagtagtggacgggtacttttggacggggtggacacatctcagctagagttggcccagttacggtcccagctcgccatcatcccgcaggagccattcttattctcaggaaccgtcagagagaaccttgatccacagggactccataaagacagagcattgtggcaggccctgaaacagtgccacctgagcgaggtgataacttccatgggaggcttggacggggagctgggagaaggcggcaggtcattgtcactgggtcagcggcagttgctgtgcctggcgagggcgctgctcacagacgctaagatcctgtgcatcgacgaggcaacggcttctgttgaccagaaaaccgatcagctactccaacagacaatctgcaagcgattcgccaacaaaacagtgttaacaattgcacataggcttaacaccatcctcaattccgaccgagtcctagtcctgcaggccggtagagtagtcgagctggattcgcctgccacactgcgcaatcagccacattctctgtttcagcagcttttacaatcaagtcagcagggggtgcctgcctcgctcggaggcccttag

SEQ ID NO: 109203 - DNA, 4035 bp, synthetic construct
  misc_feature 1..4035: note = Description of Artificial Sequence: Synthetic coding sequence
  source 1..4035: mol_type = other DNA
atgacaagaaagcggacatattgggtgccaaattccagcgggggacttgtcaatcggggcattgacattggcgatgatatggtcagcgggttgatctacaaaacatatacactgcaagatggaccttggtcccagcaggagcgaaatcccgaagccccaggtagagccgccgtgcctccttggggaaaatatgacgctgcactacgaaccatgattccattcaggcccaaaccacggtttcctgccccacagcccctggacaatgcaggcctcttctcatacctgacagtgagttggttaacgccactgatgatccagtcgttgcgctcccggcttgacgaaaacactatcccccctctgtccgttcacgatgcctctgacaagaacgtgcagaggttacatagactgtgggaggaggaggtgtctagacgcggtatcgagaaggcctcggttttgctcgtgatgctgaggtttcagcggactcgcctcatctttgatgccctgctaggcatttgcttctgtatcgctagcgttctaggacccatattgatcattccaaaaatcttagagtattccgaggagcagcttggtaatgtggtccatggggtcggcctttgctttgcacttttcctgtcggaatgcgttaagtccctgtctttttcctcatcctggataatcaaccaacgcactgcaatccgcttccgtgccgctgtcagctcttttgcctttgaaaaactgattcagtttaaatcggtgatccatataacaagcggagaagctattagcttctttacaggggacgtcaactacctctttgaaggtgtctgttacggtcctctggtcctcatcacttgcgcctccctagtgatctgttcgatcagtagttatttcattattggctacacagcctttattgcgatcctgtgctatctacttgtattcccccttgcagtcttcatgacccgcatggcagtgaaggctcagcaccacacttccgaggtctccgaccagaggataagggtaaccagtgaggtcctgacttgcatcaagttgatcaagatgtatacttgggagaaaccatttgccaagattatagaggacttgcgtcggaaagagcgcaaactgctggagaagtgtggactggtgcagtcattaacatctatcactctgttcatcatcccaaccgtagccaccgctgtgtgggttctgatccatacatccctgaagttaaagctcaccgctagtatggcttttagtatgcttgcgagccttaacctgctgaggttgagcgtgttcttcgtgccgatagccgtaaaaggactaactaactccaagtctgcagttatgaggttcaagaagtttttcctgcaggaaagtccagtgttctatgtccaaaccttgcaggatccctctaaggctttggtcttcgaagaagcaacactctcatggcaacagacatgccccgggattgttaacggcgccctcgaactggaacgcaacggtcatgcaagcgagggcatgacacgaccgagggatgctctaggaccagaggaggaaggcaattcgttgggccccgagttgcataaaatcaatctagtcgtaagcaaaggcatgatgctgggcgtgtgtggaaacactggaagtgggaagtccagtcttttgtcggccattctagaggagatgcatctgcttgagggtagtgtgggggtgcagggctccttggcctatgtgccgcagcaggcctggatcgtctcagggaacataagggaaaacattctaatgggaggcgcctacgataaagcccgatacctccaagttctccactgttgcagtctgaaccgcgacctcgagctattaccctttggggacatgacggagattggtgaaagaggcctgaacctgagtggggggcaaaagcagcggattagtctggcccgagctgtctactccgatcgacagatttatttgctggacgaccccctgagcgctgtggacgctcacgtggggaagcacatttttgaagagtgtataaaaaaaacgttgcggggcaagaccgtcgtcctggtgacacaccaacttcagtatttggaattctgcggccaaatcatcctgctggaaaacggcaagatctgcgagaatggcacccacagtgaattgatgcagaagaaagggaagtatgcacagcttattcaaaaaatgcataaggaagctacgtctgacatgctgcaggataccgccaaaatcgcggagaagcctaaagtcgagtcacaggcgctcgctacctccctggaggaatccttaaatgggaatgctgtccccgagcaccagttgacgcaagaagaagagatggaagaaggcagcctgagctggcgcgtgtaccaccattacatccaggcggctggcggctacatggtgagttgcattatttttttctttgtcgttttaatagtcttcctcactattttctcattttggtggcttagctattggcttgaacagggttcgggaacaaacagctcccgggaaagcaatggaaccatggcagatcttgggaacatagccgataaccctcaactttctttttaccaacttgtgtacggcttaaacgctcttctgctgatctgtgtcggagtatgctctagcggcattttcacaaaggtaacccggaaagcctctacagccctgcacaacaaattgttcaacaaggttttccgatgcccgatgtcgttcttcgacactattccaattggccggctcttgaactgctttgctggcgatctcgaacagttggaccaactgctgcctatcttcagtgagcagtttctggtgcttagtctgatggtcatagctgtgctgcttatcgtcagtgtactttctccatacatcttactgatgggcgccataatcatggttatatgctttatttattacatgatgttcaaaaaggccattggcgtctttaagcggcttgaaaactactcacggagccccctgttttctcacatcctcaattccctgcagggcctctccagcattcacgtctacggaaaaaccgaggactttatctcacaattcaagcggctcaccgatgcacagaacaattaccttctgttgttcttaagcagtacccggtggatggccctcagactggagatcatgacaaatctggtgactttggccgttgccttatttgtggctttcgggatctcttcgacaccctattcgtttaaggtcatggctgttaacatcgtgcttcaactggcctcttctttccaggcaaccgcacggatcggactggaaactgaagcacagttcacagccgtcgagcgtatccttcagtacatgaaaatgtgtgtgagcgaggccccactacatatggagggcacctcgtgtcctcagggctggcctcagcacggcgagataatatttcaggattatcacatgaaatatcgggacaacactccaaccgtgctgcacgggatcaacttgacaatcagagggcacgaagtcgtaggtatcgttgggcgcaccgggagcggcaagtcttcgctgggcatggccctttttcgcctcgtcgaacccatggccggccgtatcctgatcgacggggttgatatctgctcgataggtctggaagacctcagatctaagctcagcgtcattccccaagacccggtactgttgtctggtacaatccgctttaatttagatccgttcgataggcacaccgatcaacaaatctgggacgccctggaacgaacctttttgacgaaagccattatcttgatcgacgaagccaccgctagtatagatatggagaccgacaccctcatccagcggactatcagggaggccttccagggatgcacagtcctcgtcatcgcgcatagggttactaccgtgcttaattgcgaccacattctcgtcatgggtaatggcaaagttgtcgagttcgacaggccagaggtgctgcgaaaaaaaccaggctccttatttgcagctcttatggctactgctacctcgtcactgcgatag

SEQ ID NO: 109204 - DNA, 4149 bp, synthetic construct
  misc_feature 1..4149: note = Description of Artificial Sequence: Synthetic coding sequence
  source 1..4149: mol_type = other DNA
atgacacgcaagcgcacctactgggttcccaactcaagtggggggctagttaataggggcatagatatcggggatgatatggtgtcaggactcatttataagacctacaccctccaggacggaccatggtctcagcaggaacgtaatcccgaggcccccggaagggcagctgtccctccctgggggaaatacgatgctgcacttcgaacaatgatccccttccgccccaaacccaggttccctgctcctcagccactggacaacgcgggcttgttcagttatctgacagtgagctggctgaccccactgatgattcagtccctgcggagccgcctcgatgagaacactatcccccctctgtccgtgcatgatgctagcgacaaaaacgttcagcggttgcatcgattgtgggaagaagaggtcagtagacgcgggattgaaaaggcgtcggtgttactggtaatgcttagattccagcggacccgcctgatatttgatgcacttctgggcatttgtttttgtattgcctccgtgttgggccccattttgatcatcccgaaaatactcgagtattcagaagagcaactgggtaatgtggtgcacggcgtgggcctctgtttcgctctgtttctgtctgagtgcgtgaaatcgctctctttttcaagcagctggataataaaccaaaggacggcaataagatttagggcggcagtaagcagcttcgctttcgaaaagctcatccagttcaagagcgtgatacatattacatctggcgaggcaatcagcttttttactggggatgtgaattatctgttcgaaggagtctgttacggtcccttagtgcttataacttgcgcctcgctggtcatttgctccatctcgtcctacttcattataggatataccgctttcattgcaattctgtgctatctgctggtgttccctctggcggtcttcatgactagaatggccgtcaaagcccagcatcacacctctgaagtgtccgatcagcgcatccgggtgacgtcagaggtgctcacctgcatcaagcttattaagatgtacacctgggaaaagcccttcgctaaaatcatcgaggacctgagacgaaaagaacgcaagctcctcgagaagtgtggcttggtgcagtccctaacgagcattactctgtttatcatccctactgtggccacagctgtctgggtgcttattcacacgagcttgaagctcaagttgaccgccagtatggcattcagcatgctggcctccctaaacttgctccggctgagtgtgttttttgtgcccattgctgtgaagggccttaccaactccaagagcgccgtaatgcgctttaaaaaattttttcttcaagagagccccgtgttttatgtgcagacgcttcaggacccgagtaaagccctagtgttcgaggaagcaactctgtcctggcaacagacatgcccgggcattgtgaacggcgctctggagctagagagaaatgggcacgcctccgaaggaatgactagaccccgcgatgctcttggaccagaagaagagggcaatagtttaggccccgagttacacaagataaacctcgtggtgtcaaagggaatgatgctcggagtgtgcggaaataccggaagtggcaagtctagccttctgtctgctattctcgaagagatgcacttgctcgaaggctcagtgggtgtgcagggttcactggcctatgtcccacaacaagcctggatcgtgtcagggaacatcagggagaatatcctgatggggggggcctacgacaaagctcggtacctccaggtgcttcactgttgctcactcaatagagatctcgagctgctgcctttcggcgatatgacagaaataggggaacggggattgaacctctccgggggtcagaaacaacgcatttcactagcccgcgctgtatactctgataggcagatctacctgctggacgatccattgtcggcagttgacgcacacgtcggaaagcatatatttgaggagtgcattaagaaaacattgcgcggaaagacagtggtgctggtaacacatcagctacagtatctggaattctgcggccaaattatcctgctggaaaatggcaaaatttgtgagaatggcacgcactctgagctaatgcaaaaaaaagggaagtacgcacagctaattcagaagatgcataaggaggccacgagcgatatgctacaagacaccgccaaaatcgccgagaaacccaaagtcgagtcccaagccttggccaccagtctagaggaatcactcaatggcaatgccgttcctgagcaccagctgacacaagaggaggaaatggaggagggatccttgtcctggcgagtgtaccaccactatattcaagccgccgggggttatatggtgtcctgcatcatatttttttttgtggtgctgatcgtcttcctgaccattttctcattttggtggttgagctattggctggaacaaggtagtggaacaaatagcagccgagaatccaatgggacaatggctgatctcggaaacattgcggataaccctcaactgtcattttaccagctcgtctatggcctcaatgcgctgctcttgatatgtgtaggagtatgctcttccggtatatttaccaaagtgacaaggaaggccagtaccgccctgcataacaagttattcaacaaggtgttcaggtgtcccatgtcttttttcgataccatcccaattgggcgacttctgaactgctttgccggagatctcgagcagttggaccagttgttacccatttttagcgaacagttcctggtgttatctttaatggttatagctgtcctcttaatcgtttccgtgttaagcccctacatactactcatgggggcaataatcatggtgatctgcttcatctattatatgatgtttaagaaggctatcggcgtcttcaaaaggctcgagaactattctcggtcccctctgttttctcacatattaaacagtctgcagggtctctcctccatccatgtgtacggaaagactgaggacttcatctcccagttcaaaaggttgacagacgctcaaaataattacctgttgctgttcctctcttccacgaggtggatggctctgcgactggagattatgactaatcttgtaaccctcgccgtggcgctattcgtggctttcgggatttctagtactccctacagttttaaggtgatggcagtcaatattgtactgcagctggcctcaagcttccaggctaccgcccggatcgggctcgagacggaagcccaattcaccgctgtcgagagaatcttgcagtacatgaagatgtgcgtttcagaggcgcccctgcacatggagggtacatcgtgtccacagggctggccacagcacggcgagatcatcttccaggattatcacatgaagtatcgtgataatacaccaacagtgttgcatgggattaatctaaccattaggggccatgaagtggtggggatcgtcgggcggactgggagtggaaagtcctcattgggtatggcactgtttcgactggttgagccgatggctgggcgtatcctcatcgatggcgttgatatctgtagcatcggccttgaagacttgcgttcaaagctcagcgtgatcccccaggaccccgtgctcttatctggtacaatccggtttaatctggaccccttcgaccggcacacagatcagcaaatctgggacgctttggagcggaccttcctgacgaaggctatctccaagttccctaagaagctccatactgatgtggtggagaacggtggcaacttctccgtgggcgagagacagctgctgtgtattgccagggccgtgctgcgaaacagcaagatcattctgatcgacgaggccacagcaagtatcgatatggaaacagatacactgattcaaaggaccatacgggaagcgttccagggctgcaccgtgctggtcatcgcacatagggtgacaacagtcctcaattgcgatcacatcctggtaatgggaaacggaaaagtggtggagtttgaccgtcctgaagtcttgagaaagaagccaggctccctgtttgcagcgcttatggcgaccgccaccagctctctgaggtag

SEQ ID NO: 109205 - DNA, 4149 bp, synthetic construct
  misc_feature 1..4149: note = Description of Artificial Sequence: Synthetic coding sequence
  source 1..4149: mol_type = other DNA
atgacacggaagcgaacctattgggtgcccaacagtagtggcgggctggtgaatcggggaatcgacatcggagacgacatggtctccggattgatctataagacatatactctgcaggatgggccgtggtctcagcaggaaaggaatcccgaagcacccggacgcgccgccgtgcctccttggggcaaatacgacgctgcactgcgcaccatgattccgttccgacccaaacctagattccccgctcctcagccactggacaacgccggactgtttagctacttaaccgtaagctggctgaccccattgatgattcagtctctccggtctcgcctggatgaaaacacaatccctcctctatccgtgcatgacgcctcagacaaaaatgtgcagcgtctgcaccggctgtgggaagaggaggtgtcccgacggggcattgagaaagcaagcgtgttattagtgatgctgaggtttcaacggactagactgatctttgatgcacttttgggcatatgcttctgcattgcgtcagtgcttggccctatcctgatcatccctaagatattggaatattccgaggaacaactaggcaacgtggtacatggagtaggtctgtgcttcgctctctttctcagcgaatgtgttaaaagcttgagcttctcttcaagctggatcattaaccagcggaccgctattagatttagagccgctgtgtcctccttcgcatttgagaagctgatccagtttaagagcgtgatccacatcacatcgggagaggctatcagcttctttaccggagacgttaactatctttttgaaggagtctgttatggcccgctcgtgctgatcacttgcgccagcttggtgatttgctccatctcaagctatttcatcattgggtacaccgcctttattgctattttgtgttatctgctagtttttcctctggctgtattcatgacgcggatggccgttaaggcccagcaccatacaagcgaagtttccgaccagcggattcgtgtcactagcgaagtgctgacttgtattaagctcattaaaatgtacacctgggagaagccgttcgctaaaattatagaagatttgaggcgaaaagagcgaaagctgcttgaaaagtgcggcctcgtgcagtccctgacaagcatcacactgttcatcatcccaacagtcgcaactgccgtgtgggtgctgatccatactagcctcaagcttaaactgaccgcttcaatggcattttctatgctggctagcctgaatctgctccgactttcagtcttctttgttcccatcgcggtgaaaggtttgaccaattcgaaatcagccgtgatgagattcaagaagttcttcctccaggagtctcctgttttttacgtgcaaacactgcaggaccccagcaaagccctggttttcgaagaagccaccctctcttggcagcagacctgcccgggtattgttaacggtgctttagagctagaacgcaacggccacgcctccgaggggatgacaagaccaagggatgccctgggccctgaagaggaagggaattcgctgggaccagagctgcataagatcaatttagttgttagtaaaggcatgatgctcggcgtgtgtgggaacacaggatctggcaagtcttccttgctcagtgcaattttggaagaaatgcatctgctggaagggtccgtgggagtccagggctcactcgcctacgtgccgcagcaagcctggatagttagcggcaacataagagagaacatcttaatgggcggcgcatatgataaagccagatacctgcaggtactccattgttgctccttgaaccgtgacctagaactcctaccctttggggacatgaccgagattggagagaggggcctgaacctctccgggggccagaagcaacgtattagtctggcgcgcgcggtgtacagcgacaggcaaatttacctgctcgacgaccccctgagcgctgtggacgctcacgtcggaaagcatattttcgaagaatgcataaaaaaaactctgaggggaaagacagtggtgcttgtaacacaccagcttcagtacctagaattttgtggccagatcattctgctggagaacggaaagatctgcgagaatggcactcacagcgagctgatgcagaagaaaggaaagtatgcccagctcatacagaaaatgcataaagaggcaacgtctgatatgctgcaggacaccgctaaaatcgctgaaaagcccaaagttgagagccaggccctcgccaccagcctcgaggaatctctgaatggcaacgcggtacctgaacaccagctaacacaggaagaggagatggaagaaggctccctgtcatggcgcgtgtaccatcattacatccaggccgctggcggctacatggtgagttgcattatcttcttctttgtggtgctcatcgtattcttgactatcttttccttctggtggctgagttattggctcgaacaggggtctggcactaatagttctcgggagtctaatggcacaatggccgacctaggaaacatagccgacaatcctcagcttagcttctatcagcttgtatacggactgaacgccttgcttctaatctgcgtgggagtttgcagcagtggcatcttcaccaaagtcacacgaaaggcttctacggccctgcataacaaattattcaataaagtattcagatgtcccatgtccttcttcgacactatcccaatcggcaggcttctcaactgtttcgctggtgatctggaacagttggaccagctgctacccatatttagcgagcagttcctcgtgctcagtctgatggtgatcgcagtgctgctcatcgtgtcagtcctaagtccatacatcttgctaatgggcgcgataatcatggtgatttgttttatatactacatgatgttcaaaaaggcgatcggcgtgttcaaacgtttggagaattacagccggtctcccttgttcagccacatcctgaatagtcttcagggcttgtcttctatacatgtgtatggtaaaaccgaggattttatctcccagttcaaacgtctgaccgatgcacaaaataactacctgctgctgtttctgagctcaacccgttggatggctctcaggctggagattatgaccaacttggtgactttggctgtggcgctttttgtggcttttggcatctcctctaccccgtacagctttaaagtcatggctgttaacattgtgttacagttggcttcctcgttccaggctaccgctagaattggccttgagaccgaggcgcagtttactgccgtcgaacgtatccttcagtatatgaagatgtgtgtttctgaagcaccgctccacatggaaggaacctcctgtccacaggggtggcctcagcacggggagattatctttcaggattaccatatgaaatatagagataatacacccactgtgctgcacgggataaacctcactattaggggacacgaagtagttggaatagtgggtaggacagggagcggaaagtcttctcttggaatggccctgtttcgtttagtggagccaatggccgggcgtatcctcattgatggtgtggatatttgcagcattgggctagaggacctgaggtccaagctgtcggtaataccacaggaccccgtgctgctgtcaggaacaatccggttcaatctcgacccatttgaccggcacacagatcagcagatctgggacgccctcgagcgaacattcttaaccaaggccatttctaagttcccgaagaagttgcacaccgacgtggtggaaaacggaggtaacttcagtgttggagagcggcaattattgtgtattgctcgtgcagtcttgcgtaattcaaagatcattctcatagacgaagccactgcttcgattgacatggagacagatacactgatccaacgcaccatccgagaagcattccaggggtgtactgtgcttgtgatagctcaccgagtgaccacggtgctcaactgcgatcatatactggtgatgggtaatggtaaagtggtggagttcgaccgccctgaggtgttacggaagaagcccgggtcgctgttcgctgccctcatggctaccgctacgtcctccttgaggtag

SEQ ID NO: 109206 - DNA, 4149 bp, synthetic construct
  misc_feature 1..4149: note = Description of Artificial Sequence: Synthetic coding sequence
  source 1..4149: mol_type = other DNA
atgacgaggaaaagaacctactgggtgcccaacagcagcggcggacttgtcaatcggggcatcgacataggggatgacatggtgagcgggctgatctacaaaacatacaccttacaggacgggccctggagtcagcaggagcgcaaccccgaggcacccggacgggccgcagtccccccgtggggaaagtatgacgctgccttaaggactatgatccctttccggcccaaacctcgcttccctgctcctcagccactggataatgcgggcctcttctcttatttgacagtgtcttggttgacccccctgatgattcagagcttgaggagccgcctggacgagaatactatcccacccttatccgtccacgatgccagtgacaaaaacgttcagcggctgcaccgactttgggaggaagaggtatctcgaagaggcattgagaaagcctctgtgctactcgtgatgttgcgctttcagcggacccggctgatattcgatgcgctcctgggcatttgcttttgtattgcttctgtcttaggccccatcctgattatcccgaagatcctggagtactctgaagaacagctcggcaatgttgttcacggggttggactgtgctttgcactgttcttatcggagtgtgtcaaatctttaagcttttcttcctcttggattattaatcagcgaacagctatccgatttcgggcggccgtgtcttctttcgcgttcgagaaacttatccaattcaaatccgtgatccacatcacatccggtgaggcaatcagcttctttacaggggatgtgaattatctttttgagggtgtatgttacggccccttagtactgatcacgtgtgcctcccttgttatatgttcgatcagttcctattttattattggttatacggcctttattgcgatcctttgttatctgctggtctttcccttggccgtgttcatgacccggatggctgtcaaggcccagcatcatacctccgaggtttccgaccagaggatcagggtaacaagcgaggtgttaacatgcataaagctaatcaagatgtacacttgggagaaaccattcgcgaagataatcgaagatttgaggcggaaggaacgcaaactgttggaaaagtgcggcctggtccaatcgctgacaagcatcactctcttcatcatcccaaccgtcgcaacagccgtgtgggtgctgatccatactagtcttaagttgaaactgaccgccagcatggcctttagcatgctcgccagcctgaatttgctacggctttccgtgtttttcgtgccaatagccgtaaagggtttgacaaatagtaagtcggcagtgatgaggttcaagaagtttttcctgcaggaatccccagttttttatgtgcaaacactgcaggatccatccaaagcgcttgtgtttgaagaagcgaccctttcttggcagcagacttgccccgggattgtgaatggagccctggagctggaaaggaatgggcatgcaagtgagggcatgacgcgcccgcgagacgctcttggaccagaggaagaggggaacagccttggcccagaactccataaaattaacttggtcgtctcaaagggaatgatgttgggtgtctgcggcaacactggcagcgggaagtcatccctgctgagcgccatccttgaagagatgcacctgttggaagggagcgtgggggtccagggctctctcgcatacgtccctcagcaagcatggatcgtttcaggcaacattcgcgagaatatcctgatgggcggggcatacgataaagccagataccttcaggttctgcactgttgttcactgaatcgcgacttggaactgctgccattcggagatatgacagagatcggtgaaagagggctgaacctgtcgggtgggcagaagcagaggataagtctggccagggcggtgtacagtgatcgacagatttaccttttagacgacccgctgagtgctgtggatgcccatgtggggaaacacatttttgaggaatgcatcaaaaaaaccttacgcgggaagacagtggtccttgttacacaccaattgcagtatctggagttctgtggccagatcattctccttgagaatggaaagatctgtgaaaatggcacacatagcgagctgatgcagaaaaaaggtaaatatgcgcaactgatacagaaaatgcataaagaggccacctcagatatgctacaggacaccgccaaaatcgcggagaagcctaaggtggagagtcaggcactagctacaagtctggaagaatctctgaatggaaatgcagtaccggaacaccagctaacccaggaagaggagatggaagaaggatctctgagctggcgggtttaccaccactatatccaggccgcgggtggctatatggtgagctgtataatattttttttcgttgtgctgatagtgttcctcacaatattttcattctggtggttaagttactggctggaacaaggctccggcaccaacagcagcagggaaagcaatggaactatggccgatctcggcaacatcgccgacaacccccagttgtcgttctaccagcttgtctatgggttgaatgcgctcctcctcatttgtgtaggagtttgttcgagcggaatcttcacaaaggtaacaagaaaagcaagcacagctctccacaataaacttttcaacaaagtgttcaggtgtcccatgtctttctttgacacaattccaattggtcggctgttaaattgctttgccggcgaccttgaacagcttgaccagctgctgcctatattttcagagcagtttctcgtcctcagtcttatggtcatcgccgtgctgctgattgtttccgtcctttcaccatacattctgttgatgggggccattatcatggttatctgtttcatctattacatgatgtttaagaaggccatcggggtttttaagcggctggagaactattcccgctcgccgctattttctcatattctgaacagcctgcaaggtctttcatcgatccacgtttatgggaagacagaagatttcatctcccagttcaaaaggctgacagacgctcagaataattacctgctcttgttcctgtcaagcactcgatggatggcgttaaggctggaaattatgaccaatcttgtgactcttgccgttgctcttttcgttgctttcggcatttccagcacaccctacagctttaaggtgatggcagtgaatattgtgctccaattggcttcttccttccaggccaccgcgagaatagggctggagactgaagcccagttcaccgccgtagagagaatcctacagtacatgaagatgtgcgtcagtgaagcccctctgcacatggagggaacgagttgcccacaaggatggccccagcacggggagatcatcttccaagactatcatatgaagtatagagacaacacacccacggtgctccatgggataaacttgaccattagaggacacgaagtggtaggcatagtggggaggactggcagcggtaaatcgagtttggggatggccttgttccgactggtcgaaccaatggcgggtagaatcttaatcgatggcgtcgatatctgcagcatcggactcgaagacttgcgatctaaactctctgtaattccccaggaccctgtgttgctgtctgggactattaggtttaatcttgaccccttcgatcgacacacggaccagcaaatatgggatgcactggagcgcactttcctgaccaaggccatatcaaagtttcccaagaagctccatacggatgtggtcgaaaatgggggcaactttagcgtcggggaaaggcaactcctatgcattgctcgggcagtgttgcggaactccaaaattatcttgatagatgaagccacggctagcatcgatatggaaacagacactctgatccaaaggacaatcagagaagccttccaggggtgtaccgtgttggtgatagctcacagggtaaccaccgtgttgaattgtgaccacatcctggtgatgggcaacggcaaggtggtcgagttcgacagacctgaggtgctaaggaagaaacctggctcgctgttcgccgccctaatggctaccgccacctcgagcttgagatag

SEQ ID NO: 109207 - DNA, 2268 bp, synthetic construct
  misc_feature 1..2268: note = Description of Artificial Sequence: Synthetic coding sequence
  source 1..2268: mol_type = other DNA
atgactaggaaacgaacctactgggttcccaattccagcggggggcttgtgaatagggggattgatatcggggacgacatggtgagcgggctgatctataaaacatacaccctccaggatgggccgtggagtcagcaagaaagaaaccccgaagctcctggcagagccgctgttcccccatgggggaaatacgacgctgccctgcgtacgatgattcctttccgacccaagcccagattcccagctccgcaaccgcttgacaatgccgggctgttctcttacctgacggtctcctggttaaccccgctgatgatccagagtctccgcagtagattggatgagaataccatccccccattgtccgtgcacgatgcttccgacaaaaatgttcagcggttgcaccggttgtgggaagaggaggttagccgcagaggcattgagaaggcctcagtgctgctcgtgatgctgcgctttcaaaggaccaggttgatcttcgacgcgctcttaggaatttgcttctgcatcgcgagcgtgctcggacctatacttataatcccaaaaatcctggaatacagtgaggagcagctgggcaatgtggtccatggagtcggcctctgcttcgctctcttcctgtcagaatgtgtcaaatctctgtcattctcgtcttcatggattataaaccaaaggacagccattcgattcagggctgccgtgagctcatttgcatttgaaaagttgatccagttcaaatctgtgatccacatcacaagcggggaagctatttcattttttaccggtgacgttaattatctgttcgagggggtatgctacggacctctggtgctcatcacctgcgcatccttagtgatctgctccatctcatcatattttattatcggatacactgcattcatcgcgatcctttgttacctattggtttttcctctcgccgtcttcatgaccagaatggctgtcaaggcccaacaccacacaagcgaagtgtcagatcagaggattagagtcactagcgaggtcttaacctgcatcaagcttatcaagatgtatacttgggaaaagccattcgcgaagattattgaagatctgagacgaaaagagagaaagctacttgaaaagtgtgggttggtgcagagtcttacttccatcaccctcttcattatccccacagttgcgacagcagtgtgggtcctgattcatacgagtctgaagctgaagcttaccgcctcaatggcattttccatgctggcgagcctgaacctgctgcggctgtcagtcttcttcgtgcccatagctgtgaaaggcctcactaattctaaatccgcagtgatgcggttcaagaagttctttctccaggagtccccagttttctatgtacagacattgcaggatccgtccaaggctctggtgtttgaggaagctacgttgagctggcaacagacttgcccaggcattgtcaatggagcgctcgagctcgagcggaatggacacgcttctgaaggaatgacacgcccgcgtgatgcgctggggcccgaggaggagggtaattctcttgggcctgagctgcacaaaatcaacctggtggtctctaaggggatgatgctgggcgtgtgcggtaacaccggaagcggcaagtcatcacttctctcagcaatcctcgaggagatgcacctgcttgagggtagcgtgggggtccagggttccttagcttatgtgccccagcaggcctggatcgtatctggtaacattagggagaatatcctaatgggaggggcttacgacaaagcaaggtacttgcaggtgttgcactgttgtagcctgaaccgagacctcgagctgctccccttcggcgacatgactgagattggtgaaagaggacttaatctatccggcggccagaaacaacggatttcccttgcaagagccgtgtactctgaccgccagatttacctgttggacgaccccctttccgccgtggacgcccatgttgggaaacatatttttgaagaatgcatcaagaaaacgctgcgtggtaagacagttgttctagtcacccaccagcttcagtacttggaattctgcgggcagatcatcctactcgagaatgggaagatttgcgaaaacggaactcactccgaactgatgcagaagaaggggaaatatgcccagttaatacagaaaatgcataaagaggctacttcatgtaggtccatctcctcccacaggaggcgcaggtggaagaaggcgccctag

SEQ ID NO: 109208 - DNA, 4080 bp, synthetic construct
  misc_feature 1..4080: note = Description of Artificial Sequence: Synthetic coding sequence
  source 1..4080: mol_type = other DNA
atggtcggggaaggcccctacctcatctctgacctggaccagagagggaggcgacgcagcttcgccgagagatacgatcctagtctgaaaactatgatccccgtccgaccatgtgcacgccttgccccgaatcctgtggacgacgccggactcctgtcctttgccacattctcttggctgactcccgtgatggtaaaaggctaccgccagcggcttaccgtggacacgctgccaccattgtctacctatgacagtagtgatactaatgccaaaaggtttcgggtgctgtgggacgaggaggtggcccgggttggccccgagaaagccagtctgtctcacgtggtctggaaatttcagagaacccgggtattgatggatattgtagctaacatcctgtgtattatcatggccgccattggccctgtgatcctcatccatcagattctacagcagacagagagaacatcgggcaaggtctgggttggcattggcctctgtattgccctctttgcgaccgaattcacaaaagtgtttttctgggccctggcctgggctataaattaccgcacggccattcgtttgaaggttgcgttgtccacactcgtatttgaaaacctggtttcctttaagaccttgacccacatttcagtgggtgaagtgttgaatattttgagcagcgattcctattccctcttcgaggcagctttgttctgccctctgcctgccacaatccccatacttatggtattctgtgctgcatacgccttttttatcctcgggcccacagccctgattggaatcagcgtctatgtgattttcatcccagtacagatgtttatggctaagctcaactccgctttccgcagaagcgcaattctcgtcactgataaaagagtccagacaatgaatgagttcctgacatgtatccgcctcatcaaaatgtatgcttgggagaaaagcttcaccaataccattcaggacatcagacggcgcgaaagaaagttgttagagaaggccgggtttgttcagtccggaaactccgcattagccccaatcgtatccacaatcgctatcgtcttaaccttgtcgtgccacattctgctgaggcgcaagctcaccgctcccgtggccttctccgtgattgcaatgttcaatgtgatgaaattttctattgcgattttaccattctctatcaaggccatggctgaagctaacgtaagcctgcggcggatgaagaagatactcattgacaaatctcccccatcctacattacacagcctgaggatccggataccgtgttattgcttgctaatgccactctcacctgggaacacgaagccagtaggaagagtacgccgaagaagctacagaaccagaagagacatctttgcaaaaaacagagatctgaggcatactccgagaggtcgcctcctgctaagggggcaaccggtcccgaagagcaatccgattccctgaagagcgtgttgcactctataagtttcgtggttcgaaaggggaaaatcctaggcatatgcggcaacgttggaagtgggaaaagctcacttctggcagcactcctcggtcagatgcaactgcagaaaggcgtcgtggccgttaatggaactctggcctacgtcagtcagcaggcgtggatatttcacggcaatgtccgcgagaatatcctgtttggggagaaatatgaccatcagaggtaccaacatactgtcagagtctgcggactgcaaaaagacctgagtaatcttccctatggcgacttaactgagattggggaaagggggctgaacctatctggcggccaacgtcagagaattagcctggcccgcgctgtgtattccgacagacagctctacctactggatgaccccctttctgccgtggatgcccacgtgggtaaacatgtattcgaagaatgcattaagaagacattaagagggaaaaccgtcgtcctcgtcacccatcagctgcagttcctggaaagctgcgatgaggttattctgttagaggacggagaaatttgtgaaaaaggcacacacaaagaactgatggaggagagaggaaggtatgctaagctcattcacaatctaagggggctgcagttcaaagatcctgaacacctctataacgccgcgatggtggaggcttttaaagaaagccccgcggaaagggaggaggatgctggaataatagtgctggcgcccgggaacgagaaggacgaaggaaaagagagcgaaacaggtagtgagtttgtggatactaaggttccagaacaccagctgattcaaactgagagccctcaggagggcacagtgacatggaagacttatcacacttatattaaggctagtggtgggtacctcctttctctttttactgtgttcctctttctgttgatgattggaagtgcagcgttctccaactggtggttgggtctctggttggataaaggcagccggatgacttgtggtccgcaggggaatcgtacaatgtgtgaagtgggggccgtacttgcagacattggccagcacgtctaccaatgggtttatacggcgagcatggtgtttatgctcgtgttcggggttacaaaagggttcgtgtttactaaaaccaccttgatggcctctagcagcctgcacgataccgtgttcgacaaaatcctaaagtcaccaatgagtttcttcgataccacaccaaccggacggctaatgaaccggttcagcaaggatatggacgaactggatgtccggctgccatttcatgccgagaatttcctgcagcagttcttcatggtggtcttcatcctggtgattcttgccgcagtgtttccagctgtgctgctagtggtagcatccctagctgtgggcttttttatccttctgcgcatatttcatcgcggagttcaggaactcaagaaggtcgagaatgtgtcacggtccccctggtttactcatatcacaagctccatgcagggcttaggtattatccatgcttatggaaagaaagagagctgtatcacataccaccttttgtattttaactgcgctctgcgatggttcgcactcaggatggatgttctgatgaacattctgacattcactgtggcccttttggtgacactgagtttcagttctatctcaacatcttcgaagggtctctctttatcatatattattcagttaagcggccttctccaagtctgcgttagaaccggaactgaaactcaggccaaatttacaagcgtcgaactactccgagagtacatttcaacttgtgtgccagaatgtacacacccactgaaggtcggtacttgccccaaagattggcccagccgcggagagatcacctttagggattatcaaatgcgctatcgggataacacgcccctcgtgctggattctctgaatctgaacatccagtctgggcagactgtcggcatcgttggaaggaccggatctggtaagagcagcctgggcatggcgctgttccggcttgtcgagcctgcctctggcaccattttcattgacgaagtcgacatctgtatcctcagcctcgaagatctaaggaccaagctgactgtcatacctcaggatccagtgctctttgtgggtaccgtgagatacaaccttgatccgttcgagtcacatactgatgagatgctctggcaggttctcgaacggacctttatgcgagacacgatcatgaaactgccggagaaacttcaggctgaggtgactgaaaacggtgagaacttctccgtcggcgaaagacaattactgtgcgtcgctagggctttgctgagaaattccaaaataattcttctggatgaggccacagcgtctatggactccaagaccgacaccctggttcaaaacaccatcaaagacgcttttaaagggtgcaccgtgttgaccattgctcacagattgaatacagtgttgaactgtgaccacgtactagttatggaaaacggcaaggtgatcgagtttgataaacctgaggttctggccgagaaaccggatagcgcctttgccatgctcttagcagcagaagtgagactgtag

SEQ ID NO: 109209 - DNA, 1902 bp, synthetic construct
  misc_feature 1..1902: note = Description of Artificial Sequence: Synthetic coding sequence
  source 1..1902: mol_type = other DNA
atggtcggtgagggaccctacttgataagtgatctcgaccaacgtgggcgacggcgaagcttcgccgagagatatgaccccagtttgaaaacaatgattcctgtgcggccttgtgcgagactggcccccaatccggttgacgacgctgggttgttatcttttgccactttctcttggctgacgccagttatggttaaggggtaccgacagagattgactgtggacacactgcccccactctctacctatgacagctcagacaccaacgccaagagattccgagtgctttgggatgaggaggttgcccgggttggccccgagaaggcttctctgtcccatgtggtatggaaattccagcggacaagggtgctgatggacatcgtggctaatatcctttgcattattatggcagctattggaccgacagtcctgattcaccagatactccagcagacagaaaggacctccggtaaagtgtgggttggtattgggttgtgtatcgcgctgtttgctaccgaatttaccaaggtgtttttctgggctctggcctgggccataaattaccgtaccgcaatccgcctcaaggtggcactcagcaccctagtgtttgagaaccttgtctccttcaagacgctaactcatatctcagtgggggaggtactcaatatcctcagtagcgactcttacagcctcttcgaggcagccttgttctgcccactacccgcaacgatcccaatcctgatggttttctgtgcggcttatgcatttttcatacttggccccacagccctgatcgggattagcgtgtacgtgatctttatccccgtccaaatgttcatggccaaactgaacagtgcctttcgaaggtcagctattctggttactgataaaagagtgcagactatgaatgagtttttgacatgtattaggctcataaaaatgtatgcctgggagaagtccttcaccaacaccatccaagacatccggcgacgtgaaaggaaattgctggagaaagctggatttgttcagagtggaaattcagccctcgctcccatcgtaagcaccattgccattgtcctaacactctcctgccacatactactccggcgaaaactaacagcgccagtggcattttccgtaatcgccatgttcaatgttatgaaattttcgattgccatactgcccttctcaattaaggcaatggcagaggccaacgtgagccttcgcagaatgaagaagatcctaatagataaatctccacctagctatatcacccagcccgaagatcctgataccgtgcttctgttggccaatgccacgctgacatgggaacatgaggcctcgaggaagtcaacccccaaaaagcttcagaaccaaaaaagacacctctgcaagaaacagcgcagcgaagcctattcagagaggtctcccccagctaagggagccactggacccgaggagcaatccgactcgcttaagtctgttctgcatagcatatcttttgtcgtgcgcaagggcaaaattcttgggatctgcggcaatgtgggaagtgggaagtcttccttactagcagctttgcttggacagatgcagttgcagaagggagtcgtcgcagtgaatggtactcttgcatatgtgagccagcaggcgtggatatttcatggcaatgtaagagaaaatatcctttttggcgaaaaatatgatcaccagcggctgggttcaggtgcaagcacatccctcggtggccgcgggcgcgggctggcttggcccgccctaagtacacccacagtgtcttcaacttgttggacaacaccatgtagaccttggacccctacttggggatccacatccctaaggtcagccttacgccgacgaagtggcgaacggcagtcaagttggtag

SEQ ID NO: 109210 - DNA, 2808 bp, synthetic construct
  misc_feature 1..2808: note = Description of Artificial Sequence: Synthetic coding sequence
  source 1..2808: mol_type = other DNA
atggttggagaaggcccctatctgatcagcgacctggaccaaaggggacgcagacgttcctttgcagagaggtatgacccttcgttgaaaacaatgatccctgtccggccgtgcgcacgccttgcccctaatcctgtggatgatgccgggctcctcagcttcgccacattctcatggctaacccccgtaatggtcaagggatacaggcagcggctgaccgttgacaccctgccccccctttcaacatatgacagctctgacactaacgccaaacgcttcagggttctgtgggatgaggaagtcgcgcgcgtcgggcctgaaaaagcttccttatctcatgtagtatggaagttccagaggacccgcgtgctgatggatattgtagctaatatattgtgtattatcatggccgcaattggacctaccgttctaattcaccagatcctgcagcagaccgagcggacatccggaaaggtatgggtgggaattgggttatgtattgccctattcgcaacagagttcacaaaagtgtttttctgggcattggcctgggcgatcaactataggactgctattcgactcaaagtggctctgagcacactagtgttcgagaacctcgtcagcttcaagactctcacccatatctccgtaggagaggtgttgaatatcctgtcctcagattcctattctttattcgaggccgctctcttttgccctcttcctgctacaatcccaattctgatggtgttttgcgccgcctacgcttttttcatcctgggtcccaccgccctcatcggcatctctgtttatgtgatcttcattccagtgcagatgttcatggctaagctgaactcggccttcagaagatccgctattctggtaaccgataagcgcgttcagacgatgaacgaattcctaacgtgcatccgtctgattaagatgtatgcgtgggagaagtccttcaccaataccatacaagatataaggcggcgcgaaagaaagcttctggaaaaagctggattcgtgcagtccggaaacagcgcgctcgcaccaattgtttcaaccatcgctatcgtgctgaccttgtcatgtcacatcttgctgcggcgcaagttgaccgcccccgtagccttctccgtgatcgctatgttcaacgtgatgaagttcagtatcgcaattctgcccttttcaattaaggccatggcggaagctaacgtgagtctgcgcagaatgaaaaaaatattaatagacaagagccctccttcatacatcacacagcccgaggaccccgataccgttctgctgctcgccaacgccacactgacctgggaacacgaagcctcccggaagtccaccccaaaaaaacttcagaatcagaaaaggcacctgtgtaaaaagcagcgcagcgaggcgtactctgagaggtcaccccctgctaagggagctacaggccctgaagaacagtcagacagcctgaaaagcgttctgcacagcattagtttcgttgtgaggaaaggcaaaatcctgggcatttgtggaaatgtcgggtcagggaaatctagcctacttgcagcactcctgggccagatgcagctgcaaaaaggagtggtagcagtgaatgggaccctggcatacgtgagccagcaggcatggatttttcacggcaacgtaagggagaacatcttgttcggtgaaaagtacgaccaccagcggtatcagcatacagtgcgcgtgtgtggcttgcagaaagacttgagtaacttaccttacggcgatttgacagagatcggcgaacgcgggctgaacctgtcggggggtcagagacagaggatatcacttgctagggctgtgtactccgacagacagctgtacctgctggatgacccactatctgcagtagatgcacatgtgggaaaacatgtgtttgaagagtgtattaagaaaacacttaggggaaaaactgtggttctggttacccaccaacttcagtttctagaaagctgcgatgaggtgattttgttagaggatggggagatatgtgagaaaggtacccacaaggaacttatggaggagcgaggtagatatgcaaaacttatacataatcttcgggggctccagttcaaggaccccgaacatctttacaatgccgccatggtcgaagctttcaaggagagcccagccgagcgcgaagaagatgccgtattagctcccggaaatgagaaagatgagggcaaggagtctgaaaccgggtcggagtttgtggacacaaaggttccggaacatcagttgatccaaacggagtcacctcaggaaggaacggttacctggaagacgtaccacacatacattaaggccagcggcggatatctgctgtccttgtttactgttttcctcttcctgttgatgattggtagcgccgcattcagcaattggtggctgggtctgtggctggacaaaggtagtagaatgacatgtggtccacagggcaatcggaccatgtgcgaagtgggcgctgtactagcggatataggacagcacgtctatcaatgggtgtatacggcaagtatggtcttcatgctggtcttcggagtgacaaagggatttgtattcacaaaaaccacactgatggcatcctcatcgctgcacgatacggtcttcgataaacactttccacagagatctcctggcgctcaggagggaggggagtgccagcctgtaaccctcgtgcaccctcatcacctacttcacgcaggaccaggacatcactcccggctgtggcaggagggagagttacatcacctggtgtag

SEQ ID NO: 109211 - DNA, 2793 bp, synthetic construct
  misc_feature 1..2793: note = Description of Artificial Sequence: Synthetic coding sequence
  source 1..2793: mol_type = other DNA
atggttggtgagggtccatatcttatctcagatctggatcagagaggtcgaaggagatccttcgccgagagatacgatccttccctgaagaccatgatccctgtcaggccctgcgcgagactggcccccaaccctgttgatgacgctggcctgctttctttcgcgactttctcctggttgactcccgtaatggtgaagggatacaggcagagacttactgtcgacacactacctcccttgagcacatatgattcttccgataccaatgccaagaggtttcgggtcttgtgggatgaagaggtggccagagtcgggcctgagaaagctagtctctcccacgtcgtctggaagttccagcgcacccgagtcctcatggatattgtcgccaacatcctgtgcattattatggctgcaataggtcctacagtgctaatacatcagatcctgcagcagaccgaaagaacctccggaaaagtgtgggttgggattggcctctgcattgcgttatttgcaacagaatttacaaaggtgttcttctgggctttagcttgggccattaattacagaacagcaattagactgaaagtggctttatccactctggtgtttgaaaacctcgtttcctttaagaccctgacccacatctctgtgggggagatgttcatggccaagttgaattctgccttcagacgatccgccatcctggtgactgataaaagggtacagactatgaacgaatttcttacctgcattaggctgataaagatgtatgcctgggagaaatctttcactaatactatacaagatatcaggaggagggaaaggaaactgctcgaaaaggcagggttcgtgcaaagcggaaactccgctctcgccccgatcgtaagtacaattgctatagtgcttacacttagttgtcacattcttctgcggcgtaaactcacggcccctgtggcgttctctgtgattgcaatgtttaatgtcatgaagttctctattgctatactgccttttagtattaaagccatggccgaggcaaacgttagcctgagaagaatgaagaaaatacttatcgataagagtcctccgagctacattacacaacccgaagatcctgatacagtactcttgctcgccaacgctacactcacttgggaacatgaggcctctcggaagagtacgcctaagaaattacaaaatcaaaagcgacatttgtgtaagaaacagcgatcagaagcgtactcagagaggagcccacccgccaagggggcaaccggccccgaagagcagagcgactctcttaagtctgtgcttcatagtatttcctttgtggtccgaaaagggaagattctgggcatttgcgggaacgtgggctcgggcaaatcctctctgctcgccgctctgctgggtcagatgcagctccagaagggagtagttgctgtcaatgggacgctcgcttatgtcagccagcaagcctggatttttcacggcaacgtccgcgaaaacatcttgtttggggaaaagtatgaccatcagcgctaccagcatacagttcgggtgtgcggactccagaaggacttgagcaacctgccatacggagatctgacagagattggagaaaggggcctgaatctgtccggcggccagagacagcgaatttctctagccagagccgtgtactccgacaggcagctatatttgcttgacgatcctttgtccgctgtagatgcacacgtagggaaacatgtgtttgaggaatgtattaagaagactctgcgcggaaaaaccgtcgttctcgtgacgcaccaactgcagttccttgagtcttgtgacgaggtgatcttgctggaggacggagaaatctgtgaaaagggtacacacaaggagctgatggaagagcgcggacgctatgcgaagctcatacacaacctgaggggcctccagtttaaagacccagagcatctctataacgctgccatggtggaggctttcaaagagagtcctgccgagcgggaagaagacgccgggattattgtgccagagcaccaattgatccaaaccgaaagcccgcaggaaggcaccgtcacttggaaaacttaccatacatatatcaaagccagcggtggataccttcttagcctctttaccgtctttctgtttctcctgatgataggctcagctgccttttcaaactggtggttggggttgtggctagataagggctcgagaatgacctgcggcccccagggaaacaggactatgtgcgaagtgggagccgtgctggctgacataggccagcatgtgtaccagtgggtgtatacagcctccatggtgtttatgcttgtctttggggttactaagggttttgtctttactaagaccactctcatggctagtagttcccttcacgataccgtgttcgacaagatcttaaaaagtcccatgtccttcttcgataccacgccgacggggaggcttatgaacagattttcaaaggatatggatgagctggatgtgcgactgccttttcacgccgagaactttctccagcaatttttcatggttgtgttcattttggttattttggctgccgttttcccagccgtgttgctggttgtagcctcgttggcggtaggtttcttcatcctgctaaggatatttcaccgaggagtccaggagctcaaaaaggttgagaatgtctcccggagcccctggtttactcacatcaccagcagcatgcagggcttagggataatacacgcttatggcaaaaaggagtcttgtatcacgtag

SEQ ID NO: 109212 - DNA, 321 bp, synthetic construct
  misc_feature 1..321: note = Description of Artificial Sequence: Synthetic coding sequence
  source 1..321: mol_type = other DNA
atggtgggagaaggaccttatttgatttcggacctagaccagcgaggtaggcgcagatcttttgctgagcgatacgatccctccttaaagacgatgattcctgtccgaccatgtgcccgtctggctcctaatcccgtggacgacgcaggcctcttgagctttgctaccttcagctggcttactcccgtaatggtcaaaggttaccgccaaaggctcacagtcgatacgctaccacctctgtccacctatgacagctccgataccaatgccaagaggtttagagtgctgtgggacgaggaggtcgctcgggtgggaccttag

SEQ ID NO: 109213 - DNA, 858 bp, synthetic construct
  misc_feature 1..858: note = Description of Artificial Sequence: Synthetic coding sequence
  source 1..858: mol_type = other DNA
atggtgggcgaggggccatatttgatctctgatctcgaccaaagaggacgcagacggtcgtttgccgagcggtacgatccatcactgaaaaccatgattccagtacggccttgtgcaaggctggcccctaacccagtggatgacgccggtctcctgagctttgctactttctcctggctgactccagttatggttaagggctatcggcagcgcctgactgtggacacactgccacccctaagcacttatgattcctcagataccaacgcgaaaagattcagagtcctgtgggacgaagaagttgcacgggtgggaccagaaaaagcttctctgtcccacgtggtgtggaagtttcaaagaacacgggttttgatggacatagtcgcgaacatattatgcatcattatggccgcaattggacctacggtgcttattcaccagatcttgcagcagaccgagagaacctctggcaaagtctgggtggggattggcctgtgcattgcattgtttgctacagagttcactaaagtcttcttctgggcactggcctgggccataaattaccggactgctataagactaaaggtggctttgagtacgttggtttttgaaaacctagtttctttcaagactttgacccatatctcagtaggagaggttctcaatatcttaagttcagactcttattcactcttcgaagcagcattattctgtcccctgcctgctacaatacctatcctcatggtgttttgcgcggcttacgcatttttcatactcggcccgaccgccttaatcggcatctccgtatgcctgtggcctagcagtatccagctatcagagggacaacagttttggtag

SEQ ID NO: 109214 - DNA, 882 bp, synthetic construct
  misc_feature 1..882: note = Description of Artificial Sequence: Synthetic coding sequence
  source 1..882: mol_type = other DNA
atgctggaaaagttttgtaactccacattctggaattcatcgttcctcgactccccagaagccgacctgcccctctgcttcgagcaaacagtgctggtgtggatcccactgggatatctctggctattggccccatggcagctgctgcacgtgtacaagtcaagaaccaagcgatcttccaccactaaactgtacctcgcaaagcaagtttttgtgggattcctcctcatcctggccgccattgaactggcccttgtgctgactgaggactccgggcaggctactgtacccgccgtcagatataccaaccctagtctctaccttggtacctggctccttgtgcttctcatacagtacagtaggcaatggtgtgttcagaagaactcttggttcctctctctgttttggatactttcaatcctttgtgggaccttccagtttcagactttgattcggacactcctccagggagacaactcaaaccttgcatattcgtgcctatttttcatttcttacggatttcaaatcctcatcttaatttttagcgcgtttagcgagaacaatgagtcatccaataacccctcttctatcgcgagctttctctcttcaataacctacagctggtatgattccatcattctaaaaggatacaaacggcctctgaccctcgaggacgtgtgggaggtcgatgaggagatgaaaactaaaaccttagtgtctaaattcgagacccacatgaaaagagaactccagaaggcccgccgtgccctgcagaggcgacaggaaaagagcagtcagcagaactccggcgcccgcctgccaggacttaacaaaaatcagagtcagagccaggacgcacttgtgctcgtcacatttccgtag

SEQ ID NO: 109215 - DNA, 4638 bp, synthetic construct
  misc_feature 1..4638: note = Description of Artificial Sequence: Synthetic coding sequence
  source 1..4638: mol_type = other DNA
atgctagagaagttctgtaatagtacattctggaactctagtttcctggattcgccagaggctgatctgcccctctgtttcgagcaaactgttctggtgtggattcccctcggctacctctggctcctcgccccatggcagttgctccacgtgtataagtcccggacgaaaaggagcagtacaacgaaactatatcttgctaaacaggtgtttgtagggttcctgctgatcctcgccgccatagaactggcactcgtcctgacggaggatagtggccaggccacggttcccgccgtcagatatactaatccctccctctacctcggcacttggttactcgtcctcctgatccagtacagtagacagtggtgtgttcagaaaaattcttggttcttaagcctgttttggattctgtctatcctctgcggcacttttcaatttcaaactctgatccggacactcctgcaaggcgacaacagcaatttggcttatagttgtctgttcttcattagctacggatttcagatcctaatcctgatttttagcgcgttctctgaaaacaacgagagcagtaataatccctcctctatcgcatcatttctctccagcatcacttatagctggtacgactctatcatcctgaagggctacaaaagacctctgacattagaggatgtctgggaggtggacgaagagatgaagaccaaaaccttggtaagtaagtttgagacccacatgaagcgagaacttcaaaaagcccgaagagcgctgcaaagacgtcaagagaagagctcgcagcagaacagtggagcccgactgcccggcctgaacaagaaccaaagccagagccaggatgccttggtcttggaagacgtggagaaaaagaagaagaagagcggaactaaaaaggacgtgcccaaaagctggttgatgaaggcactgttcaaaacattttatatggtgctcctcaagtcttttctgttgaagctggtgaatgacatttttacctttgtctcgcctcagctgttgaagttactgatctctttcgcttctgatcgagatacatatttatggattggatacttgtgcgccatactcctgttcaccgctgcactgatccagtcgttttgcttacagtgttactttcagctctgctttaaattgggggtgaaggtgcgaacggctattatggccagtgtatacaaaaaggccctcactctttcaaatctggcacggaaggagtacactgtgggcgagactgtgaacctgatgtcagtcgacgcgcaaaagctgatggatgttactaacttcatgcatatgttatggtcctctgtattacagatagtcttgagcattttttttttgtggagggagctggggcctagtgtgctggctggggttggagtcatggtccttgtgataccaatcaatgcgatcctttccaccaaatcaaagactatccaggtgaaaaacatgaagaacaaagataagcggctaaagataatgaatgagatcttgagcggtatcaaaatcctaaaatattttgcatgggaacctagctttcgtgaccaggtgcaaaacctgaggaagaaagagctgaagaacctgctggccttcagccagcttcagtgtgttgtaatcttcgtgttccagctgacccctgtcctcgtgtctgtggtgaccttctccgtttacgtcctggttgactcaaacaacatactggatgctcagaaggccttcacctcaatcaccctctttaatatcctccgtttcccactctccatgctccctatgatgatttcaagtatgctccaagcaagcgtttccaccgaaagactggaaaagtaccttggcggcgacgacttggatacctcagccatccgccatgactgcaatttcgacaaggcaatgcagttcagtgaggcttcctttacttgggaacacgacagtgaggccacagtgagagacgtgaatcttgacattatggccggtcagcttgtggcagtcattggtcccgtgggttctggcaaatccagcctgatctccgccatgctcggcgaaatggaaaacgtgcatggtcatatcacaattaagggcaccactgcatacgttccccagcagagctggatccaaaacgggacaattaaagacaacatcttatttggtaccgagttcaacgagaaaaggtaccagcaggtgctggaggcctgcgcattactgcctgacctggagatgttacctgggggcgacctagcagagattggtgagaaaggcattaacctctcggggggacagaagcaacgcataagcctcgcccgcgctacttatcagaacttagacatatacctgcttgatgatcccctctccgctgtggacgcacacgtcggcaagcacatcttcaacaaagtgctcggccctaacggcttgttgaaaggtaaaacgagactcctggttactcattcaatgcatttcctacctcaggtcgatgagattgttgtactcggaaacggtactatagtggaaaagggtagctacagtgcactgctagcaaaaaagggagagtttgcaaagaaccttaaaaccttcctacgtcacaccggtcccgaggaggaggcaactgtgcacgatggctcagaggaagaggacgatgactacggccttataagttcggtggaagaaattccagaagatgctgcttccatcaccatgcgcagggagaactcatttcgacgcacgctctctaggtcttctcgatctaacggaaggcacctcaagtcactccggaactctctaaaaacccggaacgtgaacagtctgaaagaagacgaggagttagtcaaaggtcagaagctgattaagaaggaatttattgagacgggcaaggtgaagttttccatctatctggaatatttacaagctatcgggcttttctccatcttcttcatcattctcgcctttgtgatgaattctgtcgcattcatcggtagcaatctgtggctctccgcctggaccagtgattcaaaaattttcaacagcactgactatcctgccagtcagcgtgacatgagagtcggtgtctacggcgcgctcggcctggctcaaggaattttcgtctttatagctcatttctggtctgcctttggcttcgtccacgcttccaatattcttcacaaacagttgctgaacaatatcttaagagcacctatgcgcttcttcgacaccaccccaacagggcgtatagtgaaccggttcgccggtgacatcagcaccgtcgatgacacccttccccagtctctgcggagctggattacctgtttcttgggcattatctctaccctggtgatgatttgcatggcgacccccgttttcacgattatcgtcatccccctgggcatcatctacgtatcagtgcaaatgttctatgtctcaacaagcaggcagcttaggcgtctcgacagtgttacaagatcccccatttattcgcactttagcgagaccgtgtccggcctccctgtgatccgggctttcgagcaccagcaaaggttcctgaagcataatgaagtgcgtatagacaccaaccaaaagtgcgtattctcctggattacctcaaatcgttggttggccatccgcctggagctagtgggaaatctcacggtattcttcagtgcgttgatgatggttatttaccgagacacactgagcggcgatacagttggtttcgtgctctcaaatgctcttaatattacccaaacactgaactggcttgtgaggatgactagcgagatagagaccaacattgtggctgtggagaggattactgaatatacaaaagtagagaacgaagccccgtgggtcactgacaaacgcccccccccagattggccgtctaagggcaagatccagtttaataattaccaggtaaggtatcggccagagctagatctggtgctacgcggtattacctgcgacatcggcagtatggaaaagatcggggtcgtgggaagaacaggtgcaggcaaatcaagcttgacaaattgtctcttccggatcctggaagctgcgggcgggcagataattattgatggagtcgatattgccagcatcggcctccatgaccttcgagagaagctgacaattatcccccaggatccaatccttttctctgggtcgctgcgcatgaacttagatccattcaacaactactccgacgaagaaatttggaaggccctcgagttggctcacctgaaatccttcgtggcctccttgcaactgggcctctctcacgaggtaaccgaggctggaggaaacctgtcaattggccagcggcagctgctgtgtctgggacgcgcactactgcgaaaaagcaagatattggtcctcgacgaggcaacagccgcagtcgatctggaaaccgacaacctgattcaaacaaccattcaaaacgaatttgcccactgcaccgtcattaccattgcgcacaggttgcacactatcatggacagtgataaagtcatggtcttggataatggcaagattatcgagtgtgggtccccagaagaacttttacaaataccagggcctttctattttatggcgaaggaagcaggcattgagaatgtgaacagtacgaagttctag

SEQ ID NO: 109216 - DNA, 4584 bp, synthetic construct
  misc_feature 1..4584: note = Description of Artificial Sequence: Synthetic coding sequence
  source 1..4584: mol_type = other DNA
atggacgccctctgtgggtccggagaactggggagtaaattctgggattcaaacttaagtgtgcacaccgaaaatcctgacctcactccgtgttttcagaatagcctactcgcttgggtgccgtgtatctatctgtgggtcgccctcccatgttaccttctttatctgagacaccactgccgggggtacattatcctgtctcatctgtccaaattgaaaatggtactaggcgtgctgctgtggtgtgtcagctgggcggacctgttctactctttccacggactcgttcacgggcgagctcctgccccagtgttctttgtcaccccgctggtcgtgggagtgaccatgctcctcgccaccctgctgatacagtatgagcgcttacaaggggtccagagctcaggagtgctcatcattttctggtttctctgtgttgtgtgtgcaattgtgccgtttagaagcaaaattttgctggccaaagctgagggcgaaatcagcgacccgttccgtttcaccacgttctatatccacttcgcccttgtgctcagcgccctcatcttggcctgcttcagagagaaaccccctttcttcagtgccaagaatgtggacccgaacccctaccctgaaacctccgctggatttttatcccggctttttttttggtggtttacaaagatggccatctatggctatcggcatcctctcgaggagaaagacttgtggtccctgaaggaggaggaccgaagccagatggtagtccagcagctccttgaggcatggaggaaacaggagaagcagaccgcccgccacaaggcctccgctgctcccgggaaaaacgccagcggagaagatgaggtgctgctaggtgcacggccaaggcccaggaaaccctcctttttgaaagccctgctggctaccttcggatcttcgtttttgatctccgcttgtttcaagttaatccaggatcttctgtccttcatcaatcctcaactgctgagcatattgatccgttttatctcaaaccctatggccccttcatggtggggcttcctggtcgccggacttatgtttttatgttccatgatgcaatcactgatactccagcattattaccactacatattcgtgacgggggttaaatttagaaccggaataatgggcgttatttacagaaaggccctggtgatcaccaacagtgtcaaacgcgcgtccaccgtcggcgaaatcgttaatctgatgagcgtagatgcgcagagatttatggatctggcccccttcctgaatctcttgtggtctgctcctcttcagataatcctggcaatctacttcttatggcagaacctgggaccgtctgttctcgcaggagtcgcattcatggtgctcctcataccacttaacggcgccgttgctgtcaagatgcgagctttccaggtcaaacagatgaagctgaaggactcgaggattaaattgatgagcgagattctcaacgggattaaagttctgaaactgtacgcctgggaacccagtttcttgaaacaagttgagggtattcgccagggcgagctgcaactgctcaggacggccgcttacctgcacaccacaacaacctttacctggatgtgttcccccttccttgtgactcttatcacactgtgggtctacgtgtatgtggatcctaacaacgtattagacgcagagaaagcgttcgtgagtgtgagcctgttcaacattctgagattacctctgaacatgttacctcagttaatttcaaacctaacccaggccagcgtgtccctcaagcggatacaacagttcctgtctcaagaagaactcgacccccagtcagttgagcgcaagactatctcacctggctacgccattacaatccacagtggtacgtttacatgggcccaggatctgccgccaactctgcactcgttggacatccaggtgccgaagggggccttagtcgcagtggtggggcccgtgggctgcggcaaaagcagccttgtctcagcactgctcggcgagatggagaaacttgaaggaaaagtccacatgaaaggcagtgtcgcctatgtccctcagcaggcatggatccagaattgcaccctacaggaaaatgtgctgtttggaaaagccctcaatcccaagcgctatcaacagaccctggaggcatgtgccctcctggctgacttggagatgctccccggcggtgatcagaccgagatcggggaaaaagggatcaatctgagcggaggccagcggcagcgggtgagcttggctcgggcagtgtactccgatgccgatatcttcctgctggatgacccactgagcgccgtcgattctcacgtagcaaaacacatatttgatcacgttattgggcctgagggggtgttagccgggaaaacgagggtcttagtgacccacgggatttcatttctcccccagaccgatttcattattgtgttggccgatggacaagtgagtgagatgggtccgtaccctgccctcctgcagcgcaatgggtcctttgcaaattttctctgcaactatgcgccggatgaagaccaaggccatttggaggacagctggacagcgctcgaaggggccgaagacaaagaagctctgctgattgaagataccctgagcaaccatacggacttaaccgacaatgatcccgtgacatatgtcgttcaaaaacagttcatgcggcaactctcggcactcagttctgacggcgaggggcagggaagacctgtgccgcgccggcacctggggccctccgaaaaagtgcaggtcacggaggccaaggcagatggggccctaacgcaggaggagaaggctgcaattggtaccgtcgaattgtccgtcttctgggactacgccaaagctgtgggattgtgtaccaccctggcgatttgtctcctgtatgtgggacagagcgcggccgccataggggccaacgtttggctgtctgcttggaccaatgacgccatggctgactctaggcagaacaacacttcactccgattaggggtatacgccgcgctggggatactccaagggtttctcgttatgttggccgcaatggccatggcagcaggcggtatacaggcggcacgggtgcttcaccaggccctgttgcataacaagatccgaagcccccagtcttttttcgatacaaccccctctgggagaattctcaactgtttttcgaaagacatctacgttgtcgacgaggtgttagcccccgtgattttgatgctgctcaactctttctttaacgctatctcaacccttgttgtgatcatggcaagcacaccactctttacagtagtgatcctgcccctcgcagtgctgtacactctggtacagaggttctacgctgccacctctcgccaactaaaacggcttgagtcagtgagccgttcacctatttactctcattttagcgaaacagttaccggcgcctctgtcatccgggcctacaacaggtcgcgcgattttgaaattatttccgacacgaaagtggacgccaaccagaggagttgttacccatacataatttctaaccggtggctgtcgatcggtgtggagtttgtagggaactgcgtggttctcttcgccgctttgtttgcagttattggcaggtcctcacttaacccagggctggtggggctcagtgtgagttactctttacaggtcaccttcgctttaaattggatgatccggatgatgagcgatctcgaaagtaatatcgtcgctgtggaacgcgtgaaggagtacagtaaaaccgagacagaagcaccatgggtagtcgagggctcaaggccgcccgaagggtggcctcccaggggcgaagtggagttccgtaattacagcgttcgctacagacctgggctcgaccttgtacttagggatctgagtttacacgtgcatggcggggagaaagttgggatagtcgggcgtacaggcgccggaaaatcaagcatgacactctgcctgttccggatcttggaagcagccaagggggaaatccgcatcgatggacttaatgtggcagatatcggtttacacgacctgcggagccagctgaccatcattccacaggatccaattcttttcagcggaacactgcgtatgaatttagacccattcgggtcttattcagaagaggatatttggtgggctctcgagttgagccatctacacacattcgttagttcacagcctgccgggctggactttcagtgttctgaaggaggggaaaatctgtcggtagggcagaggcagttagtctgcctggctcgcgctttgttacgcaaaagtcgaatactggtcctggatgaggctaccgccgctattgacctggaaacagacaacctcatccaggccactatcaggacccaattcgatacctgcactgttcttacaattgctcacaggctgaatactattatggactacacccgggtcctcgttctggacaaaggggttgtggctgagtttgattctccagcgaacctcattgccgcacgtggaatcttttatggcatggcgcgtgacgccggtcttgcttag

SEQ ID NO: 109217 - DNA, 1719 bp, synthetic construct
  misc_feature 1..1719: note = Description of Artificial Sequence: Synthetic coding sequence
  source 1..1719: mol_type = other DNA
atggatgcattgtgtggttccggtgagctaggatccaagttctgggacagcaacctgagcgtgcatactgaaaaccctgatctcaccccatgtttccagaatagcctcttggcctgggtcccgtgcatctacctgtgggtggctctgccttgttaccttttgtatcttcggcatcactgtagagggtatataatcctaagccatttgtctaagctgaaaatggtcctgggagtcctactctggtgcgtgtcctgggccgatttgttttatagttttcacggcctggttcatggcagggccccagctccagtgtttttcgtcacaccactggtagtcggcgttactatgctacttgccaccctcttaatccaatacgagcgcttgcagggggtgcaatctagcggagttctgattattttttggttcttgtgcgtcgtctgtgccattgtgccatttcgatcaaaaatcctcctggccaaagccgagggggaaatttcggaccccttcaggtttacgactttttatatacactttgccctggtgctctccgctctcatcttagcgtgctttcgcgaaaagccaccctttttcagtgctaaaaatgtagacccaaatccatatcctgagacaagcgccggatttctgtctcgtttatttttttggtggttcacaaaaatggccatctatggataccggcatcccctggaagagaaggatctatggagtttgaaagaggaagaccggagccaaatggtggtgcagcaattattggaagcatggcgaaagcaggaaaagcagacagctcggcacaaagcatccgcagctcccggaaagaacgcttccggggaggacgaggtgctgctgggcgctagacctcggcctagaaaaccttccttcctaaaagccttgctcgccacattcgggtccagcttcctgatatctgcctgcttcaaactgatccaagatcttcttagttttattaacccccagctattgtccatcctaattagattcatctcaaatccaatggctccttcttggtggggattcctcgtagcaggcctgatgtttctctgtagtatgatgcaatcactgattttgcagcattactaccactacattttcgtaaccggcgttaagtttcgcaccggcattatgggcgtgatctatagaaaagctctggtcattactaatagcgtcaagcgtgccagcaccgtcggggagatcgtgaacctcatgagcgttgatgcacagcgctttatggatctggcaccttttctgaatctgctatggagcgctcccctgcaaattatacttgcaatttatttcctttggcagaatctcgggcccagtgtactagccggggttgcctttatggtgctgctgatccctctgaacggcgccgtcgccgtgaagatgcgggcatttcaggtgaaacagatgaaacttaaagatagcaggataaagctcatgtccgagatattgaatgggatcaaggtccttaaactgtacgcttgggagccttcttttctcaagcaggtggaaggcatccggcaaggcgagctccagttgttaaggaccgcagcctatcttcataccacgactactttcacctggatgtgcagcccattccttgttcggctaggcaccggtttaggtccctgcctgcaaggatctggatgcccaggtatggcgagagcacactggaccctgccatag

SEQ ID NO: 109218 - DNA, 3717 bp, synthetic construct
  misc_feature 1..3717: note = Description of Artificial Sequence: Synthetic coding sequence
  source 1..3717: mol_type = other DNA
atggacgccctctgcggttccggcgagctcggatctaaattttgggactcgaatctcagtgtgcacacggagaatccggatctgactccgtgctttcaaaacagcctgttagcctgggtgccatgtatatacttgtgggtggctctgccttgctacctgctgtatctgagacatcactgtcgaggatacatcattttgagccatcttagtaagctgaagatggtcctcggtgtgctgctatggtgcgtgtcttgggcagacctgttttatagcttccatggcctagtgcatggtagggctcccgcaccagtcttctttgtcactccgctggttgtgggagtcacaatgctattagcaaccttgcttatccagtacgagcgcctgcagggagtgcagtcgtctggggtgctgattattttttggttcctgtgtgtagtgtgcgctattgtgcctttccgttcgaagatactcttggctaaggctgaaggagaaatttcagacccattcagatttacaaccttttacatacacttcgccctggtgctgtcagcattgatactggcgtgtttcagagagaagcccccattctttagcgctaagaacgtagaccccaatccataccctgagacctctgccgggttcctttcccgcctgtttttctggtggtttacgaaaatggctatctacgggtaccgtcaccccctcgaggagaaggatctgtggtcgctcaaagaagaagatagatcacagatggtagtgcaacagttgctggaggcttggcggaagcaggaaaaacagactgctcggcacaaggcttctgccgctcccggaaaaaacgcttcgggggaggacgaggttttgttgggggcaagaccaaggcccagaaaaccttcttttctgaaggccctcctggcgaccttcggctcttctttcttaataagcgcttgcttcaagctcatccaggacctgctgagctttatcaacccccaactgttgagcatcttaattagatttatttcaaatcccatggctccttcatggtggggatttttagttgctggcttaatgtttctgtgttccatgatgcaatccctgatactgcagcactactaccactatattttcgttacgggtgtgaaatttaggacagggatcatgggcgttatttatcggaaggctctcgtgattaccaactcagttaagagggccagtaccgttggagaaatcgtgaatttgatgtctgtggatgcacagaggttcatggatcttgccccgttcctgaacctgctgtggagtgcacccctgcagataattctcgccatatactttctgtggcaaaatctggggcctagcgtcctggcgggcgtggccttcatggtgttgctcatccccctgaatggggctgtggcggtcaaaatgagggccttccaggttaaacagatgaaactaaaagacagccgaattaagctgatgagtgagatcttgaatgggatcaaggtcctgaagctgtacgcctgggagccatcttttcttaagcaagtcgagggcatccgccaaggtgagctccagctcttgaggaccgcagcttatctccacacaactacaaccttcacctggatgtgcagtccttttcttgtgactctcattacgctctgggtgtatgtctacgtggaccctaacaacgtgctggacgctgagaaggctttcgtttcggttagtctgttcaacattctgcgactccccctgaacatgttgcctcagctgatctcaaacttaacccaggcatctgtcagcctgaagcgtattcaacagttcctgtctcaggaggaactcgacccccagagtgtggaacggaaaactatttcacctggttacgccattacgattcacagcggaacattcacttgggcccaggatctccctcccactcttcatagcctggatattcaggtccccaagggcgccttggtggccgttgtaggaccagttgggtgtgggaagagctccctggtcagtgcactgctcggcgaaatggaaaaattggaaggcaaggtccatatgaagggatcagtggcttatgttccccagcaagcctggattcaaaactgtaccctgcaggagaatgtgttattcgggaaagccttaaacccaaagaggtatcagcagaccctggaggcttgtgccctactggccgacctagagatgctgccagggggcgatcaaacagagatcggggagaaaggcattaatctttcaggagggcagcgacagagagtgtccctggcgcgggcggtgtattcagatgcagacattttcctcctagatgaccccctcagcgcggtagactcccatgttgccaaacacatttttgatcacgttattggaccagaaggcgtgctcgcaggcaaaactagagtactcgtgacccatggaattagctttcttccccaaaccgactttatcatcgtgctggcagatggacaggttagcgaaatgggcccttaccctgctctgctccagaggaatggaagcttcgccaacttcctttgtaattacgcccccgacgaggatcagggccaccttgaagattcatggacggccttggagggggcagaggacaaagaggcactgttgatcgaggatacgctgagcaaccatactgaccttaccgataacgacccagtcacctatgttgtccagaaacaattcatgcggcagttgagcgccctgagctctgacggcgaggggcagggcaggcccgtgccgaggcgccacctcggaccgtccgagaaggtccaggtaaccgaggcaaaagctgacggggctttgacacaggaagagaaagctgcaattggcactgtagaactctcggtgttctgggactatgcgaaggctgtcggattgtgcactacactggccatatgcctgctgtacgtcgggcaatccgccgctgctattggagcaaatgtttggcttagcgcctggacgaatgatgccatggccgatagtcggcagaataataccagtctgagactgggtgtttacgcagccttgggtattctccaaggttttttggtcatgctcgcggcaatggctatggctgccggggggattcaggccgcccgggtcctccatcaggctttgctgcacaacaaaatccggtccccacagagtttctttgatacgacgccatcagggcgcatcctgaactgctttagtaaggacatatatgtcgtggacgaggtacttgcacctgtgattttgatgcttttaaattcattctttaacgcaatcagtacgctggttgtaatcatggcttccactcctctctttaccgtcgtgatcttgcctcttgcggtgttgtatactctcgtgcagaggttttatgccgcaacgtcgcgccaattgaagcggctggagtccgtgagcaggtctcctatatattcacatttcagcgaaaccgtaactggtgcctctgtcatccgcgcttacaataggagcagagacttcgagataatctctgacaccaaggttgacgctaaccagcggtcctgctatccctacatcatttcgaatagatccgaggccgctagtcttgctccgtgttcttcgcgcaactcccaacaggccctctggtgcagtgggtcactgtccctgctctccccgaagcaaaaaaccggaccagctctccctctcccacacttcctgttgatttag

SEQ ID NO: 109219 - DNA, 3978 bp, synthetic construct
  misc_feature 1..3978: note = Description of Artificial Sequence: Synthetic coding sequence
  source 1..3978: mol_type = other DNA
atgttacccgtataccaggaagtcaagccgaatcccctgcaggacgctaacctttgcagcagggtgttcttttggtggcttaacccgctcttcaaaatcgggcacaagagaagacttgaagaggatgacatgtatagcgtgctgccggaggacaggagtcagcatcttggcgaggaactgcagggattctgggataaagaagtgctcagggcagaaaatgatgcccagaagccttcactcacccgggctataataaagtgttactggaaatcttaccttgtactcggaatttttaccctgattgaggagagcgcgaaagtgatccagcccatttttttgggtaagatcataaactactttgaaaactacgacccaatggattcagtagccttaaacacggcatatgcctatgctactgtgctcacattctgcacgctcatattggcaatcctgcatcatttgtacttctaccacgtccaatgcgctgggatgaggcttcgagtggcaatgtgtcacatgatttacaggaaggcactacgtctgtcaaatatggctatgggtaagactaccacaggacaaatagtaaatcttttatcaaatgacgtcaacaagttcgaccaggtgacagtcttcctgcactttctatgggccgggcccctccaggctatcgcagtaaccgccctattatggatggaaataggaatctcctgtttggctggcatggctgttctgattattttgttaccactccaatcttgcttcggaaaactgttctccagcctccggtcaaagaccgccacattcactgatgcccggattcgaaccatgaatgaggtgatcactggaatacgcattattaagatgtacgcctgggagaagtcattttcaaatcttattaccaatctccgcaagaaagagattagcaagatactccgaagttcgtgcttgcgtgggatgaatttagcctctttcttttcagcttccaaaataatcgtgttcgtgacgtttacaacgtacgtcctgttagggtccgtaatcaccgcatcacgtgtgttcgtggccgtaactctgtacggagccgttagacttacagtgactcttttttttccctctgcgatcgagagggtatctgaagctattgtcagtattaggcgcatccagacattcctccttctcgacgagatttcccagcgcaatagacagctacccagcgacggcaaaaaaatggtgcacgtacaggacttcaccgctttctgggacaaggccagcgagacccccacccttcagggactctcatttacggtcaggcccggtgaactgttggctgtggtgggccccgtgggagccggtaagtcaagccttttgtccgctgtgcttggcgaactggcccccagccacggtctggtgagcgtgcacggacgcatagcttatgtgtcacaacagccctgggtcttttctgggacactccggtcgaatattcttttcgggaaaaagtacgaaaaggagcgatacgagaaagtaattaaggcctgcgcactgaagaaggacctgcagcttctcgaggacggcgaccttactgttatcggggacagaggaactaccctctcaggcgggcagaaggcaagggtgaacctggccagagcagtttatcaagacgccgacatctaccttcttgacgacccattgtccgccgtggatgccgaagtatctaggcatctttttgagttatgtatttgtcagatccttcatgagaagattaccattctggtgactcatcaactccagtaccttaaagccgcgtctcaaattctgattctgaaggacggtaaaatggtgcaaaaagggacatacacagagtttttgaaatcaggaatagactttggtagtctgctgaaaaaggacaatgaagaatccgaacaaccacctgtacccgggacaccaaccctcaggaatcgcaccttcagtgagtcgagtgtgtggtctcagcagagcagccgccctagcctgaaggatggggccctggagtcccaggataccgagaacgtccccgtcactctatcagaggaaaacagaagcgaaggaaaggtggggttccaggcctataaaaactactttagagccggcgcccattggatcgtgttcatcttcctcattctgctcaacaccgccgcacaggtggcttacgtgctgcaggactggtggttgtcatattgggcaaataagcagtcaatgcttaatgtcacggtgaacggcggagggaatgtcaccgagaagctggacctcaattggtatctaggcatctattctgggttaacagtcgcgaccgtgctgttcggaattgcccgttcactcctcgtcttttacgtacttgttaactcctcgcaaaccctccataataaaatgttcgagtcgatcctgaaggcccctgtgctattttttgaccggaatcccattggccgcatactgaacagattttccaaagatatcgggcatctggatgatctgcttcctcttacttttctcgatttcattcaaactcttctgcaggtggtcggcgtagtctccgtcgccgtggcagtgattccttggattgccattcccctcgtgccactcgggattatcttcattttcctaaggcggtattttctggagacctctcgagacgtcaagcggcttgaatctacaactcgctcgcccgtgttcagccatttaagtagctctctacagggactgtggaccattagagcctacaaagctgaggagcgctgccaggagttattcgacgcccatcaggacctccattccgaggcttggtttctgtttctcacaacatccaggtggttcgccgttcgtctagatgcaatctgcgccatgttcgtgattattgtggcctttggatccctgattcttgccaagaccctggacgccgggcaggtcggcctggctctgtcctacgcgttgacactgatgggcatgtttcagtggtgcgtgcgacagagtgccgaggttgaaaatatgatgatcagcgttgaacgggtgatcgagtatactgatctcgagaaagaagcaccctgggagtatcagaaacgaccccccccagcctggcctcacgagggcgtgattatcttcgataatgtaaacttcatgtattcgccggggggcccgcttgtactgaagcatctgaccgcccttataaaatctcaggagaaagtcggaatagtaggaagaacaggagccgggaagagcagcttgatctctgcgctttttcgtctctccgagccggagggtaaaatatggattgacaaaatccttacaaccgaaatcggactacatgacctgcggaagaaaatgtctattattcctcaggagccagtcctgttcacaggcacaatgcgcaaaaacctagacccattcaacgagcatactgacgaagagctttggaatgcgttgcaggaagtccagctcaaagagaccatcgaagatctgccggggaaaatggacacagagctcgccgagtccgggtcgaattttagcgtcggtcagagacagctggtgtgcttagcacgtgcaattcttagaaagaaccagatactcattatcgacgaagctaccgctaatgtcgacccgcggacagacgaactgattcagaaaaaaattagggagaagtttgcccattgcaccgtgcttactattgcacacaggctgaacaccatcatcgatagcgataaaattatggtgctcgatagcgggagattgaaagaatatgatgagccatacgtcttattacagaacaaagaatctctgttctataagatggtgcaacagctcggaaaagccgaagctgccgctttgacagagactgcaaaacaggtgtacttcaagagaaattaccctcacattggtcacacggatcatatggttaccaatacaagcaacgggcaaccatctacattaacaatttttgaaactgccttgtag

SEQ ID NO: 109220 - DNA, 3837 bp, synthetic construct
  misc_feature 1..3837: note = Description of Artificial Sequence: Synthetic coding sequence
  source 1..3837: mol_type = other DNA
atgctgccagtttaccaggaggttaaaccaaaccctcttcaggatgccaacttatgttcacgcgtgtttttttggtggctcaatcctctgtttaaaatcggccacaaaagacgattagaggaggatgacatgtatagcgtcttgcctgaggaccggtcgcagcacttgggtgaggagcttcaggggttctgggataaagaagtactgagagcagagaacgacgcacagaagccttcactaacccgcgcgattattaagtgctactggaagtcatatctcgtgttgggcatcttcacgctgattgaggaatctgctaaggttatccagcctatcttcctaggcaagattatcaattattttgagaattatgaccccatggattccgtagcactgaatacggcctacgcttatgctactgtccttactttctgtacactgattctggccattcttcatcatctgtatttctatcatgtgcagtgtgctggcatgcgcctcagggtcgccatgtgccatatgatctatcgtaaggccctgcgtctctcaaacatggctatgggtaagacaactactgggcagattgtcaacctgctctccaatgatgttaacaagtttgatcaggtcaccgttttcctgcatttcttgtgggccggccctctgcaggcaatcgctgtaactgccctcttgtggatggaaattggaataagttgcctagccgggatggcagtattgataatcctgttaccactacaatcttgcttcggcaagctttttagctcccttcgatctaaaaccgctacgtttactgacgctcgaattaggaccatgaacgaggtgattaccggtattcgaatcattaaaatgtacgcctgggaaaagtcctttagtaatctgatcactaacctgaggaagaaggaaatcagtaaaatcctgagatccagctgcttacgaggcatgaatctagctagcttcttttccgctagtaaaattatcgtattcgtaacctttactacttatgttctactgggttcagtaattaccgcctcacgcgtgttcgttgccgtgaccctgtatggcgcagtgcggctcacagtaacgctcttctttcctagtgcaattgagagagtctcagaagccattgtgtcgattcgacgtatccagacattcctgctgctggacgaaatatctcagaggaaccggcagctcccatcagacggcaagaaaatggtccatgtgcaggatttcacagctttttgggacaaggctagcgagaccccaaccttgcaggggctgagtttcacagtccggcctggagaacttctggcagtcgtgggacctgtgggtgctggcaaatcatcactgctgtccgctgttttgggagagttggcccccagccacgggctggtgtccgttcatggcaggatagcctacgtctcacagcaaccgtgggtatttagtggtactcttagatccaacatactctttggaaagaaatacgagaaggagcggtacgaaaaagtcataaaagcttgtgccctgaagaaagacttgcaactcctggaagatggagatctgacggtgataggcgatcgaggcacgaccctatctggaggtcagaaggccagggtgaacctggccagagccgtgtaccaagacgctgacatttacttattggacgaccccttgtctgcagtggacgctgaggtcagcaggcacctgttcgagctgtgtatttgccaaatccttcatgagaaaattaccatcctggtcacccaccagttgcagtatctgaaagccgcttcccaaatccttattctgaaagacggaaaaatggtacagaagggtacttataccgaattcctgaagagtggcatcgacttcggaagcctactgaaaaaggataatgaggaatcagagcagcctcctgtgcccggaacaccaaccctgcgaaatcgcaccttttccgagtcatccgtatggtctcagcagtcctcaagaccatcactgaaggacggggccctcgagtctcaagatgtcgcatacgttttgcaggactggtggctctcttactgggcgaataagcagtccatgctgaacgtcacggtgaatgggggaggaaatgtgaccgagaagctagatttgaactggtaccttgggatatattctgggctcaccgtggctacagttctgttcggaatcgctagatccctgctcgtgttctacgtgctagtcaattcctctcagaccctgcacaataagatgtttgaatctattctgaaggcaccagtgttattctttgatcgcaacccaatagggcgtatcctgaaccgtttctcaaaggacataggccacttagacgaccttcttcccctcacgtttctcgactttatccagaccctgctgcaagtcgtgggggtcgtcagtgtggcagtggctgtgatcccctggatagctatccctttggtccccctcgggatcattttcatcttcctgaggcggtattttctggagacgagtagagacgtgaaacgactggagtcaacaacacgttccccagtattttcccatctctcctcgagtcttcaggggctgtggacaatccgcgcctataaggctgaagaaagatgtcaggagctcttcgatgctcaccaggacctccattctgaggcctggttcctttttctgactacttctcggtggtttgctgtgcgactcgatgcgatttgtgcaatgttcgtgattattgtggccttcggatcactgatcctggctaagactctggatgcgggccaggtgggactggcgttgtcatatgctctgactctgatggggatgtttcagtggtgtgtcagacagagcgctgaagttgagaacatgatgatcagcgttgaaagagtgattgagtataccgatctggagaaggaagccccctgggaataccaaaaacgcccacctccagcctggccccacgaaggtgtgattatcttcgataacgttaactttatgtacagccccgggggcccgctggttctgaaacacctcaccgctctgattaagtcgcaggaaaaagtcgggattgtgggacgaaccggcgctggtaaatctagcctgatctcagcgctgtttcgcctgagtgaacctgaaggcaagatttggattgataagatcctgacgacagagattggtcttcacgaccttcgcaaaaagatgtctatcattccccaggaacccgttttgtttaccggcacaatgagaaaaaatcttgatccatttaatgagcacacagatgaagaactctggaatgccctacaggaagttcagctcaaggagacaattgaagacctgccaggcaagatggacaccgaactggcggaaagcggctcaaatttcagcgtcgggcagaggcagcttgtgtgtttagcacgggccattctccggaagaatcaaatactgattattgacgaggctactgctaacgtcgaccctcggaccgacgaattaatccagaagaaaatcagggaaaaatttgcccattgcactgtgttgacaatagctcacaggctgaatactatcattgacagcgacaaaatcatggtcctggactctggccgcttgaaggagtacgacgagccctacgtccttctccagaacaaggaaagcctcttctacaagatggtgcagcagcttggaaaggccgaagcagcagcattgacggagaccgcaaagcaggtatactttaaacgaaattaccctcacattggacatactgatcatatggtgaccaatacatccaatgggcaacctagtacactgactattttcgagaccgctctgtag

SEQ ID NO: 109221 - DNA, 2580 bp, synthetic construct
  misc_feature 1..2580: note = Description of Artificial Sequence: Synthetic coding sequence
  source 1..2580: mol_type = other DNA
atgttgccggtgtaccaagaggtgaagccaaatcctttacaggacgcgaatctttgttcacgggtcttcttttggtggcttaaccccctgtttaaaataggccacaaacgccggctggaagaggatgatatgtattccgtgcttcccgaggacaggtctcagcatcttggcgaggaattgcagggtttctgggacaaagaggtgctacgggccgagaatgatgctcaaaagccaagcctcacccgtgctatcattaagtgctactggaaaagctacctagttctcggcattttcaccttgatcgaggagtccgcaaaagtcattcagcccatcttcctcggaaaaataatcaactattttgagaattacgatccaatggactctgtggctctgaataccgcctatgcatacgccaccgtgttgaccttctgcacactgatactcgcaattcttcatcacttatatttctatcacgtgcagtgtgcaggcatgagactgcgcgtggcaatgtgtcacatgatttataggaaggctctgaggttaagcaacatggccatgggtaaaacgacaacaggccagattgtcaatcttctgtccaacgacgtcaacaagttcgaccaagtgactgtatttctccattttctctgggcaggccccctgcaagcaatagccgtcaccgccctgctctggatggagatcggcatttcctgtctggcgggcatggcggttcttatcatcctgctcccactgcagagctgctttggcaagctgttctccagtctccgaagcaaaactgccacattcacggacgcgcgcatccgaactatgaatgaggtaatcaccggcatcaggatcattaagatgtacgcttgggagaaatcttttagcaacctaatcacaaaccttcgcaagaaagaaatcagtaaaattcttcgctcttcctgcctaagaggcatgaatttggcgtcgtttttctctgcatcaaagattatagtgtttgttaccttcactacttacgttctcctgggtagcgtcatcactgctagtcgggtttttgtggctgtcacgttgtatggtgccgtacgtttaactgttacccttttttttccctcggcaattgagcgagtgagtgaggcaattgtgtccatccgccgcatccagactttcctcctgctcgacgagatatcccagcggaatcggcagcttcctagcgacggtaagaaaatggtgcacgttcaagactttacggccttctgggacaaagccagcgagacgcccacacttcagggactatcgtttacagtgcgccccggagagttactcgccgtggtcggcccagtgggcgcaggcaaaagttctttattgtccgcagtgctaggcgaactcgcaccatcacacgggttggtatccgtccatggtcgcatcgcttatgtctcgcagcagccttgggtatttagcgggactctccggagtaacatcctctttggcaagaagtacgaaaaagagaggtacgaaaaggtgataaaggcgtgtgctttaaagaaggatctccagctgctggaggatggggatctcacggtaattggagacagagggactaccctctccgggggccagaaggcccgcgtgaatctcgccagagcagtttaccaggacgcagacatctatctgctggacgaccctctgtccgccgtcgacgctgaagtctcacgacacttgtttgagctgtgcatttgccagatactgcatgagaaaatcacgatccttgtgacacaccaactgcagtacctaaaagcagcaagccagatcctgattctgaaagatggcaagatggtgcaaaagggtacatacaccgaatttttaaagtcggggatagattttggaagccttctcaaaaaggacaacgaggagtctgaacagcctcctgtccctgggacccccacacttcggaacaggaccttttccgaatcgtccgtttggagccagcaaagtagcaggccctctttgaaggatggggctctggaatcccaggacaccgaaaatgttcccgtgacactgtcagaagaaaaccgaagtgagggcaaagtcggctttcaggcatacaagaactatttcagggccggagcccattggattgtttttatctttctgatcctccttaacacggcggcccaggtcgcatacgtgctgcaggattggtggctgagctactgggctaacaaacagagcatgctgaatgtcaccgtgaatggcgggggtaacgtgactgagaagctcgaccttaattggtacttaggtatttactccggattgaccgtcgctactgtcctgttcggcattgcaaggtccctgctggtcttttatgtgcttgtcaatagttcccagacactccacaataaaatgttcgagagcatcctgaaagctcctgttttgttctttgaccggaaccctatcggacggattctgaacaggtttagcaaagacattggccacctcgacgatctgctgccattgactttcctcgatttcattcagagatgggatctggccgtgctgtcttggctggtgagtaattcctag

SEQ ID NO: 109222 - DNA, 2355 bp, synthetic construct
  misc_feature 1..2355: note = Description of Artificial Sequence: Synthetic coding sequence
  source 1..2355: mol_type = other DNA
atgctgccggtttaccaggaagttaaaccaaaccctttgcaggatgcgaatctctgctcgcgcgtcttcttctggtggctcaacccgctgtttaaaattggacacaagaggcgccttgaagaggacgacatgtattctgtactccccgaggacaggtcgcagcatctgggggaggagctacaggggttctgggacaaagaggtactgcgggctgagaatgacgctcaaaaacctagtctgactcgggcaattatcaaatgttattggaaatcgtacctcgtgctgggtattttcacactcatagaagccttgagactttcaaatatggccatgggtaaaaccacaacggggcaaattgtgaatttgctgtcaaacgatgtgaataagttcgaccaggtgactgtgtttctgcactttttgtgggcaggccccctacaggcaatcgcagtgacagccctcctgtggatggaaatcggaatctcttgtcttgccggcatggcagtattgattatcctgctgcctttacaatcctgctttgggaaactcttctccagtctgaggtctaaaacagctacgttcaccgacgccagaatcaggacaatgaacgaagtcatcactggcatacgtattattaagatgtacgcttgggaaaaaagtttctccaatcttataaccaatctacgcaagaaggaaatttccaagatcctgcgcagttcatgcctgcggggcatgaaccttgcttcatttttctcggcctccaagatcattgttttcgtgaccttcaccacatacgtcctgctgggctccgtaatcacggcctctcgggtgtttgtggccgtcaccctgtacggggccgtgaggctgaccgtgacactgttttttccctccgcgattgaaagagtgagcgaagccatcgtttccattcgcagaattcagactttcctgctcctcgatgagatcagtcagagaaacagacagctaccgtcagatgggaaaaagatggtccacgttcaggatttcacagccttctgggataaagcaagtgaaacaccgaccctccaagggctatcattcacagtgcggcccggtgagttgcttgccgtagtgggccccgtcggcgcagggaagtcctctcttctgagtgcagtcttgggtgagctggctccaagtcatggcttagtgtccgtgcacggacgtatcgcctatgtgtcccagcaaccgtgggtgtttagcggcacccttagatctaacatcctgttcgggaagaagtacgaaaaggagaggtacgaaaaagtgatcaaagcctgtgcactgaagaaggacctgcagctattggaagatggagatctgacagttatcggggacaggggtactacactgagtggtggacagaaggcacgagtaaacctagctagagcagtgtaccaggacgctgacatctaccttctggacgatccactgagcgctgtcgatgccgaggtctctcgccacttattcgagttgtgtatttgccagatcttgcacgagaaaatcacaatcttggttacccaccaactgcagtatctaaaagccgccagccagattcttattctaaaagatggcaagatggtacagaaaggaacttacactgaatttcttaaatccggcatcgactttggaagtctcttaaaaaaagataatgaagaaagtgaacagccaccagttcccggcacaccaacacttcgtaacagaacgttcagcgaaagcagcgtatggtcccagcagtcctctcggcctagcctgaaggacggagccttggaatctcaggacacagaaaacgtcccggtgactctgagcgaggaaaataggtccgaaggcaaggtaggattccaggcatacaagaactatttcagagcaggcgctcactggattgtgtttattttccttatacttctgaacaccgccgcgcaggtggcctatgtcttacaagactggtggctgagttactgggccaacaagcaaagtatgctcaatgtgacggtcaacgggggtgggaatgtgaccgagaaactggacctcaattggtatctgggaatctactcagggttaacagtggcgaccgtactgtttgggatagccaggagcctgctcgtgttttatgttttagtcaactccagccagactttacacaataaaatgttcgagagtatactgaaagcgcctgtcctattctttgaccgcaacccaatcgggcgtatcctgaatcgcttctccaaggacatcgggcatctcgacgatctcctccccctcacattcttggattttatacagcgatgggatctcgccgtgctctcatggctggtttcaaattcctag

SEQ ID NO: 109223 - DNA, 75 bp, synthetic construct
  misc_feature 1..75: note = Description of Artificial Sequence: Synthetic coding sequence
  source 1..75: mol_type = other DNA
atgctacctgtctaccaggaagtcaagcccaatccactgcaggatgcgaatctttgctcgagagtatttttctag

SEQ ID NO: 109224 - DNA, 4185 bp, synthetic construct
  misc_feature 1..4185: note = Description of Artificial Sequence: Synthetic coding sequence
  source 1..4185: mol_type = other DNA
atgaaggacatcgacatcggtaaggagtatattattccctcaccggggtaccggagcgtgcgagaacggacctcgacgtcaggcacgcatagggatagggaggatagcaagttcagacgcacccgccctctggaatgccaggacgccctcgagaccgccgcccgcgccgaaggcctgtccctggatgctagcatgcacagtcagttaaggattctggacgaggagcatcccaaaggaaagtaccatcatgggctgtccgcactgaaacctatacgcaccacctcaaaacatcagcatccggtggacaatgcgggcctattctcttgcatgaccttctcctggctgagttccttggctcgggtggctcataagaagggcgaattgtctatggaagacgtatggtccctaagcaaacatgagtcgtccgacgtcaattgccggcgcctcgaaagactctggcaggaagagctaaatgaagtgggcccagatgccgcctcacttcgtagggtcgtgtggattttctgcagaaccaggctgatcctgtccattgtttgcctcatgattacccagctggccggatttagtgggccagcctttatggtcaagcacctcttggaatacactcaggctaccgagtcaaaccttcagtactctttactgctcgtgctcggccttctgttgactgagattgtgaggtcttggtctctcgccctgacctgggccctgaactaccgaactggggtccgcttaaggggcgcaattctcaccatggccttcaagaaaattctgaagttaaagaacattaaggaaaagagtctgggggagcttatcaacatttgcagcaacgacggtcagcgcatgtttgaagctgcagcagtggggagcctgctggcaggagggccggtggtggccattctgggaatgatctataatgtgatcatccttgggccaactggattcctcggttccgcggtgttcatcctattctaccctgccatgatgttcgcaagtcggttgacagcctattttaggcggaaatgtgtggcggcaaccgacgagcgggtgcaaaaaatgaatgaagtgctgacctacattaagttcattaagatgtacgcatgggtcaaggcttttagccaatctgtgcagaagatccgggaagaagaacgaagaatactcgagaaggctggctacttccaaagcattacagtgggtgtcgcaccaattgtggtggtgatagcctcggtagtgacattctccgtgcatatgacactcgggttcgacctaacggccgctcaggcattcaccgtcgtgaccgtttttaacagcatgacctttgcactgaaggtcaccccatttagtgtgaagtcacttagcgaagcctctgtagcggttgataggttcaagagcttgttcctgatggaagaggtgcatatgatcaaaaacaagccagcgtccccccatatcaagattgagatgaagaatgcaacattggcctgggactcatcgcacagctctatacagaacagtcctaagctgactccaaaaatgaagaaggacaaacgcgcttctcggggaaaaaaggagaaggtgagacagctgcagcggaccgaacatcaagcagtgctggccgaacagaaaggccacctgttgctagattccgacgagaggcctagtcccgaagaggaggaaggcaaacatatccacctgggccacctgcgcctccaaaggacattgcatagtatcgatttggagatacaggaggggaagctggtcggtatatgcgggagtgtgggttcaggcaaaacatccctcattagcgccattctgggtcaaatgacccttctcgaggggagcatcgccatttccgggacctttgcttacgtagcccagcaggcatggattctcaatgccaccctgcgtgacaacatcctgttcggcaaggaatacgacgaagagcgctacaacagtgttctaaactcctgttgcttacggcctgacctggcaatcttaccgagctccgaccttaccgaaattggcgagaggggggccaatctctccgggggccagaggcagagaatcagtcttgctagagccttatacagtgaccggagtatttatattctcgatgacccactatcagctttagacgcccacgtgggtaatcatattttcaatagcgccatcaggaaacacctcaagtccaagaccgtgctatttgtgacacatcagttgcagtatctggtagattgtgatgaggtaatctttatgaaagaaggatgcatcacagagaggggaacgcacgaagagctgatgaacctgaatggagactatgcaacaatatttaacaatctccttctgggcgagaccccacccgttgaaataaattcaaaaaaagaaacaagcggctctcagaaaaagtcccaggataaagggcccaagactggttcagtcaaaaaagaaaaggccgtcaagccagaggagggccaactggtgcagttagaggagaaaggccagggctccgtcccctggagcgtgtatggggtttatattcaggccgctggaggacctctcgcttttctcgttatcatggccctctttatgcttaatgtgggtagcaccgctttttccacgtggtggctgagttactggatcaaacaaggctccggaaacaccaccgtgacccggggcaacgaaacatccgtgagcgatagcatgaaggataatccacatatgcagtattatgcgtctatttatgctcttagtatggctgtgatgctcatactgaaggctatccgaggcgtggtatttgtgaaagggaccctgagagcatcctccaggttgcacgatgagctttttcgcaggattctgcggtcccccatgaagttttttgacacaacccccactggccgcattctgaacaggttctccaaggatatggatgaagtggatgttcgtctacccttccaggccgagatgttcatccagaacgtcattctggtgttcttttgcgtgggcatgattgcaggcgtttttccttggttcctcgtcgccgtcggccccctggtgattctgttctcagtgctgcacatcgtcagtagataccaggagcttctcgacgacaaccaggcgcccttctttttgtttacatgcgcaatgcgctggctggctgtccgactagacctcattagtattgcattaattaccactactgggctgatgatcgttctgatgcacgggcaaatcccacctgcctacgcaggactggccatatcttacgcggttcagctgaccgggttattccagtttacagtgcgtctggcttcagagaccgaggcccggtttactagcgtagaaagaatcaaccattatatcaagacactgtcactcgaggcaccagcacggattaaaaacaaggcacccagccctgattggccacaggagggcgaggtcaccttcgaaaacgccgaaatgcgctatcgcgaaaacctgcctctcgtcctgaaaaaagtgagttttaccatcaaaccaaaggagaaaatcgggattgtcggaaggactggaagtggcaaatccagcctgggcatggccctctttcggctcgtagaactgagtggaggctgtatcaagatcgatggcgtgagaatttctgacatagggcttgcagatctgcgttccaagctgtccattatacctcaggagccagtcctgttctctggcaccgtgcggtcaaatctcgaccctttcaatcagtacactgaggaccagatctgggacgctctcgagcgtacacacatgaaggaatgtattgcccaattgcccctcaaattggagtcagaggtgatggaaaacggggataacttctctgtgggagaaagacagctgctttgtatcgcgagagcactgctgcgacactgcaagatcttaatcttggacgaagctaccgcagcgatggacaccgaaactgatctgctgatccaggagactatccgcgaagccttcgcggactgcacaatgttaaccattgcacaccggctgcacaccgttctgggatctgataggatcatggttctagcccaagggcaggtcgtggagttcgatactccttcagtccttttgtctaacgactcttctcgcttttatgctatgtttgctgccgctgaaaacaaagtagcagtgaagggttag

SEQ ID NO: 109225 - DNA, 4314 bp, synthetic construct
  misc_feature 1..4314: note = Description of Artificial Sequence: Synthetic coding sequence
  source 1..4314: mol_type = other DNA
atgaaggatatcgacatcggtaaagagtatatcattcccagtcccggttacaggagtgtgcgagaacgaacctccacttcaggcacacacagggatcgcgaggattccaaatttagacggacgagaccactagaatgtcaggacgctcttgagacagccgcccgggctgagggcttatccctcgatgcttccatgcattctcagctgcggatactggatgaggagcaccccaaaggtaagtaccaccatggactatcagccttgaaacctatcagaacaaccagcaaacaccagcaccctgtggacaacgcaggcttgttttcctgtatgacattttcctggttaagcagcctggcaagagttgcgcacaagaaaggcgagctgagcatggaggacgtttggtccctcagcaagcacgagtcgtcagatgttaattgtaggcgtctggagagactgtggcaggaggagttgaacgaggtcggacccgacgccgcctcactgcggcgcgtggtctggatcttctgcagaacgcggctcatactgtctatcgtctgcctgatgataacccagcttgcaggtttctcaggaccagccttcatggttaagcatctgttggagtatacccaagcaacagagagcaatctacagtacagtctgctgctggtgcttggactgctcttaacggagatagtgaggtcctggtccctggcgctcacctgggcactcaactacaggacaggagtccgccttcgaggggcaattttgaccatggccttcaaaaagattttgaagctcaaaaacattaaggaaaagagtctaggcgaactcatcaacatctgctcaaacgatgggcaacgtatgttcgaagcagcagcagtcgggtccctgcttgctggggggcccgttgtggctattctggggatgatctacaacgttatcatcttaggaccaaccggattcctgggatctgccgtgtttattttgttttatccagccatgatgtttgcttccagactgaccgcctactttcggcggaaatgcgtcgctgccacagacgaaagggtgcagaagatgaacgaagtgctgacctacatcaagttcatcaagatgtacgcatgggtaaaggcctttagtcaatccgtgcaaaaaatacgcgaagaggaaaggagaatcctggagaaggccggatactttcagagcataaccgtcggagtagcacccatagtcgttgtaattgccagcgtcgtgaccttctctgtgcatatgaccctgggttttgacctgacggctgcacaggctttcaccgtcgttacggtgtttaatagcatgacctttgctctgaaagttacacctttttcagtgaagtcactttccgaggcaagtgtggcggtcgacagattcaagtccctttttctgatggaggaagtgcatatgataaaaaataagccggcttccccacatattaagatcgagatgaagaatgccactctcgcttgggactcatctcactcgtcgattcagaacagcccgaaactgacacccaaaatgaaaaaagacaagcgcgcctctagaggaaaaaaggaaaaagtgaggcaattgcagcgtacggagcaccaggcagtgctcgcagaacagaaggggcacctcctgctcgactccgacgaaaggcctagccccgaggaagaggagggcaagcatatacacctaggacatttgcgtttacagcgaactctccactccattgacctggagatccaagagggaaagctggtgggtatctgtggatctgtcggatcaggtaaaacttccttgatctcagcgatcctaggacaaatgactctgctcgagggtagtattgcaattagtggtactttcgcatacgtcgctcagcaggcctggatcttgaatgcaacccttcgcgataatattctcttcggaaaggagtatgatgaagagcgctacaacagtgtgctgaattcatgctgcctccggccagacctagcgatcctccctagcagtgacctgacagagatcggggaacggggggccaatctgtctggtggacagagacagcggattagcctggccagggctctatatagcgacagatcaatctacatcctcgatgatcctctttcagccctggatgcccatgtggggaatcacatcttcaacagcgctattcgtaaacatctgaaaagtaaaaccgtgctgttcgtaacacaccagcttcaataccttgtcgactgcgacgaagtgatcttcatgaaggagggctgcattacagagcgcgggacacatgaagagctgatgaacctgaatggagattatgccacaatttttaataacctgctgttgggggaaacaccaccagtagagatcaattcgaagaaagagacaagcggttcacagaagaagagccaagacaagggcccaaagacgggaagcgtgaaaaaggagaaagcagtcaagccagaggaaggacaactggttcagctcgaggagaagggacaaggaagcgtgccatggagcgtgtatggcgtgtatattcaagccgcggggggtcctctcgcctttctcgttatcatggcccttttcatgctcaacgtggggtctactgccttcagtacttggtggctctcttattggatcaagcaggggtccgggaatacaactgttactcggggcaacgaaaccagcgtttccgattctatgaaggacaatcctcacatgcagtattacgcttccatttacgccttgtctatggctgttatgttgattctcaaagccattcgtggcgtggttttcgtgaaagggaccttacgtgctagctcccgcctgcacgatgagctgtttaggcgaattcttcgaagcccaatgaagttttttgatacaaccccaacgggacggattcttaatagattctccaaggacatggatgaggtagatgtcagactcccatttcaggctgagatgtttatccagaacgtgatactggtgttcttttgtgtcgggatgatcgccggtgttttcccgtggttcctggtggcagtgggacctctggtaattctgttctccgtcctccacattgtctccagggtccttattcgggaactgaagaggttagacaatatcacccaaagcccattcctctctcacatcacctccagcatccaaggactggccacgatccatgcgtataacaaaggccaggagtttctccacaggtatcaggaattacttgatgataatcaagctccctttttcctgttcacatgcgccatgaggtggcttgctgtgcgcctggacctgatcagcattgccttgatcaccacgactgggctcatgatagttctgatgcacggccagatcccgccagcgtacgccggactggctatttcatatgccgtgcaactcacaggattatttcagttcacagtccgtttggcatctgagaccgaggcccggtttacctcagtcgaacggataaaccactatatcaaaactctgagcctcgaggcgcctgcaaggatcaagaataaagctccatcacccgattggcctcaggaaggagaagtgacctttgagaacgccgagatgagataccgcgaaaacttacctctggtattgaaaaaagttagcttcacgatcaagcccaaggaaaaaatcggaattgtgggacggaccggtagcggtaaaagctctctgggaatggctttgtttagactggtggaactttccggcggatgcatcaagatagacggggtacgcatctctgacataggtctggcagatctcaggtctaagctgagcatcatacctcaggaacccgttctgtttagtgggacagtgagatccaatttagacccttttaaccagtacactgaggatcaaatctgggatgcattggaacggacacacatgaaagagtgcatcgcgcagctccctctcaagttggaatcagaggtgatggagaatggggataactttagcgtgggggagcgccagcttctctgcattgcaagggccctgctgagacactgcaagattcttatcctggatgaggcaacagcggccatggatacagagactgatttgttaatccaggagactatcagggaagccttcgctgattgtacgatgctcaccattgctcaccggctgcatacagttttgggatcagaccgaataatggtcttggcacagggccaggtggtggaatttgatacaccatctgttctgctgtccaacgactcaagcaggttctacgcgatgtttgccgccgctgagaacaaggtcgctgtgaagggatag

SEQ ID NO: 109226 - DNA, 627 bp, synthetic construct
  misc_feature 1..627: note = Description of Artificial Sequence: Synthetic coding sequence
  source 1..627: mol_type = other DNA
atgaaggatattgacattggaaaagagtacatcattccatctcccggataccgctccgtcagagaaaggacctcaacctctgggacccatagagatagagaagactccaaatttagaaggactagacctctggagtgccaggacgccttagagaccgctgcgagggccgaaggcctctctcttgatgcatccatgcactcccagcttaggattctggatgaagaacacccgaagggcaagtaccatcatggactgtcggcattaaaacctataagaactacatcaaaacaccagcacccagttgacaatgccgggctctttagttgtatgaccttcagttggctgtcctcgctggctcgggtggcgcacaaaaagggagagttgtccatggaggacgtttggtctctgtcgaaacacgagtcaagtgatgtcaactgcagacgattagagaggttatggcaggaggagttgaatgaggtgggtcctgatgctgccagcttgagaagggttgtctggattttttgccgaacccggctcattctctccatcgtatgtcttatgatcacgcagctggcagggttttcaggtccaaactttcaggatggttgcatcttgaggtcagaatag

SEQ ID NO: 109227 - DNA, 2511 bp, synthetic construct
  misc_feature 1..2511: note = Description of Artificial Sequence: Synthetic coding sequence
  source 1..2511: mol_type = other DNA
atgcatagccagctgaggatcctggatgaagaacaccctaagggaaagtatcatcacggcctgtctgccctgaagcctattaggacaaccagcaagcatcagcaccctgtggacaatgcggggctcttttcatgtatgactttttcgtggctgtctagcctggccagagtagcccacaagaaaggcgaactctccatggaagatgtgtggtcactgtcaaagcacgaaagcagcgacgtgaactgccgccgcctggaacgattatggcaggaggagctgaacgaggtgggccctgacgccgctagccttaggcgagtcgtgtggattttctgccggaccaggttaattctctctatagtgtgtcttatgatcacacagctggctggattctcgggtcctgcctttatggtcaaacatctgttagaatatactcaggcaactgagagcaacctacaatatagcctcctactggtgctcggcctgttgttaaccgagattgtcagatcctggtcactcgccctcacctgggccctgaattataggactggggttagattgcgcggcgccattctaaccatggcttttaagaagatcctcaagctgaaaaacataaaagaaaagtctttaggcgagttaattaacatttgctcaaatgacggccagcgcatgttcgaagcagcagccgtgggttctctcctggctggcggacctgtcgtcgcaatcctcggcatgatctataatgtgatcatcctcggacctactggtttcttgggaagtgctgtctttatactcttctacccagcaatgatgttcgccagccgcctgacagcttacttccgcaggaagtgcgttgccgccaccgatgaacgagtgcagaagatgaacgaagttcttacctatattaagttcatcaaaatgtatgcctgggtcaaagccttcagtcagtccgtccaaaaaattagggaagaggagcgcagaattttggaaaaggcgggatactttcaatccatcactgtgggagtggcccctatcgtggtagtgattgccagtgtggttaccttcagcgtccacatgaccctgggctttgacctgacagcagcacaggccttcacggtggttaccgtattcaactcaatgacattcgccctgaaagtcacccccttctccgtgaaatctctaagcgaagcttctgtcgccgtggaccggttcaaaagtctgttcctgatggaagaggtacacatgatcaaaaacaaaccggcatcccctcatattaaaatcgaaatgaagaatgcaaccctagcctgggacagctcacactcctcaattcagaattccccaaagctgaccccaaagatgaaaaaggacaaacgggcaagccggggtaaaaaagagaaggttcgccagctgcagcgcacagaacatcaggccgtcctggcagagcagaagggacacctgctgctggactctgacgagagaccttctccagaggaggaggagggcaagcatattcatctgggacatctccgactgcagcgtaccctgcattctatcgaccttgagatacaggagggtaagctcgtgggtatttgcgggtctgttggcagtggcaaaacctcactgataagtgctattctaggtcaaatgacactgctggagggctccatagccattagcggtaccttcgcctacgtggcacagcaagcatggatcttgaatgccacactgagagacaacatactgttcggaaaggagtacgatgaggaaaggtataacagtgtcctcaatagctgctgcctgaggcctgacctggccatcctcccctcctccgatctgacggagatcggcgagaggggcgcaaatctgagtggtggccaaaggcagcgcatctcactggcccgagccctctattccgaccgtagcatttacatcttagacgatcccttgtcggcgctcgacgcccacgtgggcaatcatatattcaattctgccattcgcaaacatctcaaaagtaaaaccgtgctatttgtgacgcaccagctgcagtatcttgttgactgcgatgaagtcattttcatgaaagaaggatgcatcaccgagagaggcacccacgaggaactgatgaacctgaacggcgactacgccactattttcaacaatttgctcctaggcgagacccctccggtggaaattaactccaagaaggaaaccagcgggagccagaaaaagtcgcaggacaaaggccccaaaaccggtagtgttaagaaggagaaggccgtgaaacccgaagaagggcagctggttcagctggaggaaaaaggtcaggggtccgtcccttggtctgtgtacggccaccccggctgctggggacctctgggcatccccggatactatggcccgttccacgccgagtgtcgtcaacacagactccagcatcttgttgtcgaactgttagatcaggcccgcaagagagagcaccactgtgatagtagggaacgcgacctgggcgaatag

SEQ ID NO: 109228 - DNA, 678 bp, synthetic construct
  misc_feature 1..678: note = Description of Artificial Sequence: Synthetic coding sequence
  source 1..678: mol_type = other DNA
atgaaggacatagacatcggtaaggaatatataattcccagcccaggatatcgttccgttagggagcgcacgtctacctcaggcacccaccgagacagggaggacagtaaattccgcagaacacggccccttgaatgtcaggacgcactagagacagccgcgagagccgaagggctttctctggacgcaagcatgcacagtcagctgcgtattttagacgaggaacacccgaaaggcaagtaccaccacggactgagtgcgttgaagcctattagaacaacgtccaagcaccagcaccccgtggacaacgctggtctgtttagttgtatgactttttcatggctctcctccctggctagagtggcccacaagaagggtgagctgtctatggaggacgtgtggagcctaagtaagcacgagtcaagcgacgtaaactgtcggaggcttgaacggctgtggcaggaggagctaaacgaggtgggccctgatgccgctagtctgcgcagggtggtatggatcttttgtcgcactaggctcatcctcagcatcgtgtgcctcatgataactcagctggctgggttcagcggacctcctagctttggggattgtagcatctcagcagaggtttgtggcaaccgattgcactgcaccgctattctattatcatgcttcacatag

SEQ ID NO: 109229 - DNA, 696 bp, synthetic construct
  misc_feature 1..696: note = Description of Artificial Sequence: Synthetic coding sequence
  source 1..696: mol_type = other DNA
atgaaggacatcgacatcgggaaagagtacattatcccgagcccagggtatagaagtgtgcgtgagcgtacttccacttctggtacccaccgggatcgcgaagattccaagtttcggcggacaaggccactcgaatgtcaggatgccttggagaccgccgcacgcgccgagggccttagcctcgatgctagtatgcacagtcaactcaggatcctggacgaagagcatcctaagggcaaatatcaccatggcctgtccgcgctgaagccgatcaggaccacttctaagcaccagcacccggttgataacgctggcctgttcagttgtatgactttttcttggctatcatctctggcccgcgtggcccacaaaaagggagagttatcaatggaggacgtgtggtccctgtctaagcatgaaagttccgatgttaactgtcgtcggctagagcggctatggcaggaggagttgaatgaagttggccccgatgcggcgagcctgagaagagtggtgtggatcttctgtagaacacggctgattctcagtattgtgtgtctgatgatcactcagcttgcggggttcagcggcccagtgtcaagcaatcaccccttccggcagagccccggggcacgacctagaccagcgctcactctcctgttctgctgcaggggatgcgctcaactgtgggcccgctag

SEQ ID NO: 109230 - DNA, 444 bp, synthetic construct
  misc_feature 1..444: note = Description of Artificial Sequence: Synthetic coding sequence
  source 1..444: mol_type = other DNA
atgaaggatattgatattggtaaagagtatattattccctcacctgggtacagaagcgtgcgggagcgcacgagtactagcggaacacacagagacagggaggactccaagttccggagaacacggcccctggaatgccaggatgcccttgaaactgcagcccgagccgagggtctctctctcgacgcttcaatgcattctcagctgcgcatcttggatgaggagcacccgaagggcaagtaccaccatgggctgtctgctcttaagccaataaggaccaccagcaagcaccagcaccctgtcgacaacgctggtctgttttcatgtatgaccttttcgtggctgtcttcactggcacgagtcgcccataagaagggggaactgtccatggaggacgtatggagtctctctaaacacgagtcatccgatgtcaactgcaggtag

SEQ ID NO: 109231 - DNA, 639 bp, synthetic construct
  misc_feature 1..639: note = Description of Artificial Sequence: Synthetic coding sequence
  source 1..639: mol_type = other DNA
atgaaagatatcgatattggcaaagagtatattataccctctcctgggtaccgctcggtaagggagagaactagcacctcaggtacacaccgggaccgagaggattctaagtttcggcgcactagaccgctggagtgtcaggacgccctcgaaactgcagcccgagccgagggactgagcctggatgcgagtatgcattcccaactgcgcatccttgatgaggaacacccaaagggaaagtaccaccacgggctctctgctctaaaaccaatcaggactacatcgaaacaccagcatccagtggacaacgctggtctgttctcgtgtatgaccttcagttggctaagttccttagcccgcgtggcccacaagaagggagagctctctatggaagacgtgtggtcattgtctaaacacgaatcctctgatgtaaactgcaggcgcctggagaggctttggcaggaagagctgaacgaggtcgggccagatgccgcatccctccggcgtgtcgtgtggatcttctgtcgcacacggctcattctctccattgtttgcctcatgataacccagctagcaggcttttccggaccacttgcgtggtgttgtcaggaccttgacctcgggggagtgagcctgtag

SEQ ID NO: 109232 - DNA, 1530 bp, synthetic construct
  misc_feature 1..1530: note = Description of Artificial Sequence: Synthetic coding sequence
  source 1..1530: mol_type = other DNA
atgcagagctggagtcgggtgtactgtagcttggcaaagaggggccattttaaccgcatctctcacggactgcagggtttgagcgctgtgccactgcggacatacgccgatcagcccatcgatgcagacgtgacagtgattggcagcggacctggtgggtacgtggcagcgatcaaggcagcacaactgggctttaaaaccgtctgtatcgagaaaaacgaaacgttgggaggtacctgtctgaatgtagggtgcatcccttctaaggctttgctcaataacagtcactactatcacatggcccacgggaaggattttgcctcccgtgggattgagatgtcggaagttcgtctgaacttggacaagatgatggaacagaaaagcaccgccgtaaaagcactaactggtggcatcgcccacctcttcaaacagaataaagtcgtgcatgtcaacggctatggcaagattactggaaaaaaccaagtcactgctacaaaagccgacggggggactcaggtgatcgacaccaaaaacattctcattgcaacgggctctgaagtgactccttttcccgggatcaccatcgacgaagatacaattgtgagctcgacaggcgccctctcgctgaaaaaggtccctgaaaagatggttgttattggcgcgggagtgattggtgtagaacttggtagcgtgtggcagcgactgggtgccgacgtgaccgcagtcgagtttctcgggcacgtgggtggagttggaatagacatggagatctcgaagaattttcaaaggatccttcagaaacagggtttcaagttcaaacttaacaccaaagtcacaggagcaaccaaaaaatcagacggcaaaatagacgtgtctatagaggctgccagtgggggtaaggccgaggtgatcacatgtgacgtgctgctggtttgtattggacgccggcccttcaccaaaaacctggggctggaagagttgggcattgagctggacccccgggggagaatacccgtgaacactcgctttcaaaccaagatacccaacatctacgcgataggcgatgttgtcgccggtccaatgctcgcccataaagcagaggacgaggggatcatctgcgttgagggcatggccgggggggctgtccacattgattacaactgtgtgccatccgtgatctatacccaccccgaagtggcttgggttggaaagagcgaagaacaactcaaggaggaaggcatcgagtataaagtggggaaatttccatttgccgccaactctagagcgaagacgaatgccgacacggatggtatggttaaaattctagggcagaaaagtactgaccgggtgctgggagcccatatcctgggccctggtgccggtgagatggtcaatgaagccgcactggcactggaatacggggccagctgcgaagatattgcccgcgtatgccatgcacatccgacgttaagcgaggccttccgtgaagctaatttggccgcatcttttggaaagtcaataaatttttag

SEQ ID NO: 109233 - DNA, 4512 bp, synthetic construct
  misc_feature 1..4512: note = Description of Artificial Sequence: Synthetic coding sequence
  source 1..4512: mol_type = other DNA
atggcggccccagccgagccatgcgctggacagggcgtgtggaaccagaccgagcccgagcctgcagccacgtccctgctcagcctgtgctttctgcgcacagcaggcgtctgggttcctccaatgtacctctgggtgctaggcccaatttatctactcttcattcaccatcacggccgggggtacctgagaatgagcccactctttaaggcaaagatggttttaggttttgcactcattgtcctgtgtacttcctcagtggctgtggccttatggaaaattcagcaggggacacctgaggcaccagagtttctgattcaccctacggtgtggctgacaacaatgtcattcgcagttttcctgattcatactgaaaggaaaaagggagttcaaagcagcggcgttcttttcggctattggttgctgtgttttgtacttcctgcgactaacgctgctcagcaagcgagtggggcaggatttcagagtgaccctgtacggcacttgtcaacttatttgtgcctatccctggtggtcgctcaatttgtgctgtcctgcctggctgaccaaccaccctttttccccgaagatccgcagcaatctaacccctgccccgaaaccggcgcagcctttccctccaaagccactttctggtgggtgtctggactcgtttggcgcggctataggcgccccctgcggcctaaagacttgtggtcactcgggcgcgagaatagcagcgaagagctggttagcaggctggagaaagagtggatgagaaaccgttctgctgcaagacgacataacaaagctattgcttttaagaggaaaggagggtccggaatgaaggcccccgagacagaacctttcctgcgccaggaaggttcgcaatggcgccccctgctaaaagcgatctggcaggtttttcactcaacattcctgctgggtaccctctctctaattatttctgacgtctttaggtttaccgtaccgaaactgttgagcctcttccttgaattcattggcgaccctaagcccccggcatggaaggggtacctgctcgccgttctcatgtttttgagcgcttgcctacaaactctatttgagcagcaaaacatgtacagactgaaagtgctccagatgcggctgaggtctgctatcacagggctcgtgtatcgaaaggtactggcccttagctcggggagccgaaaagctagcgcagtgggggacgtcgtcaacctcgtgtcggttgatgtgcagagactgacggaatcggtgctctatctcaatggcttgtggctccccttagtatggatcgttgtgtgctttgtctacctgtggcaactcctcgggcctagcgcgcttacagcaatcgccgtttttctatccctgttacccttgaactttttcatatctaaaaaaagaaaccaccatcaagaggagcagatgcgccagaaggactcacgagcacgccttacctccagcatactcaggaactctaaaacgatcaagttccacgggtgggagggtgccttcctcgaccgggtactcgggatcagaggacaggagctcggcgctctgcgaacgtccggattgctgttttcagtgagtttggtttcctttcaggtctccacattcctggttgccttggtggtattcgccgttcacaccttggtggctgaaaatgctatgaacgctgagaaggcatttgtgactctgactgtgctgaacattctcaacaaagctcaggctttcctcccattttccattcacagccttgtccaggcccgggtcagctttgacaggctggtgactttcctttgtctcgaggaggtcgaccctggagtggttgacagttccagcagtggcagtgccgctggaaaggactgtattacaatccactctgccacatttgcttggtcccaagaatctccgccatgcctgcaccgaattaatctcacagtccctcagggctgccttctagcagttgttggacccgtgggcgctggtaaaagcagtctactgagcgcgctgctgggagagctttcaaaggtggagggattcgtctccatcgagggcgccgtcgcatatgtgcctcaagaagcctgggtgcagaatacttctgtggtcgagaatgtctgttttggacaggaactggacccaccttggctggagcgagtcctggaggcctgtgcattacagcccgacgtagatagtttcccagagggaatccatacttccattggcgaacagggcatgaatctgtcaggagggcagaaacagcggcttagcctggcacgggccgtgtatcgcaaggccgccgtctacctcctggatgaccccctggccgcgctcgacgctcacgtgggacaacacgtgttcaaccaggtaatcggtccaggtggtttgcttcaagggaccacacgcatactcgtcacccatgcattgcacattcttccacaggccgactggattattgtcctggccaacggggctatcgctgagatgggtagttatcaggagctcctgcagcggaaaggtgctctgatgtgtttattggatcaggccaggcagccaggtgaccgtggcgaaggggaaaccgagccaggcacttctacaaaagaccccagagggaccagcgcggggcgcaggcctgaactgagacgggagcggtccataaagtcagttccggagaaggacagaaccactagcgaagcccagactgaagtgcccctcgacgaccccgacagggccggctggcccgccggaaaagattctattcagtacggccgcgtcaaagcaacggtccacttagcttacctgagagccgtggggacccccttgtgcctctatgccctctttctcttcctgtgtcagcaggtcgccagcttttgcagaggctactggctgtcactgtgggcagatgaccccgctgtggggggtcagcaaacccaggccgccttgaggggaggaatttttggcctgctcggctgccttcaagccattggcttgtttgcctccatggccgccgttttgctggggggcgctcgcgccagccgactgctctttcagaggctcctctgggatgtcgtgcgaagcccgatttcctttttcgagagaaccccaattgggcacttacttaacagattctcaaaagaaaccgacacagtggacgtggatatccctgacaagttgaggtctctgttaatgtacgcctttggcctgctcgaggtttctttagtggtagctgtcgcaactcctctggcaacggtggcaattctgcccctgtttttgctctatgccggcttccagagcctgtacgtcgtctcctcctgtcagctacggagactcgaaagcgcttcttattcttctgtgtgttctcacatggccgaaacatttcagggcagcacagtagttagagcctttaggacccaggcacccttcgtcgcacagaacaatgctcgagtggatgagagtcaacggattagcttcccgagactggttgccgaccggtggttggccgctaacgtggaactcctcgggaacggcctggtgttcgccgcggccacgtgcgcagttctgtccaaagcacatttgtctgcaggcctggtgggcttctcggttagtgcagcccttcaagtgactcaaacgctccagtgggtagtccggaactggaccgatctggaaaactccatcgtcagcgtggaacggatgcaggattatgcctggacaccaaaagaggcgccctggcgcctcccaacgtgcgcagcccagccaccatggccacaaggggggcagatcgaatttagagatttcggcctcagatacaggccagagctgcccctggcagttcaaggcgtaagttttaaaatacatgctggtgagaaggtggggattgtaggacggaccggggctggaaagtcatcactggcttcgggcctattgagactacaggaggcggctgaggggggtatctggatcgacggagttcccatagcgcacgtggggctccacaccctgcgatccagaatctctattattcctcaggaccctattcttttccccgggtcattgcgaatgaatctggatctgcttcaggagcattcagacgaggccatttgggctgccttggagacagtccagctgaaggcactagtggcatccctgccaggtcagcttcagtacaaatgtgcagataggggcgaagatctttctgtaggtcagaagcaactcttgtgtctggcaagagctctcctgaggaagactcagatcctgatcctggacgaagcgaccgccgcggtcgatcccggaaccgaactgcagatgcaagccatgcttggcagttggttcgctcagtgtactgtactgctcatcgcccaccgattgcggtctgtgatggattgtgcacgggtgttggttatggataagggtcaggtggccgagtctggctctcctgcacaattattggcacagaaggggttattttaccggctggcccaagagagcggcctggtgtag

SEQ ID NO: 109234 - DNA, 2616 bp, synthetic construct
  misc_feature 1..2616: note = Description of Artificial Sequence: Synthetic coding sequence
  source 1..2616: mol_type = other DNA
atggcagctcctgctgagccttgcgccggccaaggtgtgtggaaccagacagagcctgagcccgctgccacttcactgctgtctctctgcttcttaaggacagcaggtgtatgggtgccacccatgtacttgtgggttctagggccaatttatctgctgtttatacaccaccacggccggggctatcttcgcatgagcccactctttaaggctaagatggtgctgggcttcgcgttgatcgtgctgtgtacttccagcgtagcagtagccctctggaagattcagcaggggacgccggaagctccggaattcctgattcaccctaccgtgtggctgacaaccatgtccttcgccgtcttcttgatccacacagaaagaaaaaagggcgtccagagcagcggagtgcttttcggctattggctgctctgttttgtacttcctgccactaacgcagctcagcaggctagcggagccggattccaatctgaccccgtccgacatctctccacctatttgtgcctcagccttgtggtggcccagtttgtgctcagttgcctcgccgaccagcctcctttcttcccagaagacccccaacagtcaaatccatgccctgaaacaggggccgcctttccatcgaaagccactttctggtgggtctctggtctggtttggcggggctacagaagacctctacgcccaaaggatctgtggagcctgggacgggaaaattcatctgaggaattagtatctcgactggaaaaagagtggatgaggaatcgatcagcggcacgaagacataacaaagccattgcctttaaaaggaaaggcggcagtggaatgaaagctccagagaccgaaccatttctgaggcaggaggggagccaatggcggcccctattaaaagctatttggcaggtatttcatagtactttccttttggggaccctgagtctaattatcagcgacgtatttagatttacggtgccgaaattgctaagcctgtttctggaatttatcggtgatccaaaacccccggcgtggaaaggatacctgttggccgtgttaatgtttctgtcagcttgtttacagacactgtttgagcaacaaaacatgtacagactgaaagttctgcagatgcgactcagatccgcgatcaccggtctggtgtatagaaaagtgctcgccctgtcttcaggaagtcgaaaagcttccgcagtgggcgacgttgtgaacctggtctctgttgatgtccagcgtttgaccgaaagcgttctttacttgaatggactgtggcttcccctggtgtggattgtagtatgcttcgtatacctttggcagctgttggggcccagcgcgctaaccgcaatcgcagttttcctcagcctgcttcccttgaatttttttatatcaaagaagcgaaaccaccaccaggaagagcaaatgcgccagaaagatagccgcgcccgcctgaccagctcaattttgagaaactctaagacgatcaaatttcacggctgggaaggagcctttctggacagagtgttaggcattaggggacaggaactgggagcactgcggacatccggcctgttattctccgtttcactggtctcattccaagtttcgacctttctggtggcactcgtagtgttcgccgttcacactttggtagccgaaaacgctatgaacgcggaaaaagcattcgttactctgaccgttctcaatattctgaacaaggcacaggcgtttttgccattttcgatccactccctagtacaggcaagggtttcattcgatcgcctcgtgactttcttgtgtcttgaagaggtagatcccggcgtggtagattcctctagctccggcagcgccgcagggaaagattgtatcacaattcacagcgccacatttgcttggtcacaggagtcgcctccatgcctccataggatcaaccttacggtgcctcaggggtgcctgctcgctgttgtgggccctgtgggcgctggcaaatcaagtctgttaagcgcgcttctcggcgagctgagtaaggtggaggggttcgtctctatagagggggctgtagcctatgttccccaggaggcctgggtgcagaacacttctgtggtggagaatgtctgtttcggacaggaactagacccaccctggttggaacgcgtattggaagcttgcgcacttcaacccgacgtcgactcattcccggaaggcatccacacatcgatcggcgagcagggaatgaacttaagtggaggccagaagcagcgcctttcgctggcaagagcagtgtataggaaagccgccgtttatcttctggatgaccccctggccgctttagatgcccatgtaggccaacacgtctttaaccaggtgattgggcctggggggctcctacagggcacaaaacagaatctggggcctgcaccaagaacccctgaagcaccactgcaggctggcggcccatcacttgatgcccgaggcccaagtagccagtcactgcgcaggaccgtgccccttcaaaagccacgacaacgattcttgtggatgacgctcactggtcaggatggccaacaggaacgcacggcgagtaacacggcagggtag

SEQ ID NO: 109235 - DNA, 2019 bp, synthetic construct
  misc_feature 1..2019: note = Description of Artificial Sequence: Synthetic coding sequence
  source 1..2019: mol_type = other DNA
atggccgcccccgcggaaccctgtgccggacagggtgtgtggaatcagacagagccggaacctgcggctacatctctgttatctctgtgttttctgagaaccgcgggcgtgtgggtcccacctatgtacctgtgggtgctgggcccaatctacctcttgtttatccatcatcacggaaggggatatctgagaatgagcccactttttaaggcaaagatggtggcagccatcccaggctctttagagcctggcaacgtgcttggtttcgctctgattgtgttgtgtaccagttcagttgccgtcgccttatggaaaatccagcaaggaacccctgaggctccagagtttctcattcatcccaccgtttggctgacaaccatgtccttcgccgtattcctgatccatacagagaggaaaaagggcgtccagagctctggcgttttgttcggttattggctgctgtgctttgtcctacccgctacgaacgctgcgcaacaggcatcaggtgcaggctttcaaagcgaccccgtgcggcacttatctacctacttgtgtctgtcactagtggtcgcgcagtttgttctgtcctgtctggccgaccagccaccattctttccggaggacccacagcagtccaacccatgcccagaaacgggcgccgcatttccgtcgaaggccactttctggtgggtgtctgggctagtgtggcggggatatcggcggcctcttagaccaaaagatctgtggtcccttggccgggagaactcttctgaggaattagtatctaggttggagaaagaatggatgcgtaacagatccgccgcccggcgccataacaaggccatagcattcaagcggaaggggggctccggcatgaaggctcccgaaacggaacctttcctgcgccaggagggcagccagtggagaccgttgttgaaggcaatttggcaggtgttccacagcaccttcttacttggcaccctgagtctgattatctctgacgtgtttaggtttactgtacccaagctgctgtctctctttctggagtttatcggggatcctaaaccccccgcatggaagggctatcttctggcagtgctcatgttccttagcgcgtgcctccagacactgtttgagcagcagaacatgtaccgtctgaaagtgctgcagatgaggctgcgttccgcaatcacaggcttagtataccgcaaggttcttgccctgtcatctggttctcggaaggcctcagctgtcggagacgtggttaatctagtttccgtggatgtccagcgcctgactgagtcagttctgtatctgaacgggctgtggctcccacttgtctggatagtggtctgtttcgtgtacctgtggcagctccttggaccatccgctctgaccgcaatcgctgtgttcctgtcacttctgcccctcaattttttcatatcaaagaagagaaaccatcatcaggaagaacaaatgcggcagaaagactcccgagcccggctgacatcgtcaattttgagaaatagtaagaccatcaagtttcatggatgggaaggggctttcctggatagggtcttgggtattcggggccaagaacttggcgcactgaggacaagcgggctccttttctccgtctctttggtgagcttccaggtctctaccttccttgtcgcccttgtggttttcgccgtgcataccctagtggccgagaatgccatgaatgccgagaaagccttcgtgactttaaccgtgcttaatatcctcaacaaggcccaggcgttcctgccattctccattcacagtctagtgcaggcccgcgtgtcctttgatagattggtgactttcctgtgccttgaggaagtagatcctggcgtggtggattcttcatcttccggatccgcagccggcaaggactgcattacaatccactccgctaccttcgcgtggtcccaggaaagccctccctgcctgcaccgggtgttgctatatcacgctggctggtctgctatggcctag

SEQ ID NO: 109236 - DNA, 4650 bp, synthetic construct
  misc_feature 1..4650: note = Description of Artificial Sequence: Synthetic coding sequence
  source 1..4650: mol_type = other DNA
atgtcactgtcgttttgcggtaacaacattagtagctacaatatcaatgacggagtgttgcagaacagctgcttcgtggatgcactgaacctcgtgcctcacgtatttttactgttcataacattccctatcctgttcataggatggggatcccagtcaagtaaagtgcagatccaccacaacacatggctgcacttccccggtcacaacctgcgatggattcttacctttgccttgttgtttgtgcatgtttgcgagattgccgaagggattgtgtctgattcccgtagggagtcccgccacctgcatctcttcatgcccgccgttatgggctttgtggccaccaccaccagcatcgtatactaccataacatcgagacctcaaacttccccaagctgctactggcactcttcctgtattgggtgatggccttcatcactaagacgatcaagctggtcaagtactgccagtccggcctggatatttctaatcttaggttctgcatcactggcatgatggttattctgaacgggctgctcatggcagtagaaattaatgtgatcagggtgagaaggtatgtttttttcatgaacccccagaaggttaagccccccgaagatttacaagacctgggggttcggtttctccagccgttcgtgaatctgttgtccaaagcaacctattggtggatgaacacactcattatctccgcccacaagaaaccgatagatttaaaagccataggcaagctcccaattgctatgagggctgtgacgaattacgtgtgcttgaaggatgcctacgaggagcagaaaaaaaaggttgccgaccaccctaatcgcaccccttctatatggctcgctatgtacagggctttcggacggccaatcctgctgagctcaaccttcagataccttgcggacttacttgggttcgccgggccactgtgcatatccggtatagtccaacgcgttaatgagacacagaatgggaccaacaacacaacagggatttctgaaaccctgagctcaaaggagttcctagagaacgcatatgtcctggcagtgttgctttttttagctcttatcttacagcggacctttctgcaagcaagctattatgtgactattgaaacaggtataaaccttaggggagctctactcgccatgatatataacaagatcctgcgactctctacctcaaacctttctatgggcgagatgaccctgggacagattaacaatctggtagctattgaaacgaatcagctcatgtggtttctttttttgtgcccaaatttgtgggctatgccagtgcaaataatcatgggcgtgatactcctctataatttactaggctcctctgcgctagtgggggcagccgtgattgtgctcctggcacctattcagtacttcatcgccactaagctagccgaagcccaaaaaagtacgttagactacagcacagagaggctcaaaaagactaacgagatcttaaagggaattaaactgcttaaactctacgcatgggaacacatcttttgcaaatccgtggaagaaactcgaatgaaagaactctcttcccttaagacctttgccctgtatacaagccttagcatattcatgaatgccgctattccaatcgcagccgttcttgccacttttgtaactcatgcctatgcctccgggaacaatttgaagccagccgaagcatttgcctcactgagcctatttcatatcttagtgactcccctgtttctgctgtcgaccgttgttcgctttgctgtcaaagcaattatctccgtgcagaaactaaatgaatttcttttgtcggatgagattggcgacgattcatggcgaacgggcgaaagtagcctgcccttcgaaagttgtaagaagcacactggcgtgcagcccaaaactatcaaccgtaagcagccaggcaggtaccacctggattcatacgaacagtcaaccaggcgcctcaggcctgctgaaaccgaggacatagccatcaaagtgacaaacgggtactttagctggggctcgggccttgctacgctttctaacattgacattcgaatacctaccggacaattgactatgatcgtgggccaagtgggatgcgggaagtcatccttgttgctcgcaattctgggggagatgcagactctagaggggaaggtgcactggagcaatgttaatgaatcagaacctagctttgaagccaccagaagccgaaacaggtactctgtggcctacgctgcacagaaaccttggttgctgaacgccaccgtcgaggaaaatatcacattcggaagcccgtttaacaaacagcggtataaggcagtcacagatgcctgcagtctgcagcccgatattgaccttttgccttttggggatcaaaccgaaatcggggagagggggattaacttgtccggagggcagcgacagcgcatctgcgtggcccgcgcactctaccagaataccaatatcgtgtttctggacgatccattttctgcactggacatccatctctcagatcacttgatgcaggagggcattttgaaattccttcaggatgacaaaaggacactcgtactggtcactcataaattacaatatttgacacacgcagactggattatcgcaatgaaggatggatccgtgctcagggagggcactctgaaagacatccagactaaagatgtggaactgtacgagcactggaagacgctgatgaacagacaggaccaggagctggagaaagacatggaagcagatcagaccacattagaacggaaaacgctcagacgtgccatgtacagccgagaagccaaggctcaaatggaggatgaagacgaggaagaagaggaagaggaggatgaggacgacaacatgtctactgtaatgcggctcaggacaaaaatgccttggaaaacgtgttggcggtatttaacctccggggggttttttcttctgatcctaatgattttctccaaacttttgaaacactcagtgatagtggccattgattattggctggccacttggaccagcgagtactctattaacaatacaggaaaggctgatcagacctattatgttgccggcttcagcatcctatgcggcgcaggcatctttctatgcctggtcaccagtcttaccgtggaatggatgggcctgaccgcggcaaaaaacctccatcacaacctgttgaataagatcattctgggacccatccgcttcttcgatacaactcccctgggcctcatactcaacaggttctctgccgatacgaatataatcgatcagcatatccccccaactctcgaaagtcttacaaggagcaccctgctgtgtctctctgcgataggcatgattagctacgccacaccagttttcctcgtggctctgctcccgcttggtgtggctttctatttcattcaaaaatactttagagtagccagcaaagatctgcaggaactcgatgactcgacccaactgccactactttgccacttttctgagacagccgagggcctgactacgattcgagcctttcgtcacgaaaccagattcaagcaacgcatgctcgagctgacagatacaaacaacattgcctacctatttttgtctgccgcaaaccgatggcttgaggtgaggactgactacctcggggcgtgtatcgttctaaccgcctccattgcctctatcagtggatcatcaaacagcgggttagttggactggggttgctgtacgccttgactattacaaattatctgaactgggtggtacggaacttagccgatctggaggtccagatgggcgccgttaagaaggtcaacagcttcctaacgatggaaagcgaaaactatgaaggtactatggaccccagtcaggtaccggaacactggccccaggaaggggagatcaagatacacgatttgtgtgtccggtacgaaaacaatctgaagcctgtgctcaaacatgtgaaggcttacatcaaacctgggcaaaaggtggggatttgtggcaggacaggaagtgggaaatcttcccttagtttagcctttttccgtatggtggacatttttgatggcaagatcgttattgatggaatagacattagtaagctgcctttacacaccttgcggagccgcctgagcattatccttcaggatcctatcctgttctcgggttcaattaggtttaatcttgaccccgaatgcaagtgcacagatgatcggctttgggaagcgttggagattgcacaactcaaaaatatggtcaagtccctgcccggcgggttggacgccgtggtcacggagggaggcgaaaacttctccgtgggtcagcggcagctgttctgtcttgcccgcgctttcgttaggaagtccagtatcctcatcatggatgaggctaccgcttccatcgatatggccacggagaacatccttcagaaggtagttatgaccgcattcgccgacaggactgttgtgaccattgcccacagagttcacactattctcacggccgatctagtgatcgtgatgaaacggggcaatattcttgaatacgacaccccagagtccctgctggcgcaggagaatggtgtattcgcctctttcgtgcgagccgatatgtag

SEQ ID NO: 109237 - DNA, 4650 bp, synthetic construct
  misc_feature 1..4650: note = Description of Artificial Sequence: Synthetic coding sequence
  source 1..4650: mol_type = other DNA
atgagcttatctttctgcggaaataatatctcgagctacaacattaacgacggggtgttgcagaactcatgtttcgtcgatgcattaaacctggtccctcatgttttcctactgttcatcactttccccatcctcttcattggctggggttctcagtcttcaaaggtgcagatccatcacaacacttggttgcattttccaggccataaccttaggtggatactcacattcgctcttctgttcgtgcacgtgtgcgagatcgctgaaggcattgtttccgatagtcggcgggaatctcggcacctccatctctttatgcccgctgtgatgggcttcgttgctactaccacatccatagtctattaccataacatagagacatccaacttccctaaactactgttggccctgtttctctactgggtgatggccttcatcaccaagaccatcaagttggttaaatactgccaatcgggcttagacatatctaatctgaggttctgcatcactgggatgatggtgatccttaatggactactcatggccgtggagattaacgtcataagagtacgcaggtatgtgtttttcatgaatcctcagaaagttaaaccccccgaagacctccaagatctaggggttcggtttttgcaacccttcgtgaacctcctatctaaggcgacctactggtggatgaacactctgatcatatcagcccacaaaaagccgatcgacctcaaagcaatcggcaaacttccgatcgccatgcgagctgtgacaaactatgtttgtcttaaggacgcttatgaagaacagaaaaaaaaagtggccgaccatcccaataggacgccctctatttggctcgctatgtacagggctttcgggcgccccatcctcctgagttccacgttccgctatctggctgacctactggggtttgccgggcccctgtgcatctctggtattgtgcagagggtgaatgagacgcagaatggaaccaataatacgacggggatctcagaaactctcagcagcaaggagtttctggagaacgcttacgtccttgcagttctgctgttccttgccctgatcctacagcggacattcctccaggcaagttattacgtcaccatcgagacagggatcaatttgagaggagcactcctggccatgatttacaacaagatcctcaggctatcaacgtctaacctgagcatgggagagatgactttgggccaaataaataatctggtggccatcgaaacaaaccagctcatgtggttcctctttctgtgtcctaacttgtgggcgatgccagtgcaaatcatcatgggcgtgattttgttgtataatcttctgggctctagtgccctagtgggagctgccgttattgtcctgctggctcctatccagtatttcattgccactaagctggcagaggcacaaaagtccaccctggattactcgaccgaacgactgaaaaagaccaacgaaatcctgaaggggatcaagttgctgaaattgtatgcttgggaacacatattctgcaaaagtgtggaagagacaagaatgaaggagttgtccagtctgaagacttttgccctctacaccagcctgagcatttttatgaatgctgcgatccccatcgcagccgtgctggccacttttgtgactcatgcttacgcctcaggaaacaatctcaagcccgcagaagctttcgcttcgctctctctgtttcatatactggtcactcctttgtttcttctcagcacagtcgtccgctttgccgtgaaggccatcatttccgtgcaaaagttgaacgaattcctactgtctgacgagataggcgacgacagctggagaactggagaatctagcctacctttcgaatcatgtaagaaacatacgggagtccagcctaaaacgattaaccggaagcaacccgggcggtatcacctggatagttacgaacagagcacgaggcggctgcggcctgccgagactgaggacatcgctataaaggttactaatggctactttagctggggatccggactcgctactttgagtaacatagacatccgtattcccacgggacagctcacgatgattgttggccaggtgggctgtgggaagtcaagccttcttcttgccatactcggagagatgcagaccctcgagggcaaagttcattggagtaacgtcaacgaatctgagcctagtttcgaggcgaccaggtctcgtaacagatacagtgtagcttacgctgcccagaagccttggctgcttaacgcaaccgtcgaagagaacatcacttttggatctccgttcaacaaacagagatataaagctgtgactgacgcttgtagcctgcagccagacattgatctgctgccattcggcgatcagaccgaaatcggagaacggggtattaacctttccggcgggcagcgccagaggatctgtgtggctagagcactttaccagaatactaacattgtcttcctcgatgacccctttagtgcgctcgacatccatttaagcgatcatctgatgcaagaaggaatcctgaagtttctccaggacgataaaaggaccctagttctcgtcacccacaaactgcagtacttgacccatgcagattggattatcgcaatgaaggatggctccgttctacgagaaggcacattgaaagacattcagaccaaggatgtcgaactctacgaacactggaagactttgatgaaccgccaggatcaggaattggagaaggatatggaggcagatcagaccaccctggaacgaaaaacactacgtagggccatgtactcccgggaggccaaggcacagatggaagacgaggacgaagaagaggaggaagaggaagatgaggacgacaatatgagcaccgtgatgaggctgcgaactaaaatgccctggaaaacctgttggaggtacttgacaagcggtggattcttcctgcttatcctgatgatattctcgaaattgctcaagcattctgtcatcgtggcgattgactactggctcgctacttggaccagtgaatacagcattaacaatacgggaaaagcggaccagacatactatgttgctggcttctccattctgtgtggggcaggcattttcctgtgtctggtcacgtcccttacggtggaatggatgggcttgactgctgcaaagaatctccatcataatctgctgaacaagatcatactgggacccatccgattcttcgacacgaccccgcttggactgatcctcaatagattctcagccgatactaatatcattgaccaacatatccctccaactcttgagagtctgacgaggtcaaccctcctctgcctaagcgctatcgggatgattagctatgcgacacccgtgttcctggtcgccttactgccactgggcgtcgcgttctacttcattcagaaatatttcagggtagcatcaaaggacctgcaggagctggatgactcaacccagctgcccctgctgtgccattttagcgagacagccgagggactgactacgatcagggctttccgccatgagacacgatttaaacagagaatgctggagctcaccgacaccaataatatcgcatatctgttcctgagcgccgcaaataggtggctcgaggtgaggaccgactatctgggggcatgcatcgtccttaccgcttcaatagcttctatttcaggctctagcaattccggactggtcgggctaggccttctgtacgccctgaccatcacgaactatctcaactgggtcgtgcgcaacttggccgatctggaagtgcagatgggcgctgtcaaaaaggtgaatagctttctaactatggaatccgaaaactatgagggcacaatggacccctcacaggtgcccgaacactggcctcaggaaggggagataaagatccacgacctgtgtgtgagatatgaaaacaaccttaagcccgtcttgaagcatgtcaaggcatacataaaacctggccagaaggtgggaatttgcggcaggaccggctccggaaaatcctctttgtccctggccttctttagaatggtggacatcttcgacgggaaaatagtgatcgacggtatcgatattagtaagctccccctgcacactttacgttcacggctttctataatcctccaggatcctatcttgttttccggctctatccggttcaaccttgaccccgaatgcaaatgtacagacgaccggctctgggaagcacttgagattgctcagctcaagaatatggttaagtcgttgcctggaggtcttgacgctgttgtgaccgaagggggcgagaatttcagtgtcgggcagcggcagctcttctgtctggcacgcgcattcgttcgtaaaagcagcatcctgattatggacgaagcaaccgcctccatcgatatggcaactgagaacatactgcagaaggtggtcatgaccgcctttgccgacagaaccgtagttacaatagcacatcgagtttcctccatcatggacgctggcctagtcctggtcttctctgaaggcattctagtggagtgcgacaccgtgccgaacctgctggcccataagaacggcctgttttcaaccttggtaatgactaataagtag

SEQ ID NO: 109238 - DNA, 450 bp, synthetic construct
  misc_feature 1..450: note = Description of Artificial Sequence: Synthetic coding sequence
  source 1..450: mol_type = other DNA
atgtcactttctttctgcggaaataatatcagttcttataacataaatgatggagtgttgcagaacagctgctttgtggacgctctgaatttagttccacacgtgtttctattatttattacgttccctatactgttcataggatgggggtcacagtcttccaaagtccaaatccatcacaatacctggctgcatttcccgggccataatttgcgctggattctcactttcgccctcctgttcgttcatgtgtgcgaaattgccgagggaatagttagcgattcacggcgcgaatcacgtcacctgcacttgttcatgcctgcagtgatgggctttgtggctacgacgacttcgattgtgtattatcataacatcgaaacaagtaacttccctaaattgttgttaggattcagtcatcacgagtcaaagtcttgctatcagcactcttag

SEQ ID NO: 109239 - DNA, 4542 bp, synthetic construct
  misc_feature 1..4542: note = Description of Artificial Sequence: Synthetic coding sequence
  source 1..4542: mol_type = other DNA
atgtccctgtcattctgcggaaacaatatttcatcttataatattaacgacggcgtgctgcagaactcctgttttgtcgacgctttgaacctcgtgcctcatgtgtttctgttatttatcacctttcctattttatttatcgggtggggttcccagtcaagcaaggtgcagattcaccacaatacctggctgcatttcccaggacacaaccttcgatggatccttacattcgctctgctgttcgtgcacgtgtgcgagattgctgagggcatcgtgtccgattcaagacgtgagagccgacacttgcatctatttatgcctgcagtgatgggattcgtggcaaccaccacgtctattgtctactatcacaatatcgaaacatcaaatttccctaagctgttgctggccttgttcctctattgggtcatggcctttattaccaagaccatcaaactggtcaaatattgccagtctggtcttgacattagcaacctgcggttctgtatcaccggaatgatggtgatactgaatggtctgcttatggcggttgaaatcaacgtcattagagtgcggaggtacgtgttttttatgaatccccagaaggtaaaacctccagaagatctccaggacctgggtgtgagattcttgcaaccattcgtgaatttattgtcaaaggcgacttattggtggatgaacactctgatcatcagtgctcacaaaaagcctattgatctgaaagccatcggcaaactcccaatcgccatgcgggctgtgactaattacgtctgtctcaaagacgcttatgaggagcagaaaaagaaggtagccgaccaccccaatagaacaccgtcgatttggcttgcgatgtaccgcgcctttggccggcccatcttactgagcagcacatttcggtatttggcagacctccttggattcgcagggcctctctgcatctcaggaattgtgcagagggtaaacgaaacacagaacgggactaataatacaactgggatttctgagacactcagctcaaaagaatttttagaaaacgcctatgttctggccgttctcctgtttcttgccctcatcttgcagagaaccttcctccaggcctcatattatgtcaccattgagacaggaataaacctaagaggggccctgctggctatgatttataacaagatcttgaggctgagcacttcaaatctgtctatgggcgaaatgactctgggccagattaacaaccttgtggctatcgaaaccaaccagctgatgtggtttctttttctgtgtccaaatctttgggccatgcctgtacagatcataatgggtgtgatcttactttacaacctattggggtccagcgcattggtcggcgccgccgtgatagtgctgttagcgcccatccagtacttcattgccacaaaattggcggaggctcagaaatcaacgctggactatagcacagaaaggctcaagaaaacgaatgaaatcctcaagggcatcaagcttttaaaactatacgcctgggaacatattttctgcaaatccgttgaagagaccagaatgaaagaactgagctcactgaagacatttgctctctacaccagtttgtcaatctttatgaatgctgcgatccctatcgcggctgtcctcgcgacattcgtgacccacgcctatgcgagtggcaacaatttgaagcctgctgaagctttcgcctctttgagcttgtttcacatattggtgactcccctgttcctcctgtcaacggtggtacgcttcgccgtgaaggctataatttcagttcagaagctgaatgaatttcttctgtccgatgaaatcggcgacgatagctggagaactggggagtcatctctcccttttgaatcgtgcaagaagcacacgggggttgttacaaacggctacttctcgtgggggtccgggcttgccaccctgtcaaacatcgatattcggatccctaccggacagctcactatgatcgtcggccaagttgggtgcggaaaaagctctctgctgctagcaatactcggagaaatgcagactctggaagggaaagtacactggtctaatgttaatgagtccgagcctagttttgaagccaccaggagccggaacagatatagtgtggcctatgctgcccagaaaccctggctcctgaacgccaccgtcgaagagaacatcaccttcggtagcccgttcaataaacaaaggtataaagcggtgaccgatgcctgctctctacagcctgatatcgatttactgccatttggagaccagactgagatcggggagcgaggaatcaacctaagtggcggacagaggcaaaggatttgtgtggctagagcgctatatcagaacacaaatattgtgttcctcgatgacccattttctgccctggatatccatctcagcgaccatctgatgcaggaaggaatcttgaaattcttgcaggatgataagagaaccctggtgttggtgacccataaacttcaatacctgacccacgctgactggattatcgctatgaaagatggaagtgtactgagggaaggcaccctcaaggatatacaaacaaaagatgtggaactctatgaacattggaaaactctgatgaaccgccaggatcaggagcttgaaaaagatatggaagccgatcagacaaccctggagaggaagactttaagacgagctatgtactcgcgtgaggctaaagctcagatggaagatgaagatgaggaggaagaggaggaggaagacgaggatgacaacatgtctaccgtgatgcgtctgcgcacaaagatgccatggaagacctgttggaggtacctgacttcaggcgggtttttcttactgatcctcatgattttcagtaaactgctcaagcatagcgtcatagtggcgatcgactattggcttgcgacctggacttctgaatattccattaacaacaccggaaaggcagaccagacttattacgtggctggattcagcatcctgtgtggtgccggaatattcctttgtttagtaactagccttactgtggaatggatgggcctaaccgcagccaaaaatcttcatcataaccttcttaataaaattatcctgggtccaattcgattttttgacaccacccctctaggactcattttgaacaggttctccgccgacactaatataatcgaccagcacataccacctaccctcgaatcccttaccagatctacgctactatgcctcagcgctatcggaatgatctcttatgccactcccgttttcctggtggctcttttgccacttggtgtggctttctatttcatccagaaatatttcagagtggcttccaaagatctgcaggaactggacgattctacccaactgccgctgctgtgccacttctcagaaacagctgagggcctgaccaccatccgcgcgtttaggcatgagacacgcttcaaacaaaggatgttggagctgaccgataccaataacattgcctacctctttctgtcagcagccaatcgctggctcgaagtcaggacagattatctgggggcatgtattgtgttgaccgcctcaatcgcctccatatccggctctagcaatagtggactggtggggttgggtttgctttacgcactcacaattaccaattatctcaattgggtcgtgcgcaacctggccgatctcgaggtgcaaatgggggctgtgaagaaggtgaacagctttctgactatggagagcgagaactacgagggcactatggatccaagccaggtgccagaacattggcctcaggaaggcgaaatcaaaatccacgatctatgtgtgcgctacgaaaacaacctgaagcccgtgctcaagcacgtgaaagcatatatcaagccgggccagaaggttggtatctgtggccgaaccggtagcggcaagagttccctcagtcttgccttttttcgcatggtggatatttttgacggaaagatcgtgatcgatgggattgatattagtaaattgcccttacacactctccgatcacgcttaagtatcattcttcaggatccaatcttatttagcgggagtattcgcttcaacctcgaccctgaatgtaaatgtaccgacgataggctgtgggaagccctcgagattgcccagttgaaaaacatggtgaagagcctgcccggagggctggacgcagtggttactgaaggcggcgagaatttctccgttggccagcgccagctgttctgcctcgctagggcattcgtgaggaagagctcaatccttatcatggacgaagcaacggcatcaatcgacatggctacggagaatatcctgcagaaggtggtcatgactgcatttgcggataggacagtcgtcacaattgcgcaccgcgttagcagtattatggacgccggtctcgtgctggttttctcagaggggatcctagtagaatgcgataccgtgccgaacctgttggcccataagaacggtctcttcagcacactggtcatgacaaacaagtag

SEQ ID NO: 109240 - DNA, 1386 bp, synthetic construct
  misc_feature 1..1386: note = Description of Artificial Sequence: Synthetic coding sequence
  source 1..1386: mol_type = other DNA
atgcagagggtgaacatgatcatggcagagtccccaggcctgattaccatatgcttgcttggctacctgcttagcgccgagtgcaccgtgtttctggaccatgagaatgctaataaaatcttgaaccgcccaaaacgctacaacagcggcaagctcgaagaatttgttcagggtaacctggagcgagagtgcatggaagagaagtgtagtttcgaggaagcgagggaggtctttgagaataccgagaggactactgaattttggaaacagtacgtagatggggaccagtgtgaaagcaatccttgccttaacgggggaagctgcaaagacgatatcaattcatatgagtgttggtgtccattcgggtttgaaggaaaaaattgtgaattggatgtgacctgtaatataaaaaatggacgctgcgagcagttctgcaagaacagtgctgacaataaagttgtttgcagttgtaccgaaggctaccgtcttgcagaaaatcagaagtcttgtgaacccgccgtccctttcccatgcgggagagtttccgtctctcagacaagcaagctgactcgggccgaaactgtctttccggatgtagactatgtgaactctaccgaagccgaaacaatcctcgacaatataacgcagtctacacagtcctttaatgattttacacgggtagtggggggtgaagatgctaagcccggtcagtttccttggcaggttgtgttaaacggaaaggttgatgccttctgtgggggcagtattgtaaacgaaaagtggatagtcactgccgcgcactgcgtggagacgggcgtcaagataactgtcgtggcaggcgaacataatatagaagaaacggagcacactgaacagaagcgaaacgtgatcagaattatccctcaccacaactataacgcagcgattaataagtataaccacgatattgcccttctagagctggacgaacccctcgtcctaaatagctacgtgacacccatctgcattgcggacaaggagtacactaacattttcctgaaattcggatccgggtatgtcagcggatggggccgggttttccataaaggccgatccgccctggtcctccagtatttacgggtcccactggtggatcgagcgacttgtcttcggtctactaaatttaccatctataacaatatgttctgtgccggatttcacgagggaggccgtgactcctgccaaggcgactccggcgggcctcatgtgacggaggtggagggcacctctttcctcaccgggatcatttcatggggagaagagtgcgctatgaagggaaaatacggaatttacactaaggttagccggtatgtgaactggatcaaggagaaaaccaagctgacgtag

SEQ ID NO: 109241 - DNA, 684 bp, synthetic construct
  misc_feature 1..684: note = Description of Artificial Sequence: Synthetic coding sequence
  source 1..684: mol_type = other DNA
atggatggcagactcaggaatcccgatcagtccctcacagaagacgttgttgcttttgctgcctcagttgctcacctttattcaaatttaacaaaaccactcctagatgtggctgtcacatcctatacactcctccgcgccgctcgttccagaggcgccggcacagcgtggcctagcgcaatcgccgggctggtggttttcctgactgctaacgtgctgagggctttcagtcctaaatttggcgagttagtcgccgaagaggctaggagaaaaggggaattgagatatatgcatagccgtgtggtagcaaactctgaagagatcgccttttatggtggccacgaagtagagctggctcttctgcagcggtcttatcaggatctagcgagtcagatcaatcttatactgctggagagactgtggtacgtgatgctcgagcagtttctcatgaagtatgtgtggagtgcttccggcctgctgatggtggccgtccctatcatcaccgctacaggctacagcgagtctggggaaacccagggatcaaaacgcatccaagccagagggcttagtcctatcccactgggtgcagagctcacacgagcgcagcttagccagcctgccgcccatttttgctgcagagggcatcgaggcccagcagccagcttagatgcttttaggggctag

SEQ ID NO: 109242 - DNA, 672 bp, synthetic construct
  misc_feature 1..672: note = Description of Artificial Sequence: Synthetic coding sequence
  source 1..672: mol_type = other DNA
tgactatttagcactgtggccgcgcccttttatctgcccgcatcttccgtagggggattccacctcttcatcgtggcgtctaccgatgccgaggccgtcaaaaaggccgctcttgagaagaaagaggaggagctcgtctctgagagaacagaagcttttacaattgctcggaatctgctcaccgccgcggcggatgcaattgagcgcataatgagcagctacaaagaagttacagaattagccggctacactgcacgggtacatgagatgtttcaggtttttgaggacgttcagagatgtcattttaaaagaccaagggagttggaagacgcccaggcaggatccggtactatcggaagaagtggggttcgcgtcgaggggcctttgaaaatcaggggacaagtggttgacgtggagcagggcattatctgcgagaacattccaattgtcactccaagcggcgaggttgtcgtcgcctcccttaacattagggtggaagagggcatgcacctgttgattaccggccccaatggttgcgggaagtcatccctgtttcggatcttgggcggactttggccaacctacgggggggtgctttataaacccccacctcagcgaatgttctacataccccagaggccctatatgagcgtgggatccctgcgtgactag

SEQ ID NO: 109243 - DNA, 2223 bp, synthetic construct
  misc_feature 1..2223: note = Description of Artificial Sequence: Synthetic coding sequence
  source 1..2223: mol_type = other DNA
atgactcacatgctcaacgccgccgcagaccgggtaaagtggactcgtagcagcgccgccaagcgggccgcatgcctcgtcgccgctgcctatgcccttaagacactctaccccatcattggaaagagactcaaacagtccgggcacgggaaaaagaaggctgcggcatatccggctgccgagaatacagaaatccttcattgtacagaaactatatgtgagaagcccagtccaggggtgaacgctgactttttcaagcaactgcttgagctgcggaaaattctctttcctaagttagtgacgacagaaaccggttggctctgtctccacagcgtagcgctaattagcagaacctttctgtccatttacgtcgcgggtctagatgggaaaatcgtgaagagtatcgtcgagaagaaacctagaacatttattatcaagctcattaaatggctgatgatcgctataccagctacttttgtaaatagcgctatcaggtacctggagtgcaaattagccctggcctttagaacccgcctggtggaccatgcatacgagacttacttcactaatcagacgtactataaagtgattaatatggacgggagattggcgaaccccgatcagagcttgactgaagatattatgatgtttagccaatcagtagcacacctgtatagtaacctgactaaaccgattctcgacgttatgcttacttcttatacactgatccaaacagcaacatccagaggagcaagtcctatcgggcctacgttgcttgccggtctggtcgtgtatgccacggctaaagtcctcaaagcttgctctccaaagttcggcaagctggtggctgaagaagcacaccgaaaagggtatttgcgttacgtccatagtaggatcatcgccaatgtcgaggagattgccttttacagagggcataaagttgagatgaaacaactgcaaaaaagctacaaggctctagccgatcaaatgaacctcattctaagtaaaaggttatggtatattatgatcgagcagttcctcatgaaatatgtgtggtcaagctcaggactgatcatggtggccatccctataatcacagctacaggattcgcggacggcgaggacggccagaaacaggtgatggtctctgaacgtacggaggcattcaccactgctagaaacctccttgccagtggagctgacgctatagagaggataatgagttcttataaggaggttacagaactggctgggtatacagctcgagtttataatatgttctgggtttttgatgaggtgaagcgcggtatctacaagcgcacagctgtcatccaagagtctgagtctcacagtaaaaacggcgccaaagtggagctgcctttatccgatacacttgccattaaaggaaaagtcatcgacgtggaccacggcataatctgcgagaatgtgcccataattacaccagccggcgaagtggtggcatccagactgaacttcaaagtagaggaggggatgcatctgcttataaccggtcccaacggttgtggaaagagctccctgttcagaatactctccgggctttggccagtgtacgaaggtgtgttatacaagccaccacctcagcacatgttctacattccacaacgcccctacatgagtttgggtagcctgcgggatcaggtgatctaccctgattctgtagacgacatgcacgacaagggctacacggaccaggatctcgaacgaatcttacacaacgtgcatctctaccatatcgtgcaaagggagggcgggtgggacgcagtgatggactggaaagatgtgctgtcaggcggggagaagcaacgaatgggcatggcccggatgttctaccataaacccaaatacgcgttgttggatgagtgtacctccgcagtatcaatcgacgtggaggggaagatctttcaggcggccaagggagcaggcatcagcctgctctccatcactcatcgaccgtccttgtggaaataccacacccacttactgcagttcgatggagagggaggttggaggttcgagcaactggacactgctatacgtctgaccttaagtgaggagaaacagaaactcgaaagccagttggccggcatccccaagatgcaacagcgcctgaatgaactgtgcaagatcctgggagaagattctgtgcttaagacaatcaaaaatgaggatgaaacgagctag

SEQ ID NO: 109244 - DNA, 711 bp, synthetic construct
  misc_feature 1..711: note = Description of Artificial Sequence: Synthetic coding sequence
  source 1..711: mol_type = other DNA
atggccgccttttctaagtacctcacggccagaaactccagtctagccggagcagcctttttactactctgcctgcttcacaagcgaagacgagcacttggcctgcacggtaaaaaatccggcaaaccgcctctgcagaataacgagaaagagggcaagaaggaaagagctgtcgtggacaaggtgttcttttctcgcttgattcagatactcaagattatggtgcccaggaccttttgcaaggaaaccggttatttggtgcttatcgctgttatgctggtgtcgagaacgtactgcgatgtgtggatgatccaaaacggcacacttattgaaagtggcattataggcagatcacgaaaagatttcaaacgatatctcttaaacttcatagcagcaatgcccctgatttcccttgtcaataattttctcaaatatggtttgaatgagcttaaactttgctttcgcgtgcggttgactaaatacctgtatgaggagtacctgcaggccttcacatattataaaatgggcaaccttgacaatcggatcgctaatccagaccagttattaacgcaggatgtggaaaagttctgcaatagcgtcgttgacctctattcaaacctgtccaagccattcctcgacattgtgctctacattttcaagctgacctctgcaattggagcgcaggtgttaggcaaaatcctctggcattag

SEQ ID NO: 109245 - DNA, 1980 bp, synthetic construct
  misc_feature 1..1980: note = Description of Artificial Sequence: Synthetic coding sequence
  source 1..1980: mol_type = other DNA
atggccgccttttcaaaatatctgaccgcgcgcaactcctcccttgccggagctgcatttctcctgctgtgcctgctacataagcgccggagggccctaggtctgcacgggaaaaagagcggtaagcccccactgcagaacaacgagaaagagggcaaaaaggaacgggccgttgttgataaggttttctttagccgcctgatccaaattctcaaaatcatggtaccaagaactttttgtaaggaaaccggctatttggttctgatcgctgttatgctggtgtctcgtacttactgtgatgtgtggatgatccagaatggcacactcattgaaagcggcatcataggaaggagtaggaaggactttaagcgatacctcttaaatttcatagctgcaatgcctctcataagtttagtgaataattttctgaagtacggcctaaacgagttaaagttatgctttagggtgcgcttgaccaaatacctctacgaagagtacttacaggctttcacatactacaagatgggcaacctggataacagaattgccaatccggaccagctcttgacccaggacgtagagaagttttgtaattcggtagtcgacctgtactccaacttgtctaaaccctttctggatattgttctgtacatttttaagcttacttcggcaatcggagcccaaggtccggcgtctatgatggcatatctggtagtttcgggcctgttcttaacaaggcttcgcagacccataggtaagatgactatcacggagcaaaagtatgaaggggagtacaggtacgtgaattctcgactgattactaacagcgaggaaattgccttttataatgggaataagagggagaaacagacggtacactctgtcttccgaaaactggtcgaacatcttcacaattttattctgtttcgcttttccatgggctttatcgacagtatcatcgccaaatatctggctacagttgtgggatacctggttgtctccagacccttcttagatttgtcacatcctaggcatctgaagagcactcactccgagcttctggaagattattaccagtctgggcgaatgctgctgagaatgtctcaggctctcggaagaattgtgctagctggaagagaaatgactaggctcgcgggtttcacagcgaggatcacagagctcatgcaggtcctgaaggatttaaaccacgggaagtacgaacgtacgatggtcagccagcaggagaaagggatcgaaggtgtccaagtaataccactcattccaggggccggcgaaataattatcgccgacaacataatcaagttcgaccacgttcccctggctaccccaaatggcgatgttttgattcgagatctcaattttgaggtcagaagcggagctaatgtcctgatttgcggaccgaatgggtgcgggaagtccagcctatttcgcgttttgggggaactctggccccttttcggtggcagattgaccaaacctgagagagggaagctattctatgtgccccagagaccgtacatgacactggggacgctccgcgaccaggtcatttatcccgatggcagagaggatcagaaacgaaaagggatctccgacctcgtcctgaaggagtacctggataatgtgcaactgggacatatccttgaacgggagggaggctgggatagcgtgcaggattggatggacgtgctcagcggcggtgagaagcagagaatggcgatggctcggctgttctatcacaagccacagttcgcgattctggatgagtgtacatctgctgtaagcgtagatgtagaaggctacatctacagccattgtcgaaaagtgggtattactctcttcacggtatcccacagaaagagtttgtggaaacatcatgagtactatctgcacatggatggcaggggcaactacgaattcaagcagatcaccgaagataccgtcgagtttggcagttag

SEQ ID NO: 109246 - DNA, 1650 bp, synthetic construct
  misc_feature 1..1650: note = Description of Artificial Sequence: Synthetic coding sequence
  source 1..1650: mol_type = other DNA
atggcagctttcagcaaatatctgactgctcgcaactctagtctggctggcgccgcctttcttctcctgtgcttactgcacaagcggcgaagggcactaggcctccatgggaagaaatcagggaaacctccgctccagaacaatgagaaggagggcaaaaaagagcgtgccgttgtggataaggtgttcttttccagactgatccaaatcttaaaaataatggttccacggacattctgtaaagaaacggggtatctggttttgattgcagttatgttagttagcaggacctattgcgacgtgtggatgatccaaaacggcaccctcatcgaatcaggaatcattgggaggtcacgcaaggattttaaaaggtatcttctgaatttcatcgctgctatgccattaatttcgttagttaataacttcctcaagtatggactgaatgagcttaagctgtgcttcagagtgcggcttaccaaatacctgtacgaagagtatctgcaggcctttacgtactataagatgggaaatctcgacaacagaatcgcgaatccagaccagctcctgactcaggacgtggagaagttttgcaatagcgttgtggatttgtattccaacttgtccaagccatttttggacatagtcctgtatatctttaaattgactagtgccatcggcgcgcaaggtcctgcctctatgatggcctacctggtcgtttcaggactcttcttgacccgccttaggcgacctatcggcaagatgactattactgaacagaagtatgaaggcgagtaccggtatgtgaatagtcgattaatcaccaactcattcactgcaagaatcactgagctcatgcaagtcctgaaagacctgaatcatgggaagtacgaaaggaccatggtgtcccagcaggaaaagggaatcgagggagttcaggttatcccccttatcccaggcgccggggagataattatcgccgacaacattataaaattcgaccacgtgcccctggccactccaaacggcgatgtgctgatcagagacttgaatttcgaagtcaggtctggagcaaacgtgctcatttgcgggccaaacggatgtggcaagtcatctctgtttagggttctgggagagctgtggccactctttggaggccgtttaacaaagcccgagcggggaaagctgttctatgtcccacagaggccctatatgacactgggaaccctgcgcgaccaagtcatctaccctgatgggcgcgaggaccagaagagaaaaggtatatctgatcttgtgcttaaggagtatttggacaacgtgcaactcggacacatcctggagagggagggcggctgggattcggtgcaagactggatggatgtgttgtctggaggggaaaagcagaggatggcgatggcacggctgttttatcacaagccccagttcgcgatactggatgagtgtacttcggcggtctctgtcgatgtggagggctatatttacagtcactgccggaaagttggaatcaccctgtttacagtgagccataggaaatcattgtggaaacaccatgagtattatctgcacatggacggacgaggcaattacgagttcaaacagatcaccgaagataccgtggagtttgggtcctag

SEQ ID NO: 109247 - DNA, 2052 bp, synthetic construct
  misc_feature 1..2052: note = Description of Artificial Sequence: Synthetic coding sequence
  source 1..2052: mol_type = other DNA
atggcagcctttagtaagtatttgacggctcgcaattcgagcctggctggcgctgcatttctgttactctgcctgctgcataagcgccggagagcacttggattacacggttattttatggaaacctggcgggagaaatcggatgaagtaatgggagaacttacagatcatgtgacccattgcaagaaatctggcaagccccccctgcaaaacaatgagaaggagggtaaaaaggaaagagcagtggttgataaggtctttttttccagactcattcaaattctgaagatcatggtgcctaggacattctgtaaggaaactggctacctcgtactgattgccgtgatgctggttagtaggacatattgtgatgtttggatgatccagaacggaaccttgatagagtctggtatcattggccgttctcgcaaagattttaagagatatctgttaaacttcattgcggctatgccgctgatctctttagtgaacaatttcctcaaatacgggcttaatgaactaaaattatgtttcagagtgcgtctcacgaagtatttatatgaagaatacttgcaggcattcacatattataagatgggcaacctggacaatcggattgctaatccagatcagctgcttacccaagatgttgagaagttttgcaactcagttgtcgatctctactcaaacctaagcaagccctttttggacatcgtgctgtacatctttaaactgacatcagcaattggtgctcaaggccccgcctctatgatggcgtacctggtggtgagcggcctgtttctgaccagactcaggcgccctatcggtaaaatgaccataacagaacaaaagtacgagggcgaatatcgatatgttaacagccggcttatcacaaacagtgaagagattgcattctacaatgggaacaagcgagaaaagcagaccgtccattccgtgtttcggaagctcgtggaacacctccacaactttatcctcttccgattctccatgggatttatcgatagtataatcgccaagtacctcgcaacagttgtaggatacttggttgtgtcccgcccctttctagatttatcccaccctagacacctgaagtcaactcattccgaattgctcgaggactactatcagagcggacgcatgctgcttcgtatgagccaggctcttgggcgcattgtccttgccgggagggaaatgacccgccttgccggatttactgcaaggatcacggagctgatgcaggttctgaaggacctcaaccatgggaaatatgaaaggaccatggtgtcacaacaggaaaaggggatagaaggcgtacaggtgattcctttgatacctggggcgggggaaataatcatagccgataatatcataaaattcgaccacgtaccacttgctacacccaatggggatgtcctaatccgggatttgaacttcgaagtgagaagcggcgcaaatgtattgatttgcggacccaatggttgcgggaaaagtagtttattcagagtgctgggtgagctctggccactctttggaggcaggctgacaaaacccgagcgcggcaagctgttctatgtcccacagcgaccatacatgaccctagggactcttcgcgatcaagtaatttaccccgacgggagagaggatcaaaagcggaaaggcatatctgacctggttttaaaggagtatttagacaacgtccagttagggcacatattggaaagagaaggcggctgggactccgttcaagactggatggacgtcctcagtggcggagaaaagcagcgcatggcaatggcccggttattttatcataagccacaattcgccatcctcgatgaatgtacttcagctgtgagtgtggacgttgaagggtatatttacagtcattgcagaaaggtgggaatcactctattcactgtatcccacagaaagtcattatggaaacatcacgaatattacctgcacatggacgggcgaggaaactacgaatttaagcaaatcactgaagacaccgtcgagtttggtagctag

SEQ ID NO: 109248 - DNA, 1761 bp, synthetic construct
  misc_feature 1..1761: note = Description of Artificial Sequence: Synthetic coding sequence
  source 1..1761: mol_type = other DNA
atggtacctcgcaccttctgcaaagagaccggttatctggttctcattgcagtcatgttggtgagcaggacatattgcgacgtttggatgatacagaacggcacactgatcgaatcgggcatcatcggccggtcgcgaaaggacttcaaacggtacctgcttaattttatcgcggccatgccccttatctctctggtgaataactttttgaagtatggtttaaatgagcttaagttgtgttttagagtcagattgaccaaatacttgtacgaggagtacctccaagcttttacatattacaagatggggaatctcgataaccgaatcgcaaaccccgatcaattgcttacacaagatgtggaaaagttctgtaacagtgtagtcgacctgtacagcaacctaagcaagccattcctcgacattgtcctctacattttcaagttgacgtcagcaataggggcccagggaccagccagtatgatggcttatctcgttgtttctggcctgttcctgactcgcctgagaagacctattggcaaaatgacaattacggagcagaaatacgagggtgagtatcgatacgttaactcccgcttgatcacgaacagtgaggagattgcgttctataatggtaacaagcgtgaaaaacagactgtccactccgtatttagaaaactcgtcgaacacttgcacaatttcatcttattcaggttttccatgggctttattgactctatcatcgcaaagtatctagccaccgtggtaggttacctggtcgtcagtcgccctttcctagacctgagccatccgaggcacttgaaatccactcacagtgagctgttggaggattactaccagagcggtcgtatgctgcttaggatgtcccaggccctgggtagaattgtcttagccggaagggaaatgaccagactggccggtttcactgcacggatcaccgaactgatgcaagttcttaaagatctaaatcacgggaagtacgagaggacaatggtgagtcagcaggagaaagggatcgaaggcgtccaagtgatccctctcatccctggcgccggcgaaataatcattgcagacaatattatcaaattcgatcacgttcctctcgctacacccaatggagatgtgttgatccgggacctcaacttcgaggtgcgcagcggtgccaacgtgctgatttgcggtccaaacggatgcgggaagagctcgctgtttcgtgtgctgggcgagctttggcccctcttcggaggacgactcaccaagccagaacggggcaaactcttctatgtgccccagcggccctacatgacgctaggaacactacgcgatcaagtgatatacccagacgggcgggaggaccaaaaacgtaaagggatatccgatctggtccttaaagaatacctcgataacgtacaactcgggcacatcctggagcgagagggtgggtgggacagcgtccaggactggatggatgtgttatcaggaggggaaaaacagaggatggcaatggctcgtctcttttatcataagccacagtttgccatactggacgaatgtacgtctgctgtcagcgtagatgtcgagggttacatctactctcactgtagaaaagtgggcataactctctttaccgtgtctcacagaaagagcttgtggaaacaccacgaatattatctccatatggacggaaggggcaattacgagtttaaacaaataacagaggacacagtggagtttgggagctag

SEQ ID NO: 109249 - DNA, 1467 bp, synthetic construct
  misc_feature 1..1467: note = Description of Artificial Sequence: Synthetic coding sequence
  source 1..1467: mol_type = other DNA
atgctgattgttctgaactcaacgcttaaatctttcgaccagtttacatgtaacctgctgtacgtctcctggcggaaagatctcacagaacacctgcataggctctacttccgtggacgcgcctactacactctgaatgtgttaagagacgatatagacaaccccgaccagcggatctcacaggatgtggagagattttgtaggcagctgagttcaatggctagtaagttgattatctccccctttacactggtgtactacacttaccagtgtttccagtctaccggctggctgggacccgtaagcattttcggctacttcatactgggcacagtggttaataaaacactgatgggccctatagtgatgaagctggtacaccaagagaaactggagggcgatttcagagccggccacgtcgaacacatgcgcacagaccgacgcctccaaaggttgttacagactcaacgggaactcatgtcaaaggagctatggctgtatataggaattaatacctttgactatctcggatctattctaagctatgtggttattgcaattcccatctttagcggagtctacggggacctgagccctgctgagttgtcaacactcgtctcaaagaacgcctttgtctgtatttaccttatatcatgcttcactcaactaattgatttgtccaccacactcagcgacgtggccgggtacactcatcgaatcggccaactcagagaaacgttacttgacatgagcctgaagtctcaggactgtgaaatactaggcgaaagcgaatggggattggacacacccccaggatggccagcagctgagccggcagacacagctttcctgctcgagcgcgtaagcatctctgcgccttcttccgacaaacctctaatcaaggatttaagccttaagatttcagaaggacagtctctgctcatcactgggaacacaggcaccgggaagacatctttgcttcgcgtactaggtggcctgtggactagcactcggggtagtgtgcaaatgctgaccgattttgggccacacggagtactcttcctgccacagaagcccttctttactgatgggacccttcgggaacaagtcatttaccccctcaaggaagtataccccgattccggctccgcagacgatgaaaggattctcaggttcctggaactggctgggctgtctaatctggtggctcgtactgaaggcctcgaccagcaagtggactggaactggtacgatgtgctctccccaggtgagatgcaacgtttatcattcgcaagattgttctacctacagcccaagtatgcggtgctggatgaggcgacctcagctttgacagaggaggttgagtcagaactctaccggatcgggcagcaacttggaatgacatttatttccgtgggtcacagacagagtctggagaaggtcccggtgctcacaaggatggcctag

SEQ ID NO: 109250 - DNA, 1821 bp, synthetic construct
  misc_feature 1..1821: note = Description of Artificial Sequence: Synthetic coding sequence
  source 1..1821: mol_type = other DNA
atggcagtcgccggccctgcccctggtgccggagccaggccacgcttggacctgcagtttttgcagagatttctgcagatcctgaaagtcttgttcccgtcatggtcttcacagaatgcgctgatgttcttgacacttctttgcctaacactgctcgaacagtttgtgatctatcaagttggcttaataccgtcccagtattatggcgtgctgggtaacaaagatctcgaaggcttcaaaacgttaaccttccttgccgtgatgttaattgtgcttaactcgaccctgaaaagtttcgaccaattcacatgcaaccttttatacgtgagctggaggaaggacttgacagagcacctacatcgactatatttccgtggtagggcatactatacacttaacgtcctgcgagatgatatcgacaatcctgaccagaggatttctcaggacgtggagcgattttgtagacagctgtcctctatggcatcgaagctcatcatctctccatttaccctggtctactacacttaccaatgctttcagtctaccgggtggttggggcctgtcagcatctttggatattttatcctgggcaccgtcgtgaacaagacactgatgggccctatagtgatgaagctggtacaccaagagaagttagagggcgatttccgttttaagcatatgcaaattcgggtgaatgccgaaccggcggccttctatcgcgctgggcacgtggaacacatgcgaacagaccgccgcctgcagaggctgctacagactcagagggagctgatgtctaaggaactttggctgtacataggaatcaacacatttgactatctgggcagtattctctcttacgtcgtgatagccatcccaattttttccggagtgtacggagatctctccccagctgagcttagcactcttgtcagtaaaaatgctttcgtgtgcatttatctgatctcatgcttcacacagctgatcgacctgagcactaccctctctgatgtggccggatacactcacagaatcggacagctgcgggagaccttgctggatatgagcctgaaatctcaggattgtgaaattttaggggaaagtgaatggggcctagacaccccgcccggatggccagccgccgagcctgctgataccgccttcttgctggaacgcgtttccatctctgctccgtcctccgacaagcctttaattaaggacctatccctaaagatcagcgaggggcagagcctgttgataactggcaatactggcactggaaagacttcactcttgcgcgtgctaggaggtctgtggacttcaacacgcggaagcgtgcaaatgctaacagactttgggcctcatggcgttctttttttaccacaaaaaccgtttttcaccgatggaacattacgcgaacaggtcatctatcccctaaaagaagtctatcctgattctggatcggccgatgatgagcgcatccttcggtttcttgagctcgccgggctctcaaatctggtcgcacgaaccgagggtttggaccagcaggtggactggaactggtacgacgtactgagccctggagagatgcagcgattgagcttcgctcggcttttttacctgcagccgaagtacgcagtcctcgatgaagctacaagtgccctcactgaggaggttgaatccgaactgtaccggatcggtcagcagctcggcatgacatttatatcggtgggacatcggcaaagcctcgaaaagtttcatagtctggtcctgaaactgtgcgggggcggcagatgggaattgatgagaataaaagtggagtag

SEQ ID NO: 109251 - DNA, 297 bp, synthetic construct
  misc_feature 1..297: note = Description of Artificial Sequence: Synthetic coding sequence
  source 1..297: mol_type = other DNA
atgagatccttgctgctgtctacagtgggcatcaatacctttgattatctgggcagtattctgtcatacgtggttatcgctatacccatattcagcggagtgtacggcgacctttcccccgccgaactgtctactttggtgagcaaaaacgcctttgtgtgtatctacctcatcagctgcttcactcaactcattgacttatctaccactctgtccgatgtcgccggctacactcatagaattgggcagcttagggaaacacttctcgacatgtcactgaaaagtcaggactgttag

SEQ ID NO: 109252 - DNA, 1800 bp, synthetic construct
  misc_feature 1..1800: note = Description of Artificial Sequence: Synthetic coding sequence
  source 1..1800: mol_type = other DNA
atggccgataaactaactagaatcgccattgtaaaccacgataaatgtaagccaaaaaagtgtcggcaagagtgcaaaaagtcttgtcctgtggtgaggatgggcaaactgtgcattgaggtgacccctcagtcaaagattgcatggatctctgaaacactgtgtattggctgtggcatttgcataaagaaatgcccatttggcgccctgtctattgttaatctgccttctaatctggaaaaggaaaccactcaccggtactgcgctaatgcattcaagcttcacaggctgccaattcctcgccccggggaagtactggggctggtaggaactaatggaattggaaagtcaactgccttaaaaattcttgcggggaaacagaaacctaatcttggcaagtatgacgacccacccgattggcaggagatactgacatattttcggggcagtgagctacagaactactttacgaagattctggaggacgatcttaaggcaattataaaaccgcagtacgtggatcaaattccaaaggccgccaagggtacagtgggttcaatcctcgacagaaaggatgagactaagactcaggctattgtatgccaacagttggatctgacccacctgaaggagcggaacgttgaagatcttagcggcggagagcttcagaggtttgcctgtgcggtcgtgtgtatccaaaaggctgacatctttatgtttgatgaaccatcctcctatctggatgttaaacaacgactcaaggcagcaattaccattcgaagcttgattaatcccgatcgctacattatcgtggtagaacacgatttgtcagtcttggattaccttagcgatttcatctgttgcctgtatggcgttcctagcgcttatggagttgtgaccatgccattttctgtcagagaagggattaatatatttctggacgggtatgtgccaacagaaaacctgaggttcagggatgctagtctggtctttaaagtagcagagacggccaacgaagaagaggtgaagaagatgtgtatgtataagtacccaggcatgaaaaaaaaaatgggggaatttgaactggccatcgtggccggggaattcacggatagcgagattatggtcatgttaggcgagaacggcacaggcaagacgacattcattcgaatgttggcaggacgtctgaaacccgacgaaggcggcgaagtgccggtccttaacgtgagctacaaaccgcagaagatatctcctaagagcaccggttccgtccgccagctgcttcatgagaagattcgggacgcctacacccatccacagttcgtgacagatgtgatgaaacctctgcagatagagaatatcatagatcaggaagttcagaccctctcaggaggtgaactgcagagagtggccctggctttatgcctggggaagccagcagatgtgtacttaatagacgagcctagcgcatacctagattccgaacagcgcctcatggctgctcgggtggttaagaggttcattctgcatgccaaaaaaactgcctttgtcgtggagcatgattttatcatggctacctacctagcagacagggttatcgtgttcgacggcgtgccgagcaaaaataccgtggccaactcgccacagacgctcctggccggaatgaacaagttcctatcgcagctggagatcacattccggcgtgaccccaacaattaccgcccacgcatcaataagttgaattcgatcaaagacgtggaacagaagaaatccggaaactactttttcttggatgactag

SEQ ID NO: 109253 - DNA, 633 bp, synthetic construct
  misc_feature 1..633: note = Description of Artificial Sequence: Synthetic coding sequence
  source 1..633: mol_type = other DNA
atggcagataagttaacacggatcgcaatagtgaatcacgacaaatgcaagccaaaaaagtgcagacaggaatgtaaaaaaagttgtcctgtggtaagaatgggtaaattgtgtatcgaggtaacgccccagtcgaagatcgcctggatctcagagaccctgtgcatcggctgtggcatctgtatcaagaagtgccctttcggggctttgagtatcgttaacttgcccagtaatcttgaaaaagagactacccatagatactgtgccaatgcctttaagctgcaccggctgcctatacccaggcccggagaagttctgggcctagtgggcactaatggcatcgggaagtctacagccctgaaaatcctggctggcaaacaaaagccaaacttaggcaagtatgacgatcctccggattggcaggaaatcctgacatatttccggggcagtgagctccagaactatttcaccaaaattttggaagatgacctcaaagcgatcatcaagccacaatacgtggaccaaatacctaaggcggctaagggcaccgtgggctccattctggatcggaaggacgaaactaaaactcaggcgattgtctgtcagcaactggatttaacccaccttaagtag

SEQ ID NO: 109254 - DNA, 2538 bp, synthetic construct
  misc_feature 1..2538: note = Description of Artificial Sequence: Synthetic coding sequence
  source 1..2538: mol_type = other DNA
atgcccaaggcccctaaacagcaaccgcctgaacctgagtggatcggcgatggagagagcacgagcccatctgacaaggtggtgaaaaagggcaaaaaggacaagaagatcaaaaaaaccttttttgaggaattggcagtggaggacaagcaagctggagaagaggaaaaagtgttgaaagagaaggagcagcagcagcagcaacagcaacagcaacagaagaagaaacgtgataccagaaaagggcgtcgcaaaaaggacgtagatgacgatggcgaggagaaagagctcatggaaaggctgaagaaacttagcgtgcccacttccgatgaggaagacgaggtccctgccccaaaacctagggggggtaagaaaacaaagggtgggaacgtgttcgcagccctcattcaggaccagtctgaggaagaggaggaagaggagaagcacccgcctaagcctgccaagccagaaaagaataggattaacaaagccgtctccgaggaacaacagccggccctgaagggaaagaagggcaaagaggaaaagtccaagggtaaggccaaacctcagaacaaatttgcagcactggataatgaagaggaggataaagaagaggagatcattaaggaaaaagaaccacccaagcaaggtaaggagaaagctaagaaggcagaacaaggcagtgaggaggaaggagaaggagaagaggaagaggaagagggtggcgagagcaaagctgacgacccttacgcccatctctccaaaaaagagaagaaaaaattgaaaaagcaaatggaatacgagcggcaggtcgcatcccttaaagctgcgaatgctgccgagaacgactttagtgtctcacaggccgagatgtcgtccagacaggcaatgttggagaacgctagcgacataaagctggagaaattctctatttccgctcatggcaaggaactgttcgtgaacgcagatctgtacattgtggccggcagacggtatggtttagtaggacccaatggcaaggggaaaactacactcctaaaacacatagccaatagggccctatcgattccacccaacattgacgttctgctttgcgagcaggaggttgtagcggacgagactcctgcagttcaggctgtgctgagggcggacacgaaaagactgaagctgctggaggaagaacgccgcctgcaaggacagctggagcagggggacgacactgctgcagaacggctcgagaaagtgtatgaagagctgcgagccaccggagctgctgcagctgaagccaaggcgaggagaattctcgccgggctcggtttcgatcctgaaatgcagaaccgccctacacagaaattttcaggcggttggaggatgcgcgtgtccctggccagagcgctgtttatggagcccaccctcttaatgcttgatgagcccaccaatcatctcgacctgaatgctgtcatctggcttaacaactatctgcagggctggcggaagactcttctaattgtgtcacacgaccagggttttttggatgacgtctgcaccgacattatccacctcgacgcacagcggctccattactacagagggaactatatgacatttaaaaagatgtaccagcagaagcagaaagagctcctcaagcaatatgagaaacaagaaaaaaaactcaaagagcttaaagccggcggtaaatccactaagcaagccgaaaaacaaaccaaggaagctctgacacgcaagcagcagaaatgccgccgcaagaaccaggacgaggagtctcaggaagcacctgaactcctgaaacgccccaaggaatatacagttaggtttacctttcctgacccgccccctctgtctccaccagtgcttggactccacggagtgacattcgggtatcagggccagaaaccgctgttcaaaaacctggattttggcattgacatggactcccgaatctgtattgtgggaccaaacggggtaggcaaatcaaccctgcttctgctcctcactggcaagctaacacccacacacggagagatgagaaagaaccatagactgaaaataggattttttaaccagcagtatgcagagcagttgcgcatggaggagacccccacggagtacctccaacggggattcaatctgccatatcaggacgccaggaagtgcttgggaaggttcgggctggaatctcatgcccataccatccagatctgtaaattatctgggggacaaaaggctcgggttgtttttgccgagctagcttgccgggaacccgatgtgttaattctggatgaacccacaaacaatttagacatcgagtcgatagatgcactaggtgaagcaataaatgagtacaagggagcagtgatagttgtttctcacgatgccaggcttatcaccgagaccaattgtcagttatgggtggtagaggaacagtctgtatcacagatcgacggagattttgaagactacaaacgggaagttctcgaagcgttaggtgaggtcatggtgagtcggccaagagagtag

SEQ ID NO: 109255 - DNA, 2424 bp, synthetic construct
  misc_feature 1..2424: note = Description of Artificial Sequence: Synthetic coding sequence
  source 1..2424: mol_type = other DNA
atgccaaaggccccgaaacagcagccgcctgagccggaatggatcggggacggggaaagtactagccctagcgacaaggtggtgaagaaaggcaagaaagataagaagattaaaaaaactttctttgaagagctggccgtagaagacaagcaggctggcgaagaagaaaaggtgcttaaagagaaagaacaacagcaacaacagcaacaacagcagcaaaagaagaagcgcgacaccagaaagggccgaagaaaaaaagatgtggatgacgatggcgaggaaaaggagctcatggagcgcttaaagaaattgtctgtcccaacaagtgacgaggaagacgaagtcccggctcccaagccccgtggaggcaagaagaccaaggggggcaatgtatttgccgcactcatccaagaccagtctgaggaagaggaggaagaagagaaacacccccctaagccagcaaaaccagagaaaaacaggatcaacaaggccgtgagtgaggaacaacaacctgcgctgaaaggaaagaaggggaaagaggagaaaagcaagggaaaagccaaaccacagaacaagttcgccgccctggataacgaggaggaagacaaagaggaagaaattatcaaggagaaagagcctccgaaacagggtaaggagaaggccaagaaggcggagcagatggagtacgagcgccaggttgcctcgctcaaggcagccaacgctgcggagaatgacttctcagtcagtcaggcagaaatgtcaagccgccaagcgatgttggagaacgcctccgacattaagctggagaagtttagtattagcgcccacggtaaggagctttttgtgaatgccgacctctacatagtggccggtcgtagatacggactggtaggtcccaacggaaaggggaaaacgacgctactcaagcacatagccaatagagcactgtctataccacccaacatcgatgtcttgttgtgcgagcaagaggtagtggcagatgagacccccgctgtgcaggccgtgttgagagcagacaccaagcgactgaagttgttagaagaggagagacggctgcaaggacagctcgaacaaggcgacgatactgccgcagagaggctagaaaaggtctatgaggagttaagggccaccggcgccgctgccgctgaggcgaaagctaggcggattctggctggacttggctttgaccccgagatgcagaaccgccccactcaaaagtttagcggggggtggaggatgagggtgtcactcgcaagggctttgtttatggagccgaccctactgatgctagacgaacccacaaatcatttggacctcaacgccgttatctggctgaataactatctccaaggctggcgaaagacactgttaatcgtgagccatgatcagggtttcctggacgacgtatgcactgacatcattcacctagacgcccagagattgcactactaccggggtaattacatgacattcaagaaaatgtaccagcagaagcaaaaggaactgttgaagcagtatgaaaagcaggaaaaaaagcttaaggaactgaaagctggtggcaaatcaacgaagcaggcggagaagcagactaaagaggcgctcacccgcaaacagcaaaaatgtagaagaaagaaccaggatgaagaaagtcaggaagcccctgagcttctgaaaagacctaaagagtatactgtgcgctttaccttccctgatcctccccctttaagccctccagtcctgggcttgcatggcgtcaccttcggctatcagggacagaaacccctctttaaaaatctggatttcgggatagacatggacagtcggatctgtattgttgggccaaacggagtcgggaagtccactcttctgctactcctcactggcaagctgacgcctacccacggcgagatgaggaaaaatcaccggctgaagattggcttcttcaaccaacaatatgctgagcagctgcgaatggaggaaaccccaactgagtatttgcaacggggctttaacctgccctaccaggacgcacgcaaatgcctgggacgttttggcctcgagtcccacgctcataccattcagatttgtaaactgtcaggggggcaaaaagcacgagttgtgttcgccgaacttgcttgtcgcgagccggacgttctgattctggacgagccaaccaacaacctggatatcgaatcgattgacgccttaggtgaggccatcaatgaatataagggtgccgtgattgtggtaagccatgacgcacgcttgataaccgagacaaactgccagctttgggtcgtggaagagcagtctgtgagccaaatagacggtgattttgaggactacaaaagagaggtcctggaagcccttggagaagttatggtatcgaggcctcgtgagtag

SEQ ID NO: 109256 - DNA, 2424 bp, synthetic construct
  misc_feature 1..2424: note = Description of Artificial Sequence: Synthetic coding sequence
  source 1..2424: mol_type = other DNA
atgccaaaggccccaaaacagcagcctccagagcccgagtggatcggcgacggggagagcacttccccttccgacaaggtggtgaagaaaggcaagaaggataaaaagattaagaaaacattctttgaagaactggccgtcgaggataagcaggccggcgaggaggagaaagtcctaaaagagaaggaacaacagcagcaacagcagcagcagcaacagaaaaagaagagagacaccagaaaaggtcggcgcaaaaaagatgtggatgatgatggggaagagaaagaactgatggagagattaaaaaagctttcggtgccaacatctgatgaagaagacgaagttcccgctcctaagccacggggcggtaagaagaccaaggggggtaatgtgttcgctgccttaattcaggaccaaagcgaagaggaagaggaggaggagaagcacccccctaaacctgctaagccagaaaaaaaccggatcaataaagccgtgagtgaggaacagcagccagctctgaaggggaaaaagggaaaagaagaaaagtccaagggcaaagctaaaccacaaaacaaattcgccgctctagataacgaagaggaggacaaggaggaggaaattatcaaagagaaagagccgccaaaacaagggaaggagaaggcaaagaaagcagagcaaatggagtacgaacggcaagtcgcttcacttaaggctgctaatgccgccgaaaacgacttcagcgtgagtcaggcagagatgtcatccaggcaagccatgctggagaatgcctccgatattaagctcgaaaaatttagcatttccgcgcacggcaaggagctcttcgtcaacgccgatctgtacatcgtggccggccgcagatacggcctggtaggtccaaacgggaaaggaaagacaaccctgctgaaacacatcgcaaacagggcactttccatccctcctaacatagacgttctgctgtgtgagcaggaagtcgttgccgatgagacaccagccgtgcaagccgtgttgcgcgctgacaccaaacgtttgaagctattggaagaggaacgtaggctacagggacaacttgaacagggggatgatacggctgccgagcggttagaaaaggtctacgaggagctgagggccacgggcgcagccgccgccgaggcaaaggcgcgcaggatcctagcaggacttggctttgatcccgagatgcagaaccgccccacgcagaagtttagtggggggtggcgcatgcgtgttagcctggctcgagccctgtttatggaacctacgctattgatgctggatgagccaacaaatcatctagatcttaatgctgtcatttggctcaacaattaccttcagggatggcggaaaactcttctgatcgtgtcacatgatcaaggcttcctggatgatgtgtgtactgacatcatccatctcgacgcccaacgtctccactactatcgcggaaactatatgacctttaaaaaaatgtaccaacagaaacagaaggaactgctcaagcagtacgagaagcaggaaaagaaactcaaagaactgaaggcgggaggcaagtcaaccaagcaggcagagaagcagactaaggaagcacttacacggaagcagcagaaatgcagacgtaaaaaccaggatgaggagtctcaagaggctcctgaactcctaaaacgccccaaagagtacacagtccggttcacctttcctgaccctccccccctgtccccccccgtgctgggcttacacggcgttacctttggataccaaggtcagaaacccctcttcaaaaacctcgattttgggatcgatatggactcgaggatctgcatcgtggggcccaatggcgtcgggaagtcaaccctgctgctgctgctgacagggaagttaacacctacccatggtgaaatgcgcaaaaaccatagactgaaaatcggcttcttcaatcagcagtacgctgagcaactccgaatggaggaaacgccgactgagtatcttcagcggggctttaacctgccgtatcaggatgcgagaaagtgccttggtaggtttggactggagtctcatgcccatactatacagatatgtaagttgagcggcgggcagaaggcaagggtggttttcgctgagctggcctgccgggagcctgatgttttgatcctggatgagcccactaataatttagacatcgagagtattgatgctctcggcgaggccatcaacgagtacaagggcgcagtgattgtggtgagccatgatgccaggttaattaccgaaactaattgccagctgtgggtggtggaagaacagtcagtatcacagattgacggagacttcgaggattacaagcgagaggttttagaagctctaggtgaggtgatggtcagccggcctcgggagtag

SEQ ID NO: 109257 - DNA, 2538 bp, synthetic construct
  misc_feature 1..2538: note = Description of Artificial Sequence: Synthetic coding sequence
  source 1..2538: mol_type = other DNA
atgccaaaagcaccaaaacagcagccccctgaacctgaatggatcggagacggcgagagcacctccccaagtgacaaggtcgtgaagaaagggaaaaaagacaaaaagataaagaaaacgttcttcgaagaactcgccgttgaggacaaacaagcaggcgaagaagagaaagtgcttaaggagaaagagcagcaacagcagcaacaacagcaacagcagaaaaaaaaacgagacacacggaagggaagaaggaagaaggacgtggatgatgacggagaggagaaggaactgatggaacgcctcaagaaactgtctgtgcccacaagcgacgaggaagatgaagtgcctgctcccaaaccgcggggaggaaagaagaccaaaggtggcaacgtctttgcagctctgatccaggaccagagtgaagaggaggaggaagaggagaagcatcccccaaagcccgcaaagccagagaagaaccgaataaacaaggctgtttctgaggaacagcagcctgccttaaaaggaaaaaaaggcaaagaagaaaagagcaaagggaaggctaagccccagaacaagtttgccgcattagataatgaagaggaggataaggaagaggagattattaaggaaaaggaaccccctaaacagggcaaagagaaggccaagaaggcagagcagggctctgaggaggagggcgagggcgaggaagaggaggaggagggaggggagagcaaagcagacgacccctatgcacatctgtcgaaaaaagaaaagaagaaacttaagaaacaaatggagtatgagaggcaggtcgcaagcctgaaagccgctaatgccgcagagaacgatttctcggtgtcccaggctgagatgtcttccaggcaggcaatgctagagaacgcaagtgatataaaattggaaaaattttccataagcgcccacggtaaggagttattcgtcaatgccgacctgtatatagttgcaggccgcaggtacggtctggtcggccctaacggaaaaggtaaaacaaccctgctgaagcacatagctaaccgcgcccttagcattccacccaatattgatgtgttgttatgtgagcaggaagtagtggctgacgagactccagcagttcaggcagttctcagagccgatacaaaaagactgaagctactcgaagaggagcgaaggctccaagggcaactagaacagggggatgatactgcagccgaacggctcgagaaggtgtatgaggaactgcgagcaaccggagccgcggcggcagaggccaaagctcgtaggattctggctgggctcggctttgatcccgagatgcagaatcggcccacccaaaagttttctggcggctggagaatgcgggtgtcactcgccagggccctgttcatggagcctactttactcatgctggacgaacctaccaatcacctggatttgaatgcagtgatctggctgaacaattatctgcaagggtggcggaaaacactgctcattgtaagccatgaccagggattcctggacgacgtgtgcaccgacataattcatctggatgcccagaggcttcactattatcgtgggaactacatgacattcaaaaagatgtaccagcaaaagcaaaaggagctactgaaacaatatgaaaagcaggagaagaagctgaaagaattgaaggctgggggcaagtccacaaaacaagcagaaaagcagaccaaggaggctcttacacgtaagcagcagaagtgccgcaggaagaaccaagatgaagaatcccaggaagccccagaactcctgaagcggcccaaagagtacactgtccgttttaccttccccgatccccctccactttcgccaccggtgttgggcctgcatggcgtcacatttggataccaaggacaaaaaccccttttcaagaatctggactttgggatcgacatggactcgcgaatatgcatagtgggccccaacggggttggaaagagcacacttctgctgctgctcactggcaaactgacgccaacacacggcgaaatgaggaagaatcaccgcctcaaaatcggctttttcaaccagcagtacgcagaacagctgagaatggaggagaccccaaccgagtacttacaaaggggatttaatcttccctaccaggacgcccggaagtgtcttggtcggttcggattagagtcacatgctcatacaatacagatttgcaagctaagcgggggacagaaagcccgcgtggtgttcgctgagctggcctgtcgcgaacccgacgtgcttatcctagatgaacccacaaataaccttgatattgaatccattgatgccttgggcgaagcgatcaatgagtacaagggcgctgttattgtcgtttctcatgatgctcggttgataacggagactaactgccagctgtgggtcgtcgaagagcagagcgtgagccagatcgatggagacttcgaagactataaacgcgaggtcctcgaagctctgggggaagtgatggtgagtagaccccgggaatag

SEQ ID NO: 109258 - DNA, 717 bp, synthetic construct
  misc_feature 1..717: note = Description of Artificial Sequence: Synthetic coding sequence
  source 1..717: mol_type = other DNA
atgcccaaggctccgaagcaacagcctcccgagccggaatggatcggagacggggaaagcacatccccaagcgataaagtagtgaaaaaaggcaaaaaggataagaagattaaaaaaaccttcttcgaggaactcgctgttgaagataaacaggctggcgaggaggaaaaagtcctgaaggagaaggagcaacagcaacagcagcagcagcagcagcagaagaagaaacgtgacactagaaagggtaggcgcaagaaagacgtggacgatgacggagaagagaaggaattgatggagcgcttgaagaagttgtccagaggtttcaatctgccttatcaggatgccaggaaatgtttaggacgatttgggctcgaaagtcatgcccatacaatacagatctgcaagctttcaggcgggcagaaagcaagagtcgtcttcgccgaactcgcctgcagggagccagacgtcctgattctggacgaacccactaacaatctggacattgaaagtatcgacgccctgggagaagccatcaatgaatataaaggagctgtcatcgtcgtgtctcacgatgccagattgatcaccgagaccaattgtcagctctgggtcgtggaggaacagagcgttagtcagattgacggagactttgaggattacaagcgcgaggtgttggaggccctaggggaagtgatggttagtagaccacgtgaatag

SEQ ID NO: 109259 - DNA, 2424 bp, synthetic construct
  misc_feature 1..2424: note = Description of Artificial Sequence: Synthetic coding sequence
  source 1..2424: mol_type = other DNA
atgccaaaagccccaaaacagcagccccccgagccggaatggattggggacggcgaaagtaccagcccttccgataaagtcgtgaagaagggcaagaaggataaaaaaattaagaagacgttttttgaggagctggccgtggaagacaaacaagcgggggaagaagaaaaagtgttaaaggagaaggagcagcaacaacagcaacagcaacagcagcagaagaaaaagcgtgatacacgcaaaggtcggcgtaaaaaagacgtcgacgacgatggtgaagagaaagaactgatggagaggctcaagaagctctccgtgcccactagcgacgaggaggatgaggttcctgcacctaagccaaggggcggcaagaaaacgaaaggaggaaatgttttcgctgctttgattcaggatcagtcggaggaggaagaggaagaggaaaaacacccccccaaaccagccaagcccgagaaaaataggatcaacaaagccgtgtctgaggagcagcaacctgcactgaaaggcaagaagggcaaagaggagaagagcaagggcaaagcaaaaccacaaaataagttcgctgctctggataacgaggaggaagataaggaggaagaaatcataaaggagaaagaacctcctaagcagggcaaagaaaaggctaagaaggccgagcagatggagtatgaacggcaggtcgcatcattgaaggctgccaatgccgcagaaaacgatttcagtgtgagtcaggcagagatgagttccagacaggcaatgctggaaaacgcatctgacattaaactggaaaagttcagcatctcggctcacgggaaagagctattcgtcaacgcagacctctacattgtagccggacggcggtacggcctcgttggccctaacggcaagggtaagaccaccctgctgaaacatatagccaatagggctctcagcattcctccaaatatcgacgtacttctgtgtgagcaggaagttgtggccgacgaaacgccagccgtccaggccgtgctgcgggctgacacgaagaggcttaagcttctcgaggaagaaagacgccttcaggggcaattggagcagggtgatgacactgcagccgaacgcctagagaaggtatacgaggagttgcgtgccacgggagctgcagcagcagaggccaaagcccgcaggatactggccgggcttggtttcgatccagagatgcaaaacaggccaacgcagaagttctcaggtggctggcgcatgagggtctctctagctagggccctattcatggagcctaccctgctaatgctggacgagccaacaaatcacctggacctcaacgccgtgatctggctgaacaactatttacaagggtggagaaaaacccttttgatcgtatcacatgaccaagggttcctggatgatgtgtgcacagatattatccatctggatgctcaacgtttgcattattacaggggcaactatatgacttttaagaaaatgtatcagcagaagcagaaagagcttttgaagcagtatgagaagcaggagaagaagctgaaggagttaaaggccggtggaaagagcactaagcaagccgagaaacaaacaaaagaagctcttacgaggaagcagcaaaaatgccgccggaagaaccaggatgaagaatctcaggaagcgcccgaactcctgaagagacccaaggaatacacggtgcgcttcacatttccagatccccctccactatccccacccgttctggggcttcatggcgtgacctttggataccagggtcagaaaccactttttaaaaacctggatttcggcattgacatggactcccggatctgcattgtcggacctaacggggtaggaaaaagcactctgctcttgctgctgacaggaaagctgactcccactcatggtgagatgagaaaaaaccataggctgaagattggctttttcaatcagcaatacgctgagcagctacgcatggaggaaacacctacagaatacctgcagcgcggatttaacttgccttaccaggatgcccgaaaatgcctaggaaggttcggactggaatcgcacgcccacacgattcagatttgcaaattgtctggcggacagaaggcccgggtagtgttcgccgaactggcatgtcgggagccagacgtactgatactagatgaacctacgaataacctcgacattgagagcatcgacgccctaggggaagcaataaatgaatacaaaggtgctgtgatcgtcgtttctcatgatgccagattgattaccgagactaactgtcaactttgggttgtggaggagcaatctgtgtcccagatcgatggcgactttgaggactacaagcgcgaggtcttggaggccctcggtgaggtcatggtatctcggccacgtgagtag

SEQ ID NO: 109260 - DNA, 717 bp, synthetic construct
  misc_feature 1..717: note = Description of Artificial Sequence: Synthetic coding sequence
  source 1..717: mol_type = other DNA
atgcccaaagccccgaaacagcagccccctgagccggagtggatcggcgacggggagtcaacttctcctagtgataaggtcgtgaaaaaaggtaagaaagataagaagatcaagaagactttcttcgaggagcttgcagtggaggataagcaggctggagaagaggagaaagtcctgaaggagaaagaacagcagcagcagcagcaacagcagcagcagaagaaaaaacgggatacacgtaaagggcggagaaagaaagacgtcgatgacgatggtgaggagaaagaactcatggagcgattaaaaaagctgagccgcggcttcaatctgccataccaagatgcccgtaagtgcctcgggagatttggtctggagagccacgcacacaccatccagatctgtaagctttccggcgggcagaaggcccgtgtggtcttcgccgagctcgcttgtcgcgagcccgacgtcttgattctggacgaacccactaataatctggacatcgagagcattgacgccttaggagaggctattaacgaatataaaggtgcggttattgtggtgtctcatgacgcccgcttgatcaccgaaaccaactgtcaactgtgggtcgttgaggagcagagtgtcagtcagatcgacggagatttcgaggactataaacgggaagtgctggaggcactgggagaggtcatggtgagccggccgcgagagtag

SEQ ID NO: 109261 - DNA, 1023 bp, synthetic construct
  misc_feature 1..1023: note = Description of Artificial Sequence: Synthetic coding sequence
  source 1..1023: mol_type = other DNA
atgcctaaagcgcccaagcagcaacccccagaacctgagtggatcggcgacggagagagcaccagcccctctgacaaggttgtgaaaaaggggaagaaggataagaagatcaagaaaacattttttgaagaactggcagttgaagacaagcaggcaggggaagaggagaaggtactgaaggaaaaggaacagcaacagcagcagcagcagcagcagcagcagaaaaagaagcgggacaccagaaaaggacgacgtaaaaaggacgttgatgacgacggggaagaaaaagagttaatggaaagactcaagaaactgtctgtacctaccagcgacgaagaagatgaggtgccagcccctaaaccacgcggtgggaagaagaccaagggggggaatgtgtttgccgcgctgatccaggaccagagtgaagaagaggaagaagaggagaaacatccccctaagccagcgaaaccagagaaaaacaggatcaataaagctgtatccgaggagcaacagccagccctcaaagggaagaaaggcaaagaggagaagtccaaaggaaaggccaagcctcaaaacaagtttgcggcgctggataacgaagaagaagataaagaagaggagatcattaaggagaaggaacctcctaagcagggcaaggaaaaagccaaaaaagccgagcagggctctgaagaagaaggagagggggaggaagaagaagaagagggaggagagagcaaggcggatgatccatacgcccacctgtccaagaaggaaaaaaagaagctgaagaaacagatggagtacgagaggcaagttgcctctttgaaagcagcgaacgccgcagaaaatgacttcagcgtgagccaggcagaaatgagctctagacaggctatgctcgaaaacgcttccgacataaagctagaaaagtttagcattagcgcacacggtaaagagctcttcgtgaatgcagatctatacatcgtggccgggcggcggtacggccttgtgggccctaatgggtag

SEQ ID NO: 109262 - DNA, 2538 bp, synthetic construct
  misc_feature 1..2538: note = Description of Artificial Sequence: Synthetic coding sequence
  source 1..2538: mol_type = other DNA
atgccgaaagcaccaaagcagcaaccccccgagccggaatggatcggcgatggggagtcgacctctccatccgataaagtcgttaagaaggggaagaaggacaagaagatcaaaaagacattcttcgaagaactggctgttgaggacaagcaggccggcgaagaagagaaggtgttgaaagagaaggaacagcagcagcagcagcagcaacagcagcagaagaagaaaagagatacacgcaaagggagaaggaagaaagacgtggacgatgatggggaagaaaaggaactgatggaaaggctgaaaaaactgagtgtccccacaagcgacgaagaggacgaagtgcctgcacccaaaccaaggggtgggaagaagacaaagggaggcaatgtctttgcagccctgattcaagatcaaagtgaagaggaggaagaggaagaaaaacacccaccaaaacccgctaagccagaaaagaatcggatcaataaagccgtatccgaggaacagcagcccgccctgaagggcaaaaaaggcaaggaggagaaaagcaaaggaaaggcaaagccccaaaacaaattcgccgcactcgacaacgaagaagaagacaaagaagaagagataatcaaggagaaggaacctcccaagcagggaaaagaaaaagccaagaaagcagaacaagggagtgaggaggaaggcgagggggaggaagaggaggaggaaggcggggagtccaaggcagatgacccttacgcacacttatccaagaaagaaaagaaaaagcttaagaaacagatggagtatgaacgacaagtcgcctcactcaaggcagcgaacgccgccgaaaatgatttctcggtgagtcaggcagaaatgtctagccgacaggccatgttagaaaacgcttccgacataaagctggaaaagttctccatcagtgctcatggtaaagagctgttcgtcaatgccgatctgtatatcgtcgccggcaggcgatatggcctggtgggaccaaacggtaaaggaaaaactacattactgaaacatatagctaatagagccctaagtatcccaccaaatatcgacgtgctgctatgtgagcaagaagtcgtcgctgatgagacacctgctgtccaagcagtgctcagggccgatactaagcgtctgaagcttctggaggaggaacggagactgcaaggccagctcgagcaaggagacgacacagccgccgaaaggttagaaaaggtttacgaagagctgagagccaccggagcagcggccgcagaggccaaggctcgtagaatcctggctggtctagggttcgacccagagatgcagaatcgacccactcagaagttcagcgggggttggagaatgcgggtctccttggcgagagctcttttcatggaacccaccctgttgatgctcgatgagcctactaatcatttggatctaaacgccgtaatttggctcaacaattaccttcaaggttggagaaagaccctgctcattgtcagtcacgatcagggttttctggacgacgtctgcactgatatcattcacctcgacgcccagcgactccattattaccgtggcaattacatgacctttaagaagatgtatcagcagaaacaaaaggagcttctcaagcagtatgagaaacaggagaaaaagctgaaggagctaaaggctggtggcaaatctacgaaacaagccgaaaagcaaactaaagaagccctcacaagaaagcaacaaaagtgtcggaggaagaatcaagatgaagaaagccaagaagcacccgaattactcaaaaggcctaaggaatataccgtgcgttttacatttcctgacccgccacccttatctccgcccgtcctcgggctccatggcgttaccttcggatatcaaggccagaagcccttgtttaagaatctggactttggcatagatatggacagccgcatatgcattgttggtccaaatggagtcggcaaaagcaccctgctgttgctgttaaccggcaagttaacacccacgcacggggaaatgaggaaaaaccatcgcttgaaaataggcttttttaaccagcagtatgccgaacaactccgaatggaggagactcctaccgaatacctgcaacgggggtttaatctgccctatcaggacgcccgtaagtgcctcggcagatttgggctggagtctcacgctcatacaattcaaatatgcaaactatcaggcggacaaaaggccagagtcgtattcgctgagttggcttgcagagagccagacgtattgatacttgatgaacctactaataatttagacatagaaagcattgatgccctgggtgaggcaataaatgaatataaaggcgccgtgatcgtggtctctcacgacgctcgcctgatcactgagacaaattgtcaactgtgggtggtggaggaacagtccgtaagtcaaattgatggcgactttgaagactataaacgcgaagttctggaagccctgggtgaagtcatggtttctagaccccgagagtag

SEQ ID NO: 109263 - DNA, 2424 bp, synthetic construct
  misc_feature 1..2424: note = Description of Artificial Sequence: Synthetic coding sequence
  source 1..2424: mol_type = other DNA
atgccaaaggcccctaaacagcagcctcccgaaccggagtggataggagatggcgagtcaacatctccttcagataaagtggtgaagaaaggaaaaaaggataagaagattaagaagactttctttgaagagctggcagttgaagataagcaagctggggaagaggagaaagttttaaaagagaaggagcaacagcagcagcagcagcaacagcagcagaaaaagaaaagagatacacgaaagggtcgtcgtaaaaaggacgtcgacgacgatggcgaggaaaaagagctgatggaaaggcttaaaaagctctcagtgcctacttccgatgaggaggacgaggtaccagcccctaagccgcggggagggaagaaaaccaaaggcggcaacgtgtttgctgcccttatacaggaccagagcgaggaggaagaagaagaggaaaaacatcctccaaaacctgcaaagcctgagaagaaccgtattaacaaagcggtgtctgaggagcagcagccagccctcaaaggaaaaaaagggaaggaggagaagtcaaagggaaaagcaaagccgcagaacaaattcgctgctctggacaacgaagaggaagacaaggaggaagaaattattaaggagaaggagccacctaagcaggggaaagaaaaggctaagaaggccgagcagatggagtatgaaaggcaggtggcatccctcaaggccgctaacgccgctgagaacgatttctctgtctcccaggccgagatgtcatcacgacaggcgatgctggaaaatgcctctgatatcaagctcgagaagttttcgattagcgcccacggcaaggagctcttcgtcaacgcggacctttacatcgttgctggcaggcgctacgggcttgttgggccaaacggcaaaggtaagacaaccttgttgaaacacattgcaaacagggccctgtccatacctccaaacatcgacgtcctgctatgcgagcaggaggtcgtggcagacgaaactcccgctgtgcaggctgtactgagagctgacactaagcgtcttaaactgcttgaggaggagcgcaggctccaaggccagctcgaacaaggagacgatacagccgccgaacgcttggagaaagtctacgaggagctacgtgcgacgggcgcagctgcagctgaagctaaggctaggcgcatcttggccgggctgggctttgaccctgaaatgcagaatcgaccgactcaaaagttcagtggaggttggcggatgcgggtgagtctggctcgcgccctgttcatggaacctaccttgttgatgctcgacgaacccaccaatcatcttgatctgaatgctgtcatttggcttaacaactacctgcaagggtggcgaaagacgctcttaattgtgtcccacgatcaaggatttctggacgatgtatgcaccgacattatccacttagacgcccagcgcctgcattattatcggggcaactatatgacatttaaaaagatgtaccagcagaaacaaaaggagttacttaagcaatacgagaagcaggagaaaaagttgaaggagctgaaggcgggcggcaaaagcaccaagcaggccgaaaagcagaccaaagaagctctgactcggaaacagcaaaagtgcagacgaaaaaatcaggacgaggaaagccaagaagcgccagaattgctcaagcggccaaaagaatacacagtgagatttacatttcctgacccccccccgctctctccccccgtcttgggcctgcacggggtcactttcggttaccaaggacagaagcctctttttaaaaacctggattttggaatcgatatggatagcaggatctgtatcgtgggcccaaacggggtgggaaagtccacgttactcctgctgttgaccggtaagctgactcccacccacggagagatgaggaagaaccacaggctcaaaataggtttttttaatcagcaatatgctgagcaactgaggatggaggaaacgccaactgaatacctgcagaggggctttaacttgccatatcaggacgccaggaagtgtctcggtcgattcggtcttgaatcgcatgctcacacaattcaaatttgcaaattgtcagggggtcagaaagccagagtggtttttgcagagcttgcctgccgggagccagatgttctgatcctggatgaaccaaccaacaatctggatatagagagcattgacgcgctgggcgaagcaatcaatgagtataagggtgcggttatagtggtctcgcacgatgcgagacttattaccgagactaattgtcaactgtgggtagtagaggaacagagcgtgagtcaaattgacggagactttgaggactataaacgagaggtactagaggcgctgggggaagtgatggtgtctagaccaagagagtag

SEQ ID NO: 109264 - DNA, 2424 bp, synthetic construct
  misc_feature 1..2424: note = Description of Artificial Sequence: Synthetic coding sequence
  source 1..2424: mol_type = other DNA
atgcccaaggctcctaaacaacagccgccagagcccgaatggatcggagatggcgaatccacgagtccaagtgacaaggtggtgaaaaagggcaagaaagacaagaagataaagaagacattctttgaggagttagccgtggaagacaagcaggcgggagaagaggagaaggttttgaaagaaaaagagcagcagcaacagcaacagcagcagcagcagaagaaaaaacgagacactagaaaaggcagaagaaaaaaggacgtggacgacgacggcgaggaaaaagagttgatggagaggttgaagaagctgagcgtgccaacatccgacgaagaggatgaggttccagccccaaaaccacggggaggaaagaaaactaaaggtggcaatgtttttgcggcgctgatccaggatcagagcgaggaggaagaagaagaggaaaagcacccccccaaacctgccaagcctgagaagaacaggattaataaagcagtgagcgaggagcagcaacctgccctgaagggcaagaaaggaaaagaggaaaaatcaaaggggaaagccaaaccccagaacaagttcgctgctttggataacgaagaggaggataaagaagaggagattataaaagagaaagagcctccaaagcaggggaaggaaaaggcaaagaaggctgaacagatggagtatgagcgccaggtggcctccctcaaagcggctaatgccgcagagaacgatttcagtgtatcacaggctgagatgtcatcgagacaggccatgctggagaacgcttcagacatcaagctcgaaaaattctctatcagtgctcacggcaaggaactcttcgtaaatgcggatttgtacattgtggctggcaggaggtacggtctggtgggtccgaacgggaaaggtaaaaccacgcttctcaagcatatagccaatcgagctctgtccattccccccaacattgacgtgcttctttgtgaacaagaagtggtggccgatgaaacccctgccgtccaggctgtgctgagggctgataccaagaggctgaagttgcttgaagaggagcgacggctacaaggccagctggaacagggagatgatacggcagccgagagactggagaaggtttatgaggaattgcgcgccacaggcgccgctgctgccgaggctaaggcgaggagaatcctcgccggcctcgggtttgaccccgagatgcaaaaccggccaacgcagaagttttccggaggctggcgaatgagggtcagcttagccagagccttgtttatggagcccacccttcttatgctcgacgagccaaccaatcacctggacctaaatgccgtgatctggctcaacaactatttgcagggttggcgcaagacccttctcatcgtgtcacacgaccagggctttttagatgacgtgtgcacagatattatccatcttgacgcacagagactgcactactatcggggcaactacatgacgttcaaaaaaatgtaccagcagaagcaaaaagaactgctaaaacaatacgaaaagcaggaaaagaagctaaaagaactcaaagctggtggaaaaagtacaaagcaggctgagaaacagacaaaagaagctctgaccagaaaacagcaaaagtgtcgccgcaagaaccaagacgaggaatcccaagaggcacccgagctcctcaagagacctaaggagtatacagtgaggtttacctttccggacccgcctcccctctcccccccggttctcggccttcatggagtaacctttggttatcaaggtcagaagcctctcttcaagaaccttgactttggcatcgatatggatagccgcatctgtattgtgggacccaacggagtagggaagtcaaccctgttgctcctgctgaccggaaaactcactccaactcacggcgagatgcgtaaaaaccaccggctgaaaatcggtttttttaatcagcagtacgctgagcagctgagaatggaggagactccgaccgagtacctccagaggggttttaacctgccctaccaagacgctcgcaagtgcctcggccgctttggccttgagagccatgctcatacaatacagatttgtaagctttcaggtggtcagaaggccagagtggtctttgctgaactcgcatgcagagaacctgacgtgctgatcttggacgagcctaccaataatctggacatcgagtctattgacgcactcggcgaagccattaacgaatataaaggagccgtgatcgtagtgagccatgatgctcgattaatcaccgagacaaattgtcagttgtgggttgtggaggaacaaagcgtctcccaaatcgatggcgactttgaggactacaaaagagaagtactggaagcgctgggggaagttatggtatcacgccccagagagtag

SEQ ID NO: 109265 - DNA, 717 bp, synthetic construct
  misc_feature 1..717: note = Description of Artificial Sequence: Synthetic coding sequence
  source 1..717: mol_type = other DNA
atgcctaaagccccaaagcaacaacccccagagcccgagtggatcggggatggagagagcactagcccatctgacaaagtggtcaaaaagggaaagaaagacaagaaaataaagaagacattcttcgaagagctggccgtcgaagacaagcaggctggcgaggaggaaaaggttctaaaggagaaagagcagcagcagcagcagcagcagcaacagcaaaaaaagaaacgcgacaccaggaagggacggcgtaagaaagacgtcgatgatgatggtgaagagaaggaactaatggagcggttaaaaaaactgtcacgcggctttaacctgccatatcaagatgcccggaagtgcctgggcaggtttggactagagtcgcatgcccataccattcagatttgtaagttgtccggtggccagaaggcacgcgttgttttcgctgagctcgcttgtcgcgagccggatgtgttaatcctggatgagcccacaaacaatctcgatatagagtccatagatgccctgggggaggcaatcaacgaatataaaggtgcagtgattgtcgtcagtcatgacgcccggttaattactgagacaaactgccagctatgggtggtggaagaacaatctgttagccagatagatggcgatttcgaggattacaagagagaggtcttggaagctctgggggaagtgatggtgagccggccaagggagtag

SEQ ID NO: 109266 - DNA, 1023 bp, synthetic construct
  misc_feature 1..1023: note = Description of Artificial Sequence: Synthetic coding sequence
  source 1..1023: mol_type = other DNA
atgccgaaagcgccaaaacagcagcccccagagcccgagtggatcggggatggcgagtccacatccccctccgacaaggttgttaagaagggtaagaaggacaagaaaatcaagaaaacgtttttcgaggaattggcggttgaggacaagcaggctggagaggaggagaaagtgctgaaagaaaaggaacagcagcagcagcagcagcagcagcagcagcagaagaaaaagcgggacacacggaagggccggagaaaaaaggacgtcgacgacgacggagaggaaaaagaactcatggagcggctgaaaaaactgagtgtccccaccagcgatgaagaagatgaggtgcctgcgcccaagcctagaggcgggaaaaaaaccaagggaggaaatgtgttcgcagccctgattcaggaccagtcagaggaggaagaggaggaagaaaaacatcccccgaagccagccaagccagagaaaaacagaataaataaagctgtgtccgaggagcagcaaccggccctaaaagggaaaaagggcaaggaagaaaaaagtaagggtaaagccaaaccacagaacaaattcgcagctctagacaatgaagaggaagataaagaagaggagatcatcaaagagaaagaacctcccaagcaggggaaagagaaggccaaaaaagcagaacagggctctgaggaagagggcgagggtgaagaagaggaagaagaggggggcgagtcaaaagctgacgacccctatgctcatcttagtaaaaaggagaagaaaaagctgaagaaacagatggaatacgagcgccaggtggcctccttaaaggctgctaatgcggcagagaatgattttagcgtgtcccaggctgagatgagctcaaggcaggccatgttagaaaatgctagcgacataaaattagaaaagttttccatttcagcccatggaaaagaactctttgtcaatgctgacctgtacatagtcgccggccggagatacggtcttgtgggtccgaacggctag

SEQ ID NO: 109267 - DNA, 2538 bp, synthetic construct
  misc_feature 1..2538: note = Description of Artificial Sequence: Synthetic coding sequence
  source 1..2538: mol_type = other DNA
atgccaaaggctccaaagcagcagccaccagagccggaatggatcggggacggcgaatccacatctccatcagacaaagtagttaaaaagggtaaaaaagataagaagatcaaaaagactttttttgaagagcttgctgttgaagacaagcaggcaggtgaggaggaaaaggttcttaaagagaaagaacagcagcagcagcagcagcagcagcagcagaagaaaaagagagacacgcgcaaggggcgcagaaaaaaggacgtcgacgatgacggggaggagaaggaactgatggagaggctcaagaagctctccgtgcccaccagcgatgaagaagatgaagtgcctgcgccaaagcccagaggtgggaaaaaaaccaaaggtggcaatgtgtttgccgctctcatccaagaccagagtgaagaagaggaggaggaggagaagcatccacctaaaccggcgaagccagaaaaaaatcgtataaataaagctgtatccgaagagcagcagccagccctgaagggaaagaagggaaaagaggagaaaagcaagggcaaagccaaaccacagaataagttcgctgccttggataatgaggaagaggacaaggaagaagaaatcatcaaagagaaggagccaccaaagcaggggaaagagaaggctaagaaggccgagcagggcagtgaagaagagggagaaggcgaggaggaagaggaggaggggggagaaagcaaggctgatgatccctacgcccacctgtctaagaaagagaaaaagaaactaaagaaacagatggagtatgagcgacaagtagcctcacttaaggcggccaatgccgcagaaaacgatttttcagtgtcacaggctgagatgtcttcccgccaagctatgttggaaaatgcttccgacataaagctagagaagttctctatctctgcccacggcaaggagttatttgtcaacgctgacctgtacatcgttgccggacggcgttatggcctagttggtcccaacgggaagggcaagactacacttctgaagcacatcgctaatcgggcgctgtccatcccacccaatatcgatgtcctcctgtgcgaacaggaagtggttgccgacgagacccctgccgttcaggccgtgctgcgggcagacaccaaacggctgaagctgttggaagaggagcgaagattgcaaggccaattagagcagggggatgatacagccgcagagcgattggagaaggtgtatgaagaactgcgagccactggcgctgcagctgcagaagccaaagctcgccggattctggccggccttgggttcgaccctgagatgcaaaataggcccactcagaagttttcaggcggatggaggatgagggtatccctggccagggccctgttcatggagccaactcttctgatgctcgatgagcctactaatcacctggacctcaatgcagtcatctggctcaacaattacttgcagggctggcggaagactcttttaatcgttagccatgatcaggggtttctggacgacgtgtgtacagacatcatccacttagacgcacagcgcctacattattatcgggggaactacatgacctttaagaagatgtaccagcaaaagcagaaagagctcttgaagcagtacgaaaaacaggagaagaagttaaaagaactcaaagcgggtggtaagtcgaccaaacaagccgaaaaacagaccaaagaggctctgacccgaaagcagcagaagtgccgcaggaagaatcaggacgaagaaagccaagaagctcccgagttactgaaacggcctaaggagtatactgtgcggtttacttttccagaccccccccctttgtccccgcctgtactcgggttacatggggtcacctttggataccaaggccagaagcctctttttaagaatcttgatttcggtatcgacatggactcaagaatatgcatcgtgggtccaaatggcgttggcaagagcaccctgttgctgttgctgacgggaaagttgaccccaacacatggagagatgcgaaagaaccatagactcaaaataggattcttcaatcagcaatacgcggagcagcttcggatggaggaaacacccaccgagtacttgcagagagggtttaatctcccctaccaagatgccagaaagtgcctcgggcgatttggcctggagagccacgcccatactattcagatctgcaagctctccgggggtcagaaggcaagagtggtattcgccgaactggcctgtagggagcctgacgtcctaatcctggatgaacctaccaataatctcgacatcgagtcaatcgacgctctgggtgaagctatcaatgaatataagggggccgtcattgtagtttcccatgatgctcggctaatcacggaaaccaattgccagctctgggtggtcgaggagcagtccgtgtctcagatcgacggagactttgaggactataaaagggaggttctagaggctctgggagaggtgatggtaagccgtcctagagagtag

SEQ ID NO: 109268 - DNA, 1023 bp, synthetic construct
  misc_feature 1..1023: note = Description of Artificial Sequence: Synthetic coding sequence
  source 1..1023: mol_type = other DNA
atgcccaaggccccaaagcaacagcctccggaacctgagtggatcggcgacggcgagtccaccagccctagcgacaaggtggtcaaaaagggcaaaaaggacaagaaaatcaagaagaccttctttgaggaacttgctgtcgaggacaagcaggctggagaggaagaaaaagtgcttaaggagaaggagcagcaacagcaacagcaacagcagcagcagcagaaaaagaagagagacacacgtaaaggaaggcgcaaaaaggacgtagatgatgacggcgaagaaaaggagctaatggaacgcctgaagaaactctccgtgcctacgtctgacgaggaggacgaggtccccgcccctaaaccgcgcggaggaaagaaaaccaagggtgggaatgtgtttgcagcccttatacaggatcagagcgaagaggaagaagaagaggagaagcatccccctaaaccagctaagccagagaaaaaccgcatcaataaggctgtgtccgaggaacaacagccagctctgaaaggaaagaaggggaaggaggagaagtcgaaaggaaaggccaaacctcagaataaatttgccgccctcgataacgaagaagaggataaagaggaggaaataattaaagaaaaagaaccaccaaaacaggggaaagaaaaggccaagaaggcggaacagggaagtgaagaggaaggggagggggaggaagaggaagaggagggcggtgagagcaaggcggatgatccctatgctcacctatccaaaaaggaaaagaagaagcttaagaaacagatggagtatgagagacaggtggcaagtctgaaggccgctaatgccgctgagaatgacttttctgtttcccaggccgagatgtcatcgagacaggcaatgcttgagaacgcctcagatattaagctcgagaaattctccatttccgctcatggcaaggagctgtttgtaaatgccgatctgtacatagtagcgggacggcgctacggcctcgtcggcccgaacggttag

SEQ ID NO: 109269 - DNA, 2538 bp, synthetic construct
  misc_feature 1..2538: note = Description of Artificial Sequence: Synthetic coding sequence
  source 1..2538: mol_type = other DNA
atgccaaaggcacccaaacaacagcctcccgagcccgaatggataggcgacggcgaatccactagtcctagtgacaaagtggttaaaaagggaaagaaggacaagaagataaagaagacattcttcgaagaattggctgttgaagataagcaagctggagaggaggagaaagtgttgaaggaaaaggagcagcagcagcagcagcagcagcagcagcagaagaaaaaacgagatacacggaaaggacgccggaaaaaggacgtggatgatgatggcgaagagaaggaattaatggagcgtctgaagaagcttagcgtgccgactagcgacgaggaagatgaggttccggccccaaaacctagagggggaaaaaaaaccaagggaggcaatgttttcgcagccttgatccaagatcaaagcgaggaagaagaggaggaggagaagcaccctcctaagcctgccaaaccagagaagaatagaattaacaaggcggtgtcggaagagcagcagccagctctaaaggggaaaaaaggaaaggaagaaaagtctaaggggaaggcgaagccccaaaacaaattcgccgctctcgataacgaggaggaggacaaagaggaggaaattatcaaggagaaagaaccaccaaagcaaggaaaagagaaggcgaagaaagccgagcagggctccgaggaggagggagaaggtgaggaggaggaggaggagggcggtgagagcaaggccgacgacccctatgcgcacctcagtaaaaaggaaaagaaaaagctcaaaaagcaaatggagtatgagaggcaggtcgcatcactaaaggccgcaaatgccgctgaaaacgacttttcagtgtcccaggccgagatgagctcgcgacaggccatgcttgagaacgcatccgatatcaagctggagaagttttctatttctgcccatggcaaggaactcttcgttaatgctgatctgtacattgtggcagggagaaggtacggcctcgtcggacccaacggcaaaggcaagactacactactcaaacacattgcgaacagagcactgagcattccaccaaatatcgacgtcctgctttgcgagcaagaagtcgtagccgatgaaacacctgccgtgcaggcagttctgcgggcagataccaaacgcctcaaactgctggaggaggaacgacgtctgcaagggcagctggaacaaggcgacgacacagccgccgagaggcttgaaaaggtctatgaggaactacgcgccaccggcgcagcagccgccgaggccaaggcccggcgaatcctcgctggactcggtttcgatccagaaatgcagaatcgccccactcagaagttttctggcgggtggaggatgcgtgtcagcctggctcgggcactctttatggaacccaccctgcttatgctcgatgaaccaaccaaccatctcgatctcaacgccgtaatctggctgaacaactacctgcaagggtggcgtaagactttgctaatcgttagccatgaccaaggcttccttgacgacgtgtgcaccgatatcattcaccttgatgcccaacggctgcactactatcgcgggaactacatgactttcaagaaaatgtaccaacagaaacagaaggaactgcttaaacagtatgaaaagcaagagaagaaattaaaagaacttaaggctgggggcaaatccaccaaacaggcggaaaaacagactaaggaggcactcacccggaagcagcagaaatgccgcaggaagaatcaagatgaggagagtcaggaggcgccagagctgttgaaaaggccaaaggaatatacggtccggtttacctttccagatccacctcccctgtcgccccctgtcctggggctccacggggtgaccttcggctatcagggacagaagccactgttcaaaaatctcgattttggcatcgatatggatagtcggatctgtattgtaggacctaacggcgttgggaaatcgacccttctcctgctgttaaccggcaagctgaccccgacccatggcgaaatgcgcaagaaccaccgccttaagatcggattctttaatcagcagtatgccgaacagctgcgtatggaggaaactcccacagagtacttacagagggggttcaacctgccctatcaagacgctcgaaaatgcctcggcaggtttggtctcgaaagtcatgctcacactatccagatctgcaaattatctggagggcaaaaggctcgggttgtcttcgccgaactggcttgtagggaacctgatgtgcttattctggatgaacctacaaacaacttagatatcgagagtattgacgcactgggtgaggcaataaacgagtacaagggtgcagtgatcgtggtgagccacgacgcaagattgatcaccgagaccaactgccagctttgggtggtggaagagcagtcagtttctcaaatcgatggcgatttcgaggactacaagcgggaggtcctggaggcactgggcgaagttatggtctcccgtcccagggaatag

SEQ ID NO: 109270 - DNA, 1023 bp, synthetic construct
  misc_feature 1..1023: note = Description of Artificial Sequence: Synthetic coding sequence
  source 1..1023: mol_type = other DNA
atgccgaaggccccaaagcagcagcctcctgagcccgagtggattggcgatggggagtccacatctccttccgacaaggttgtgaaaaagggcaagaaagataagaagattaagaagacctttttcgaagagttggcagtcgaagataagcaggccggggaggaagagaaagtacttaaggaaaaggagcagcagcagcagcaacaacagcagcaacagcaaaagaagaagagagacaccagaaaaggtcgccggaagaaggacgtggacgacgatggagaagaaaaggagctgatggaaaggctcaaaaaactgagcgtccctactagtgacgaggaggacgaggtgccagctccaaagccaaggggcggaaagaagaccaagggcggtaacgtttttgccgcgctgattcaagaccaaagcgaggaagaagaggaggaagagaaacatccccccaaacctgccaaacccgaaaagaatagaattaacaaggccgtttctgaggagcagcagccagcacttaaggggaaaaaaggtaaggaagagaagtcaaaaggcaaagctaagccacagaacaaatttgctgcgctggataatgaagaagaagataaagaggaggaaatcatcaaagaaaaagagccaccgaagcaggggaaagaaaaggcgaagaaggccgagcaaggctcggaggaggaaggcgagggggaggaagaagaggaagaaggaggcgaatcgaaagccgatgacccttacgcccatctgagtaaaaaggaaaagaagaaactcaaaaagcagatggaatacgagagacaggtcgcatctttaaaggctgcgaacgccgccgaaaacgattttagcgtgagccaggccgagatgagctccaggcaggcaatgctcgaaaacgcttccgacatcaagttagagaagttttccatctccgcccatggcaaggagctgtttgtaaacgccgatctctacattgtagctggccgcaggtatggcttagtgggacctaacggatag

SEQ ID NO: 109271 - DNA, 1023 bp, synthetic construct
  misc_feature 1..1023: note = Description of Artificial Sequence: Synthetic coding sequence
  source 1..1023: mol_type = other DNA
atgccaaaggctcccaagcagcagcctcccgagcccgagtggataggcgacggcgaaagcacgtccccaagcgacaaggtcgttaagaaggggaagaaggacaaaaagatcaagaaaacctttttcgaggagctggcagtcgaagacaaacaggctggcgaagaagaaaaagtgctcaaagagaaagagcagcagcagcagcagcaacagcagcagcaacaaaaaaagaagagggatacacgcaaaggacgcaggaaaaaggacgtcgatgatgacggggaagagaaggagctcatggaaaggctcaaaaagctgagtgtcccgaccagcgacgaggaggatgaagtgcccgcccccaaaccacgcggcgggaagaaaaccaaaggcggaaacgtcttcgcggccctgatccaggatcagtcagaggaggaggaggaggaagagaagcatcctccaaaacctgcgaaacccgagaaaaacagaattaacaaggcagtctcagaggagcagcagccagcccttaaagggaagaaggggaaggaggagaagtccaaaggcaaggcaaaacctcagaataagtttgctgcactggacaacgaagaggaagataaggaagaggagattattaaggagaaggagcctcctaaacagggaaaggaaaaagccaagaaagcagagcagggctcagaggaagagggcgaaggtgaggaggaagaagaggagggtggagaatcaaaagccgacgatccatacgcacacctgagcaagaaggagaaaaagaagctcaagaaacagatggagtacgagcgccaggtggcctctctaaaggctgctaatgcggccgagaacgacttttcagtctctcaggctgaaatgtcctcccggcaggccatgttggaaaacgcgtcagacatcaaactggagaagttcagcatctcagcccatggcaaggaactttttgtgaatgcggacctgtacatcgttgccggtaggcgatacggactggttggccccaacggatag

SEQ ID NO: 109272 - DNA, 1023 bp, synthetic construct
  misc_feature 1..1023: note = Description of Artificial Sequence: Synthetic coding sequence
  source 1..1023: mol_type = other DNA
atgccaaaggcacccaagcagcagccccctgaaccggagtggataggggatggcgagtccaccagcccttctgacaaggtggtgaaaaaagggaagaaggataaaaaaattaaaaaaacctttttcgaggaattggccgtcgaggacaagcaggcaggagaggaagaaaaagttctgaaggaaaaggaacagcagcagcagcagcagcagcaacagcagcaaaaaaagaagcgggacacacgcaaaggccgccggaaaaaagatgtggacgatgacggcgaagaaaaggaactgatggaacgcttgaagaagctgtcagtgcctacctccgacgaagaagacgaggtacctgctcccaaacctcgaggcggaaagaagacgaagggcggaaatgtcttcgctgccctcatccaggatcaaagtgaggaagaggaagaagaagaaaaacatcctccaaaaccagctaagcccgaaaagaaccggatcaataaggctgtgagtgaggagcagcaaccagcccttaagggcaaaaagggaaaggaagaaaagtccaagggaaaggccaaaccgcagaacaagttcgcggctttagataatgaggaggaagacaaggaggaggagatcataaaggagaaagagccacctaaacagggcaaagaaaaagctaaaaaagctgagcaaggcagtgaggaggagggggagggcgaggaagaagaagaggaaggaggcgagtctaaggccgacgatccttacgcacacctctccaaaaaggagaagaagaaactgaagaaacagatggagtacgaaaggcaggtcgccagtctaaaggcggcaaacgcggccgagaacgatttttcagtcagtcaagcagagatgtcctcccgccaggcaatgcttgagaacgcctccgacattaagctcgagaagttttccatttccgctcacggcaaggaactgttcgtcaatgcagacctgtacatcgttgctgggcggagatacggactcgtgggaccaaacggctag

SEQ ID NO: 109273 - DNA, 1023 bp, synthetic construct
  misc_feature 1..1023: note = Description of Artificial Sequence: Synthetic coding sequence
  source 1..1023: mol_type = other DNA
atgccaaaagcaccaaagcagcaacctccagaacctgagtggattggcgacggggagtccaccagcccatcagacaaggtggtcaaaaagggcaaaaaagacaagaagattaagaagaccttctttgaagagttagccgttgaagacaagcaggctggagaggaagaaaaagtgctgaaggaaaaagagcagcagcagcagcagcagcaacagcagcagcagaagaagaagcgggataccagaaaggggaggcgaaaaaaggatgtggacgacgatggggaagagaaagaactgatggaaaggctaaagaagctcagcgtcccaacatcagatgaggaagacgaagtccctgcccctaagcccagaggggggaaaaaaaccaaggggggtaacgttttcgccgccctaattcaggaccagtctgaggaggaagaggaggaagagaagcacccacccaagcctgccaagcccgagaagaataggattaataaggcagtgagtgaggagcagcaaccagcactcaaggggaaaaaaggtaaagaggagaagtcgaagggaaaggcgaagccacagaataaatttgccgctcttgacaacgaggaagaagataaggaggaggagatcatcaaagaaaaagagccacccaagcagggtaaggaaaaggccaagaaggccgagcagggaagtgaggaagagggcgagggtgaggaagaggaagaggaggggggcgagagcaaagccgatgacccttacgcccatctctccaagaaggaaaagaagaaactcaagaaacaaatggaatatgagcggcaggtcgcaagtctgaaagcggccaacgccgctgaaaacgacttctcggtgagccaggccgagatgtcttcccggcaagcgatgctggaaaacgcttcggacataaagctggagaaattctctatatccgcgcacggcaaggagctgtttgtgaacgcggacctctacatcgtggccggacgacgctacggcctggtcgggcctaacggatag

SEQ ID NO: 109274 - DNA, 2424 bp, synthetic construct
  misc_feature 1..2424: note = Description of Artificial Sequence: Synthetic coding sequence
  source 1..2424: mol_type = other DNA
atgcccaaggctcccaagcagcaacctccggaacctgagtggatcggcgatggagagtctacaagtcccagcgacaaggtggttaaaaaaggaaaaaaagataagaaaataaagaaaactttttttgaagaacttgcagtcgaggacaaacaggccggagaggaggaaaaagtcttgaaagagaaagagcagcagcaacagcaacagcagcagcagcagaagaagaagcgtgacactagaaaaggccgtagaaagaaggatgtcgacgacgatggggaggaaaaagagctcatggagcgactgaaaaagctgtctgtccccactagcgacgaggaggacgaagtgcccgccccaaagccaaggggggggaagaagactaagggcggtaatgtgttcgccgccttgatacaggatcagtccgaggaagaggaggaagaagagaagcaccccccaaaacctgccaagccagagaagaacagaatcaacaaagctgtgagtgaagagcagcagccagcactcaaggggaaaaaggggaaggaggagaagtcaaaggggaaggctaagcctcagaacaaattcgctgctctcgataatgaggaagaggataaagaggaggaaatcatcaaagaaaaggagcctcccaaacagggaaaagagaaagctaagaaagcagagcagatggagtacgaacggcaggtggcgtcactgaaagccgctaatgctgccgaaaacgattttagcgtctcccaggctgagatgtctagtagacaggccatgctcgaaaacgcatcggacataaagctggaaaagttctctataagcgcccacggaaaggaactgtttgttaacgcagacctgtacatcgtggccgggcgacggtatggcctggtgggacccaacggtaagggcaaaactactctgctaaagcatatagccaacagagcgctgtccattccacctaatattgatgtgctgctgtgcgagcaggaagtcgtggcagacgagactcctgccgtacaagcagtgctccgggcggacactaagaggttaaaattactggaggaagagcggcggctgcagggacagctcgagcagggagacgacacagccgccgagcgtctggaaaaagtgtacgaagaactgcgagccaccggggcggcggctgccgaagccaaagcccggcggatactggcagggttgggcttcgacccggagatgcagaatagacccacccagaagttttctggtgggtggagaatgcgcgtctcactggccagagcattgttcatggaacctactctgctgatgctggacgaacctaccaatcacctggatctcaacgccgtcatctggttgaacaattacctgcaggggtggcgcaagaccctgctgatagtgagccacgatcagggttttctcgacgatgtctgcacggacattattcacctggatgcccagcgactgcactactaccgcggaaactacatgaccttcaagaaaatgtatcagcagaaacagaaagagctcctcaagcaatacgaaaagcaggagaagaaactcaaggagttgaaggctggagggaagtccaccaaacaggcagaaaaacagaccaaggaagctctgactaggaagcagcagaagtgcagaagaaagaatcaggatgaggagtcgcaggaggccccggaattgctcaagcgccctaaagaatacacggtgcggttcacctttcctgaccctcctcctctcagtccaccagtgctgggacttcatggagttacatttggctaccaaggacaaaagcccttgttcaagaatttggatttcgggatagatatggacagtcgcatatgcattgtggggcctaatggagtggggaagtcgacgcttctgttacttttgacaggcaaactgacccccactcatggcgagatgaggaagaaccatcggctgaaaataggcttcttcaaccagcaatatgcggagcagttgcgaatggaggaaacacctaccgagtatctgcagcgtggattcaacctcccctaccaggacgcaaggaagtgcctcggaaggttcggccttgagagccacgcccacacaattcagatctgtaaactttcaggaggccaaaaggccagagtagtgttcgctgagctggcttgccgagagccggacgtcctcattttagacgagccgaccaacaacctcgacattgaatcaatcgacgcgcttggtgaggcaattaatgagtataagggggctgttattgtggtgagccatgacgctcgcctgatcacagagaccaactgccagttgtgggtagtggaggaacagtccgtttcccagatagatggagacttcgaagactacaagagggaggtccttgaggctttaggcgaagttatggttagccgcccaagagagtag

SEQ ID NO: 109275 - DNA, 2424 bp, synthetic construct
  misc_feature 1..2424: note = Description of Artificial Sequence: Synthetic coding sequence
  source 1..2424: mol_type = other DNA
atgcccaaggccccgaaacaacagccccccgagcctgaatggataggcgatggcgagtcgacttccccctccgacaaagtcgtgaagaaaggcaaaaaagacaagaagatcaagaagactttcttcgaagagctggccgttgaagacaagcaggcaggcgaggaggaaaaagtcctgaaggaaaaggagcagcagcagcagcagcagcagcaacaacaaaaaaagaaacgagacacccggaagggtcggcggaagaaagacgtggatgatgacggggaagagaaggagctcatggaacgcttgaagaagctgtccgtccctacaagtgacgaagaagatgaagtgcccgcccccaaacctaggggaggcaaaaaaactaagggaggaaatgtgtttgcggcgttaatccaggaccagtcagaagaggaagaagaggaagagaagcacccaccgaaacccgccaaacctgaaaagaatcgaataaataaggccgtgtcagaggagcaacagcctgccctgaaagggaagaagggaaaggaagaaaaaagtaaggggaaggcaaaaccccagaataaatttgccgccctggataatgaggaggaagacaaggaggaggagatcatcaaagaaaaagaaccaccaaagcaggggaaggaaaaagctaaaaaagctgaacagatggaatatgagagacaggtcgcctcacttaaggccgccaacgccgcagagaacgatttcagcgtgtcgcaggcggagatgtccagccgccaggcgatgctcgagaacgcctccgatatcaaactcgaaaaattcagtatcagcgcccatggaaaggagttgttcgttaacgcagacctctatatcgttgcaggacgaaggtacggactcgttgggcctaacggcaaggggaaaaccacacttctgaaacatatcgctaacagagctcttagcatcccacccaacattgacgtactgctttgcgagcaggaggtcgtggccgatgaaacacccgctgttcaggccgtgctccgtgcagatacgaaacgccttaagttattggaggaagaaaggagactacaaggccagctggagcagggggacgacaccgccgctgagaggcttgaaaaggtttacgaagagctcagggccaccggggcagcagccgccgaggccaaggcccggcggattctggctggcctcggctttgaccccgaaatgcagaatcgcccaacccaaaagttttccgggggctggcgtatgcgcgtctctctcgcgcgtgcactctttatggaacccaccctgctcatgctggacgagcccaccaaccatctggatctgaatgcagttatttggctgaataactacctccagggttggagaaagacgctgctgatagttagtcacgatcaggggtttttggacgatgtgtgcactgatattatacacttggatgcgcagcgcctgcattattacaggggaaactacatgacttttaaaaagatgtaccagcagaaacagaaggagttgcttaaacagtacgagaagcaggaaaagaagctcaaagagctgaaggctgggggcaaaagcaccaagcaggctgagaaacagactaaggaagcattaaccaggaaacagcagaagtgtaggcgcaaaaatcaggatgaagaaagccaagaagctccagagctgctgaaacgtcctaaggaatatacagtgcgctttactttccctgaccctcccccactctcaccacccgtgcttggcctgcatggtgtgactttcgggtaccagggccagaaaccgctgttcaagaatctcgacttcggaatcgacatggatagcagaatatgtatcgtaggtccgaatggcgtgggcaaatccacccttctgcttctcctgaccggcaaactcactccaacccatggggagatgcgtaaaaaccaccgtctgaaaataggattctttaaccagcagtacgctgagcaattaaggatggaggagacccccaccgaatatctgcagagaggctttaacttgccataccaagacgctcggaaatgtttgggacgatttggactggagtcacacgcacatacaatccagatttgcaagttgagcggcggccagaaggcgcgggtcgtcttcgctgaacttgcctgcagagagcctgacgttctcatcctggacgagccaacgaacaatcttgacatcgaatcgattgatgccctcggggaggcgatcaatgaatacaagggtgccgtcatcgttgtgtctcatgatgcaaggctcattaccgaaactaattgccagctttgggtggtggaagagcaatccgtgtctcaaattgatggcgacttcgaagattataagagggaggtgttggaggctttgggggaagtgatggttagtcgtcctagggagtag

SEQ ID NO: 109276 - DNA, 717 bp, synthetic construct
  misc_feature 1..717: note = Description of Artificial Sequence: Synthetic coding sequence
  source 1..717: mol_type = other DNA
atgcctaaggcccccaaacagcaacccccggagcctgaatggatcggcgatggggagtccacatcccctagcgataaagtggtgaaaaaaggaaaaaaggataagaagatcaagaagactttttttgaagaactggcagttgaggacaagcaggccggggaggaggagaaggtgttgaaggagaaagagcagcagcaacagcagcaacaacaacaacagaaaaaaaagagagacacccgaaaaggtcgcagaaagaaggatgtggatgatgatggggaagagaaagagctgatggaacgcctgaagaaactatctaggggttttaacctgccttatcaagatgcccgaaagtgtctgggaagattcggtctcgaatcacacgcccacacaatacagatatgcaaattgtccggcgggcagaaggctcgggttgtgttcgctgagctggcctgtcgtgaaccagacgtcctcatcctcgacgagcccacgaataacctcgatattgagagcatcgatgcactcggagaggccattaacgaatacaagggagccgtgatcgttgtctctcacgacgctaggttaatcaccgaaaccaactgccaactatgggtcgtggaggaacagtctgtaagtcagattgacggagactttgaggactataagagggaggtgctggaggcattaggagaggtgatggtctccaggccacgcgagtag

SEQ ID NO: 109277 - DNA, 1602 bp, synthetic construct
  misc_feature 1..1602: note = Description of Artificial Sequence: Synthetic coding sequence
  source 1..1602: mol_type = other DNA
atgccaaaagcccccaaacagcagccaccagaaccagagtggatcggggacggggaaagcacctcccccagcgacaaagtcgtgaaaaagggaaaaaaggacaagaagatcaaaaaaaccttctttgaagagctggctgttgaggataaacaggctggggaagaagagaaggtccttaaagagaaggagcaacagcagcagcagcagcagcagcagcagcaaaagaagaaacgagacactagaaaaggcaggcgcaaaaaggacgtcgatgacgatggggaagagaaggagttgatggaaaggctgaagaaattgtccgtccccacgtccgatgaggaggacgaggtcccggccccaaaaccgaggggcgggaagaaaactaaagggggaaacgtcttcgccgctctgattcaagatcagtctgaagaagaagaggaggaggagaagcaccccccaaagcctgcgaagccagagaaaaaccgaattaacaaggcagtttccgaggaacagcagcctgcgctcaaaggaaagaaaggcaaagaagagaagagcaaaggcaaggctaagcctcagaacaaatttgccgccctggataacgaggaagaggataaggaagaagaaattattaaagagaaggagccccctaaacagggaaaagagaaggccaagaaggctgagcaggggtccgaagaggagggggagggggaagaagaagaggaggaggggggcgagtccaaggctgacgatccttatgcacatctgtcaaaaaaagaaaagaagaagctgaaaaagcagatggagtatgagagacaggtggctagcctgaaagctgcaaatgccgcagagaatgactttagtgtgagccaggcagagatgagtagtcgacaggccatgctggaaaacgcaagcgacattaagctggaaaaattttccatttcagcacacggaaaagagctcttcgttaacgccgacttatacatagtagccggcagaaggtacggattagtgggccccaacggcaaaggaaagaccactcttttgaaacacatcgctaatcgcgctctatccattcctcccaacatagatgttctactttgtgaacaggaagtcgtagcagacgagacgccagcggtgcaggctgtgctgcgcgatgacaccgcggctgaacgcctggaaaaagtgtacgaggaactccgggccacaggagccgccgccgcagaagcaaaggctcgccggatccttgcagggctgggtttcgatcccgagatgcagaaccgccccactcagaagttcagcgggggctggcggatgagggtttctttggctagggctctctttatggagccaacactgctcatgctggatgaacccacaaataatctagatattgagtccatcgatgcattgggggaggccatcaacgagtacaagggggccgttatcgtggtttcacatgacgcaagactgatcactgaaacgaactgccagctctgggtggtggaggagcagagtgtgagccagatagacggagacttcgaggattataaacgcgaggtgctggaggcactcggggaagttatggtgagccggccgcgtgaatag

SEQ ID NO: 109278 - DNA, 717 bp, synthetic construct
  misc_feature 1..717: note = Description of Artificial Sequence: Synthetic coding sequence
  source 1..717: mol_type = other DNA
atgccaaaagcacccaagcaacaacctccagaacccgaatggatcggggatggggaaagcacctcacctagcgacaaggtggtgaagaagggcaaaaaagacaagaaaattaaaaaaacctttttcgaagagcttgccgttgaggacaaacaagccggcgaggaggaaaaggtactgaaagagaaggagcaacagcagcaacaacaacagcagcaacagaaaaagaagcgagatacacgcaaggggaggcgcaagaaggacgtggacgatgatggcgaggagaaagagttgatggaaagattgaagaaactctcgcgcgggttcaatctgccttatcaagatgcccggaaatgccttggacgcttcggcctagaaagccacgcgcatactatacaaatctgcaagttgagcgggggacaaaaggccagggtagtctttgccgagttggcctgtagagagcccgatgttttgattcttgatgaacctaccaacaacttagatatagagtcgattgatgctctaggggaggccatcaacgagtacaagggcgcggttatcgtagtgtcgcacgatgcccgattgatcacagagactaactgccagctgtgggtggtcgaagaacaaagcgtgagtcagatcgatggagatttcgaagattacaaaagggaagtgttggaggcactgggtgaggtgatggtgtctcgccctcgcgaatag

SEQ ID NO: 109279 - DNA, 2538 bp, synthetic construct
  misc_feature 1..2538: note = Description of Artificial Sequence: Synthetic coding sequence
  source 1..2538: mol_type = other DNA
atgccaaaggcacctaaacaacagcccccagaaccagaatggatcggagatggcgagtctacctctccttcagataaggtggttaaaaaaggcaaaaaagataaaaaaattaagaagaccttcttcgaagagctggcagtggaagacaagcaggccggcgaggaggaaaaagtgctgaaggagaaggaacagcagcagcagcagcagcagcagcagcagaagaaaaaacgagatacgaggaaaggacgtcgcaaaaaggacgtcgacgatgacggtgaggagaaggaacttatggaaagactgaagaagctcagcgtgcccacaagcgacgaagaggatgaagtacccgcccctaaaccccgcggcggcaagaagaccaagggggggaatgtcttcgcagcactcattcaagaccaaagtgaggaggaggaggaggaagagaaacatccaccaaaaccagccaagcccgaaaaaaaccgaattaataaagcggtgagcgaggaacagcagccagcactgaagggcaagaaaggcaaggaggagaagtccaaggggaaagccaaacctcagaacaaatttgcagccctcgacaatgaagaggaagataaggaagaagaaatcataaaggagaaggagccacctaaacaggggaaggagaaagctaagaaagctgagcaaggatccgaagaagaaggagagggggaagaagaagaagaggaaggaggtgagtcaaaagctgacgacccatacgctcatctgagtaaaaaagagaagaagaagctgaaaaaacaaatggagtacgagagacaagtcgcatctctgaaagctgctaacgccgcagaaaacgatttcagcgtgtcacaggctgagatgtcttcccgacaggcaatgctggaaaacgcctcagatataaaactggaaaagttcagcataagcgcccatggcaaggagcttttcgtgaacgcggatctgtacattgtcgcagggagacgatacggactggttggcccaaacgggaagggtaaaacgacattgctgaaacatatagcgaaccgagcattaagtataccccccaatattgacgtgttgctctgcgagcaggaggtagtggctgatgagacgccagcagtgcaggccgtcttgcgcgcggacactaaaaggctgaagctgctcgaagaggagcgtcgattgcaaggacagctggaacagggcgacgataccgccgccgagaggctggagaaagtgtacgaagagctccgcgccacaggtgccgcggccgctgaggccaaggccaggcgcattctagccggcttggggttcgatcccgagatgcagaatcggccgacccaaaagttctccggaggatggcgcatgcgagttagcctcgcccgcgccctgttcatggagccgacgctgctcatgttggacgagccgacaaaccacttagacttgaatgcagtcatctggctcaataattacctgcaaggatggagaaaaaccctactgatcgtctctcatgatcagggctttcttgacgatgtgtgtacagatataatccatctcgatgcccagcggcttcactactaccgaggtaattacatgacttttaagaagatgtaccagcagaaacagaaggagcttttgaaacagtacgagaagcaggagaaaaagttgaaggaattgaaggccggaggtaaatcaacaaaacaggccgaaaagcagacaaaagaagccttgactcgcaaacaacagaagtgtcggcgcaagaatcaggacgaggagtcacaggaagcccccgagctgctgaagcggcccaaagaatacacagtgaggtttactttccccgatcccccacccttaagcccccccgttctgggtttgcacggtgtgacctttggttatcagggccagaaaccactgttcaagaatcttgattttggcattgatatggacagcaggatatgtatcgtcgggccgaacggagtgggaaaatcgacgttgctcctgctgctgaccgggaaactgaccccaacacatggtgagatgcgaaagaaccaccgactgaaaatcgggttcttcaatcagcagtatgccgaacaattgaggatggaagagacgccaactgagtatctgcagaggggctttaacctgccataccaggatgcacggaaatgcctcggaagattcggactggagagtcacgcacacactatacagatatgcaaattgtccggtggccagaaagcgcgtgtagtgtttgccgaactcgcatgtagggagccagacgtcctgattttggacgagcccactaataatttggatatcgagtcaatagatgccctgggcgaggcaatcaacgagtataaaggagccgtaatagtggtgtcccatgacgcgcgcctgatcaccgagacgaactgccagctctgggtggtagaggagcagtctgtgagccagattgatggcgacttcgaggactataaacgcgaggttctggaggcactcggtgaagtaatggtgtctcggccacgcgagtag

SEQ ID NO: 109280 - DNA, 2538 bp, synthetic construct
  misc_feature 1..2538: note = Description of Artificial Sequence: Synthetic coding sequence
  source 1..2538: mol_type = other DNA
atgccaaaggcccctaagcagcaacccccggaaccagagtggattggcgacggagagtctacatcacccagcgataaggtcgtgaaaaaaggcaaaaaggataaaaagatcaagaaaacgttctttgaggaattggccgtggaggataagcaagccggagaagaggagaaagtgctgaaggaaaaagaacagcagcagcagcagcagcaacagcagcaaaagaaaaagcgagatactcggaaagggcggcgcaagaaagatgtagatgatgatggcgaagagaaagagctgatggagaggctgaaaaagctgtcagtcccgaccagcgacgaggaggacgaggtccccgcaccaaagcctcgcggggggaagaagactaaaggcggcaacgtgttcgcggccttgatccaggaccaaagtgaggaagaggaggaggaggagaaacatcccccaaaaccagcaaagcctgagaagaatcgcattaacaaggccgtgagcgaggagcagcaaccagccctcaaagggaagaaaggaaaggaggaaaagagcaaaggcaaagcaaagccgcagaataagtttgccgccctcgacaacgaagaggaggacaaggaggaggagatcattaaggagaaagagccaccaaaacaggggaaggagaaggccaaaaaggccgagcagggatccgaagaggaaggcgagggcgaggaggaggaagaggaagggggtgaaagcaaagcggatgacccatatgctcatctgtctaaaaaggagaagaaaaagctgaagaagcagatggagtatgagagacaagtggcttccctgaaggcagcaaatgccgcagagaatgatttctctgtgtctcaggccgagatgagttcccgtcaggccatgcttgagaatgcttccgatataaaactggaaaaattttcaatcagtgctcatggcaaggagctcttcgtgaatgccgacctttacattgtggccggaaggagatatggcctggtgggcccaaacggcaaaggaaagactactttgctgaaacacatcgctaaccgcgcactgagtataccacccaatattgacgttctgctctgtgagcaggaagtggtagctgatgaaactcctgccgtgcaggcagtgcttcgcgccgacaccaagagactcaagctcctcgaggaagaacgaaggttgcagggacagctcgagcagggagacgacactgcagcagagagactggaaaaagtgtacgaggaactgagggcaaccggggcggccgcagccgaggccaaagcccggagaatcctggccggtctgggattcgaccctgagatgcagaatcgacccacccaaaagtttagtggaggctggcggatgcgggtctctctggcccgggcactgtttatggagccgacattattgatgctggacgaacctacaaatcatctggatctaaacgcggttatctggttgaataactacttgcagggctggcgcaagaccctcctcattgtttcccatgaccaggggtttctggacgacgtgtgtactgacatcatccacttggatgctcagcgacttcattactataggggtaactacatgacctttaaaaagatgtatcagcagaagcagaaagagctcttaaaacagtacgaaaagcaggagaagaaactgaaggaattaaaggcaggggggaaatcaacgaaacaggccgagaagcaaactaaagaagctctgacccgcaagcagcagaagtgccggagaaagaatcaagatgaggaatctcaagaagccccggaactgcttaagaggccaaaagaatatactgtgaggttcactttcccagatccaccccccctgtcacctcccgtccttggactccacggggtcacattcgggtatcaaggtcaaaaaccacttttcaaaaacttggacttcggtatagacatggattctagaatatgtatagtagggcccaacggcgtggggaaaagcaccttactacttcttcttaccggtaagttaacccccacccacggagaaatgcgtaaaaaccaccgtctgaagattggattttttaaccagcagtacgcggaacagctccgcatggaggagacccctactgagtatctgcaacgtggtttcaacctcccataccaggatgcaaggaagtgtctagggcgttttgggctggaatcccacgcccacacaatccaaatctgtaaactttccggggggcaaaaggctagggtcgtcttcgcagagttggcctgtcgggaaccagacgtccttattttggatgagcctacgaataatttagatatcgagtcgatcgatgcactcggagaggccattaatgagtacaaaggagcggttatcgttgtatcgcatgacgcacgactaattaccgaaacaaattgtcagctgtgggtcgtcgaggaacagtccgtcagccagatcgatggcgatttcgaagattataagagggaggtgcttgaggcccttggcgaggttatggttagcaggcctcgagaatag

SEQ ID NO: 109281 - DNA, 717 bp, synthetic construct
  misc_feature 1..717: note = Description of Artificial Sequence: Synthetic coding sequence
  source 1..717: mol_type = other DNA
atgcccaaagctcctaaacagcagcctccagagccagagtggatcggcgacggcgagtcaaccagcccttccgacaaggtagtgaagaaggggaagaaggataaaaagatcaagaagactttcttcgaagaactggcagttgaggataagcaggcgggagaggaggaaaaggtgctaaaggaaaaagagcagcaacagcagcaacagcaacagcagcaaaagaagaagcgggacacgagaaagggccgaagaaagaaggacgtggacgacgatggcgaggagaaggaactcatggagcgccttaaaaagcttagtcgggggtttaatctgccttatcaggacgccagaaaatgcttgggtagattcggactggaatctcatgcgcacaccatccagatctgcaaactctcaggcggccagaaggcccgcgtcgtgtttgcagagttagcatgccgcgagcctgacgtgctgatcctggatgagcccacaaacaaccttgatatcgagagcatagacgcactgggagaggctattaatgaatacaagggagccgttatcgtcgtatcccatgatgcccgcctcattacagagacgaattgtcagttatgggtggtggaggaacagtcagtgtctcagattgacggagactttgaggactataaacgtgaggttttagaagcactcggggaggtcatggtttctcgcccccgtgagtag

SEQ ID NO: 109282 - DNA, 1602 bp, synthetic construct
  misc_feature 1..1602: note = Description of Artificial Sequence: Synthetic coding sequence
  source 1..1602: mol_type = other DNA
atgcccaaggcccccaagcagcagcctcccgagcctgaatggatcggggacggggaatctacgagtccaagcgataaagtcgtgaagaagggtaagaaggacaaaaagatcaagaaaactttctttgaggagctggctgtggaggataagcaagctggggaggaggagaaagtgctgaaggagaaggaacagcagcagcaacagcaacagcagcagcagcaaaagaagaagcgggatacccgaaagggccggaggaagaaggacgtcgacgacgacggagaagagaaagagttgatggaaagattgaaaaagttatcagttcccacctctgatgaggaagacgaggtgcctgcccccaagccccgcggagggaagaagaccaaagggggcaacgtgttcgcagccctcatccaggaccagagtgaggaggaagaggaagaggagaagcatccccccaagccagccaaacctgaaaagaacagaatcaacaaagctgtttcagaagaacagcagccagcactgaaaggtaagaaggggaaggaagaaaaatcaaaaggtaaagcaaagccacagaacaaattcgcagccctggacaacgaagaggaggacaaagaagaagagatcataaaggaaaaagaacctcccaagcagggaaaagagaaggccaagaaggctgaacaaggcagtgaagaggaaggggagggtgaagaggaagaggaggaagggggagagtcgaaagccgacgatccctatgcccatctcagcaaaaaggagaaaaaaaagctcaagaaacagatggagtatgagagacaggtagccagcctgaaggcggccaacgccgcagaaaacgatttctctgtaagtcaggctgaaatgtcatcccgtcaagccatgcttgagaatgcatctgacatcaagctagagaaattttcaatcagtgcccacggcaaggagctgtttgtgaacgccgacctgtacattgtggccgggagacggtatggcctggtcggtcccaacggaaagggaaagacaaccctgcttaagcacattgccaacagggccctctccatcccccccaatatcgacgtcctcctgtgcgagcaggaggttgttgcagacgagacacctgctgttcaggctgtgctgcgagatgatactgccgccgaaaggttggagaaagtttatgaggaacttcgggccaccggcgcggctgccgctgaggcaaaggcgcgacgaatcctagcagggcttggatttgatcccgaaatgcaaaatcgcccaactcagaaattctccgggggctggaggatgcgcgtgtccttagcgcgagcactcttcatggagccgaccctcctgatgctggatgagcccaccaataatcttgacatagaatccattgacgcgttaggcgaagctatcaacgagtacaagggcgcagttatcgtggtgagtcatgatgcaagactgattactgaaactaactgccaactatgggtcgtagaagaacagtcagtgagccagatcgacggagatttcgaagactataaacgagaagtcctggaagccttgggtgaggttatggtgagtcgacctcgagagtag

SEQ ID NO: 109283 - DNA, 1599 bp, synthetic construct
  misc_feature 1..1599: note = Description of Artificial Sequence: Synthetic coding sequence
  source 1..1599: mol_type = other DNA
atgcctaaagccccaaagcagcagccacctgagccagagtggatcggcgacggcgagtccactagccccagcgacaaggttgtgaagaaggggaagaaggacaagaagattaaaaaaactttcttcgaggaactcgccgtcgaagataaacaagcgggcgaggaggagaaggtgctgaaggagaaagagcagcagcagcagcagcagcagcaacagcagaaaaaaaagcgagatacccgtaagggacggcggaaaaaggatgtcgacgacgacggggaggagaaggaactgatggagcgactgaagaagctgtctgtgcctacatctgacgaggaggacgaagtgcccgcacctaaacctcgagggggcaaaaagactaaggggggcaacgtgttcgcagctcttattcaggaccagtcagaagaggaagaggaagaagagaagcatcctccaaagcctgcaaagccagaaaaaaatcggatcaacaaggccgtttctgaagaacaacagccagccctgaaaggcaagaaggggaaggaggagaagagcaaggggaaagctaagccccaaaataagtttgcagctctagataatgaggaggaggataaggaagaagagatcatcaaggagaaagaaccgcccaagcagggcaaggagaaagccaagaaggctgagcagggttctgaggaagagggggagggtgaggaggaagaggaggaggggggagagagcaaggcagatgacccatatgcccatctgtccaagaaggagaagaagaagctgaagaagcagatggagtatgagcgccaggtcgcgagccttaaggccgctaacgctgctgagaacgacttttccgtatcacaggctgaaatgtcttcaagacaggccatgctagagaacgccagcgacattaagctagaaaagttcagtatttcggcgcacggtaaagaactgtttgtaaatgctgatctctacatcgtggccggacgccgctacggcctcgttggacccaatgggaagggtaagactactctgctcaagcacatcgcaaatcgcgctctgtctatcccgcctaatattgatgtgctcctttgtgagcaagaggtggttgccgatgagacccccgctgtgcaagctgtgttgcgagatgacactgctgccgaacggctagagaaggtgtatgaggaactgagggctactggggccgccgccgctgaagccaaggcgaggcggattttggccggcctgggattcgacccagaaatgcagaatcgtcctacacagaaattctccggcggctggagaatgagagtatcacttgcccgggccctcttcatggagcccacgctcctgatgctggatgagccgaccaataatttggacattgagagcattgacgccttgggcgaggctatcaacgaatacaaaggggccgtgattgtcgtgtctcacgacgcgaggctcatcacggagacaaactgccagctctgggtggtggaggaacaatcggtcagtcagatcgacggggatttcgaagactacaagcgggaggtcttagaggctctcggagaagtcatggtttcacgacctagggagtag

SEQ ID NO: 109284 - DNA, 1599 bp, synthetic construct
  misc_feature 1..1599: note = Description of Artificial Sequence: Synthetic coding sequence
  source 1..1599: mol_type = other DNA
atgcccaaggccccaaagcagcagccccctgaacccgaatggatcggagacggcgaatctacttccccatcagacaaagtagtgaagaaagggaaaaaggataagaagattaaaaagacgttctttgaggagctagctgtggaagataagcaagccggggaggaggaaaaggtgttgaaggaaaaagagcagcagcagcagcagcagcagcagcagcaaaaaaaaaaacgagacacaagaaagggaagacgcaaaaaggacgtcgacgacgatggcgaggagaaagagctgatggaacgcctgaagaagctgtccgtccctaccagcgacgaagaagacgaggtacctgctcctaaaccccgcggcggaaaaaagaccaagggaggcaatgtgttcgccgctctgattcaagaccagtccgaggaggaagaagaggaagaaaagcaccccccaaaaccagccaaaccggagaaaaaccggatcaacaaggcagtcagcgaggaacagcagcccgccctgaaaggtaaaaaagggaaagaggagaagtctaaggggaaggctaagccccagaataaatttgccgcgttggacaatgaagaagaagacaaagaggaggagattataaaagaaaaggagccccctaagcaaggcaaggaaaaagccaaaaaggccgaacagggtagtgaagaggagggcgaaggggaagaggaggaggaggaaggcggggaatctaaggcagatgatccgtatgcacatctgagcaagaaggaaaagaagaagctcaaaaagcagatggagtacgagcgccaagtggcaagtctgaaagccgccaacgcagccgaaaatgacttctcagtgagtcaggcggaaatgtccagcaggcaggcaatgctagaaaatgcttctgacattaagttggagaaattctctatctccgcccacgggaaggagctattcgtgaacgcagacttatatattgtcgctggaagaagatacggccttgtcggcccaaacggtaaggggaagaccactctgttgaaacatattgcaaatcgggcactgagtattccccctaacatcgatgtgctgctgtgcgagcaagaggtcgttgcagacgagacccctgcagtgcaagccgtattgcgtgatgacaccgccgccgagcgcttggagaaagtgtatgaagaactgcgcgctactggtgccgccgccgccgaggccaaggctagaaggatactcgcagggctgggcttcgacccggaaatgcagaacaggcctactcagaaattcagtggcggctggcgcatgcgcgtttccctggcccgcgccctgttcatggagcctacactgcttatgctggacgaaccaaccaataaccttgacatcgaaagtatagatgccctaggggaggccataaatgagtacaagggagcagtcattgtcgtgtcacacgatgccaggctgatcactgagacaaattgccagttgtgggtagtggaggagcagtcggtttcccagattgacggcgacttcgaagattataagcgggaagtgctggaagccctcggtgaggtcatggtgagcagaccccgggaatag

SEQ ID NO: 109285 - DNA, 1599 bp, synthetic construct
  misc_feature 1..1599: note = Description of Artificial Sequence: Synthetic coding sequence
  source 1..1599: mol_type = other DNA
atgcccaaggccccaaagcaacagcctcctgaacctgagtggattggcgacggagagagcacatctccctctgataaggtcgtcaagaagggcaaaaaggataagaagattaaaaagaccttcttcgaggaattggctgtagaagacaagcaggctggagaagaagagaaagtccttaaagagaaagagcagcagcagcaacagcaacaacaacagcagaagaagaagagagatactcgcaaaggacgcagaaagaaagacgttgacgacgatggagaggagaaggagttgatggagcgattgaagaaactgagtgttcctacttccgacgaagaggacgaagtgccagcccccaagccacgggggggcaagaaaacaaaaggcggaaacgtctttgcagccttaattcaagaccaaagtgaggaagaagaggaggaagagaaacaccctcctaagcctgccaagcccgaaaagaacagaattaataaggcggtgtcagaggaacagcaaccagccctaaaggggaagaaaggaaaagaagagaagtccaagggcaaggctaaacctcaaaacaaattcgccgccctggacaacgaggaagaagataaggaggaagagataattaaggaaaaagaaccacctaagcagggcaaggagaaggccaagaaagccgaacaaggctcagaagaagagggggaaggagaggaagaagaagaagagggtggagagtcaaaagccgacgacccgtacgctcatctgtctaagaaggagaaaaagaagctgaagaaacagatggagtacgagcgccaggttgcatccctgaaagctgcaaatgccgccgagaacgatttttcagtgtcccaggctgagatgtcttccaggcaggctatgctggagaatgcatccgacatcaaactagagaaattctcgatctcagcacatgggaaagagcttttcgtcaacgctgacctgtatatcgtcgcaggacggaggtacggcctcgtgggccctaacggcaaagggaagacaacacttttgaagcatatagccaaccgtgccctgtctatacctccaaacattgacgtgctcttatgcgaacaggaagtcgtggctgatgaaacacctgccgtgcaggctgttcttcgggacgatacagctgccgaacgcttggagaaggtgtacgaggagctgagggcgacaggggctgccgccgctgaggcaaaggcaagacgaatcctggccggactgggatttgatccggaaatgcaaaaccgacctacccaaaaatttagcggtggatggaggatgagggtgagtttggcgcgtgctctgtttatggagccaaccctcttaatgttagacgaacccacaaataacttggatatcgagtcaatagatgccttgggtgaagccatcaacgagtacaagggcgcggtgatcgtggtgagtcacgacgccagactgatcaccgagactaactgccaattgtgggttgttgaagagcagtccgtctcccagatcgacggcgacttcgaggactacaagagggaagtcctggaagctctcggtgaggtgatggtgtcccgcccccgggagtag

SEQ ID NO: 109286 - DNA, 1599 bp, synthetic construct
  misc_feature 1..1599: note = Description of Artificial Sequence: Synthetic coding sequence
  source 1..1599: mol_type = other DNA
atgccaaaggcccctaaacaacaaccacctgaacctgagtggatcggggacggcgagtccacttctccttcggataaggtagttaaaaaagggaaaaaggataaaaaaataaagaagacgttctttgaggaacttgctgtggaagataaacaggcgggcgaagaggagaaggtgcttaaagaaaaggaacagcagcagcagcaacagcagcaacaacagaagaagaagagagatactaggaaaggaagacgtaagaaggacgtagacgatgatggagaggaaaaggaactcatggagcgcctgaagaaactatccgttcctacttccgacgaggaggacgaagttcctgctcctaagccacggggcgggaaaaagacaaaggggggcaacgttttcgctgcgctgatccaggaccagagcgaggaggaagaagaagaggagaagcacccccctaaacctgctaaacctgaaaaaaatcgtatcaataaagctgtctctgaagaacaacagccggccctgaaggggaaaaaaggaaaagaggagaaaagcaagggcaaagccaagcctcagaacaagtttgctgccctggataatgaagaggaggataaggaggaggagattatcaaagagaaggagccacctaaacaggggaaagagaaggccaagaaggcagaacaaggcagtgaggaggaaggcgagggagaagaggaggaggaggagggaggtgagtctaaggctgacgacccgtatgcacatttgtccaagaaggaaaaaaagaagctgaagaagcagatggaatatgagaggcaggttgcatccttgaaggctgctaatgctgccgaaaatgatttctctgtcagtcaggccgagatgtcatctagacaggctatgctggagaacgcatcagatataaagcttgaaaagttttctatcagtgcccacgggaaggagctgttcgtcaatgccgacctgtatatagttgctggtagacggtatggcctcgtaggaccaaacggcaaaggaaaaacaaccctcctgaagcacattgccaaccgggctttatctatccctccaaacatcgatgtgctactctgtgagcaagaggtcgttgctgatgaaacgcctgccgtgcaggctgtactgagggatgacactgccgctgagcggctagagaaggtttacgaggagctgagagctaccggtgctgccgccgctgaagcaaaggcccgcagaatacttgccgggctgggcttcgatcctgagatgcagaaccgccccactcaaaaattctcaggtggatggcggatgagagtcagcctggcacgcgccttgttcatggaaccaacgttgctgatgcttgatgagccaacgaataaccttgacatcgaaagcatagatgcattgggcgaagctataaacgaatacaaaggtgcagtgatcgtagttagccacgatgctcgattgatcacagaaactaattgtcaactgtgggttgtggaagagcagagcgtatcccagattgacggcgactttgaagattataaacgtgaggttcttgaggctctcggagaggtgatggtctcacggccccgcgaatag

SEQ ID NO: 109287 - DNA, 1602 bp, synthetic construct
  misc_feature 1..1602: note = Description of Artificial Sequence: Synthetic coding sequence
  source 1..1602: mol_type = other DNA
atgcctaaagcccccaaacagcagcctccagaacctgagtggattggcgacggagaatctaccagcccgagcgacaaggtcgtaaaaaaaggcaaaaaggataagaaaataaagaaaactttcttcgaggaactagcagtcgaggataagcaagcaggcgaggaggagaaggtgcttaaagagaaggagcagcagcaacagcagcagcaacagcaacagcagaaaaagaaaagggacacccgcaagggaagacgcaagaaagacgtggacgatgacggagaagaaaaggaactcatggagcgactaaaaaaacttagcgtgccaacttctgacgaagaagacgaggttccagcccccaagccacgcggcggtaaaaagaccaaaggcggaaacgtgttcgcggcgcttatccaagatcaatcggaggaggaggaggaagaggaaaaacatcctcctaagcctgcaaaacctgagaagaacagaattaataaggctgtgtccgaggaacagcagcccgcactgaaaggaaagaaagggaaggaggaaaaatcaaagggtaaggctaagccccaaaataaattcgctgctctggataacgaggaggaggataaggaggaggaaataattaaagagaaggagccacccaagcagggtaaggaaaaagccaaaaaagcagagcaaggcagcgaagaggagggtgaaggggaggaggaagaggaggagggaggcgaatccaaggcggatgacccctacgcccatctgagcaaaaaagaaaagaagaaactgaaaaagcaaatggaatacgaacgtcaagtcgctagtctaaaagctgccaacgcggccgaaaacgactttagcgtgagtcaagccgagatgtcctcaagacaagccatgttggagaacgccagtgacataaagctggagaaattttcaatcagcgcccacggtaaggagctctttgtgaatgccgacctatatatcgtagcagggcgtcggtacggtctggtgggtcctaacggtaagggcaaaacgacgctgcttaagcacattgctaatagggccttgtccatcccacctaacatcgatgtgctgctgtgcgagcaggaggttgtggccgacgaaaccccggctgttcaggctgttctgcgcgatgacacggccgctgaacggctggagaaagtctacgaggagctgagagccaccggtgccgccgccgcagaggccaaagccagaaggatcctagccgggttgggatttgaccctgaaatgcaaaaccggcccacccagaaattctccgggggctggcggatgagggtctcacttgcccgggccctgttcatggaaccaaccctactgatgctcgatgagcccaccaataacctcgatatcgagtccatcgatgccctcggtgaggctattaacgaatacaagggggctgtcattgttgtatcgcatgatgcccgcttgatcaccgaaacgaactgccagttgtgggtagtcgaggagcagtccgtttcccagatcgacggagatttcgaagactacaaaagagaggtcctggaggcactgggagaggtgatggtcagtaggcctcgcgaatag

SEQ ID NO: 109288 - DNA, 1515 bp, synthetic construct
  misc_feature 1..1515: note = Description of Artificial Sequence: Synthetic coding sequence
  source 1..1515: mol_type = other DNA
atggatctgatccctaatttcgctatggagacttgggtcttggtcgcaacaagcctcgtcttgctgtacatttacggcacacacagccacaagctatttaagaagctcggcatccccgggccaacccctcttccctttctgggaacaattctcttttacctgcggggtctttggaacttcgatagagaatgcaatgaaaagtacggagaaatgtggggattgtacgagggccaacaacccatgctcgtaatcatggaccctgatatgattaagactgttttggttaaggaatgttacagcgtgttcacgaaccagatgcccctgggcccgatgggcttccttaagtctgcgctatcattcgcagaggatgaagaatggaaacggatacgaactctgttaagtcctgcctttacctcagtgaagttcaaagagatggttcccatcatttcacagtgtggggacatgctcgtccgttctctgagacaagaggcggaaaattcaaagtcaatcaatctcaaagatttcttcggtgcatacaccatggatgtgataacaggcacactgttcggagtcaacctcgatagcttaaataacccacaggaccctttcctgaagaatatgaagaagcttttaaaactggattttttggacccctttttactgctgatatctttatttccattcctcacaccggtgtttgaggctttaaatattggcttatttccaaaagacgtgacccactttctaaagaacagcattgaaagaatgaaggaatcaagacttaaggacaaacagaaacatcgagtcgattttttccagcagatgatagattctcagaatagcaaggagaccaaatcacacaaagcactgtcagatttggagctggtggcacagtccattataatcattttcgctgcgtatgatactactagcactacactgcctttcataatgtacgaactggcaacccacccagatgtccagcagaagctccaggaagagattgatgccgttctcccaaacaaagctcctgtgacctacgatgctctcgtgcagatggagtacctggatatggtggtgaatgaaaccctgcggctcttcccggtagtgtcccgtgtgacccgcgtatgtaaaaaagatatcgagatcaacggcgtctttattcctaaagggttggctgtgatggttcccatttatgccctgcaccacgatccaaagtactggaccgaacccgagaaattttgcccggaatccaggttttccaaaaaaaacaaggattctatcgatctgtaccggtacattccatttggcgccggtcctcgtaactgtattggaatgagattcgctcttacaaatatcaaactggccgtaattcgggcactgcagaatttctcttttaagccttgcaaagaaacccagattccgctgaagctggataacttgccgatcctgcaaccagaaaaacccatcgtgctaaaagtgcatttgagggacggaataaccagcggtccctag

SEQ ID NO: 109289 - DNA, 1872 bp, synthetic construct
  misc_feature 1..1872: note = Description of Artificial Sequence: Synthetic coding sequence
  source 1..1872: mol_type = other DNA
atgccgtctgatctcgctaagaagaaagctgcgaaaaaaaaggaagccgctaaagccagacagcggcccagaaaaggacatgaggagaatggcgacgttgtgacagaaccgcaagtcgccgagaaaaatgaggcaaacggacgcgaaaccactgaagtcgatcttctgacaaaagaactggaggatttcgagatgaagaaagcagccgctagagccgtcaccggagtgcttgctagtcaccccaacagtaccgatgttcacataattaatctttctctaacattccacgggcaggagctgctgtctgacacgaagctcgagctgaacagcggcaggaggtacggattaatagggctaaacgggatcggcaagtccatgttgctgagtgcaattgggaagagagaggtccctatccctgagcacattgacatataccacctaactagggaaatgccgccatccgataagacacctctgcattgcgttatggaggtcgacactgagagagccatgctggagaaggaggccgaacgcctcgcacacgaggacgctgagtgtgagaaactcatggagctgtacgaaaggttggaagagctagatgccgacaaggcggaaatgagggcctcccgtattctgcacggcctcggattcaccccagccatgcaacgcaaaaagctgaaggacttttcaggaggatggcgcatgcgcgtggccctggcacgcgctctgttcatcaggccattcatgttacttctcgacgagcctactaatcatctggacctcgacgcctgtgtgtggctggaagaggagctcaagactttcaagagaatcctagttctagtgtcccatagccaagattttctgaacggagtatgcaccaatatcatccatatgcataacaagaaactgaagtactatacagggaactacgaccaatatgtcaagacacgacttgagctggaagaaaatcagatgaagcgattccactgggagcaagatcagattgcccacatgaagaattatatcgctcgtttcggtcacgggtccgcaaagcttgcgaggcaggcacagagcaaggagaaaaccctgcagaaaatgatggcgtctggcctcaccgaaagggtcgtgagcgataagacactgagcttttatttcccaccttgtggcaagatcccccctcctgtgattatggtgcagaacgtatcgtttaaatacacaaaagacggtccttgcatctataacaacctcgaatttggtattgatctggacactcgggtggccctggtcggccccaatggggccggcaaatctacacttcttaagctgcttaccggagaactcctgcccacagacggcatgatacggaagcatagtcacgttaaaatcggccggtatcatcaacacctgcaggaacagttggacctcgacctgtcacccctcgagtatatgatgaagtgttacccagagattaaggagaaggaggagatgcgcaagatcatcggaaggtacggtttgaccgggaaacaacaggtcagcccgattcgcaacttatccgatgggcagaaatgcagagtgtgtctggcttggctggcttggcagaacccacatatgctctttctggacgagccaactaatcacctggatatcgagactattgacgcattggcagatgctatcaatgaattcgaagggggcatgatgctggtgtcccacgacttccgcctgattcagcaagtggcacaagaaatctgggtgtgcgaaaagcagacaataaccaagtggcctggcgatattctggcctataaggagcacctaaagagcaaactggtcgacgaggagccccagctgaccaagcggacacacaatgtgtag

SEQ ID NO: 109290 - DNA, 723 bp, synthetic construct
  misc_feature 1..723: note = Description of Artificial Sequence: Synthetic coding sequence
  source 1..723: mol_type = other DNA
atgcctagtgatctcgccaaaaaaaaagccgccaagaagaaagaggccgcaaaggccaggcagcgcccaaggaaagggcacgaggagaacggcgacgtggtgacagaaccgcaagtggcggagaaaaatgaagctaacgggcgtgaaacaactgaggtggaccttcttacaaaagagctcgaagatttcgagatgaaaaaagctgccgctagagcagtgaccggggttttagcaagccatcctaattctactgatgtccatattatcaacctttcccttaccttccacggacaggaactcttgtctgacaccaaacttgagttgaatagcggcagacgttacggacttatcggtctgaacggcattgggaaaagcatgctgctgtccgcaataggtaaacgcgaggtccctattccagaacacattgatatttatcacctgacccgcgaaatgccaccatcggataagactcccctccactgtgtgatggaggtggacaccgaacgagccatgctcgaaaaggaggctgagcggctggcccacgaagatgccgagtgcgaaaaactcatggaactttatgagagactggaagagctggacgctgacaaggctgagatgagagcctcaagaattcttcacgggctggggttcactcctgctatgcagcgaaaaaagcttaaggacttctcaggtggctggcgtatgcgagtggcccttgcatag

SEQ ID NO: 109291 - DNA, 867 bp, synthetic construct
  misc_feature 1..867: note = Description of Artificial Sequence: Synthetic coding sequence
  source 1..867: mol_type = other DNA
atgcctagcgatctcgcaaaaaagaaagccgctaaaaagaaggaggcagcaaaagcccggcagcgtcctcgcaagggacacgaagaaaacggggacgtcgtgacagaaccacaagtcgcagagaagaatgaggccaatggacgcgaaactaccgaggtggacttgctgacaaaggaactcgaagactttgaaatgaaaaaggccgctgccagggctgtgaccggtgtacttgcttcccaccctaattccacggacgtccatattattaatctcagtctgaccttccacggacaggagctactctccgatactaaactggagctgaactccggcaggcgatatgggctgatcggcctgaacggaatcggtaaatctatgttattatctgccattggtaaaagagaagtgcccataccggaacacatcgacatttatcatctcacaagggagatgcctccatcagacaaaacgcccttgcactgcgtgatggaggttgacacggaaagagcaatgctagagaaggaggccgagaggttggctcatgaggatgcagagtgcgaaaagctcatggagctgtacgagaggctggaagagctcgacgccgacaaagccgagatgagggctagccgcatactgcatggattgggatttacaccagctatgcaacgtaagaagctcaaggacttttccggcggttggcgtatgagggtggcattagcccgcgcactattcatacgtccgttcatgctgttacttgatgaacccaccaaccatttggatttggatgcctgtgtctggctggaggaagaactgaaaacgttcaagaggatcctcgtgctggttagtcattcacaagatttcctgtag

SEQ ID NO: 109292 - DNA, 2361 bp, synthetic construct
  misc_feature 1..2361: note = Description of Artificial Sequence: Synthetic coding sequence
  source 1..2361: mol_type = other DNA
atggtacggagaggctggagtgtctgcactgccatcctattagcgcgactgtggtgcctggtgccaacacatacatttcttagtgagtaccctgaggcagcggagtacccccaccctggctgggtttactggctgcagatggcagttgccccaggtcatttgcgtgcctgggttatgcgtaacaacgtgactaccaatatcccctctgccttctccgggaccttaactcatgaggagaaggccgtactcacagtattcaccggaacagccacggccgtgcatgttcaggtggcggcactcgctagcgctaagctcgaaagttctgtgttcgtcacagattgtgtgtcatgcaagatcgagaacgtgtgcgattcagcgcttcagggcaagcgcgtgcccatgagtgggctgcaggggagtagcatcgtaattatgcctcccagtaacaggccactgaaagcttccgccgcaagttgcacttggtctgtgcaggttcagggaggccctcaccacttaggcgtggtcgccatctcaggaaaagtgttgagcgccgctcatggtgcaggcagggcatacggatggggattcccaggagatccaatggaggagggatacaagactctgctcaagggaatttcagggaaatttaactctggcgaactcgtcgctattatgggaccatccggtgctgggaaaagcaccctgatgaatattctggccggctaccgcgaaactggaatgaagggcgcagtgctgataaatggccttccgcgcgatttgcggtgtttccgcaaggttagttgctacataatgcaggacgatatgcttttgccccacctcacagtgcaagaagcaatgatggtgtctgctcacctgaagctgcaagagaaggacgaaggcagacgggagatggtcaaggagatcctgactgctttggggctgctgagttgcgctaacaccagaaccgggtcactctctggaggacagcggaagaggctggccatagcactggaactggtcaataaccccccagtgatgtttttcgacgagccaacgtctgggctagattctgctagttgttttcaggtggtgtctctgatgaaaggtctggcacaaggcggacgttccattatatgtactatccaccagcctagcgctaaactgtttgagctgttcgatcaactgtacgtcttgagtcaggggcagtgcgtgtaccggggcaaggtctgtaacctagttccctaccttcgggacctgggactgaattgtcctacctatcacaacccagccgatttcgtgatggaggtagctagtggcgagtacggcgaccagaactcacgtttagttagagcggtgcgcgagggtatgtgtgacagtgatcacaaacgggatttagggggcgacgccgaggtcaacccatttctttggcatcgaccctcagaagaggttaaacagaccaagagattgaaagggcttagaaaggatagcagcagcatggaggggtgccactcgttctctgcatcatgtctcactcagttctgcatactgtttaaaaggacgtttctcagcataatgcgtgacagtgttctaactcatctgagaatcaccagtcacattggcataggtttgctgattggactgttgtatctggggataggaaatgaagccaagaaagtcttgtccaatagcgggttcctgttcttcagtatgcttttcctgatgttcgccgctctgatgccaacagtgcttacattcccactggagatgggagtatttctgcgggagcatttgaactattggtactccctgaaagcctactacttagctaagacgatggcagacgttcctttccagattatgtttcctgtggcctattgtagcatcgtttactggatgacttctcaaccaagcgatgctgtgcgctttgttctgtttgccgctctgggaaccatgacctccctggtggctcagtcattagggctgctcatcggggcagcaagtacttcactgcaggtggctacctttgttgggccggtgaccgccattcctgtcttactcttcagtggtttctttgtttccttcgataccatacctacgtatcttcaatggatgtcatatattagctacgtgcgctacggctttgagggcgtgatcttgagtatttatgggcttgatcgggaagacctgcactgtgatatcgacgagacatgtcacttccagaaatcagaggcgatcctccgggaactagacgtggagaacgctaagctgtatctggacttcattgttctgggtattttttttatcagtctcagactcatcgcgtacttcgttcttagatataaaatccgagcggaaagatag

SEQ ID NO: 109293 - DNA, 2034 bp, synthetic construct
  misc_feature 1..2034: note = Description of Artificial Sequence: Synthetic coding sequence
  source 1..2034: mol_type = other DNA
atgagaatcagcctgccaagagcccccgaaagagacggaggcgtgagtgcgtcctctctgttggatacggtcactaacgcttctagttactctgcagaaatgactgagcccaaaagcgtctgtgttagcgtcgatgaggtagttagttctaacatggaggcaaccgagacggatctactgaacggccatttgaagaaggtggataataatcttacagaggcccagcggttctccagtcttcccaggcgagcagccgtcaacatcgagtttcgcgacctgtcctactccgttccagaggggccttggtggcgcaagaaggggtataagacactcctgaaaggaatttctggcaagttcaattctggcgagttagtcgccattatgggaccatccggggctggaaagagcacactgatgaacatcctggctggataccgcgagacagggatgaaaggggcagttctaattaatggcctgccaagagaccttagatgtttcaggaaggtgtcctgctacattatgcaagacgacatgctgctgccgcatctgaccgtccaggaagccatgatggtttcagcgcaccttaaactccaggaaaaggatgagggtcggagagagatggtcaaggaaattctcaccgctcttgggttactgagttgcgcaaacaccagaacaggaagcctctctgggggccagcgaaaaaggctggctatcgctcttgagctggttaataacccccctgtcatgttttttgacgagccaacctcaggtctggattctgccagttgcttccaagtggtctcacttatgaagggcttggcccagggaggccgctcaatcatctgcaccattcatcagcctagcgccaagctattcgaacttttcgaccagttgtacgtgctgtcgcaaggccagtgtgtgtaccgaggaaaagtgtgcaacttggtcccatacctgcgggatttgggattgaattgccctacctaccacaatccagctgatttcgtgatggaagtggcttctggcgagtatggggaccagaactcaaggttagtcagggccgttcgagaagggatgtgcgactcggatcacaaacgagatttaggcggcgacgcagaagttaaccccttcctctggcacagaccctccgaggaggactcttcctctatggaaggatgccattcattttccgcttcctgtctgacacagttctgtattctattcaaacggacctttctttccataatgcgggactccgtcctgacccatctgcggatcacctcccatattgggattggcctcctgatcggtttgctctacctgggcatcggcaatgaggcaaagaaggtcttgtcaaatagcgggttcttgttcttttcgatgctgtttttgatgttcgccgcgctgatgcctacagtactgacttttcctctggaaatgggagtctttttgcgtgagcacctgaattactggtacagtttgaaggcatattatttggccaagacgatggcggatgtaccgtttcagatcatgtttcctgtcgcctattgttcaattgtttattggatgacaagtcaaccttctgatgcggtccggtttgttctgttcgcagcacttggcacgatgacttcactggtggcccagtcgctgggcctattaatcggcgccgcatccacttcacttcaggttgccacattcgttggccctgtgactgccatccctgtgctcctgtttagcggtttctttgtgagttttgataccattcctacatatcttcagtggatgagctacatttcgtacgtccgctacggattcgagggagttatcctgagtatatacggcctcgaccgagaagatctgcattgcgacatcgatgagacatgtcacttccagaaatccgaggccattctgcgtgagttggacgtggaaaatgccaaactctatctggatttcatagtcctgggaatttttttcatctctctgcgccttattgcctattttgtcctgaggtataaaattcgggccgaaaggtag

SEQ ID NO: 109294 - DNA, 1992 bp, synthetic construct
  misc_feature 1..1992: note = Description of Artificial Sequence: Synthetic coding sequence
  source 1..1992: mol_type = other DNA
atgatcatgcggttgcctcagccacacggaacgaacgcctcctcttactccgccgaaatgacagagcccaaatccgtgtgtgtgagcgtggatgaagtggtgtcatccaatatggaggcaacggaaaccgatctgctgaatggccacctcaagaaggtagacaacaatcttaccgaggcccaaaggtttagcagcctgcctagaagggccgctgtcaatattgaattcagagatctctcctactcagttccggagggaccatggtggagaaaaaagggctacaaaactttgttgaagggcatatccggtaaattcaactctggagagttggttgcaataatggggccatctggagctggcaagagcactctgatgaacatcttagcagggtaccgtgagactggaatgaagggagcagtcttgatcaatggcctgcctcgggatctgaggtgtttccgaaaagtcagctgttatattatgcaggatgacatgctgctgccacatctcacagtgcaggaagccatgatggtttccgctcacctgaagctccaggagaaggacgaagggcgaagggaaatggtgaaagagatcctgacagccctaggtttgctgtcgtgtgccaacacgcgcacgggatccctcagcggcggacagcggaaacggctggccatcgcattggagcttgtcaacaatccacccgtgatgtttttcgacgagcccacgtccggactcgattcagcatcttgcttccaggtggtgtccctaatgaagggtttggcccagggggggcgcagtattatatgcaccatccaccagccaagtgccaaactgttcgagctattcgatcaattatacgtcctgtcccaggggcagtgcgtctaccggggcaaggtgtgcaacctggtgccctacttgcgcgatctcggactcaactgccccacatatcataacccagctgactttgtgatggaagtggcctccggggagtatggggaccaaaatagtagattggtccgggcagtccgggagggtatgtgtgacagcgatcataagcgggatctaggcggggatgccgaagtgaaccctttcttgtggcatagaccatcggaagaggattctagtagcatggagggctgccactcctttagtgcctcctgcctcactcagttctgtatactattcaagagaactttcctgagcatcatgcgtgactcagtactgacccatctcaggataactagtcacatagggatagggctcctgatcggcctgttatacctggggataggaaacgaggccaagaaggtgctatctaatagcggctttttgtttttctcaatgctattccttatgttcgccgccctgatgcctaccgtcctgacttttccactggagatgggggtgtttctcagagagcacctgaattactggtattcattaaaagcatactatctggccaaaaccatggccgacgtcccatttcaaatcatgttccctgtggcctactgcagcattgtgtactggatgacttcccagccgtcagacgccgtacgtttcgtgttgttcgccgccctcggcactatgaccagcctggtagctcagtcactagggttgctgatcggagccgcctccacatcccttcaggtagcgacatttgtgggccccgtgacagctattcctgtcttgttattctcagggttcttcgtttcttttgacaccattcctacatacttgcagtggatgtcctacatcagctatgtaagatacggtttcgagggggtgattctctctatttatggcctagatagggaagatcttcactgtgacatagatgaaacttgccacttccagaaatcggaggctatactccgtgagctcgacgtggagaatgcgaagctttaccttgatttcattgtcttaggcattttttttatatcactgagactgatcgcctattttgtcctccgctataaaatcagggctgagcgctag

SEQ ID NO: 109295 - DNA, 2037 bp, synthetic construct
  misc_feature 1..2037: note = Description of Artificial Sequence: Synthetic coding sequence
  source 1..2037: mol_type = other DNA
atggcatgtttaatggccgcctttagcgtgggtactgcaatgaacgcttccagttattccgctgaaatgacagagccaaaatccgtgtgtgttagtgtggacgaggtcgtgtcgagcaacatggaggctaccgaaaccgatctgctgaatggacatcttaaaaaggtggacaacaaccttacagaggcgcaaaggttctcgagcctgcccaggagggcggcagtcaacattgaattccgcgatctgagctatagcgtgccggaagggccatggtggcgcaagaagggctacaagaccctccttaaaggcatctcaggtaaatttaatagcggcgagctcgtggcaataatggggccaagtggagccggaaaatccaccctgatgaatattttggctggttatcgcgaaacgggaatgaagggtgccgttttgattaacggcctgccacgggatctgagatgctttagaaaagtttcttgctatatcatgcaggacgatatgcttctcccgcacctgacagtccaagaagccatgatggtgagtgcgcatttgaaattgcaggagaaggacgagggcagaagggagatggtgaaggaaatcctgacagcattggggcttttgtcttgcgccaataccagaaccggttccctttcagggggccagcggaaaaggctcgctattgctctggaacttgtgaacaaccctcccgttatgttcttcgacgaaccaacgagcgggcttgactctgcctcgtgcttccaggttgtgtcactgatgaagggtctcgcccaaggtggtcgaagcatcatttgtacgatacaccagccctccgccaaactgtttgaactgtttgatcagctgtacgtactgagtcagggccagtgcgtgtaccggggaaaagtttgcaacctggtaccctatctgagagacctggggctgaactgtccgacctatcacaaccccgcggatttcgttatggaggtggcgagtggagaatacggcgatcagaactcgcggttggtgagggcagtccgggagggcatgtgtgatagtgaccataaacgagacctgggcggagatgcagaggtgaatccttttctgtggcataggcccagcgaggaggttaaacaaacgaagcgtctcaaaggactgaggaaggactctagctccatggagggatgccattctttcagtgcctcatgcttaacccagttctgcattctgttcaaacggactttcctgtctatcatgcgggacagtgtcttaacccacctgaggataaccagtcatatcggaataggcctcttgatagggctgttgtacctgggcatcggcaatgaagcaaaaaaggtcttgtctaatagtggatttctgtttttttcgatgctcttcctaatgttcgccgctttaatgcccactgttttaacctttccacttgaaatgggggtgtttttacgcgagcacctcaattactggtatagtctgaaggcatattatttggccaaaaccatggcagacgtaccatttcaaatcatgtttccggtggcctactgcagtattgtatactggatgacgagtcaacccagtgatgccgtgcgatttgtactctttgcggccctgggaacaatgacttccctcgtcgcacagtctctgggtcttttaattggagcggcaagcacttcactgcaggttgctacctttgttggccccgtgactgctattcccgtcctgctattctcaggcttttttgtgtcctttgacaccattcccacctatctccaatggatgtcatacattagctacgttaggtatggatttgagggagtcattctgtcaatctatggcctcgatcgagaagatctgcattgtgatattgacgagacatgccatttccagaaaagcgaggctatcttgagagagctggacgtagagaacgccaaactatacctagactttattgtactgggaattttttttatcagcctccgtctgatagcatactttgtcctcagatataaaatcagggcagaacgctag

SEQ ID NO: 109296 - DNA, 2475 bp, synthetic construct
  misc_feature 1..2475: note = Description of Artificial Sequence: Synthetic coding sequence
  source 1..2475: mol_type = other DNA
atgttagccgtgcagcagactgagcacctccccgcatgtccacccgccagacggtggagctccaacttctgccccgaatctacggaggggggtcccagcctgctcggacttcgagacatggtgagacgcggttggtccgtttgtactgccattcttctggcaagactgtggtgtctggtccctactcacacctttctcagcgagtacccggaggccgccgagtacccgcaccctggctgggtgtactggctgcagatggccgtggcccccggtcacctgagggcatgggttatgcggaataacgtaactaccaatataccaagcgctttctcagggacactgacgcatgaagaaaaagccgttctgacagtattcacaggcactgccaccgccgtgcatgtccaggttgccgcccttgcctctgcaaaattggagtcatctgtcttcgtcactgactgcgtgtcatgtaaaattgaaaatgtctgcgatagcgctctccaaggcaagagggtgcctatgagcggcctgcagggcagcagcattgtgattatgcctccttcaaacaggcctctggctagtgccgccagttgcacatggagcgtgcaggtccagggaggcccacaccatctcggagtagtcgccatcagcggcaaagtgctatcggctgctcatggcgccggaagagcttacggatgggggttccctggagatcctatggaggagggatacaaaaccctactgaaagggatttccggcaaattcaacagcggtgagctggtcgccataatgggaccatctggggcgggcaagagcaccctgatgaacattctggcagggtaccgggaaaccggcatgaaaggcgcagtgctcatcaatggtctgcccagagatctgcgttgtttccggaaggtaagttgttacattatgcaagacgacatgcttctgccgcacctcactgttcaggaggccatgatggttagcgctcacctcaaactgcaggagaaggatgaagggaggcgggaaatggtcaaggagatcctgaccgcgctcggcctactttcctgtgcgaacaccagaacaggaagcctcagcgggggacagcgaaaacggttagctatcgcgctcgaactggtcaataacccacccgttatgttcttcgacgagcctacatcagggttagacagcgcctcatgcttccaggtggtgtcccttatgaaaggattggcacagggaggcagaagcatcatatgcactatccaccagccgtctgctaagctcttcgagctgtttgatcaactgtacgtactctctcaaggtcagtgtgtatatagaggaaaggtttgcaaccttgtgccttacctgcgagatttgggattaaactgccccacctaccacaatccagcagactttgtgatggaggtggcgagtggcgagtacggcgaccagaattctcgccttgtccgggcggtacgtgaaggcatgtgcgatagcgatcacaagagggacttaggtggagacgcagaggtcaatccttttctctggcatcgcccttctgaagaggtgaaacagaccaaaagactgaagggcctgcggaaagactctagctctatggagggttgccattcattctcagctagctgcttaacgcagttctgcattctgtttaaacgaaccttcttaagcattatgcgtgatagtgtgctcactcacctgcgtataacgtctcacattggcattggcctgctcatcggcctgctttacctcgggattggtaatgaggcaaaaaaagtcttgtctaattcgggctttcttttcttctctatgcttttcctgatgtttgccgctctgatgcctaccgtgctaacgttcccactggaaatgggcgtctttctacgcgaacatcttaactattggtactccctcaaggcttactacctggctaaaaccatggctgatgttcccttccaaatcatgtttcccgtcgcttactgttctatagtgtactggatgaccagccaaccttcagacgccgtgcgttttgtcctcttcgccgcgctggggaccatgacttccctggtggctcagtctttgggcctgctgataggggccgcctccacatccctgcaggttgcgacattcgtagggcctgtgaccgccattccagttctcctgttctccggcttcttcgtcagttttgacactattccaacctatctccagtggatgagctacatttcctacgtgcgctatggatttgagggtgtaatcctgtctatttacgggcttgatagggaggatttacactgtgacatcgatgaaacttgtcacttccagaagtccgaggcgatcctccgggagctggacgtcgagaatgcaaaattgtacctggattttattgttctgggaatctttttcatctccctgagactgattgcctatttcgtactcagatataagatcagggctgagaggtag

SEQ ID NO: 109297 - DNA, 2001 bp, synthetic construct
  misc_feature 1..2001: note = Description of Artificial Sequence: Synthetic coding sequence
  source 1..2001: mol_type = other DNA
atggcttgtctaatggccgccttctctgttgggacagccatgaatgcaagtagttattctgccgagatgacagagcccaagtccgtttgtgtgtccgtggatgaagtggtttcatcgaacatggaagctaccgagacggacctgctgaacggccacttgaaaaaagttgataacaacctgacagaagcacagcgcttctcttctttgcctcgtcgggcagctgttaatatagagtttagagatctctcatattccgtgcctgaaggcccctggtggaggaaaaaagggtacaagaccctcctgaaaggaattagcgggaagttcaacagcggggaactcgtggctattatgggaccaagtggagccggcaagtccactctgatgaacatcctggctggatacagggagactggtatgaaaggagctgtgttgatcaatgggctgccacgcgacttgagatgctttcgaaaagtcagctgctacattatgcaggacgacatgctgctcccacatctcacagtgcaggaagcgatgatggtcagtgctcacctgaaactgcaggagaaagacgaggggagaagagagatggtgaaggaaattctgactgcgctaggcttactgtcctgtgctaacacacggacaggcagtcttagcggcggccaaaggaagcgtttggcgattgccctggagcttgtcaacaacccccccgtgatgttcttcgatgaaccaacatcaggcctcgactccgcttcatgctttcaggtggtatcactcatgaaggggcttgctcagggcggcagatctatcatctgcacaattcaccaaccttcagcgaagttgtttgaactatttgaccaactctacgttctatcacagggtcaatgcgtctacagaggcaaggtgtgtaacttagtcccgtaccttcgcgacctgggcctgaattgccctacctatcacaatccagccgactttgtcatggaagtcgccagcggcgagtatggtgaccagaatagcaggctggtcagggccgtgcgcgaaggcatgtgtgattccgaccacaaacgggacttgggtggcgatgcagaggtcaatccattcttgtggcaccggccaagcgaggaagactcctccagtatggagggatgtcacagctttagcgccagctgtctgacccagttttgcatcctgtttaagagaacatttctgtcaattatgcgcgattctgtactgacacacctgcgcataaccagtcacataggtattgggttacttattggattgctgtatcttggcatcggcaatgaggctaagaaagtcctctccaactctggcttcctgttcttctccatgctgtttttaatgtttgcagcgttgatgcccaccgtgcttacctttcccttggagatgggcgtgttcctgagggaacatctgaattactggtattctttgaaggcatactacctggcaaagactatggccgacgtcccctttcagatcatgtttccggtcgcctactgttctatagtgtactggatgacatcccagccttctgacgccgtgaggttcgtcctgttcgccgccctaggcacgatgacctcactcgtcgcccagtcactaggccttctgattggggccgcatctacatccctgcaggtagcaaccttcgtgggcccagtgaccgctatcccggtgctgcttttctccggatttttcgtttcattcgatactatcccaacctacctgcagtggatgtcttacatcagctatgtgaggtacggctttgagggggtcattctgagtatctacggactcgacagagaagatcttcactgcgacattgatgagacttgccacttccagaaatcagaagccatactgcgcgaacttgatgttgagaatgccaaattatatcttgacttcatcgtcttaggcatttttttcatctctcttcggctcatcgcatacttcgttttgcgctataaaattcgggccgagagatag

SEQ ID NO: 109298 - DNA, 2007 bp, synthetic construct
  misc_feature 1..2007: note = Description of Artificial Sequence: Synthetic coding sequence
  source 1..2007: mol_type = other DNA
atgctaggaacacagggatggaccaagcaacgtaagccttgtcctcaaaacgcctctagctactccgccgagatgaccgagcctaagtccgtctgcgtcagcgtggacgaggttgtgtctagtaacatggaggcgactgaaacagacctgttaaacgggcatctgaaaaaggtggacaacaatctgactgaggctcagcgattctcatctctgccgcggagggctgctgtcaatatcgagttcagagatcttagttacagtgtccccgaaggcccatggtggcgtaaaaagggatataagactctattgaagggaattagcggtaaattcaattcaggcgagttggtggcaatcatgggcccttctggtgcagggaagagtacactgatgaacatcctggccggctatcgggaaaccggaatgaagggtgccgtgttgattaacggcctgccacgggacctgcggtgtttccgcaaagttagctgctacattatgcaggacgatatgttgctgcctcaccttaccgtgcaggaagctatgatggttagtgctcatctgaagctgcaagagaaagatgagggcagacgggaaatggtgaaagagatcctgacagcactcgggttgctgtcctgcgcaaatacccgaactggtagcctgagtggtggccaaaggaaacggctagccatcgccctcgaattggtgaataatccccctgtaatgttcttcgacgaacctacatctggtctggacagcgcttcttgcttccaggttgtgagccttatgaaagggctggctcaagggggccggtcgataatttgcactatccatcagccctctgccaagctgtttgagttgttcgaccagctgtacgtgctgagccagggccagtgcgtctatagagggaaggtgtgtaacctagtcccatatctgcgagatctagggctgaactgccccacgtaccacaatcctgcagatttcgtgatggaggtcgcgtccggtgaatatggcgatcaaaatagcagattggtccgagccgtgagggaggggatgtgtgatagtgaccacaagagggacctgggaggcgatgccgaggtaaaccccttcctctggcaccgtccctctgaagaggattcctcctccatggagggatgtcattcctttagcgcatcctgcctgacgcagttctgtatccttttcaagcgcaccttcctatcgatcatgcgtgacagtgttctgactcacctgagaataactagtcacatcggaattggtttacttatcggcttgctgtacttgggaattggtaatgaggcaaagaaggttctgtccaatagcggattcctttttttttccatgttattcctgatgttcgctgccctcatgcccacggttctcacattccctctggaaatgggagtctttctgcgcgaacacctcaattactggtactcattaaaggcctactatctggcaaagaccatggccgatgtgccctttcagatcatgttccccgtagcttactgttcaattgtatactggatgaccagccaaccctcagacgccgtgagatttgttctgttcgcagcgctgggtacaatgaccagcctagtggctcagtctctaggactcctaattggtgctgcctcaaccagtcttcaggttgccacatttgtgggacccgtcacagcgatccctgtcctgttgttctcaggcttttttgtctccttcgatacaattcctacctatttacagtggatgtcgtatattagctacgttcggtatggtttcgagggagtaatcctgagcatatacggcctggatcgggaggatctgcattgtgatattgatgagacctgccatttccaaaagtccgaagccatactcagagagctagacgttgaaaacgcaaagctgtatttggactttatcgttctggggattttttttatttcactacggctgatcgcatacttcgttctcagatataagatccgtgccgagcgttag

SEQ ID NO: 109299 - DNA, 1941 bp, synthetic construct
  misc_feature 1..1941: note = Description of Artificial Sequence: Synthetic coding sequence
  source 1..1941: mol_type = other DNA
atggccgagaaagccctcgaagccgtaggctgtggactggggcctggagccgtcgcaatggccgttactttggaagatggcgcggaacctccagtgctgaccacacacctgaagaaggtggaaaatcatatcacagaggcccaaaggtttagtcacctccctaaaaggtccgctgtggacatcgaatttgtggagctgtcttactcggtccgcgagggtccttgttggaggaagcggggatataaaaccctgttgaaatgtctgtcaggcaagttttgtagacgcgaactgatcggcatcatggggccctccggcgccggtaaatctacattcatgaatattctcgcagggtatcgggagtcagggatgaaaggacaaattcttgtcaatggacgcccccgcgagctgcggactttcaggaagatgagctgctatatcatgcaagacgacatgctcctgccacacctcactgttctggaggccatgatggtctccgccaatctcaaactttctgaaaagcaggaagtaaaaaaggaactggtgaccgaaatcctcacagccctgggcctgatgtcctgttcccataccagaaccgctctgctttccggtggccagcgcaaacggctggctatcgcgttggagttagtgaataatccacccgtgatgttttttgacgaaccaacctccggactggatagcgcttcctgctttcaggttgtgagcctgatgaaatctctggcccaaggcggtagaactatcatctgtaccatacaccaaccctccgctaaactttttgagatgttcgataaactgtatattttatcacaagggcaatgtatcttcaaaggtgtggtcacaaatctgatcccttatctgaaagggttgggtctgcattgcccaacttatcacaaccccgctgactttatcattgaagtagcctccggagagtacggcgacctcaatcccatgctgtttagggccgtccagaacggcctctgtgctatggccgaaaaaaaaagttctcccgagaaaaacgaggtgcctgcaccctgtccaccctgcccgccagaggttgacccgattgagagtcacacctttgctacaagcacgcttacccagttctgcattctgtttaaacgtacatttctgtcaatcttaagagatacagttctgacacatttacgattcatgtcccacgtggtcatcggcgttcttatcggactcctgtaccttcacatcggggacgatgccagcaaggtgtttaacaacactggctgtctcttcttttcaatgctgttcctgatgtttgccgccttgatgcccacggtgctgacatttcctttagagatggctgtatttatgagggagcacctcaactactggtatagcctcaaagcctactatctggccaagaccatggccgatgtgccatttcaagtggtgtgcccggttgtgtattgcagcatcgtgtactggatgaccgggcagccagctgagaccagtcgcttcctcctcttctccgccctggctacagccactgcccttgtcgcccagtcactgggtctcctgatcggcgcggcctccaacagccttcaagtggccacattcgttggcccggtcacggcaatcccggtgttgctctttagtggcttttttgtctcttttaaaaccatccccacttatctgcagtggtccagctacctcagctatgtgagatacggctttgagggggtgattctgaccatatatggtatggagagaggcgatttgacgtgcctcgaggagcggtgtcccttccgggaaccccagtcaatcctccgagcactggacgtggaagatgcaaagctttatatggattttcttgtgctgggcattttcttccttgccttacgactgttggcatacttggtgctgcggtaccgagttaagagcgagcgctag

SEQ ID NO: 109300 - DNA, 1941 bp, synthetic construct
  misc_feature 1..1941: note = Description of Artificial Sequence: Synthetic coding sequence
  source 1..1941: mol_type = other DNA
atggccgaaaaggccctggaggctgtgggctgcggcttggggcctggggccgtggccatggccgtaacattggaggatggcgccgagcctcctgttctaacgacgcacttgaagaaagttgagaaccatatcaccgaagctcagcgtttcagccatctccccaagcgaagcgctgtggacatagagttcgtggagctttcctatagcgtcagggaaggaccttgctggaggaagaggggatacaagacactgctcaaatgtctctctggcaagttttgtcggcgggaattgattggaatcatggggcccagcggcgccggtaaaagcaccttcatgaatatcctcgctggctaccgcgagtccggcatgaaagggcagatcttggttaacgggcgaccccgtgaacttcgtacattccgaaaaatgagttgctacatcatgcaggatgacatgcttttgccccacctgactgtcttagaagcgatgatggtttctgccaacctcaagctgtcagagaaacaagaggtcaaaaaagagctggtaacagagattctcactgccttaggcctcatgtcatgttcacacactcgaactgcactactctccggtggccagagaaaacgcctggcaatagccttggaattggtcaacaatccaccagtgatgttcttcgatgaacccacttctggattggattccgccagctgttttcaggttgtttctctcatgaaaagccttgctcagggtggccgaacaattatttgcactatacaccaaccctcagcgaagctgttcgagatgtttgacaagctgtacatcttgtcccaaggacaatgtatctttaaaggtgtcgtcactaaccttataccttacttaaagggcttggggctgcactgtcccacataccataatcctgctgattttataatagaagtggctagtggtgaatatggagaccttaatcccatgctgtttcgggctgttcagaacgggctgtgtgctatggcggagaagaagtcttcccctgaaaagaatgaagtgcccgcaccttgtcctccctgcccccccgaagtggatcccatcgagagccacacatttgccacctccactctgactcagttttgtatacttttcaaacggaccttcctatctatcctcagggacactgtacttacacacctcagatttatgtcacacgtcgtcatcggggtgctcatcggattactgtatttgcacataggtgacgacgcctcaaaagtctttaacaacaccggctgcttattcttctccatgctgtttctcatgtttgccgcactgatgccaacagttttaacattcccacttgaaatggcagtgttcatgagagagcatttgaactattggtatagtttgaaggcctactatctggccaaaactatggctgacgtcccatttcaggtggtctgtccagtggtgtactgtagcatcgtgtattggatgacaggccagccggccgagacctcacgatttctgctgttcagtgctctagctacagcaacagctctggtggcacaatcactggggctccttatcggagccgctagcaactcattacaggtagccacatttgtgggccccgtcaccgccatcccggtgttactgttctctggcttctttgtgagttttaaaactatccccacctatctgcaatggagtagctacctttcatatgtgcgatatggtttcgaaggggtcattcttaccatctatgggatggaaagaggggacttaacctgtcttgaggagcgatgccccttccgcgagccccagtccattctccgtgcactggacgtcgaggatgcgaagctgtatatggatttcctggtgctcggcatttttttcctggctctgcggctgctggcatatctggtcctccgttaccgcgttaaatccgaacgatag

SEQ ID NO: 109301 - DNA, 1941 bp, synthetic construct
  misc_feature 1..1941: note = Description of Artificial Sequence: Synthetic coding sequence
  source 1..1941: mol_type = other DNA
atggcagaaaaagcactggaggcagtgggatgtggactaggtccaggcgctgtcgccatggctgtcacactcgaagatggagcggaacctcccgtgctaaccacacacctcaaaaaagtggaaaaccacattaccgaagcgcagagattcagtcacttacccaaacgatcggccgtggatattgaattcgtggagcttagttactctgttagagaggggccttgttggcgaaaaaggggatacaagactttactgaaatgtctttctggcaaattttgtcggagagaactcatcggcataatgggccctagtggtgccggcaagtccaccttcatgaatattctggcaggttatcgagagtctggaatgaaggggcagatcctcgtgaacggcaggcctcgtgaactgcgaacttttcggaagatgtcttgttatattatgcaggacgatatgttgctccctcacctgacggttttagaggcaatgatggtgtcggccaacctcaaactgtctgagaaacaggaagtaaaaaaagaactcgtgactgaaatactgacggcactgggtctgatgagttgtagccacactcggacggcgcttttgtccggaggccaacggaaaaggcttgccattgctctggaacttgtcaataacccccctgtcatgttcttcgatgaaccgacctccggccttgattcagcgagctgctttcaggtggtgtcgttaatgaaatccctggctcaaggtggcaggacaattatttgtacaattcaccagccttctgctaaattgttcgagatgtttgacaagttgtatatactgagtcagggacaatgcatcttcaaaggtgtggtgacaaacctgatcccttatcttaaggggctcggactccactgcccaacataccacaaccccgctgattttatcattgaggttgctagtggcgagtacggcgatctcaatcccatgctgtttcgcgctgtgcagaatgggctgtgtgccatggcagagaagaaatccagccccgaaaaaaacgaagtccccgccccttgccccccatgtccacctgaagtcgatcctattgaatctcacacttttgccacctccaccctgacacagttctgtattcttttcaagaggaccttcctgagcatactcagagacacagtgctcacgcatttgcgattcatgtctcacgttgtgattggcgttctgatcgggctcttgtacttgcatattggagacgatgcctctaaagtgtttaacaacaccggctgcctgttcttctccatgttgttccttatgttcgccgccttaatgcccacagtgttgacattccccttggagatggctgtcttcatgcgggagcacctgaattattggtatagcctcaaggcttattacctggctaaaacaatggccgatgtcccatttcaggtggtgtgtcctgttgtgtattgttctatagtctactggatgacgggccagcccgcggagacctctcgcttcctgctgttcagcgccctggctacagccactgcactggtcgcccaatccctcggactattgatcggtgccgctagcaacagcctccaggtcgctacattcgtcggccctgtcacggcaattcccgttctgctgttctctggattcttcgtgtcgttcaagaccattcccacttacctgcagtggtcaagctatctgtcttatgttcgttacggcttcgagggcgtcattctgacgatttatggaatggaacgcggcgatctgacatgtctagaggagaggtgtccgttcagggaacctcagtccatcctccgcgctctggatgtcgaagacgctaagctctacatggacttcctggtgctgggcatcttctttttggcattaagacttctggcatatctagtgttgagatatagggtgaaaagcgagagatag

SEQ ID NO: 109302 - DNA, 1956 bp, synthetic construct
  misc_feature 1..1956: note = Description of Artificial Sequence: Synthetic coding sequence
  source 1..1956: mol_type = other DNA
atgggggatctgtcctccctgacccccggagggagtatgggactgcaggtgaatcgcgggtcccagtcgtctctggaaggagcgcccgctacagctcccgaaccccactcgcttggcatccttcacgcctcctactctgtgtcccaccgtgtgcgcccatggtgggatattactagttgcagacagcagtggacacgacagatcctcaaggatgtgagcctttacgtggagtccgggcaaatcatgtgcatcctcggctccagcgggtcagggaagactactctcctcgacgctatgagcgggaggctcgggcgcgccggaacttttcttggcgaagtttacgtaaatggccgagcactgagacgcgagcagttccaggattgtttctcttatgtcttacaatccgatacactgttgtcatctctcacagtacgtgaaacactacattacaccgccttgctggcaattcggcggggcaatccaggatcttttcagaagaaagtagaggctgttatggcggaactctccctgagtcatgtggcagataggctgataggcaattactccctcggcggaatttctacaggcgagaggcgcagagtttcaatcgccgcccagctacttcaggacccaaaagtgatgctgttcgatgagcctaccacagggctcgactgcatgaccgcgaatcagatcgtagtgcttctcgtggagcttgcacgacgcaatcgtatcgtcgtgctgaccattcatcaaccgaggtcagaactgtttcagttgttcgataaaatcgccatactgtcctttggcgagctaatattctgcggtaccccagctgaaatgctggactttttcaatgattgtgggtacccttgcccggagcactccaatccatttgacttttacatggacctcacatctgtggatacacagtccaaggagcgagaaatcgagacaagcaagagggtgcagatgatcgaaagcgcatataaaaaaagcgcaatctgccataagacccttaagaatattgagaggatgaagcacctgaagacactacccatggtgccttttaagaccaaggacagccctggtgtgttctccaagctgggcgtcttacttaggcgcgtgactcggaacttggtgaggaacaagctggccgttatcacacgcctgctccagaatttaatcatgggcctatttcttcttttcttcgtgctgagggtaagatccaatgtgctgaagggagcaattcaagaccgcgtggggctcctttaccagtttgtcggcgccacaccatacacaggcatgctcaatgccgtcaaccttttcccagtgctacgggctgttagcgaccaggaaagtcaggatggcctttatcagaagtggcagatgatgctggcctatgctctgcacgtacttcccttctccgttgtggctacaatgatattcagcagtgtatgctactggaccctgggtctgcaccctgaagtggccaggtttggttacttcagcgccgcattgctggcccctcacttaataggcgagttcttgacgctcgtgctgctggggattgttcaaaatccaaacatcgtcaattctgtggtcgctctgcttagcattgcaggagtgctggtgggtagcggttttctgaggaatattcaagagatgcctattcccttcaagatcatctcctattttacgttccagaaatactgtagcgagatcctggtagtaaacgagttttacgggctgaacttcacctgcggcagctcgaacgtaagcgtcaccaccaatccgatgtgcgcattcactcagggtatacagttcatagagaaaacatgcccaggcgcgaccagcaggtttacgatgaatttcctcattctctattcttttattcccgccctcgttatactggggatagtagtgtttaagatcagagaccatctgatctcaaggtag

SEQ ID NO: 109303 - DNA, 1443 bp, synthetic construct
  misc_feature 1..1443: note = Description of Artificial Sequence: Synthetic coding sequence
  source 1..1443: mol_type = other DNA
atgtgcatcctgggttcaagtggcagtggcaagaccactctgctcgacgcaatgtccggtaggctgggacgcgcagggactttcctcggagaggtctacgtgaatgggcgggccctgcgacgcgagcagtttcaggattgttttagctatgtcctgcagagcgatacgttattatccagccttactgtcagggaaacactacactatactgccctgctcgctatccgccgaggaaatcccgggtccttccagaaaaaggttgaggccgtcatggccgagctgagtcttagccacgttgctgacaggttgattgggaactatagtctggggggaatttctacgggtgagaggcgtcgcgtctccattgccgctcaattgttacaggatccaatggatctcacctctgtggatacccagtccaaggaaagggagatcgagacttctaaaagagtgcagatgatcgagagcgcttacaaaaaaagcgcaatatgccataaaaccctgaagaatatcgagcgtatgaagcacttaaagacactgccaatggtgccctttaagactaaggatagtcccggcgtcttttctaagctaggtgtgcttctcaggagggtaacacggaacctggtgcggaataagcttgcagtaatcacgagactgttgcagaatttgataatggggctgttcctcctctttttcgtgctccgggttcgaagcaacgtgttaaaaggggccatccaggacagggtcggcttgctttaccagtttgtgggtgctacaccttatacaggcatgttaaacgccgtcaatttgtttcccgtgctgagagctgtgtctgaccaagagtctcaagacggcctctaccagaagtggcaaatgatgctcgcctacgccttgcatgtgctaccgtttagcgttgttgccaccatgatattcagttccgtgtgctactggacactcgggctccatccagaagtggccaggttcgggtatttctccgccgccctgcttgcccctcatctgattggcgagttccttactctggtattattgggaattgtgcagaatcctaacatcgtcaattctgtagtggcccttctgagtatcgcgggggtgttagtgggaagcgggtttctgagaaatatccaggagatgcccattcccttcaagataatatcttactttacgttccagaaatattgctctgaaatcttagtggtcaatgagttctatggtttgaactttacttgtggatcctccaatgtgtctgtgacaaccaaccctatgtgtgcattcactcaagggattcaattcattgaaaagacttgccccggggccacttcacgatttacaatgaacttcctcatcctctacagctttatccctgcattagtcattctgggtattgtggtattcaagattcgagatcatctgatctccagatag

SEQ ID NO: 109304 - DNA, 771 bp, synthetic construct
  misc_feature 1..771: note = Description of Artificial Sequence: Synthetic coding sequence
  source 1..771: mol_type = other DNA
atggggctgtttctcctctttttcgttctgagggttagatctaacgtgctaaagggcgctattcaggaccgggtcggtctcttatatcagtttgtgggggcaacaccctatactggcatgctcaacgcggtcaatctcttccccgtgctgagggctgtgtctgatcaggaatctcaggacgggctgtatcagaaatggcaaatgatgctggcatacgccctgcacgtcctgccgttcagtgtggtggcaaccatgattttttcttccgtgtgctattggacccttggcctgcacccagaagtcgcaaggtttggctatttttctgccgccctcttagcacctcacctcatcggagagtttctgactctcgtcctgctgggaatcgtccaaaatcctaatattgtgaattctgtggtggctctgttgagtattgctggagtccttgtgggctctggtttcctcagaaacattcaagagatgccaataccgttcaagatcatttcctacttcacgtttcagaaatattgctctgagatactggttgtgaacgagttctacggcttgaatttcacttgtggtagctcgaatgtatcagttaccaccaatcctatgtgcgccttcacgcagggaattcagtttatcgaaaagacctgcccaggagccacctctcgcttcaccatgaactttctcatcctctacagctttattcccgccctggtcattttgggcattgtggttttcaagatcagggatcatttaatctcaagatag

SEQ ID NO: 109305 - DNA, 2022 bp, synthetic construct
  misc_feature 1..2022: note = Description of Artificial Sequence: Synthetic coding sequence
  source 1..2022: mol_type = other DNA
atggctggaaaggctgccgaggagaggggccttccaaagggcgctacgccccaagacacaagtggcctacaggaccgcctcttctctagtgaatccgacaattcactatattttacttattcaggacagccaaatacgctcgaagtaagagatctcaattatcaggtcgatctggcttcacaggtgccttggttcgaacaactggctcagttcaagatgccatggaccagcccctcgtgccagaactcctgtgaactgggaatccaaaacctgagctttaaagtgcggtctgggcaaatgctggcaattattggcagctctggctgcgggagagcctcactcctggatgttattactggccggggacatgggggaaagatcaaaagtggtcagatctggatcaacggtcagccttcatcccctcaactcgtcagaaagtgtgtggcacacgtccggcagcataaccagctgctgcccaatctgaccgtgagggagacactggcctttatagcacagatgcgcctgcccagaacgttcagccaggcccagagagacaagagagtagaagatgtcatcgccgaactccggctcaggcagtgtgcggatactagggtgggcaatatgtatgtcagaggactgagcggtggcgaacgaagacgggtgtcaatcggcgtgcagctgctctggaacccagggattctcattctcgatgagccaacaagcggactcgattcttttacggcccataacttggtcaaaaccctcagccgcctcgccaagggaaataggctggtcctgatctctctgcatcagccacgctctgacatctttcgattgtttgacttagtgctgttaatgacctccggaacccctatctacctgggtgccgcacagcacatggtccaatattttactgcgattggatacccctgtcctagatactctaaccccgcagacttttacgtcgatttgaccagcatagaccggagatcaagagaacaggaactcgccacacgcgagaaggcccagtctctggccgctctctttctcgaaaaagtgcgagaccttgacgatttcctttggaaagcggaaacaaaagatttggacgaagacacctgcgtggaatcatccgtgacccccttggacacgaactgcctcccctctcctacgaagatgcccggtgcggtgcagcagtttactacactcattaggcgccaaatctctaacgatttcagggacctgccaaccctgctgatacacggtgcggaggcttgtctgatgtcaatgaccattggtttcctgtactttggacatggctctatccagctgtcattcatggataccgctgctttgctattcatgatcggcgctttgatcccatttaacgtaatcttggacgtaatttcgaagtgctatagtgaaagagcaatgctgtattacgagttggaggatggactttacaccacaggaccctactttttcgcaaagattctgggcgaactcccagaacactgtgcctacattatcatttacggcatgccaacatattggttggccaacttgcggcctgggctgcagcctttcctgctgcacttcctgttggtctggctggtggttttctgctgtaggatcatggccttggcggcagctgctctgttgcccacatttcacatggcctcattctttagtaacgccttgtacaattccttttacctggcaggcgggttcatgatcaacctgtcttcactgtggaccgtcccagcatggatttctaaagtgtcctttctacgatggtgtttcgaagggctcatgaaaatccagttttccagacgcacctacaaaatgcctctgggtaacctgaccatcgccgtcagcggcgataaaatcctctctgtgatggagctggactcttatcccctgtatgccatttaccttattgtgattggtctctcaggaggcttcatggtgttgtactacgttagccttcgcttcataaagcaaaagccgtcacaggactggtag

SEQ ID NO: 109306 - DNA, 2376 bp, synthetic construct
  misc_feature 1..2376: note = Description of Artificial Sequence: Synthetic coding sequence
  source 1..2376: mol_type = other DNA
atggccggtactagtgccccgggctccaagcggcggagcgagcctcctgcacccaggcctggccccccccctggcacgggacacccgcccagcaaaagagcccggggattctccgcagctgcagctcccgatccagacgaccccttcggagctcacggcgactttactgctgacgatctagaagagctggacacgctggcatcacaggctctctcccagtgtcccgctgccgcgcgcgacgtctcttcagaccataaagttcaccgcctgctggacggaatgagtaagaatccaagcggcaagaaccgggaaaccgtcccaattaaagacaatttcgaactcgaagtgttgcaggctcagtataaagagctgaaagaaaagatgaaggttatggaagaggaggtgttaattaagaacggagagattaagattctgcgagattccctgcatcagacggagtcagttctcgaagaacagcgccgctcccattttctactagagcaggagaagacgcaggccctcagcgacaaggaaaaagagtttagcaagaagcttcagagcctccagtctgaactccagttcaaagatgcagagatgaacgagcttcggacaaagcttcagacttcggaacgtgccaataagctggccgcgccctcggttagccatgtgtctccccgaaagaacccatcagtggtgattaagccagaggcgtgttccccccaattcggtaagaccagcttccctaccaaggagagtttcagtgccaacatgtctctgccacacccttgtcagactgagagcggatacaagcctttagtgggccgtgaagactcaaagcctcattcccttagaggagattctatcaagcaagaggaggcccaaaagagcttcgtagacagttggcgacaaagatctaacacacagggttcaatcctaatcaatttactcctgaaacaaccgctcataccaggaagttcactaagcctgtgccatctgctgtcctcatcctccgaatctccagccgggaccccacttcaaccacccggattcggttccacactggcaggtatgtctggtctgcgcacaactggttcttacgacggctctttttcactctcagcactgcgggaagcacagaacctggccttcactggcttaaatttagtcgctagaaacgagtgtagccgggacggagatcctgcagagggcggccggcgcgctttccccctttgtcagcttccaggcgctgtccacttcctgcccttggtgcagttttttatcggcctgcactgtcaggccctccaagatctagcagcagcaaaaaggagtggtgcccctggagattctccgacccattcctcgtgtgtctcatctggggtggaaaccaatccagaggactccgtgtgtatccttgaaggattttcagtcacagcactcagtatccttcagcatctggtatgtcacagtggcgccgtggtgtctctcctgctaagcggtgtgggggccgatagcgccgctggggaagggaataggagcctagtgcaccgacttagcgatggcgacatgactagcgccctccgcggtgtagctgacgaccaggggcagcacccacttcttaaaatgcttttgcatctgctcgcattctcttccgccgctaccggtcacctgcaagcctctgtgctaacccaatgtctgaaggttcttgtgaagcttgctgagaacacatcttgcgattttctgcccagattccagtgtgttttccaggtgttacctaagtgcctttccccggagacccccttgccatccgtgctgcttgcagtggaactgctatccttactggctgatcacgatcaactcgcccctcagctttgttctcacagcgagggttgccttctgctgttgctgtatatgtacatcacctcacgcccagaccgggtggctttagagacacagtggctgcaactcgaacaggaggtcgtgtggttgcttgccaagttgggagtgcaaagccccctcccacctgttacaggatccaattgtcagtgtaacgtagaagtggtgagggcactgactgtcatgctccatcgccaatggctgacggtacggagagccgggggtcctccgaggaccgaccagcagcgtcgaacagtgaggtgcctgagagacaccgtgctgcttctccacggactttcgcaaaaggataagctcttcatgatgcattgcgttgaggtactgcatcagtttgatcaggtgatgcccggcgttagtatgctgattagagggctgcccgacgttacagattgcgaggaagccgcccttgatgacctatgtgccgccgagaccgatgtggaagacccagaggtagaatgcggttag

SEQ ID NO: 109307 - DNA, 2295 bp, synthetic construct
  misc_feature 1..2295: note = Description of Artificial Sequence: Synthetic coding sequence
  source 1..2295: mol_type = other DNA
atggcagggacatctgccccagggagcaagaggcggagtgaacctcccgctcccagaccgggccccccccctggtactggtcacccaccatcaaagagagctcgcggtttctcagccgcggcagctcctgatcctgatgatccttttggcgcgcacggagatttcactgccgacgacttggaggagctggacactctcgcttcgcaggctctttcccagtgtcctgccgctgctcgagatgtttcctcagatcataaggtccaccgactcttagatggcatgtctaaaaatccctcgggaaaaaatcgcgagaccgttccaatcaaagacaatttcgagcttgaggtgctgcaagctcagtacaaagagttgaaagagaaaatgaaagtgatggaggaggaggttctgataaaaaatggggaaataaagattcttcgagactccctgcatcagaccgaaagtgtgctggaagaacagcgtaggagccacttcctcttggagcaggaaaagacacaagccttgagcgataaagaaaaagagttttcgaagaagctgcagtcgctgcaaagtgagctgcaattcaaggatgccgaaatgaacgagttaagaacaaaattgcagaccagcgaacgggcaaataaactggccgccccttccgtgtcacatgtttctccaaggaagaaccctagtgtagtcatcaaaccagaagcttgctcaccccagtttggaaaaacgagcttcccaacgaaagagtcgttttctgctaatatgagcttgccccacccctgccagacagagtctggatataagcctctggtaggacgggaggactccaaaccacattccctgagaggagattccatcaagcaggaagaggcgcagaagtcgttcgtggactcctggcggcagcggtccaatactcaggggtccattctgatcaaccttttattgaagcagccactcattccagggtcttcgcttagtctgtgccacctactgtccagcagcagtgagtcccctgctggcacaccgctgcagcctcccgggtttgggagcacactcgctggaatgagcggactacggaccaccggttcatatgacggctcctttagtctctcagcgcttcgcgaggctcagaacctcgccttcacaggacttaacttagtagcaagaaacgagtgttccagggacggtgatcctgcagagggaggacgcagagcatttcccctgtgccaacttcctggagcagttcatttcctgccgttggtgcagtttttcataggcctccattgtcaggctctgcaagacttagcggcagccaaacggagtggagcaccgggtgatagcccaacacactcttcctgtgtgtcctccggagttgagacaaatcccgaagatagcgtctgtatcctggaaggtttcagtgtgaccgccctgtcaatcctgcaacatcttgtttgccactcaggtgccgtggtgagcctgctcctcagcggcgtaggggctgatagcgccgccggtgaggggaaccggtctctcgtgcacaggctgtcagacggagatatgacaagcgctcttagaggggttgctgacgatcaaggccagcaccccctgttgaagatgctcctacaccttctcgcttttagctccgcggctacaggtcacttgcaggcttccgtcctcacccaatgtctcaaggtactggtgaagttggccgaaaatacgtcctgtgacttcctccctagattccaatgtgttttccaggtgctccccaagtgcctgtctccggagacccccttgccctccgtcctgctggccgtggagctgctcagcttgctggccgatcacgaccagctcgcccctcagctctgcagtcactcggagggttgtctgcttctgctgctgtatatgtatatcacatctcgcccagatagggtagccctagagacacagtggctgcaattggaacaggaggttgtgcgggccttgaccgtgatgctgcatcgccagtggctgaccgttcgccgggctggcggacccccaaggaccgatcagcaaaggcgaacggtacgttgtctcagagacactgtgctcctgctgcatggtttgtctcagaaggataagctgttcatgatgcactgtgtcgaagttcttcaccagttcgaccaggtgatgcctggggtgtctatgctcatccgcggcctgcctgacgttacagattgcgaagaggccgcactcgatgacttgtgtgcagccgaaacagacgtggaagatcctgaagtagagtgtgggtag

SEQ ID NO: 109308 - DNA, 1995 bp, synthetic construct
  misc_feature 1..1995: note = Description of Artificial Sequence: Synthetic coding sequence
  source 1..1995: mol_type = other DNA
atgaaggtcatggaagaggaagtgctaattaagaatggagagatcaaaattttgcgtgacagcctgcatcagactgaatccgtacttgaagagcagcggcgcagccactttctgctcgagcaggagaaaacccaggcactaagcgataaagaaaaggagttcagcaagaagctgcagagtctgcaaagtgaactacagtttaaagatgccgagatgaacgagctccgcactaaactgcagaccagtgagagagcaaataaacttgccgcgccctccgttagccatgtctcaccaagaaaaaacccatcagtcgtgataaaacccgaagcctgtagcccccagttcggaaagacatctttcccaaccaaggaatcttttagtgctaacatgagcttaccccacccctgccaaaccgagagcgggtataaacccctcgtcgggagggaagatagtaagccacacagtcttaggggcgattccatcaagcaggaagaagcccagaagagttttgtggactcttggcgccagcgtagcaatacccagggcagtatacttatcaacttgctactcaaacagccactcattccaggatcttccctgagtctttgtcatctgttatcttctagcagcgagtcccctgccggaacgccacttcagcctcctggatttgggtcgacgctggccggtatgtccgggctacgaacaacaggctcatacgacggttccttctctctgtccgccctcagggaggcgcagaacctggctttcaccggtttgaacttggtggcacgtaacgagtgtagtcgagatggtgatccagctgagggcggtcggagagcctttccgctttgccagttgcctggggccgttcacttcttaccgctggtgcaattctttatcgggctccattgtcaggccctacaggacctagccgcggccaagcgcagtggcgccccaggcgacagcccaactcacagctcttgcgtttcttccggtgtggaaacaaaccctgaggattctgtgtgcatcctggaagggttctcggtaactgctctatctatactgcaacatctggtttgccacagcggcgccgtggtgtccctgctgctttcaggcgtcggagccgattccgctgccggcgagggaaaccgctctctcgtccatcgcctgtcagacggcgatatgacttctgctcttcggggagttgcggacgaccaggggcagcacccattgcttaaaatgctcctgcatttgctggccttctcctctgccgccactgggcacctgcaagcatccgtcttaacacagtgtttgaaggtgctcgtcaaactagcggagaatacttcttgcgatttcctgcctcggtttcagtgcgtgtttcaggttctgccgaagtgccttagtccagagacaccactcccttctgtactgctggcagtcgagctcctgagcctgctggctgatcacgatcagctcgcaccacaactgtgcagtcacagtgagggatgcctgctcctgctcctctatatgtacattacctctcggcccgatcgagtggcactggagacccagtggctccagctggagcaagaggtggtttggctattggccaaactgggtgtgcagtctccattgccccccgtgacaggctccaactgtcagtgtaatgtcgaggttgtgcgggcactcacagttatgctgcaccgccagtggctcactgtccgaagagccggaggccctcctagaacggaccaacaaaggagaaccgtacgttgcctaagggacacagtcctcttgttgcacggcttatcacagaaagataagctgtttatgatgcactgcgttgaggttctccatcagtttgaccaggtgatgcccggggtcagtatgctcattagggggcttccggacgtgacagattgcgaagaggctgcactagacgatttatgcgcagccgagaccgacgtggaggaccctgaggttgagtgcggctag

SEQ ID NO: 109309 - DNA, 2097 bp, synthetic construct
  misc_feature 1..2097: note = Description of Artificial Sequence: Synthetic coding sequence
  source 1..2097: mol_type = other DNA
atgtctaaaaacccctcgggaaaaaatcgcgagaccgttccgattaaggacaactttgagctggaagtgctccaggcgcagtacaaggagctcaaggagaagatgaaggtaatggaggaggaagttctgataaagaatggagagatcaaaatcttgagggacagcctacaccagaccgagagcgtgctcgaggagcagagaaggagccacttcttactggagcaggagaaaactcaggccttgagcgacaaagagaaggagtttagtaagaagttacagagtctccaatctgagctgcagttcaaggatgccgaaatgaacgaattaagaacgaagctccagactagtgagcgagcgaataaactggcagccccaagtgtgagccacgtgtcaccgagaaaaaacccttcggtcgtcattaaacctgaggcctgctctccccagtttggaaagacgagctttcctacaaaggagagctttagcgccaacatgagtctcccgcacccatgccaaaccgaaagtgggtacaagccactggtcggaagagaagactcaaagccccactcactccggggtgactctatcaaacaggaggaagcccagaagagctttgtcgactcctggaggcagcggtctaacacccaaggttctatcctgataaacctgcttctcaagcagccccttatccctggctcctctctgagcctgtgccacctgctgagttcttcgagcgagagcccggcggggacacctctccagccccctggcttcgggtccactcttgccgggatgtccggattgcggaccacaggttcctatgatggtagtttttctctcagcgcattgcgcgaggctcagaacttggctttcacagggcttaacctggtcgccaggaatgaatgctcacgagacggggacccagctgagggggggcgacgtgcctttccactatgtcaacttcctggcgccgtccactttctgccgttggttcagtttttcattggcctccactgccaggcacttcaggatttggccgcagcaaagaggtccggcgcacccggcgactccccaacacacagttcatgcgtgtccagtggcgtggagacgaaccctgaggactccgtgtgcatcctggaggggttttcagtcaccgcattgtcaattttgcagcatctggtttgccacagcggagccgtggtgtccctgctgctgtccggcgtgggcgccgattccgcagccggtgaagggaataggtccctggttcatcgattgtcagatggagatatgacctcggctctaaggggcgtagcggacgatcagggccagcaccctctccttaagatgctgctgcatctgcttgctttctccagcgctgcaacaggccatcttcaggcatctgtccttactcagtgtctgaaggtgctggtgaagcttgccgagaataccagctgcgattttttacctcgcttccagtgcgtttttcaggttttgccaaagtgcttatccccggagaccccattgccttcagtcctcctcgctgttgagctgttgtcgctgctcgccgatcacgaccagctggctcctcaactctgtagtcactctgagggttgcttgctgctgctactttacatgtatattacaagtaggccagatagagtggcattagagactcagtggttgcagctggaacaagaggttgtgtggttgcttgcaaaattaggtgtccagtcaccactgccgcctgtgacaggaagcaactgtcagtgcaatgttgaggtcgtgagggctcttaccgtgatgctccatagacagtggctgacagttagacgcgctggcggcccccctaggacagatcagcaacgccgaacagttcgttgtcttcgagacaccgtgctgctactgcacggcctgagccaaaaggataagctcttcatgatgcattgtgttgaggtgctgcaccagttcgatcaagtcatgccaggtgtttctatgctgatccggggcctgcctgacgtaacagactgtgaggaggctgcgctggatgacctgtgcgctgctgagacagacgtggaagatccagaagtcgagtgcggatag

SEQ ID NO: 109310 - DNA, 591 bp, synthetic construct
  misc_feature 1..591: note = Description of Artificial Sequence: Synthetic coding sequence
  source 1..591: mol_type = other DNA
atgtcaaagaatccctccggcaaaaacagagaaactgtgccaatcaaagataacttcgagctcgaagtgctccaggcccaatataaagaactcaaggaaaaaatgaaggtaatggaagaagaagtacttattaagaatggcgaaatcaagattctaagggacagtctgcaccagactgaatccgtgcttgaggagcagcgaaggtcccatttcctgttagagcaggagaaaacacaagcgttgtctgataaggagaaggaattttcaaagaagctccagtcattacaatcagagctccagtttaaagatgccgagatgaacgagctccgaaccaagctccaaactagcgagagagcgaataagctggcagcaccctccgtgtctcacgtgagtcctagaaaaaatccttctgtggttatcaaaccagaggcatgcagcccccaattcggcaaaacaagcttccctactaaggaaagcttctcagccaacatgtctctgcctcatccctgccaaaccgagagcgggtataaaccactggtcggacgcgaggattcaaaaccccatagtctgcgaggcgatagtatcaaatag

SEQ ID NO: 109311 - DNA, 141 bp, synthetic construct
  misc_feature 1..141: note = Description of Artificial Sequence: Synthetic coding sequence
  source 1..141: mol_type = other DNA
atgtcaaagaacccctctggcaagaatagagagaccgtgcccatcaaggacaattttgagctggaggtcctccaagctcagtataaggaactgaaggagaagctatgtaagaaagctgatactagttaccaccacctgtag

SEQ ID NO: 109312 - DNA, 1305 bp, synthetic construct
  misc_feature 1..1305: note = Description of Artificial Sequence: Synthetic coding sequence
  source 1..1305: mol_type = other DNA
atgagcatcgaaaaaatttgggcaagagaaatcctagactccagggggaatcccacggtggaagtggatctctatacagccaaggggctgtttagagctgcggtcccaagcggtgcaagcaccggaatatacgaggctctggaattgcgggacggggacaagcagcgatatctgggcaagggagtgcttaaggccgtggatcacattaactccaccatagcacctgctttgatctcgagcggtctgtcagtagtcgaacaagagaagttggacaatctcatgctcgagctggatgggactgaaaataagagcaaatttggagctaatgcaatactaggcgtgtctctggccgtttgtaaggctggggcagccgaacgggagctgcccctatacagacacatagcgcaactcgccggcaacagtgatttgatcctgccggtgcccgcttttaacgtcatcaacgggggctctcacgccggcaacaaactggccatgcaagagttcatgattctgcctgtgggggctgagagctttcgcgacgctatgagactgggagccgaagtgtaccataccctgaagggtgtaatcaaggataagtacgggaaggacgccactaacgttggagacgagggtgggtttgcccctaacattctggaaaactctgaggccctcgagctggtcaaggaggccatcgataaggctggctataccgagaagatcgtgataggaatggatgtggccgcttccgaattctatcgagatggcaagtatgacctggatttcaagagcccaacagatccgagtcgatacataactggtgaccagctgggggcactttaccaggatttcgttagggattacccagttgtgtccattgaggacccgttcgatcaggatgattgggccgcctggtccaaattcactgctaacgtgggaatccagatagtcggtgacgatctgacagtgaccaacccaaagagaatcgaaagagctgtggaagagaaagcatgtaactgtctgctgctcaaagtaaaccagatagggtcagtcactgaggcgattcaggcctgtaagttggctcaagaaaacgggtggggtgtgatggtatcgcataggtcaggtgagacagaggatacctttatcgccgatttagtcgttggcctctgtactggccagatcaagaccggtgcgccatgtcgcagtgaacggctcgctaagtataaccagttgatgagaatcgaagaggagcttggggatgaggctagattcgctgggcataattttcgcaatccatcagttctctag

SEQ ID NO: 109313 - DNA, 3573 bp, synthetic construct
  misc_feature 1..3573: note = Description of Artificial Sequence: Synthetic coding sequence
  source 1..3573: mol_type = other DNA
atgaaaacgagacagaataaagactccatgagtatgcgctccggacgcaaaaaggaggccccgggcccccgagaagaactacgaagtcggggtcgcgcttccccgggaggggtcagtacgtcctctagtgacggcaaggcagaaaaatctcggcagaccgccaaaaaagctcgcgtcgaggaggcttcaacaccaaaagtaaacaagcaggggcggagcgaggaaatttccgaatctgagtccgaagagaccaatgcaccaaagaagaccaaaacagaacaggaactgccaagacctcagagtccctcagacctcgattctctggatggtagatcgcttaacgacgatggtagctcggacccacgggacattgaccaggataatcgctctactagcccatctatctatagtcccggatctgttgagaacgactcagacagtagttcaggcctttcccaggggcctgcacggccctaccatcctccccccctgttcccacccagtccacagccaccagacagcacacctagacagccagaagcaagcttcgagccgcaccccagtgtgacccctaccggatatcatgcccccatggagcctcctacaagcaggatgttccaagcacctccaggagcacctcccccccatcctcagctatatcccggcgggactggcggtgtgctcagcggcccacccatgggacctaagggcggcggcgccgctagttctgtgggcggccccaatggcgggaaacagcacccccctccaactactcccattagtgttagttccagcggagctagcggggcgcctcctacgaagccccctaccacccccgtggggggtggcaatctcccgtccgcacccccacccgccaacttcccgcatgtgacccccaacctgcctcccccaccggccctgcggccactcaataatgccagcgcctcaccgcctggcctgggggcacagccactacccggtcacctcccttccccgcatgccatgggtcagggtatgggtggactcccaccaggaccagagaaaggcccgacgctggctccctcacctcatagcctcccccctgcgtcctcaagcgcaccagccccacccatgcgatttccctacagctcgtctagcagctctagcgcagcagccagttccagctcctcctcttcaagtagctccgcctcgccatttcccgcgagtcaggcccttcctagttatccacacagttttccacctccaactagtctgtctgtctcaaaccagcctcctaagtacactcagccctctctgcctagccaggcagtgtggagtcaagggcctcctccgcctcccccatatgggcgcttattggctaacagtaacgctcatccaggcccgtttcccccttccaccggcgcacaatctactgcccatcctcccgtgagtactcatcaccatcatcatcagcagcagcagcagcaacaacagcagcagcaacagcaacagcagcaacagcagcaacatcacggcaatagcgggccgcccccccccggtgcttttccgcatccactcgaaggcgggtctagccatcacgcgcatccatatgcaatgagtccatcactaggtagcctgcggccctatcccccaggcccagcacacctgcctcctccacactctcaggtctcgtattcacaagccggacccaacggccccccagttagtagcagctcgaatagcagctcctccacatcccagggctcatacccctgttctcacccctctcctagtcagggtccacaaggggccccctatcctttcccaccggtgccaaccgttaccaccagctccgctaccctgtccactgtgattgcaacggtagcttcttcgcctgcagggtacaaaacggcaagcccaccaggacctcctccttacggtaaacgggcaccttcaccaggcgcgtataaaacagcgactccgcctggctacaaacccgggagtcctccgtcatttcgaaccggaacgccccctggttacaggggtacctcccctcctgcagggcccggcactttcaagccgggtagcccaacagtaggccctggcccgctccctcctgccggaccaagtggattgccatccctgcccccgccccccgcagctcccgcatctgggcctcccctctcagccactcagatcaagcaggaaccagccgaagaatatgagacccctgagtctcccgtgccacctgccagatcacccagtcccccccccaaggtggtggatgtcccaagccacgcgagccagtccgctcgttttaataagcacctggaccgggggtttaactcctgcgccaggtctgatctgtacttcgttcccttggaggggtctaagctagctaagaagcgcgctgacttagtggagaaagtgcggcgtgaggccgagcaaagggctagggaggagaaagaacgagagagggagagagaacgggagaaagaacgggaaagggagaaggagcgtgaacttgagcgaagtgtgaagctggcacaggaaggccgtgccccagtggagtgcccttctctggggcccgtaccacaccgcccccctttcgagccaggctccgctgtggccacagtcccaccgtacctcggcccagacactccagcgttacgtacactatccgagtatgcacgcccacacgtgatgagccctggcaatcggaaccacccattttatgtgcccctgggcgcagtcgatcctggcttactgggttacaacgttcctgccttgtactcttcagatcccgctgcccgcgagagagagcgcgaggcacgcgagcgtgatttgagggatcgcctaaaacccgggttcgaagtgaagccatcagagctagaacctttacatggagttcccggacccgggctggaccccttccctcggcacggcggactagcgctacagccggggccccccggactccatccgtttccctttcacccatcgctgggtccgctggaaagggagcggctcgccctggccgccggtccagccctccgccctgatatgtcttacgcggaacgcctcgcggcagagcgccagcacgccgagcgggtggccgccttgggcaacgaccccctcgctcggctacagatgctcaacgtgaccccgcatcaccatcagcattcacacattcatagccacttacacctgcaccagcaagacgcgatacacgctgcttccgcctccgtccaccctttgattgacccgctcgctagcgggagtcaccttactcggattccttaccccgccgggacgttgcccaatccactccttccgcatcccctgcacgagaacgaggtgctgaggcatcagttgttcgccgccccataccgggatctacctgcaagtttgtcggccccaatgagtgcagcgcaccagctgcaggccatgcatgcacaatctgcagagctgcagagactagctctggagcagcagcaatggctgcacgctcaccatcctttgcactctgttccacttccggcacaagaggactactactctcacctgaaaaaagaaagtgacaagcctctctag

SEQ ID NO: 109314 - DNA, 3573 bp, synthetic construct
  misc_feature 1..3573: note = Description of Artificial Sequence: Synthetic coding sequence
  source 1..3573: mol_type = other DNA
atgaaaactagacaaaacaaggactccatgagtatgaggagtggcagaaaaaaagaggccccaggcccacgggaggaactcagatcaaggggtagagcctctcctgggggcgtgagtacatctagctcagatggcaaggcagaaaagagccgacagaccgcgaagaaagctagggtagaagaagcttccaccccgaaagttaacaagcagggccgatctgaagagattagcgagtctgagtcggaagaaacaaacgctccaaaaaagactaaaactgagcaagaactcccccgacctcagtcgcctagtgacctcgatagtctggatgggcgcagtctcaatgatgacgggtcgagcgacccccgcgatatcgatcaggacaataggtccacctcaccttccatttatagccctgggtccgtagaaaacgattcagacagctcttccgggctttctcagggcccagcgcggccataccatccacctcctctctttcccccatcaccgcaaccaccagattctactccccgccagcccgaagcatcattcgagcctcacccaagcgttacacccaccgggtatcatgcccccatggagcctccgactagccgaatgttccaggctcctcccggcgctccgcccccgcacccgcagctgtatcccggagggactggaggcgtcttatccgggccccctatggggcccaaaggcgggggagctgccagcagtgttggcggtcccaatggaggcaagcagcatccccccccaacgacacctattagcgtcagcagtagtggagcttctggagcaccacccaccaaaccaccaaccacccctgtgggcggcggcaacctgcctagcgcccctccacctgccaatttcccgcatgtgactcccaaccttccacccccaccagctctccgcccattaaataatgcttcggcgtccccccccggactgggggcacaaccactgcccgggcatctgccgtcccctcacgcaatgggacagggcatgggaggtttgcctcccggtcctgagaaggggccaacactcgccccgtccccacactctttgcccccggcatcaagcagcgcccctgccccaccaatgcggtttccctactcgtcctcaagtagtagctctgccgctgcaagctcaagctccagcagctcttccagtagtgcctccccatttcccgcatcccaggcattgccttcgtatcctcacagctttccaccacccacctccttatcagtatctaatcagcctcctaaatacacccagccaagcctccctagccaggctgtgtggagtcaaggaccacctcccccccccccttatggccgactgctcgccaatagtaatgcccatcctggcccttttcctccctcgactggcgctcagagtaccgcccatccccccgtgtccacccaccaccatcaccaccagcaacagcagcagcaacaacagcagcaacaacaacagcagcagcagcaacagcaacatcatggaaactcagggccacctccacccggtgccttccctcatcccttggaaggagggagctctcaccacgcccacccctacgcgatgtccccctccctgggatccctgagaccttatccccccggacccgcccacctgcctccccctcattctcaagtgtcatatagtcaggcgggcccgaacggacctcccgtgtcaagcagtagtaatagcagcagtagcacttctcagggctcatacccctgtagccatccatcgccctcacaggggccccagggagcgccttatcctttcccccctgttcccaccgtgaccacttcttctgcaacacttagtaccgtcattgctactgttgctagctctccggccgggtataagactgcctcccctccggggccacctccttacggcaagcgcgcaccctctccaggagcttacaagacagcaacaccaccgggctataagcccggttcccccccaagctttaggactggaacaccgccaggttatcggggcacttcaccacctgctggacctggcaccttcaagcccgggtcaccaacggttggacctggccccttgccacccgctggcccgtctggactaccgtccttgccacctccacctgccgcacctgcatccggacctcctctgtctgccacacagataaagcaggaacccgctgaggagtacgaaaccccagagtcccctgtcccacccgcacgctctccgagtcccccaccgaaagtggtcgatgtgcccagccatgcttcacagtctgctcgctttaataaacatttggaccgcggatttaatagttgcgccagaagtgacctctattttgtgcctctggagggctcaaagttagcgaaaaagagagctgacctcgtggaaaaggttcgaagggaagcagagcaaagagctcgtgaggaaaaggagagagagcgagaacgcgaacgggagaaagagcgggaaagagagaaggagcgggagctggaaagatccgtgaaactcgcccaggagggccgtgcgccagtcgaatgtccgtctctcgggccagtgcctcacagaccccctttcgagcccggatcagccgtggcgaccgtgcctccctatctcggccctgatactcctgctttgagaaccttgagtgagtacgctcgccctcacgtgatgagccctggcaacagaaatcatcccttctatgtacccctcggcgctgtcgatcccgggctcttaggatacaatgttcccgccctgtatagcagcgaccctgccgctcgcgagagggaaagagaggctagggagagagacttacgggaccgcctgaagcccgggttcgaggttaaaccctctgagctggagccgctacacggagttccaggacctggcttagacccatttccgcggcacggcgggctggcattgcagcccggtccccctggcttacaccccttcccctttcacccttcccttgggcccctggaaagagaacggctggcccttgcggctggaccagccttgaggcctgacatgtcctatgcagaacggttggctgccgaacgacagcacgccgagagagtcgctgcacttgggaacgaccccctcgccaggctccagatgctgaatgtgaccccgcatcaccatcagcacagtcacattcactcacacctacacctgcaccagcaggacgcaattcatgctgcctctgcaagcgtccatcccctgattgatccacttgcaagcgggagtcacctgaccaggattccgtatcctgccggtactttgccaaatccactcctgccacatcctctccatgagaacgaggttctgaggcaccaactgtttgctgcaccgtaccgcgaccttccagctagcctgagtgcacccatgagcgctgcacatcagctgcaagccatgcatgcacagtctgctgagctgcagcgcttggcattggagcaacaacagtggctccacgctcatcatcctctccattccgtgccattgccagctcaagaagactattactcccatcttaaaaaggagtctgacaagccactatag

SEQ ID NO: 109315 - DNA, 3573 bp, synthetic construct
  misc_feature 1..3573: note = Description of Artificial Sequence: Synthetic coding sequence
  source 1..3573: mol_type = other DNA
atgaagactaggcagaataaggattctatgtccatgcggtccggcaggaaaaaggaagccccagggccaagggaggaactgcggtcccggggcagagctagtcccgggggggtcagtactagctcctctgacggcaaggcagagaagtcccgacagaccgcaaagaaggcccgtgtggaggaggctagcactcccaaggtcaacaagcagggccgcagcgaagagatcagtgaatccgaaagtgaggagacaaatgccccgaagaaaaccaaaaccgaacaggagctgccgcgcccccagagcccgtcagatcttgacagcctggacggcagaagtcttaatgacgatggctctagtgatccccgtgatattgaccaggacaatcggagtacatctccatccatttactcccctggaagtgtggagaacgattcagacagttctagcggattatctcagggacctgcaagaccctaccacccaccgcccttgtttccaccatcacctcagcctcccgattctactccgaggcagcccgaagctagctttgagccccacccaagtgtgactcccactgggtatcatgccccaatggagcccccgacgagccgaatgtttcaggcgcctcccggggcacctcccccgcaccctcagctctaccccggtggtacgggtggggtcctctccggtccaccgatgggacccaaaggcggcggggcagctagctccgttggcggtcctaatgggggaaaacaacatcctccccccacaacacccatctccgtgtcatcctctggagcatcaggggcccccccgaccaagccccccaccacacccgtcggcggcggaaatctgccctcagcccccccccccgccaattttccccacgtgacccccaatttaccacctcctcctgccctaagaccgctgaataatgcttcagccagcccgccggggctaggagctcagccgttacctggccacctgccgagtccacacgcaatgggccagggcatgggcggactgccgccgggtccagagaaaggcccgacccttgccccctcgccacattctctgccacccgccagcagttcagcgccagcccctcccatgagatttccatactccagctcaagctctagcagtgctgcagccagctcttcgtcatctagctctagctccagtgccagccctttccccgcgtcccaggcactcccatcttacccccactcattcccaccacccaccagtttatccgtctctaaccagccacccaagtacacccaaccatcactaccaagccaggccgtgtggtctcaagggcctccccctcctcctccatacggccgcctgcttgcaaatagtaacgcacatcctggacccttccctccctctacaggagcgcaatccacggcacatccgcccgtgagcacgcatcaccatcaccatcaacagcagcaacagcagcaacaacagcaacagcaacaacaacaacagcaacagcaacatcacggaaatagcgggccaccaccccctggggccttccctcacccgctagaaggtgggtcttctcatcacgctcacccttatgccatgtcaccatccctagggagtctccgcccctatccccccggacctgcccatctgcctccgcctcattcacaggtcagttactcacaggccggtcccaatggaccaccagtctccagtagctccaattcgtcgtctagcacctcccagggatcgtacccttgttcgcacccgtcaccatctcaaggaccccagggtgctccttacccattccctcctgtgcctaccgtgaccacttcgagtgctaccttgtctactgtgatcgcaacagtcgcgtccagccctgccggctataaaacagcgtcaccaccagggccacccccttacggaaagcgggccccatcacccggagcgtataagacggctaccccccctggatataaacccggatcccctcccagtttccggaccggtacgccaccaggctaccgtgggacttcccctcccgccgggcctggcacctttaaacctggctccccaacggtggggcctgggcctctccctcctgccgggcctagtggactaccgtctttacctcccccgcccgccgcgcccgcttccggtcccccattatcggcaacccaaataaagcaggagcctgctgaagaatacgagacgcccgagtccccagtgccgcccgcaaggagtccgtctcccccgcctaaggttgtggacgtgccgtcccacgctagccaaagtgcgcggttcaacaaacatctggataggggcttcaactcttgcgcccgcagcgacctttattttgtgcccctggagggaagcaaactggctaagaagagggccgacctggttgagaaggtacgacgggaagccgaacagcgggctagggaggaaaaggagagagagcgggagagagagagagagaaagagcgcgaacgtgagaaggagcgtgagctggaacgcagcgtaaagttagcacaggagggcagggcccctgtcgaatgccctagtctgggaccagtgccgcatcgacctcccttcgaacctggttcagccgttgccaccgtccccccttatctcggccctgacacaccagccctccgcacattgtctgagtatgcacggcctcatgttatgagtcccggcaatcgcaaccatcctttctatgtaccactgggcgccgttgacccaggactgctgggatacaacgttccggccctctattcatctgacccagcagcaagggaaagggagagagaggctagagagagggacctgagggaccggttaaagccagggtttgaggtcaaaccgagcgagcttgagccattacacggcgtgccgggccccgggctggatccatttccccggcatgggggcttggccctgcaacctggccctccaggattgcacccttttcccttccacccctcactgggccccttagaaagagaacggttggccttagccgccgggcccgctctccgaccggatatgtcttatgcggaacggctagcggctgagcggcagcacgccgagagggtagccgctctcggcaacgatcctctggctcggctccaaatgcttaacgtgaccccccaccaccaccaacattcacatatccattcccacttgcacttgcatcagcaggatgcaattcatgcggcaagcgcatccgtgcaccctcttattgatccattggcatccgggtcacacctcacaaggatcccctatcccgctggtactctgcctaaccccctgctcccacatcccctccatgagaacgaggttctaagacaccaactgtttgctgctccatacagggatctgcccgcttccctaagtgcccccatgtcagcagctcatcagctccaggctatgcacgcccagtctgccgagctgcaacggctcgccctagaacagcagcagtggctccacgcccatcatccactgcattctgttcctttgccagctcaggaagattattattcccatttgaaaaaagaatccgacaagcccttatag

SEQ ID NO: 109316 - DNA, 519 bp, synthetic construct
  misc_feature 1..519: note = Description of Artificial Sequence: Synthetic coding sequence
  source 1..519: mol_type = other DNA
atgctagttatacaccttgaggagcacgtgattatagctttctcgcagcataatacaatcatggatctagttcagttcttcgtcacattttttagttgttttttgagcctcttgctggtggccgctgtagtttggaaaattaaacaaacctgttgggcatctcggcgacgcgaacaactgctgcgtgagcgccagcagatggcttcaagaccattcgcatcagtcgacgtggcgctggaggtaggcgccgagcagactgagtttcttcgcggccctctggagggggcacccaagccaatcgccattgaaccatgcgctggtaatcgtgccgctgttctgacagtctttttgtgcctccctcgggggagctcgggcgcccctcccccaggtcagagcggcctggcaatcgcatctgccctgatagatatctcccaacagaaggcctctgattccaaagacaagacctcaggggttcgtaatagaaaacacctgagtactcgccagggtacatgtgtgtag

SEQ ID NO: 109317 - DNA, 4140 bp, synthetic construct
  misc_feature 1..4140: note = Description of Artificial Sequence: Synthetic coding sequence
  source 1..4140: mol_type = other DNA
atggagaccggaggccgggccaggactggcaccccacagcctgcggcccccggtgtctggcgggctagacctgctggcggcggcgggggtggcgcctctagttggctgctcgacggtaactcctggctattgtgctacggattcctttaccttgccctgtatgctcaggtttcccagtctaagccgtgtgagcggacggggagttgtttctccgggcgatgtgtgaacagcacctgcctgtgtgacccaggttgggtcggagaccagtgccagcattgccaaggtaggttcaagctgaccgaaccatccggttatctgacagatggtcctattaactacaaatacaagactaaatgcacatggctgattgaaggctatccgaatgctgtgttacgcctgcgatttaaccactttgcgacagagtgctcttgggaccatatgtatgtgtatgacggtgacagcatctacgcgccacttatcgccgtgctctcaggactgattgtgccagaaatccggggcaacgaaacagtgcctgaggtggtgacaacgtcaggttatgcccttcttcactttttttcggacgccgcctacaatctgacaggttttaacattttttactccatcaactcctgtccaaacaattgcagcggtcacggcaagtgcaccacatcagtgagtgttccaagtcaagtatattgtgaatgcgacaaatattggaagggagaggcatgtgacataccctactgtaaggcgaactgcggttcacctgaccatggctattgcgacctcaccggagagaaactgtgcgtgtgcaacgacagttggcagggacccgactgtagtttaaacgtgccttctactgaaagctactggatcctgccaaatgtcaagccttttagcccctcagttggacgggcatcccataaggctgtgttgcacgggaaattcatgtgggtcatcgggggttacacgtttaactatagtagcttccagatggtgcttaattataacctcgagagcagcatctggaacgttggaacaccgtccaggggccctctccagaggtatgggcactccctggccctgtaccaagaaaacattttcatgtacgggggcagaatcgagacaaacgatggcaacgtaacagatgaactgtgggttttcaacattcacagtcagtcttggagtacaaaaacgcctaccgttctcgggcatggccaacagtacgctgtcgaggggcatagtgcccatattatggagctggactcgagggatgttgtcatgattatcatttttggatacagtgctatttacggttatacaagctctatccaggaatatcatatatctagcaatacctggctcgtccctgagaccaaaggggcgatcgtacaggggggatacggtcatacctccgtgtatgacgaaatcaccaaatcaatttatgtgcacggcggctacaaggcgctacccgggaacaagtacggtttagttgacgacctgtacaagtacgaagtcaacacgaagacttggacaatcctgaaggaatctggattcgcccgctatctgcacagcgcagtgctcattaatggtgcaatgttaatttttggcgggaacacccacaatgacactagtctgtccaatggagccaagtgcttcagcgctgactttttggcatacgatatcgcctgcgacgaatggaagatcttgccaaagcctaatttgcacagggacgtgaaccgattcgggcattcagcagtcgtaattaacggatctatgtacatctttggtggattcagctcggtcctactgaacgatatcctcgtgtataaaccacccaattgcaaggccttccgcgatgaggaactttgcaagaatgcgggtcccggtatcaagtgcgtttggaataaaaaccactgtgagagctgggaatcgggaaacacaaataatatcctgagggccaagtgcccccccaaaaccgctgcctccgatgacaggtgctaccgctacgccgactgcgccagttgtaccgctaataccaatgggtgtcagtggtgcgacgataaaaaatgtattagcgctaattccaattgcagcatgtctgttaaaaattacactaagtgtcatgtaagaaatgaacagatctgtaacaagttgactagctgcaagagctgttcgttgaatctcaactgccagtgggatcagaggcagcaagaatgtcaggcactaccagcccatctgtgcggggagggttggtctcatatcggggacgcctgcctccgggtcaattcctctcgggagaactatgataacgccaaattgtactgttataatctctcaggtaacttggcctcactaaccacatcgaaagaagtcgagtttgtccttgatgaaattcagaaatacacgcagcagaaagtcagtccatgggtcggcctgcgcaagattaatataagctactggggctgggaagacatgtctcccttcacaaacaccaccctgcaatggctccccggtgagcccaacgactcagggttctgcgcttacctggaaagagccgccgtcgccggacttaaagccaacccgtgcaccagtatggcaaatggtttagtctgcgagaaaccggtggtgtcaccgaaccagaatgcacgcccttgtaaaaaaccctgtagcttgagaactagctgttcaaattgtacatccaatggaatggagtgcatgtggtgctcatctacgaaaaggtgcgttgattccaacgcgtacatcatcagcttcccttacggacagtgcctcgagtggcagaccgctacctgctctccccagaattgctccggcctgcgcacatgcggacagtgcctggaacagcccggttgtgggtggtgcaatgatccctcaaataccgggcgcggacactgcattgaagggagtagccggggcccaatgaaactgattgggatgcaccactctgaaatggtgttagacactaacttgtgtcctaaagaaaagaattacgagtggtcattcatccaatgcccagcctgccaatgtaatggccactctacgtgtataaataacaacgtttgtgaacagtgcaagaaccttacaacaggcaagcagtgtcaggattgcatgcctggttactatggagacccaaccaatggtgggcaatgtactgcatgtacttgcagtggacacgccaacatttgtcacttacatacgggtaagtgcttttgtaccaccaagggaattaagggcgaccagtgccagttgtgcgactcagagaaccggtacgtggggaatcctttacgcggaacctgttattattcattgcttattgattaccagtttactttctctctgcttcaggaggatgataggcaccacacagccattaattttatcgcaaatccagaacaaagcaataaaaatcttgacataagcatcaacgcgagtaataactttaatttgaatatcacttggtccgtcggaagcactgccgggacaatttctggagaagaaaccagtatcgtgtccaagaacaacatcaaagagtaccgagatagtttttcctatgaaaagtttaactttagatcgaatccaaatattacgttttatgtatacgtctctaacttctcatggccaatcaagattcagatcgcttttagtcagcacaacactataatggatctggtccaattctttgtgacgtttttctcatgcttcctcagcctcctgttggtggctgccgtggtgtggaagatcaaacagacatgctgggcttcacgccgccgagagcagctgctgagggaaaggcagcagatggccagtcgaccttttgcctcggtggatgtggccctggaggtcggggcagagcagacagaattcttgcgcggccccctagagggtgcaccaaagcctatcgccatcgaaccttgcgcaggcaatagagccgcggtgctgacggtgtttctgtgcctaccaagaggctcatctggtgcccctcccccggggcagagcggcctggcaattgctagcgcgctcattgacatcagtcaacaaaaagcctcagactccaaagataagacatctggagtccgaaatcgaaaacacctaagtacgaggcagggtacctgcgtgtag

SEQ ID NO: 109318 - DNA, 1293 bp, synthetic construct
  misc_feature 1..1293: note = Description of Artificial Sequence: Synthetic coding sequence
  source 1..1293: mol_type = other DNA
atggagtgcatgtggtgctcatctacaaagcggtgcgtggattctaacgcatatattatcagctttccgtacgggcagtgtctcgaatggcagacagcaacctgttccccacagaattgttcagggctgcgaacctgcggccaatgcctggaacagcctggctgcggctggtgcaacgacccttcaaacacgggccggggccactgcatcgagggcagcagcaggggtccaatgaaattaatagggatgcaccacagcgagatggtgttagacaccaacctgtgcccaaaggagaaaaactatgagtggtctttcatccagtgcccagcatgtacttgttccggccatgccaatatatgtcacctgcacacaggcaaatgcttttgcacgaccaaaggaattaagggggatcagtgccaattatgtgactctgaaaacaggtatgtgggcaaccccttgcggggtacctgctactactccctcctgattgactaccagtttaccttttccctgctgcaggaagacgatagacatcatacagctataaatttcatagctaaccccgagcagtcaaacaagaatttggacatttccattaatgcctccaataatttcaaccttaacatcacatggtctgttggttcaactgcgggcacaatcagtggcgaagaaactagcatcgtcagcaaaaacaatatcaaggaatatcgagattctttctcttatgagaagtttaatttccggtcaaatcccaacattacattctacgtgtacgtatctaatttcagctggcctatcaagatccagattgccttctcacagcacaatacaattatggacctcgtacagttcttcgtaacattcttctcctgcttcctaagcctgctgcttgtggccgccgtcgtgtggaagatcaaacagacctgctgggcctctcgccgccgagagcagctcttgcgggaaaggcaacagatggcaagccggccatttgcctccgtcgacgtagcgctggaggttggcgctgagcaaaccgaatttttaagagggcctcttgagggcgccccaaagcctatcgctatcgagccatgtgccgggaatcgtgccgccgtgctcaccgtgtttctttgtctcccacgcgggtcaagcggggcgccccctccagggcagtccggtctagctatagcatcagctttgattgacattagtcaacagaaggcatctgattccaaggataaaactagcggcgtccggaaccgaaagcacctgtcgactcgtcagggaacatgcgtatag

SEQ ID NO: 109319 - DNA, 207 bp, synthetic construct
  misc_feature 1..207: note = Description of Artificial Sequence: Synthetic coding sequence
  source 1..207: mol_type = other DNA
atgcccaagcacgaattctcagtcgatatgacctgtggtggttgcgccgaagccgtgtccagggtgctgaacaagctgggaggtgtaaagtatgatattgacttgcctaataaaaaggtgtgcatcgaatctgagcactctatggacactctgttggctaccctgaagaagaccgggaagaccgtttcctatctgggcctggaatag

SEQ ID NO: 109320 - DNA, 207 bp, synthetic construct
  misc_feature 1..207: note = Description of Artificial Sequence: Synthetic coding sequence
  source 1..207: mol_type = other DNA
atgcctaagcacgagttctctgttgacatgacatgtggaggctgtgccgaggcggtctcccgtgtcttaaataaacttggaggtgtgaagtatgacatagacctgccaaacaagaaagtttgtatcgagtctgagcattccatggacacgctgctcgctacactcaaaaagactggcaaaacggtgagttacctggggctggagtag

SEQ ID NO: 109321 - DNA, 207 bp, synthetic construct
  misc_feature 1..207: note = Description of Artificial Sequence: Synthetic coding sequence
  source 1..207: mol_type = other DNA
atgccaaaacacgagtttagtgttgatatgacttgcggtgggtgcgcggaggcggtgtcccgggtcctgaacaagctcgggggcgtaaaatatgatatagaccttccaaacaagaaggtttgcatcgaaagtgagcacagcatggacacgcttttggcgaccctgaagaaaacaggtaagaccgtgtcctacttggggctcgagtag

SEQ ID NO: 109322 - DNA, 933 bp, synthetic construct
  misc_feature 1..933: note = Description of Artificial Sequence: Synthetic coding sequence
  source 1..933: mol_type = other DNA
atggcagctgctgtggctgcggctcccggggccctcggctctctgcatgctggtggcgcacgcctggtcgcagcctgctccgcctggctctgcccagggctccgactgccaggctctctggccggtagacgagccggaccagcgatttgggcacaggggtgggtgcccgcggctggtggacctgcaccaaagcgcgggtattcctccgagatgaaaactgaggacgaattacgggtacgacatctggaggaggagaaccgcgggattgtggtgctcggtattaatcgggcctatggaaaaaactccttatctaaaaatttaattaagatgctctccaaggctgttgatgccctgaaatccgacaagaaagtgaggacgattatcatcagatcagaggtgccaggtattttttgtgccgctaatctgccagtgcccaccattgcagctattgatggactggcattgggcggcggactcgaactggcactcgcctgtgacatccgagttgcagcctctagtgcgaagatggggttggtcgagactaaactggccattattcctggcgggggcgggacacagaggctgccccgtgccatcggaatgagtcttgccaaggaacttatcttttcagccagggtgctggacggaaaagaagcgaaggccgtgggcctcatcagccacgtgctcgagcagaatcaggagggcgatgcggcttataggaaagcgttggatctagcccgagaatttctgccccaaggtccagttgccatgcgggtggccaagttggctattaaccaaggtatggaggtagacctggtaacaggcctggccatagaggaggcgtgctatgcccaaacaatacccaccaaggataggctggaaggcctccttgcctttaaggaaaagcgcccacctaggtacaagggtgagtag

SEQ ID NO: 109323 - DNA, 1020 bp, synthetic construct
  misc_feature 1..1020: note = Description of Artificial Sequence: Synthetic coding sequence
  source 1..1020: mol_type = other DNA
atggccgccgctgttgctgctgccccgggcgccttagggtcgctccatgctggaggagctagactcgttgcagcatgcagcgcatggctgtgccctggcctccgcctacctggatcgctggccggtcgaagagccgggccagcaatctgggcacagggatgggtccccgccgccggcggccctgccccaaagagagggtattcttccgagatgaagacagaagacgagctccgagtcagacacttggaggaagaaaacaggggcatagtggtgctgggcatcaatcgggcgtacggcaaaaactcccttagcaaaaatctgataaagatgctgagtaaggctgtagacgcattgaaatcagataaaaaggtccgtaccatcattattagaagtgaagttccggggatcttctgtgctggcgccgatctgaaggaaagggccaagatgagttcaagtgaggtgggcccttttgtgtctaagattcgcgctgttatcaacgatattgcaaacctcccggtccctacaatagcagccatcgacggcctggcgcttggaggcggactcgagttggctttggcctgtgatatcagagtggcagcctcgagcgcaaagatggggctggtagagaccaaactggctatcattcctggtgggggaggtacacagagactgccccgcgccattggaatgagcctggctaaagagttaatcttttcggctcgtgttcttgacggtaaggaagcaaaagcagtcggattgatttctcacgtgctcgaacagaaccaggagggagacgccgcctataggaaggctctggatctggctagagaatttttacctcagggccccgtcgctatgcgtgtagctaagctggctatcaaccaaggaatggaagttgacctggtgaccgggctagcaattgaagaggcttgctatgcccagacgattcccacaaaggacaggctcgagggcctgctggcctttaaggaaaagcgccctccacgctataaaggcgaatag

SEQ ID NO: 109324 - DNA, 768 bp, synthetic construct
  misc_feature 1..768: note = Description of Artificial Sequence: Synthetic coding sequence
  source 1..768: mol_type = other DNA
atggccgccgcagtagcagccgccccaggcgctcttggcagcctgcacgctggaggcgctaggctagtagcagcctgctccgcttggctgtgtccagggctgaggttaccaggatctctggccgggaggcgagcgggtccggctatctgggcacagggatgggttcccgccgcaggaggccctgctcccaaacgaggatatagttctgagatgaagacagaagatgaactgagggtgagacatcttgaggaagaaaatagggggatcgtggtcctgggtatcaacagggcctatgggaaaaattctttgtctaaaaacctcatcaaaatgctgtcaaaagctgtagatgctttaaaaagtgataaaaaggtgaggactattataattaggtccgaggtcccgggaattttttgcgccggagcagatctgaaggaacgcgcaaagatgagcagctcggaagtcggacccttcgttagcaaaatacgggccgttataaatgacattgctaatctcccagtgcctacaatagctgccattgatggactggcgctggggggaggcctcgaactcgccctggcatgtgacattcgagtggccgcctcttccgccaaaatgggcctggtggaaacaaaattagccatcattcccggtggcgtcacatcttctaccgaagtgctgaatccttcaaagtcctctatgaaaattggcatcattattttccagaccccggtgaacattgacattctcgctagctcacatgaaagctag

SEQ ID NO: 109325 - DNA, 1932 bp, synthetic construct
  misc_feature 1..1932: note = Description of Artificial Sequence: Synthetic coding sequence
  source 1..1932: mol_type = other DNA
atgccacttctcttcttggagcgtttcccctggccctccctccggacatacaccgggctttccggcctggcactgctggggaccataatcagcgcctaccgagccttgtcccaacctgaggctggaccaggcgaacccgatcagctgaccgcttctttacagccggagccaccagccccggcccggccttccgccggagggccaagggcgcgcgatgtcgcccaatatctgctgtctgatagcttgtttgtgtgggttcttgtaaacactgcctgttgcgtgttaatgctagtcgctaagctcatccagtgcatagtctttggtccattgagggtgagcgaaaggcagcacctgaaagacaaattctggaacttcattttttacaaattcatattcattttcggagtgctgaacgtccagaccgtggaggaggtagtgatgtggtgcctgtggtttgcaggtcttgtattcctccatttaatggtccagctgtgcaaggacagattcgagtacctttctttttcccccaccacccccatgagtagccacggccgggttttgtctctgctggtcgccatgctcttatcttgctgcggcctcgctgccgtctgttccatcactggttacacccatggtatgcacaccctggctttcatggctgctgagtccttgctggtcaccgttcgcacagctcatgtcatattgcgctatgtgatccatctgtgggatttaaaccacgagggaacatgggaaggcaaaggaacttacgtctactacaccgactttgtgatggagttgaccctgctctcccttgaccttatgcaccacatccatatgcttttattcgggaacatctggctctctatggccagcctggtgatattcatgcagcttaggtatttgtttcatgaggtccagagaagaatccgcaggcacaagaactacctaagggtggtgggaaacatggaggcgaggttcgccgtggcgactccggaagaacttgctgtgaataatgatgattgtgcaatctgttgggacagtatgcaggctgcgcgtaagttgccttgcggacacttatttcataattcctgccttagaagttggcttgaacaggatacttcatgtcctacgtgtcgcatgtcattgaacattgccgataacaatagagtacgagaagagcatcaaggggaaaacctggatgagaacctggtcccagtggcagcagccgaggggcggccacggcttaatcagcacaatcacttttttcattttgacggtagtcggattgcatcctggctcccatctttcagcgtggaggtcatgcacacaaccaacatcctggggattacgcaggcctcaaactcacagctgaatgcgatggcccatcagatccaggagatgttccctcaggtaccataccaccttgttctacaggatctccagttgaccaggtcggtcgagatcacaaccgataatatactggaagggcggatccaagttccctttccgacccagcgatctgactccattaggccagccctcaatagtcccgttgaacggcccagtagtgatcaggaggaaggggagacttctgcccagactgaacgagtgcctctggatctttcaccccgtttagaggagacactggatttcggagaggtggaagtggagccatccgaagtggaggatttcgaagccagaggaagtaggtttagtaagtccgcagacgagcggcagcgaatgctggtgcaaagaaaggacgagctactgcaacaggcacggaagcgctttttgaacaagtcttccgaagatgatgccgcatcggagagctttctgccaagcgagggagcgtcctctgacccagtgacgctaaggcggcgtatgcttgccgcggcagcagaaagacgactgcagaagcagcagacatcatag

SEQ ID NO: 109326 - DNA, 954 bp, synthetic construct
  misc_feature 1..954: note = Description of Artificial Sequence: Synthetic coding sequence
  source 1..954: mol_type = other DNA
atgagagattcagcatgttggcagcgaaaggacgaattacttcaacaggcgcggaagagattcttgaataaatcctctgaggacgatgcagcgagtgagtctttcctccccagtgagggcgccagtagcgatccagtcacactgcggagacgaatgctggccgctcgaaacggaggattccgcagctcccgccctccatctgcccctctaccctcctctgccgcgagctgcgctctgtgtcccacagactggcgtcggccggtgcccattccactgcatggaaaagcaggactgaccgccctgccactgtacaaggcttgtggccttatagtcttcggacagctgataaacctcatcttgctgtgtaataccttttatgtgacattcctgtttccactggaaactctgcaaatactgaccgtgggcatgatttcttctggggtcgactggactgcctggggcggcggcagatcaggaggctctgaggtggcgtgcttgcagcaagccgcaagcacacctgcaagttgcgttaggcccaccaatgcgggtgtgttaagcaccacacctagtggcaagtctgtcggcgaagctcactcagtgtcacctcccccaagaagaggcgttacttctgtgattaagctactcagcctgctctggaaacacgttgattgtgctaggcgcccaacgggatcctgtacaccgcagcagggcatcctcgagaaggagctgttagtgagatatctggaacagaggcgggggaaaagcagagctatcggatgcgatgaggtcactcctttttgtcctaccacttctggaactgatttcccttctcttcaatctaaagccggtcttatttcagtcaattcaggtgccccagccagccatgagtgcgcgccgtgggtgccctcccccctcagtattagcttgtcccgactggatctgggctcagggtag

SEQ ID NO: 109327 - DNA, 1638 bp, synthetic construct
  misc_feature 1..1638: note = Description of Artificial Sequence: Synthetic coding sequence
  source 1..1638: mol_type = other DNA
atggccactgatgcagctctgaggcgcttactacggctgcaccggaccgagatcgctgtggctgtggatagtgcatttcctctgttgcacgccttggccgaccacgacgtagtccccgaggacaagtttcaagagacgctgcatctgaaagagaaggaggggtgtccccaagcttttcatgccctgttgtcatggctgctgacccaggactcaaccgcaatcttggacttttggcgggtcttatttaaagactacaacttggagcgctacggaaggttgcagccaatcctggacagtttccctaaggatgtggatctgtcacagccgcgaaaaggacgcaagccacccgcagtgcccaaagcactcgtgccaccaccccgcttacccaccaagcggaaggcatcagaggaggctcgcgcagctgcccccgccgccttaaccccacgggggaccgcctcgcccggcagccaactgaaggcgaagccgccaaagaaacccgagtcatccgcagaacagcagagactgccactcggcaacggcatccagacaatgtctgcgagcgtgcagcgtgcggtggccatgagttcaggggatgtccccggcgcccgaggcgctgtagagggaattcttatccaacaagtgtttgaatctggtgggtctaagaaatgtatccaagtgggaggcgaattttatactcccagcaagtttgaagactccggatctggcaagaataaggcgagatctagctccggacctaaaccactggtaagggctaaaggtgcccagggagccgctcctggtgggggtgaggcacggctagggcagcaggggagtgtcccagcccccctagcactacccagcgatccacagctgcatcaaaagaacgaggacgaatgcgcagtgtgtagagatggcggagagctcatctgttgtgacggttgtccccgcgcatttcatctcgcctgcctttcacccccactgcgtgaaatcccttctggcacatggcgatgcagtagctgtttacaggcaacagttcaggaggtgcagcccagagcagaggaaccccggccccaggaacctccagttgaaacaccactcccacctggtctgcgatccgctggagaggaggttcgcgggccccccggagaaccattggctggcatggacactaccttggtatataagcatcttcctgcaccaccgtctgccgcccccctccccggattagatagctctgccctgcaccccttgctatgtgtcggcccagaaggccagcagaatcttgcccccggggcgagatgcggtgtgtgtggagacggcaccgacgttctgcggtgtacccactgtgctgcagcgtttcattggaggtgtcacttccccgccggtacatcacgaccaggaacgggactgaggtgtaggagttgcagtggggacgtaacacccgctcctgtggagggagtcttggctccaagcccagctcggctggctccagggcctgccaaagatgatacagccagccacgagcctgctctccatagggatgatctggagagtcttctctccgagcacaccttcgatggaatactccagtgggccatccagagcatggctcgcccagccgccccgttcccaagttag

SEQ ID NO: 109328 - DNA, 735 bp, synthetic construct
  misc_feature 1..735: note = Description of Artificial Sequence: Synthetic coding sequence
  source 1..735: mol_type = other DNA
atgtggcttgtatattcctcgggcgccccaggcacccagcagcctgctcgtaacagggtgttcttcccgataggaatggcacctggaggcgtctgttggcgacccgatggctggggaactggtggccagggcagaatttccggaccaggaagtatgggtgcaggtcagcgtctgggcagttcaggaacccaaaggtgctgttggggatcgtgttttggcaaggaggtggcgctgcgacgggtccttcacccttctcctaagaacgaggacgaatgcgctgtgtgcagagacggaggcgagttaatctgctgtgatggatgtccacgtgcctttcatttggcttgcttgtctcctccactacgagaaatcccttccggaacctggcgctgtagctcatgtctgcaagccacagtgcaagaagttcagcctcgagcagaagagcctaggcctcaggagcccccagtggagactccactgcctccggggctgagatcagccggagaggaacctcggtgtcaaggctggacacctcgaccatgtacaccctattgtgtctgggtccttcgcgtctctcgaacgtggctcctggtgagagtcgccggctgcgctgagatggttaggacttgctgcggagttttgaccgctcccctccctagcaccggtgctgcaacgtctcagccagcaccacccggccccggaagagcctgtgcagcagatccagcacaagaaacatag

SEQ ID NO: 109329 - DNA, 1047 bp, synthetic construct
  misc_feature 1..1047: note = Description of Artificial Sequence: Synthetic coding sequence
  source 1..1047: mol_type = other DNA
atgtggctcgtgtattcttctggggcacccggcacccagcaacctgcaaggaaccgggtgttcttccccatcggaatggccccaggaggggtctgttggagacctgacggctggggcacaggaggccagggccgcattagcgggccaggaagcatgggcgcaggccaacgcctcgggtcaagtggaacacaacgctgctgttgggggtcatgcttcggaaaggaagtggccctgaggagagttttgcacccgtctccagtttgtatgggagttagttgtctttgtcagaagaacgaggacgaatgcgccgtgtgcagagatggcggtgaactcatttgttgcgacggctgcccccgtgcattccacctcgcttgcctatctccgcccttaagggagatcccgtctggcacatggcgctgctcaagctgcttacaggccaccgtccaagaagtccagccccgggcggaagagccacgtccacaggagcccccagtggaaaccccacttccccctgggcttcgttctgctggagaggaagtaaggggcccaccaggagagccactcgccggaatggataccacactggtgtacaagcacctgccggccccgccgtcagcagcccctctcccgggattagattcctcggctttgcatcccctcctatgtgtaggaccagaagggcagcagaatcttgcgccgggagctagatgtggcgtgtgcggggatgggacagacgtgctgaggtgtacgcattgcgcagccgctttccactggaggtgtcacttccctgcaggcactagccgtccgggtactggactgagatgtcgatcctgtagcggcgatgtgacccccgctccggtggaaggcgtactggccccatctcctgctaggcttgcaccagggcctgctaaagatgacaccgccagccatgagcctgccctccaccgagacgacctggagagcttgctttctgagcacaccttcgacggcatactccagtgggcaatccagagcatggccaggccagccgctccctttccaagctag

SEQ ID NO: 109330 - DNA, 1017 bp, synthetic construct
  misc_feature 1..1017: note = Description of Artificial Sequence: Synthetic coding sequence
  source 1..1017: mol_type = other DNA
atgtggttggtgtacagcagcggcgcacctggcacacaacagcctgccaggaaccgcgtgttctttcccataggcatggcccccggaggggtctgctggaggcccgatggctggggcacgggcggacagggacggatcagtgggccggggtcgatgggtgccggacaacgtctgggtagctctggcacccagagatgctgttggggatcatgtttcggcaaggaggtggcccttaggagggtgctccacccttcacccaagaatgaggacgaatgcgccgtttgcagagatggcggcgagctgatatgctgtgatggctgcccgagggctttccacttggcctgtttatcacccccgctaagagaaattcctagcggcacctggcgttgctcaagctgcttacaggcaacagtgcaagaagttcagccgagggccgaggaaccacgaccacaggagcctcctgtcgagacacccctgccccccggattgcgttctgcaggcgaggaagtgcgcggtcctccaggtgagcctttggcggggatggacacaactctcgtgtacaagcacctgcctgccccgccctctgcagctcctctccctgggctggatagtagcgcattgcaccccttgctctgcgtcggaccagagggccaacagaatttggctcccggggctaggtgtggggtgtgcggcgatggtactgacgttctcaggtgcacccattgtgcagccgccttccactggagatgccactttcccgcaggaacgtctcggcctggtacaggtctgcgctgccgttcctgcagcggcgacgttaccccagccccagtagaaggtgttctggcacccagtccagccaggctggcacctggccccgcaaaagatgatacagcgtcccacgagcccgctctccaccgcgatgacctggagtctcttttgtcagagcacaccttcgacggtattctccagtgggcgattcagagcatggctaggcccgccgcgccgttcccatcttag

SEQ ID NO: 109331 - DNA, 1047 bp, synthetic construct
  misc_feature 1..1047: note = Description of Artificial Sequence: Synthetic coding sequence
  source 1..1047: mol_type = other DNA
atgtggctggtttattctagtggcgcacctgggactcagcagcctgccaggaacagagtgttctttccaatcgggatggcccctgggggcgtgtgctggcgtcctgacggctggggcactggaggacagggtcgaatctctggcccggggagtatgggcgccggtcaaaggctcggtagctctgggactcagaggtgctgttgggggtcttgctttggaaaggaggtggccctgcggcgcgtgctgcatccttcgccagtttgtatgggagtctcatgcctttgccaaaaaaacgaggatgagtgtgccgtttgtagggacgggggggagctgatttgctgtgatggctgccctcgggcttttcatcttgcgtgtttgtcccctccattgcgggagattccttcgggaacctggagatgtagctcatgccttcaggccacggtgcaggaagttcagccaagagcagaagaaccaaggccccaggagcctcccgtggagacacccctcccacctggacttcgaagcgcgggtgaggaggtccgaggcccccctggcgagcccctagctggaatggacactactttggtctacaagcatcttcccgctccaccttctgccgctccgttgccgggattggactccagcgcgctgcatcccctgttgtgcgtgggaccagaagggcaacagaacctggcgcctggggcaaggtgcggtgtgtgcggggacggtaccgacgtgttaagatgtacacattgtgccgcagcctttcattggcggtgtcacttccctgcaggcacttcaagacccgggacgggtctccgatgtagaagctgcagcggcgacgttacgcctgcccccgtggagggggttcttgcccccagtccagccagattagcaccaggccccgccaaggacgataccgcgagtcacgagccagcactgcatcgcgatgacctggagtctctcctcagcgagcatacgttcgatggaatcctgcagtgggccattcagagcatggcgagacccgccgctccctttcctagctag

SEQ ID NO: 109332 - DNA, 3717 bp, synthetic construct
  misc_feature 1..3717: note = Description of Artificial Sequence: Synthetic coding sequence
  source 1..3717: mol_type = other DNA
atgaaagtcgtcccggaaaagaacgccgtacgtattctgtggggccgtgaacggggggcacgtgctatgggcgcccagcggctgctccaggaattggtagaggacaaaacacgatggatgaaatgggaagggaaacgcgtcgagctgcccgactccccacgcagcacgttcttgcttgcatttagcccagataggactctgctcgcttcaactcacgttaaccataacatctatattacagaggttaagactggtaagtgtgtgcatagcctgatcgggcaccgccggacaccttggtgcgttacattccaccccacaatctccgggctgatcgcctccggctgtctcgatggggaagtgcgcatctgggatctgcacgggggcagtgaatcttggttcaccgactcgaacaacgctatagctagcttagcatttcaccctaccgcacagttattgctgatcgctaccgcaaacgagattcatttctgggactggagcagaagggaaccattcgcagtggtgaagactgcttccgagatggagagggtgcggctggtgaggttcgatcccttaggccattacctgctcacagccatcgtcaacccatccaaccagcagggagatgacgagccagagattcccatcgacggtaccgagttgagtcattataggcaaagggcgctgttacaatcccagccagtgcggcggactcccctcctgcacaattttctgcacatgctgtcctctaggagttccggcatacaggtgggggagcagagcactgtacaggactcggcaactccatctcctcctccccctccacctcagccttctacagagcgcccaaggacatctgcatacatccgccttcgccagagagtctcttaccccactgccgaatgctgccagcacctgggcatcctctgcctgtgctcacggtgctccggaacacgcgtgcccagcctgctgccccatcaggactccgtgcccccagcttctgccagggccaccacaccaagcttttccttcgtgcagaccgagccctttcacccgcccgagcaggccagcagcactcagcaagatcagggccttttgaatagaccttctgcgttttctacggtgcagagctcaaccgccggcaacaccctccggaatcttagcctcggccccacccgacgcagcctcggtggcccactttcttctcacccatctaggtatcatagagagatcgctcccgggctgacaggcagcgaatggacacgaaccgtgctttccctaaactcccgctcagaggcagaaagtatgccgccccctcgcacctctgcctcttcagtgtcacttttaagcgttcttcgacagcaggagggcgggagccaagcatcagtttataccagcgccaccgagggaagaggatttcccgcatccgggctggcaactgagagcgacgggggaaacggctcttctcagaacaatagtggatccatcaggcacgagcttcagtgcgatttgagacggttctttctggagtacgatcgccttcaggaacttgaccaatccttgagcggggaagccccacaaacccagcaggcacaggaaatgcttaacaacaatattgagtccgagcgtcccggcccaagccaccaacctaccccacattcatcagagaacaacagtaatctgtctcgaggacatctgaatcgctgccgggcttgccataacctcctgacctttaataacgatacactaaggtgggagagaaccaccccaaattactcgtccggggaggcttcgtcctcatggcaggtgccaagctcctttgagtccgtccctagctccggctcccagctgccccctctcgagagaaccgaaggacagacaccctcttctagccgcttggaactgagttcaagcgcttcaccccaagaggaacggactgtgggggtagctttcaatcaggaaacaggacattgggaaagaatctacactcagtccagtcgctctggcactgtttcccaggaggccttacatcaggacatgcctgaggaaagttcagaagaggactcgcttcggcgcaggctgctggagagcagcttaatctccctgtcaagatatgatggagctgggagtagggaacaccccatataccccgaccctgcaagagacaacggagacagatctcggcacagagccccgcggaacgcaaggatgtccgcacccagtctcggacgtttcgtgcctagaagatttttattgcccgagtacttaccctacgctgggatcttccatgaacgcggtcagcccggcctcgccacccatagttcggtgaatcgcgttctcgccggcgcagtgattggcgacggccaatcggctgtggcaagcaatattgcgaacacaacctaccgcctgcagtggtgggatttcacaaagttcgatctacctgaaatctctaacgcaagcgtgaacgtgctagtgcaaaactgcaagatctataatgacgcctcttgcgatatatccgccgacggtcaactgttagccgcttttataccgagcagccagcgcggatttccagacgagggcattttggctgtctattctttagccccccacaatctgggcgagatgttatatacaaaaagatttggacctaatgctatttccgtaagcctcagccctatgggcaggtatgtgatggttgggctggcctcacggcgaattctcctgcacccttctacagagcacatggtggcacaggtatttcgccttcagcaagcccatggaggcgagacatcaatgcgacgggtgtttaacgtcttatacccaatgccggctgatcaaagacggcatgtgagcatcaacagcgccagatggctgccggaaccgggactaggactggcatatgggactaataagggcgatctggtaatatgccggccagaagccctcaattccggtgtcgaatattactgggaccagctgaatgaaaccgtatttactgttcactccaattctaggtcatctgagcgccccggaacctcgcgagcaacatggcgcactgatcgcgatatgggcttgatgaacgctattgggctgcagccaagaaaccccgcgacctccgttacctctcaggggacacagaccttagcactgcagttgcagaacgccgaaacacagacggagcgggaggtgcccgaacctggaacggccgcttctggccctggcgagggggagggttccgaatacggagcttcaggggaagatgcactgtctcggatccagaggctgatggcagaaggggggatgacggccgtagtgcagcgcgaacagtctaccactatggcgtccatgggcggctttgggaacaatatcatcgttagtcaccgtatacatcgaagttctcagaccggcaccgaaccgggtgctgctcacacgtcctcgccccaaccctccacctcaaggggtctgttgcccgaggcaggccagctagccgagagaggcttgtccccacgcaccgctagctgggaccagccaggcacaccagggagggaacctactcaacccaccctcccgtcaagtagcccagttcctatccctgtgtcactcccatcagctgaaggcccgactctgcattgcgaacttacaaacaataaccatctgcttgacgggggatcctctaggggtgacgccgctggcccccgcggagaaccccgcaacagatag

SEQ ID NO: 109333 - DNA, 2169 bp, synthetic construct
  misc_feature 1..2169: note = Description of Artificial Sequence: Synthetic coding sequence
  source 1..2169: mol_type = other DNA
atgaaggtggtccctgagaaaaacgctgtcaggatcctgtggggacgcgagagaggcgcaagggctatgggcgcacaacggttgctgcaagagctggttgaggataaaacccggtggatgaagtgggaaggcaagcgcgttgagttacccgactctccccgctccaccttcctgctcgcatttagccccgatcggaccctcctggcctccacccacgtgaaccacaatatctatattacggaagtaaagactgggaagtgtgtgcatagcttgatcggccacagacggaccccctggtgcgtcacttttcatccaacaatctccgggctcatcgcttcaggatgtcttgacggcgaagtgagaatttgggatctgcacggagggtccgagtcctggttcactgatagtaacaatgcaattgccagtctggcttttcatccaacagcacagctgctgcttatagccactgcgaatgagattcatttctgggattggtcccgtagggaaccttttgccgtggtcaaaactgccagtgaaatggagagggttcgcctggtgcgcttcgaccctcttggacactacctgttgactgcaattgttaatccaagtaaccagcaaggcgatgacgagccagaaataccaattgacgggaccgagctatcccattatcgccagagagctcttctccagagccaaccagtgaggcggacccctttactgcacaatttcctccacatgcttagcagtaggagttccgggattcaaactgaacccttccacccacccgagcaggcatcctctacccagcaggaccagggcctcctgaacaggcccagtgctttcagcacggtgcagtcaagcactgccggaaacacgctgcgcaacctttctctcggcccgactaggagaagcctaggaggcccattgagcagtcatccgtcacgctatcacagagagatcgcacccggtctgacagggtccgagtggaccaggacagtcctcagcctaaattctcggtcagaagcagagagtatgccccctcctaggacatctgcttccagcgtctctttgctgagcgtgctccgccagcaggaggggggcagccaagcttctgtctacacttcagctaccgaagggcgcggcttccccgctagcggactggccactgagagtgatggaggcaacggctcctcacaaaataactctgggtcaatcagacacgaattacagtgcgacctccggcgcttttttctcgaatatgaccgcctccaggagctagatcagtctctgtctggcgaggcgccacaaactcagcaggcccaggaaatgctaaataacaatatagaaagcgaaaggccggggccaagccaccagccaacccctcactcctccgagaataatagcaatctaagccgcggccacctcaaccggtgtcgcgcatgccacaatctcctcaccttcaacaacgataccctcagatgggagcgtaccactcctaactatagttctggagaagcatcaagttcttggcaggtcccctcatcatttgaatcagtgccaagcagcggctcccaactcccccccctcgaaaggaccgaaggccagacgccttcctcttcccgtttagaactgtcttcttccgcatcaccccaagaggaacgcacggtaggtgtggcctttaatcaagaaactggccactgggagagaatctacactcagtcatcccgatcggggacggtgtctcaggaggctcttcatcaggacatgcccgaggaatcttccgaagaagactccctccggaggagatccctggcacttagtccccgtctagaatactcgggcgcaattctggctcactgcaagctacggctgcccggatcttgtcactcacccgccagcgcctcgcaggtagcaggaacaaccggcgcacatcaccacgccagactgatcttcgcgtttctagttgagatggaatttcaccacgttagccaggcggggcttgagctgctgacatccggcgacttacccaccagcgctagtcaaagtgcgggcatcacaggagtatcacaccgggcgtggcccaggttactcgaaagttccctgatcagcctctccaggtacgatggtgcgggatcacgcgagcacccgatttacccagaccccgcctag

SEQ ID NO: 109334 - DNA, 3627 bp, synthetic construct
  misc_feature 1..3627: note = Description of Artificial Sequence: Synthetic coding sequence
  source 1..3627: mol_type = other DNA
atgaaagtcgttcctgagaaaaacgcagtacggatcctgtgggggcgcgaaagaggggcgagagccatgggggctcagagactgctgcaggaattggtggaggacaagactcgctggatgaaatgggaagggaaaagagtggaactgccagattcccctcggtcaacgttcctgctggcctttagccccgataggactctgctcgctagtacccacgttaaccataatatatacatcacagaggtcaaaactgggaagtgcgtccatagcctcattggccataggaggaccccctggtgtgtgacatttcacccgaccataagcgggctgatagcttccggatgcctagatggcgaggtcaggatctgggatctccacgggggatccgagagttggttcaccgactcaaacaatgcgattgcgtcactcgcattccaccctacggcccagctgctcctcattgccacagcgaatgagattcacttttgggactggagtcggagggagccattcgccgtcgttaagacagcctccgaaatggagcgcgtgcgcctggtccgatttgacccactcggacattacttactcacagcaattgtcaacccctcaaatcagcaaggcgatgacgagcccgagattcccatagatggcaccgagctgtcccactataggcagagggctcttctccagtctcagcctgtaaggcggactccacttctccataactttctgcacatgttatcaagccgctcaagcgggatccaaaccgaaccgttccatccacctgagcaagcctcttccacacagcaggatcagggcttacttaacagaccttccgccttttccactgttcagtctagtaccgccgggaataccttaaggaaccttagtctcgggccaacccgcagatcactcggaggcccgctgtccagtcacccctcacgataccaccgggaaattgcccccggcctcaccgggtccgagtggacccgcacagttctgtctctcaacagccgctcagaggctgagtccatgccgccccctcgcaccagtgcgtccagcgtgagtctgctctccgttttacgtcagcaggaggggggatcacaagctagcgtgtatactagtgcgaccgaggggagggggtttccggcctcggggctggctaccgaatccgatggcggtaacggtagctcccaaaataactccggcagcattcggcacgagctgcaatgtgacctgcgcagattttttctggagtacgaccgcctccaggaactagatcagtctctatcaggcgaggcacctcagacgcagcaagcccaagaaatgctgaataataatattgagagcgaacgccccggacccagccaccagcctacgcctcacagctctgagaataactcaaatctgtccaggggtcacctaaatcgctgccgggcttgtcataacttgcttaccttcaataacgataccttaaggtgggagagaacgacaccaaactatagcagtggggaagcttcttcgtcatggcaagtgccgagttccttcgagagtgtcccatcctccggaagccagctgccacccttggaacggaccgaagggcagaccccgtcgtcctcgcggctcgagctttcctccagcgcttccccacaggaagaacgcaccgtcggtgtagcattcaaccaagagaccggtcactgggaacggatctatactcagagtagcaggtcgggaaccgtctctcaggaggcgttgcaccaagacatgcccgaagagtcaagcgaagaggacagcttgagaaggcgactgctggagagttctcttatcagcctcagccgctacgacggggccggcagccgcgagcaccctatctaccctgaccccgcgcggttatctccagctgcttactacgcccagcgcatgatccagtatctcagcaggagggacagcatcagacagaggtccatgcggtatcagcagaaccgattgcgaagctctacaagtagctcttccagcgacaatcaagggccaagcgtggaaggaaccgacttagagttcgaggacttcgaggataacggagataggtcccgtcatagggcccccagaaatgctcggatgtcggctccttcacttggtcgttttgtgccaagaagattccttctgcccgagtacctgccttacgccggcatattccatgagagaggtcagcctggcctggccactcatagctcagtgaatagagtgctggccggcgctgtgatcggggacggacaatccgccgtggcctctaatattgccaacactacatatcggttgcaatggtgggacttcacgaaatttgacctgcccgagataagcaacgcttcagtgaacgtgcttgttcagaactgcaagatttataatgacgcttcttgtgatatcagcgctgatgggcagttgttggccgccttcatcccgtcctctcagcgcggatttccagatgagggcatcctggccgtttactcccttgcgccacacaacctgggagagatgttgtataccaagcgcttcggccctaatgccatatcagtgtctctgtcgcctatgggtcggtacgtaatggttggacttgcctcaaggagaatcctgctgcacccctccacagaacatatggtagcccaggtttttcgacttcagcaagcccatggcggcgaaacttccatgcgtcgggtgtttaacgtactgtatcccatgccagccgaccagaggcgacacgtcagcattaactcggctcgctggctgcccgaaccaggcctgggacttgcttacggtacaaacaagggggacctggtgatctgtcgaccagaagccctcaactctggggtagaatactattgggaccaattgaacgagaccgtgttcacggtacactccaattcaagaagctcagagcgcccgggcaccagcagggccacctggcgcacagatcgggacatgggactcatgaacgccatcggactgcaaccgcgcaatcccgccactagcgttactagccaggggactcagaccctggcactacagcttcagaacgccgaaactcagaccgaacgcgaagtgccagagcccggtaccgctgcatctggacctggcgagggcgaaggatctgaatatggagcgagcggagaggatgccctttcacgcatccaaagactaatggcggaaggaggcatgacagcagtcgtccagagggaacagtccacgacgatggctagtatgggaggattcggcaacaatatcatcgtttcccaccgcattcatcggtccagccaaactggcactgaaccaggagccgcgcacacctcatccccacagccatctacttcccgtggactcctgccagaagccggacagctcgctgaaaggggactaagtccacgaaccgcctcttgggaccaacctggaacccccgggcgggaacccacacagcccactttgccttcttcatctcccgtgcccattcccgtttctctgccttctgctgaaggtcccacgcttcactgcgaactgacaaacaacaatcatctgctagacggtggaagcagccggggtgatgctgccggcccgcggggagaacccagaaaccgttag

SEQ ID NO: 109335 - DNA, 3810 bp, synthetic construct
  misc_feature 1..3810: note = Description of Artificial Sequence: Synthetic coding sequence
  source 1..3810: mol_type = other DNA
atgaaggtcgtgccagagaaaaatgccgtcagaattctctggggccgggagcgaggggccagggctatgggcgcacaacgcctactgcaggagctggttgaagataaaactcgctggatgaaatgggaaggcaagagagtcgagttgcctgattccccgagaagtacttttctccttgccttctccccggatcgcactctgctagcatccacgcacgttaaccataatatctatataactgaagtgaaaaccggcaagtgtgttcactccctcatcggccacaggcggacaccttggtgcgtgaccttccaccccaccatttcaggcctgattgcttccgggtgtctggacggcgaggtacggatttgggatttgcatgggggatccgaatcttggtttacagattccaacaacgctatcgccagccttgcctttcatcctactgcccagttgctgctgatagcgactgctaatgaaattcacttctgggactggagtaggcgggaaccattcgccgtggtcaagaccgcttccgaaatggagagagtaaggctggttagatttgaccctctcggccattacctgctcaccgccatcgtgaacccaagtaatcagcagggggacgacgagccagagatcccaatagacggtaccgaactgagccactaccgacagcgggccttgctgcagagccaacccgtgagacgcacacccctgcttcacaactttctccatatgctgtcctctagaagttccggcatccaggtcggcgagcagtccacagtgcaggattctgccaccccctctccgccacctcccccgccgcagccatcgacagagcgcccccgcacaagtgcctacatacggttacggcagagagtaagctatcccactgccgaatgctgccaacacttgggcatcctgtgcctgtgcagcaggtgtagcggcacgcgcgtgccttcactgctgccccatcaggacagtgtgccccccgcatccgcccgcgccacaacccccagcttttcttttgtccagaccgaaccgttccatccacccgagcaagcatctagcacccagcaggatcagggactactgaaccgtccttcagcattctcgactgtgcagtcttcgacagcaggtaataccttacgcaaccttagtctgggacctacgaggcggtcgctgggaggccctctgagttctcatccatccagatatcaccgtgaaatcgcgccgggcctcacaggctcagagtggacgagaacagtcctcagcttaaacagtaggagcgaagccgagagcatgccaccgccaagaaccagcgcaagttcagtgagcctgctgtccgtgttgcgtcaacaggagggcggcagccaggcttcagtctacaccagcgctacagagggcaggggattccctgcgagtggtctggccaccgagtctgacgggggcaacggctcttctcagaacaactcagggtcgatacgacacgaactccaatgcgacctacgccgcttcttccttgagtatgacaggctgcaggaattagatcagagcctatccggagaagccccacaaacgcaacaggcgcaggagatgttgaacaacaacatcgagagcgaacggcctggaccctcccatcagcctaccccgcactcctcagagaataacagcaatctgagccggggacaccttaacaggtgcagggcctgtcataacctgttgacttttaataatgacactcttcgttgggagcgcacaacccccaattacagctcaggcgaggcctcctccagttggcaagtaccatcaagctttgagtccgtgcctagctccggcagccagctccctcccctggaaaggaccgaaggacagacacctagctcaagccgtctggagctgtcatcctcagcttccccccaggaggagaggactgtgggcgtagccttcaaccaggaaacaggccactgggagagaatttacacacagtcatcacggtctgggacagtctctcaggaagctctccaccaggatatgcccgaagagtcctctgaagaagattcattacgccgactttccccagccgcgtactacgctcagcgcatgatccagtatctctctagaagagacagtattagacagcgctctatgcggtatcagcaaaacaggctgaggagctccacatccagtagtagctccgataatcagggtccaagtgtggaggggacagacctcgaattcgaagactttgaagataatggtgacagatctaggcacagggcaccgcgtaacgcacggatgagcgcgccctcactgggcaggttcgttcctcgcagattcttgttgcctgagtatctcccttatgccggcatctttcacgaacggggccaaccagggcttgctactcacagttcagtcaaccgggtgctcgccggcgcggtgatcggcgatgggcaaagcgccgttgcttccaatatcgccaacacaacgtacagactccagtggtgggattttaccaagttcgatctcccagaaatttccaacgcatctgtcaacgtgttggtgcaaaattgcaaaatttacaatgatgcctcttgcgatatctctgccgacggacagctgctcgccgcattcattcccagctctcagagagggtttccagacgagggaattctcgccgtttatagcctggcccctcacaatctgggtgagatgttatacacgaaacggttcgggcccaacgctatctcggtcagcctgtctcctatgggccggtatgttatggtcgggttagccagccggaggatcctgcttcacccctcaactgagcacatggtggcacaggttttccgattgcagcaggcacatggaggcgagaccagcatgaggcgagtgtttaatgtactctatcccatgcccgcagatcaacggagacatgtgtcaatcaacagtgcccggtggttgccagagccgggcctcggattagcttatggaactaacaaaggcgacctggtcatttgtaggcccgaggctctgaattccggcgttgagtactactgggatcaactgaacgaaacggtgtttaccgtccactccaatagcaggagctcagagaggcccgggactagccgcgcaacttggcgaaccgaccgagatatggggctcatgaacgccatcggccttcagcccagaaatcccgccacatcagtgacctcacagggaacgcagacgctagcgctccagcttcaaaatgccgaaactcagacagagcgggaagttccagagcccggaaccgctgcgagcggaccaggcgagggagagggctctgagtatggcgcatccggagaggacgcattaagcagaatccagcgtctgatggccgaaggcggcatgactgctgttgtgcagcgcgagcagtctaccacaatggcttccatgggcgggtttggaaataatatcattgtatcccacagaatccatcgatcatcacaaaccggcacagagcctggggctgcacatacaagctctccgcagccctcaacttcgaggggcctgttaccagaggcgggccagctcgccgaaagaggtctgagcccccgaacggcgagctgggaccagcctggcactcctggtcgcgaacctacccaaccaacactgccaagctcaagtcccgttcccatccccgtgtcccttccctccgctgaggggccgactttgcattgtgaactcacaaacaataatcatttattagacggggggtcctctcggggggacgctgcagggcccagaggggagcccagaaaccggtag

SEQ ID NO: 109336 - DNA, 3897 bp, synthetic construct
  misc_feature 1..3897: note = Description of Artificial Sequence: Synthetic coding sequence
  source 1..3897: mol_type = other DNA
atgaaagtggtccctgagaaaaacgccgttcgcattctgtggggccgcgagagaggagctcgggccatgggagctcagcgcctgctgcaggaattggtggaagacaaaacaagatggatgaagtgggaggggaagcgggttgagctgcccgattctccgcgctccaccttcttgctggcttttagcccagataggaccctcctggcctcgacgcacgtgaatcataatatatacatcactgaagtcaagaccggcaagtgtgtacactcattgattggccaccggcgcactccatggtgcgtcacattccatcccacaattagcggcctgattgcctccggctgcctggacggcgaggtacggatttgggacctgcacgggggctccgaatcttggtttacagactcaaataacgctatcgccagcctggccttccaccctaccgcccaactcctgctcatagcaaccgccaacgaaatacatttctgggactggagccgacgtgagcctttcgcggtggtaaagacagcctctgaaatggaaagggtcaggctggtcaggtttgacccactggggcactatttgcttacagcaattgtgaacccctcgaatcaacagggggacgatgaaccagaaattccaatcgatgggaccgaactgtctcattatagacaaagagcattacttcagtcccagccagtccgacggaccccgttgctgcacaacttcctgcacatgctaagctctagatcatcggggattcaggtgggggagcagagcaccgtgcaggacagtgctaccccatcccctcccccccctcctccccagcccagtactgaaagacctcgcacgtctgcttacatccggctgcgccagagagtgtcttaccctacggcagaatgctgccagcatctcgggatactctgcctgtgttctcggtgctcgggtacacgtgttccatcactgcttccacaccaggattcagttccaccagctagcgcccgcgccaccacacctagtttcagtttcgtccagaccgagccattccatccccctgaacaggccagctccacacagcaagaccaggggctgctcaaccgtccgtcagcattctctaccgtgcagtcaagcaccgcaggtaatacactgagaaacctatctttggggcccacgcggcggtctctgggcggtcccctgtcaagccatccgtcgcgctaccaccgtgaaatcgcacccgggcttacgggcagcgaatggacccgaacagtactgagcctgaatagccggagcgaagccgaatccatgcctcctcctaggacttccgccagttctgtctcactgctgagtgtgttacgccagcaagaggggggaagtcaagctagcgtgtacaccagtgccaccgagggccgcggttttcctgcgtctgggctggccacagagtcagatggcggaaatggcagcagccagaataactctggctcaattagacacgagctccagtgcgatcttagacggtttttcttagagtatgatcgactgcaggagctggaccagagcctgagtggcgaagcaccccaaacgcagcaggcccaggaaatgcttaataataatatagagagcgagcgcccgggcccatcccatcagccaacacctcacagcagcgagaataacagcaacctgtctaggggacacctcaatcgctgtcgagcatgccataatctgctgaccttcaacaatgacaccttacggtgggaacgtaccactcctaactactcatctggagaagcttcatcaagctggcaagtgccgagctcattcgaatccgttcctagctccggttcccagcttcctcctcttgaacgaacagaaggtcagacgccatcatctagcagacttgaactgtctagctctgcttcaccccaagaagaacggactgtcggggttgcctttaaccaagaaacaggccactgggagcgcatctacacacagtcttctagaagtgggaccgttagccaggaggcactgcaccaggacatgccggaggagagttccgaagaggacagcctgagaaggaggcttctggagagctcgttaatttcacttagcaggtatgacggggccggcagccgggaacatccaatatatcctgacccagcacgactctcaccagccgcgtactacgcgcagaggatgattcagtacttatcccggcgcgacagtataaggcagaggtcgatgagatatcagcaaaatcgcttgagatcaagcacaagctcctcatccagtgacaaccagggaccgagtgtggagggtacagatttagaatttgaggacttcgaagataatggagacaggtcccgccatcgtgcgccaagaaatgctagaatgagtgccccttcactgggaagattcgtccccaggaggtttcttttgcccgaatatctgccgtatgcgggtattttccacgaacgcggtcagcctggactggctacacactccagcgttaacagggtgctggcaggagccgttataggggatggacagagtgctgtggctagcaatatagccaacaccacctacagactgcagtggtgggattttacaaaatttgacctcccagagatctcgaatgcctccgttaatgtcctggtacagaattgtaaaatctataacgatgcgtcatgcgatatcagcgctgatggccagctgctcgccgcctttataccatcatcccagcgcggattcccggacgaaggcatcctagcagtgtatagcctggcccctcacaatctgggcgagatgctgtatactaaaaggtttgggccaaacgcaatttccgtgagcctttccccaatgggtagatacgtgatggtgggattggcaagccggcggattctactgcatcccagcacagaacacatggttgcccaggtgtttaggctgcagcaggcgcatggtggtgaaacctcgatgagacgtgtattcaacgtgttgtacccgatgccagccgatcagagacgccatgtatccatcaactcagcccgttggctgcctgagccaggactggggctggcttacggcaccaacaagggcgacctagtgatttgccggccagaagctctgaattccggggtcgagtactactgggaccagctgaacgaaacagtattcaccgttcactcaaatagcagatcttcggagcggccgggcacctccagagctacgtggcgcacggatcgagacatgggactgatgaacgccatcgggctccagccaaggaatcccgcaacctctgtgacatcccaggggactcagactctagccctgcagttgcagaacgccgaaacgcaaaccgaaagggaagtcccagaacctggcaccgccgccagtgggcccggggaaggggaggggtcagaatacggggcctcgggcgaagacgcactttcccggatccagcggctgatggccgaggggggcatgacagcggttgttcagcgagagcagagcacgactatggcttcaatgggcgggttcgggaacaacatcatcgtctcacatcggatccataggagcagtcagaccggcacagagcccggcgcggctcatacctcttcgccgcagccgtctacctcgcgaggtctcctccccgaggccgggcagctggcagaaagggggctctcccctcgcaccgctagctgggatcagcctgggaccccagggcgggaacccacgcagcctactctgccctcatcatctcctgtgcctatccctgtgagcttgccctccgcagaggggcccactcttcattgtgaactgaccaataataaccatctgcttgacggtggcagttccaggggcgacgcggctgggcctcgcggcgaaccacgcaacaggtag

SEQ ID NO: 109337 - DNA, 75 bp, synthetic construct
  misc_feature 1..75: note = Description of Artificial Sequence: Synthetic coding sequence
  source 1..75: mol_type = other DNA
atgaaggtggtgcccgagaagaacgctgtcagaattctgtgggggagagaaagaggggcccgggcaatgggttag

SEQ ID NO: 109338 - DNA, 3810 bp, synthetic construct
  misc_feature 1..3810: note = Description of Artificial Sequence: Synthetic coding sequence
  source 1..3810: mol_type = other DNA
atgaaggtcgtgcctgagaagaatgccgtgcgcatcctctgggggcgcgagagaggggccagagccatgggtgcgcagcgactactgcaggaactcgtggaggacaaaactaggtggatgaagtgggaaggaaaacgagtggagctgcctgacagtccgcgaagcaccttcctgcttgctttcagcccagatcgcacgctcctcgctagcacgcacgtaaaccataatatctacatcacggaggtcaagaccggtaaatgtgtacacagtctcattggccaccggagaactccatggtgtgtcaccttccaccccaccatttctggtctcatcgctagtggatgccttgacggggaggtgagaatctgggatcttcatgggggctcagagtcctggtttacagatagtaataatgctattgcatcgctggcattccacccaactgcgcagttattgttgattgcaacagctaacgagatacatttctgggactggtcccggcgggagccttttgctgttgtgaagacagcatccgaaatggagagggtgcgattggttcgatttgaccctctgggccattaccttctaactgccattgtcaacccctctaatcagcagggagacgatgagcctgagatccctatcgacggcaccgagttgtctcactatcgacaacgagccctccttcagtcccagcccgtgcgccgaacaccgttacttcataacttccttcatatgctgtcaagccgttcctctggtattcaggtgggcgagcagagcactgtacaggattctgcaaccccaagccctccgcctcctcccccgcagccatccactgaacgtccgaggacctccgcatatatcagactgcgtcagcgagtgtcctacccaaccgctgagtgttgtcagcatctcggaattctgtgtctctgttctcgctgcagcggtactcgagtccccagcctgcttcctcatcaggattcagtcccccctgcaagcgctcgtgctaccacacctagcttttccttcgttcaaacagagccattccacccacccgaacaggcctcctccacgcagcaggaccagggcctgctgaataggccgagcgctttttctaccgtgcagagctccactgctggcaatactctgcggaatttatcattaggccccacccgccggagtttaggaggacccctgagcagccatccgagtaggtatcacagagaaattgccccaggcttaactggaagtgagtggaccaggaccgtcctttccctgaacagccggagcgaggccgagtcgatgcctccaccgaggacgtccgcgtcttcggtgtccctactcagcgttttgaggcagcaagaggggggctctcaagcgagtgtgtacactagcgcgacagagggcaggggttttcctgccagtgggttggcaacggagagcgacggaggcaatggttccagccaaaacaatagtggctctattcgacacgaactgcagtgtgacttaagaagattctttctggaatatgaccggctccaggagctggatcagagtctcagtggtgaagcccctcagacgcagcaagctcaggagatgctgaacaacaacatagaatccgagcgaccaggaccatcccaccaacctacaccccactcatctgagaacaattctaatctgagcaggggccacctgaacagatgtagggcatgccataatctgctgaccttcaacaacgacactctgagatgggagcgcactaccccgaattactcaagcggagaggctagctcatcatggcaggtgcctagctcatttgagagtgtaccgagctcaggaagtcagctcccacccctggaacggaccgagggccagacccccagttctagcagactcgaattaagttcctctgccagcccacaggaggagagaacagtcggagtggccttcaaccaggagacagggcactgggagcgaatatacacccagagctcaaggagcggaacagtgtcccaagaagctctccaccaagacatgcctgaggaatctagcgaggaggactccctgcgccggctctcacctgccgcctattacgcccagcgaatgatacagtacctctctagacgcgattcaatacgtcagcgctccatgcggtatcaacagaataggctgcgaagctctaccagctcctcttcgtctgacaaccagggccccagtgtggaaggcacagatcttgagtttgaagattttgaggataatggggaccgcagccggcacagagcaccaagaaacgcccggatgtcagccccaagtctaggtcgtttcgtgcctcgcagatttctgctcccagagtaccttccatacgctggaatcttccatgaaagaggacaaccagggctagctacccactctagcgtgaacagggttctggccggcgcagtgatcggggacggtcaaagcgcggtcgcctccaatattgccaataccacctacaggctgcagtggtgggacttcactaagttcgatctgcccgaaatttcaaatgcaagcgtcaacgtactcgtacagaattgtaaaatttacaatgatgcctcatgtgacatatctgctgatggccagctgctggccgcatttatcccatcctctcaacgcggatttcccgacgaagggatcctagctgtgtatagcctcgccccacacaacctgggcgaaatgttgtacacaaaacggttcggaccaaatgcgattagtgtctctttgtctcccatgggcaggtatgtgatggtagggctggcctcacggaggattctgctgcacccttcaacagagcacatggtcgcccaagtgtttcgactgcagcaggcccacggtggcgagacttctatgcggcgagttttcaatgtgctttacccgatgcccgccgaccagagacgccacgtatcaatcaattcagcgcgttggctgccagaacctggactgggtctcgcctacggcaccaataaaggagatctggtcatatgccgaccagaagcgcttaattccggagtggagtattactgggaccagttgaatgaaacagtttttactgtgcacagcaatagccgatcttctgagaggccaggaacttcaagggcaacttggaggactgacagagacatgggcttaatgaatgctatcggcttacagccgcgcaacccagccaccagtgttacaagccagggaacacaaacacttgccctgcagctgcagaacgcagagacacagacagagagggaagtccctgagccagggacggcagcctcgggaccaggtgagggagaagggtcggagtacggcgcctcaggagaagacgctctttctcggatccaacgactcatggcggaaggagggatgaccgctgtggtgcagagagaacaatcaaccacaatggcttccatggggggttttggcaataatattatcgtgtcacatcggattcacagatcttcacagactggcaccgagccaggagcagcacacaccagcagtccacaaccctctaccagccgcgggctgcttcctgaggccgggcaattagctgagcgcggcctgtctccgcgtaccgccagttgggaccagcctggaactccaggtcgagagcccactcagcctactctccctagtagttcacccgtgcccattcccgtatccctgccctctgccgaaggacccacgcttcattgtgagctgacgaacaataaccatctgctggacggcgggagcagccgcggcgacgcggccgggccccggggagagccgcgcaatcgatag

SEQ ID NO: 109339 - DNA, 3717 bp, synthetic construct
  misc_feature 1..3717: note = Description of Artificial Sequence: Synthetic coding sequence
  source 1..3717: mol_type = other DNA
atgaaggtcgtgcctgagaaaaacgccgtgaggattttatgggggcgtgaacggggggcccgcgccatgggagcccagcgcctcctgcaggagttggtggaagacaagactcgctggatgaagtgggagggcaagagggtggagttgccggacagccccaggtccacctttctgctcgccttttctcctgacagaacgctgttagcctctacgcacgtgaaccacaacatatacatcactgaagttaaaactggcaagtgtgtgcactctctaatcggacaccggcggactccttggtgcgtgacgttccacccaactataagcggcctcatagctagtggctgcctcgatggcgaggtgcggatttgggacctgcatggcggcagtgaatcgtggttcacagactcaaataatgccatagctagcctggccttccatcctactgcacagcttttactaatcgccactgctaatgaaatacacttttgggactggagcagacgtgaaccgttcgcggttgtaaaaaccgcgtctgagatggagagagtgcggctcgtgaggtttgatccactgggacactacctgttaaccgcgatcgttaatccctcgaatcagcagggcgacgatgagcctgaaatccctatcgatggaacagagctgtcacactatcgacagagagccctactgcagtcccaaccagtgaggcgaaccccacttctgcataattttcttcatatgctctcatccaggtctagcggaatacaagttggggaacagagcacagtgcaggattctgctactcccagccctcctcctcccccaccccaaccaagtacagagaggccaagaaccagcgcatacatccggctccgccaaagggtgtcgtacccgaccgcagagtgctgtcaacatctgggcatactctgcctttgcagcaggtgttctggtacacgggttccctccctactcccacatcaggacagtgtcccgccagcatctgcacgggccaccactccatctttttcttttgttcagacagaaccctttcacccaccggagcaggcaagcagtacacagcaagatcagggcctgctgaatagacccagcgcctttagcactgttcaatcctcaactgcaggcaacaccttgaggaatttgtctctcgggccaacacggcgcagtctgggcggacccctgtcgagccatcctagtcgctaccaccgcgagattgcaccaggattaaccggtagcgaatggacaagaaccgtcctcagtctcaatagtcggagtgaagcagagtccatgccgcctccccgaacttctgcatcaagtgtttctctattgtccgtcttgaggcagcaagaggggggcagccaggcctccgtttacacctctgcaaccgagggacgtggatttcccgcttccgggttggctactgagtctgacggcggaaacggatcctcccaaaacaacagtggatctattcgacatgagcttcagtgcgatcttcgccggttttttctggaatatgaccgcctacaggaactggaccaatcattgagcggggaagccccccagacccagcaggctcaggagatgttaaacaataacatagaatccgaacgtcccgggccctctcatcagcccacccctcattcctcagagaataattcaaatctcagccgaggtcatctgaataggtgcagagcctgccataacctgttgacattcaataacgacacactacgctgggagcggacaacacccaattatagcagcggcgaggcaagctctagctggcaagtgcccagctctttcgaaagcgtcccgtcctccgggagccagctcccgccccttgagcggaccgagggccagacccctagcagttcccggctagagctgtcttctagtgccagcccccaggaggagagaactgtgggcgtggcttttaaccaagaaacagggcattgggagagaatctatacacagtcctctaggtcaggtactgtgtcccaagaagccctgcatcaagacatgcctgaagaatcttccgaggaagattccttgcgccgccgcctcctggaatcatccctgatcagcctgagtagatacgacggggcaggctcgcgggagcaccctatttaccctgatcctgcaagagataatggcgacaggtcccgacaccgggcaccacgaaacgccagaatgagtgcaccgtccctggggaggttcgtgccacgaaggtttttactacccgaatacctgccttatgctggaatcttccacgaaagagggcagccggggctagccactcattcctccgtgaaccgagtgctcgctggagccgtgatcggtgatggccaatctgcagtcgcctcaaatattgccaataccacatacaggctgcagtggtgggatttcacaaaattcgacctccctgaaatctccaacgccagcgttaacgtgttggtgcagaactgtaagatatataacgacgctagctgcgacatctctgccgacggccaactattggctgccttcatccccagctctcagcggggattccctgacgaggggattctggctgtgtatagcctggctccccacaaccttggcgagatgctgtacactaagcggtttggccctaatgccattagcgtgtctctaagtcccatggggcgctacgttatggtaggtctagcatctagaagaattctcctgcatccaagcactgagcacatggtggcccaagtcttccgactacaacaggcacatgggggagagacatcaatgagacgcgtgttcaacgttctgtatccaatgcccgcagaccaacgaaggcatgtgtctataaattcagcacgctggctgcccgagcccggactggggttagcttacggtaccaataagggagatctggtcatctgtcgaccagaggctctcaactcaggagttgaatactattgggaccaactaaacgaaacagtgtttaccgtgcattcaaacagccgctcttccgagaggccgggtacgtctcgcgccacatggcggactgaccgtgacatgggcctaatgaacgcaatcggacttcagcctcgaaacccagctacctctgtgaccagccaaggaacccagaccctcgctctgcaattgcagaacgccgagacacagaccgagagggaggtccctgaacctggcacggcggcaagcggcccgggcgagggagagggtagcgaatatggcgcctccggggaagatgctctgtctagaatacagaggcttatggcagaaggtgggatgaccgcagtggtgcaacgcgagcaatccacaacaatggcgtccatgggcggattcggcaataacattatcgtatcccacaggatccaccgttccagccaaaccgggactgaacctggcgccgctcatacctcctcaccacagccaagcacgtcacgtggactgctgcctgaggcaggacagttggcagagcggggactgtcccctaggaccgcgagttgggaccagcctggcaccccaggtcgggaacccacgcaacctaccctaccaagctcgagcccagtaccgatacccgtttcgctgccctcagccgaggggccaacccttcattgtgagctcaccaataataaccatctgctggacggcggctccagtaggggggatgcagcaggaccacgcggagagcctcgtaacagatag

SEQ ID NO: 109340 - DNA, 3540 bp, synthetic construct
  misc_feature 1..3540: note = Description of Artificial Sequence: Synthetic coding sequence
  source 1..3540: mol_type = other DNA
atgaaggttgttcccgagaaaaacgccgtgcggattctgtgggggcgcgagcgcggggcacgcgctatgggcgcacagcgcctgttacaggagcttgtcgaggataaaacgagatggatgaaatgggagggtaagagggtggaattgcctgacagccccagatccacattcctcctcgccttttcacctgatagaactttgctggccagcactcacgtgaaccacaacatttacattactgaagtcaaaactggtaagtgcgtgcactctctgatcggtcacaggaggacaccttggtgcgtgactttccatcctaccatcagtggattgattgccagtggctgtctggacggggaagtcagaatttgggatcttcacggagggtcagaatcatggttcacagattccaataacgcaatcgcctccctcgccttccatcctacagcacagctgctgctaatcgccaccgccaatgagatacatttctgggattggagtagacgagagcctttcgccgtagttaagacagcttctgagatggagcgcgtgcgcctggttcggtttgaccctctgggacactacctactaacagccatagtaaacccaagtaatcaacagggagacgatgaacctgagatcccaattgacggcaccgaactgtcccattatcgacaaagggctcttctgcagagtcaacccgtgcggaggacccctctcctccacaactttctccatatgctcagctccagaagcagtgggattcagactgagccctttcatcccccggaacaagcgagttccactcagcaagatcagggactcctcaaccggccttcagctttttcaaccgtgcaatcttccacagccggcaataccctgaggaatctgtctctcgggccaacccgtagatcactgggaggcccgttgtccagtcatccctctcggtaccacagagaaatcgcccctggacttactggctccgagtggactcgcaccgtgctgtccctgaactcccggagtgaagcagaatccatgccaccaccacgcacttccgcctctagcgtgagcctacttagcgtcctccgacagcaagaaggaggctcgcaggctagtgtgtacactagcgctaccgaggggcggggtttcccagcatctggcttggctacagaatcagacggggggaacggttcatcacagaataactcaggctcaattcgacacgagttacagtgtgacctgcgtcgcttctttctcgagtatgataggctccaggaactggaccagtccttgtcaggggaagccccccagacccagcaagctcaggaaatgctgaataacaacatcgagtctgagaggcctggacccagtcaccaacccactccacactcctctgaaaataactctaacctctcacgggggcatctgaaccgatgccgtgcctgccataacctcttgaccttcaataacgataccctacgttgggagagaactacacctaactacagcagcggcgaggcttcgagctcatggcaggtcccctcctctttcgagagtgtcccatcttcaggtagccagctgccaccactagagcggaccgagggccagaccccttcatcctctaggctggagctgagctcttctgcgtcaccgcaggaagagaggacagtgggcgtagcttttaaccaggagacagggcactgggagcgcatttatactcagagttcccgatccgggaccgtttcgcaagaggccctgcaccaagacatgccagaagaatccagtgaagaggactctctgaggaggctgtcccctgcggcttactatgcccagcgtatgattcagtatctgagccgcagggattccattagacaacgctccatgaggtatcaacaaaaccgtctgcgatcatcaacatcctccagtagcagtgacaaccagggcccatccgtggaggggacagacctagaatttgaagactttgaggataatggagaccgcagcagacatcgcgctccgagaaacgcccgaatgagtgcgccgtctctcggccgctttgtccctcgtagattcttgctacctgaatacctaccctatgccggaatctttcacgaacgcggccaaccaggcctcgcgacacatagctcggtgaaccgcgttctggcaggggccgttattggggacggacagagtgccgtggctagcaacatcgccaataccacctacaggctacaatggtgggatttcacgaagtttgacctgccagagatttccaacgcctcggtaaatgtactggtccaaaattgtaagatttataatgatgcgagttgtgacatcagtgcagatggacagctgctggccgctttcattccttcatcgcagcgaggtttcccagacgaaggaattttggcagtgtacagcctggctccccacaaccttggcgagatgttgtatacgaagaggtttggacctaacgccatcagcgtgtcactgtctccaatgggacgttacgtcatggtaggccttgccagcaggagaatactgctgcaccccagcaccgagcacatggtcgcgcaggtgtttagactacagcaggctcacggcggcgagaccagcatgaggagagtgtttaacgtgctataccctatgcctgctgaccagaggcggcatgttagcatcaactctgcacgctggctccccgaacccggcctgggacttgcgtatgggaccaataagggagaccttgtaatttgtcgccccgaggcgttgaactccggggtcgagtactattgggatcagttgaacgaaaccgtcttcactgtgcactcaaactctcgttcgtctgaaagacccggcacaagtagagccacatggcgaactgacagagacatgggcctgatgaatgccatcggcctacagcctcgcaaccctgccactagcgtaacctcccagggaacccagactttggccttacagctgcagaatgccgaaacccaaaccgagcgcgaggtaccagagccgggcacagctgcatctggacccggagagggtgaggggtcagagtatggcgcatcaggagaggatgcacttagcagaattcagaggctgatggctgaaggggggatgaccgctgttgtgcagcgagagcagtcaactactatggcctcaatgggggggtttggcaacaacattatcgtttctcatagaatccaccgctcttctcagaccggaacagagcctggggccgcccacacaagctcaccacagccttcaacatctagaggcctgctcccggaggccggccagttggccgaacgaggtttaagccctagaaccgcatcctgggatcagcctggaaccccggggagagagcctactcagcctactctgcccagtagctcccctgtgcctatccccgtgagcctgccctcagccgaaggccccactctgcactgcgaactgacaaacaataatcacctgctcgatggtggctcttcccgaggcgatgctgctggtcccaggggagagcctcggaatagatag

SEQ ID NO: 109341 - DNA, 1947 bp, synthetic construct
  misc_feature 1..1947: note = Description of Artificial Sequence: Synthetic coding sequence
  source 1..1947: mol_type = other DNA
atggagaaggccaggcgcgggggagacggcgtccctcgcggacctgtgctccacatcgtggtggtaggcttccatcacaaaaaaggctgccaggtggagtttagttacccccccctcattcccggagacggccatgatagtcacaccctgcctgaggaatggaagtatctgcctttcctggccttgcctgatggcgcccacaactaccaggaagacacagtgtttttccatttacctccgcgtaatggcaatggcgctactgtttttggaatttcttgttatcggcagatcgaagcgaaagccctgaaggttcgccaggcagatattaccagggaaaccgtgcagaagagcgtgtgcgtcctctctaagctaccactgtatggtctgctgcaggccaagttgcaactgatcacccatgcctactttgaggagaaagatttcagccaaattagtattctaaaggaattatacgagcatatgaactctagcttgggcggcgcctctcttgaagggtcacaggtttacctgggcttgagtcccagggatttggtgctgcatttccggcataaggtgctgattctgttcaagctcatattgttggagaaaaaagtgttgttctacatttcccctgtcaataagctcgtgggcgccctgatgactgttctgagcctcttcccaggaatgatcgaacatggcctgtcagattgctcgcagtatagacctcgaaaatccatgagtgaggacggcgggctacaggaatccaatccttgcgcagatgactttgtctctgcctccactgcggacgtgagccacactaaccttggaaccattcggaaagttatggccggtaaccacggagaggatgccgctatgaagacggaagagccgctgttccaagtggaggatagctcaaagggacaggagccgaatgatacaaatcaatacttgaagccccctagcaggccatcgcctgactcaagtgagagcgactgggaaaccctggacccaagtgtcctggaggacccgaatttaaaggaacgggagcaacttgggagtgatcaaactaatttatttccaaaggactcggtcccgagtgagtccctgcctataacggtgcagcctcaggccaacactggccaggtggtcctcataccaggtttaatttctggcctggaagaggaccaatacgggatgccgttggctatttttaccaagggttatttatgtcttccatatatggcgctgcagcagcatcatctccttagcgatgtcaccgtcaggggtttcgtcgccggcgctaccaatatcctgtttaggcagcaaaagcacttgagcgatgccattgtggaggtggaagaggccctcattcagattcatgacccagaactgcggaagctgctgaaccccacaacagcagatcttagatttgccgattacctcgtgagacacgtgactgagaatagggatgacgtttttcttgatggcaccgggtgggaaggcggagacgagtggattcgggcacagttcgctgtgtacattcatgctctgttggccgctacgctccaactcgataacgagaaaatactgtctgactatggaaccacattcgtgacagcctggaagaacacccataattacagggtctggaactccaacaagcacccagctctcgcagaaatcaatcccaatcacccgtttcaagggcaatactcagtatcagatatgaagctgcgattctctcatagcgtccagaatagcgaacgggggaaaaaaattgggaacgtgatggtaactacatcccgtaacgttgtgcagaccgggaaagctgtcggacaaagtgtgggcggtgccttttcgtctgccaagactgccatgagttcctggctttctacatttacaacctcaacaagccaatcactaaccgagcctcccgacgagaagccctag

SEQ ID NO: 109342 - DNA, 1773 bp, synthetic construct
  misc_feature 1..1773: note = Description of Artificial Sequence: Synthetic coding sequence
  source 1..1773: mol_type = other DNA
atggaaaaagctcgacgcggaggagacggcgtgccccgcggcccggtgctgcatattgtggtggtaggcttccatcacaagaaagggtgccaagtggaattcagctatccacctctcatcccgggcgatgggcacgactcacacactctgcctgaagaatggaagtatctgccgtttctggccctccccgacggtgcccataactaccaggaggacacagtgtttttccacctgcctccacgcaatggcaatggcgctaccgtgttcggcataagctgttaccggcaaattgaagccaaggcgttgaaggtgcgacaagccgacattacgagggagacagttcagaagtcggtttgcgtgctcagcaaactccccctgtatggcctcctgcaggcaaaacttcagctcattacccatgcatacttcgaagagaaggatttctcgcagatttctatccttaaagagttatatgaacatatgaactctagcctggggggagcatccctggaggggtcccaagtgtatctcggactgagcccgcgagacctagtcctccattttcggcataaagtattgattttgttcaaactgattttactagaaaagaaagtgcttttctacatctccccagtcaataagttggtcggcgccctgatgactgttctgtccttgttccctgggatgatcgaacacgggttaagtgactgctcacagtaccggccacgcaagtcgatgagcgaggatgggggcctgcaggaatctaatccctgcgcagacgacttcgtgagtgcttccaccgcggacgtcagccatacgaacctgggaacaatccgcaaagtgatggcagggaatcacggagaagacgcggctatgaaaactgaggaaccccttttccaggttgaagacagtagcaaaggtcaggaacccaacgacacgaatcaatacttaaagcctccctccagaccctccccggactcttccgagtccgattgggaaacccttgatccatctgtgctagaggatcctaacctaaaagagcgcgaacagctgggcagcgatcagacaaatctttttcctaaggactctgtgccctctgagtcactgccgataactgtccaaccccaggctaacacagggcaggtggtacttattcctggcttgatttctggcctggaggaggaccagtatggaatgcctctggctatattcactaagggttacctctgcctcccatacatggctctgcagcagcaccatctgctgtccgacgtcaccgtccgtggattcgtagccggtgccaccaacatcctgttcaggcagcagaagcacctgtcagatgcaatcgtcgaagtggaggaggcgctgattcagattcacgatcccgagttgcgaaagcttttaaaccccacaacagccgacttgcggtttgcagattacctcgtacgacatgtgaccgagaatagggacgacgtgttcttggacggaactggatgggaaggaggcgacgaatggatccgtgcccaatttgccgtgtacatccatgcgcttctggctgctacgctgcagcttgtgctgttccggatagtgaatgtgaaaaagattggcaacgtgatggtcacaacatcccggaatgtggtgcagactggaaaagctgtgggtcagtcggtggggggcgcattcagcagcgcaaagacggccatgtccagctggctttctacttttacaacatcgacctctcagtctcttaccgagccgccggatgaaaagccatag

SEQ ID NO: 109343 - DNA, 1392 bp, synthetic construct
  misc_feature 1..1392: note = Description of Artificial Sequence: Synthetic coding sequence
  source 1..1392: mol_type = other DNA
atggagaaggcacggagggggggagacggcgtcccacgcgggccggttttgcacatagtcgtggtgggtttccatcacaagaaggggtgccaagttgagttttcctatccgcctctgataccaggcgacggacacgactcacacacccttccagaggagtggaaatacctccccttcttggccctgcctgatggagcacataactaccaggaggatactgttttttttcacctcccaccccggaacgggaatggggccacagtctttggtatctcatgttacaggcaaattgaggcaaaggctctaaaagttaggcaggccgacattacacgggagactgtgcagaagagcgtctgcgtgctctctaaactgcctctttacgggctattgcaggcaaagcttcagctcatcactcatgcttactttgaggaaaaggacttctcacaaatcagcatactgaaagagttatacgagcatatgaatagctcgctcggaggagcttctctggaggggagccaggtttacctcggtttaagtcctcgagacctcgttctgcacttccggcacaaagtcctgatcctgtttaagttgattctgctcgaaaagaaggtgcttttttacatttcccctgtcaataaattagtgggtgctctgatgaccgtactctccctgttccccggcatgatcgagcatggattgagcgactgttctcagtatagacctagaaaaagcatgtccgaggatggggggctccaagagtcaaatccttgcgcagacgacttcgtgtccgctagcacggctgacgtttcccacacaaatctcggaaccatacgcaaggtgatggctggtaatcacggggaggacgctgctatgaaaaccgaagagccacttttccaggtggaggatagctccaagggacaggaaccgaacgatacaaatcaatatcttaaacccccctcccgccctagccctgatagtagcgagtcggactgggagacactggatccaagtgtcttagaggaccccaatctgaaagagcgggagcaactcggttcggaccagaccaacctgtttcctaaggactctgtcccgtcagaatccctgcctattacggtacaaccacaggctaacaccggacaggtcgtgctgatccctggcctgattagcgggctcgaagaggaccagtatggtatgcccctcgccatcttcacaaagtgcacacaggacgtgttgcctcaggcaaaccactccttcaaattcctgatcaccgatcgtaggattactcccagacccttgcggcgaaggctggtgagtgcgacgctcacaaacatgctccaggagaagagctgttggaaaaaacacattaagtgccgcaggagggtccagaagtag

SEQ ID NO: 109344 - DNA, 2532 bp, synthetic construct
  misc_feature 1..2532: note = Description of Artificial Sequence: Synthetic coding sequence
  source 1..2532: mol_type = other DNA
atgtcctcagctatgctcgtgacatgtcttccagacccttcgtcttcctttagagaagatgccccaaggcctccggttcccggcgaggaaggcgaaacacccccctgccaaccaggggtcggaaaaggtcaagtgaccaagccaatgcctgtatctagcaatacccggcggaatgaggacggactgggtgagccagaaggacgggccagtcccgacagcccccttactcgctggaccaaatctctccactcactgctgggagatcaggacggcgcttacctgttccggacattcctggagcgcgagaagtgcgtcgatacattggatttctggtttgcctgtaatggatttcgtcagatgaacctcaaagatacgaagacccttagggtcgcgaaggcaatatacaagagatatattgaaaacaatagtattgttagtaaacaactaaaacccgctacaaaaacctacatccgtgatggcattaaaaagcagcagatcgactcaatcatgtttgaccaggcccagacagaaatccagagcgttatggaggaaaatgcataccagatgttcctaacgtccgacatttatttggagtacgtgcgctcaggaggtgaaaataccgcatacatgagcaatggaggcttgggaagcctgaaagttgtgtgtggatacctgcctactctcaatgaggaagaggagtggacttgtgctgactttaagtgcaaactgtccccaaccgtcgtcggtctgtcttctaaaactctccgcgctaccgcttcggtgcggtcgacagaaactgtcgactccggttacaggagctttaagcggtccgacccggtaaacccctaccacattgggtccggatatgtgtttgcccccgccacaagtgctaacgactccgaaatctcttctgatgctcttactgatgactcaatgtccatgaccgacagtagcgtcgatggtatccctccttatcgggtcggatccaagaaacagcttcagcgggagatgcatcggtcagtgaaagcgaatgggcaggtatcactgcctcacttccccagaactcacaggcttcccaaggagatgaccccagtcgagccagccacatttgcagcagaactcattagcagactggagaaactcaaactggaactcgagagccggcactctctcgaggagcgcctccagcagattcgcgaggatgaagaacgggagggcagtgagctcaccctcaacagccgggagggtgctcctacgcagcaccccctctccctcctcccatccggctcctacgaagaggacccccagacgatactggatgatcatctctcaagagtactcaaaaccccaggatgtcaatctccaggcgtcggcagatattcaccacgctcccgatcaccagatcaccaccaccaccaccatagtcagtaccactccctcctgcccccaggagggaagctcccgccggctgccgcatcacctggagcctgtcctctcttgggtggcaaaggttttgtcaccaaacaaactaccaaacatgttcatcatcattacatccatcaccatgctgtgccaaaaacaaaagaggagatcgaagccgaagccacgcagcgggtgcactgcttttgtcccgggggctccgagtattattgctactccaagtgcaagtcgcattcaaaggcacctgaaactatgcccagcgaacagtttggtggttctagagggtcaaccctgcccaaaaggaatggcaaggggaccgagcccgggctcgctctgcctgcccgcgaagggggcgcaccgggcggagccggagccctgcaactgccccgcgaagagggcgatcgctctcaagacgtgtggcaatggatgctggaaagtgaacggcagagtaagcccaagccccacagcgcccagagtaccaaaaaagcatacccccttgagtccgcccgcagcagtcctggggagagagcatcccgccatcatctctggggtggaaattctggccatccgcggaccaccccaagagcgcatctattcactcaagatccagccatgccacccctcacgccgccaaacacactagcacagttggaagaggcctgtcgccggctagccgaggtgagtaaacccccgaagcagcgctgttgcgtggccagtcagcagagagatcggaatcactccgccaccgttcagacaggggcaaccccatttagtaacccttctctggctcccgaggatcacaaagagcctaaaaaactcgctggtgtgcacgcactgcaggcatcagagctggttgttacctattttttttgcggcgaggagataccctataggcgcatgctgaaagctcagtccttgaccctagggcattttaaggaacagctgtccaaaaaaggtaactaccgctactatttcaagaaggcaagcgatgaattcgcctgcggagccgtctttgaagagatttgggaagacgagacggtgctgccaatgtatgagggccgcatactgggcaaggtcgaaagaatcgactag

SEQ ID NO: 109345 - DNA, 2337 bp, synthetic construct
  misc_feature 1..2337: note = Description of Artificial Sequence: Synthetic coding sequence
  source 1..2337: mol_type = other DNA
atgagctctgccatgctggtcacgtgcctgccagatccttccagtagcttcagggaagacgcccctcggccccccgtccctggagaggaaggtgaaacccctccctgtcagcctggagtgggtaaaggccaggtaacaaagcccatgcccgtgagcagtaataccagacgcaacgaggacgggttgggcgaacctgagggacgggcctcacctgacagccctctgactagatggacaaagagcctacatagcctactcggcgaccaggatggcgcgtacttgtttcggacattcctggagcgggaaaagtgtgtagacacgcttgatttctggtttgcctgcaacggctttagacagatgaacctgaaggatacaaagaccctgagagtggctaaggctatctataagagatacatagaaaataatagcatagttagtaaacaactgaaacctgctactaaaacttatatccgcgatggtatcaagaagcagcagatcgattcaataatgttcgaccaggcccagaccgaaatacagagcgtgatggaggaaaatgcataccagatgtttctgaccagcgacatttatctggagtacgtgcgatcaggcggcgaaaataccgcttatatgagtaatggcggattagggagcctgaaagtagtgtgcggttaccttcccaccctcaacgaggaggaagagtggacatgtgcagacttcaagtgtaaactctcacctaccgtagtcgggttgagcagtaaaacgttacgggccacagcaagtgtcagatcaactgaaactgttgactccggctaccggtcgttcaagcggtcagacccagtaaatccataccacattggatcagggtatgtgttcgctcccgcgacttccgctaatgatagcgaaatttcctctgatgctctgaccgatgactccatgagtatgaccgacagctctgtcgacggaattcctccatatcgggtgggcagtaagaaacaactccaacgcgagatgcacaggtctgtaaaggctaacggtcaggtttctctgccccattttccgcggacacatagactgcccaaagaaatgactccagtggaacctgccaccttcgccgctgagttaatttcacgtcttgaaaagttaaagctggaactcgagtctcgacacagtttggaggaaaggttacaacaaattcgggaggacgaagaaagagagggatccgaactcactttgaactcacgcgagggcgccccaacacagcatcccctgtcgctactgccaagcggctcatacgaggaagatccccagacgatactggatgaccatctatctcgggttctgaagactccaggttgtcagtctcccggggtcgggcgctatagcccaagatcaagatctcccgatcaccatcaccaccatcacagccaataccattctttactacccccagggggtaaattgcccccagcagccgcttctccaggcgcatgtcccttactggggggcaagggctttgttaccaagcagaccactaagcatgtccaccaccactatatacaccaccacgccgtgccaaagacaaaggaagagattgaggcggaggcaactcagcgagtgcactgcttctgcccgggcgggtccgagtattattgttattcaaagtgcaagtctcacagcaaagcccccgagaccatgccctccgaacaatttggtgcccagtcaacaaagaaggcctaccccctcgaaagcgccaggagtagtccaggagagcgcgcctcgcggcatcacctttggggcggcaacagcggacacccccggacaaccccccgggcccatctctttacccaggatcccgccatgcccccactgaccccccctaacacccttgcgcagctcgaggaagcatgtagacgactggccgaggtgagtaaaccgccaaagcagagatgctgcgttgcctcgcagcagcgggacaggaatcattcagccacagtgcagacaggagctacccccttttcaaatcccagcctcgcacctgaggatcacaaagagcccaaaaaactcgcaggcgtacacgcacttcaggctagcgaactcgtcgttacctactttttctgcggagaggagattccatatcggcgcatgcttaaagcacagagtctaaccttggggcactttaaggagcagctgagtaagaagggaaattaccggtattatttcaagaaagcgagcgatgagttcgcctgcggagccgtgtttgaagagatctgggaagatgagaccgtgctgcctatgtacgagggccgaatcttgggcaaagtcgagcgtatcgactag

SEQ ID NO: 109346 - DNA, 483 bp, synthetic construct
  misc_feature 1..483: note = Description of Artificial Sequence: Synthetic coding sequence
  source 1..483: mol_type = other DNA
atgtcctccgcgatgctggtcacttgcctcccagacccctcttccagttttcgtgaagacgctcctcgccctcctgtgccaggcgaggagggagagacccccccgtgccaaccaggcgttggaaagggtcaggtcaccaaacccatgcctgtgtcgtctaacaccaggcgaaatgaggacggcctgggggaaccggaggggcgcgcatctcccgatagcccactcacacgttggacgaaatctctccacagccttcttggagatcaggatggagcttacctgtttcgtacttttcttgaacgtgagaaatgtgtcgacactctggacttctggttcgcttgtaacggattccggcagatgaatttaaaagataccaaaacgttgcgcgtggtcaacgatttctgccatgatattttgttctatctctattgtaagctgtgcatcatcaagagctccttcaaggaaaactacctggtgcagtag

SEQ ID NO: 109347 - DNA, 921 bp, synthetic construct
  misc_feature 1..921: note = Description of Artificial Sequence: Synthetic coding sequence
  source 1..921: mol_type = other DNA
atgtccgaggttaccaggtcgctcctgcagcgctggggcgccagttttcgtagaggcgctgattttgactcctggggacagctggtggaggcaatagacgagtatcagatcctcgctaggcatttgcagaaagaagctcaggctcaacacaataactcagaattcaccgaggaacagaaaaagaccatcggtaagatcgcgacttgtctagagcttagatccgccgctttgcaaagcacgcagtcacaggaggaattcaaactggaggacttgaaaaagctcgagcctatcctgaaaaacatcttaacgtacaacaaagagtttccctttgatgtgcagcctgtccctctgagacgtatcctggcccctggcgaggaggagaacttggagttcgaagaagacgaggaggagggcggcgcgggtgctggttctcctgattccttcccggctagagtgcctggtacgctgctccctaggttaccctctgaaccaggcatgactctcctgaccataaggatagaaaagatcggcctcaaggatgctggtcaatgtattgatccttacattaccgtgtccgtcaaagatttgaatgggattgaccttacccctgtgcaagacaccccagtggctagccgaaaagaggatacttacgtgcacttcaacgtcgacattgaattacaaaagcacgtggaaaagctcacaaagggcgcagcaatttttttcgagttcaaacactacaaacctaagaaacgattcaccagcacaaaatgttttgctttcatggagatggacgaaatcaagccaggtcctatagtgattgagctctataaaaagccaactgatttcaaacggaagaagctgcagctcctcaccaaaaagccgctctacctgcacctgcaccagaccttgcataaggagtag

SEQ ID NO: 109348 - DNA, 675 bp, synthetic construct
  misc_feature 1..675: note = Description of Artificial Sequence: Synthetic coding sequence
  source 1..675: mol_type = other DNA
atgtccgaagttacccgctccctccttcagcggtggggtgctagtttccgtcggggcgccgactttgattcatggggtcaactggtggaggccatagacgagtaccaaatcctggcacgacatctccagaaggaagcccaggcacaacataataacagtgagttcacggaagagcaaaaaaaaaccatcgggaagatagcaacttgtctcgagctgaggtccgccgcccttcagagcacccagtctcaggaagagtttaagctggaggatctgaagaagctcgaacccattttaaagaatatattaacctataataaagaattcccctttgacgttcagccggtgcccctgcgcagaatattggcgcctggagaggaagaaaatctcgagtttgaggaagatgaggaagagggtggcgccggggctgggtcacctgactcattccccgctcgggtgccgggagcagctatcttttttgagttcaagcattataagcctaaaaaacgattcactagtactaaatgctttgcgtttatggaaatggacgagatcaaaccaggacccatagtaattgagctgtacaaaaaacctaccgattttaagaggaagaagctgcagttgctgaccaaaaagcctctgtacctgcacctccaccagacactccataaagaatag

SEQ ID NO: 109349 - DNA, 849 bp, synthetic construct
  misc_feature 1..849: note = Description of Artificial Sequence: Synthetic coding sequence
  source 1..849: mol_type = other DNA
atgatcgctaccgaagccgtcgtccgcgctgcccagggactggctcgtcaccttcaaaaagaggcacaggcccagcacaacaacagtgagtttaccgaagagcagaagaagacgataggaaaaatcgccacttgtctggagctacgctcagctgccttacaaagcacccaatcgcaggaagagttcaagctggaggatctcaagaagttagaacccattctgaagaatattctgacatataataaagagttccctttcgacgtgcagcccgtgccccttcgacgcatcctggctcctggtgaagaggagaatctcgagttcgaagaggacgaggaggaaggaggggccggcgccggttccccagacagctttccagcaagggtgcccggaactctgctaccccgcctcccctccgagcccggcatgacactcctgacaatccgcattgagaaaataggactgaaggacgcaggccagtgcattgacccttacataaccgtatcagtaaaggacttaaacggaattgacctgactcccgtccaggacacccctgtggcgtcacgcaaagaggacacatatgtgcacttcaatgttgacattgagcttcaaaagcacgtcgagaagctcactaagggcgccgccattttctttgaatttaaacattacaagccaaaaaaaaggtttactagcactaaatgtttcgctttcatggagatggatgaaatcaagcccggtccaattgttatcgagctgtacaaaaaacctaccgattttaagcgaaagaagcttcagcttctcaccaaaaagccactgtatttacatctgcatcagactttacacaaggagtag

SEQ ID NO: 109350 - DNA, 2685 bp, synthetic construct
  misc_feature 1..2685: note = Description of Artificial Sequence: Synthetic coding sequence
  source 1..2685: mol_type = other DNA
atggcgtggcgctgccctcgtatgggtagggttccactcgcctggtgtttggcattgtgcggatgggcctgcatggccccccgcggaacccaggctgaagagagcccttttgtgggaaacccgggcaacatcacaggagctaggggtctgacaggtacattgaggtgccagctgcaggtccagggcgaaccgccggaggtgcattggttaagggatgggcagattttggaactggctgactcaacacagacacaagttcctctcggcgaggatgaacaagatgactggatcgtagtgtcccagctgaggatcacatcccttcagttgtccgatacagggcaataccagtgcctggtgtttctcggacaccagacgtttgttagccagcccggatacgttggtctcgagggcctcccgtatttcctggaagaaccagaagacagaaccgtagcggccaacacacccttcaatctgtcatgtcaggcccagggacctccagagccagtggacctgctatggctccaggatgcagttcccctggcgaccgctcctggacatggcccccagcgctccctgcacgtccctggactgaacaagacctcaagtttcagttgtgaagcccacaatgctaaaggcgtcactacctctcgtaccgccactatcaccgtcttacctcagcagccacgcaatctgcacctggtgagtaggcagccgaccgaactagaggtagcctggacacctggcctgagcggcatctacccactgacccactgtacactgcaggctgtgttgtccaacgacgggatgggcatccaggcaggtgagcccgacccacctgaggaacctctaacttcacaggcgagcgtccctccacatcagctacgcctgggatcactccacccacatacaccctatcatattagagttgcttgcaccagctcccagggccctagctcttggactcactggttgccagttgaaactcccgaaggggtgccacttggcccaccagagaatatcagcgccacacgcaatggttctcaggccttcgtccactggcaggagccgagagctccattacagggaaccctcctagggtatagactggcttaccagggtcaagacacccctgaggtactcatggacattggcctccggcaagaagtgacactcgagctccaaggggatggcagcgtgtccaacctgaccgtctgtgttgcagcatacactgccgctggcgatgggccctggtctttacctgttccactggaggcctggcggcccggtcaggcccagccagtgcaccagctcgtgaaggaaccttccacccccgctttctcctggccgtggtggtacgtgttgctaggcgccgtggttgcggcagcatgcgtgctcatcctcgctctcttcttggtccataggcgcaaaaaggaaactaggtacggggaggtgtttgaacctaccgtcgagcggggcgagctcgtcgtccgctacagagtcaggaagtcctatagcagacgaactaccgaggctactctgaacagtctaggaatttctgaagagctaaaagagaaattacgtgacgtcatggtggaccgccataaggtagctctggggaaaacactcggtgaaggcgaatttggagctgtcatggaggggcaattgaaccaagatgacagtattctcaaagtagccgtcaaaaccatgaagatcgctatttgcacgcggtcagagttggaagacttcctgagcgaagcagtgtgtatgaaagagttcgaccatccaaatgtgatgaggctgatcggggtgtgttttcagggatcggaaagagaaagcttccctgcgccagtggtaatcttgcctttcatgaaacacggcgatttgcatagcttcctgctgtacagcaggcttggggaccagccagtgtaccttccaacacagatgctggtgaagtttatggctgatatagcctcaggtatggaatacttgagcactaaaaggtttatacaccgggatttggctgccagaaactgtatgttaaatgaaaatatgagcgtgtgtgtggccgacttcggcctgagtaagaagatatacaacggcgattattatcgccagggacggattgccaaaatgcccgtgaaatggattgctattgagagtcttgctgacagagtgtatacatcaaaatccgatgtgtggagcttcggcgtgacgatgtgggaaattgctacccggggacagacaccctaccccggcgttgagaacagcgaaatttatgattacttgaggcaaggcaataggctcaagcagcccgctgactgtctcgacggcctgtatgcactgatgtctcggtgctgggaacttaatccacaagacaggcccagcttcaccgaactgcgggaagatctggagaacaccttaaaagctctgccgcccgcccaagaaccagatgaaatcctttacgttaatatggacgagggggggggctaccctgagcccccaggggcggccggcggcgccgaccccccgactcagcccgatccaaaggactcttgcagctgcctgacggcagcagaggtccaccccgcgggcagatacgtgctctgccctagcaccactcctagcccagcccagcccgctgaccggggcagcccggctgcacccggccaggaagatggcgcttag

SEQ ID NO: 109351 - DNA, 2658 bp, synthetic construct
  misc_feature 1..2658: note = Description of Artificial Sequence: Synthetic coding sequence
  source 1..2658: mol_type = other DNA
atggcgtggagatgtccccgaatggggagggtccctctcgcttggtgcctggcgctgtgtggatgggcttgcatggcccctcgtggtactcaagccgaggagagcccatttgtcggaaatccaggtaatattaccggagcgcgaggcctcacaggtacacttagatgccagttacaagtgcagggggaaccacctgaggtgcactggctgagggacgggcagattctggaattagccgactccacgcagacgcaggtgccactgggcgaagacgagcaggacgactggatagtagtgagccagctcaggatcactagtctgcagctgagtgatactgggcagtatcagtgccttgtctttctgggacatcagacttttgtctctcagcctggctatgtagggcttgaaggcctcccatatttcctggaggaaccagaagaccggacagtagcggcaaatactcctttcaacctgagctgccaagcgcaggggccccctgaacctgtcgatcttctgtggctccaggatgcagtgcctcttgctacagcccctggacatggtcctcagaggagtcttcatgtccccgggctcaacaaaacgagttcctttagctgcgaggcacacaatgccaaaggtgtgactacgtcccgaacagctacaatcacggtcctcccgcaacagcctcggaatctgcatctcgtctctagacagcccactgaacttgaggtcgcgtggacacccgggttgtccggcatctatccactcacgcactgcactctgcaggctgtgttgtctaacgatggcatgggcattcaggcaggagaaccagaccccccagaagagcccctgacaagccaagcatccgttccacctcaccagttgaggttgggctctcttcacccccacacaccgtatcatatccgcgttgcctgcacgtcgtctcaaggcccctcaagttggacacactggcttcctgtggaaactcccgagggcgtgcccctcggtccaccagaaaatatctccgcaactcggaacggatctcaagcttttgtgcattggcaggaaccgcgcgccccactgcagggcactctgctgggatatcggctcgcttatcaggggcaggataccccagaagttctgatggacattggccttaggcaggaagtgaccctcgaacttcagggagatggtagcgtaagtaacctcactgtatgtgtagcagcgtatacagcagcgggtgacggcccgtggtctctgccggttccattagaagcttggaggcctgtcaaagaaccatccacccccgccttttcttggccctggtggtacgtcctgcttggggctgtcgtggcagctgcgtgtgtgttgatactagccctctttctggttcacaggcgcaagaaggagacaagatacggcgaggttttcgaacctaccgtcgagcggggagagctggtcgttcgatatcgagtgcgaaagagctactcaagacgtactacagaggcgaccttaaatagtttgggaatttcagaagaactgaaggagaaactgcgggatgtcatggtggatcgacacaaagtggccctggggaaaactctgggagagggggaatttggcgccgtgatggaaggacagttaaaccaggatgacagcatactgaaagtggccgtaaaaactatgaagattgcaatctgtacacggtcagagctcgaggactttctgtcagaggccgtgtgtatgaaggagttcgatcaccccaacgttatgcgtctcatcggagtgtgctttcaaggctctgagcgagagtctttcccggcccctgttgttatactgcctttcatgaaacacggcgatcttcatagtttcctgctgtacagcagactgggtgaccaacctgtctacctgccaactcagatgcttgttaaattcatggccgacattgcttctggcatggaatatttaagtacaaagagattcattcaccgcgacctggcagctcgcaattgcatgttaaacgagaatatgtccgtgtgcgtcgcagatttcggactgtctaaaaagatctataacggcgactattataggcaaggcagaatcgccaaaatgcccgttaagtggattgcgatagagagtctggccgacagagtatatacgagtaagtccgacgtatggtctttcggggtgacaatgtgggaaattgctacccgcgggcaaaccccctatccgggcgtggaaaattccgagatctacgactatctacggcaggggaacaggctgaagcaaccggccgactgtctggacggcctttatgctctgatgagccgttgctgggaactgaaccctcaggacagacccagcttcaccgagctcagagaggacttagagaataccctgaaggcactgccccccgctcaggaacccgatgagatactatacgtcaatatggacgagggagggggctatccagaacctcccggagctgcaggtggtgcggacccccccacccagcccgatccaaaggactcttgcagttgcctgactgccgccgaagttcaccccgcaggccgctacgtcctttgcccctccactacaccctccccagcacaaccagcagacagaggcagcccagctgcccccgggcaggaggatggagcttag

SEQ ID NO: 109352 - DNA, 2439 bp, synthetic construct
  misc_feature 1..2439: note = Description of Artificial Sequence: Synthetic coding sequence
  source 1..2439: mol_type = other DNA
atggagccactcggaaactggcgctcattgagggccccattaccccctatgctgctccttttactgctccaggtagcgggccccgtcggagcccttgccgaaaccctgctaaacgccccaagggccatgggtacgagtagctctccccccagtcctgcatccgttgtcgcccccgggacaaccctgttcgaggagagccggttaccagtgttcactttggactacccccacgtgcagatcccttttgagataaccctatggatcctactggctagcctcgccaagatcggatttcatctttaccacaagcttcccacaattgtgccggagtcatgtctccttattatggtaggtctgctcctaggcggtatcatctttggtgtggatgaaaaatccccacccgccatgaagactgacgtgttctttttgtatctgcttcctccaattgtactcgatgcaggatactttatgccaacaagaccttttttcgaaaacatcgggaccattttctggtacgccgtcgtaggtactctctggaacagcattggaattggggtgtcgctgtttggcatttgccagatcgaggcgtttggcctctccgatatcacgttactgcagaacctgctattcggtagcctcatatccgccgtggaccctgtagccgtgcttgccgtgtttgaaaatattcacgtcaatgaacagctttatattctcgtattcggagagagtttgctcaatgatgccgtgacagtggtactgtataatctctttaagtccttctgccagatgaaaaccatagaaacgatcgacgttttcgctggaatcgcaaactttttcgtagtcggcatcgggggcgttctgataggtatctttcttggcttcattgccgctttcaccacccggttcacacataacattcgtgtgatcgaacccctcttcgttttcctctattcttacctgtcgtacattaccgcggaaatgttccatctatccggcattatggccatcactgcctgtgctatgacaatgaataagtacgtggaggaaaatgtcagtcagaagtcttacactaccataaagtattttatgaagatgttaagcagtgtatcagaaacccttatttttatcttcatgggggtttccaccgtgggcaaaaaccacgagtggaattgggcgtttgtgtgcttcactctggccttctgtctcatgtggcgagccctgggagtgtttgttcttacccaggtgattaaccggttcagaactattccgctgactttcaaggatcagtttatcatcgcatacggtggtctgagaggagctatatgctttgccttagtgttcctgcttccagcagccgtgtttccacgcaaaaagctgttcatcacggccgccattgtggtcatattttttacggtttttatattgggcatcaccattcgcccactggtcgagtttctagacgtgaagcgttccaataaaaagcagcaggccgtgtcagaggagatttactgtcgcctgttcgaccacgtgaaaacaggaatagaggacgtgtgtgggcattggggccacaacttctggagagataagtttaaaaagtttgacgataagtacctgcgtaaactactcatcagggagaatcagcctaagtcaagcatcgtaagcctctacaaaaagctggaaattaagcatgccattgagatggccgagactggcatgatcagcaccgtgcccactttcgcatctctgaacgactgcagggaggagaagatcaggaaagtgacatcgtctgaaacagacgagatccgcgagctgctctcccggaacctgtatcaaattaggcagcgaaccttgagctataatcgtcactccctcaccgcagacacatcagaaaggcaagccaaggagatcctcatccgaaggcgtcactcactccgggagtcaatacgcaaggattcttcattgaatagggagcatcgcgcttccacaagcacttcaagatacctctccttgccgaaaaacacgaagctgcccgagaagcttcagaaaaggcgcactatcagcatagccgatggcaattcttccgatagcgatgcggatgcggggactacagtgctgaacctgcagcctagggccagaagatttctcccggagcagttctctaagaagtcaccccaatcttacaagatggagtggaaaaacgaagtggacgtggattccggcagagatatgccgtccacccctccaactccccattccagagagaagggcacccaaacctcaggcctcctccagcagccactgctgtccaaggaccaaagtggttctgagcgcgaagacagtttgactgaggggattccccctaaacccccacctcgtctggtgtggcgcgcatctgagccaggaagccggaaggcacgctttgggtctgagaaaccttag

SEQ ID NO: 109353 - DNA, 681 bp, synthetic construct
  misc_feature 1..681: note = Description of Artificial Sequence: Synthetic coding sequence
  source 1..681: mol_type = other DNA
gccgaaggcaaatggggcctggctcatggaagggctgaggcgcacgtctggcctggccagggcggatggcgtctcggaccaccacaggggcgatggacagggtcctcacccttgttggacatcgtggggggaagaaaagcacgacctagacagttcccttttctggctagtatacagaaccagggtagacacttctgtggaggggccctaatccacgcaagatttgttatgacagcagccagctgcttccagtcccagaatccaggtgtgtctacggtcgtgttaggagcctatgacttgagaaggagggagaggcagagccgtcagactttttctatctcatcgatgagtgagaacgggtatgacccacaacagaacttgaacgatctgatgctcctgcagttggatcgtgaagcaaacctgacatcctccgtgactattctaccactccctctacaaaatgccacagttgaagccggaaccagatgccaggtggccgggtgggggtcacaaaggtcagggggcaggctgtctcgctttcctcgcttcgttaacgttacagtcactccagaagaccagtgccggcccaataacgtgtgcactggggttttgacacggagaggcggaatctgcaacgttagcgccccttgcggcggaaggcggggccccgaaagatattag

SEQ ID NO: 109354 - DNA, 7875 bp, synthetic construct
  misc_feature 1..7875: note = Description of Artificial Sequence: Synthetic coding sequence
  source 1..7875: mol_type = other DNA
atgttcagacgcgcccgcttgtcagttaaacccaatgtcaggcccggcgtcggcgcccgaggcagtacagctagcaacccccagcggggccgggagtcacctcgccctcccgaccctgccacagattccgccagcaaacccgcagagccgactgacgtgccgaccgtggatttcggtggtgcggaaccccaggaaaaggcaccccgctcatcgaccgagaaaacaggcggcgataatgacgtggaagaatcttctcgttcaagtagcactgtatctcagcgcaggaaacgcattagcagtacttcaagcctcgttaagtcttcagtctccgtgccttctgagtcacacccactctccaccataaaccaggaggccccccagccgaccgcaacaagtaccaaagagaagcagccttgctcagataggtaccgcatttataaagcccagaagctgcgtgagatgctgaaagaggagctgcgcaaggagaagaaacagtggaagaataagtatgcaattaatgaaagccagcgtccaccggacagaagcaaaatgaccatgcgagatttcatttattacttgccagacaacaatcctatgaccagctcgctggagcaggagaagaagactgaaaaaccttcaacgccggtccagactcgggagcaagaaggcaagagtactcccaacgccgaagataacgaaatggaagaggagacggacgacggaccactgctggtgcctagagtcaaggttgccgaagacggctcgatcatcctggatgaagagtcccttacagttgaggtgctaaggacaaaagggccatgtgtggtggaggaaaacgaccccatcttcgagcgaggttctactactacctatagttcttttcggaaaaactactatagtaagccctggtctaacaaggaaacagatatgtttttcctggctattagcatggtcgggaccgacttctcaatgatcggccaactgttcccgcaccgcgcgcgaattgagatcaaaaataaatttaagagggaagaaaagaccaatggctggcggattgataaagccttccaggagaaacgcccattcgatttcgacttctttgcccatcttctgcagaaggtcctcgccgaggaagagaaacgaaaacagaaaagcgtgaagaatcatagcttgaaagaaaagaaatccactaagcctaggaagaatgttaaagtcaaaaaggtggcctgtgagggcgttaataacgacccagacgagagcatgagctcgcgcataagtgacactgaacgtagccagaaagatgctcagacagttgaggaagagtcactgaccctgtcaagggaggacgccgaacaagtggcactggaagtggatctgaaccagaagaaaaggcggcgtaagaagcaagacggagcgaacgagctgggagtgaacaatttactggagaacgcgaccgtgcaggccgggcccagcaagggcgagaagcataagaacaaatgccaagcaatcaggccggaactgaaggagggagagtgcagcaaagaacagatgctgtcttgtactcagaatatcgacggcatcgtcggcttcgcctctactgagaaggttgagaaacggaccgaccctatcctgtctctctcaaaccagcaggatgcaacttcagtggccacagagtcttctgagtcatccacgtccgatctgcccagcttcgaagttgggatacgggcactgtgtgaagtaaataatgcggaaggctcttgtatcgaagagagaaatgtggacctgaaaaacaacagtcttgaaattgatcagacggagaatgtgaagccgatgctccgggggcgcttccaacgccctaagccaaacctgtcaagggctgggaaaaagagcgtcctcagccaaggtaagaccgaaagcgagagtaaaaattcacatagtaagacctccgtggaaaagaaccacgtggagaaggataagatgaatacactggatattctgagaatggagacaaccgagagggaaaacccagaggctgaaaccgtgtcagttctgggagaaaaaaattgtcttcaggaaggaagtcagctcaaagctttgcgcccagttcaggttcggggtcggttacaaaagcccaaacctaatgctggaaaggccgctgaacggaaggagatccttatcagccaggaggaaattggggccaacgtagaaaaaaatgagaatgaaagctgtgcagatcgcgacaccccacagcacatggaagatcaatctaggaaggattttgaagaagaggatgtgatactccagccagaaaaaaatgacagtttccagaatgtgcagccggacgagcccaaagtgctgaacgagtgcctctctgtgcaggagaacaataaggctaataagttgaaccaggttccaattttgcgtaccaggttccagaagccgaagccaaacataggtagagggaccggcagacgcgaaatatcatctaaagaggaggtcctggagaagatcctggtcagcggcgaaatggccgctgccttgcgggaaacagttcgtttagacacgtctcctaaagaaatggtgcctgcggaaattaatacaaaagaaatgcagagtgacctgaaagagacagggcgtcgcgctattagccctcgcgagaagatactagacgtcattgacgatacaatcgaaatggaaaccgggcttaaagccatggggcgggagatctgcttaagggaaaaaacccccgaagtcattgacgctacagaggaaatagacaaggatctggaagaggctggaagacgagaaatctctccacagaagaacggccctgaagaagtaaagcctttgggagaagttgaaaccgacctgaaagctactgggaatgagtctagtcctagggaaaagactcccgaggtgaccgacgccaccgaggagattgacaaaaacctagaagaaacaggaagaagaaagatcagccctagagagaacggccctgaagaggtgaagcctgttgacgagatggagacagacctgaacgcaaccggacgagaaagctctccccgggagaagacccctgaagtcattgacgctaccgaagagattgatctcgaggagaccgaacgcgaagtgagccctcaagagaacggcttagaggaggtaaagcctttaggcgaaatggaaaccgacctgaaagcgacgggtagagacagttttcctaggggtaagacccccgaagtgatcgatgccattgaggaaatagagattgacctagaggaaaccgaacgagagatcagtccccaggaaaacggactggaggaggttaagccactaggcgagatgcagactgacttgaaggctacaggccgcgaaatatctccacgcgagaagacaccggaagtgattgatgcaacagaggaaattgataaagacttagaagagactggccgccgcgaaatcagccccgaagagaacggcccggaggaggtaaaaccggtcgatgagatggagacagatctgaagactactgggcgtgagggctcttccagggagaagacacgggaagtcattgatgcggctgaggtgatcgagaccgatctggaggagactgaaagggagatttctccgcaggaaaatggcccagaggaagtcaaacccgtaggaaagatggagaccgatttgaaagaaattcgagaggaaatctctcagagagagaaagtcctggccgagtttagtgctataagagaaaaagagatagacctaaaagagacaggcaaacgggatatcccaattatggaaaaagtaagcggtaagatggctgtcgtggaagagatggaagcggacctgaaagagacaggcaaagaaaatttcagagaacggggcagcgaagagatttgcgtcaccgaggaaaaagtggcagagttaaaacagaccgggaaaaccgacattagcccgagagaaaatgagttagaggagaccagcacatcacggcaaacggatacccatctaatgcagtcaggatccaatgatttcagtgcagttccctcactggacattcagaacatctcaagtgaggtcctcagtatgatgcacactccagtggaagaaaagagaaattcagagaaggaagtgtccagccatttttcacatttcaagatcagttctcagacacatgagtcagacaagaccgaggtgcaagggattcagtcccccgatgtgcctgagcagttctccgacatcaaccttagcaaaagtctcccccaggagcaaaaacccctggaaattaaaccagcgccctttgtgcgcagtcggttcaaacgacccaagcctaatttggcccgcgcagcgctgaagcgggagaccacagaatcagaaaagtacatttacgagaagaagtcagagaccaagaagatggagactatcgtgatgcaggaaaacaacgaacaaaccgatacactgccctcacagcatgacgaagcatccctgatgatcagcagagaaaaggatacgctgggtcatcggaatgaggaagctgtaatccttccgtgtacccagacagagcgtaatctctctcccagcaacagctgcgaacctaaggaggagtctcagagcgcacctgtccagaagaatgatagtgtggtgtccgttggcacaaataatgtcaacacttttcagcaggagatgaaagagtcggtgatacagacggcaagacaggtgcggggcaggctacagcggcccagacccaatattaggaagacaggacagcgtcaaatcgtggacaagggggaagctaaaggcatcatcaaggaagggcgaaccatactgccgaaagatgagaccgaaaagaaggtgctgacagtgagcaacagccagatcgagactgaaattgaagttccctcgtcagcagtacccgaacatcgcatgtacgaaaatcagtctcaggttgtgttggtggaaaatctccacgttaataagactaacgagaccattcggcacgagaataagccgtatgtccccagctccgcccaaatgaccagacgcaagtttcaaaaagcgaagcccaacctcggccgggcccactcaaagaaagaggagcctgttctcgaaaaagtgactactgatcagtcaaaggagggcaaacccgaggatcacctgctgcagaaaggcgcgagcaacacccagctactactcaaagaaaaagcagagctgttgactagtttagaggtctcagcacggaaagactgcgtgggctctaaagagagcgcgctcgcgaagattgacgctgagctggaggaggtcggtccgtctagacgagtgggtgaggagactgtcggagacaactctccttcgagcgtggtggaggaacagtatttgaacaagctgaccagttgtccacaaccccttaacgaaacctcttactctaagattgccctggacggaaagactaccatctcctctaccagcgaatacgagcggaatcgcggggaacggaggtcccataaaaaatttaaacccaacgtcacgcggggtagagggagcaagagggtgcgtggcaagacatccaagaaagaaccacgtgcttccaaggcaatgttagttaccctgagggccagccaggaagaagacgatgacgctgacgacttcgaatccgactatgaagaggaaagttatcacctggcaccggaggaggtcaataaggctcccgtctttgtgccggtaggcctgagatctccagagcccgtctccgctcagatcgaagagaccatggaagagctcgaaatcactgttaacgttccggacgttggttgtatcgctgttgtcgagcacgagttgcctaacaccgatgttaccacggaagagatgaagcaagaagagaatctctctgtcccgttcgagatgacgactagtgagcacatccaggacgagcccgggacgaatgacgggagcactgaggcagctataaccctcctcaccatgggagatctcgtgctccaaagtgagatctcctccgaacaaggcgatgtgggggtgtgcatcatccctcatgtgcactccaaagacaagagccatatacccagtagcttggacaatgtcaaccacaagatcgtgcacgagtgccaagagctgtcttcacctgtgatcacgacatcccctgcatctttcgaggagaataaaattgtcctagaagagcagagttccagagaggagatcagcctcatggaaaaagtgaaagagaatgcaactccaacaaggaacaccatctccaaagtgactagcaatttaaggattcggtcaaggttagcaaaacctaagcctaatctggagaagactctgggtacgaatagacttgatgattatcaggaagtatcttcactgtgtgtcaccaagggggccgaaatggaaacacagagggagaccgagaaaaacgcatccaaggccacagagctcgaaaataagaaccttgggcctgtgacaaccgccgaaaacaaggatcagagcaagctggcttgtgtccacgggattaaagggacctctatctctagcgaggtaaacctgactgaaaggaatgaaaaccaggaggagagcagccaggaagtgcatatgctgagcgtggccccagtggcctcctccgagacgggcccatgcacactcggattagatagaggactgggagaaaacagcgttgaggagccccagattaaagattccaagggtgacagcgtattgacgctgccggtccccgagtacacccccacctccataccagaagttcagcaggagaatatcattaatcctcaagacctaacggtgaacctggtagcaaacgtgcctcaggacggcgaagatgagcaggcgtttatcttgacacttgtagagatccctgctaatgccgttgaggaatttacggatgccactgctcagttcatgccaaatcccctcctccctgcacccatacttgtcaagagcgtgaataccgaagaaagaggcgacatgtcaatttgcctgccagccactagtgtgggccaggacgccatgggattaagtatctctggcagggacaactcgaaaaagcctcctgacaatctggatctggtgagcagaaagcgcttccagtgtcgcttggacaagaacgatcacatcccgccagctaagaaaagatcacttaccttgcgcgatgactgccaggaatatactacggaggttcactcaaaggagctgaccaatgtcttcgaggagacaggggagtcccacaaagggcaggatatttttctcacctccggttctacactcaccactcctgagccccagaggcaacaggtggaagccgccttccaaagcaggggctcaaggagccctgacgcgtgtatggacaaaaatgtcccgcagctccctcaggacgagatgattgtatctgacaaggaagaaaggaccgacgccgctcccaaaagccagcagatggatagcaggacctcctcttccaaagcttcattgagtcggcctgggcgccgaccgctggggtttctttccctgatctgtagcaagaattccctggagtccgacgagcctatgcaggttcacagcaaaaagcgattgaagcctctgattccaggactacggaagaagcttaagcgctctaacccttttaacgagtcacaggagaagaacagggagtctagcgacttattgccttcccccagtgtcatcacgacgcaatctgagaatatctcctcatctgccacccaggttagctgcgaccaaccactgctgaaggagggatacaagtcggcccagaagagagctccccagggtgaggccaccaccgtaagtgagtattttttcaatgatatcttcatcgaggtagatgaaaccgagtag

SEQ ID NO: 109355 - DNA, 1392 bp, synthetic construct
  misc_feature 1..1392: note = Description of Artificial Sequence: Synthetic coding sequence
  source 1..1392: mol_type = other DNA
atgctggtcactctcagggcctcccaagaggaggacgacgacgccgatgattttgagagcgactacgaggaggagtcttaccatctcgctccggaggaggtcaataaagcacctgttttcgtgccggttggcctacgcagcccggaacctgtcagtgcccagatagaggagacaatggaggagcttgagattaccgtgaacgtcccggacgtgggctgcattgcagttgtagagcacgagctgcccaacaccgatgtaacaaccgaggaaatgaagcaggaggagaacctaagcgttccttttgagatgaccacctccgaacatatccaggatgaaccaggcacaaacgacggatcaacagaggccgcgataacccttctgaccatgggcgatctagttctccagagtgaaatcagctctgaacagggcgacggcgtgtgtataatcccacatgtacattctaaagacaaatcgcacatcccgtcaagtctcgataacgtcaaccataagattgtgcacgagtgccaggagctcagcagcccagtgatcactacaagcccggcgagcttcgaggaaaacaaaatcgttttggaagaacagtcatcccgcgaagaaatctctctgatggagaaggtgaaagaaaacgccacaccgacacgcaacacaatttctaaggtgacctctaaccttaggatacggtctaggctcgccaaaccgaagccaaatctagagaagaccttgggtaccaaccgcttagacgactaccaggaggtgagcagcctgtgcgtaacaaagggcgccgagatggagacccagcgcgaaaccgagaagaacgcttccaaagccactgagcttgagaataaaaaccttggaccagtcacaactgccgaaaacaaggaccagtccaagttagcgtgcgtccacggaattaagggtacctcgatttcctctgaagtgaatttgaccgagcgaaacgagaatcaggaggagtcgtcacaggaggttcacatgctaagtgtagcaccagtggcatctagcgagacaggcccttgcacacttggtcttgaccgaggcctgggcgaaaattccgtggaggagcctcagataaaggactcaaagggtgactctgttctcaccctgcctgtgccagaatacacccccacttctattccagaagtgcagcaggagaacatcatcaacccccaagacctgactgtgttcgtgtatcagcaactgcagctcgtgaaaatgccctgggtgtacctgtttctggaagagataattctgaagagcagactgattatctggatcctctacctaggaagagatttcaacgctggcttgattaagatgactacattcttactgcccaaaaacgtgcatagcttgtag

SEQ ID NO: 109356 - DNA, 2445 bp, synthetic construct
  misc_feature 1..2445: note = Description of Artificial Sequence: Synthetic coding sequence
  source 1..2445: mol_type = other DNA
atgtttcgccgggctaggctctctgtgaagcccaacgttcggccaggggtgggggcccggggcagcacggcaagcaatccgcaacgcggtagagaaagccccagacctcccgatccagccactgattctgcttccaagcccgccgagccgactgacgtgccaacggttgatttcggaggagccgaaccacaggagaaggcacctcgatcaagcaccgaaaaaactgggggcgataacgacgtggaggagagctcgagaagcagctctaccgtgtcacagcggaggaagaggatctcgtctaccagtagtctggtaaagtccagtgtctccgtgcccagcgaaagtcaccccttgtccaccattaaccaagaagctccgcagcctactgccacctccactaaggagaagcagccttgttccgatcgataccgaatatacaaagctcagaagctgagggagatgctgaaggaagaacttcgtaaggagaagaagcagtggaaaaacaaatatgcaatcaatgaatcccagaggccccctgatcgctcaaaaatgaccatgagggacttcatttattatctgccggacaataacccaatgacctcttcgctcgaacaggagaagaagaccgagaagccgtccaccccagtccagacacgggaacaagaaggtaagtccaccccgaatgctgaagacaatgaaatggaagaagagaccgatgacggtcccctgctggtgccccgcgttaaagtcgctgaggatggctctatcattcttgatgaagagtccctgacagtggaagtgctcaggaccaaaggtccatgtgtggtggaggagaatgatcccattttcgaacgcggatccacgactacttattcttctttcaggaagaattactacagcaaaccctggtcaaacaaagagacagacatgttcttcctggccataagcatggtcggaacagactttagcatgattggacaattattccctcacagagctaggattgaaatcaagaataaatttaaacgcgaagagaagactaacggatggcgcatagataaggctttccaggagaagaggccatttgatttcgattttttcgcacatttgctgcagaaggtgctggccgaggaggaaaaacgtaagcagaaatctgttaagaaccactctcttaaggaaaagaaatctacaaaaccgcgaaaaaacgtcaaagtgaagaaagtggcttgtgagggggtgaataatgaccctgacgagagcatgtcaagccgtatatccgatacagagaggagtcaaaaggatgcacaaaccgttgaagaagaatccttgactctttctagggaagacgccgagcaggtggctttggaggtggatctcaatcagaaaaaacggcggcggaagaaacaagacggagccaatgagcttggcgttaataacctgctggagaacgcgacagtgcaagccggcccaagcaagggcgaaaaacataagaacaagtgccaggccatccggccggaactcaaggagggtgaatgttccaaggagcagatgctgtcttgtacacagaatatcgatggcatagttggttttgcctcaaccgagaaggtggaaaagagaaccgatcccatactaagcttgagtaatcagcaggatgccacttcggtcgcaaccgagtcaagcgagtcttcaaccagcgaccttccaagttttgaggttggcattcgtgccttgtgtgaggttaataatgccgagggaagctgcatcgaagaacgcaacgtcgacttaaagaataactcccttgagatcgaccagactgagaatgtgaagccgatgctgcgcggtagatttcaacggccaaagcccaacctctccagggccggtaaaaaaagcgtcttgtcccaagggaaaaccgagtccgaaagtaagaattcccactccaagacttctgttgagaaaaatcatgtcgaaaaggacaaaatgaacacattggatattcttcggatggaaactaccgagcgcgagaatccagaagccgaaaccgtgagcgtactgggagaaaagaactgtctgcaagagggatcccagctgaaggcactgcgccccgtgcaggtcaggggtcgtctgcaaaaaccaaaaccaaacgccggcaaggccgctgagcgcaaggagatcctgatctcacaggaagaaatcggagccaacgtggaaaagaacgagaacgagtcctgtgcagatcgagatactccacagcacatggaggatcagtctaggaaagatttcgaggaggaagatgtaatcttgcagcccgagaaaaacgactccttccagaacgtgcagcccgacgaaccaaaggttcttaacgagtgcctgtcagtgcaggaaaacaacaaagccaataagctgaatcaagtgcccattctgagaaccaggtttcaaaaaccctag

SEQ ID NO: 109357 - DNA, 2541 bp, synthetic construct
  misc_feature 1..2541: note = Description of Artificial Sequence: Synthetic coding sequence
  source 1..2541: mol_type = other DNA
atgttccgacgggctcgtctctccgttaaaccgaatgtaagaccaggcgttggagctcgcggaagcaccgcgagcaacccacagagagggcgggagagtccccggccccctgaccctgcaacagacagcgcatctaaacctgcggagcccacggatgtccccacggtcgattttggcggcgccgagccccaggagaaagccccacgatcctccaccgagaaaacagggggtgataacgatgtggaagagagttcgcgaagctcatcaacggtctcgcagaggcgcaagcgcataagctcgacttcctctctcgtgaagtcctccgtttctgtcccttcggagtcccatccactcagcacaattaatcaggaggcaccacagccaaccgcaacatccacaaaagaaaaacagccctgctccgaccgctatcgaatctataaggcccagaagctgcgggagatgcttaaggaagaattgagaaaggaaaagaaacagtggaagaataagtatgccatcaacgagtcccagcgccctcctgaccgatctaagatgactatgcgtgatttcatttactacctgcctgataacaatcccatgacgagtagtttggaacaggaaaaaaaaaccgaaaagcccagtacaccagtccagaccagagaacaggagggcaaatcgacaccgaacgccgaagataacgagatggaggaggagacagatgacggaccactgctggtgcctcgcgttaaggttgctgaggacggttctattatccttgatgaagaatccctgacagtggaggtactccgaactaaggggccctgcgtggtggaagaaaatgatcctatatttgaaaggggttctacaacgacgtattcctcttttcgcaaaaattattacagcaaaccttggtcgaacaaggagacagacatgtttttcctggccatttctatggtggggactgacttttctatgatcggccagctttttccacaccgagcccggatcgagatcaagaacaagtttaagcgggaggaaaaaaccaatggatggcggatcgacaaggcattccaggagaaacgcccctttgacttcgacttctttgctcacctcctgcagaaggtgctcgccgaagaagaaaaacgcaagcagaaatccgtgaagaaccacagtttaaaggagaagaaaagtacaaaaccccggaagaacgtgaaggtgaaaaaagtcgcctgtgaaggagtgaacaacgatccagacgaatcgatgagtagtcgcattagtgatacggaaaggtcgcagaaggatgctcagactgtcgaagaggagagtctgactctgtctagagaggatgctgaacaagtggccctggaggtggatttgaaccagaaaaagagacgacggaaaaagcaagatggcgccaacgaactgggggtcaacaatctgctggagaacgcgaccgtccaggccgggccttcgaagggcgagaagcataaaaataagtgccaggcgatccgacccgagctgaaggaaggggaatgttccaaggagcagatgttatcctgcacccagaatattgacgggattgtcggcttcgccagcacagagaaggttgaaaagcgcaccgatcccattctgagcctgtcaaaccaacaagacgccacctcagtggctacagagtcttctgagtccagcacctccgacctgccttccttcgaggtggggatcagggctttgtgcgaggtgaataatgccgaaggatcctgcattgaggaaagaaatgtagatctcaagaacaatagtcttgagatcgaccaaacagagaatgtgaaacctatgttgcgtggacggtttcaacgccccaagcccaacctcagtcgcgccgggaagaaatctgtcctctctcaaggcaaaaccgaaagcgaatctaaaaatagtcacagtaagaccagcgttgaaaagaatcatgtcgaaaaggataagatgaatacactggatatcctcagaatggaaacaactgaaagagaaaatccagaagcagagactgtctcagtgctgggggaaaaaaattgtcttcaggagggctctcaattgaaggccctccgtccggttcaggtgaggggcaggctgcagaaacctaaacccaatgccggtaaggccgccgagcggaaagagattctgatttcccaggaagagattggagccaacgtggaaaaaaatgagaatgaatcatgcgccgaccgcgatacgccacagcacatggaggatcagagcagaaaggacttcgaggaggaagacgtgattctgcagcccgaaaaaaatgactcgtttcaaaacgtgcaaccagacgagcccaaggttctcaacgagtgcctaagcgtgcaggagaataataaagctaataaattgaaccaggtgccaattctgcggactcgtttccagaagcctaagcctaacattgggcgggggaccggcagaagagagattagttccaaagaggaagtgctggaaaaaatcctgagcctgggtaaatggcgccagcactag

SEQ ID NO: 109358 - DNA, 6399 bp, synthetic construct
  misc_feature 1..6399: note = Description of Artificial Sequence: Synthetic coding sequence
  source 1..6399: mol_type = other DNA
atgtcgagtagaatcagcgacaccgagagatctcaaaaagatgcccagacagttgaggaggaatcacttactctgtccagagaggatgccgagcaagtcgcactggaagtagacctgaatcagaagaaaagacggcgaaaaaagcaggatggggcaaacgagttgggcgttaacaacctccttgagaatgccacagtccaagcagggccttcgaagggagagaagcacaaaaacaagtgccaggcaatacgccctgaattaaaagagggtgaatgtagcaaagaacagatgctgtcttgcacacaaaacatcgatggtatcgtgggattcgcttctacggagaaagtcgagaagcgaacagaccctatcctgagcctgtctaatcagcaggatgcaacaagcgtggcaactgagagctccgagagttccacctccgacctcccatcatttgaggttgggattagggcattgtgtgaagtgaataacgctgagggctcttgcatcgaggaacggaacgtggatttaaaaaacaattccttagaaattgaccagaccgaaaatgtgaaacctatgctgcgcggacggtttcaacggcccaagcccaacctgtcccgggcgggtaagaagtccgtgctctcccagggtaagacagaatcagagtctaagaactcacattcaaaaaccagcgtggaaaagaaccatgtggagaaggataaaatgaataccctggatattctcagaatggagactactgaacgggaaaacccagaggccgagaccgtctcggtactgggagagaagaattgcctccaggagggaagccaactcaaggctcttcgcccagtgcaggttcgcggacggctccagaaacccaagcccaatgccggcaaagcagcagaaagaaaggagatcctaatctcacaggaagaaattggggctaacgtggaaaagaatgagaatgagagctgcgccgatcgggacaccccacagcatatggaagatcagtctcgaaaagacttcgaagaggaggatgtgattttacaaccagagaagaacgacagcttccagaatgtgcagcctgacgagccaaaagttctgaacgagtgcctgtctgtccaagaaaataacaaggcaaacaagcttaaccaagttcccattttaagaacgagattccagaagcccaaaccaaacatcggtagaggtacgggccggcgtgagatttccagtaaagaggaggtgctggaaaagattctagtgtctggtgaaatggctgcggccctgagagaaacagtgagacttgatacatctccgaaggaaatggtgcccgctgaaattaataccaaggagatgcagtccgatctcaaggagaccggcaggagagcgatttctccaagagagaagatcttggatgttattgacgacactatcgagatggagacagggctaaaggctatggggagggaaatatgccttagggagaagactccagaggtaatcgacgcaacagaggaaattgacaaggatttggaggaggcaggccgccgggaaataagcccacagaagaatggtcctgaagaggtcaagcctcttggagaggtggagacggatctgaaggccacagggaacgaaagctcgccccgagagaaaactccagaagtgacggatgcaactgaagagatagacaaaaacctagaagagacaggccgccgaaagatctctcctcgcgaaaacggccccgaggaggtgaaacctgtggatgagatggagactgatcttaatgcaacgggtcgcgagagtagtccacgagagaagactccggaagtcatagatgccactgaggagattgatctcgaggagacggagagggaggtgagcccacaggagaatgggttagaagaggtgaaaccactgggcgaaatggaaacggacctgaaggccactgggcgagattccttcccccggggcaagacacctgaggtgatagacgccatcgaggagatagagattgatttagaggagacggagagagagatctctcctcaggaaaatggcttagaagaagttaagccactgggcgagatgcagacagacctgaaggccaccgggcgcgagatttctcctcgcgagaaaacgcccgaggtgattgatgcaacagaagagattgataaagacctggaagagaccggtcggagggaaatcagccccgaggaaaatgggccggaggaggtcaagccagtggacgagatggagaccgacctcaagacaacaggaagggaagggagctcgcgagagaagaccagggaggtgatcgatgcggctgaggtgattgagacggatctcgaagaaaccgagcgcgagataagtcctcaagagaatggacctgaggaggttaaacctgtgggcaaaatggagactgatcttaaggagatacgagaggaaattagccaaagggagaaggtgctcgctgaattcagtgcaattagagagaaggaaatcgatctaaaggagactgggaagcgcgacattccaatcatggagaaagtgagtgggaagatggccgtcgtagaagagatggaagctgacctgaaggaaacgggcaaggaaaattttagagaacgcggtagtgaggaaatctgcgtcactgaggagaaggtggctgaactgaaacagactggtaagacggatatttctccacgcgagaacgagcttgaggagacttctacttctagacagacggatactcatctgatgcagagcggcagcaacgatttcagcgccgtgccgtcattggatatacagaatattagtagtgaagtgctgagcatgatgcatacacccgtggaagaaaagagaaactccgaaaaagaagtcagcagccatttctctcactttaagatctcttctcagacccacgaatccgataaaaccgaggttcagggaatacagtcacctgatgttcctgagcagttctcggacattaacctgtctaaaagtctcccacaggagcaaaaaccgctcgagatcaaaccagcgccttttgtgcggagccgctttaagcgccctaagcccaatttggcccgagctgccctgaagcgggagaccacggagagtgaaaagtacatttacgaaaagaaaagtgagacaaagaagatggagaccatcgtcatgcaggagaacaacgagcaaaccgacacattgccttcccaacatgacgaggccagcttaatgatatctagggaaaaagacaccttaggccataggaatgaggaagctgtgattctaccatgcacccagacagagcgcaatctatctccttctaactcctgtgagcctaaagaagagagtcaatcagcgcccgtgcagaaaaatgatagcgtggtgtctgttggcacaaacaacgtaaataccttccagcaagagatgaaggaaagtgtcatccagaccgctcgccaggtacgtggtagactgcaaaggccgcggcccaatataaggaagactggccaacgccagattgtggataaaggcgaggccaagggcattatcaaagaggggcgtaccatcctgccaaaagatgagacagaaaagaaggtcctcacagtatccaacagtcagattgagactgaaattgaagtgccctctagtgcagtaccagagcatcggatgtatgaaaatcaatcacaggtggtgctggtggagaatctccatgtcaataaaactaatgagacaattcggcacgaaaacaaaccatatgtgccatcttctgcgcagatgacccgaagaaagtttcaaaaggccaaaccaaatttagggcgtgctcactcaaaaaaggaagaaccggtgctcgagaaagttaccactgatcagtccaaggaggggaaacccgaagatcatctcctccagaaaggcgcctccaatacacaactgctgctcaaggaaaaagccgagctcctcaccagcctcgaagtgagtgcaagaaaagactgtgtggggagcaaggaaagcgcactggccaaaattgacgctgaactagaggaagtgggcccctcacgccgggtgggcgaagagacagtcggcgataacagcccaagcagcgtggtcgaagagcagtacttgaacaaacttacttcttgccctcagcccctgaatgagacgtcctattccaaaatcgccctcgatggtaagactactatctcttctacctcagagtacgaaaggaatagaggcgaaagaagatctcacaagaagttcaagcccaacgtgactcggggacggggctcgaaacgcgtcaggggaaaaacttctaagaaggaacctagggctagtaaggccatgcttgtcactctccgggcatctcaagaggaagacgatgatgctgacgattttgagtctgattatgaggaagagagctaccacctcgccccagaagaggttaataaagcgccagtgtttgtccccgtaggcttacggagccccgaaccagtgtctgctcagattgaggaaaccatggaagagctagaaattaccgtcaacgtccccgatgttggttgtattgctgtcgtggaacacgagctgcctaatacagatgttacaactgaagagatgaaacaagaggagaacctgtcagtgccttttgaaatgaccacatctgagcatatccaggatgaacccggcgtgtgcattattccacatgtacactcaaaagacaaatcacacataccatcctccctcgataacgtgaatcacaaaattgtccacgaatgccaggagctgagttcgcccgttatcactaccagcccagcatccttcgaggaaaataaaatcgtactcgaggaacagagctcccgtgaggaaatctccctgatggagaaagtgaaagaaaatgccaccccaacccgtaacaccatcagcaaagtcacctccaacttaaggattaggtcccggctcgccaagcctaaacctaacctggaaaagacattgggcaccaaccgactggatgactatcaggaggtctcatcgctttgtgttactaagggcgctgagatggaaactcagagagaaactgaaaagaacgcatccaaggcaaccgagttggaaaacaagaatcttggacccgtcacaacagcagagaacaaggaccagagtaagttggcctgcgtccatggtattaagggaacgagtatcagcagtgaggtgaatctgacagaaagaaatgaaaatcaggaggagtcctctcaggaggtgcacatgctctcggtggcaccagtcgctagtagtgagaccggaccttgcaccctcggtttggaccgcgggctgggggaaaactcagtggaggagcctcagatcaaggactctaagggcgacagcgtgctgactctgcctgtacccgaatatacgcccacttcaattcccgaagtgcaacaagagaatataattaatccgcaagacttgacagtgaatcttgtggctaacgtaccgcaagacggtgaggatgagcaggccttcattcttacactcgtagagatccccgctaacgccgtggaagaattcacagacgctacagcccagttcatgcccaatcctctcctgccggccccgattctggtgaaatcggtgaatacagaggaacgcggcgacatgagtatctgcctaccagccacctcagtaggccaagacgccatgggactctctattagcggtcgggataatagtaagaaaccccccgataacctcgatctagtaagcagaaagcgctttcagtgcagactcgataagaacgaccatataccacccgcgaagaagcggtccctcactctgcgagacgattgccaggaatataccacagaggtccactccaaagagctgactaatgttttcgaggaaacaggcgagtcgcataaaggtcaagatatttttctgaccagcggatccacactgacaacgcctgagcctcagcgtcagcaggttgaagcggccttccagtcccgaggttctaggtcccccgacgcatgcatggataaaaacgtaccacaactgccgcaggatgaaatgatagtgtcagataaagaagagagaacggatgccgccccaaaatcccagcaaatggacagtagaacaagctcaagcaaggccagtctctcccgcccaggcagaagacctctgggattcctgtcactgatctgtagtaaaaatagcctggagtccgacgaacctatgcaagtccactctaagaagagactcaaaccgctcatccccggcttgcgtaagaaactcaagcgctctaacccctttaacgaatcccaggaaaagaatagagagtcctccgacttactccccagccccagtgtgattaccacccagtctgagaacatctcttcctccgccactcagtcgcccttttag

SEQ ID NO: 109359 - DNA, 1392 bp, synthetic construct
  misc_feature 1..1392: note = Description of Artificial Sequence: Synthetic coding sequence
  source 1..1392: mol_type = other DNA
atgctggtgacgctgcgggcaagccaagaggaggacgatgacgccgacgactttgaatctgactatgaagaagaaagctaccacctggcccctgaagaagtcaacaaggcaccagtcttcgtgcccgtgggtctgcggagcccagaaccagttagtgcccaaatcgaggagactatggaggaactagagatcaccgtgaacgtgcctgacgtcggatgtatcgccgtagttgagcacgaattgcctaatactgacgtgacaacggaggagatgaagcaggaggaaaatctgagcgtgcccttcgaaatgaccacttccgaacatatacaagacgaacctggcactaacgatgggagcactgaggcggctattaccctgctaaccatgggggacctagttcttcagagcgaaatctcaagcgagcagggagacggcgtctgcattattccacatgtgcattcgaaagacaaatcacatatcccatcgagcctggataacgtcaaccataagattgtacatgagtgccaggaactgagctcccctgtcatcacaaccagtccagctagctttgaagagaacaagattgtcctggaggagcagtctagcagggaagagatcagcctgatggagaaagtgaaagagaatgcaacgcccacccgaaacactatttcgaaagttacgtcgaacctccgcattcggtcccggctggcgaaacccaagccaaatttagagaagaccttaggcaccaataggctggacgattaccaggaggtctccagcctgtgcgtgacaaagggagctgaaatggaaacccagcgggaaacagaaaaaaacgcttctaaagccactgaacttgagaataagaacttgggtcctgtcaccaccgctgagaataaagaccagtcaaaactcgcgtgcgtgcacgggattaagggcacgagcatcagttctgaggtcaacctcaccgagcgcaatgaaaaccaagaagagtcgtctcaggaggtgcatatgttgtcagtggcacccgtggccagttcagagacagggccatgcacactgggtcttgacagagggttgggcgagaatagcgtcgaggagccccagatcaaagacagcaagggcgacagcgtgctgactctgccagtgcccgagtatacacctacaagcattcctgaagtgcaacaagagaatataattaaccctcaggacctgacagtatttgtgtaccagcagctccagctagtgaagatgccctgggtttatctgtttctggaagaaattattctgaaaagtagacttatcatatggattctctacctggggcgagacttcaacgctggattgataaagatgacaactttccttctgccgaagaatgtccacagtctttag

SEQ ID NO: 109360 - DNA, 1518 bp, synthetic construct
  misc_feature 1..1518: note = Description of Artificial Sequence: Synthetic coding sequence
  source 1..1518: mol_type = other DNA
atgggcctggtctcttccaagaaacccgacaaggagaaacctattaaagagaaggataagggtcaatggtcccccctgaaagtttccgcccaggacaaggatgcccctcccttaccccctctcgtggtatttaaccacctgacgcccccacctcccgacgagcacctggatgaggacaagcactttgtagttgctctttacgactacacagccatgaatgatcgcgacctacagatgttgaagggagagaaactgcaggtgctaaagggcacaggggattggtggctcgctcggtctctggtgacgggaagggaaggatacgtgccatccaacttcgtggcaagagtcgagagcctggagatggaaaggtggttcttccggtcccaggggagaaaagaggcggagcgacagctgctggcccctatcaataaggctgggtcattcctgatccgcgagtccgaaactaacaagggagcattttccctcagcgtaaaggatgtgacaactcagggggaactgattaagcactataagattcggtgcctcgacgagggaggatattatattagcccgagaataacattcccatccctgcaggccctggtgcagcattactctaaaaagggagacggactgtgccagcgtttgactctgccctgtgtgcgccccgccccacaaaatccatgggcccaggacgagtgggaaatcccaagacagtctctgagattggtaaggaagctcggctctggccagttcggggaggtttggatgggctattataaaaataatatgaaggtggccatcaaaactctcaaggagggcactatgagtccagaagcattcctgggcgaagctaacgttatgaaggccctgcagcatgagcggctcgtacggctatacgcagtggtaaccaaagagccaatatatattgtgacagaatacatggctcgaggttgcctgttggatttcttgaagaccgatgagggcagcaggttgtccctgcccaggttgatcgacatgagtgcccaaattgcagagggaatggcgtatatcgagcgcatgaattcaatacatcgagacctgagggcggccaacatcctagtctctgaggcattatgctgcaagattgccgacttcggactcgctcggatcatcgattcggagtatactgcccaggagggcgccaagttccccataaaatggactgcccccgaagccatccatttcggagtcttcacaattaaagctgacgtttggagtttcggggtcctgctcatggaagtggtgacttacggaagagttccttaccccggcatgtcaaacccagaggtaatcaggaacttggaaaggggctatcgcatgccaagaccagatacctgcccgcccgagttgtacagaggggtaattgccgaatgttggcgttccagaccagaggagcgacccaccttcgagttcctccaatccgtcttggaggatttttacactgccaccgaacgacagtacgaactgcaaccttag

SEQ ID NO: 109361 - DNA, 1773 bp, synthetic construct
  misc_feature 1..1773: note = Description of Artificial Sequence: Synthetic coding sequence
  source 1..1773: mol_type = other DNA
atgggcctggttagttccaagaagccagacaaggagaaaccaataaaagaaaaggataaaggacaatggtcgcctttgaaggtgtcggcccaggacaaagacgctcctcccttacccccgctagttgtatttaatcacctaacccctcctcctcccgatgaacatcttgacgaagacaagcattttgtcgttgcgttgtacgactatactgcaatgaacgatagagatttgcagatgctcaagggcgagaagctacaggtcctgaaagggaccggggattggtggctggctagatcactcgtcacagggcgagaaggctacgtgccatccaatttcgtggcgagagttgagagtctcgagatggaacgctggttctttagatctcagggtagaaaggaagctgaacggcaactgttagctcccatcaacaaggccggttcatttctcatccgggaatccgaaactaacaagggcgcgttctctctgagcgtgaaggacgttaccactcagggcgagcttatcaaacattataaaatcagatgtctcgacgagggaggctactatatttcaccccgcattacctttccaagtctgcaggccctggtgcagcattactctaagaagggggacggtctgtgccagaggttaactctcccttgtgtgcgccccgcacctcagaacccatgggcccaggatgagtgggagatcccaagacaatctcttcgcttggtgcgaaagctcggctcaggtcaattcggcgaagtctggatggggtattacaagaataacatgaaggtggctattaaaacactgaaagaggggacaatgtccccagaagcttttctcggggaggccaacgtgatgaaagctctgcaacatgagcgactggttagactctacgccgtggtgactaaagagccaatctacatcgtcaccgagtacatggcccggggctgtcttctggattttctgaagactgacgagggcagtcgtctctccctgcccagactgatcgacatgtccgcacagattgctgagggcatggcttatatagaaaggatgaactcaatccaccgggacctcagagctgcaaacatattggtgtccgaagctttatgttgcaagatcgcagacttcggccttgcccggataattgactccgagtataccgcacaggaaggggctaagtttcccattaaatggacggctcctgaagcaattcattttggcgtgtttaccatcaaggctgacgtgtggtcattcggcgtgcttctgatggaggtggttacatacgggagggtcccgtatcccgggatgagcaatcccgaggtcatccgcaacctcgaacggggataccgaatgcccagacccgacacatgtcctcctgagctttatagaggagtcattgccgagtgttggaggtcacggcctgaggagcgccccacctttgattgcacacccggaagagtcactcgccctttgtgcgcagctagcttcgttgagggatgtaatagcgaccttgcccggtcctctggggtcctatccccatccaaggttttccggactggcaaacgcctgagctcatctaaggcccctgtgttgggcaccccaagagccgggagagtgcccgcatctgccccgtgtgtggatccagccttgccgaggtaccggtcgcaaacggggtccaggggcaggcagcaggggcagccgcaacctcggctgaggtcatccaccgctggcctgttctgtaacaaagtgaccagcgttaggtag

SEQ ID NO: 109362 - DNA, 615 bp, synthetic construct
  misc_feature 1..615: note = Description of Artificial Sequence: Synthetic coding sequence
  source 1..615: mol_type = other DNA
atggccactgcaagtccctcagtgtttctgttgatggttaacgggcaagtggagagtgcccagtttccagaatacgacgacctgtattgcaagtactgctttgtgtatggccaggactgggcacccaccgccgggctggaagagggtatctctcagataacttccaagtcccaggatgtccgacaggcgctcgtgtggaactttccaatcgacgtcacctttaagtcaacaaacccatatggttggccccagatcgtgctgagtgtgtatggaccagacgtttttggcaatgatgttgtcagagggtatggcgctgtgcacgtccctttttctcctgggaggcacaagaggacgataccgatgtttgttcccgagtctactagtaaattgcagaagttcactagttggttcatggggcggcggccagagtataccgatcctaaagtggtagcacagggggagggtcgggaggtgactcgggtgaggtcgcagggatttgttaccctccttttcaacgtggtgaccaaggacatgcgcaagctcggttacgatactggaccatcagacacacagggcgtgctcggtcctagcccaccacagtcatttcctcagtag

SEQ ID NO: 109363 - DNA, 462 bp, synthetic construct
  misc_feature 1..462: note = Description of Artificial Sequence: Synthetic coding sequence
  source 1..462: mol_type = other DNA
atggcaaccgcttcccctagcgtgttcctcttgatggtcaatggtcaggtggagtcagcacaatttcctgaatacgacgatctgtattgcaaatattgcttcgtgtacggtcaggattgggcgcccacagcgggactggaggaaggtatcagtcagatcaccagtaagtcacaggatgtgcggcaagccctagtgtggaattttcccatagacgtgaccttcaagtctaccaatccatacggctggccccaaatcgtcctcagcgtttatggcccagacgtatttggcaacgacgtcgtacgcggatacggcgccgtgcacgtcccattcagtcctgggcgccataaacgcaccattcctatgtttgtccccgaatccacatctaaactgcagaaatttacttcattatgcttagtggcgtcgtctgaccttcaagctgccccccccaccgaggacaagtag

SEQ ID NO: 109364 - DNA, 486 bp, synthetic construct
  misc_feature 1..486: note = Description of Artificial Sequence: Synthetic coding sequence
  source 1..486: mol_type = other DNA
atggccacagcgagcccctctgtctttctactcatggttaacggtcaggtggaaagcgcccagttcccagaatatgacgatctgtactgcaaatactgctttgtttatggacaggactgggcgccgacagctggactagaggaaggcatctcgcagataacctctaaatctcaagacgtgcgacaggccctggtgtggaatttcccgatagacgtcacattcaagagtactaatccctacggttggccgcagatcgtgctaagtgtgtacggtcctgacgtgtttggcaacgacgtggtgcggggctatggtgccgttcacgttcccttcagtcctgggaggcataagcgcactatcccaatgttcgttcctgaatccacaagcaagctgcagaagttcacttcttggttcatggggcggaggcccgaatacacagatcccaaagtcgttgcccagggagaggggcgggaggctcagcctggctag

SEQ ID NO: 109365 - DNA, 564 bp, synthetic construct
  misc_feature 1..564: note = Description of Artificial Sequence: Synthetic coding sequence
  source 1..564: mol_type = other DNA
atggccacagcctcccctagcgtgtttctgctgatggttaatggtcaagtggaatctgcacaattcccagaatatgatgacctgtattgtaaatattgttttgtctacgggcaggactgggccccaaccgctggcctggaagaagggatctctcaaattacaagcaaatcacaagacgtccggcaggccctcgtctggaacttccctatcgacgtcacatttaaatctacgaacccatacggctggccccagatcgtcctgtctgtctatggccctgacgtcttcggcaatgatgtggtgagaggatacggagctgtgcacgtgcccttttctcctggcagacataaacggacgatccccatgtttgtgcctgagtcaacctcaaaattgcagaagttcaccagttggttcatggggagacgtccggaatacaccgacccaaaggtcgtcgctcagggggagggccgggaagacgaaaacgcagaagccgagattcctagaagcacctgggtgagcctgtgcccatcgccagcctggcttatgttaccattctgccctcaatag

SEQ ID NO: 109366 - DNA, 402 bp, synthetic construct
  misc_feature 1..402: note = Description of Artificial Sequence: Synthetic coding sequence
  source 1..402: mol_type = other DNA
ctcttgatggtgaacggacaagtagagtccgcccagtttcctgagtatgacgatctgtattgcaaatattgttttgtttacgggcaggactgggctccaacggcaggactcgaggagggcattagtcagatcacgagcaagtcacaagacgtgcggcaggccctggtgtggaattttcccattgatgtcaccttcaaatccaccaatccctacggctggcctcagattgtgctgtccgtgtacggtcccgatgtgttcggcaacgacgtggtgagaggctacggcgccgttcatgtgccctttagccctggtcggcacaaacgcacaatccctatgttcgtacctgagtccacatccaaactgcagaagttcaccaggtcagccagctgcagcactcactag

SEQ ID NO: 109367 - DNA, 615 bp, synthetic construct
  misc_feature 1..615: note = Description of Artificial Sequence: Synthetic coding sequence
  source 1..615: mol_type = other DNA
atggccacagcttcaccgagtgttttcttgctgatggtcaatggccaggttgagagcgctcagttcccagaatatgacgatctgtattgcaaatactgttttgtgtatgggcaggattgggccccaacggctggcttggaggaggggattagccagatcacaagtaaaagccaggatgtgcgtcaggctctcgtgtggaacttccccatagatgttacttttaaatcaacaaatccatacggatggccacagatcgtgctgtccgtgtacggaccggatgtctttggaaacgacgtcgtccggggatacggcgccgtacacgtgcctttctctccggggaggcacaagagaacaataccgatgtttgtgcctgagtccactagcaagctgcagaaattcacatcatggtttatgggcagacgacctgagtatacagaccctaaggtcgttgcccagggcgaggggagggaggtgacacgggtgagatcacaggggttcgtcaccctgttgttcaatgtagttactaaagacatgagaaagctaggctacgataccggacctagtgatacccagggcgtcctgggaccaagcccaccacagtcatttccccagtag

SEQ ID NO: 109368 - DNA, 444 bp, synthetic construct
  misc_feature 1..444: note = Description of Artificial Sequence: Synthetic coding sequence
  source 1..444: mol_type = other DNA
atgatgacctcaaccgcctctaccgccctgtgtaccgctagaacgggacctcctcagcgggtgtggcgccgggggagccataggagccaccctcgggccaaaatgtgcggtaaacactggtgtggaacttcccccctcatgagtccccttaaagcaccaactcccacagcaggacaccgctcctgcagcgcatgtatggatcagatgtgctctgggacgatgtggttcgaagcgatgggaccttgcacttgtccttcacatttggcgggtaccaaagggcccagcccatgtctgtcacaaaacctgcgtctgaactgtagaagccttcaggccggctcatggggaggcggccccagcacccagacacctcggtggtggctcagagtgaaagcgggtaagcctccctctggactaagtgtcaaagacagctcagttagcagatag

SEQ ID NO: 109369 - DNA, 528 bp, synthetic construct
  misc_feature 1..528: note = Description of Artificial Sequence: Synthetic coding sequence
  source 1..528: mol_type = other DNA
atggcagaggttcacgtgatcggccaaatcataggggcgtctggcttttccgagagctcattgttttgcaaatggggtatccatacgggggcagcctggaaactactctccggagtgagggaaggccagacgcaggtcgacaccccccagattggagatatggcctactggtctcaccctatcgacctccatttcgctacaaagggattgcagggctggccaagactccactttcaggtatggagccaggactcttttggccgctgtcaactcgccgggtacgggttttgtcacgtcccatcgtctcctggaactcaccagctggcctgtcctacctggaggcccttggggagttggcgggaacagctggccagagccttcgttggaggcggacctcagttgctgcatggggacactatctattctggcgcggaccgctacaggttacataccgcagcgggcggtacagtgcatctggaaatcgggctactgctgcgtaacttcgatcgatatggggttgagtgctag

SEQ ID NO: 109370 - DNA, 1452 bp, synthetic construct
  misc_feature 1..1452: note = Description of Artificial Sequence: Synthetic coding sequence
  source 1..1452: mol_type = other DNA
atgaccgaggtcgaatacacccagctccagcatattctgtgctctcacatggaagctgctgccgatggtgaactcgagactcggctcaatagcgcccttctggctgccgcggggcctggagctggggcaggtgggttcgccgcaggcggccaaggtggagctgcccctgtgtatcctgtgctatgcccgtctgccttagcggccgatgcaccgtgcctgggccatatcgattttcaggaactgcgcatgatgttattgtcggaggccggagctgctgagaagacaagcggagggggagatggcgctcgggctagggccgacggagcagccaaggaaggcgcaggggccgcagccgccgccgccggcccggatggtgcaccagaagcccgggccaaacctgccgtgcgggtcagactagaagatcgcttcaactccatccccgccgagccgccgccggcacctcgggggcccgagcctccagaacccggcggcgccctgaacaaccttgtgaccctgatcaggcacccttcagagctaatgaatgtccctctgcagcagcagaataaatgtacagctttggtaaaaaataagacagccgctacaactaccgccctccagtttacatatcccctgttcaccacgaatgcctgtagcacctctggcaacagcaacctgtcccagactcagtcatctagcaattcctgcagtgtactcgaggcggccaaacaccaggatattggattgcctcgcgcgttcagcttttgctaccagcaggaaatcgaatccacgaaacagacactcggttcccgcaacaaggtcctgcctgaacaggtttggatcaaggtcggcgaggcagccctgtgtaaacaggcactgaaacgcaatcgctcacgtatgcggcagctggacacaaatgtcgaacggagagccctcggggagatccagaatgtcggggaaggggcgacagccactcagggcgcctggcagtcaagcgagtcgagccaggctaacctcggggagcaggctcagtctggcccacaaggcggaaggtcccagcgcagggagcgccataatcgcatggaaagggatcgccgcagaaggatccggatttgttgtgacgagctgaacctgctggtccctttctgtaatgctgagacagacaaggctactactttgcaatggacaactgcattcttgaagtacattcaggagcgacacggcgacagcctaaagaaggtgctgagcacaaactccaggtacgtaatgctctggacttgtttcctgaaaatgaagtccgcagtggacggaaaaaatccccagcacgcctatcgcactgccaaccataaatggctatgcttgcacgaggccagaagttttgcctttgaggtgtccatatgggcacacttccagctgtttcgcgtgcgcatccctgagggtttcctgagcatatag

SEQ ID NO: 109371 - DNA, 843 bp, synthetic construct
  misc_feature 1..843: note = Description of Artificial Sequence: Synthetic coding sequence
  source 1..843: mol_type = other DNA
atgggcccaaaggacagcgcaaagtgtctgcataggggcccacaaccctctcactgggccgcaggagacggacctactcaggaacgatgcgggcctcggtccctgggttctccggtgctgggtttggacacatgtagggcttgggaccacgtggacggacagattctgggacagttgcggcctctaactgaggaggaggaagaagaaggtgcaggagccactctgagcagaggccccgcgttccccgggatgggaagcgaggagctgagactagcttccttctatgactggcccctgacagcggaggtgccaccagagctcctcgctgccgccggtttctttcacactggccatcaagacaaggtcagatgcttcttctgttatggcggtctgcagtcatggaagcgaggtgatgacccctggaccgagcacgccaagtggtttccctcatgccaattccttttgcggagcaagggccgggattttgtgcactccgtgcaggaaacccattctcagctgctggggagctgggacccttgggaagagcccgaagacgcagcccctgtggctccttccgtgcccgcctccggatatcctgagctgccaacccccagacgagaggtccaatctgaaagtgcgcaggagcccggcgctagggacgttgaggcacaactgcggaggttgcaggaggagcgtacctgtaaagtgtgcctagacagagcagtctccatcgtgttcgtgccctgcggacatctcgtgtgtgctgagtgcgcccctggcctgcagctttgtccgatctgccgggcacccgtccgttctagggtgcgcacatttctttcctag

SEQ ID NO: 109372 - DNA, 3564 bp, synthetic construct
  misc_feature 1..3564: note = Description of Artificial Sequence: Synthetic coding sequence
  source 1..3564: mol_type = other DNA
atgagacctcgcggcgccgccttcgcagctggccctccaggagacctgcaccttggcaccgcaattggcttcgcaggggcaatttggaggtctcggagtccagccatgtccaccctgctggacatcaagagctctgtgctgagacaggtccaagtttgcccctcatttcggcgaaggactgagcaggacccaggtagcgcatcagcagacccgcaggagccagctaccggtgcttggaagcctggagatggcgtcgagtttttcgcccatatgagattgatgctcaaaaagggcgaaggccgccaaggcctcccctgcctcgaagttcccctgcggtctgggtctcccgcaccccctgaacctgtggacccctcgttgggcttgcgcgcccttgcccctgaggaagtggaaatgctgtatgaggaggctttatacaccgtgctatacagagccggaaccatggggcctgatcaagtggacgacgaagaggctctactgagttatctgcagcaggtgtttggaacatccctcgaagagcatacggaagctatagaaagggtgcgtaaagcaaaagctcccacttacgctttaaaggtctccgtaatgcgagctaagaatctgctggcgaaggaccccaatggcttcagcgatccctattgtatgcttggaatattgcccgcatctgatgctacgagagagcctagggcacagaaggagcagcgatttggtttccgcaaaggctctaagaggggaggtccactgccagcgaaatgcatccaagtcacggaggtgaaatcttcaacgctgaaccctgtgtggaaagaacacttcctatttgagatcgaagacgtgagtactgaccaactccatttagacatttgggatcacgacgatgacgtgagtctcgtggaggcttgtagaaaactcaatgaggtgatagggctaaaaggcatggggaggtatttcaaacagatcgttaagagcgcacgtgccaacggaactgctggccctactgaagaccacacagatgatttcctcgggtgtctcaatattccagtgagggaagtgcctgtggcaggtgtagacagatggttcaagttagagcctcggagctcagcctcccgtgtccagggccactgtcatctggtccttaagctgatcacgacccagagagacacagccatgtcacagcggggacgaagtgggttcttgagtcacttactgctgttgagccatctgcttagattggaacactccgcggaagagcccaattcatccagttggagaggagagctaagtacccccgctgcaaccatactgtgtctgcacggtgcccagtctaacctgtcacccctgcagctggctgtcttacattggcaagtcagttctagacatcaccagacctgtacactggactattcctatctcctcgggctgctggaagacatgcaggcccattgggaggaggccccctccctgccccaggagcaggaagaaagtttggccgattccttgagcgcattcagtgagttcgggcttcagttgcttcgtcagctgagagactattttcctgccaccaatagtaccgcggtccaccgcctggagctcttgctgaagtgtttggggaaacttcagctatttcagccatccttcgaaatttgccctttcgaaagcgaactgaatatggatatcgccgctgccctgaaacgcggtaatcgtgaatggtacgatcggatcctcaacgataagtcaccgcgagagcaaccaggccctcagaggctccccggcctggtggtcttagctgatgcggtgtatgacgacctgcagttttgttacagcgtctacgcaagcctgttccactccatccttaatgtcgatgtgtttactttaacattccgacagctggaacggttagtcgcagaggaggcgtgggttctgaccgaagagctttcaccgaagatgacattagaagttgcctcagggctgtttgaactctacctgactctcgccgacctgcaacggttttgggattccattcctggtcgcgacagcaggtctctggcactggctggtatccatgccccctttctgccagccgttaagctgtggtttcaggtgttgcgggatcaggcaaagtggcgactgcagggggctgtggatatggatactctagaacctgtagatgcttcatctagacactcaagtagtgcagcgacagccggcctttgtttgtctcatatccaggaactttgggtgcggctggcgtggccagatcccgctcaggcccagggcctgggtacgcaacttgggcaggacgtgtgcgaagcaaccctcttctacacagagttgcttcgtaagaaggtggatacacagcccggggccgcaggcgaggcagtcagcgaagccctctgcgtagtgctgaacaatgtagagctggttcgcaaagccgccggtcaggctctgaagggccttgcttggcctgaaggagccacggggccggaaggagtgctgcccaggccccttcttagctgcactcaggcgctggatgatgacctgcaacgcgaggcacacacagtaacagcccacctgaccagcaagatggtgggggatattaggaagtatgtgcagcacatctctttgtcgcctgacagcattcagaatgacgaagcggtcgcccctctcatgaagtacctagatgaaaaacttgcactgctcaatgctagcctggtgaaggggaacttgagccgggtgctggaagcactatgggaacttctcctgcaggccatcttgcaggccctcggtgcaaatcgtgatgtttctgcagacttctactctcgctttcatttcacactggaggctctagtcagtttctttcacgctgaggggcagggtttgcccttggagtcgctacgtgacggatcctataaacgccttaaagaggaattgagactgcataagtgtagtacccgggagtgcatcgagcagttctacctcgataagctgaagcagcgcacgctggagcaaaaccgctttggaagattgtcggttaggtgccattacgaagcagctgagcagagactcgccgtagaagtgctccacgccgcagatctgcttccactggacgcgaacggcctgtcagacccgtttgtgatcgtagaattgggtcccccccacctcttcccactggtgcgcagtcagaggacccaggtcaagacccgtactttacaccctgtttatgatgaactcttttactttagcgtccccgccgaggcctgccgtcgaagagcagcatgcgtgttatttacagtgatggatcacgactggctgagcaccaacgacttcgccggggaggccgctctggggctggggggtgtgaccggtgtggcccgcccccaggttggtgggggagcacgggcgggacaacccgtgactttacacttgtgccggccccgagcccaggttcgctcagccttgcgccgcctcgaaggcaggacctccaaagaagcacaggaatttgtgaaaaaacttaaggagctggagaagtgcatggaagccgacccgtag

SEQ ID NO: 109373 - DNA, 3510 bp, synthetic construct
  misc_feature 1..3510: note = Description of Artificial Sequence: Synthetic coding sequence
  source 1..3510: mol_type = other DNA
atgtcaaccttgctagacatcaagagcagcgtgctgagacaggtccaggtctgccctagctttagaaggaggaccgaacaggaccccgggagcgctagcgcagacccccaggagcccgcaactggagcttggaaacctggcgacggggtcgaattctttgctcacatgcgcctgatgctgaagaaaggcgaaggtcggcagggcctgccgtgtctggaagcttgggggtccccttgtcgacagtcaccccaccccggcccgcacactcaggtcccgttgaggtccggttcgccagccccgcctgaacctgtggaccctagcctcgggctgcgggcacttgcacccgaggaggtggaaatgttgtatgaggaagcgctgtataccgtgctctatagggccggcacgatgggcccagatcaggttgatgacgaggaggccctcttaagctacttacaacaggtttttggaaccagcctggaagaacacaccgaggctatcgagcgagtgcggaaggctaaagccccaacttatgccctgaaggtcagcgtgatgagggccaagaacctcctggcaaaggatcccaatggattctcagatccctactgtatgctcggaattctgcccgcctccgatgccactcgtgagccccgcgctcagaaggaacaacgcttcggttttcggaaaggaagcaaacggggaggccctctaccagcaaagtgcatacaggtgacagaagttaagtcgtcaactctgaatcccgtttggaaggagcacttcctcttcgagatcgaagacgttagtacagaccaactgcatcttgacatttgggatcacgacgacgacgtgtcactcgtggaggcctgccggaaactgaacgaggtcatcggattgaagggtatgggacggtattttaagcagatcgtcaagagcgctagagccaacgggacagctggtcctactgaggaccacaccgacgactttctggggtgccttaacataccagtgagagaggtgccagtcgcaggcgtggaccgctggttcaagttggagccacggtcaagcgcgtcaagggtgcagggacattgccacctggtgttgaaactgatcaccactcagcgggacacagcaatgtcacagcgggggagatccggttttctttcacatttactcctgctgagccacctgttacgactcgaacatagtgcggaagagcccaacagttcaagttggcggggtgagctgtcgacaccggcagccaccatattatgcctacatggtgctcagtcaaacctatccccactacaattggctgtgctccactggcaggtatctagtagacatcatcagacttgcaccctggactactcgtacctcctgggcctgctcgaagacatgcaagctcattgggaggaggctcctagcttaccccaggagcaggaggagtccctcgctgattctctgtccgcgttctccgaattcggcctgcaactcctgagacagctccgggattacttccccgccactaatagtaccgcggtgcatcgactggaactgctccttaagtgtctgggtaaacttcagctgttccaaccctcctttgaaatttgcccgtttgaatccgagctcaacatggacatcgccgctgccctgaaacgcggtaatcgcgagtggtatgatagaattctgaacgacaagtccccaagagaacagcccggacctcagcggctgcctggtcttgtggtactcgcagacgccgtctacgacgatctacagttttgttattcagtttatgcaagtctcttccactcaatcctcaacgtcgacgtgtttacccttacatttaggcagctcgagcgcttagttgctgaagaggcatgggttctgacagaggaactttccccgaagatgacactcgaagtggcttccggcctcttcgaactctatctgaccttggcagatctacagaggttttgggactctatccccggccgggattcccggtccttggccttggccggaattcacgcccccttcttgccagctgtcaagctgtggttccaggttcttcgcgaccaggccaagtggcgtctccagggggccgttgacatggacaccctcgagcccgtggatgcttccagcaggcattcatcaagcgcagcaacagctggactgtgcttgtcccacatccaggagctgtgggtacgcctcgcctggcctgatcccgctcaggctcaaggattaggaacccagctcggccaagacgtgtgcgaggcaaccctattctataccgaactcctacggaagaaagtggatactcaaccaggcgctgccggcgaggccgtcagcgaggctctgtgcgtcgtgctcaacaacgtagagttagttagaaaggccgctggccaggcattaaagggattggcatggcccgagggtgccaccggccccgaaggtgtactgcctaggccactgctatcatgtacacaggccctggacgatgacctgcagagagaagctcacaccgtcactgcacacctgacttcaaagatggttggcgacattcgcaagtatgtccagcacatcagcctgagcccagacagcatacaaaatgatgaggccgttgctcccctcatgaagtatttggatgaaaagttggcactgctgaatgcctccttagtgaaaggaaacctgtcaagggtgctcgaggcgctatgggaactgctgctgcaggcaatcctccaggctttgggtgccaatagggacgtgtcagccgacttttatagccgtttccactttaccctcgaagccttggtgagcttcttccacgccgaggggcaaggcctgccactcgaatctctccgggacggctcctataaacgcctgaaggaagaattgcggcttcacaaatgttcaacccgggaatgcatcgagcagttttatctcgacaaattaaagcaacgaacactagaacagaaccgcttcgggcggctctcagtgagatgccactatgaggctgcggagcaaagattggccgtggaagtgctgcatgcggcagatctgcttcctctggatgccaacgggctctcagatccttttgtgattgtggagctgggacctccccatctctttccgctggtgagaagtcagcgcacacaggttaaaacaaggactctacatcccgtgtatgatgagctgttctacttttcagtgcccgccgaggcatgtcggagacgcgcagcgtgcgtgctttttactgtcatggaccatgactggctctccactaatgatttcgcgggcgaggccgcactcgggctcggcggtgtcacaggtgtcgcacggccccaagtcggcggtggagcacgcgctgggcagcctgtgacgctacatttatgcaggccacgggcccaggtgagaagcgcccttcgcagattggagggtcgaacatccaaagaagctcaggagttcgtgaaaaaacttaaggagctggagaaatgtatggaggccgacccttag

SEQ ID NO: 109374 - DNA, 3510 bp, synthetic construct
  misc_feature 1..3510: note = Description of Artificial Sequence: Synthetic coding sequence
  source 1..3510: mol_type = other DNA
atgtccactttactggacatcaagagcagcgtgctaaggcaggtccaggtatgcccttcattccgccgccggacagaacaagatccaggctcagccagtgcagacccccaggagccagcgacaggggcatggaagccaggggacggtgtggagtttttcgcccacatgcggctcatgctgaaaaaaggtgagggacggcagggactcccgtgtctggaagcttggggatccccctgcagacaaagcccccatccaggaccacacactcaagtccctctgcggtccgggtcacccgcgccacccgagcctgtggatccctcgctgggtctgcgggcactggcacccgaggaagtggaaatgttatacgaggaggctctctacacagtcttgtacagagcagggacaatgggaccagatcaggtggatgatgaggaggccctgctctcatacctccagcaggttttcgggacttcactcgaggaacatacggaggcgatcgaacgggtgaggaaggcaaaagcgccaacctacgctttaaaggtgtctgtgatgagggccaagaacctgctggccaaagatcccaatggcttcagcgacccttactgcatgttaggcattcttcccgcgtccgatgccactcgtgaacctcgtgcccagaaagagcagcgctttggcttcaggaaaggctcgaaaaggggaggcccactacccgctaagtgcattcaggtgacagaagtgaagagcagcactttgaaccctgtgtggaaagagcacttcttgtttgaaatcgaagacgtgtcgacagatcaactgcacctcgacatctgggaccacgatgacgacgtcagcctagtggaagcttgccgtaaactgaatgaagtgatcggtcttaaaggcatggggagatactttaaacaaattgtcaagtctgctcgggccaatggtaccgccggtccgactgaggaccacacagacgattttttagggtgtttaaatattcccgttagagaggtccccgttgccggggtcgaccggtggttcaagctggagccccggtcttccgcatctcgagtgcagggccactgtcacctggtgcttaaattgatcactacacagagagataccgcaatgagtcaacgcggaaggtccggatttctctcccacctcctgctcttaagccacctactgaggctggagcactcggccgaggagcccaattccagctcctggcgaggcgagctgagcacacccgcagccaccattctgtgtctgcatggcgcccaatctaacctgagtcctctgcagctcgccgtcctgcactggcaagtcagcagtcggcatcaccagacctgtacgctcgattactcctaccttttaggactgctggaagacatgcaagcgcactgggaagaagcaccgagccttccccaggaacaggaggagagtctggctgattccctgtcagccttctcagagttcggtttacagctgcttaggcagttgagggattacttcccagctacaaattccactgcagtacaccggctggagctgttactgaagtgtctggggaagctgcagctattccagccatcattcgagatctgccccttcgaatccgaactgaacatggatattgcggctgccctcaagagaggtaacagagagtggtacgatcggatcctcaacgacaagagtcccagggaacagccagggccgcaacgattaccggggctcgtggtgttggccgacgcggtgtacgacgacctacagttctgttacagcgtttacgcttctttgttccattccatcctcaacgtggacgtatttacgttgacattcagacagctggagcgcctcgtggctgaggaagcttgggtgcttactgaggagctgtcccctaaaatgacactggaggtcgccagcgggctttttgaactttatttgacgctcgcagacctgcagaggttctgggactccatcccaggaagggattcacgtagtcttgcgctcgccgggattcacgctcctttccttccggcagttaagctgtggttccaggttctgcgcgaccaggcaaagtggagactacagggcgcagtggacatggatacgctagagccagtcgatgcaagtagccgtcacagttctagtgcagccactgctgggttgtgcctgagccacatccaggagctgtgggtacgactggcctggcctgaccctgcgcaggcgcagggtttgggaactcaactgggtcaggacgtttgtgaggccaccctgttttatacggaactgcttagaaagaaggttgatactcagcctggagctgcaggcgaggcggtgtctgaggccctctgtgtggttctcaataacgtcgaactcgtgcggaaagcagcaggacaggccctaaaaggactggcctggccagaaggcgctaccggccctgaaggcgttttgcccagacccctcctcagctgtactcaggcgttagacgacgaccttcagcgggaggcacataccgttaccgctcacctgacaagcaagatggtgggtgacatcaggaagtatgtgcagcacataagcctgtctcccgactcgatacagaatgacgaggcagtggcaccattgatgaagtatctcgatgaaaaactagccttgctgaacgccagcctggtcaaggggaacctctcacgggtgctcgaagcactctgggaactgctattacaggcgatcctccaggctctgggtgccaatagggatgtctcggccgatttttatagccgctttcacttcacccttgaagccttggtatctttttttcacgctgaaggacagggacttcctctcgagtcactccgagacgggtcctataaacggctcaaggaggagctgcggctgcacaagtgcagcacgcgtgaatgtatcgaacaattttacctcgacaagctgaaacaacgcaccctggagcaaaatcgttttggccgcctttcggtaagatgccattacgaagccgccgagcagcgactggccgtcgaggttctgcatgccgccgatctgcttccactcgacgccaatgggctttccgacccatttgtgattgtcgagcttggtccccctcatcttttccctctggtgcgctctcaacggacgcaggtcaaaacccgtaccctacatcctgtgtatgatgagctgttctacttctccgttccagctgaggcttgccggcgccgggccgcctgcgttttgttcacagtaatggatcatgattggctctcaacaaatgatttcgctggagaagccgcattgggccttggcggtgtgaccggcgtcgcgcgcccacaagtgggcggcggggcccgcgcggggcaacccgtgactcttcacctgtgtcggccaagggctcaagtgaggagcgctctgcgacggttagagggtcgcaccagcaaagaagcccaggaattcgtcaaaaagctgaaggaattagagaaatgtatggaagctgacccctag

SEQ ID NO: 109375 - DNA, 3351 bp, synthetic construct
  misc_feature 1..3351: note = Description of Artificial Sequence: Synthetic coding sequence
  source 1..3351: mol_type = other DNA
atgtccacactgttggacattaagtcttccgttttaagacaggtgcaggtgtgcccaagcttccgcagaagaaccgagcaggaccccggctccgcaagtgcagacccacaggagcctgctaccggcgcttggaagcccggcgacggtgttgagttcttcgcccacatgaggctgatgctcaaaaagggggaggggcggcaggggttgccatgcctggaagtccctcttcggagcggcagcccagcaccaccggaacccgtcgacccttccctcggtctccgggctctggcccccgaggaggttgaaatgctctacgaagaagctttgtacactgtcttataccgtgccggcacaatgggccccgatcaggtcgatgatgaggaggccctgctgtcctacctccagcaagtctttggcacatcactcgaggaacatactgaggccatcgagcgtgttcgcaaggcaaaagcaccaacttatgctctgaaggtgagcgtgatgcgcgctaaaaacttgctggccaaggatcccaatggattctcagatccatactgtatgctcgggatcctcccagcgtccgatgctacgcgtgagccaagagcacaaaaagagcagaggttcggttttcgcaaggggtctaagcgcggaggccctcttcccgcaaagtgcatccaagtcacagaagtgaaatcaagcacgcttaacccggtgtggaaggaacacttcctcttcgagatcgaagatgtgtcgactgatcagctgcatctggacatctgggatcatgacgatgatgtttctttggtggaggcttgcagaaagctaaacgaggtgatcgggttgaagggcatggggcgctactttaaacagatcgtgaagagcgctagagcaaacggaaccgccggacctactgaggatcatacggatgacttcctcggatgcttgaacattcctgtccgccgcgacactgcaatgtcccaacgaggtcgctctggctttctttctcacctgctgctcctttcacatctccttcgcctcgaacactccgccgaagagcctaacagttcgtcctggcgcggagaactttcgacacctgccgccactatcttgtgtctgcatggagctcaatccaatttaagcccactccaactggccgtgctgcattggcaagtttcatcgaggcaccaccagacatgcacattggattacagctatctcttaggcctactggaggacatgcaagctcactgggaagaggcaccttctctcccccaggagcaggaggagtctcttgcagactccctcagtgcattctccgaattcggactgcaactgctcagacagctacgggattacttccctgccacaaacagcactgccgtgcaccgactcgagttgctcctgaagtgcctggggaagttgcaattgtttcagcccagtttcgagatttgtcctttcgagagtgaactgaatatggatatagccgctgcgttgaagcgcgggaatagggagtggtatgataggattctcaacgacaagagccccagagaacagcctgggccccagcggctgccaggcctagtcgtcctagctgatgctgtatacgacgatctccagttctgttacagcgtatacgcttcactgttccattcaatcttaaacgtggatgttttcaccctaacattcaggcaactggagagactcgtggcagaggaggcatgggtgttgactgaagagctctctccaaaaatgacactggaagtcgcatccggactgtttgagctttatctcactctggccgacctacagcggttttgggactctatccccggtcgggatagcagatccctagctctggccggtatccatgcccccttcctgcctgccgtaaaactgtggtttcaggtgctgagggaccaggctaaatggcgactgcaaggagccgttgatatggataccctggaacctgttgatgcatcatctcgacatagttctagcgccgcgaccgccggactgtgcttgtcccatattcaagaactctgggtgaggctcgcctggcccgaccccgctcaggcccaaggcctcggcacacagcttggccaggatgtttgcgaggcgacattgttttataccgagctgctgcggaagaaggtggacacccagccaggggccgccggagaggctgttagcgaagctctttgcgtggtgctcaataatgtcgaattggtgcgtaaggctgccggccaagccctgaaaggtttggcctggccagagggagcaactggtcctgagggggtcctgcctcgacctttgctctcgtgcactcaggcgttagacgacgacctgcagcgcgaggcacacactgtgaccgcccacctgaccagcaaaatggtgggagatattagaaagtatgtgcaacacatttccctttcgccggatagtattcagaatgacgaggccgttgccccattaatgaaatatctggatgagaaactcgcgctcctgaacgccagtctggtgaagggcaacctgtcacgggtcctggaggccctttgggagctgttgctgcaggccatattgcaggccttgggggccaaccgggatgtgagtgctgatttctactcacgttttcacttcacactcgaagccctcgtgagcttctttcatgctgaagggcagggtctccccttggagagcttacgggatggcagttacaaacgactgaaggaggaactgcggcttcacaaatgctccacaagggaatgtatagaacagttctatctggacaagttaaaacaaagaaccctcgagcagaacagattcgggaggctctctgtcaggtgccattacgaagccgccgagcaaagactggccgttgaggtcctgcacgcagcggatctcctccctcttgatgcaaacgggctctccgatccctttgtgatcgtggaattgggccctccccaccttttcccgctagtgcggtctcagagaacacaagtgaagacaagaaccctccaccccgtctatgacgaattattctacttcagcgtgcccgccgaggcttgtcgacggagagccgcgtgcgtgctattcactgtgatggaccatgactggctgtccacaaacgacttcgccggtgaggctgcactcggtctgggcggtgtgaccggggtggcccgtccccaggtagggggcggcgctcgcgcaggtcaacctgtcaccctccatttgtgtaggcctcgcgcccaagtacggtcagcgcttaggcgcctggaggggcgcacctctaaagaagcccaggagtttgtgaaaaagcttaaggagctggagaagtgtatggaagccgacccctag

SEQ ID NO: 109376 - DNA, 3459 bp, synthetic construct
  misc_feature 1..3459: note = Description of Artificial Sequence: Synthetic coding sequence
  source 1..3459: mol_type = other DNA
atgtctaccctgctggatattaaatcttccgtgcttagacaagtccaggtgtgtccctccttccgtcggcggacagaacaggatccagggtccgcgagtgctgaccctcaggaacctgcaacgggcgcctggaagcctggtgacggcgtggagttttttgcccacatgcggctgatgttaaagaaaggagaaggacggcaagggctcccttgtctcgaggtgccactgagatccgggtcccccgctcctcctgaacccgtggaccccagcctgggactccgtgcactagctcccgaggaggtagagatgctgtacgaggaagcactctatacggtgttgtatcgcgctggcacaatggggccagaccaggtggacgacgaagaggcgcttctatcatatctccagcaggtgtttggcaccagtttggaggagcacactgaagcaatagagagggtaagaaaagccaaggctcctacgtatgccctaaaggtgagtgtgatgagggccaaaaacctattagctaaggaccccaacggcttcagcgacccgtattgcatgctgggtatcctcccagcatccgatgccacaagggaaccacgcgcacagaaggaacagcggttcggcttccggaaagggagcaaaagagggggccctctcccagccaagtgcattcaggtaacggaagtcaagtcctctacactgaaccccgtctggaaggaacatttcctgttcgagatcgaagacgtaagtaccgaccaactgcacctcgacatctgggaccatgacgacgacgtttcacttgtcgaggcgtgccgaaagctgaatgaggtgattggtctaaagggcatgggtagatactttaagcagatcgtcaaatcagccagagctaatggaacggcaggtcctacagaggatcacaccgatgacttcctcgggtgcctgaatatacccgtgcgcgaggtgcctgtagctggggtggaccgctggttcaagctggaaccgcgctcatccgcatccagagtccagggacactgtcacctggtccttaaactgataactacccagcgagacacagccatgagccagcgcggccgtagcggcttcctgtcccatctcctcctcctgagtcatttacttaggctggagcatagcgctgaggagcctaacagcagtagttggcgaggcgaactgagtacacccgcagccactatcttatgccttcatggagcacaatccaacctgtcccctctgcagctagccgtgcttcattggcaggtaagcagtcgccaccaccagacctgcacccttgactacagttatttactgggtctcctggaagatatgcaagcacactgggaagaagcgccctctctgccacaggagcaagaagagtcactggccgatagcttatctgccttctctgaattcgggctgcagcttctgaggcagctcagagactactttccggctactaacagcacggcagtacatcggctggagctgctgctgaaatgcctcggcaaactgcagttgttccagccatcctttgaaatctgtccattcgaaagcgaactaaatatggatatcgctgcagctttaaagcgcggtaacagggagtggtacgatcggatacttaacgataaatcgccacgcgaacaaccaggcccccagcgcctgccgggcctggttgtccttgctgacgcagtatacgacgacctgcagttctgctatagcgtctacgccagcctttttcacagcatcctcaatgtggacgttttcaccctcacgttccgccaactggagcggttagtcgccgaggaggcttgggtgcttacggaggaattgagtccgaagatgactctagaggtggccagcgggctgtttgaactttatcttactctggccgacctacagaggttttgggactctatcccgggccgcgacagtagatcgctcgccctggcaggtatccacgcacctttcctgcccgccgtgaagctttggtttcaagtgctgcgggatcaggccaaatggcgcttacagggcgcagtcgatatggacacacttgagccagtggatgcctcctctcgacattccagtagcgcagctaccgccggcctgtgtttgagccacattcaggagctgtgggttagactcgcctggccagatcccgctcaggctcagggcctgggaacacagttgggccaggacgtctgcgaagcaacgttgttctacacggagttgctgcgaaagaaagttgacacgcagccaggagcagctggtgaggcagtgtcagaggccctctgcgtcgtgcttaataatgtcgagctggttcggaaggccgccgggcaggcgctgaagggcctggcatggcccgaaggcgccaccggccccgaaggagtgttgccacgcccactcctcagctgcacccaggccctcgacgacgacttacagcgggaagcacataccgtgactgcgcacttaacctccaaaatggttggagacatcaggaagtatgttcagcatatcagcttgagtccagactcaatccagaacgacgaggccgtggcgccactaatgaagtatctggatgagaagctcgcattgctgaatgcctccctagttaaaggtaatctttctcgggtattggaggccctgtgggagttactcctgcaggccatcctccaggctctgggcgccaatagagatgtgtccgcagacttttactccaggtttcacttcacgctagaggccctggtctcttttttccatgctgaagggcagggactgccgctcgaatccctgcgcgacgggtcatataagagacttaaggaggagcttaggctgcacaaatgcagtacccgggaatgtatcgaacaattctacctcgacaaactgaagcaaagaacgctcgagcaaaacagattcgggcgcctgagcgtgaggtgtcactacgaggcggccgagcagaggctggctgtggaggtccttcacgctgctgatctacttcctcttgatgcaaatggcctctcagatccttttgtgattgtggaactgggccctcctcacctcttccccctggtgcgcagccagcgcacacaggtgaagactaggaccctccatccggtatacgatgagctcttttacttctccgttccggcggaggcatgtagacgaagagccgcatgcgttctttttactgtcatggaccacgattggttgtccaccaatgatttcgccggtgaagccgcgttaggcctcggcggcgtgacaggcgtcgcacggccacaggtgggtggaggagctcgcgccggccagcccgtcacattgcacttgtgccggcctagggcccaagtccgctccgccctgcgacgcctggagggaaggacttcgaaagaagcccaggagtttgtcaagaagctgaaggaactggaaaagtgtatggaggcggacccatag

SEQ ID NO: 109377 - DNA, 537 bp, synthetic construct
  misc_feature 1..537: note = Description of Artificial Sequence: Synthetic coding sequence
  source 1..537: mol_type = other DNA
atgagtcagaggggacgatctggatttttgtcacacctgctcctgctaagccatcttctccgacttgagcactcagcagaggagcccaattcttccagctggaggggagaactgagcacacctgcagcaaccatactatgtctacacggggctcagagcaatctgtccccgcttcagctggctgtcctgcattggcaagtctcttcaagacaccatcagacgtgtacactagattacagctatctgttaggcctcctcgaagatatgcaggcacactgggaggaggcgcctagcctcccacaggagcaggaggagtccctggccgattctcttagcgccttcagcgaattcggcctacagcttttgcgtcaactgcgggattattttccggccacaaactcaactgccgtgcatagactcgagctgctgctgaagtgcctcggaaagctgcagctattccagccctccttcgaaatctgcccacgtgtaggcgccgagcacggacattgttgcggccccgaagagagacagccatag

SEQ ID NO: 109378 - DNA, 1782 bp, synthetic construct
  misc_feature 1..1782: note = Description of Artificial Sequence: Synthetic coding sequence
  source 1..1782: mol_type = other DNA
atggccgccgcatcgtcctccgactctgacgcctgtggggccgagtcgaatgaagctaacagcaaatggctggacgcgcattatgaccccatggcgaacattcacactttctccgcctgcctggccttggctgaccttcacggcgacggggagtacaagctggtggtcggagatctgggccctggtggccaacagccaaggctgaaggttctgaaggggcccctggtgatgaccgagtccccattgccggctcttccagctgccgccgcaacatttttaatggagcagcacgaaccccgcactcctgccctggctctggcatctggcccctgtgtctatgtttacaagaacttgagaccatactttaaattctccttgccacagctgccccccaaccccctggaacaggacctctggaaccaggcgaaggaggatcggattgatcctctcaccctgaaggaaatgctagagagcattcgggagactgccgaggaacctttgagtatccagtctctgcggtttctccaactagagctatcggaaatggaggcattcgttaatcaacacaagtccaactccattaagaggcagacagttatcactacgatgactaccctgaagaagaacctcgctgatgaagatgctgtgagctgcctggtgctcggaacagagaacaaagaactcctcgtgctcgatcccgaagcgttcacaatcctcgccaagatgtctctgccctctgtccccgtttttctggaagtgtcaggtcaattcgacgttgaattccgtctcgcagcagcttgcaggaacgggaacatctacatcctgcggcgcgacagcaagcacccgaagtactgcatcgaacttagtgcccagcccgtgggcctgatccgggttcacaaggttctcgtcgtggggagtactcaggactccctccacggtttcacccataagggaaagaagctgtggaccgttcaaatgcccgccgcaatccttacgatgaatctgctcgagcaacattccagggggcttcaagccgttatggccggcctcgccaacggagaagttcgaatttatagagacaaggccctcctcaacgtgatacatacccctgatgccgtgacatcactttgtttcgggcggtacggcagggaggataataccctgataatgacaacgcgcggaggcggtctgatcatcaagatcctgaagcggactgcggttttcgtggaggggggaagtgaggtagggccaccacctgcccaagcaatgaaactgaatgtccctaggaagaccagactatacgtagaccagacactgcgcgaaagggaggctggtacagccatgcatagagcattccagacagacctatatttgctgaggctgagagccgctagagcatatctgcaggcattggagtcgtcattgtctccattgtccaccacggccagggaacccttgaagttacacgcggtggtacaggggctgggtcccaccttcaaattgaccctgcatctccagaacacctccactacgaggccggttctaggactcctggtttgtttcctgtataacgaagccctgtactcgttacccagggcattttttaaggtgccgctgttggttcctggacttaactaccccctagaaacattcgtagagagcctcagcaacaaggggatctcggacattattaaagtgcttgttctaagagagggccaatctgctccgttgctcagtgctcacgttaacatgcctggctccgaaggcctggccgccgcttag

SEQ ID NO: 109379 - DNA, 498 bp, synthetic construct
  misc_feature 1..498: note = Description of Artificial Sequence: Synthetic coding sequence
  source 1..498: mol_type = other DNA
atgagccccggtcctcagctatggcatcttctccaggcactggtgagcatgtgtataaggatatccgatcccacctctagttccgcgtgccctaactgtctgcagatcctgtggaataagacatttggaacgagacctaaaagggaaacagccgaggaacccttatccatccagtcactgaggttcttgcagttggagttgagcgaaatggaagccttcgtgaaccaacacaaatccaatagtattaaacgccagacagtgatcaccactatgactacccttaagaaaaacttagcagatgaggacgcggtcagttgtcttgttctcggtactgagaacaaggaattactggtgctagatcctgaggccttcacaatcctcgctaaaatgtctctaccgtctgttccggtctttctggaggtcagcggccagtttgatgtggagtttcggcttgccgctgcatgtagaaatggtaacatctacatcttgcgtagatag

SEQ ID NO: 109380 - DNA, 2172 bp, synthetic construct
  misc_feature 1..2172: note = Description of Artificial Sequence: Synthetic coding sequence
  source 1..2172: mol_type = other DNA
atgttaagctcaatggcagcggccggttctgttaaggctgctctccaggtggccgaagtcctagaggccatagtatcctgctgtgtcggccccgaagggagacaggtgctgtgtaccaaacctaccggagaagtactgctctcccgcaacggagggcgcctcctggaggcattgcacctcgagcatcctattgctcgaatgattgtggattgcgtctctagtcacctgaaaaagaccggtgacggcgcaaagacattcatcatattcctgtgtcatctgttgcggggactgcatgccattacggatagagagaaggatccactcatgtgcgagaacattcagacccatggcaggcattggaagaattgcagtagatggaagtttatctcccaggcgctgttaacattccagactcagattttggatggcatcatggaccagtatctgagccggcattttctttcgatttttagttcagcaaaagagagaaccctgtgtcggtcctcactcgagttgctcctggaggcctatttttgtggacgagttggcagaaataatcataagtttatttctcaactgatgtgtgattacttcttcaaatgtatgacctgtaagtctggaatcggcgtctttgagctagtagatgaccacttcgtcgagctgaatgtgggggtcaccggcctccccgtatccgacagtcggattattgccggactcgttctgcagaaggatttctcggtttatcggcccgcagacggtgatatgcggatggtgatagttaccgagactattcaacccctattctctacaagtggctctgagttcatcctcaattctgaagcacaattccagacatcacagttctggatcatggagaaaaccaaagccatcatgaaacatctgcatagccaaaacgtgaagctgcttatatcttcggtcaagcagcccgacttagtgtcttattatgccggcgtgaatggcatttcagtggtggagtgcctctctagcgaggaagtctccttgatccgaagaattattggtctgtcccccttcgtgcccccacaggccttttcacaatgcgagatccctaacaccgccttggtcaagttttgtaaaccgctgattcttcgttctaagcgctacgtgcaccttggtttaatttcaacctgcgctttcatcccacactctatcgtcctgtgtggccccgtacatggtttgatcgaacaacacgaggacgccctgcacggcgcacttaagatgctgagacaattgttcaaggatctggacctgaactacatgacacagactaacgatcagaacggaacctcttcactgtttatttacaaaaattccggggaaagttaccaggctccagatcccggaaatgggtccatacaacggccctatcaagacaccgttgctgaaaataaggacgctttagagaaaacacagacctacctaaaagtccatagcaacctggtcatccctgatgttgagctcgagacatacatcccctactccacacccaccctgacccccacggataccttccagacagtggaaactcttacttgcctgagtttggagagaaatagacttactgactactacgaaccactactgaagaacaatagtaccgcatacagcacacgcggcaatagaattgaaatttcttacgagaacctgcaagttacgaatataacgcgaaaggggagcatgctgccagtatcttgcaagctcccaaatatgggcacatctcagtcctatttgagtagttctatgcctgcaggctgcgttctgccggtgggcgggaattttgagatcctcctgcactactatttgctcaattatgccaagaagtgtcaccagtctgaagagacaatggtgagcatgattattgccaatgctctgttgggaataccaaaagtgctgtacaagtctaaaactggcaagtatagctttccccatacatacatccgtgccgtacatgccttacagaccaatcagccactggtctcaagccagacgggactggaatcagtaatgggcaaataccagctgctgacctccgtgctccagtgtttgaccaagattctgacaatcgacatggtcattacagttaaacggcatccacagaaggtgcacaaccaggactcagaggatgagttgtag

SEQ ID NO: 109381 - DNA, 2133 bp, synthetic construct
  misc_feature 1..2133: note = Description of Artificial Sequence: Synthetic coding sequence
  source 1..2133: mol_type = other DNA
atggtgatggcatgtagggttgtgaacaagcggcgacacatgggactgcagcagctcagcagcttcgctgagaccggacgcacgtttttaggtccattgaagtcctcaaagtttatcatcgacgaagaatgtcacgaaagtgtactcatttcctccacagtgaggttattggagagcttagatctcacatcagccgtgggccaactgcttaatgaagccgtgcaagcccagaataacacctacagaacggggattagcaccctcttgttcctcgtcggcgcctggtcttcggccgtggaggagtgtcttcatttgggcgtcccaatcagcattatagttagcgtgatgagcgagggactgaacttttgtagcgaagaagtggtctcactacatgttcctgtgcacaatattttcgattgtatggattcaaccaaaactttttcgcagcttgagacattctccgtttctctgtgcccctttctgcaggtgccctcagatacggacctgatcgaggagcttcatggcctgaaagatgtggcgtcacagacactgactatttcaaacctttccggtaggcccttgaagagttacgagctgtttaagcctcagacaaaggtcgaggcggataataacacgtcccgaactctgaagaactctcttctggccgacacatgctgtcggcagagtatactgattcatagccggcatttcaaccgtaccgataacaccgagggagttagtaaacccgacggcttccaagaacacgtaacagccacacataaaacctacagatgcaatgatttggtagaactagctgtgggcttgagccacggggaccacagcagcatgaaactggtggaagaggctgtgcaactccaataccaaaacgcctgcgtacagcagggaaattgtactaagccattcatgtttgacatttcaaggattttcacctgctgcctgcctggactgccagagacctcttcctgtgtgtgtccaggctacatcaccgttgtcagtgtatccaacaatccagtaatcaaggagctacagaaccagccagtgcgcatcgtgctcatcgagggagacctgaccgagaactaccgacacctcggttttaacaaatctgccaacattaagactgttcttgattccatgcggttacaagaagactcaagcgaagagctgtgggccaaccatgtactgcaggtcctcatccagttcaaagtgaatcttgttctcgtgcaaggtaacgttagcgagaggctcatcgagaaatgtattaatagcaaaaggttggttataggcagtgttaatggctccgtgatgcaggccttcgccgaggctgcaggcgcagttcaagtggcgtatatcacacaggtgaacgaggactgcgtaggagatggggtctgcgtgaccttctggcggtcctcccctctggatgtcgtggatcggaataatcggatcgccatcctgctgaagacagaggggatcaacctcgtgaccgctgtgctgacgaatccagtgacagcgcagatgcagattaaggaagaccgcttttggacctgtgcgtatcgtctgtactatgcgctgaaggaggaaaaggtgtttttaggaggcggtgcggtggaatttctgtgcttaagttgtctgcacatattggcggagcagagcctgaagaaagagaaccatgcatgctccggctggctgcataacacaagctcttggctggccagctctttggcaatttataggccgaccgttctaaaatttctagccaacggctggcagaaatacctttctacactgctttacaacaccgctaactactcctccgaattcgaggcgtccacatacattcagcaccacctgcagaacgctaccgactccggttcacctagtagttatattttgaatgaatactccaagcttaactcccgaatctttaactcagatatctctaacaagctggagcagatcccgagagtgtacgatgttgtcacaccgaaaatagaggcctggcgtcgagccttggacctggtcttgctggtgctgcagactgattcagagattatcacaggtcatggccatactcagataaattcacaggaacttaccgggtttctgttcttatag

SEQ ID NO: 109382 - DNA, 576 bp, synthetic construct
  misc_feature 1..576: note = Description of Artificial Sequence: Synthetic coding sequence
  source 1..576: mol_type = other DNA
atggtgatggcctgccgggtggtcaataaacgccgccacatgggactgcagcagcttagtagcttcgcagagaccgggagaacgttcctcggtcccctgaaaagttctaaattcataatagacgaggagtgccacgagtcagtgcttatcagttccacagtcagactgctggagagcctggacctgacgtcagctgtggggcaacttttgaatgaggccgtgcaggcccaaaacaatacgtacagaaccggcattagtacgttgcttttcttggtaggagcctggtcaagcgccgtcgaagagtgcctgcatctcggggtgcctatctcgatcatagtgtcagttatgtccgaaggactgaatttctgctcagaagaggtggtgtcactgcacgttccggtccataacatctttgactgtatggattccaccaagaccttctcccagttggaaaccttctctgtctcgctgtgcccttttctgcaggttccttccgataccgatctgattgaggagctccacggcctgaaggatgtggcatcccagacacttaccataagtaacctgagcggctag

SEQ ID NO: 109383 - DNA, 2133 bp, synthetic construct
  misc_feature 1..2133: note = Description of Artificial Sequence: Synthetic coding sequence
  source 1..2133: mol_type = other DNA
atggttatggcctgcagggttgttaacaaacggagacacatgggcctgcaacaattaagttcctttgcagaaacaggacggactttcctgggtcctctaaagagttccaagtttatcatcgacgaggagtgccacgagtccgtccttatcagcagcacagtccggttgttggaatcccttgatctgacttccgctgtcgggcagctgttgaatgaggctgtgcaagcccagaacaatacctaccgcacggggatctctactctcctctttctggttggggcctggtcctccgcagtggaggagtgcttgcacctgggagttccaatcagtattattgtaagcgtgatgtcggagggcctgaacttctgttctgaagaggtcgtgagcctgcatgtcccggttcacaacatcttcgattgcatggattccacgaagacattttcacaactggagactttctccgtgtccctgtgtcctttcctgcaagtgcctagcgacactgacctcatcgaggagctgcacggactcaaagatgtggcttcacagacactgaccatctccaacctcagtgggcgaccactgaagtcatatgaactgttcaaaccacagactaaagttgaagcggacaataacactagcaggacattaaaaaattcactgctcgcggacacgtgctgccgacagagcatcctaatccatagccggcattttaataggaccgacaacaccgaaggggtctctaagcctgatggattccaggagcatgtcacggccacgcataagacttaccgctgcaacgatctggttgaactggctgtcggactcagtcacggtgatcattcttctatgaaactggtggaggaagcggtgcaactgcaatatcagaacgcatgtgtgcagcagggtaattgtaccaagcccttcatgttcgatattagcaggattttcacatgttgtcttcctggactgcccgagacttcttcgtgcgtttgccctggatatatcactgtcgtgtccgttagcaataaccctgtcatcaaggagctgcaaaatcagccggtgcgcatagtcttaattgagggggatctgacagagaactatcggcacctggggttcaacaaatccgccaatataaaaacggtcttggattccatgaggctgcaggaggatagctcagaagaactgtgggccaaccatgtgttacaggtacttattcaattcaaggtgaatctggtgctcgtgcaaggcaacgtgagcgagaggctgattgaaaaatgtataaactctaaacggctcgtgatcggatcagtgaatggatcagttatgcaggcgttcgctgaggccgcaggtgccgttcaagtggcatacataactcaggtgaacgaagattgcgttggcgacggcgtgtgtgtgaccttctggaggtcctccccgctcgatgtggttgatcgtaataatcgcattgctattctgttaaagaccgaaggcattaacctcgtaactgcagttcttacgaaccccgtgactgcccagatgcagataaaggaggaccggttctggacatgcgcttataggctgtactacgctctcaaggaggaaaaggtctttctggggggcggtgctgtcgaattcttatgcttatcctgtttacacatcttggcagagcagagtcttaaaaaagaaaatcatgcatgtagcggctggttgcacaacacaagttcttggctcgcatcctcactcgctatataccgacctaccgtcctaaagtttctcgcaaacgggtggcagaaatatctgagcacgctcctgtacaacactgccaactactcatcagaattcgaggcctctacatatatccaacaccacctgcagaacgcgacggatagcggaagcccatcaagctatatacttaacgaatactctaaactcaactcacgcatcttcaactccgacatctcaaacaagctggaacaaatccctagggtctacgacgtcgtaacaccaaaaattgaagcatggcgtagggccctggatttagtgctgctggtgcttcagactgacagcgaaatcatcacaggtcatggacacactcaaataaattctcaggaactgacagggttcctgtttctgtag

SEQ ID NO: 109384 - DNA, 2166 bp, synthetic construct
  misc_feature 1..2166: note = Description of Artificial Sequence: Synthetic coding sequence
  source 1..2166: mol_type = other DNA
atgctgctgcctgtgttcaccctgaagctccgccataagattagcccacgtatggtggccatcgggcgttacgatggaactcatccatgtttggcagccgccactcagacgggcaaggtgtttattcacaaccctcacactagaaaccagcacgtgtccgcctccagagtctttcaaagcccgttagaatctgacgtgtctctgctgagtatcaaccaggcagttagttgccttacggcaggcgtcctgaaccctgagctcgggtatgacgctctgctggttggaactcaaactaacctgctggcctacgatgtgtataataacagtgacctcttttaccgggaggtggcagatggcgccaatgccatagtgcttggaacactaggagacatctcaagccctctcgccatcatcggtggcaactgcgcactgcaaggtttcaaccatgaggggtcggacttattctggaccgtcacaggagacaatgtcaactcgcttgctctgtgtgattttgacggtgatggtaagaaagaattgctggtggggagtgaagacttcgatatcagggtgttcaaagaagacgagattgtggctgaaatgaccgagaccgagatcgtaacatcgctatgtcctatgtatggctctcgctttggctatgccctgtctaacggaacagtgggagtttacgataaaacctcccggtactggaggattaaatctaaaaatcatgcaatgtccatacatgcatttgacctgaactctgatggcgtcaatgagctgattacaggttggagcaacggtaaggtcgacgctcgtagcgaccgtacaggggaagtcatttttaaggataatttcagttctgccatagccggggtagtggaaggggactaccgaatggatggccatatccaactgatctgttgttcagtcgacggcgagatccgcgggtatctacccgggactgccgagatgcgggggaatctaatggataccagcgcggaacaggatttgatccgtgagctctcccagaaaaaacagaacttacttctggaactgcgcaattacgaggaaaacgccaaagccgagctggccagcccactgaatgaagcggacggacaccggggtatcattcccgctaacacccggctccacaccaccttaagcgtgagtctaggcaacgaaacacaaacagcgcacacagaactgcgcatcagtacaagcaacgatactattattcgcgctgtgcttatctttgctgagggcatcttcactggagaaagtcacgttgtccacccctccattcataatctgtcaagctccatatgtattccaatcgtgccacctaaggacgtccccgtggatctgcacctaaaagccttcgtcggctacaggtcctcaactcagtttcacgtctttgagtcaacgcgccagcttcctaggtttagcatgtatgccctgacctccctcgatccagcttccgaacctatctcctacgtcaacttcaccatagccgagagggcgcagcgcgttgtagtgtggctcggtcagaatttcctcctacccgaagatacccatatccagaacgccccatttcaggtctgttttacaagcttgaggaatgggggacacctgcatattaagatcaaactgagcggcgagattaccataaacacagatgatatcgacctcgctggtgacattatccaaagcatggcatcctttttcgccatcgaggacctacaggtggaggccgactttcctgtgtatttcgaggaactcagaaaggtcctggtgaaggtagacgagtatcatagtgtgcatcagaaactttctgccgatatggccgatcacagcaacttgatccggtccctcctggtaggggccgaggatgcacggctcatgagggacatgaagactatgaagtcgagatatatggaactctatgatcttaaccgggacctcttgaatgggtataaaattcggtgtaacaatcacacagagctgttggggaacctgaaggccgtgaatcaggctattcagagagctggtcgcctacgcgtgggcaagccaaagaaccaggttataactgcctgtcgggacgccatcagatctaacaatattaacactctgtttaagattatgcgtgttgggaccgccagctcctag

SEQ ID NO: 109385 - DNA, 1560 bp, synthetic construct
  misc_feature 1..1560: note = Description of Artificial Sequence: Synthetic coding sequence
  source 1..1560: mol_type = other DNA
atggccgaagagagggtagccaccaggacacagttcccggtcagcaccgagtcacagaaacccagacaaaaaaaggcacctgagtttccaatactcgagaaacagaattggctcatacacttgcactacattaggaaagattacgaagcgtgtaaagctgtcataaaggagcagctgcaggagactcaaggactgtgcgagtacgctatttatgtccaagctcttatcttccggctggaagggaacattcaggaatcgctggagctgtttcagacctgtgcagttctgtctccccagtctgcagacaacctgaagcaagtggctcggtctctgtttcttctcggcaagcataaagctgccattgaggtgtacaacgaagctgccaaacttaaccaaaaagattgggaaatatcgcataatctgggcgtctgttacatttatctcaaacagttcaataaggcgcaggaccagttacataatgccttgaacctgaatcgacacgaccttacgtatatcatgttgggcaagatacatctcctggaaggggaccttgataaggcaattgaggtttacaagaaagctgtcgagttttcaccagagaatacagagctcttgaccactttggggctcctctatttacaactgggaatctaccagaaagcctttgaacacctaggtaatgccctgacttacgacccaactaactataaagccattctggccgcaggctcaatgatgcaaacacacggggactttgacgtcgctctcactaagtatagagttgtggcctgtgctgtgccagagagtcctccattatggaacaacattggtatgtgtttcttcgggaagaaaaagtacgttgcagccatttcttgcctaaaacgtgcgaattacctggccccatttgactggaagatactgtacaatttagggctggtacatctcacaatgcagcagtatgcaagcgccttccattttcttagcgcagccattaacttccagcctaaaatgggggagctctacatgctactcgcagtggcgctgactaacctggaggacatagagaacgcgaaacgcgcctatgccgaagcagtccacttagacaagtgtaacccactggtaaacttaaattatgcagtgctgttgtacaaccagggagagaagaagaacgccttggcacaatatcaggagatggaaaagaaggtgtccctgctcaaagataattcctcactggaattcgacagcgaaatggtggaaatggcacagaagcttggcgccgcactgcaagtgggggaagccttagtgtggaccaaacccgttaaggatcctaagtctaaacatcagaccacctccacgtcaaagcccgcctcatttcaacagcccctcggatcaaaccaggctcttggccaagctatgtcttctgccgctgcctatagaactctgccttctggagccgggggtactagtcagtttaccaagccaccctcactcccactggagcctgaacctgccgtggaatcctctcccaccgagacatctgagcaaattagagagaaatag

SEQ ID NO: 109386 - DNA, 1584 bp, synthetic construct
  misc_feature 1..1584: note = Description of Artificial Sequence: Synthetic coding sequence
  source 1..1584: mol_type = other DNA
atggccctcactgtcgtccccagcttttccgtcagcggcgtttggaagcggacccaattcccggtgtcaacagagagccagaaacccagacagaaaaaggcccccgagttccctatcctggagaaacagaattggctaatccatctgcattatatacgcaaagactacgaggcctgcaaggccgtaatcaaagaacagctgcaggagacccagggcctgtgcgagtacgctatctacgtacaggccctgatttttcgactggaagggaacattcaggagagtctggagctatttcagacatgtgccgtgttgtccccccagtccgccgacaacctgaagcaagtcgccagaagcttatttctgctaggaaaacacaaggcagccattgaagtttacaatgaggcagccaaacttaaccagaaggattgggagatttcacacaacctgggcgtctgttacatttaccttaagcagttcaataaagcccaggatcagctacataatgcgctgaaccttaaccggcacgacttaacttacataatgctgggaaaaatccatctcctcgagggagatctggataaagctattgaggtgtacaaaaaagcggtagagttttctccagagaacactgaactcttgaccactctcggcttactctatttacaactgggtatctaccagaaggcctttgagcacctgggcaatgctctcacttacgatcccactaactataaggccatcttggccgcaggatcgatgatgcagacccacggcgattttgacgtcgccctgacgaaatatagggtggtcgcttgcgcggtgcccgagtcgccccccctgtggaacaatatcggcatgtgtttttttggcaaaaaaaagtatgtggctgctatcagttgcctgaaacgggcaaactacctagcacctttcgattggaagattctgtacaatctgggcctggtccacctgacaatgcaacagtatgcttccgcctttcacttcctctcagccgcaattaacttccagccgaagatgggtgaattgtacatgctcctggccgttgccctgactaatctggaggacatcgagaatgccaaacgggcatatgccgaggcagtgcacctcgataaatgcaaccctctcgtcaatctcaactatgccgtgttgttatacaaccaaggcgaaaagaagaatgccctggcacagtatcaggaaatggaaaagaaggtctctctcttgaaggataactcatcgctggagtttgattccgaaatggttgagatggcccagaaactaggcgcagccctgcaggtgggtgaagccttggtttggaccaagccagtaaaagacccaaagtctaagcatcagaccacatccacatcaaaacccgcatccttccagcagcccctgggtagtaaccaagccctcggccaagctatgagttccgccgctgcataccgcactcttccctccggagctggtggaacctcccagtttactaagcctccctccctgcccttggaaccagagccagctgtggagtcatcccctacggagacttctgagcagatccgggaaaaatag

SEQ ID NO: 109387 - DNA, 1524 bp, synthetic construct
  misc_feature 1..1524: note = Description of Artificial Sequence: Synthetic coding sequence
  source 1..1524: mol_type = other DNA
atgatttggaatactcggaatagtacttatatttttactgctcccgaatttccaattctagaaaaacagaattggctcatccatttgcactacatccgcaaagattacgaagcatgtaaggccgtaatcaaggaacagctgcaagagactcagggactgtgtgaatacgctatctacgtgcaagccctgatcttccgcttggagggaaacatccaggagagcctggagctgtttcaaacgtgcgccgtgttgagccctcagtcagccgacaatctgaagcaggtggctcggtctctgtttctcctggggaagcataaggctgccatcgaagtgtacaacgaggcagctaagctgaaccaaaaggactgggagattagccacaacctgggcgtgtgttatatttatctcaagcaatttaacaaggcgcaagatcagttgcacaatgcactgaacctgaaccgccacgacttgacctatatcatgctggggaaaatccacttactggagggtgatctggacaaggcaatcgaggtttataaaaaggctgttgagttttctcctgagaataccgaactgctgactaccctgggactgctctacctccaattgggaatctaccagaaagccttcgagcacctgggtaatgctctaacctatgacccaacaaactacaaagcaatccttgccgctggtagtatgatgcagacacacggagacttcgacgtcgccctcaccaaataccgcgtggtggcgtgcgcggttcccgaatccccccctctgtggaacaacatcggcatgtgttttttcgggaagaagaagtatgtggctgccatcagctgcttgaagcgcgccaattatctcgccccattcgattggaaaattttgtataatcttgggctggtccatttgacaatgcagcagtatgcatctgcctttcacttcctgtctgcagccatcaatttccagcccaagatgggagaattgtacatgctgttagctgtagccttaaccaatttggaggatattgagaatgccaaacgcgcttacgcggaagctgtgcatttagacaaatgcaatccgctagtaaacttgaactatgccgtgcttctgtacaatcagggagagaaaaagaatgcactcgctcagtaccaagagatggaaaaaaaagttagcctcctgaaagataatagcagcctggaatttgactctgagatggtggagatggctcagaagctcggtgcagccttgcaggtgggcgaagccctggtctggactaagcctgtcaaagaccctaaaagcaagcaccagaccaccagtacctctaagcctgcttcttttcagcaaccgctcggttcgaatcaggcattaggacaggccatgtccagcgctgccgcctataggaccctcccttctggggccggggggacaagccagtttacaaaacctccgtcccttccgttagaacctgaacctgccgtggagagctcccctaccgaaacatccgagcaaatacgagaaaagtag

SEQ ID NO: 109388 - DNA, 1044 bp, synthetic construct
  misc_feature 1..1044: note = Description of Artificial Sequence: Synthetic coding sequence
  source 1..1044: mol_type = other DNA
atgctgggaaagatccatctgctggaaggagacctggataaagccatcgaagtttacaagaaagctgtggagtttagccctgagaacacggaattgctgacaacactggggctgttatacctgcaactgggaatttatcagaaggccttcgaacacctgggcaacgcccttacatatgatcccacaaattacaaggccattttagccgctgggtctatgatgcagacacacggtgacttcgacgtggcgcttacaaaataccgagttgttgcgtgcgccgtgccagagtcgcctcctctgtggaacaatattggaatgtgtttcttcggaaagaaaaaatacgtggcagcaatttcatgtttaaaaagggcgaactatctcgctccctttgactggaagattttatacaatttaggcctggtccatctcacaatgcaacaatacgcgagcgcattccacttcctgtcagcggctatcaacttccagcctaaaatgggcgaattgtacatgctgctggctgtcgctctaaccaacttagaggatatcgagaatgccaaacgtgcgtacgcagaagctgtacatcttgataagtgcaatcctctagtgaatctcaattacgccgttctgctgtacaatcagggcgagaaaaaaaacgcactcgctcagtaccaggagatggagaagaaggtttctctcctaaaggataatagctctttagagtttgattccgaaatggtggagatggcgcagaagttgggagctgcactgcaagtgggagaggccttggtgtggacgaagcctgtgaaagaccccaagagtaaacaccaaacaaccagcacaagtaagcccgcatcttttcagcagcctctggggtctaaccaggccctgggacaggccatgtcctctgccgccgcttataggaccctgccgagcggtgccggagggacctctcagttcacaaaacctccatctttgcccctggagccagagcccgccgtcgagtcatcacctacagagacaagtgaacagatcagagaaaagtag

SEQ ID NO: 109389 - DNA, 1026 bp, synthetic construct
  misc_feature 1..1026: note = Description of Artificial Sequence: Synthetic coding sequence
  source 1..1026: mol_type = other DNA
atgtcagtgctggacgctctgtgggaggatagagacgtcagattcgatttaagcgcccagcagatgaaaactagacctggcgaagtgctgattgattgcctggactctatagaggataccaagggaaataacggcgatagggggcgactgctcgtgaccaacctgcgcatcctctggcactcactggcactgtcgcgcgttaacgtgtctgtgggctataactgcattcttaatatcacaacccggacggctaatagcaaactgagggggcagacagaggcactgtatatcttgaccaaatgtaatagcacaagatttgagtttatttttaccaacctggtgcctggttctccccgcttgtttacaagtgtgatggcagtacatcgggcctacgagacatctaaaatgtatcgtgattttaaactccgcagcgccctgattcagaacaagcagctgaggctgcttccacaggagcacgtatacgacaagataaatggggtatggaatctgtcgagcgatcaggggaacctggggacattttttatcacaaatgtgcgcatcgtctggcacgctaacatgaatgacagctttaatgtctctattccttatctccagatccggtccataaagatccgcgattcaaagtttggactggccctggtgatcgaatcaagtcaacagtcagggggttatgtccttgggtttaaaattgacccagttgagaaattgcaagagtccgtgaaagaaattaatagtctacacaaggtttattctgccagccccattttcggcgttgactatgagatggaagagaaaccccaacctctggaagcgttaacagtcgaacaaattcaagatgatgtcgagatcgattcagacggacatacggacgcttttgtggcctattttgccgacggtaacaagcagcaggatcgtgaaccggttttttcagaagagctcggattggcgatcgagaagctgaaggacggttttaccctgcagggactgtgggaagtcatgagttag

SEQ ID NO: 109390 - DNA, 963 bp, synthetic construct
  misc_feature 1..963: note = Description of Artificial Sequence: Synthetic coding sequence
  source 1..963: mol_type = other DNA
atgtcagtgctcgatgcactctgggaggatcgggatgtgcgctttgatctgtctgcccagcagatgaaaaccagacccggcgaagtgcttattgactgtcttgactctatagaagacaccaaaggtaacaacggagaccgagggcgtctgctggtaacgaatttgcgcatcctgtggcactctctggccctgtccagagttaacgtttccgtgggctataattgcatactgaacatcaccacacgcacggcaaactccaagctcagaggtcaaaccgaagctctatacatattgactaaatgcaacagcacacgattcgagtttattttcactaacctagttccaggttctccccgattatttacgtccgtcatggctgtgcaccgagcgtatgagacgtcgaaaatgtacagagatttcaaactaaggagtgctttaatacagaacaaacagctccggttgcttccccaagagcacgtgtatgataaaatcaacggtgtctggaatctctcttccgaccagggcaacctcggcacattcttcattaccaacgtgagaattgtctggcatgccaatatgaatgattcattcaatgtaagtatcccttaccttcaaattagcggcgggtatgttctgggtttcaagattgatccagtggagaaactgcaagagtcagttaaagaaatcaactcactccataaggtttacagtgcttcacccatctttggcgtcgactacgagatggaagagaagccgcaaccactggaagccttaacagtggaacagatccaggacgatgtggagatcgattccgatgggcacacggacgcattcgttgcctatttcgcagacggcaacaagcagcaggaccgcgagcccgtcttttcagaagagctcggattggcgatcgagaaactgaaggacggttttacactccagggactatgggaggtgatgtcttag

SEQ ID NO: 109391 - DNA, 1635 bp, synthetic construct
  misc_feature 1..1635: note = Description of Artificial Sequence: Synthetic coding sequence
  source 1..1635: mol_type = other DNA
atgagtgttcttgacgctctctgggaagatcgggacgtccgcttcgatctttcagctcagcagatgaagacacgtcccggcgaagttttaatcgattgtctggactctatagaggacactaagggaaacaacggcgacagagggcgtctcctcgtcacaaatctgaggatactgtggcattcgctcgccttgtcacgagttaatgtaagtgttggctataattgtatcttgaatatcacaacgcgaactgcaaattcaaaattacggggccagacagaggctttgtatatcctgaccaaatgcaactccactaggtttgagtttatctttacaaacctggtacccggctcacccaggttgtttacgtccgtgatggctgtgcatcgggcctacgaaacctcaaagatgtatcgggatttcaaactaagatcagccctaatccaaaacaagcagttgaggctactacctcaggaacacgtgtatgacaaaattaatggagtctggaacctctcttccgatcagggtaatttgggaacttttttcatcactaacgtcaggatagtgtggcacgcaaatatgaatgatagctttaatgtgtcaatcccatacctccagataaggtctataaagatcagagactccaagttcggattagctttggtcattgagtcatcacagcagagcggcggctacgtactcggttttaagatagaccccgttgagaaactgcaagagtctgtcaaagaaatcaactccttgcacaaagtttactcagccagccctatatttggggtcgactatgaaatggaggagaaaccacagcccctagaagcactcaccgtagagcagatacaggacgacgtcgaaatcgattctgacggtcataccgacgcttttgtagcctacttcgctgacggtaacaagttagatagcattgcttctgaatgggtgggactgcctccactgccatcagccagatgcctgttcgggttaggagaggtcgatgacaaaatttacgtcgtggctggcaaggatctgcagaccgaagcatcccttgattctgtgctctgttacgaccctgtggccgcaaagtggaacgaggtgaagaagctccctatcaaggtctacgggcacaacgtgatctcccacaaggggatgatctattgtctgggcggcaagactgacgacaaaaagtgcacgaacagagtctttattttcaaccccaagaagggcgattggaaggacttggctcccatgaaaattcctagatcaatgtttggagtggctgtacacaaagggaaaatcgtgattgctggtggggtgacggaggacggcctctccgctagtgtcgaggcctttgacctgaccactaacaagtgggatgtgatgaccgaattccctcaggagcgtagcagcattagtctggtctcgctcgccggaagcctgtatgccatcggaggcttcgcaatgatccaactcgaatcgaaagagtttgctcctactgaagtgaatgacatctggaagtatgaagatgataagaaggaatgggctggaatgctgaaggaaattaggtatgcttccggcgcatcttgtttagcaactcgactgaatttatttaaattgagcaagctgtag

SEQ ID NO: 109392 - DNA, 2148 bp, synthetic construct
  misc_feature 1..2148: note = Description of Artificial Sequence: Synthetic coding sequence
  source 1..2148: mol_type = other DNA
atggatttgattctcaataggatggattatcttcaggtgggagtgaccagtcagaagacgatgaagctcattcccgctagccggcatcgagcgacccagaaagttgtgatcggtgaccacgacggcgtcgtaatgtgcttcggcatgaaaaagggcgaggctgcggccgtgttcaaaacacttcctggaccaaagatcgcccggctagaactgggtggggttattaacacaccccaagagaaaattttcattgccgctgccagcgagatacggggtttcaccaaaagaggtaaacagtttctgtcattcgaaacaaacctgactgagagcattaaagctatgcacatttctggaagtgacctgtttctgagtgcctcctacatatacaatcactattgtgactgtaaagatcaacattattatctgtctggggacaaaatcaacgacgtgatatgcttgccagtcgaacgactctccaggatcacccccgtactagcctgccaggacagggtattgcgtgtccttcagggcagcgacgtcatgtacgccgtagaggttcctggccctccgaccgtgctggcactgcacaacgggaacggtggagatagtggcgaggacctgctgttcggaaccagtgacgggaagttagccctgatccaaataactacaagcaagcctgttagaaaatgggaaatacaaaacgagaagaagcggggcgggatcctgtgcattgatagtttcgatatcgtgggtgatggagtcaaagacctcctggtaggacgggacgacggcatggttgaggtttactccttcgacaacgctaatgagccagtgctgaggtttgaccagatgttaagcgagtcagttacaagcattcagggcggttgcgtaggaaaggatagctacgatgagatcgtggtgtccacgtattctggttgggttacgggcctcaccaccgaacctattcataaggaaagcggcccaggcgaggagttaaagatcaaccaggaaatgcagaacaaaattagtagtctccggaacgagctggagcacctccaatataaggttctccaggagagggaaaactaccaacagagcagtcagagctcgaaggccaaaagtgccgtaccctcctttggcatcaatgacaagtttacccttaacaaggacgatgcttcttatagtctcattctggaggttcagaccgccatcgacaacgtgctaatccaatctgatgtccccattgatctgctcgacgttgacaagaattccgcggtggtctcattcagcagctgtgactccgagagcaatgacaatttccttttagcgacctaccggtgtcaagctgacactacaagactggaactcaagatcagatctattgaaggccagtacggaaccctgcaggcttacgtgacccccagaatacagccaaaaacctgtcaggtgcggcaatatcacattaaaccccttagcctgcaccagcgcacccattttatcgatcatgaccgcccaatgaatacactgacccttaccggacagttctcctttgccgaagttcactcgtgggtggtcttttgccttcctgaggtgccagagaagcccccggccggcgagtgcgtcaccttttacttccagaacacctttctcgatacacaactcgagagcacttatcgaaaaggtgaaggcgtgttcaagtcagacaacatcagcactatcagtatacttaaggatgtacttagtaaagaagcaaccaagaggaaaatcaacctgaatatctcctacgagatcaatgaggtaagcgtaaagcataccctcaaactgatccaccccaaactggagtaccaactgttgctggccaaaaaagtccaacttatcgatgccctcaaggagctccaaatccacgagggcaatactaacttcctgattcccgagtaccattgtatcctggaggaagcagaccatttgcaagaggaatataaaaaacagccagcgcatctcgagcgcctgtatggcatgatcacggacctgttcatcgataagttcaaatttaagggcaccaacgttaagactaaggtgcctttgctgctagaaattttggatagttacgatcagaacgctttgatcagctttttcgacgctgcctag

SEQ ID NO: 109393 - DNA, 2019 bp, synthetic construct
  misc_feature 1..2019: note = Description of Artificial Sequence: Synthetic coding sequence
  source 1..2019: mol_type = other DNA
atggatctgatcctgaataggatggattatctacaggtaggcgtgacctcccagaagactatgaagcttattcctgcgagccgacacagagcgactcaaaaggtggtgattggagatcatgacggtgttgttatgtgcttcggaatgaagaagggcgaggccgcggccgtttttaagaccttgccaggccctaagatcgcaaggctggaattaggcggagtaattaacactcctcaggagaagatcttcattgcggcagcttcggagatcagggggttcactaaacggggcaagcaattcctttcctttgaaactaatctgaccgagagtattaaggctatgcacatctctggatcagatctcttcctgtccgcctcctacatctataatcactactgcgactgtaaggaccagcattattacctgtccggcgacaagattaacgatgtaatctgcctgcccgtggaaagactgtccagaattacccccgtcctggcatgtcaggatagggtgctgcgggtgctgcagggcagcgatgtgatgtacgctgtggaagttccgggccctcccaccgtgttagcactgcacaatgggaacggaggcgattcaggagaggacctgctgttcgggacaagcgatggaaagctagctttgatccagatcacaacttccaagcctgtcaggaagtgggagatccagaatgaaaagaagcgcggtgggattctgtgcattgactcctttgacattgttggagacggcgtcaaggacttactcgtcgggagagatgacggcatggtggaagtctactccttcgacaatgccaatgagccagtgctccgcttcgaccaaatgctctctgagtcagttacttcaatccagggtgggtgcgtgggcaaggatagctacgacgagatcgtcgtgtctacctattccggctgggtgaccggcttgacaaccgaacctatccacaaggaaagtggtccaggagaggaacttaagattaaccaagagatgcaaaataagatctcctcattgcggaatgagctggagcatctgcagtataaggtgcttcaggaaagggagaactatcagcaatccagtcaatcatccaaagccaagagcgcagtcccgagctttgggatcaacgataagtttaccctcaacaaggatgacgcctcctattctctgatactcgaggtacagacggcgattgataatgttctgatccagtccgacgttccaatcgacttgctggatgtggataaaaactcggccgtggtctcattttcaagttgtgactctgaatctaatgataatttcttgctggccacatacagatgccaagcagacactacaagactggagctaaaaattagatctattgaaggccagtatggaaccctccaggcctacgtgactccccggatccaacccaagacttgccaggttcgacagtaccacatcaagcctttaagcttgcatcagaggacccactttatcgaccacgatcggccgatgaacactctgacattaaccggccagttctcattcgcggaagttcactcttgggtcgtgttctgtctgccagaggttcctgagaaacccccagcgggtgaatgcgtgacattttacttccagaatacctttttagacacacagttggagagcacttaccgaaaaggggaaggcgtctttaagtctgacaacatcagcaccatatctattctgaaagacgtcttgtctaaggaagccacaaagcgcaaaatcaatctgaatattagttatgaaataaatgaagtttctgtgaaacacaccttaaaactgatccacccaaaactggagtatcaacttctgctcgccaagaaggttcaactgatcgacgcactcaaagagcttcagattcacgagggaaataccaattttctgatcccagagtaccactgcatcttggaagaggcagaccatcttcaggaagaatataaaaagcagcctgcgcatttagagcgtctttacggatag

SEQ ID NO: 109394 - DNA, 417 bp, synthetic construct
  misc_feature 1..417: note = Description of Artificial Sequence: Synthetic coding sequence
  source 1..417: mol_type = other DNA
gacgtgctgtcaaaggaggccacaaaaaggaagattaacctgaacatctcctacgaaatcaatgaggtctcagtcaagcacaccttgaagctcattcatccaaagcttgaataccaactgctgctggccaagaaggtacagttgatcgacgctctcaaggaactgcagatccacgaaggcaacactaatttcctgattcccgagtaccattgtattctggaggaggctgatcatttgcaagaagaatacaagaagcagcctgcccatcttgagaggctctacggcatgatcactgatctctttatcgacaagtttaagtttaaggggactaacgtgaaaacaaaagtgcctctgctgctcgagatcctcgattcctatgatcagaatgcactgatatccttcttcgatgcagcttag

SEQ ID NO: 109395 - DNA, 2664 bp, synthetic construct
  misc_feature 1..2664: note = Description of Artificial Sequence: Synthetic coding sequence
  source 1..2664: mol_type = other DNA
atgagtctatttaaggccagggactggtggagcaccattctgggggataaggaggaatttgaccaggggtgtttgtgtttggcaaacgtcgacaactccgggaacggccaggacaaaatcattgtcggatccttcatggggtaccttcgcattttctctccccacccagccaagactggagacggtgctcaggcggaagacttactgctagaagttgacctgagagatcccgtgcttcaggtagaagttgggaaattcgtctcaggaacggagatgctgcacctcgccgttttgcattcgcgaaaactgtgcgtttactcagtgtcgggaactctcggtaatgtcgaacatggcaatcagtgtcaaatgaagctaatgtacgaacacaaccttcagcgaactgcttgcaacatgacctatgggagcttcggtggagtcaagggaagggatctaatctgcattcagtccatggatggaatgctcatggtgttcgaacaggaaagctatgctttcgggcggtttttgcctggcttcctgttgcctggaccgctcgcctatagctcccgtactgatagcttcctcacagtgagcagttgccaacaggtggagagctacaagtatcaagtgctagcgttcgctactgacgctgacaagaggcaggagaccgaacagcagaagcttggatccgggaagcggctggtcgtggactggactcttaacattggcgaacaggccctcgatatttgcatcgtcagtttcaatcagtcagccagtagtgtatttgttctgggggagcgaaacttcttttgcctgaaggacaatggccagatccgattcatgaagaaattggactggtccccctcgtgtttcttaccctactgctctgtgagcgagggcaccatcaatacgctcataggtaatcataataacatgcttcacatataccaggatgtcacactaaaatgggcaacgcagctaccacatattccagtggctgtccgcgtaggctgcttgcatgacctgaagggcgttatcgtcactttgtcggacgatggccatctccaatgcagctacctaggcacagatccatctctattccaggctcctaacgtgcaatcacgagaactcaactacgacgaactggacgttgaaatgaaggagctgcaaaagattatcaaggacgtgaacaaatctcagggcgtctggcccatgacggagcgggaggacgaccttaatgtgtccgtggtcgtctctccaaacttcgacagcgtgtcacaggctaccgatgtggaggtgggaacagatcttgtcccatccgttacagtgaaagtcacactacagaatagggtaatccttcagaaagccaaactgtcagtatatgtgcagcctcccctagaactgacatgcgaccaatttacttttgagttcatgaccccagatctgacccggacagtttctttcagcgtttacctcaagaggtcatacactccaagcgagctcgaaggcaacgctgtggtgtcctatagccggcctactgatcgcaacccagacggcatcccccgagtgatacagtgtaaatttcggctccccctgaagctgatatgtctccccggtcagccatccaagacggcatcacataagatcactatcgacacaaacaagtccccagtcagtctcctttctctttttcctgggtttgcaagccaatccgatgacgatcaagttaatgttatgggtttccatttcttgggcggggcccgcataaccgtattagcgtccaagacttcacaaaggtatcgtatccaatccgagcaattcgaggatctgtggctcatcacaaatgagctgatactaagactccaggagtacttcgagaagcagggcgttaaggacttcgcttgctcctttagcgggagtatccctctgcaggagtattttgagctgattgaccatcattttgaattgcggatcaatggagaaaagctggaggagctgttgagcgaaagagctgtgcagttcagggccatacagaggagattgctggcccgcttcaaggataagactccggcacctttgcagcacctggacacccttctagatggaacctataaacaggtcattgcccttgccgatgctgtagaggagaatcagggcaatctttttcagagtttcacgagattgaaatctgcaacccacctcgtgattttgcttattgctctatggcagaaattatcagctgatcaagtcgccatcctggaggcagcctttctgccgctccaggaggatacccaagagctgggctgggaggagaccgtggacgcggccatcagtcacctgcttaagacctgtctgagcaaaagcagtaaagaacaggccctaaacctgaattcacaactgaacatccccaaagacaccagtcagctcaagaagcatatcaccctgttatgcgaccgcctcagcaagggaggtagactgtgcctgtccaccgacgctgctgcccctcaaacaatggttatgccgggtgggtgcacaactatcccggagagcgatctggaggagaggtcagtggagcaggattccacggaattgtttaccaatcataggcacctgactgccgaaactcctcggcccgaagtcagcccactccaaggcgtgtccgaatag

SEQ ID NO: 109396 - DNA, 2544 bp, synthetic construct
  misc_feature 1..2544: note = Description of Artificial Sequence: Synthetic coding sequence
  source 1..2544: mol_type = other DNA
atgtccttattcaaggcccgcgattggtggtcaacaattctcggcgataaagaagaattcgatcaaggctgcctttgcctggccaatgttgataacagcggaaacggacaggacaaaattatcgtcgggtccttcatgggctatctgcggattttctccccgcacccagccaagaccggcgatggagcccaggctgaggatctgctgctcgaggtagatttgcgcgaccctgtgctgcaggtagaggtcggcaagtttgtgagcggaaccgagatgcttcacctagcggtgctgcactctcgcaagctgtgcgtgtactccgtgtcaggaactctggggaatgtcgaacatggtaatcaatgtcagatgaaattaatgtatgaacacaatctgcagagaaccgcttgcaacatgacatacgggtcctttggaggtgtcaagggaagggatctgatctgcatccagagtatggacggtatgttaatggtcttcgagcaggaaagctatgcatttgggcgcttcctccccggtttcctgctgcctggcccattggcatactcatcccggaccgactcgtttctcacagtgagcagttgccagcaggtcgagtcctacaagtatcaggtgttagcattcgctacagacgctgacaaaaggcaggagaccgagcaacagaaactgggctcaggaaaacggctggtagtggactggaccctgaatattggggagcaggcattagatatctgcatagtgtcattcaaccagtccgccagctcggtgttcgtgctcggggagcgtaattttttctgtctcaaagataacgggcagatccgcttcatgaaaaaactggactggtctcccagctgttttttgccttactgcagtgtgtcagaggggacaatcaacacgttgataggtaatcacaacaatatgctgcacatctatcaggacgtcaccttgaagtgggcaacacagctcccacacatccccgtggccgtcagggtcggctgtttacacgatctgaaaggcgttatcgtcacccttagcgacgatggtcatctgcagtgctcatacctggggactgacccatctctgttccaagcacctaatgttcagtcccgggagctgaattacgatgaactcgacgttgagatgaaggagcttcagaaaataattaaagacgtcaacaagtctcagggcgtgtggccgatgacagaaagagaggacgacctcaacgtgagcgtggtggtctccccaaactttgattccgtttcccaagctacagatgtggaggtcggaaccgacttggtgccatcggtcactgttaaagtcactctgcagaacagagtaatcctgcagaaagccaagctctcagtgtatgtacagcctcccttagaactaacctgtgaccaatttactttcgagttcatgtctattccacgcgttatccagtgtaagtttcgtctccccctgaagttgatttgcctcccaggacagccatccaagaccgccagtcacaaaatcacgatcgacaccaataagagtcccgtcagcctcctctcactgttcccaggtttcgcgagccaatcagacgacgatcaggtcaacgtgatgggcttccatttcctgggtggggctaggatcaccgtgctggcctccaagacgtcccaaagatatcggattcagtccgaacagtttgaggacttatggctgatcaccaacgagctgatcctcagactccaggagtatttcgaaaagcaaggggttaaggactttgcctgcagtttcagcgggagcattccgctgcaagaatactttgaactgattgaccaccacttcgagctgcgcattaacggcgaaaagcttgaagaactcctttctgagagagctgtccagtttagggcgatccagagacgcctgctcgctcgcttcaaggacaaaactcctgcaccgctccagcaccttgacactctgttagacggtacttataagcaagtgatcgccctggcagacgctgtcgaggagaaccaaggcaacttgttccagtccttcaccaggttgaaaagtgccacccacctcgtgattctgcttatcgcactctggcaaaagctgagcgctgaccaagtggctattctcgaagctgctttcctgccactgcaggaggacacacaggagctcggatgggaggagaccgtggatgctgccatcagccatctgctgaagacctgtttgtctaaatcctctaaggagcaggccctcaacctgaatagccagctgaatatccccaaagacaccagccaacttaaaaaacacattacattgctgtgcgatcgcttgtccaaaggtggccgactatgtctttccaccgacgcagccgctccacagactatggttatgcccggaggatgtacaactattcctgaatctgacttggaagaacgctctgtcgagcaggacagtactgagcttttcactaaccaccggcacttaacagccgagactccccgaccagaggttagccccctacagggggtgagtgagtag

SEQ ID NO: 109397 - DNA, 2559 bp, synthetic construct
  misc_feature 1..2559: note = Description of Artificial Sequence: Synthetic coding sequence
  source 1..2559: mol_type = other DNA
atgagcctgttcaaggccagggattggtggtccaccatcctcggcgacaaggaagaattcgaccaaggctgcctttgcctggccaacgtagacaacagcggaaacgggcaggataagattatagttggctcgttcatgggttacctccgcatcttcagtcctcaccctgcaaaaaccggtgatggggcgcaagcggaagatctccttttggaagtggaccttagagatcccgtgttacaggtcgaagtgggcaaatttgtaagcggaactgaaatgttgcacctggcggttctgcattcacggaagctgtgcgtctactctgtttccggtactctcggaaatgtcgaacacggaaaccagtgtcaaatgaaattgatgtacgaacacaacttgcaacgtacagcatgtaatatgacctacggttcctttgggggcgtcaaagggcgcgatctgatctgtattcagtctatggatggcatgcttatggttttcgaacaagagtcatatgcctttggccgattcctgccagggtttttgctgccaggcccccttgcctactcctcacggacagattcatttttgacagtctcaagctgccagcaagtcgagtcatataagtaccaagtcctcgctttcgccaccgacgctgataagagacaagagactgaacagcagaaactggggagtgggaagcgcttggtggttgactggactttaaatatcggagagcaagcgctggacatttgcatagtgtctttcaatcagtccgcgtcctctgtcttcgttctgggagagaggaactttttctgcctcaaggacaacggacagatccgattcatgaagaaactggattggtcaccatcatgtttcctcccatattgttctgtttcggagggcacaataaatacccttataggcaaccataacaatatgcttcatatataccaggatgtgactcttaagtgggctactcaattgccacacataccggtggctgtgagggtgggatgcttacacgacttgaagggcgtcatcgtaacgctttcagacgacgggcacctccagtgttcttacctcggaacagatccatctctgtttcaggccccaaacgtgcagtccagagagctgaactacgacgagctggatgttgaaatgaaggaactgcagaaaatcatcaaagacgtcaataaatctcaaggcgtctggccaatgactgaacgagaggacgatctgaacgtgtccgttgtggtcagcccaaatttcgattccgtatcccaagcaacagatgtcgaagtgggtacagacctagtgcctagtgtcactgttaaagtgacccttcaaaatagagtgatcctccagaaggccaaactttctgtgtatgtccaaccaccactggagctgacctgcgaccaatttacgttcgaatttatgtccttgaatgtcctgggtattccacgtgtgatccagtgcaaatttcggttacccctcaaacttatttgtctgcctggccagccctccaaaacagcctcacataaaattacaatcgataccaacaagtcccccgtcagcctcctgtccctttttcccgggtttgcaagccagtctgacgacgatcaggtgaatgtgatgggattccattttctcggaggcgcccggatcacagtgttagcttccaagacaagtcaacgatatcgaattcagtccgagcagtttgaagatctgtggctcataacaaacgagttgatactaaggctccaggagtactttgagaagcagggagtgaaggatttcgcttgtagcttctccggtagcattcctctgcaggagtactttgaactgatcgatcaccatttcgagcttagaataaacggggagaaacttgaggaattgctttccgagagagcggtccaattccgcgctatacagaggagactcttggccagatttaaggataagacccccgccccactccagcatctggataccctgctggatgggacatacaagcaggtgattgctcttgcagacgctgtggaagaaaaccagggaaaccttttccagtccttcactcgactgaagtccgcaacacatttggtgatcctgttgatcgccctctggcagaagctgtcagccgatcaagtggcaatattagaagcagcttttctgcccctgcaggaggacacccaggagctcggatgggaggaaaccgtggacgcagccatctcccatctgctgaaaacatgcctcagcaagagttcaaaggaacaggcacttaacctgaactcccaattaaacatcccaaaagacacttctcaactcaaaaaacacattactttactatgcgaccgtctcagcaaaggcgggcgcctgtgtctctccaccgatgcggccgccccgcagacgatggtcatgcctggaggatgcaccacaatcccagagagcgatctggaggagcggagtgttgaacaggacagcaccgagctgtttactaatcaccgtcacctgaccgccgagaccccccgcccggaggtgagccccttacaaggggtgtccgaatag

SEQ ID NO: 109398 - DNA, 2649 bp, synthetic construct
  misc_feature 1..2649: note = Description of Artificial Sequence: Synthetic coding sequence
  source 1..2649: mol_type = other DNA
atgagtttatttaaggcacgggattggtggagcacgattttgggcgacaaagaggagtttgatcagggctgtctgtgtcttgcaaatgtggacaattcaggaaatggccaagacaagatcatcgtgggctcctttatgggctacttacgaatattctccccacaccctgcgaagaccggtgacggggctcaggcggaggacctgcttctcgaggtcgatttacgtgaccctgtgctccaagtcgaggtgggaaagtttgtttccggtacggagatgctgcaccttgctgtgttacacagccgcaagctgtgcgtctatagtgttagcggcactctcggtaatgtggagcacggcaatcagtgccagatgaaactgatgtatgaacacaacctgcagagaaccgcctgcaacatgacttatggttcattcggcggagtgaagggcagggatttaatctgtatccagtcaatggacggtatgctgatggttttcgaacaggagtcatacgcctttggccgctttctacccggcttcttgcttccggggcctcttgcatattcctcaagaaccgattccttcctgacggtttcttcctgtcagcaggttgagagttacaagtatcaggtgctcgcctttgctactgatgcagataaaaggcaggaaaccgagcagcagaagttaggtagtggcaaacggctggttgtagactggacactgaatattggggagcaagctcttgacatttgcattgtgtcttttaatcagagtgcgtcctccgtgttcgtgctaggagaacggaatttcttttgcctgaaagataacggacaaattcgattcatgaagaaactggattggtccccaagctgttttctcccttactgctccgtaagtgagggtacgataaataccctgattggcaaccacaacaatatgctgcacatatatcaggacgtgactcttaagtgggccacacagctgccgcatatcccggttgcagtccgagttggatgcctgcatgatctgaagggagtgattgtcaccctgagcgatgacggccacttacaatgttcatacctgggaactgacccaagcctttttcaggccccgaacgtccaaagcagggagctgaactatgatgagctggacgtagagatgaaggaactgcagaagataatcaaagatgttaataaatcacagggcgtctggcctatgactgagcgagaggatgaccttaatgtgagcgtcgtcgtgtcgccaaacttcgatagcgtctcacaggctaccgacgttgaagtgggtaccgacctggtgccaagcgtaacagtaaaagtgacccttcaaaacagagtaattttacagaaggcaaagttgagtgtttatgtgcagccaccactcgagcttacctgcgaccagttcaccttcgaattcatgactccagatctgacacgaaccgtctccttctctgtttatttaaagcgatcttatacgccgtcagaactcgaaggcaatgccgtagtcagctattccagacccactggtattcccagagtgattcagtgcaagttccgactgccccttaagttgatctgcctcccaggacagccctccaagaccgcctcccacaagattaccatcgacacaaataaatccccggtgtctttgctatccctgtttcctggttttgctagccaaagtgatgatgaccaagtgaacgtcatgggattccatttccttggcggagccaggataaccgtcctggccagcaagacttcacagcgctatcgcatccaatccgagcagttcgaggacctgtggctgattaccaacgaattgatactaaggcttcaagagtactttgaaaaacagggcgtcaaagatttcgcttgcagtttttcgggcagcatcccactgcaggagtatttcgagttaatcgatcaccactttgagctcagaatcaacggcgaaaaactcgaggaactcctgtcagagcgagcagttcagtttcgcgcgatccaacgtcggctgttagcgaggttcaaggacaagacccccgcgcccttacagcaccttgatactctcctggatggcacctataagcaagttattgccctggccgatgcagttgaggagaaccaggggaatctcttccaatccttcactagactgaaatcggccacgcatctggtgattctcttgatcgctctctggcagaagctgagcgctgaccaggtagcgatactcgaggcagccttcctgcccctgcaagaggacacacaggagttgggatgggaagagaccgttgacgctgctattagtcacctactgaagacgtgcctttcaaaatccagcaaggagcaagctttaaatctcaattcccagctcaacatacctaaagacacgagtcagctgaaaaaacacatcaccttactgtgtgataggctttccaagggcggaaggctctgcttgtctaccgatgcggccgctccccaaacaatggtgatgccaggcggttgcactaccattcctgagtctgatcttgaggagcggtcagtggaacaggatagcactgaacttttcacgaatcatcggcacctgaccgccgagactcctcgtcctgaggtgtcacccctgcagggagtctcagagtag

SEQ ID NO: 109399 - DNA, 1446 bp, synthetic construct
  misc_feature 1..1446: note = Description of Artificial Sequence: Synthetic coding sequence
  source 1..1446: mol_type = other DNA
atgagcctgtttaaggcacgcgactggtggtccactatactgggagataaagaggagtttgatcagggctgcctttgtctggctaatgtggacaactccggcaacgggcaggacaaaattatagtgggatcattcatgggctacctgagaattttttccccccaccccgcgaagaccggcgatggagcacaggccgaggacctcctgttggaggtagacctccgcgaccccgttcttcaggtcgaggtcgggaagtttgtgtctggcacagagatgttacaccttgccgtgctccactctcggaagctctgcgtgtattcagtgtccggcacactgggaaatgtggaacacggcaatcagtgccagatgaaacttatgtacgagcacaatttgcagaggactgcctgtaatatgacttacggatctttcggaggcgtcaagggccgcgatcttatttgtattcaatctatggacgggatgctcatggtgtttgagcaggagtcttacgcattcggaaggtttctccccggcttccttcttcctggccctttggcctattcctccagaaccgattcttttctgacagtctccagttgtcagcaagttgagagctacaaataccaggtcctggcgtttgcaactgacgctgacaaaaggcaggagaccgagcagcagaagttggggtctgggaagcgactggtggtggactggacgctgaatataggggaacaggctctagacatctgcatcgtttcttttaaccagagcgccagctctgtctttgtgctcggcgaacgtaatttcttttgcctgaaggataacggacaaataagattcatgaaaaagcttgattggagcccctcctgcttcctgccctattgtagtgtcagcgagggcaccatcaatacgcttattggtaatcacaacaatatgcttcacatataccaagacgtcactctaaaatgggctacccaactgccgcatatcccagttgctgttcgcgtaggatgcctgcacgatcttaaaggggtgatagtaactctgtccgatgatggacatctccagtgttcctatctaggcaccgatcctagccttttccaagcacccaatgtgcagtcccgagagttaaactatgacgaactagatgtcgaaatgaaagagctgcagaaaattatcaaggacgtgaacaagtcgcagggggtgtggccgatgacggagagggaagatgatctaaatgtgagtgtggtcgtgagcccaaattttgattctgtgagtcaagcaacggacgttgaagtcggcaccgacctggttcctagcgtgacagtgaaggtcaccctccagaacagagtaatcctgcagaaggcgaagttaagcgtttacgtgcagcccccgctggaacttacctgcgatcagtttacgttcgagttcatgaactttccgtcatag

SEQ ID NO: 109400 - DNA, 2559 bp, synthetic construct
  misc_feature 1..2559: note = Description of Artificial Sequence: Synthetic coding sequence
  source 1..2559: mol_type = other DNA
atgagtctttttaaggcccgtgattggtggtccaccatcctcggcgacaaagaagagttcgatcaaggttgtttatgtctggccaatgttgacaatagtggtaacggccaagacaaaattatcgtcggatcattcatgggttatctccgcattttctccccgcatcccgctaaaactggggatggcgctcaagccgaagacctgttactggaggtggacctccgggaccccgtcctgcaagttgaagtgggcaaatttgtcagcggaactgaaatgctgcacctagctgttctgcactctcggaagctgtgcgtctattccgtcagtggcacgctggggaacgtggaacacggcaaccagtgccagatgaaacttatgtatgaacacaaccttcagaggactgcttgtaatatgacgtatggatccttcgggggggttaagggccgagacctgatatgtattcagtccatggacggaatgctgatggtgttcgagcaggagagctacgccttcggccgcttcctgcccgggttcctgctgcccggccccctcgcttattctagccgcacagactcattcctgaccgtttcgtcttgccagcaggtcgagagctacaagtaccaggtgcttgcctttgctactgacgcagataagaggcaggaaactgagcagcagaagctgggcagcggaaaaaggctggtggtcgattggaccctaaacataggcgagcaggctctcgatatctgcatcgtctccttcaatcaaagcgcaagttctgtgtttgtactaggtgagagaaactttttttgcctgaaggataacggccagattagatttatgaagaagctggactggtctccctcatgctttctgccatactgcagcgtctcagagggtaccattaatacgctaattggcaaccataacaacatgttacacatctaccaggacgttaccctgaaatgggctactcagctgcctcatatccctgtagcagtgagagtgggctgtctgcatgacttgaagggagtgatcgttacgctgagcgacgatgggcaccttcagtgcagttatttgggcacagatccctctctgttccaggcaccaaacgtacagagccgtgagctgaattacgatgagctggacgttgaaatgaaagagctacagaagattattaaggatgtaaataaatctcagggggtatggcccatgacagagagggaggacgacctgaatgtgagtgttgtggtgagcccgaacttcgactcagtgagccaggctacggatgttgaagtcggaaccgaccttgtaccgtctgtgaccgtgaaagtcacacttcagaatcgagtgatcctccagaaggcgaagttgagcgtgtacgtccagccccctcttgaactcacttgcgatcagtttacgttcgagttcatgaaccgcaatcccgacgggatcccaagagtgatacagtgcaagttcaggcttcccctcaaactgatctgccttcccgggcagccctctaagacagcttcccacaagataaccatagacaccaataagagcccagtgtccctgttgtctttgtttccgggcttcgcaagccagtccgacgatgatcaggttaatgtaatgggtttccacttcctaggaggtgccaggatcacggtgcttgcctcaaagacctctcaaaggtatagaattcaaagcgagcaatttgaagacctttggctgatcacgaatgaattgatcttacggctgcaggagtacttcgagaagcagggggtgaaggatttcgcctgttccttcagtggaagtatacctctgcaggagtatttcgagttgatcgatcatcactttgaacttcggatcaacggagagaaactggaggaactgctgtctgagcgggcagttcaattcagggccatacagcgtagactcctggctcgcttcaaggacaaaacacctgccccacttcagcatttggataccctgttggatggtacgtataagcaggtcattgctctcgctgacgcagtggaagaaaatcagggcaacttgtttcagtcttttacacgtctgaaatcagcaacccatcttgtcatcttacttatcgctctgtggcagaagttatctgccgatcaggttgccattctcgaagccgcctttttacccctgcaggaagacacacaggagctcgggtgggaagagacagttgacgcagcaatatcacacctgctgaagacttgtctgtccaagagctcaaaagaacaggcccttaatctaaactctcagctcaacataccaaaagatacgagccagctgaagaaacatattacgcttctgtgcgacaggctcagcaaaggagggagactgtgcctctctaccgacgcagcagcccctcaaactatggtgatgcctggaggctgcactacgattcccgaatccgatttagaagagaggagcgtggaacaggactcaactgagctgttcacgaatcatcgacatctcacagccgaaactccccggcccgaggtgagcccactgcagggggtgagcgagtag

SEQ ID NO: 109401 - DNA, 2664 bp, synthetic construct
  misc_feature 1..2664: note = Description of Artificial Sequence: Synthetic coding sequence
  source 1..2664: mol_type = other DNA
atgtctctgttcaaagctagggattggtggtccaccatcctgggcgacaaggaggaatttgaccagggatgcctgtgcctcgccaatgttgacaacagcggaaacggacaggacaagattatcgtcggctcttttatggggtacttgcgcatcttctccccccacccagctaagactggggacggggcccaggctgaagacctgcttctcgaagtcgacctccgggaccccgtgctgcaggtcgaagtgggcaaattcgtaagtggcacagaaatgctgcatttggcggtccttcattctagaaaactgtgcgtgtatagcgtgtcagggacgttagggaacgtggagcatggaaaccagtgtcagatgaagctcatgtacgagcacaatcttcagcggacagcttgcaatatgacctatggcagcttcgggggtgtgaagggacgagacctaatctgtatccagtccatggacggtatgctgatggtgtttgaacaggagagctacgctttcggacgttttctgccaggttttctgctgccaggccccttggcctactcaagcaggactgattccttcctaacagtctcatcatgtcagcaggtcgaaagctataaataccaagtgcttgcttttgccactgatgctgataaaagacaagaaacagagcaacagaagctggggtccggcaagcgtcttgtggtggactggacactcaacatcggcgagcaggccctcgatatttgcatcgtcagtttcaatcagtcagccagctctgttttcgtgttaggcgaacggaattttttttgcctgaaggataatggccagatcaggtttatgaaaaagttagattggtccccttcttgcttcctgccttactgctctgtttctgaaggcactattaacacgctgatcggcaatcataacaatatgctgcacatctaccaggatgtgaccctcaagtgggcaactcagctcccacatatccctgttgcggttcgtgtgggatgcttgcacgacctaaagggcgtgattgttacacttagcgatgacggccaccttcagtgctcctatctgggaacagacccatcattatttcaagcgcctaatgtacagtctcgcgagttaaactacgatgagttggacgtcgagatgaaggaattgcagaaaatcatcaaggatgtgaacaagtcacaaggcgtctggcccatgacagagcgggaggacgatttaaatgtgagtgtggtggtgtcgcctaacttcgacagcgtgtctcaggcgaccgatgtggaggtggggaccgacttggtcccgagcgttacggttaaagtgacccttcagaaccgagtgatcctccaaaaagctaaactgtcagtgtatgtccagcctccgctggagcttacatgcgatcaatttaccttcgaattcatgacacctgatctaacaaggaccgtctcctttagcgtataccttaaacggagctatactccatcggagctggaagggaacgccgtggtgtcctacagcagacccactgttcagaatagtttagggatcccaagagtgattcagtgcaagttcagactgccccttaagctgatttgcctgccaggacagccttccaagaccgcatcccacaaaattacaatcgatacaaataaatcacctgtttccttactgagtttgtttcctggcttcgcctcacagtctgatgacgaccaggtgaatgtcatgggatttcactttctaggcggtgcacgcatcaccgtattagcgtcaaaaaccagtcagaggtacagaatacagagcgaacaattcgaagacttgtggcttattacaaatgagctgatcctcagacttcaggagtactttgaaaagcagggcgtgaaggatttcgcttgctcattcagtggtagcatcccgctccaagagtacttcgagctaattgaccaccatttcgagctgaggataaacggtgagaaactggaagaactactgtccgaaagagcagtccagtttcgggcgattcagaggcgcctactcgctcgctttaaagacaagactccagctccactgcaacacctcgacacactcttagatgggacgtacaaacaggtcatagctttggccgatgcagtagaggagaatcagggcaacctgttccagtctttcacacggttgaagtccgccacgcacctggtaatcttgctaatcgctttatggcagaagctgtccgccgaccaggtggcaattctcgaagcagcctttctgccactacaggaggatacgcaggagctcggatgggaagagacagtggacgctgccatttctcatctcttgaagacttgcctgtctaagtcttcaaaggagcaggccctcaacctgaacagccagctcaacattcctaaggacacttcacaactgaaaaaacatataaccctgctgtgcgacagactgtccaaaggagggaggctgtgcctcagcacagacgccgcagcaccacagaccatggtgatgccaggcggttgtaccactatacccgagtccgacctggaggaacgcagtgtggaacaagattccacagaactttttacaaaccataggcaccttacggctgagaccccaagaccagaagtgtcccccctacagggggtgtccgagtag

SEQ ID NO: 109402 - DNA, 933 bp, synthetic construct
  misc_feature 1..933: note = Description of Artificial Sequence: Synthetic coding sequence
  source 1..933: mol_type = other DNA
atgggctatttacggattttctctccacaccccgcgaagaccggtgatggagcccaggcagaagaccttctcctggaagttgatctgcgggaccccgtgctgcaggttgaagtcggaaagtttgtcagcggaactgagatgctgcatctcgccgttctgcacagtcgcaagctgtgtgtgtactcagtctctggcacactgggcaacgtggagcatggaaaccagtgtcaaatgaagcttatgtacgagcacaatctgcagcgcaccgcgtgcaacatgacttacggaagcttcgggggagtgaagggacgagatctcatctgtatccagagcatggacgggatgctgatggtatttgagcaggaaagctacgcatttggacgttttctgcccggcttcctactgcctggcccactggcatattcaagccgtaccgacagttttctgactgtatcatcttgtcaacaggtggaatcatacaagtaccaggtcctcgcgttcgcaactgatgccgacaagagacaggagaccgagcagcagaagttgggatccgggaagcgcttggtagtggactggacacttaatattggtgaacaggctttagatatatgtatagtgtctttcaatcaatccgccagtagtgtgttcgtgctcggagaaaggaacttcttctgtctgaaagacaatggacagatccgcttcatgaaaaaactggactggtcaccttcctgcttccttccgtactgctccgtgagcgaaggcactatcaatacactcatcggcaatcacaacaacatgctacacatctatcaggacgtaaccctgaagtgggcgacccaactgccccatatacctgttgccgtgcgcgtgggctgcctgcagttttctctctggaagcatctgttgccccggagctccaccttagagaagtag

SEQ ID NO: 109403 - DNA, 294 bp, synthetic construct
  misc_feature 1..294: note = Description of Artificial Sequence: Synthetic coding sequence
  source 1..294: mol_type = other DNA
atgtcactgtttaaggctcgcgattggtggtccacgatcctgggggacaaagaagaattcgaccagggatgtctttgtcttgcgaacgtggacaacagtggaaatggccaggacaagattattgtcgggagctttatgggctacctgaggatcttctccccgcaccccgctaagactggtgatggagcccaggcagaggacctgctgttggaggtggaccttagagatcctgtactgcaggtggaggtgggcaaattcgtgagcggcaccgaaatgctgcacctggccgtgtag

SEQ ID NO: 109404 - DNA, 1365 bp, synthetic construct
  misc_feature 1..1365: note = Description of Artificial Sequence: Synthetic coding sequence
  source 1..1365: mol_type = other DNA
taggatctcgttccttccgttaccgttaaagtgaccctgcagaaccgcgtaattctgcagaaagctaaattaagcgtttacgtgcagccaccactggagctaacctgtgaccagttcactttcgaattcatgactccggatcttactagaaccgtttctttctcagtctaccttaagcggtcatacacacccagtgagcttgaaggaaatgctgtggtctcctattctcgacctactgatcgcaaccctgatggtatcccacgcgttattcaatgtaaatttcggcttccactcaagcttatctgcctcccggggcaaccatccaagacagcgtcacacaagatcaccatcgataccaataaatctcccgtgtccctgctgtcactgtttcctggcttcgcgtctcagtccgacgatgatcaggtaaacgtgatgggctttcactttctgggaggcgcaagaataactgtactggcctcgaaaacctcccagcggtatcgcatacaaagtgaacagttcgaagacctctggctcatcaccaatgagctgatcctcagactgcaggagtacttcgagaagcagggagtgaaggatttcgcatgctcttttagcggaagtatccccttacaagagtactttgagcttattgaccatcatttcgaacttcgaatcaacggggagaagctcgaggaactgctgtcggaacgggccgtgcagtttcgggccattcagcggcgcctgctggctcgctttaaggacaaaacgcccgccccgctgcaacacttagatactctgctggatggcacttataagcaggtgatagccctggctgatgccgtggaagagaatcagggaaatctgttccagtcttttactcgtttaaagtccgcaactcatctggttatattactgatcgctttgtggcagaaactctccgcagatcaagtcgcgattctggaggcggctttcctgccgctccaggaagacacgcaagaattgggatgggaggagacagtggatgccgctatttcccacctactgaagacatgcctaagcaaatcgagcaaagagcaggcattgaatctgaattcacagctcaacatccccaaggatacctctcagctcaaaaagcatatcactttgctctgcgaccgtttgtcaaaggggggtagattgtgtctgtccacggatgcagccgcccctcaaactatggtaatgccaggtggttgtactacaatacccgagtcagatttggaagaacgctctgttgaacaggactctactgagctcttcaccaatcatagacaccttaccgctgagacaccgcgccctggaaagaggcttgatggtctccacaaaagatag

SEQ ID NO: 109405 - DNA, 1227 bp, synthetic construct
  misc_feature 1..1227: note = Description of Artificial Sequence: Synthetic coding sequence
  source 1..1227: mol_type = other DNA
atgaagttaatgtacgaacacaatctccagcgcactgcctgcaatatgacctacgggagctttggcggggtgaaaggacgagatcttatctgtatccagagcatggacggtatgctgatggtctttgagcaagaatcttacgccttcggccggtttttgcccgggttcctcctgccgggccccctggcatatagttcaagaacggacagctttttaacagtatcaagctgtcagcaggtggagtcctataagtaccaggttttggcattcgccaccgacgctgacaagcgtcaggaaacagaacagcagaagctcggctccggcaagagactggtggtggactggaccctcaatatcggcgagcaggctctggatatttgtatcgtgagcttcaaccagtccgcctctagcgtgttcgttctgggagagcgcaactttttctgcctgaaggacaacggccagattaggtttatgaaaaagctcgattggagcccttcctgcttcctgccttactgttctgtgtctgagggtacaatcaatacactaattggcaatcataacaatatgttgcacatttatcaggatgttacattaaaatgggccactcaactgcctcacatccccgtggccgtgcgggttggttgtcttcatgatttgaagggcgtgatcgtgacgttatccgacgacggtcatcttcaatgctcttatttgggaacagacccctctctattccaagcccctaatgtacagtcgcgagagttgaactacgatgaattggatgtggaaatgaaagagcttcagaaaataatcaaggatgtcaataaatcacagggcgtctggccaatgaccgagcgtgaggacgacctgaacgtatcagtcgttgtcagccccaacttcgacagtgtgtctcaggcaactgacgtggaggtaggcaccgacctggtgccgtctgtgacggtcaaagtgactctccagaatcgcgtaattctgcagaaggcaaaactcagtgtgtatgtccaaccccctttggagctgacttgtgaccagtttacctttgagtttatgacgcctgatctgactcgtactgtctcgttctcagtgtatcttaaacgtagcattcaccaccaaaactggaaagagatgctattgttcctgatccctgatcaacagattgagattctgatggcattccgcgagcttagcaatgtgaatctggattttccgtag

SEQ ID NO: 109406 - DNA, 984 bp, synthetic construct
  misc_feature 1..984: note = Description of Artificial Sequence: Synthetic coding sequence
  source 1..984: mol_type = other DNA
atggagggctcaaatgggttcggcatagattcaatactctcacaccgcgctggaagccctgctttgcctaagggcgaccccctgcttggggactgccgctctccgctggaattgagtccacgcagtgagagcagctccgattgcagttcccccgctagtcccggacgcgactgtctggagactggcaccccccggcccggcggagcgagtggacccggccttgatagtcatctgcagcctggccagctgtccgcccccgctcagtcccgtacagtcacatcaagcttcctcatcagggacattttagctgactgcaagcctctggcggcatgcgccccatactccagctcgggtcagcccgccgctccggagccaggcgggcggctggccgctaaagcggccgaggactttcgggataaattggataaatctggctcaaatgccagtagcgactcagagtataaggtcaaagaggagggggatcgcgagataagcagctccagggacagcccccctgtacgtctgaagaagcctcgcaaggcacggacagcttttacagatcatcagctggctcagcttgaaagaagttttgagcgccaaaagtatttgagtgtgcaggacaggatggaactagcggcgtcactgaacctgactgatacccaggttaagacctggtaccagaacagaaggacaaaatggaaaagacagaccgcggtcggtttggagcttttagcagaagccggcaactacagcgctctacaacgaatgttcccaagcccttatttctatccccagagcctggtgtcaaacttagaccccggggcagctctgtacctgtatcgggggcccagcgcaccccccccagcacttcagcggcctctggtgccacgcattctaattcatggattacagggagcatctgagccacctccccccctgccacccctcgccggggttttacctcgcgccgctcagccaaggtag

SEQ ID NO: 109407 - DNA, 984 bp, synthetic construct
  misc_feature 1..984: note = Description of Artificial Sequence: Synthetic coding sequence
  source 1..984: mol_type = other DNA
atggagggaagtaacggtttcgggattgattcgatactgagtcatcgcgccggcagtcccgctcttccaaagggagatcccttgctgggggactgtaggtcccctctcgaactgtccccccgttcggaaagctcctcagactgttcttctcccgcgtcccctggcagagattgtctggagaccggcaccccgcgacccgggggcgcctctgggcccggactggattcccatctccaacctggccaacttagtgctccagcgcagtcaagaacggtgacctcatcatttctgatccgtgatattttagccgattgtaagcctctggccgcctgtgccccatatagtagttccggccaacccgccgctcctgagcccggcggccgcttggctgcaaaggcagcagaggacttccgggacaagttagacaagtcagggtctaacgcttcatcagactctgagtacaaagttaaggaagaaggtgatagggaaattagcagtagtagggattcccctccagtgcgtctcaaaaagcctaggaaggcccgaactgcttttacagatcaccagctcgcgcaactggagagatcttttgaacggcaaaaatatttgtccgtgcaggaccgtatggagcttgcggctagtttaaacctgacggacactcaggtaaagacctggtaccagaaccgcaggaccaagtggaagcggcagaccgccgtgggattggaactcctcgctgaggcgggtaactactctgccctccagagaatgtttccttccccttatttttacccccagtctcttgtgtcaaatttggaccccggagctgccctgtatctgtatcgcggcccatcggcaccaccaccggccctacagcggcctcttgtgccacggatcctgattcacggccttcaaggagcctccgagccgcctcccccactgcccccgttagccggagtgctccctagagccgctcagccgcggtag

SEQ ID NO: 109408 - DNA, 270 bp, synthetic construct
  misc_feature 1..270: note = Description of Artificial Sequence: Synthetic coding sequence
  source 1..270: mol_type = other DNA
atgactaccagccagaagcaccgagatttcgtggccgaacccatgggcgaaaagcctgtcggatctcttgccggcatcggagaagtgttggggaagaagctggaagagagaggcttcgacaaagcttatgtcgtgctgggccaatttctcgtcctgaaaaaggacgaggacctgtttcgagagtggctgaaggacacctgtggcgccaatgccaagcaatctcgggactgtttcgggtgtctgcgcgaatggtgtgacgcgttcctatag

SEQ ID NO: 109409 - DNA, 270 bp, synthetic construct
  misc_feature 1..270: note = Description of Artificial Sequence: Synthetic coding sequence
  source 1..270: mol_type = other DNA
atgaccaccagtcagaaacatagagacttcgttgcagagcctatgggcgagaagcctgttggcagccttgctggcatcggcgaggtgctcggaaagaaactagaggaaagaggattcgataaggcgtacgtggttctgggccagttcctggttctgaaaaaggacgaggatctgtttagggaatggttgaaggatacctgtggtgccaacgccaaacagtcgagggattgctttggctgtttgcgggagtggtgcgacgcttttctctag

SEQ ID NO: 109410 - DNA, 270 bp, synthetic construct
  misc_feature 1..270: note = Description of Artificial Sequence: Synthetic coding sequence
  source 1..270: mol_type = other DNA
atgacaactagccaaaagcacagagacttcgtcgccgagcccatgggtgaaaagcccgtgggtagcctggccggtataggagaggttctcggaaaaaaattagaagaaagaggattcgacaaggcctacgttgtgctgggacaattccttgttctgaaaaaggacgaggacttattcagagagtggctcaaagatacatgtggagcaaacgctaagcagagcagggactgttttggttgtttacgggagtggtgtgacgcttttctttag

SEQ ID NO: 109411 - DNA, 87 bp, synthetic construct
  misc_feature 1..87: note = Description of Artificial Sequence: Synthetic coding sequence
  source 1..87: mol_type = other DNA
atgaccactagtcagaagcaccgcgacttcgtggccgagcctatgggtgaaaaacccgtaggctctttagccggtatcggagaatag

SEQ ID NO: 109412 - DNA, 270 bp, synthetic construct
  misc_feature 1..270: note = Description of Artificial Sequence: Synthetic coding sequence
  source 1..270: mol_type = other DNA
atgactacatcgcagaagcatcgcgacttcgtggccgagccaatgggtgagaaaccagtcggctctttagccgggattggcgaagtgttgggaaagaagttggaagagcgcggctttgacaaggcttatgtggtgcttggacaattcctggtgctcaaaaaggacgaagacctctttagagaatggctgaaggatacttgtggggcaaacgccaagcagagtcgcgactgttttgggtgcctgcgcgaatggtgtgacgcattcctgtag

SEQ ID NO: 109413 - DNA, 963 bp, synthetic construct
  misc_feature 1..963: note = Description of Artificial Sequence: Synthetic coding sequence
  source 1..963: mol_type = other DNA
atggcggacgagaagactttccgaattggttttattgttctgggtctctttctgctggccctaggcacctttctcatgagccatgataggccacaagtctatggaacgttctatgccatgggtagcgtcatggtgatcggagggatcatttggtctatgtgtcagtgctatcccaagattacatttgtccctgcagatagtgatttccagggcatcctgagtccaaaagccatgggactgttggaaaacgggctcgccgcagagatgaagagcccttcaccccaacccccttacgtgagactgtgggaggaggccgcctatgatcagagtctgcctgatttcagtcacatccagatgaaagtgatgagctatagtgaggaccatcggagcctccttgcacctgaaatgggtcagcccaaacttggcacttcggatgggggcgagggcggacccggagacgtgcaggcctggatggaagcggctgtcgtcattcacaagggaagcgacgagtcagagggagagagaaggctgacacagagttggcctggccccctagcgtgccctcagggacccgccccattggcttcttttcaggacgaccttgacatggattcttcagagggaagtagccccaacgcttcaccccacgacagagaggaagcttgctccccgcagcaggagccacaggggtgccggtgtccactggatcggttccaagactttgctctcatagacgcgccgaccctggaagatgagccgcaggagggccagcaatgggaaatcgctctacccaacaactggcagcgttacccccgcaccaaagtcgaagagaaggaggcctcagataccgggggagaggagcctgagaaagaggaagaggacctgtactatggcctcccggatggcgctggcgacttgctgccagataaggagcttggttttgagcctgatacccagggctag

SEQ ID NO: 109414 - DNA, 765 bp, synthetic construct
  misc_feature 1..765: note = Description of Artificial Sequence: Synthetic coding sequence
  source 1..765: mol_type = other DNA
atgcagcgccccggcgagcccggagctgccagatttggtccacccgagggatgcgctgaccacaggccacataggtacagaagcttcatgatcgaagaaattcttacagaacctccgggtcccaaaggcgccgctccggccgcagccgcggccgccgccggggagctgctgaagttcggcgtccaggccctgctcgctgcgcggccttttcactctcacctggctgttttgaaggccgagcaggcagcggtgtttaaattcccattggcacctctgggttgttctggcctatcgtccgctttgttggctgcgggacccggtctgcctggggccgcgggtgctccacacctccccttggagctgcagcttagagggaaacttgaggcagccggcccaggcgagccgggtacaaaggcaaaaaagggtcgtcgctccaggacagtgttcactgaattacagctgatgggcctggaaaaacgtttcgaaaaacagaagtacctatcaaccccagaccgcatcgacctagccgagagcttaggactgagccaattgcaggtgaagacatggtaccagaatcggcgcatgaaatggaagaagatcgtcctgcagggaggaggactcgagtcaccaaccaagcccaaagggcggccaaagaagaattctatccctacaagcgagcagctcacggaacaggagagagctaaggatgctgaaaagcctgcagaggtacccggggagcctagtgaccgctctagagaagattag

SEQ ID NO: 109415 - DNA, 303 bp, synthetic construct
  misc_feature 1..303: note = Description of Artificial Sequence: Synthetic coding sequence
  source 1..303: mol_type = other DNA
atggggctggagaagcgttttgaaaagcaaaagtacttaagtaccccagaccggatagacctggcagaatccctgggattatcacagctccaggtcaagacatggtaccagaaccggcgaatgaagtggaaaaagatcgtacttcagggaggagggctcgaatcccccaccaaaccaaagggccgccccaaaaagaacagcatccccactagtgagcagctgaccgagcaggaacgagcgaaggacgcagagaaacccgcagaagtcccaggtgagccctcagaccgctctcgggaggattag

SEQ ID NO: 109416 - DNA, 840 bp, synthetic construct
  misc_feature 1..840: note = Description of Artificial Sequence: Synthetic coding sequence
  source 1..840: mol_type = other DNA
atgcactgccatgccgagcttcgcctctcttctcccgggcaactcaaggctgctaggcggaggtataaaacctttatgattgatgaaattttgagcaaggagacgtgtgactacttcgagaaactgtcattatattcggtgtgtcctagcctcgtagtgcgcccaaagcctttacacagctgcacagggtcccctagcctgagggcttatccccttttgtcagtgattactcggcagccaacagtcatctcgcacttagtgcctgccacaccaggaattgcacaggcgctttcttgtcaccaggtaacagaagctgtatcagccgaagcacctgggggcgaagccctcgcatcaagcgagagtgagacagaacagcctacaccaagacagaaaaagccccgccgatcaaggaccatttttaccgagctgcagctgatgggcctggagaaaaaattccagaaacagaaatacttatcaactcccgatcgtttggacctggcacagagtctggggttgacccaactgcaggttaaaacctggtaccaaaaccggcgaatgaaatggaaaaagatggtccttaaaggcggacaagaagcccctacaaagccaaaagggaggccgaagaaaaatagcatccccactagcgaagagatcgaggccgaagagaaaatgaattctcaggcccagggacaggagcagctggagcccagtcagggtcaggaggaactctgtgaggctcaggagcccaaggcccgtgacgtacctctcgagatggccgagcctcctgacccgccacaggagcttccgattcctagcagcgagcctccccctttaagttag

SEQ ID NO: 109417 - DNA, 1887 bp, synthetic construct
  misc_feature 1..1887: note = Description of Artificial Sequence: Synthetic coding sequence
  source 1..1887: mol_type = other DNA
atggaacctccagacgccccagcacaagccagaggagccccccggctgctcctcctcgccgtcttgctcgctgcacatccagatgcccaggccgaggtgagactcagtgtaccacctctggttgaggtgatgcggggcaagtccgtgatcttagattgtacccccacgggaactcacgatcattacatgttagagtggttcctgaccgaccgaagtggagccagaccacgactggcttccgcagaaatgcagggtagtgagctgcaggtcaccatgcatgacacaagaggtaggtctcctccctaccaacttgactcccagggacgtcttgttctcgctgaggcccaagtgggggatgaaagagactatgtgtgcgttgtgagggccggcgccgcaggtacagctgaagctaccgctaggttaaatgtctttgccaaacccgaagctacggaagtgtctcccaataagggaacgctatccgtcatggaagattctgctcaagagattgccacttgtaacagcaggaatggtaatccagctccgaagattacttggtaccgtaacggacagcgtttggaggtgccagtggagatgaatccagagggatacatgaccagcaggacggtacgcgaagcttccggattattgtccctgacaagtactttgtaccttcggctaaggaaggatgatcgagatgcaagtttccactgtgctgcccattacagcctgcccgaaggtcggcatggccgcctcgactcaccaacatttcatctcaccctgcattatccaaccgaacacgtgcagttctgggtcggcagtcccagcactcctgctggatgggtccgcgaaggtgatacagtacaactgctttgccgaggcgacgggtccccgtccccggaatataccctcttcaggctgcaggacgagcaggaagaggttctcaacgttaacttggaaggaaaccttactctggagggagtgactcggggtcagagcgggacgtacgggtgccgcgtcgaggactatgacgctgcagacgatgttcaactcagcaagaccctggagttgagggtggcatacttggacccacttgaactgagcgagggaaaggtactgtccctaccgctgaactcatccgccgtggtcaactgctctgtccatgggctccctacacccgcccttcggtggaccaaggactccacccctctaggcgatggacccatgctaagccttagcagtataacttttgattcaaacgggacctacgtgtgcgaggcttcccttcctactgtgccggtgctgtcccggacacagaacttcacacttttggtgcaaggttcacccgagttgaaaacagctgaaattgaacctaaggccgacggcagttggagggagggagacgaagtaacattaatttgttcggcccgcgggcaccctgacccaaagctgagctggagccagctcggtgggagccctgcagagccaatccctggaagacaaggctgggtctcctcttccttaaccctcaaagtcacatcggcccttagtagagacggcataagttgtgaggcttcaaacccccacggcaacaaacggcacgtgttccatttcgggacagtctcaccacagactagccaggcgggcgtagctgtcatggcagtagctgtgtctgtcggtttactcctcctagtcgtggctgttttctattgcgtccggaggaaaggagggccgtgctgccggcagcggagagagaaaggcgcccctccgcccggggaacctggcttatctcattccggatccgagcagcccgaacagacaggcctgcttatgggaggtgccagcggaggggctagaggagggtcaggcggcttcggggacgagtgctag

SEQ ID NO: 109418 - DNA, 1767 bp, synthetic construct
  misc_feature 1..1767: note = Description of Artificial Sequence: Synthetic coding sequence
  source 1..1767: mol_type = other DNA
atggagcctccggatgcacctgcccaagcccgcggtgcccctcgtttgttgttgctggctgtgctactggccgcccaccccgatgcccaggctgaggtgcggctgagcgttcccccccttgtagaggttatgcgaggcaagtctgttattctggattgcacaccaacaggtacacacgatcattatatgctggagtggtttcttactgacagaagtggtgctcggcctcggctggcctccgccgagatgcagggcagtgagttgcaggtgacaatgcacgacactagaggtcgttcacctccctaccagttggactcacaagggcgtctggtgctggccgaagctcaggtgggtgacgagagggactacgtgtgcgttgtgagggccggggctgctggaaccgctgaggctactgccagactgaacgtgtttgcgaagcccgaggcgaccgaagtgtcacctaacaaaggaactctgtccgtgatggaggacagcgcacaggagatcgcaacatgtaactctcgcaatgggaatccagccccaaaaattacatggtatcggaacggccagcggctggaggtccctgtagagatgaaccctgagggctacatgacatccagaactgtccgagaggctagcgggttactctccttgactagtacactgtatcttagattgagaaaggacgatagagacgcgtcattccattgtgccgcacactattctctgccagaaggccgccacggccggctggactctcccacattccatctgactctgcactatccaaccgagcacgtgcagttctgggtcggatcgcctagcactcccgctggttgggtacgggaaggcgatactgtgcagttgctatgtaggggggatgggtcacccagccctgagtacacactattccgcctccaggatgagcaagaagaggtgctcaatgtgaatctcgaaggtaatctgacattagagggcgtgaccagagggcagtccggtacctacggatgccgagtcgaggactacgacgctgccgacgatgtacaattaagtaaaacacttgaactccgggtggcttacctggaccccttggagctgtcagaaggtaaggtcctcagcttgcctctgaattccagcgcagttgtgaattgttctgtacacgggctgcccacccccgctctcaggtggacaaaagactctacccccctcggagacggccccatgctgtctctgagttccataacttttgactcaaacggtacatacgtgtgcgaggctagtttacctaccgtgccagtcctatcacggacccagaatttcacactcctcgtccagggctcaccagaacttaagaccgctgaaattgaaccgaaggccgatggatcttggcgcgagggggacgaggtgaccctgatctgcagcgcacgtggtcatcccgatcccaagctttcttggtctcagctgggtgggtcccccgccgaacccatcccggggcggcagggctgggtttctagtagcctcaccttaaaggtcacttcagctttgtcccgagatggtatatcttgtgaggcaagcaatccgcatgggaataaaaggcatgtgttccattttgggacagtatccccgcagacctcgcaggcaggtgttgcagtgatggcggtggccgtctcggtgggattgctcttattggtggttgccgtcttttactgcgtgagaagaaaaggggggccatgctgtagacaacggcgagaaaaaggtgccccgtag

SEQ ID NO: 109419 - DNA, 321 bp, synthetic construct
  misc_feature 1..321: note = Description of Artificial Sequence: Synthetic coding sequence
  source 1..321: mol_type = other DNA
atgatgacactcgtgcctcgggcacggacaagagctggccaagaccactactctcatccatgtccaagattctctcaggtactgctcacagagggtattatgacgtattgtcttaccaaaaatctctccgacgtcaacatcttgcacaggctgctaaagaatggtaacgtgcgcaacactttgctgcagagtaaagtgggtctgttgacttactatgtcaaactctaccctggcgaggtgacactgcttaccaggccctccatccagatgagattgtgctgcatcacgggctccgtcagccggcctaggagtcagaaatag

SEQ ID NO: 109420 - DNA, 321 bp, synthetic construct
  misc_feature 1..321: note = Description of Artificial Sequence: Synthetic coding sequence
  source 1..321: mol_type = other DNA
atgatgacgctggtgccaagggcccggacacgggcaggccaggatcactattcgcacccctgccccagatttagtcaggtgttgcttaccgaggggatcatgacgtattgtctgacaaaaaatctcagtgatgtgaatatactgcatcgtctgcttaaaaacggcaatgttcgcaacacccttcttcagtctaaggtcggcctactaacttattacgttaaactttaccctggtgaggtcacattattgacacgcccaagcattcaaatgagactttgttgcatcaccgggtccgtcagccgtccgcgatcacaaaaatag

SEQ ID NO: 109421 - DNA, 1146 bp, synthetic construct
  misc_feature 1..1146: note = Description of Artificial Sequence: Synthetic coding sequence
  source 1..1146: mol_type = other DNA
atggagcgaggcatgcacctgggtgccgctgcagcaggcgaagacgacctctttctccacaagtcactgagtgccagcaccagtaaaaggttggaggccgccttccggtccacacctcccgggatggatttgagcctcgcaccccccccccgtgagcggcccgctagttcctcaagctcccctttaggctgcttcgaacccgcggatccggaaggagccggtctgttactgccaccacctgggggaggtggtggggggagtgccggaagtggaggagggggcggcggcggggttggagtcccagggttattggtcgggagtgcgggggtcgggggcgatccaagcttgtcgtccctgccggctggcgccgctctctgtctgaagtacggggagtccgctagcaggggatccgtcgcggaaagttcgggcggggagcagtctccagatgatgacagtgacgggaggtgcgaactagtcctgcgcgcaggggtggctgacccgagagcatcgccgggcgcgggagggggaggagcgaaggccgctgaggggtgtagcaacgcacacctgcatgggggagcctccgtccccccaggtggcctcggcggggggggaggcggtggttcaagctcagggagtagcgggggcggtggtggctctggttccggtagcggtggctcctccagctcttctagtagtagcagcaagaagagtaaggagcagaaggctttgcggctgaacattaacgccagagaacgcaggaggatgcatgatctgaatgacgccctagacgagcttcgcgccgtgatcccatacgcacattccccctcagtgcgcaagctgtcgaagatagctactctactgctggctaagaattacattctcatgcaggcccaggccttggaagagatgagacggttagtggcctacctaaaccaggggcaagccatctcagctgcctccctgccctcctccgctgctgccgcagctgctgccgccgccctgcatcccgctttaggagcctatgagcaggctgcggggtatccatttagtgcgggactgccgcccgccgcctcctgtccagagaagtgcgcactgttcaactcagtttcttctagcctgtgtaagcagtgcacggaaaagccatag

SEQ ID NO: 109422 - DNA, 678 bp, synthetic construct
  misc_feature 1..678: note = Description of Artificial Sequence: Synthetic coding sequence
  source 1..678: mol_type = other DNA
atggctgaactaaagtctctatcaggagacgcatatctggccctgtcgcatggttatgctgcagctgccgcaggcctggcctacggagccgctcgggagcctgaggctgcccgaggctatggaacgcctgggcccgggggcgacttacccgcggctcccgctccgcgcgcccctgctcaggcagccgaaagctctggcgagcaatctggagacgaagacgacgcctttgagcagagacgacggcgccgtggacccggatccgctgcggatggacgccggcgccctagagagcagaggtcgctgagattgtccatcaacgcaagggagcgacgacggatgcatgatctgaacgatgctctggatgggttaagggcagttattccctacgcacactccccttcagtgagaaagttgagtaagatcgcaacactgctgctggccaaaaattacattctcatgcaggcacaggcattagacgaaatgcgccgactggtggcctttcttaatcaagggcaaggtcttgctgctccggtgaacgccgcccctctaacaccattcggccaggctacagtgtgcccattctctgccggcgccgcgctgggcccttgtccagacaagtgtgctgcgtttagtgggacacccagcgccctgtgcaaacattgccatgagaagccttag

SEQ ID NO: 109423 - DNA, 1239 bp, synthetic construct
  misc_feature 1..1239: note = Description of Artificial Sequence: Synthetic coding sequence
  source 1..1239: mol_type = other DNA
atggagaggataccctccgcgcagcccccgcccgcctgcttacccaaagctcctggactggagcacggcgatctccccggcatgtacccagcccacatgtatcaggtgtacaaatctagaaggggtatcaaacggagcgaagattcgaaggagacctacaaactcccccacagactcattgaaaaaaaacgcagagacagaattaacgagtgcattgcccagctgaaggacttgctgccagaacatttaaagctaaccactctagggcacctggagaaagcagtcgtgctggaactgacactgaaacatgtgaaagcactgacaaacctaattgatcagcagcagcaaaagataatcgctctgcaaagtggtctacaggccggtgagctgtcaggacgaaacgtggagaccggtcaggaaatgttttgcagcgggttccagacatgtgctcgcgaagttctccagtatctggctaaacacgagaataccagggacctaaaatcttcccagcttgttactcatctacatcgagtggtcagtgagttgctccaaggaggcactagccggaagccatccgatcccgcacctaaagtgatggattttaaagagaagcctagctcaccggccaaggggtctgaaggccccggcaagaactgtgtcccagttatccagcggaccttcgctcactcctccggcgagcagagcggatctgatactgatacagattccgggtacggcggggagtccgaaaagggtgatcttagatcagaacagccatgttttaagtcagaccatggccgaagatttaccatgggtgagcgaatcggggccatcaaacaggaatcagaagagcccccgactaagaagaatcgcatgcagttgtccgatgatgaagggcactttacctctagcgatttgattagctctccattcctggggccacacccacatcaaccacccttttgcctccctttttacctgatccctccatccgccaccgcgtatctgcccatgctagagaagtgctggtaccctaccagcgtgcccgtgctgtaccccggacttaacgcctcagccgcggccttaagctcctttatgaacccggacaagattagcgctcctctcttgatgccacagcgactcccttcccctctgccagcccacccgtctgtcgacagcagtgtcttactgcaggccctcaaacctatcccccctctgaatctcgagaccaaagattag

SEQ ID NO: 109424 - DNA, 378 bp, synthetic construct
  misc_feature 1..378: note = Description of Artificial Sequence: Synthetic coding sequence
  source 1..378: mol_type = other DNA
atgcctcattcttcagacagtagcgattcatctttttcgaggagtcccccacctggaaagcaagattcgagcgacgatgtcagaagagtacagagaagggaaaaaaatcggatcgccgcacagaaaagtagacagcggcagacgcaaaaagcggatacactacacctagaaagcgaggatctggagaaacagaatgcagctctcaggaaagaaatcaagcagctcactgaagaactgaagtactttacatccgtgctgaactcacatgagccactctgcagcgtgctggctgcaagtactccatcacccccagaggtcgtgtatagcgcccacgcatttcaccagccccacgttagcagtcctcggttccagccatag

SEQ ID NO: 109425 - DNA, 384 bp, synthetic construct
  misc_feature 1..384: note = Description of Artificial Sequence: Synthetic coding sequence
  source 1..384: mol_type = other DNA
atgagtcaggggctccccgcggctggttctgtactgcagagatctgtggctgcacctgggaatcaaccacagccacaacctcagcagcaatccccagaggatgacgatcgcaaagtaaggcggagggaaaaaaatagagtggctgcccaacgctctagaaagaagcagactcaaaaggccgacaagctccatgaggagtatgagagtctggaacaggaaaatacaatgttaaggcgggaaattggtaagcttacagaagaattgaagcaccttactgaggctttaaaggagcacgagaagatgtgccccctgctgctctgccccatgaacttcgtgcctgtccctcccaggccggacccagtggcggggtgtctaccccgatag

SEQ ID NO: 109426 - DNA, 489 bp, synthetic construct
  misc_feature 1..489: note = Description of Artificial Sequence: Synthetic coding sequence
  source 1..489: mol_type = other DNA
atgaaggagaccattatgaaccaggaaaaactggcaaagctacaggcccaggtacggataggtggaaaaggcactgctagacgcaagaagaaagttgtacacagaaccgctacagctgatgataaaaaattacagttcagtcttaaaaaattaggagtgaataacatctccggtatcgaggaggtgaacatgtttacgaatcaggggactgtgattcattttaataaccccaaagtgcaggctagtctggcagctaataccttcaccattacaggtcacgcggaaactaaacagcttacagaaatgctcccatctattctgaaccagctgggtgccgactcattaacctctttaaggcgcctggccgaggcccttcccaagcagagtgtcgacggtaaagcaccactggccaccggcgaggatgacgacgatgaagtgccagatctggtggagaatttcgatgaggcgtcgaaaaacgaggcgaactag

SEQ ID NO: 109427 - DNA, 621 bp, synthetic construct
  misc_feature 1..621: note = Description of Artificial Sequence: Synthetic coding sequence
  source 1..621: mol_type = other DNA
atgcgccggaccggagccccagcacaagccgacagtaggggcagaggtcgtgccagaggcggatgtcccggaggggaagccaccctctcccagccacccccacgtggcggaactaggggacaggagccacagatgaaagaaactatcatgaatcaggaaaaactggccaagctccaggcccaagtccggatcgggggcaaaggcactgcgcgccgcaagaaaaaggtggtgcaccgcacggcaaccgctgatgataagaagcttcaattcagtctcaaaaagctgggtgtcaacaacatcagcggcattgaggaagtcaacatgtttactaatcagggtacagtgattcattttaataatcccaaggtgcaagcaagcctcgctgccaatacattcaccattacagggcatgccgaaaccaagcagttaactgaaatgctcccctccatcctgaatcaattgggcgctgacagtttaacatcactccggcgattagcggaggctttacccaaacagtctgtcgacggaaaagctccccttgcaaccggagaggatgacgacgacgaggtacctgatttggtggaaaatttcgacgaagcatccaagaatgaagccaactag

SEQ ID NO: 109428 - DNA, 1158 bp, synthetic construct
  misc_feature 1..1158: note = Description of Artificial Sequence: Synthetic coding sequence
  source 1..1158: mol_type = other DNA
atggccgccgctctctttgttctgttggggtttgccctgctgggaacccatggggcttctggagccgcgggcttcgtccaagcccctctcagccaacagcgatgggtcggggggtccgtagagctgcattgcgaagcagttgggtctcccgttcccgagatacaatggtggttcgagggacagggacccaacgacacatgcagccaactgtgggacggcgcgcggttggatcgtgtacacatccatgccacgtatcaccagcatgctgcctcaactatctcgatagataccctggtggaggaggatacggggacatacgagtgcagggcaagcaatgatccagataggaatcatctcaccagagcgccccgagtaaagtgggtacgggcccaggccgttgtcctggtcctggagccagggacagtttttaccacagtggaagacctgggctccaaaatcctgctgacttgcagcttgaacgatagcgccacagaagtgactgggcaccgctggctaaaaggcggcgtggtccttaaggaggatgccctgcccggccagaaaaccgaatttaaggtggacagcgacgaccaatggggagaatattcatgtgtgttcctacctgaaccgatgggcacggccaacatccagcttcatggtcctccgagagttaaggctgttaaatcatctgagcacattaacgagggcgagacagccatgcttgtctgtaaaagcgagtctgtccctccagtaactgattgggcatggtacaagattaccgatagtgaagacaaagccttgatgaacggatctgagtcacggttctttgtcagtagctcccaggggaggtccgaattgcacatagaaaatctcaacatggaagctgatcctggacagtatcgatgcaatggaacttccagcaaaggttctgatcaggccattattaccctgagggtgcgcagtcacctggctgccttgtggccatttttgggaatcgtggccgaggttctggtgctggtgacaatcatatttatttacgaaaaaaggcggaagccagaagatgtcctcgacgatgatgatgccggcagcgcccctctcaaaagctcagggcagcatcagaacgacaaggggaagaatgttcgacagaggaacagttcatag

SEQ ID NO: 109429 - DNA, 618 bp, synthetic construct
  misc_feature 1..618: note = Description of Artificial Sequence: Synthetic coding sequence
  source 1..618: mol_type = other DNA
atgaaacaatctgacgccagtcctcaagaacgcgtagattctgatgatcaatggggtgaatactcttgcgtattcttacctgagcccatgggaaccgctaacattcaactgcatggcccacctagagtgaaggcagtgaagtcttctgaacatataaatgagggcgaaacagcaatgctggtatgtaagagtgaaagcgtaccacctgtgactgattgggcttggtataagatcacggactcagaggacaaggctttaatgaacgggtccgaatcccggttcttcgttagtagtagccagggacgatcggagttgcatatcgaaaatctcaatatggaggctgaccccggccaatatagatgtaacggtacatccagtaagggcagcgatcaagcgatcatcaccctgcgtgtgagatctcacttggctgcactatggcccttcctaggtattgtggctgaggtcctggtcctggtgacaatcatttttatttatgaaaaaaggaggaaacccgaagacgtattggacgacgacgatgcaggctccgcacccctgaaatcctctggccagcaccagaatgataaaggaaaaaacgtgcgacagcggaattcatcctag

SEQ ID NO: 109430 - DNA, 810 bp, synthetic construct
  misc_feature 1..810: note = Description of Artificial Sequence: Synthetic coding sequence
  source 1..810: mol_type = other DNA
atggccgccgccctgttcgtgctcctgggctttgctttgctcgggacgcacggcgcttctggcgcagccggcactgtgttcaccacagtagaagaccttggctctaaaattctgctcacgtgttccctaaatgacagtgccaccgaagtaaccggtcaccggtggctgaagggcggtgtggtactaaaagaagacgcgttaccgggtcagaagacggagttcaaagtcgactccgacgaccagtggggagagtatagctgcgtttttctgcccgaacccatgggaaccgcaaacatccagttgcatggcccgccccgcgtcaaggcagtgaaaagctcagagcacattaatgagggagaaaccgccatgctcgtgtgtaaatccgagtctgtgccccctgtaactgattgggcatggtataaaattaccgacagcgaggataaggcccttatgaacggaagcgagagtaggtttttcgtttcctcaagccaaggaagatcagagctccacatcgagaacctcaacatggaagcagatcctggccagtacaggtgtaatgggacatcatccaagggtagcgatcaagccattataaccctgcgggttcggtcccatctggccgctctttggcctttcctgggaattgtggctgaggttttggttctcgtaaccatcatcttcatctacgagaaacgcagaaagcctgaagacgttctggacgacgatgatgcaggatctgctcccctgaaaagttctggccaacaccagaacgataaaggtaagaacgttagacagcggaatagcagttag

SEQ ID NO: 109431 - DNA, 531 bp, synthetic construct
  misc_feature 1..531: note = Description of Artificial Sequence: Synthetic coding sequence
  source 1..531: mol_type = other DNA
atgggaacagcaaatatccaattgcacgggccacccagggtgaaggccgtgaaatcaagcgaacacatcaacgaaggggagacagccatgctcgtctgcaagagtgaatcggtcccccccgtcaccgactgggcatggtataaaatcaccgatagcgaggataaggccctcatgaacggctccgagtctcggttctttgtgagcagctcgcaggggcggtctgagctgcacatagaaaatctcaacatggaagccgaccccgggcaatacagatgcaatggcacttctagtaaaggcagtgaccaagccataataactctgcgcgttcggtctcacttggccgctttatggcctttccttggaattgtggccgaagtgttagtgctcgtgacaattatcttcatttacgaaaagagacggaagccagaggatgtcctggacgatgacgacgccggaagtgcccctctcaagtcctctgggcagcaccagaacgacaaggggaagaatgtacgacaaaggaactcttcttag

SEQ ID NO: 109432 - DNA, 2985 bp, synthetic construct
  misc_feature 1..2985: note = Description of Artificial Sequence: Synthetic coding sequence
  source 1..2985: mol_type = other DNA
atgagacgcagacctccctccaggggcggacggggcgctgctagagctagagagacacgccgacagcccaggcatcgtagcggcagacgcatggctgaggctatctcctgcactcttaattgttcttgccaaagcttcaagcctggtaaaatcaaccatcggcaatgcgatcagtgcaaacacggatgggtggcgcatgccctcagcaagctcaggatcccaccaatgtacccaactagtcaggtggagatcgttcagtctaacgtcgtctttgacataagcagcctaatgctgtacggaacacaggccattcccgtgcggcttaaaattctgctggatcggctgttcagcgtgcttaaacaggacgaggtgctccagattctgcatgcacttgactggaccctgcaggactacatccgtggctatgtgctgcaggatgcatctggcaaggtgctggatcattggtctataatgacttcagaggaagaagttgccacgctgcagcagtttctcagattcggggaaacgaagtccattgtggaactgatggccatccaggagaaagaagaacagtcaattattataccaccctcaaccgccaacgtggacattcgagcttttatcgaaagctgttcacataggagtagctcactgccaacccctgtggacaagggaaacccaagcagcattcacccttttgagaatcttattagtaatatgacgtttatgctgccgtttcaatttttcaaccctctcccaccagccctcatcggctccctcccagaacaatacatgcttgaacagggacacgaccagagtcaggaccccaaacaggaagtccatggccctttcccagacagttcgtttctgacgagcagcagcaccccattccaggtagaaaaggaccagtgcctgaattgccctgacgcgatcaccaaaaaagaggattccacgcacctgagcgacagctccagctataacatcgttacaaagttcgagaggacacaacttagcccagaggccaaagtgaagccagaaaggaattctctgggcactaagaagggcagggtgttctgcactgcctgtgaaaaaacgttttatgataagggtacccttaagatccattataacgcagtgcaccttaagatcaagcataagtgtaccattgaaggatgcaacatggtcttctcaagcctccggagccggaaccggcatagcgctaaccctaacccacgcttgcatatgcccatgaatagaaacaatagggacaaggatttgagaaattccctcaacctggcaagtagtgaaaactacaaatgtcccggctttacggttacgagcccagattgccgccctccaccgtcttatccagggtccggtgaggacagcaagggacagcctgcctttccaaatatcggccaaaacggcgtgctgtttcctaatctcaagacagtgcaacccgttctgcctttttatagaagtcctgccactcccgccgaagtggcaaacacccctggcattctcccaagtctgcctctgctcagttctagcatccctgagcagttgatttccaatgagatgccatttgacgcactcccaaagaaaaaatcccggaagagctcgatgcctattaaaattgagaaggaggctgtggagatagccaatgagaaacgtcataacctgtcctctgacgaagatatgcctctccaagtagtgtctgaggatgaacaggaggcctgttcaccccagagccatagggtgtccgaggaacagcatgtgcagagcggtggtttggggaaaccttttcccgaaggggagcggccttgccatagggagtcagtgatcgaatcgagtggggccatttctcagacgcccgagcaggcaactcacaattctgagagagaaaccgaacaaactccagccctcataatggtgcctcgagaggtcgaggatggaggtcacgagcattacttcacaccgggtatggaaccacaggtccccttctcggattatatggagctccagcagaggctccttgctggtggacttttttccgccctgtcaaatagaggtatggcttttccatgcctcgaagacagtaaggagctggaacatgtgggacagcatgcgctggcacgacagatcgaggagaaccggttccaatgcgatatttgcaaaaaaactttcaaaaacgcatgcagcgtgaagattcaccataaaaacatgcacgtcaaggaaatgcatacctgcactgtagaaggctgcaacgcgacgttccccagtaggagaagccgcgaccgacactcctcaaatctcaacttacaccaaaaagcactgagtcaagaggctctggagagctctgaggaccacttccgcgccgcatacttgctcaaagacgtggccaaggaagcttaccaggatgtggcgttcactcagcaggcctcccagacctctgtgattttcaagggaacctctaggatgggtagtctcgtgtatcctatcacgcaagttcatagcgcatccctggaatcgtataattcagggccgctgtctgagggcactatcctggatctgtccacgacttcctcgatgaagtccgaatcttcgagccactccagctgggattctgacggggttagcgaggagggcactgtactgatggaagattcagacggtaactgcgagggatcctcactggtgccaggggaggatgagtaccccatctgcgtactgatggaaaaagccgaccagtctctcgcctctctgcccagtggcctccccatcacttgtcacctctgtcagaagacatactccaacaaggggacttttcgcgcacactacaagaccgtgcatcttaggcaattacacaagtgtaaggtcccgggctgtaacaccatgttcagtagcgtccgcagccgtaaccgtcactcacagaatccaaacctgcataaatcacttgcaagtagcccatctcacctgcaatag

SEQ ID NO: 109433 - DNA, 2964 bp, synthetic construct
  misc_feature 1..2964: note = Description of Artificial Sequence: Synthetic coding sequence
  source 1..2964: mol_type = other DNA
atgaggtgtcggaacatgtttttttctttcaaagcctcgctgtgtgggtgcggggccgctactgccccatcccttactgcaataagctgtaccctcaattgttcttgtcagagctttaagcctggcaagataaaccacagacaatgtgaccagtgcaagcacggctgggtcgcccatgctctcagcaaactgcggattcctcctatgtatcccacatctcaggtggaaattgtccagtctaatgtggtttttgatataagttccctgatgctttatggcacgcaggcgatccccgtcaggctgaaaatcctgctggatcgcctcttctctgtgctgaagcaggacgaagtgctacagattctacatgccctggactggactctccaggactacatacgggggtacgtgctgcaggacgccagcggcaaggtgctggaccattggtccatcatgaccagtgaggaagaagtggccaccctccagcaattcctgagatttggggagaccaaatccattgttgagttgatggccatacaggaaaaggaggagcagagcataattatccccccaagtactgctaatgtggatatacgtgcttttatagaaagttgctcgcaccgctcatctagcttacctacccccgttgataaaggaaacccgtcttcaatacacccttttgagaacctgattagcaacatgacctttatgctccccttccagtttttcaatcctctcccacctgctctcattggtagtctcccagaacaatatatgctggaacaggggcacgatcagagccaagaccccaaacaagaggtccacgggccctttcctgattcctcctttctgacaagcagctctacgccgtttcaggtcgagaaagatcagtgcttgaactgccctgacgcgatcaccaagaaagaagattccacacatctctccgactccagctcatataacatcgtcacaaaatttgaaagaacccaattgtctcccgaagccaaagtaaaacctgagcggaattcgctcggaactaagaagggcagagtgttttgcacggcctgtgaaaaaaccttttacgataaaggcacgctgaaaattcactacaatgctgtccatctgaagataaaacacaagtgcaccattgagggttgcaatatggtcttctcctcactgcgctctcgtaatagacacagtgcaaacccaaatccacggctccacatgcctatgaatcgcaataatcgtgacaaggatcttaggaattcactgaacctggcttcctccgaaaattacaaatgtccggggtttacggtcacatcaccagactgtcgaccgcctccatcctacccaggttccggcgaagattccaagggtcaaccagccttccccaacattggacaaaacggagtgctcttccccaacctgaagactgtccaacctgtgctccccttttaccggagtcctgccaccccggccgaggttgccaacactcccgggatattgccttctctacccctgttatcaagcagtatccccgagcaactgatcagtaacgagatgccctttgatgccttacccaagaagaagagccggaagtccagtatgccaattaagatcgagaaggaggctgtcgaaatcgccaacgagaagcgccacaacctcagtagcgacgaagatatgccactgcaagtagtgtccgaggacgagcaagaagcctgttctccacagagccacagggtgtctgaggagcagcatgtgcaatctggaggtctgggcaagccattccccgaaggggagcgtccgtgccacagagagagcgtcatcgagagtagcggtgcaatttctcagactcccgagcaggccacacataattcagagcgggagactgaacaaacacccgcccttatcatggtacccagagaagtcgaggatggaggacatgaacattacttcactccagggatggagccccaggtccctttcagcgattacatggaactgcagcagaggctgcttgctggcgggctcttctccgctcttagtaaccggggcatggcctttccttgcctagaggattcaaaggagctcgaacacgtcggtcagcacgcattggctagacagatcgaggagaaccgcttccagtgcgacatctgcaaaaagacgtttaaaaacgcatgtagcgtgaagattcaccataaaaacatgcatgtgaaagaaatgcacacttgcacggtggaagggtgcaatgccacgtttcccagcagaagaagccgggaccggcacagctccaacttgaacctgcaccagaaagccctctcgcaggaggctctagagagttcagaggatcatttccgagccgcatacctcctgaaagacgtagccaaggaagcgtatcaggatgttgcctttacccagcaggcttcgcagaccagcgtgattttcaaaggtaccagccgcatgggctctctggtttaccctatcacacaggtgcactctgcctctctagagtcttataactccgggcctctctccgagggcaccatcctcgatttgtcaaccacaagctctatgaaatcggagtcctcctcacacagctcctgggacagcgacggagtctcagaggaaggtaccgtgcttatggaggattctgacggaaattgcgaaggctcctccttagttccgggcgaagatgagtaccctatatgtgtcttgatggaaaaggccgaccagtcccttgcttccctgcctagcggactccctattacctgtcacctgtgtcagaagacctattcaaacaagggcaccttccgagctcactacaaaaccgtccacctgagacagctgcacaaatgcaaggtgcctgggtgtaatacgatgttttcttcggtaaggtcccggaatagacatagtcagaatcccaacctgcataaaagcttggcgagtagccctagccatttgcaatag

SEQ ID NO: 109434 - DNA, 2712 bp, synthetic construct
  misc_feature 1..2712: note = Description of Artificial Sequence: Synthetic coding sequence
  source 1..2712: mol_type = other DNA
atggcacacctaggccccacacccccacctcattccctcaattataagagcgaggataggctgtcagaacaggactggcctgcttacttcaaagtaccttgctgtggggtggacacttcccagattgaatcggaagaggctgaggtggacgtgagggaacgagaaactcagcgggacagggagcctaaacgagcccgggacctgaccttgagggattcttgtactgataactccatgcaattcggaactcggactacaacagccgagccaggctttatggggacgtggcagaacgccgatactaacctgctttttcggatgtcccaacaggccatccgttgcaccttggttaattgcacatgtgaatgcttccagccggggaaaataaatcttagaacatgcgatcaatgcaaacacggatgggtggcccatgcactagataagctgtcgacacagcacctgtaccacccaacccaagtggaaatcgtgcagtcaaatgtcgtctttgacatttcctcccttatgctctatggaacccaggcggtgcctgtgaggctgaaaatccttctggatagactgttcagcgtgctaaagcaggaagaggtgctgcacatcttgcatggattgggttggaccttacgggactatgtgcgcggttacatcctgcaggacgccgcaggtaaagtactagataggtgggccatcatgtctcgggaagaggaaattataactctgcaacagttcctacgcttcggggagacaaaatccatcgtcgagttaatggctatccaggagaaagaaggccaggcagtggcagtcccttctagtaagaccgactctgacattaggacttttattgaaagtaataataggactcgatcccctagcctgttagcacatttagaaaactccaatccaagctctatacaccattttgaaaatataccaaacagcctggcctttctgctaccatttcagtacatcaaccccgtctctgctcccctactgggactccccccgaatggcctcctactcgagcaacccggcttgagactgagagaaccatcactctccacacagaatgagtataacgagagcagcgaatccgaagtttcacctacaccttataagaacgaccagacgccaaatcggaacgccctaacaagtattacaaacgttgagcctaaaactgagcctgcttgcgtttcccctattcagaacagcgccccggtctccgatttaacgaagactgagcaccctaagtcttcgttcagaatccacagaatgcgtaggatggggtccgcgagtcgaaagggccgggtgttctgcaatgcatgtggaaagaccttctatgacaagggtaccttaaagattcattataacgcggttcatttgaaaatcaagcataggtgtaccatagaaggatgcaatatggtttttagcagccttcggtctcgaaacaggcattccgccaatcccaaccccagactccacatgccgatgctgcgcaataatagagataaagatttaattagagctactagtggcgcggctacaccagtgatcgctagtacaaagtccaatctggcgttgacaagcccaggaaggcctcctatgggatttacaacaccacccctagatcctgtcctgcagaacccattgcctagtcagctagttttttctggactaaagaccgttcagccagtgcctcccttttaccgatctctgcttactcccggcgaaatggtgtctcctcccactagtctgcccacaagtccaataatcccgacttccgggacaattgaacaacaccctcctcctccttctgagcctgtggttcctgccgtcatgatggcaacacatgagccttcagccgatctggccccaaagaagaaaccacgcaagtcctctatgcctgtgaagattgagaaggaaattatcgacacagctgacgaatttgacgacgaggacgatgaccctaatgacggcggcgctgtagtcaacgacatgagccacgataaccattgtcatagccaggaggagatgagcccaggtatgtccgtaaaagacttctccaaacataatcggacacgctgtatctcacgcactgagatcagaagagcagacagtatgaccagtgaggaccaggagcccgaacgtgattatgagaacgagtccgagagctctgaaccaaagctgggagaagagagcatggagggagacgagcatattcactccgaggtaagtgaaaaggttctgatgaacagcgagcgacccgacgaaaaccatagtgaaccaagccaccaggatgttattaaggtgaaggaggaattcacagacccgacatacgatatgttctatatgtcccagtacggcctgtacaatgggggcggagcctccatggctgctctccacgagtcttttacctcctcgctcaattatggctcaccccagaaattttcgcctgagggtgatttgtgctcttcaccagaccccaagatctgctatgtatgcaagaaatccttcaaatcatcctatagcgttaaactacactatcgcaatgtccatctcaaggagatgcacgtgtgcactgtggctggctgcaatgccgcatttccatccagacggtcgagagatcgctactgggaaaaaagcaatgaacaaaatggcctgctggtcagctggggggagaccttgtctagcctgaagtag

SEQ ID NO: 109435 - DNA, 3099 bp, synthetic construct
  misc_feature 1..3099: note = Description of Artificial Sequence: Synthetic coding sequence
  source 1..3099: mol_type = other DNA
atggcccacctgggccccacccctcccccccatagtctgaactacaaatcagaggacaggcttagtgagcaagactggccagcctattttaaagttccttgctgtggtgtcgacacatctcaaattgaggccatacggtgtaccctagtgaattgcacttgtgaatgctttcagccgggcaagattaacctacgcacatgtgaccagtgtaagcacggttgggtggcacatgcattggacaaactgagcactcaacatctgtaccaccccacccaggtggaaatagtgcaatcaaacgttgtttttgatatttcttctttaatgctgtatggcacccaggcagttcctgtgaggctgaaaatcttgctggaccggctcttttccgtgttgaaacaggaagaggtccttcatatcctccatgggttgggttggactctgagggactatgttagggggtacattctgcaggatgctgctggtaaagtcctggaccgatgggccataatgtcaagagaagaagaaatcatcactctccagcagtttctgcggttcggcgagaccaagagcattgtggagctgatggcaatccaggagaaggagggccaggcggtggctgttccaagctccaaaaccgattcagatattcggacatttatcgagtctaacaataggaccagatcacctagcctacttgctcacctggagaattcaaatccttcgagtattcaccacttcgagaacatacccaattccttggcattccttctgcctttccagtacataaacccagtaagtgcaccccttctaggattgccaccaaatggacttttactggagcagcccgggttgagactgagagagcctagtttgtctacccagaacgaatataatgagtcctctgagagcgaggtatctcccacaccttacaaaaatgaccagacccccaacaggaacgcgctgacctccatcactaacgtagagcctaaaacggagcccgcgtgcgttagtccaatacaaaattccgcccccgtgtcagatcttacaaagacagagcaccccaagtcctcttttcgcatacatcgtatgcgcaggatgggatctgcatccaggaaaggtcgcgtcttctgcaatgcctgcggaaagactttctatgacaagggtactttaaagattcactacaatgcagtgcacctcaagatcaagcaccgatgtacaatcgagggctgcaatatggtatttagctcactcaggtctaggaacagacatagcgcgaatccgaatccacggttacatatgcccatgctccggaacaacagggataaggacctcattagggctactagcggagctgctacacccgttattgccagcacaaagtctaacttggctctgacatccccaggacgcccccccatgggtttcacaaccccgcccctggatcctgtcctgcagaaccccctgcctagtcaactcgtgttcagcggccttaagaccgtccagcccgtgccccccttttatcggagcctattgacccctggtgaaatggtgtcaccccccacctccttgccgacatcaccgatcattccaacatcagggacaatcgaacaacatccacctccaccttctgagccagtggtcccggcagtgatgatggcgacccacgagcctagcgctgatttagctcctaagaaaaaaccccgcaaatcctccatgcccgtcaaaatcgagaaggaaattatagacaccgccgatgagttcgacgatgaggatgacgaccccaacgatggtggcgcggttgtgaacgatatgtctcatgataatcactgtcactcacaggaagaaatgtcacctggtatgagtgtaaaagactttagcaagcataatcgaacacggtgtattagcaggacagagatcagaagagcagattctatgaccagtgaggatcaggagcccgagagagactacgagaatgaaagcgagagttccgaacccaagctcggtgaggagtcgatggagggcgacgaacacatccacagtgaggtttctgagaaagtgctgatgaactcagaaagaccagatgagaatcactccgaaccaagccaccaggatgtcatcaaggtcaaagaagaatttacagaccccacttacgacatgttctatatgagccagtacgggctgtataatggaggcggcgcaagcatggccgctttacatgaatccttcacctcttcgctgaactacggcagcccacaaaaatttagtccagagggggatttgtgttcctctccagatcctaaaatctgctacgtgtgtaagaaaagcttcaaatctagctattccgttaagcttcattatcggaatgtacacctcaaggaaatgcatgtatgcacggtggccggctgcaatgcagcctttccttctaggcgctcacgcgatcggcattcggcaaacataaatttgcataggaaactcttaactaaggaattggatgacatgggcctggatagcagccagccttcattgtccaaagatctcagggatgaatttctggtgaagatctacggcgcccagcaccccatgggcctggacgtacgagaggacgcatcctcaccagccggtacagaggactctcacctgaacgggtatggtcgggggatggctgaagactacatggtactcgatctttcaactacctcctctctacagtcatcatctagtattcacagttctagggaatccgatgctggaagcgacgagggaattctgctggatgatatcgacggtgcctccgacagtggagaatccgcacacaaggctgaggcaccagccctacctgggtctctgggggcagaagttagtggctccctaatgttctctagcttgagtggatctaacggcggcattatgtgtaatatctgtcataagatgtatagcaataaaggcacactgagagttcactacaagactgtacacctccgagaaatgcataaatgcaaggtgcctgggtgtaacatgatgtttagcagtgtgagatctagaaatcgccattctcaaaaccctaacctacataagaacattccattcacttctgtcgattag

SEQ ID NO: 109436 - DNA, 3300 bp, synthetic construct
  misc_feature 1..3300: note = Description of Artificial Sequence: Synthetic coding sequence
  source 1..3300: mol_type = other DNA
atggctcacctcggccccacccccccacctcattccctgaattataaaagtgaggataggctgtctgagcaggactggccagcctatttcaaagtcccttgctgcggggtggacacctctcagatcgaaagtgaggaggccgaagtggacgttcgcgaaagggagacacagcgggacagagagccaaagcgcgcacgagatctgactcttagagacagctgtacggacaactcaatgcagttcggcacaagaacaaccactgcagaaccagggttcatggggacatggcagaatgcagatacaaacctgctctttcggatgtcgcagcaggcaattcgctgtacactggtcaattgtacgtgcgaatgtttccagcctggtaaaatcaatttgcggacctgcgatcagtgcaaacacgggtgggtggcacacgctctcgacaaattgtccactcagcacctctatcaccctactcaggtagagattgtgcaatccaacgtcgtatttgacatcagttcgctcatgctctacggaacacaggctgttcctgttcgactcaagattctgcttgacagactgttcagtgttcttaaacaggaggaagtactccacatcttacacggcctgggctggaccctgagggactacgtaagaggatacatcctgcaggatgccgccggcaaagtgctggacaggtgggcaattatgtctagggaagaggagattatcaccctccagcaatttctccggttcggcgagacgaaatcaatagttgaactcatggctattcaggaaaaggagggccaggccgtggctgtgccttcttccaagactgactccgacattcggacttttatagaatcaaataataggacgcgcagccccagcttactagcccacctcgaaaattccaacccgagctccattcatcatttcgaaaacatccctaactccttggccttcctgctgccatttcaatatattaatccagtctctgcaccattactgggtctcccccccaacggtctccttctggaacagccagggctgaggctgagagaacctagtttgagcacccagaacgagtataacgaaagctccgaaagcgaggtctctccgaccccctacaaaaacgatcaaactcccaatagaaacgctctaaccagtataactaacgtagagcccaaaacggagccggcctgcgtcagcccaattcagaattctgctcccgtgtctgacctgacaaagacagagcaccccaaatcctctttcagaatacacagaatgagaagaatgggctctgccagcagaaagggtagagtattttgcaatgcctgtggtaaaaccttttacgataagggaactctgaaaatccattacaatgctgttcacctgaaaatcaagcataggtgcactatcgaaggatgcaacatggtgttctccagtttacgttcgcgtaatcgacactcggccaacccaaaccctaggttgcacatgcccatgcttagaaataacagggacaaagatcttatccgtgctacaagtggcgctgccacccccgtgatcgcttctacaaaatcaaatctggccctgacgagcccagggcgccctcctatggggtttacaacgcctccattggatcctgtgctgcagaacccactacccagccaacttgtcttctccggcttaaagaccgtgcagccagtaccccctttttatcggtcactgcttacacccggagaaatggtgtccccaccaacgtctcttccaacatcaccaataatcccgacatcagggaccattgagcaacaccctccacctcccagcgagccagtggtaccggcagtgatgatggctactcacgagcctagcgccgacctggcacccaagaagaaaccacgcaagtcatctatgccagtgaaaattgaaaaagaaattattgataccgccgatgagttcgatgatgaggatgatgaccctaacgatgggggcgcggtcgtgaacgacatgagtcatgataatcattgtcattcgcaggaggagatgtctcccggcatgtctgtgaaggacttttctaaacacaaccgaaccagatgtattagcagaacggaaattcggagagctgacagtatgactagtgaagatcaggaaccagaacgagactatgagaatgaaagtgaaagtagtgagccgaaattaggcgaggagagtatggaaggggacgagcatattcactccgaagtttcagagaaggtactaatgaactcagaaaggcccgatgagaaccacagcgagccaagccaccaagatgtaatcaaagtgaaagaggagtttactgatcccacctacgacatgttctatatgtcgcagtatgggctgtacaatggaggaggcgcctccatggccgcactccacgagtcattcacatcttcactcaactacgggtcgccgcagaagttctctccagagggagatctctgttcctcccccgaccccaagatttgctacgtgtgcaaaaagagtttcaaaagttcctattcggtaaaattacactacagaaacgtccacttgaaggaaatgcacgtttgtactgtcgccggttgcaatgccgcatttccatctagacgcagcagggatagacactcagcgaacatcaatctccacaggaagctccttaccaaggagttggacgatatgggcctcgacagctctcagccttcgctctctaaggacctccgggacgagtttttggtgaaaatatacggggcgcagcaccccatgggcctggatgtgagggaagatgctagctccccagccggcactgaagactcccatctgaacggctatgggcgggggatggccgaggactatatggtgctggacctgagcactacatccagcttgcagtcatcaagtagcatacactcctcaagggagtccgacgctggcagcgatgaaggtatactactggacgatatcgatggcgctagtgattcaggagagagtgcccataaagccgaagcacccgcactcccgggtagcttaggtgccgaggtgagcgggagtctgatgttctcatcactttctggtagcaacggcggcataatgtgcaacatctgccataaaatgtatagcaacaaggggacgctgcgggtccactataaaaccgtgcatctccgggagatgcacaagtgtaaggtaccagggtgcaatatgatgttttcaagcgttcgatcacgaaaccgccattcacagaaccccaacctgcacaagaatatcccatttacatcagtcgactag

SEQ ID NO: 109437 - DNA, 984 bp, synthetic construct
  misc_feature 1..984: note = Description of Artificial Sequence: Synthetic coding sequence
  source 1..984: mol_type = other DNA
ccatcagaacccgtggtgcctgccgtgatgatggccacccacgagccttccgcagacctggctcccaaaaagaaaccccgaaaatcaagcatgcccgtgaaaattgagaaggagatcatagataccgctgacgaattcgacgacgaggatgatgaccccaatgacggaggagccgtcgttaacgatatgtcgcacgacaatcactgccacagccaggaggaaatgagccctggtatgtcagttaaggatttttctaaacacaaccgaacaagatgcatttcccgcaccgaaatccgccgggctgactctatgacctccgaggatcaagagcctgagcgagactatgagaacgagtccgaaagtagtgaaccaaaattaggagaagagtctatggaaggggacgaacatatacattcagaagtgtcagaaaaagtcctcatgaatagcgagcgacccgacgagaaccactccgagcccagccaccaggacgtgatcaaagtgaaagaggaatttactgatcccacgtatgatatgttctacatgtcccagtatggcctttataacggggggggcgcttctatggccgcactccacgaatctttcacaagtagcctgaattacgggagtccacagaagttctctccagagggtgacctgtgttcatctccggaccctaaaatttgctatgtctgtaagaaaagcttcaagagcagttattcggtaaaactgcattaccgcaatgtgcacctgaaggaaatgcacgtgtgcactgttgctggctgtaatgccgcgtttccttcaagacggagcagggaccgtaatagaaacctgagaatggaaagaacaatcggtcccggacacagagatagtttgcacctgcggaggggtaattctaaccgcccaggcacatgttgtttgcataccggggacagcctcgaggaaagcgtcattgtccgcattagttgtaagcggctcgagagctag

SEQ ID NO: 109438 - DNA, 2583 bp, synthetic construct
  misc_feature 1..2583: note = Description of Artificial Sequence: Synthetic coding sequence
  source 1..2583: mol_type = other DNA
tcggaggaggccgaggtagacgttagagagcgggaaactcagcgagatcgggaaccgaaaagagccagagatctgaccctgcgcgacagctgtaccgacaactctatgcaatttggaacaaggacaaccactgccgaaccagggttcatgggaacgtggcagaacgcagacactaaccttttgtttagaatgtcccagcaggccatcaggtgcacacttgtgaactgtacctgcgaatgtttccagccaggcaagattaacctgcgtacttgtgatcagtgcaagcatggttgggtggcccacgccctggacaagctgagcacacagcacctgtatcaccccactcaggtggaaatcgtgcagagcaacgttgtatttgatataagtagcttaatgctttatggcacacaggcggtaccagtgaggctgaagattctcctcgatcggttattctccgtactgaaacaggaagaagtgctgcacatcctgcatggtttgggttggaccctgcgggattatgtgcgcggatatattctccaagatgccgccggcaaggtgcttgatcgctgggccataatgtctcgggaggaagagatcattacactgcagcagttcttgcgctttggcgagactaagtccatagtcgagttgatggccatccaggagaaagagggtcaggccgtggctgttccttcaagcaagactgacagtgatatcaggacatttatcgagagcaacaacaggactcgcagcccttccctactcgcccacctggagaacagcaaccccagcagtatccaccactttgaaaatatcccaaattcgcttgcctttttactgccttttcaatacatcaaccctgtgagtgcaccactcctcggcttgcctccaaatggtctgctgcttgaacagccaggtctgagactcagggagccgtccctgtcgacacagaacgaatacaacgaatcaagtgagtccgaagtttcccctactccatataaaaacgaccaaacgcccaatagaaatgcgttaacttcaatcaccaatgtggaacctaagaccgaacccgcatgtgtgtctccaatccagaattccgcaccagtcagtgacctgacaaaaaccgagcatcccaaatccagctttcgaatccacaggatgcgcagaatggggtcagcctcgcgaaaaggccgggttttctgcaatgcttgcggaaagactttttacgacaaaggcacactaaagattcactataacgccgtacacttgaaaatcaaacaccggtgcacaattgaggggtgcaatatggtattttcatctctgcgtagcaggaataggcacagcgccaacccaaatccacgactgcatatgcccatgctacggaacaaccgcgataaggacctgattcgagcaaccagtggagcagcgactcctgtgattgcaagtactaagagcaaccttgccctgactagccccggacgaccaccaatgggcttcacaacccctccactggacccagtgctgcaaaaccccctacccagtcagctggtctttagcggacttaaaacagtccaaccagtgccccccttctacaggagtctgctcacacctggcgaaatggtgagtcctcctacgtccctgccgacaagccccataatacccacttccggaaccattgagcagcacccacccccacctagtgagcccgtggtgcctgcagttatgatggccacgcatgaacccagcgcagacctcgcccctaagaaaaagcctcgcaagtccagcatgccagtgaagattgagaaagaaatcatcgataccgcagatgagtttgatgatgaagatgacgatcccaacgatggcggtgccgtggtcaacgatatgtctcatgacaaccattgccacagtcaggaagagatgagccccgggatgtctgtgaaagactttagcaagcataatagaaccagatgcattagtcggacagagattcgtcgagctgatagcatgacctcggaggatcaggagcccgaacgggactatgaaaacgagtcagaaagtagtgaacctaagctgggtgaggagtctatggagggcgatgagcacattcactctgaagtctccgaaaaggtgctcatgaactccgagcgcccggatgaaaatcacagcgagccgtcgcaccaagacgtcatcaaagtgaaggaagagttcaccgatccaacatacgacatgttctacatgtctcaatatggtttgtataatggaggaggggcctcaatggccgcactacatgagagctttacatcctccctgaactacgggagcccacagaagttctcgcccgagggagacctgtgcagcagcccggacccaaagatttgttatgtgtgtaagaagtcatttaagtctagttacagcgtcaaactgcactaccggaatgtccacctgaaagaaatgcatgtctgcactgtggccggatgcaatgctgctttcccgagcagaaggagccgggaccgtaatagaaatctgaggatggaaagaactatcgggccaggccacagggactcactgcatctcctgccaacctag

SEQ ID NO: 109439 - DNA, 1206 bp, synthetic construct
  misc_feature 1..1206: note = Description of Artificial Sequence: Synthetic coding sequence
  source 1..1206: mol_type = other DNA
atggcacatttgggacctaccccacccccacactcgctgaattacaaaagcgaggatcgcctttcagagcaggattggcccgcatactttaaagtcccctgttgcggagttgataccagccagattgaatcagaggaagccgaggtagatgtacgggaaagagaaacccaaagagatagggagcccaagagagcacgagacctcaccctgagagactcctgtactgacaatagcatgcagttcggaacaagaacaaccactgcagagccaggattcatgggcacctggcaaaacgccgacacgaacctcttattccgcatgtcacagcaggtaccactcgcctgcaccggtagggtgctgggggcggatttctgccctaatctcgaggaaccataccataggttggaggtccaggcaatccgctgcacactagtgaattgcacttgtgaatgtttccaaccggggaagatcaacctgcgaacttgtgatcagtgtaagcatggctgggttgctcatgctctggacaaacttagcacacagcacctgtatcacccaacgcaggtggagatcgtgcagagcaatgttgtgtttgatatatcctcgctgatgctgtacggaacccaagctgtccccgtgagacttaagattctgcttgatagacttttttccgtactcaagcaggaagaagtactgcacattctgcatggcctgggttggacattgcgcgactatgtccgcggctacatcttacaggacgccgccggtaaagtgcttgaccgttgggccatcatgagcagagaggaagagatcattaccctgcagcagttcttacgctttggggagactaaaagtatcgttgagctcatggctattcaggagaaggaggggcaggcagttgctgttccttcctcgaagacagactccgatattaggacttttatagaaagcaataacagaaccagatcaccaagtctcctcgctcatttagagaactcaaacccgtcctccattcaccactttgaaaatattcctaactccctggctttcctcctgccattccaatacatcaacccagttagtgcaccgctcctcgggctgccacctaatggacttctcctcgagcagccgggactgcgtctgcgcgagccatcactctccacccagaatgagtataacgaatcctccgaatctgaggtgtcaccttag

SEQ ID NO: 109440 - DNA, 306 bp, synthetic construct
  misc_feature 1..306: note = Description of Artificial Sequence: Synthetic coding sequence
  source 1..306: mol_type = other DNA
atgtgtagacttcttgttcctctggcctgcaccggccgagtgctcggcgccgacttctgtccgaatcttgaagagccatatcatagattagaggtccaggctatcagatgtacactagtcaattgtacctgtgagtgtttccagcccggaaagatcaatctgaggacttgtgatcagtgcaagcacggctgggtcgcccacgcgttagataagctgtctacccagcacctttatcatcccacacaggtagagatcgtacagagtaatgtcgtttttgacatcagttcgctgatgttgtacggctag

SEQ ID NO: 109441 - DNA, 1233 bp, synthetic construct
  misc_feature 1..1233: note = Description of Artificial Sequence: Synthetic coding sequence
  source 1..1233: mol_type = other DNA
atggctcatctcgggcctaccccacctccacactctctcaattataagtccgaagatagactatcagaacaggattggcctgcttactttaaggtcccatgctgtggggtggacaccagccagatcgaatcggaagaggctgaggtggacgtgagagagcgtgaaacgcagcgggatcgagaaccgaaaagagcacgagacctgacactgcgtgatagctgcactgacaatagtatgcagtttggcacacggacgaccacagcagaaccgggcttcatgggcacttggcaaaatgctgacaccaacctcttgtttcggatgagccagcaggccggcttgaagctcctaacaagtggagacccacctgtgctggatttccagtccgccggcattactggcgtgtctcactgcacacgcctgaaagtggcaatgatatccaaggcgatccgttgcacccttgtaaactgcacatgtgagtgcttccaacccggaaagattaacctacgtacttgtgaccagtgtaaacacggctgggttgcccatgctctcgataagttgagcacgcagcacttgtaccatccaacccaggtcgaaatcgtgcaaagcaacgtggtctttgatattagctcccttatgctgtacggaactcaggcggtgccagtccggctgaaaattctgctcgaccgcctatttagcgttctgaagcaggaggaggtcttacatattctacatggtctggggtggaccctaagggactacgtcaggggttatattctgcaagacgcagcgggcaaagttctggaccgctgggccattatgtcacgcgaagaagagataataaccctgcaacagtttctgagattcggagaaaccaaatctatcgttgagctgatggccattcaggaaaaggagggacaggctgtggctgtaccctcttccaagactgacagcgacattcggactttcatcgagtcaaataaccgcacaagatccccctctctactcgctcacttggagaacagtaatcccagcagcattcaccatttcgagaacatacctaactccctggcatttctcctacccttccagtacattaatcctgtctccgccccactgctgggcctccctcccaatggactgctcttagagcaacccgggctgaggctacgtgaaccctccctgtctacccagaatgagtacaacgaaagcagtgagagcgaggtatcaccatag

SEQ ID NO: 109442 - DNA, 2712 bp, synthetic construct
  misc_feature 1..2712: note = Description of Artificial Sequence: Synthetic coding sequence
  source 1..2712: mol_type = other DNA
atggcccatctcggccccacccctccccctcattctctgaactacaaatccgaagaccgtctatcagagcaggattggcctgcctactttaaggtgccatgctgcggagttgatacctctcaaatagagtccgaggaagcagaagtggacgtgcgcgagcgcgaaacacaaagggaccgcgagcccaagcgggctcgcgacttaacccttcgcgatagctgcacggacaattccatgcaattcggcaccaggaccaccaccgctgagcctggatttatgggaacttggcagaacgcggacaccaatctactctttcgtatgtctcagcaggctattaggtgcacgctggtgaactgcacttgcgagtgttttcaacccgggaagattaacttgagaacttgtgatcaatgtaagcacgggtgggtggctcatgccctcgataagttgtcaacacagcacctttaccatcctacccaagtggaaatcgtgcagtcaaatgtggttttcgatatctcttcactgatgctctatgggacacaggcagtccccgtgagactgaagattttgttagacaggctgttctctgtactcaaacaggaggaagtacttcatatattgcacgggctcgggtggactctgcgggattatgtgcgcggctacattctgcaggacgcggccggcaaggtcctggatcgctgggccatcatgagtcgtgaggaagagatcattacccttcagcagtttttgaggttcggcgagactaagagcattgtcgagcttatggccattcaggagaaagaggggcaggctgtggctgttccaagcagcaaaaccgatagtgacatcaggacgtttatagagtccaataataggacacgaagcccaagtctattggctcatctcgaaaacagtaatccctctagtattcaccatttcgagaacattccgaacagcctcgcttttctgctgcctttccagtacattaatcctgtgtcagcccccctcctcggtttgccccctaatggcctgctactggagcagccaggactgcgcctgagggaacccagtttatcaacccagaatgagtataacgaatcatctgagagtgaggtgagtccaactccctacaagaatgatcagactcctaataggaacgctctgaccagcatcactaatgttgagccaaagactgagccagcatgcgtcagtccaatccagaacagcgcccctgtgagcgatctcacaaagaccgaacaccctaaatcgtcattccgcatccacagaatgagacgcatggggagcgcgtcccgcaagggacgagtattctgtaacgcatgtggaaagaccttttatgacaaggggacccttaaaattcactacaacgcggttcacctgaaaatcaagcaccgctgcactattgaggggtgcaacatggtgttttcttcactcaggtcaaggaatagacacagtgctaatcctaaccccagattacatatgcctatgctgcgtaacaaccgcgacaaggacctgattcgagctacgagtggtgcggctactccagtgattgcatcaactaagtctaacctcgctctcaccagtccaggcaggccaccaatggggttcaccacccctcccctggatcccgttctgcaaaacccacttccttcccagctggtttttagtggtttgaaaacagttcagcctgtcccacccttttataggtccttactgactcccggcgaaatggtttcccccccaacaagtctcccgaccagccccatcatccctacttccgggaccattgaacaacacccccctcctccctccgaacctgtggtcccagcagtcatgatggctacacatgagccttcagcagacctcgcccccaagaagaagccgcggaaaagttcgatgcctgtgaagatcgagaaagagatcattgacacagccgacgaattcgatgatgaagatgacgaccctaatgacggaggcgccgtggtgaacgatatgagtcatgacaaccactgtcattcacaggaggaaatgtcccctggcatgagcgttaaagacttctctaagcacaataggacccgttgtatctctcggaccgagatcagaagggctgactccatgacatcggaggatcaggagcccgagcgcgattacgaaaatgaaagtgagtcttcagagcccaagctgggcgaagagtcaatggaaggtgatgaacatatccacagcgaagtcagcgagaaagtcttgatgaacagtgaacgaccagacgagaatcactcagaaccctcccaccaagatgtcataaaggttaaagaggagttcaccgacccaacatacgacatgttttacatgtcacagtacggactgtataatggaggaggagctagtatggcagctctgcacgagtcgtttacatcctccctgaattacggaagtccacaaaaattttcaccagagggagacttatgttcatcgccggaccctaagatttgctacgtttgtaagaagagcttcaagtcatcctacagcgtcaagctgcattaccgaaatgtccacctcaaggagatgcacgtgtgcaccgtcgctggatgcaatgccgcctttcctagtaggaggagcagggaccggtactgggagaaaagtaatgaacagaacggccttcttgtgagctggggtgaaaccctgagctccctcaaatag

SEQ ID NO: 109443 - DNA, 2712 bp, synthetic construct
  misc_feature 1..2712: note = Description of Artificial Sequence: Synthetic coding sequence
  source 1..2712: mol_type = other DNA
atggcccatctgggacccactccccccccacactctctgaactacaagagtgaggatcgccttagcgagcaggactggcccgcttacttcaaggtcccctgctgcggtgtggatacctcgcaaattgagagtgaggaggccgaagtagacgtaagagaacgagagactcagcgcgatagagaaccgaagcgtgccagggatctcaccttaagggatagttgcactgacaatagtatgcaattcggaactcgaaccacaactgccgaaccggggttcatggggacatggcagaacgcggacaccaaccttctgttcaggatgagccaacaggccatccgatgtaccctcgtgaattgcacttgtgagtgctttcagcctgggaagataaatctcaggacctgcgaccaatgtaagcatggttgggtggcccacgcgctggataaactctcaacacagcacctctaccacccaactcaggtcgagatcgtgcagtccaacgtcgtatttgatattagctccttgatgctgtacgggactcaggctgtgcccgtacggttgaagatattactggatcggctgttcagcgtccttaaacaggaggaggtgctgcacatcctgcatggcctgggctggactttaagggactatgtccgggggtacattctgcaggacgccgccggaaaggtcctggacagatgggcaataatgagtcgcgaggaagaaattataacactgcagcaatttctgcgtttcggggagacaaaaagtattgtggagctcatggcaatccaggagaaagaaggacaggccgttgctgtcccctcgtcaaaaacagacagcgatataagaaccttcatcgagtctaataaccggactcgctcgccaagtctcctggcacacctggaaaattcgaacccgtccagcatccaccacttcgaaaacatcccgaattccctcgccttcctgctcccctttcaatacatcaatcctgttagcgccccgctcttaggcctgccacccaacgggcttctactggaacagccgggactgaggctgcgagagcctagccttagtacccaaaacgagtataacgagtcatccgagtcagaggtctccccaactccttataaaaatgaccagacacctaaccgcaacgctctcaccagcattaccaacgtggagcccaaaacagagcctgcttgtgtgtcccccatccagaactcggctccagttagtgatctgaccaagacagaacaccctaagagttccttccggatccaccggatgcgtcggatggggtcagcctcaaggaaggggagggtgttctgtaatgcctgtgggaaaaccttttacgacaaaggaacattgaagatacactacaatgcagtgcacttgaaaataaagcatcggtgtaccatcgaagggtgcaatatggttttctccagtctaagatcaagaaaccgacactccgcaaacccaaatccccgcctgcacatgcctatgctgcgcaacaacagggataaggatttgatccgcgccacctctggcgctgccacaccagtgatagctagcacaaagtctaatctcgcactgacctcgccaggcagacctccaatgggctttaccactcccccacttgatccggttcttcagaatcccctgccgagccagctggtttttagcggactcaaaaccgtgcagccagtgcctcccttttatcggtccctgctcactcccggggagatggtgagcccacccacgagcttgccgacctctcctattatccccacctctggcaccatcgaacagcaccctccccctccctccgaaccagttgtgccagctgtcatgatggccacccacgagccttctgccgatctggcacctaaaaaaaagccacgcaagagctccatgcctgtgaaaatcgaaaaagaaatcattgataccgcagatgagtttgatgatgaggatgacgatcccaatgatggcggcgctgtggttaatgacatgagtcatgacaaccactgccactcacaggaggaaatgagtcctggcatgtccgtgaaagactttagcaagcacaatcgtaccagatgtatctcccgcactgagattagacgcgcagattccatgacgagcgaagaccaggagcctgagagagactacgaaaatgaaagcgagtcctcggaaccaaagctaggagaagagtctatggaaggagacgagcacatccacagtgaagtgtccgaaaaagttctaatgaacagcgagcgacccgatgaaaatcatagcgagcctagccatcaggacgttatcaaggttaaagaggaattcaccgaccccacctacgatatgttctacatgtctcagtatggcctgtacaacgggggcggtgcctctatggcagcacttcacgaatcctttacaagctcactgaactacggtagtcctcaaaagtttagcccagagggcgacctatgcagcagtcccgacccaaaaatctgttatgtgtgcaagaaatcattcaaatcatcttactccgtcaaactccactatcggaatgtacatttgaaagaaatgcacgtgtgcaccgtggccggatgtaatgccgcatttccctcacgacgaagccgggacaggaaccgaaatctgcggatggagcggactataggcccggggcatagggattctttacacctgcgaagcacctag

SEQ ID NO: 109444 - DNA, 1950 bp, synthetic construct
  misc_feature 1..1950: note = Description of Artificial Sequence: Synthetic coding sequence
  source 1..1950: mol_type = other DNA
atgctctacggcactcaggccgtcccagttcgcttaaaaattctccttgacagacttttctctgtcctcaaacaagaggaagtgctgcacatccttcacggcctcggatggactcttagggactacgtccgaggatatattttacaggatgctgccgggaaagtgcttgatcgctgggctattatgagtagagaggaggagatcatcaccctgcagcaattcctacgatttggcgaaaccaagtctatagtggaattaatggccatacaggagaaggagggccaggcggttgccgtgccatccagcaagaccgatagcgacatccgcacatttatagagagcaacaatcgcacccggagccccagcctgctagctcacctcgagaatagcaatcccagcagcatccaccactttgagaatattcctaacagccttgcatttctgcttccctttcagtatattaatcccgtcagtgcccccctcctcggtctcccccccaatggcctgctcctggaacaaccaggtctgaggctccgcgaaccatctctgtccacccagaatgaatataacgagagcagcgaatctgaggtgagccccactccgtacaagaatgaccagacccctaatcgaaacgccctcacaagcatcacaaacgtcgaacccaaaaccgaaccagcctgtgtttcgccgatacaaaactcagcacccgtatccgatttgacaaaaactgagcacccaaaatcatcttttcggattcatcgcatgcgaaggatgggatctgcgtcgaggaaagggagagtattttgtaatgcatgcggtaaaactttttatgataagggcaccctgaagatccactataatgcggtgcacctgaaaataaaacatcggtgtacaatcgaaggatgtaacatggtcttctccagccttagatcacgtaacagacacagcgctaatcccaatccgcggctgcatatgcctatgcttaggaataacagagataaagaccttataagagccacttcgggggcagccactcctgtgatcgctagcacaaaatcgaacttggcccttacctcgcccggccggccccctatgggctttacaacacccccgctcgaccccgtgctgcaaaatccacttccaagtcaactggtgttttccggccttaagactgtgcagcccgtgccgccattttataggtccttgctgacacccggggagatggtcagccctcccacttccctccccacatcccctatcattccaacttccggaacgatcgagcaacatccaccacccccaagtgagcccgtagtccctgcggttatgatggccactcacgaacctagcgccgatctggccccaaaaaagaaaccccgcaagagctcaatgccggttaagatcgagaaggaaatcattgataccgccgacgagttcgatgatgaggatgatgatcccaatgacggaggggcagtcgtcaatgacatgtcacacgataaccattgccactcacaggaggaaatgtctccaggcatgtctgttaaggatttctcaaagcataatagaactcgctgcatttcacgaacagaaatccggcgcgctgattctatgaccagcgaagaccaagagcccgaaagggattatgaaaatgagtctgagtctagcgagcccaaattgggagaggagagcatggagggtgacgaacacatacactctgaagtcagtgagaaggtcctcatgaatagcgaacgcccggacgagaaccactccgaaccaagtcatcaagatgtcatcaaggttaaggaagagttcaccgatcctacctatgacatgttctacatgtcccagtacggcctatataacgggggtggagcatctatggccgctttgcatgagtcatttaccagctctctgaattatggctccccacaagttctacccagaagatag

SEQ ID NO: 109445 - DNA, 3015 bp, synthetic construct
  misc_feature 1..3015: note = Description of Artificial Sequence: Synthetic coding sequence
  source 1..3015: mol_type = other DNA
atgaccgacgatgtgaaggagccctcaagattctccctgctactcgcgattcgatgcacattagtgaactgcacatgtgagtgtttccagccgggcaagattaatctaaggacatgtgatcagtgcaagcacggctgggtcgctcacgcactcgacaagttgtctacccagcacctgtatcatcccacccaggtcgaaatagtgcagtcaaatgttgtgtttgatatcagtagtcttatgctttatggaacacaggccgtgcccgtgcgtctcaaaatcttgctggataggttgtttagtgttctcaaacaggaagaggtgctccacatactccacgggctgggatggaccctccgcgactatgtcaggggctatatcctgcaggacgccgcaggcaaggtgctcgatcggtgggctattatgagccgcgaagaagaaatcattactctgcagcagtttttaagattcggagaaactaagtctattgtggagctcatggcaattcaggagaaggagggtcaggcggtcgccgtgccctccagcaagaccgattcagatattcggacgtttatcgagagcaataatagaacacggagcccaagcttgctggcgcaccttgagaacagtaacccttcctccattcatcacttcgaaaatattcctaactccctggcctttctgctccccttccagtacataaatccagtgtccgcaccactgcttggccttcccccaaacgggctgctgttagaacaacctggcctgagattgagggaaccgtctctgagcactcagaatgagtataacgagtcatccgaatcagaagtttcacccacgccctacaaaaatgaccagactcccaaccgaaatgcgttgacaagcattaccaacgtcgagcccaaaactgagccagcctgtgttagcccaatccagaattcggcaccagtgagtgacctgacgaaaacagagcacccaaagagcagctttagaatccaccgtatgcggcgaatgggtagtgcctccagaaaaggaagagtgttctgtaatgcctgtgggaaaaccttttatgataagggcaccctgaaaatccattacaacgctgtgcacctgaagataaagcatagatgcacaatcgaaggatgcaatatggtgttttcctcactgcggagccgcaacaggcacagcgccaaccctaacccccggttacacatgcccatgttacgcaacaatcgggataaagaccttatccgagctacctccggcgcagccactccggtaatcgcttctaccaagtcaaatcttgccctgacctcacccgggaggcccccgatgggcttcacaacacccccactggatcccgtactgcagaaccccctgccaagccagctcgtgttttcggggctgaagacggtgcaaccagtgcctccattctaccgcagcctattgacgcccggcgaaatggtatcccctcctacttccctccccacatctcccatcattcccacatcgggaactattgagcagcaccccccaccaccatcagagccggtggtgcccgctgtgatgatggctacccacgagcccagcgccgatctcgcacccaaaaaaaagcccagaaagagctctatgccagtcaagattgagaaggagataattgacacagcggacgaatttgacgatgaagacgacgatcccaacgatggaggagctgtggtaaatgacatgtcccacgataaccattgccattcacaggaggaaatgtcgcctggcatgagtgtgaaggatttctcaaaacacaacagaactcgctgtatctcacgcaccgagatccgacgggccgattctatgacttcagaagatcaggagcccgagagggattacgaaaatgagagcgagtcttccgaacccaagcttggagaggaatccatggagggcgatgagcatatccacagtgaggttagtgaaaaagtcttgatgaattccgaaaggcctgacgagaatcacagtgaaccaagccatcaagacgtgatcaaggtgaaggaagaatttactgacccaacatacgacatgttttacatgtcccagtatggcctttataatgggggcggagctagcatggccgcactgcacgaatcatttacttcctcactaaactacggcagccctcagaagttcagtcctgagggggacctgtgctctagtcccgacccgaagatttgttacgtctgtaagaagagttttaaatcctcctatagcgtgaaattacattatagaaatgtgcatctgaaggagatgcacgtctgtaccgtggcaggctgtaatgcagccttcccgtcccgccgctctcgcgacaggcactccgcgaacatcaacctgcaccggaaactacttacaaaagaattagacgacatggggctggactcttcacagccctcactgagtaaagacctgagggacgagtttctcgtgaaaatttatggcgcccagcaccctatgggcctagacgtgcgagaagacgctagcagtccagctggtacagaagacagccacctcaacggatatggacgcggcatggccgaagactatatggtgttggatctttccacgacttcatccctgcagagctcctcaagtatccattcgtcaagagagagtgatgcgggcagcgatgaggggattctgctggacgacatcgacggagcctccgatagtggagaatctgcccacaaggctgaagcacctgccctacccgggtcactgggcgccgaggtgagtggaagtttgatgttctcctctctctccggctcaaacgggggaataatgtgcaacatctgtcacaagatgtatagcaacaaagggacactcagggtgcattacaagacggtccacctgcgcgagatgcacaagtgtaaagtccctgggtgcaatatgatgtttagcagcgtccggtctcggaacaggcattcccagaatccaaacttacacaaaaatattccctttacaagtgtggactag

SEQ ID NO: 109446 - DNA, 11781 bp, synthetic construct
  misc_feature 1..11781: note = Description of Artificial Sequence: Synthetic coding sequence
  source 1..11781: mol_type = other DNA
atggggaacgaggtgagcctggaggggggggctggagacggaccattgcccccgggtggcgctggcccagggcccggaccgggacctggacctggggccgggaaacccccatcagctcccgcaggcggagggcagctgcccgcggcaggggccgctaggagtaccgctgtcccgccagtgcctgggcccgggcccgggcctgggcctgggcctggccccggtagtacctcacgtagacttgatcccaaagaacctctcgggaaccagcgagccgcctcgcccacccctaagcaggcctccgcgacgaccccggggcatgagtcccctcgagagactcgggcacagggccctgcaggtcaggaggcggacggccctaggcgcacgctgcaggttgattcaaggactcagcgctccggccggtccccctccgtctccccggaccgggggtcaacccctacctcaccatatagtgtcccccagatcgcacctctcccctccagtacactgtgccccatttgcaaaaccagcgatctgacaagcaccccatcgcagccaaacttcaatacatgcactcagtgccataacaaggtgtgcaatcaatgtgggtttaaccccaacccccacctgacccaagtgaaggagtggctctgtttaaactgccagatgcagagagctctgggaatggacatgaccaccgcacctcgtagtaaatcccaacagcagctgcattccccagcactgtcacccgcacattcacccgctaagcaaccactggggaagccggaccaggaacgcagtaggggccctggggggccacagccaggtagccggcaagccgaaactgctagagcgacatcagtaccaggacctgcccaggcggctgcccctcctgaagttggtcgggtaagcccccaacctcctcaacctacgaaaccatctacagccgagcctaggccccctgccggagaagctcctgcaaagtctgccaccgcagtccctgccggtctcggtgctacagaacaaactcaggagggattgacaggaaagttatttggactgggggccagcctcctgacccaggcaagcacattgatgagtgtgcaacctgaggccgacactcagggtcagcccgcaccttccaaaggcactccaaagatcgtattcaacgatgccagcaaggaggctgggcccaagcccctaggatccggcccgggccccgggcccgcccctggcgccaagaccgaaccaggcgctcggatgggccccggttctggaccaggggcgctccccaaaacgggtggtactacaagtcctaaacacgggagggccgagcatcaggcggcttccaaggcagccgctaagcctaaaacaatgccaaaagagcgggcgatctgccccctgtgccaggccgagctcaatgtcggctctaagagtcctgccaattacaacacttgtacaacctgtcgccttcaggtctgtaacctgtgcggctttaaccccacgcctcatctggtcgaaaagaccgagtggctctgcctgaactgtcagaccaaacgactgttggagggatcactcggcgagccaacaccgttgccgccccccaccagccagcagcccccggtcggagcccctcatagagcatctgggacctcccctcttaagcagaagggcccacaggggctcggccagccttcaggtcccctacctgccaaggcaagtcctctgtcgacaaaggctagtccactgccctcgaaggcgtccccccaggctaagcctctgagggcgtcagaacccagcaaaaccccatcctcagtgcaggaaaaaaaaaccagggttccgactaaggctgagccgatgccgaagccgccccccgagactacccctactcctgccactcctaaggttaagtccggtgttcgccgggccgagcctgcaacccccgtggtcaaagccgttcccgaagcccctaagggcggagaagcagaggacctagtaggtaaaccctacagtcaagacgcatccaggagcccacagagcctcagcgacactggatattcctctgacggcattagctcatctcagtctgagattacaggagttgtgcagcaagaagtcgagcagctggacagcgcaggagtgacagggcctcacccaccatcacccagtgagatccacaaagtaggctcttctatgcggcctctgctgcaggcccaaggattggcgccttccgagcggagcaagcccttatcttccggaacgggtgaggagcagaagcagcgtccccattcattatcaattacgcccgaggcctttgactctgacgaagagttggaagatatactcgaggaagacgaggattctgctgagtggcgcaggcgtagagagcagcaagacacagctgaatctagtgatgatttcggctcccagctcaggcatgattatgtagaagacagtagcgaaggaggcttaagcccgctccctccacaaccccccgctcgggcagcagaattaacggacgaagatttcatgagaagacagattttagaaatgtccgccgaggaagacaacctggaagaggatgacaccgccacctccgggcggggcctggctaaacacggcacccagaaaggagggccaaggccccgccccgaaccttcacaagaacccgctgcactgccaaagcgtaggcttccccacaacgcaactacgggatatgaggaactgctaccagaagggggctctgccgaggccacggacggaagcgggacattgcagggtggactgcgccggtttaaaactattgagttgaactctaccgggagctatggtcacgaactagacctcggacagggccctgatccatctctggatcgggagcctgagctggagatggagagcctgacggggtcgcccgaagatcgatcgcggggcgagcattcgagcaccctgcccgcctccacaccttcatacacaagtggcacctcacccacatcactgtcaagcctcgaggaggactcggatagctctccctctaggagacaaaggctcgaagaggctaagcagcagagaaaggcacgccataggtctcatggccccttgctacctacaatcgaggattcgagcgaggaggaggagttgagggaggaggaggagcttttgcgggaacaggagaaaatgagggaggtggaacagcagaggattagatcgactgctaggaagacaagaagggacaaggaggaattgcgcgctcagcggaggcgcgagcgaagtaagacccctccttcaaatttatcccctatagaggatgccagtccaactgaagagcttaggcaagcagcagaaatggaggaactgcatcgcagtagctgttctgagtactcccccagtccttcactcgatagcgaggccgaggccctggacggaggcccttctaggctatacaagtctggctccgaatataatctacccaccttcatgtcattatatagccccacggagaccccctccgggagctccacgacgccctcttccggtaggccgctaaagagcgcggaagaagcttatgaagagatgatgcgaaaagccgagttactgcaacggcagcagggccaagcggccggagcacggggcccccatggaggcccctcccaacccactggacctagaggtctcggaagttttgagtaccaggatacaaccgaccgagagtacggtcaagccgcccaacctgcggccgaggggacacctgcttctttaggcgctgccgtgtacgaggaaatcctgcagaccagccagtctatcgttcgtatgcgtcaagcttcgtcccgcgatctagccttcgcggaagataagaaaaaggaaaaacagttcttgaacgccgagagtgcttacatggatccaatgaagcagaacgggggccctctcactcctggaacttcacccactcagttagctgctcccgttagcttctctacccctacatcctctgatagctcgggtggacgcgtgataccagacgtcagggttactcaacatttcgctaaagagacacaggatccactaaagctgcattccagtccggcaagccctagcagcgcatctaaagagatcgggatgccattttctcagggaccgggaacgcctgcaacaactgccgtagctccctgtccagccgggcttcccagagggtacatgacgcctgcatcacccgccggctcagagagaagcccatctccatcaagtacggctcatagctacggtcactcccccacaactgcgaactacggtagccaaaccgaagatctcccacaggccccatctggccttgcagctgccggaagggcagctagagagaagccactttccgctagtgatggagagggaggcactccgcagccaagccgggcctacagctactttgcttcatctagtccacccctgtcaccaagcagcccaagtgagtccccgacattctccccaggcaaaatgggccctagggcgacggccgaattctccacccagacgccttcccccgccccagctagcgacatgccaaggtcccctggagccccaactccatctccaatggtggcacaggggacccagactcctcatcggccaagcaccccgaggctggtctggcaggagagctcacaggaggccccctttatggttatcaccctggctagtgatgcctcttctcaaacacggatggtgcacgcttctgctagcacctcaccactctgttcccctaccgagacacagcctacaacccacgggtattcccaaacgacaccacccagcgtcagccaactgccgccggagccccccggtccccctggtttcccccgtgtgcctagtgccggcgcagacgggccactggccctctatggatggggtgccctgccggccgaaaacatctcactttgccgcatatcttcggtgccaggtacctctagggtggaaccaggtccccgtactcctggcactgctgtcgttgatctgcggacagccgtgaagccgacacctattatcttgacagaccagggcatggacttaacatcactggcagttgaagcacgcaagtacggcctcgcactcgaccctattcccggacggcagtccaccgccgtgcagcctttggttattaatctgaacgcacaagagcatacatttctcgccacagccactacagtatctataaccatggcaagttccgttttcatggcgcagcagaagcagcccgttgtgtacggcgatccctaccagagtcgtctcgacttcggtcaggggggcggtagcccagtctgtttagctcaagtgaaacaagtagaacaggctgtgcagaccgctccatacaggagtgggccccggggccgtccgagggaggccaaattcgcccggtacaatttgcccaatcaagtagctcctcttgcacgccgagatgtgcttatcacccagatggggactgcccagagcatagggctgaagcccggaccagtgccagagccgggcgctgaacctcatcgcgcgacccctgccgaactcaggtcacacgcattaccaggggcaagaaaacctcatacagtcgtcgtccagatgggggaaggaacggcgggcactgtcaccactttgctgcccgaggagccggccggagccctggatctgacaggcatgcgcccagagagtcagctcgcctgctgcgacatggtttacaaactgccgttcgggtcaagctgcaccggaacattccatcccgctccaagcgtgccagaaaaaagcatggcagacgccgccccccctggacaatcctcctctcccttctatgggccccgcgacccagagccccccgagccccccacctacagggcccaaggcgttgttggcccgggcccgcacgaggagcaacgtccctatcctcaaggtcttcctggccgcctgtattctagtatgagcgacaccaatctcgctgaggctggtctgaattaccacgctcagcggatcggtcaactttttcagggccccggaagagattccgctatggacctcagctctctgaaacattcctactctctgggctttgcagacggcagatacctgggccagggtctgcagtatgggtcggtcactgacctgcgtcatcctaccgatcttctcgctcaccctttacccatgagaaggtatagttcggtcagcaacatttactccgaccaccgctatggacctcggggtgacgcggtcgggtttcaggaagcgtcattggcacaatatagtgctaccacagcccgggaaatatcccgcatgtgtgccgctctgaacagcatggatcagtacggggggagacacgggtccggggggggtggacctgacctggttcaataccagccccagcacgggcctgggctatcggctccccagtccctggtgcccctcagacccggccttcttggaaaccccaccttccctgagggccatccttctcccgggaatttggctcaatacgggccagccgcggggcagggcaccgccgtgaggcagctgctcccttctacagcaaccgtgcgcgccgcagacggcatgatatatagtaccatcaatacacccatagcagcaacactgcccatcaccacacagccagccagcgtgctacgccccatggtccggggcggaatgtataggccgtacgcctcaggcgggattaccgcagtgcccctgacaagcctgacgagagtgcctatgatcgcccctcgggtcccccttggcccaactggcctctaccgttacccagcaccttctcgttttccaattgcgagtagtgttccccccgcggagggaccagtgtaccttggtaagcctgccgctgcaaaagcccctggcgcaggtggtccgagcaggccggaaatgcccgttggagcagcgcgcgaagagcccctaccgaccactaccccggctgcaatcaaggaggctgccggcgcacccgccccagccccattagccggacagaaacctcccgccgatgcagcacctggcggcggctctggcgccctgagtcgcccagggttcgagaaggaggaggcttctcaggaagagagacagagaaagcagcaggagcaattgctgcaactagaacgcgaacgagtggagctggaaaagttgagacaactaagactccaggaggagctggagcgagagcgagtggagctgcagagacatcgtgaggaagaacagttactcgtgcagcgagagttgcaggagcttcaaaccatcaaacatcacgtgctacagcagcagcaggaagaaaggcaggcccagtttgccctgcagcgcgagcagttagcccaacagagactccagctggagcagattcagcagctgcagcagcagctgcagcaacagttggaggagcagaagcagcgacagaaggctccttttcccgctgcctgcgaagcacccggccgaggcccacccctggcagcagcagagctcgcccagaacgggcagtactggccaccgctcacacatgccgcgttcatagccatggcaggaccagaaggactgggacagcccagagaaccggtgcttcaccggggcctgccgagtagtgcatctgacatgagcctccagactgaagaacaatgggaagcctctagatccgggatcaagaagcggcactccatgcctcgtctgagagacgcgtgtgagcttgaaagcgggaccgagccgtgtgttgtcagaagaatcgccgactcttcggtgcagaccgacgacgaggacggagaatccagatacttgctctcgagaagaaggcgggcccgtaggtccgcagattgctctgtgcagacagatgacgaagattcggctgaatgggagcaaccagtgaggcggcggaggtcgcggcttccacgccatagcgattccggttccgattcaaagcacgacgcgactgcttcaagctcatcagcagctgctaccgtgcgcgctatgtcaagtgtgggcattcagaccatatccgactgtagtgtccagactgagcccgatcaactgccccgcgtgtcacccgcaattcacattaccgccgccacagatcccaaagttgagatcgttagatatatttctgctcccgagaagacaggccggggagaatctctcgcctgtcagacagaacctgacggacaggcccagggtgtcgctggcccccagcttgtggggcctaccgctatcagtccatatctgcccggcatccaaatcgttaccccaggccccttggggaggttcgagaaaaagaaaccagacccccttgagatcgggtaccaggcacatctgccaccggaatcgttgtcacagttggtgagtagacaaccacctaaatcccctcaggttttatatagtccagtgtcacccttgtctccgcaccgactgctagacacgtccttcgccagcagtgagcgattgaacaaggcccacgtaagtcctcagaagcatttcactgcagattccgcgttacgtcaacagactctgccaaggccaatgaaaacactgcagagatccctgagtgacccaaaaccactgtcaccaaccgctgaagaatccgcaaaggagaggtttagcctctatcagcaccagggcggactgggctcacaagtgagcgccctgcccccgaattcactggtccggaaggtgaagaggaccttgccatcacctccccctgaggaagcgcacctccctctggcaggccaggctagcccacagctatatgcagcgtccttgcttcaacgcggcctgaccggccctacaactgtgcctgccactaaagcctctctgctcagggagctcgacagagacctgaggttggtggagcatgagtccacaaaacttcggaaaaagcaagccgaactagatgaggaggagaaggaaattgatgctaaattaaagtacctggagctcggcatcacccagcggaaggaatctctcgcaaaagaccgcggtggcagggattaccctccgttacgcggattaggggagcatcgtgactacctgagtgacagcgagctcaatcagttgcgacttcaggggtgcacgacgcccgctgggcaatttgtggacttccccgcaactgcggcggccccggccaccccttctggacctaccgcattccaacagccccgctttcagccccctgcaccccagtattccgccggctccggaggacccactcagaatggctttcccgcacatcaggcacccacatacccaggaccgtctacctaccccgcccctgctttcccgcccggcgcctcttatcccgcggagcccgggctgccaaatcagcaggctttccgccccaccggacattatgccggccagacacccatgccgactacccaatcaaccttgtttcctgtacctgcagatagtcgtgctcctttgcagaagcctagacaaacaagtctggccgatcttgaacagaaagtgcctaccaactacgaggtcatagcatctccggtggtgcccatgagcagtgccccaagtgaaacatcctactccgggccagcggtgtcctctgggtacgagcaagggaaggtgcccgaggttcctcgcgcaggtgatcggggatctgtgtcgcaatctcctgcccccacctatcccagcgatagtcattatacctctctggagcagaacgtgccgcgcaattatgtgatgattgacgacatctctgagctcacgaaagactcaaccagtacagcacccgacagccaacgactggagcctctgggccccggttcctccgggaggcccggtaaagagccgggagagccaggagtgcttgatggccccactctgccttgctgctatgccaggggggaagaagagtccgaggaagacagttacgatccgcgcggcaaaggagggcacctcaggtctatggagtctaacggccggcccgcctctacccattattatggagattctgactatagacacggtgcacgggtcgaaaaatacgggcccggtccaatgggcccaaagcacccgagtaagtcccttgcgcccgcagccatttccagtaagcgttcaaagcaccggaagcaaggaatggagcagaaaatctcgaaattttcaccaatcgaagaggccaaggacgtcgaatctgatctggctagctatccaccaccagctgtgtcctcatctctggtatctagaggacggaaatttcaggacgagatcacatacgggcttaagaagaacgtctacgagcagcagaagtactacggcatgtcgagtagagacgccgtagaggatgacagaatctacggtggctcaagccgatcccgcgctcccagcgcctactccggagagaagctcagttctcatgatttctctgggtggggaaaggggtacgagcgggagagggaagccgtcgagagactccagaaagccgggcctaaaccatcgtcacttagtatggcacactcaagagtgcgtccaccgatgcggtcacaagcctccgaagaagagtcccctgtgtctcctcttggacgcccaaggccggctggtgggccgctcccccctggcggcgatacctgcccacaattttgctcaagtcactcgatgccggacgtccaagagcacgtgaaggatggacccagagctcacgcctacaagagagaagaggggtacatacttgacgacagccactgcgtggtgagcgacagcgaggcttaccacttaggacaagaagagaccgactggttcgataaaccacgtgacgcgcgcagcgatcgcttccggcaccatggtggtcatgctgtctccagctcatcacaaaagcgcgggccagctcggcactcttaccacgactatgatgaacctcctgaagagggtctgtggcctcacgacgagggaggcccaggacgacatgcttctgctaaggaacatcgccatggtgatcacggcagacattctggccgccataccggcgaggaacctgggcgccgggctgcgaaacctcatgcgagggatttagggagacacgaagctagaccacacagtcagccctccagtgcacccgctatgcctaagaagggacagccaggatatccatcgagcgccgagtactcccagccgagccgggcgtcaagcgcataccatcacgcaagtgattcaaagaaagggtcgcggcaggctcatagtggccctgcagcattgcagtccaaggcagagccccaagcgcagcctcaactccagggtcgacaggcagccccgggtccccagcagtcacagtcgccctcttccaggcagattccctctggggcagcgagtcgtcaaccacagacccagcaacaacagcagggcttgggattgcagcctccccagcaggccctgacccaggcaaggctacagcaacagtctcagcctactactcggggttctgccccagctgcttcacaaccagctggaaagccacaaccgggcccttcgactgccacagggcctcagcccgccggacctcctagggcggaacagactaatggctccaagggcaccgctaaggccccacagcaaggccgggccccccaggctcagcctgccccaggtccgggccctgctggggtgaaggccggggccaggccaggcggcacacccggtgcccctgcaggccagcctggcgctgatggtgagtccgtttttagcaaaattcttccagggggtgcagccgagcaggcaggaaagctgacggaggctgtctccgccttcggaaaaaagtttagttcattctggtag

SEQ ID NO: 109447 - DNA, 702 bp, synthetic construct
  misc_feature 1..702: note = Description of Artificial Sequence: Synthetic coding sequence
  source 1..702: mol_type = other DNA
atggaacccactgcccccagcctcacagaagaggacttaaccgaagtcaagaaagacgcgcttgagaacctgagggtgtacttgtgcgaaaagattattgctgaaagacattttgaccaccttagagcaaagaagatcttgtccagggaggatacggaggagattagctgtcggacctctagcaggaagagggcaggtaagctgcttgactatctccaggaaaaccccaagggccttgacactctggtggaaagtatccggcgcgagaaaacacagaactttctgattcagaagatcaccgatgaagtgctcaaactgcgaaatatcaagctggaacacttaaagggcctgaagtgtagtagttgtgagcctttcccggatggtgccacaaataacctctctcgctctaatagtgatgaaagtaacttctctgagaaactgagggcatccaccgttatgtaccaccctgagggcgaatcttccactacccccttcttcagtacaaattcttccttaaacctgccagtcctggaagtgggtcgcacagagaatacaatctttagttccacaaccctgcccagaccaggtgatcctggtgccccacccctgcccccggacctgcaattagaagaagagggcacatgcgcaaatagttctgaaatgtttctacccctccgctcacgcacggtgtcccggcaatag

SEQ ID NO: 109448 - DNA, 702 bp, synthetic construct
  misc_feature 1..702: note = Description of Artificial Sequence: Synthetic coding sequence
  source 1..702: mol_type = other DNA
atggagcctacagccccctcacttaccgaagaggaccttaccgaggtgaaaaaggacgcacttgagaatctgcgggtgtatctatgtgaaaagatcattgctgagcggcacttcgaccaccttcgcgccaagaagatcctgtcccgggaggacacagaggaaatctcatgcagaacaagtagccgaaaacgggctggcaagctgctcgattacttacaagagaatcccaagggccttgacacactcgtggagtcaataaggcgcgaaaaaactcagaatttcctgatccagaaaattactgatgaagtgttaaagctgaggaatatcaagctggaacatctgaaggggctgaaatgctcctcttgcgagccgtttcccgatggtgctaccaataacctctcacgttctaactccgatgaatccaacttttccgaaaagctgcgggccagcaccgtgatgtaccatcctgagggggaatcaagcacaacgccctttttctccaccaacagttccctgaatcttccagtgctggaagtgggcaggacagaaaacactatattcagttcgaccaccctaccaagaccaggcgatccaggagctccgcccctccctccagacctgcagctggaagaggagggaacctgcgccaatagcagcgaaatgtttctccccctgagaagcaggacagtctcccgtcaatag

SEQ ID NO: 109449 - DNA, 471 bp, synthetic construct
  misc_feature 1..471: note = Description of Artificial Sequence: Synthetic coding sequence
  source 1..471: mol_type = other DNA
atggagcctaccgccccgtctcttacagaagaggacttaacagaagtgaagaaagatgcactggaaaatcttagagtgtacctgtgcgagaaaatcatagctgaacgccacttcgaccatctgagggcaaaaaaaatccttagcagagaggatacagaagaaatctcctgcagaaccagtagccgcaagcgagctggaaagttactggattatctgcaggagaatcctaaggggctggacactcttgttgaaagtatccggcgggagaagactcagaatttccttattcagaagattaccgatgaagtcctcaagctgcggaatattaagctagagcatttaaaggatggtgcaaccaataatctgagcaggtctaattctgacgagtccaatttttcagagaaattacgggcctctactgtgatgtaccaccctgagggcgaatcctcaaccactccgttcttttactag

SEQ ID NO: 109450 - DNA, 2508 bp, synthetic construct
  misc_feature 1..2508: note = Description of Artificial Sequence: Synthetic coding sequence
  source 1..2508: mol_type = other DNA
atgtcgagacggaagcagggtaaaccacagcacctctctaagcgcgagttttcccctgaaccgcttgaagccatactgactgatgacgagcctgatcacggacccctgggcgcccctgaaggggaccatgatctcttaacctgtgggcaatgtcagatgaatttccctctgggtgacatccttatattcatcgaacacaaaaggaagcagtgcaatggctcactgtgtctggagaaggcagtggataagccgccctcaccatctccaatcgagatgaaaaaggcctcaaaccctgtggaggtaggcatccaggtcactcccgaggacgacgactgtctcagtacaagctcccgtgggatctgtcctaagcaggaacacatcgccgataagctgctgcactggcggggcttgagctcccctcgaagtgcccatggagctctcatccccactcctggcatgtccgccgagtatgctccgcaaggtatctgtaaagatgagccctccagctacacttgcacgacctgcaaacagccctttacctccgcatggtttctcctgcaacatgcacagaacacccacggactgaggatttacctggaatcggaacacggcagccctttaacacccagggtcggtattcctagtgggcttggagcggaatgcccttcgcaaccccctttgcatggcatccatattgcagataacaacccatttaacttgctccgaatcccgggctcagtttcccgcgaggcgagcgggctggccgaaggacgattccctcccacccctccattattcagcccacccccacgacatcatctggacccacatagaattgagagactaggcgctgaggagatggccctagctacgcatcacccatccgctttcgaccgtgtgctgcggctcaatcccatggcaatggagcctccagctatggatttttcacgtcgcttacgggagctggctggaaatacttctagtccacctctctctccaggtaggccatcaccaatgcagaggctattacaacccttccagcccggctcgaaacctccctttctggccacccccccacttcctcccttgcaatctgccccacctccatcacagccccctgtaaagagcaaaagttgcgagttctgcggtaaaacgttcaagttccaatccaatctagtggtgcaccgcaggtcacatactggcgagaagccctataaatgtaatctctgtgaccatgcatgcacccaggccagcaaacttaaaaggcatatgaaaacccatatgcataagtcgagtcctatgacagttaaaagcgatgacggcctatccactgctagtagcccggaacccggaacatccgacctcgtggggagcgccagctccgcattgaaaagtgtagtggcaaaatttaagtctgagaacgaccctaacctcatcccggaaaatggagacgaagaggaggaagaggacgacgaagaggaggaagaggaagaggaggaggaggaagaggagctcactgagagcgaacgcgtggactatggtttcggcctgtcacttgaagctgcccggcatcacgaaaattcaagcaggggtgcagtcgttggagttggcgacgaatccagggccttgcccgatgtgatgcagggtatggttctctctagcatgcaacacttcagcgaggctttccaccaagtgctgggcgagaagcacaaacgcggccacctggcagaagccgagggccatcgggacacctgcgatgaagattcagtggctggagaatcagaccgcatcgatgacgggacagtaaacggcaggggttgtagccctggcgagtccgcgagcggcggactgtccaaaaagttgcttcttggtagcccgagttcgctttcgcctttctccaagagaattaaattggagaaggagtttgatctcccccccgctgccatgccaaacactgagaatgtctatagtcagtggctcgccgggtatgctgcgagtcggcaactgaaagacccctttctttccttcggcgactctcgacaaagtccgttcgccagctcttcagaacactctagcgagaatggatctttgaggtttagcacaccaccaggtgaactggacggtggtatctccggacgatcaggaaccggcagcggaggtagtactccacatatctccggcccaggaccaggaagaccctcatcaaaggagggccgccgttctgacacgtgcgagtactgtggaaaggtctttaagaactgttctaacctgacggtccaccgtcggagccatacaggagagaggccctacaagtgtgagttgtgcaattatgcatgcgcgcaaagctctaagcttacacgccatatgaaaacgcatgggcaagtgggaaaggatgtctataagtgcgagatatgcaagatgcccttcagcgtgtactctaccctcgaaaagcacatgaagaaatggcactctgatcgggtgctcaataatgatatcaagacagagtag

SEQ ID NO: 109451 - DNA, 2322 bp, synthetic construct
  misc_feature 1..2322: note = Description of Artificial Sequence: Synthetic coding sequence
  source 1..2322: mol_type = other DNA
atgtctaggcgtaagcaaggcaaaccccagcacctctccaagcgggagttctcaccagagcctctcgaagccattttgaccgacgacgagccagaccatggccccctgggcgctcctgaaggagaccacgacttactcacctgcggacagtgtcagatgaatttccctttgggtgacattttaatttttatcgagcacaagagaaagcagtgtaatggatccctgtgccttgagaaagccgtggacaagcccccgagcccttccccaatcgagatgaagaaagcctctaatccagtagaggtgggtatccaagtaacaccagaagacgacgattgcttgtcgacctcgtccagaggaatctgccctaagcaagaacacatcgcagataaactcctccactggagagggctttcatctcctaggagtgctcacggggctctgatccctacccccggcatgtcggcagagtacgccccccagggtatctgtaaggacgaacctagctcttatacctgtacaacgtgcaagcaaccttttacaagcgcatggttcctactgcaacatgctcagaacacacatgggttgcgcatctacctggagtcagagcatggaagcccgctgacaccccgggttggaataccctccggactgggtgccgaatgcccatctcagcctccgctacatggaatccacatagcagacaataacccatttaatctgcttcgcatacctgggtcagtgtcacgtgaggcctcaggcctggcagaagggcgctttccgccaactccacccttgttcagcccgccaccccggcatcatctggacccgcaccgaattgagcgactgggcgccgaagagatggccctcgccacacaccatccctctgcttttgaccgggtgttacgtttgaaccctatggctatggagccaccagccatggatttttctcgccggctaagggagctggctggtaacacttctagcccccctctttcccccggcaggcctagtcccatgcagaggctgctccagcccttccagccgggcagcaaaccgccgttcctggccactccccctttgcctcccctgcagtcagcccccccaccttctcagccccccgtcaaaagcaaatcatgcgagttttgcggtaagacctttaagtttcagagcaacttggtggttcaccgccggtcccacacaggcgagaaaccgtacaagtgtaacttgtgtgaccatgcttgcacacaggcatccaaactcaaacgccacatgaagacacatatgcacaaaagctctcctatgactgtcaaatcagatgacgggctctccaccgctagcagccccgagcccggcacgagcgaccttgtgggatccgcctcaagtgccttgaaaagcgttgttgccaagtttaagagcgagaacgaccccaacctcattcctgagaatggggacgaggaggaagaggaggacgacgaagaggaggaagaggaggaagaggaggaggaagaggagctgaccgagtctgagagggtggattatgggttcgggctgagccttgaagcagcacgccaccacgagaatagttctaggggcgccgtagtcggcgtcggcgacgagtctcgagccctccccgatgtgatgcagggcatggtcctgagcagtatgcagcacttctccgaggcttttcatcaggtgctgggcgaaaagcacaagcgagggcacctagcagaagcagagggtcaccgggatacatgtgacgaagatagtgtggcaggggaaagcgaccgcattgatgatggtacggtgaacggccgcggatgtagtcccggggagagcgccagcggcggcctgtccaaaaagctgctcttaggatccccaagcagcctgtctcctttctcaaaaagaattaagctggagaaggagtttgacctgccccctgccgccatgcccaataccgaaaatgtttacagccagtggctggcggggtacgcagcctcacgccagctaaaggatccgttcctgagtttcggtgattctcgacagtctccatttgcatcttcttcagaacacagttccgaaaacggctcgctcagattctccacccctcctggcgagctcgacggcggaatctctggcaggagcggtaccggaagcgggggttccacccctcatatctcgggaccaggacccgggcgcccaagcagtaaagaaggtcgaagaagtgatacctgctccagccatactcctattcgccgcagcacccagcgggcacaggatgtgtggcagttctctgatgggtccagccgcgctttgaagttctag

SEQ ID NO: 109452 - DNA, 2406 bp, synthetic construct
  misc_feature 1..2406: note = Description of Artificial Sequence: Synthetic coding sequence
  source 1..2406: mol_type = other DNA
atgtcccgaaggaaacaggggaagccccaacacctgtctaagagagagttctctcctgaaccgctggaggcgatccttaccgacgacgagcctgaccacgggcctctgggggccccggagggtgaccacgatctgctaacttgtggccagtgtcagatgaactttccactgggggacattttgatctttatcgaacataagcgcaagcagtgtaatgggtccttgtgccttgagaaagccgtggataaacccccttcaccatcccctattgagatgaagaaggcatccaatccagtggaggttgggatccaggtaacgcccgaagacgacgactgtctttccacttcaagtcggggtatatgtcctaagcaggaacacatagccgggaaagacgaaccatcatcttatacctgtaccacgtgtaaacagccgttcacttctgcctggtttctgttgcagcacgctcagaacacacacggattacgaatctatttggaaagtgagcacggatcacctttaacgccccgagtcggcatcccgtctgggctgggcgcagaatgtccctcccagccccctctgcacggaattcacatcgccgacaacaatcctttcaacctgttgcggatccccggaagtgtttctagagaggcaagcggcctagccgaggggagattccccccaaccccaccgctgtttagccccccccctcggcaccacctcgatccgcatcgaattgagcgactgggcgctgaagagatggctctggctacgcaccacccctcagctttcgaccgcgttctgcggctcaaccccatggccatggaacctcccgcgatggacttttccagaaggctgcgcgaactcgcgggaaatactagctccccaccgttgagccctgggcgcccaagccccatgcagcgtctcttacagccttttcagcccggcagcaaacctcccttcctggctacccccccactgccgcctcttcagagtgcaccaccccccagccagcctcccgtgaagagcaagagttgtgagttctgcggtaagacattcaaattccagtccaacctagtcgtgcaccggaggtcccacacaggggagaagccttataaatgtaatctgtgtgaccacgcatgtacccaggctagcaaacttaagcgccacatgaaaacacacatgcacaagtcttcccctatgaccgttaaaagcgacgacgggctctcaacagcttcttctccggagcccggaacatccgacttagtgggctcagcgtccagtgctttgaaatctgtggtggctaagttcaagagcgagaacgaccccaatttaatcccagaaaacggtgacgaggaggaggaggaggatgatgaggaagaagaggaagaggaagaggaggaagaggaggagctcacagaaagcgagagagtggactacggatttggcctttcgctcgaggccgctcggcaccatgagaattcttcacggggtgccgtggtgggagttggtgacgagtcccgcgcgttgcctgatgtgatgcagggcatggtcctgtcctcaatgcagcacttctctgaggcctttcatcaggttctgggtgagaaacataagcggggccatttggcggaagccgagggacatagggacacctgcgacgaggactcggtggcaggggagagtgatagaattgatgatgggaccgtgaacggccgcggctgttcacccggggagtccgcctccggaggactaagcaaaaagctccttctgggatctccatcttctctctccccattctcaaaacggattaaactggagaaagagttcgatttgcccccggctgcaatgcctaacaccgagaacgtatacagccagtggcttgctggctacgctgcttcacggcagttgaaagacccattcctctctttcggcgatagccgacagtctccattcgcttcctccagcgaacactctagcgaaaacggttcattgcgattcagtactccgcccggcgagctcgatggaggtatctccggccggagtggcacgggatctggaggttccactcctcatatatctggtccaggccctgggagaccatcatcaaaggaaggtagaagatctgatacttgcgagtactgtggcaaggtctttaagaattgttctaacctgacggttcatcgcaggagccataccggtgagcggccttataaatgcgagctgtgcaattatgcttgtgcccagagcagcaagttgacaagacacatgaagacacatggacaggtaggaaaggatgtgtacaagtgtgagatatgcaagatgcccttttcggtctattctacgcttgagaaacacatgaagaaatggcactctgatagggtcctgaataatgatataaagacagagtag

SEQ ID NO: 109453 - DNA, 732 bp, synthetic construct
  misc_feature 1..732: note = Description of Artificial Sequence: Synthetic coding sequence
  source 1..732: mol_type = other DNA
atgtcaagacggaagcaggggaagccacagcatctctccaagagagagttcagcccagagccacttgaagcaattctgactgatgatgaacccgatcatgggcccctcggagccccagagggtgaccatgatctattgacatgcggacagtgtcagatgaatttcccactgggagacatactaatcttcattgaacacaagaggaagcaatgtaatggtagcctctgtctggaaaaagccgtcgacaaacctccgagcccatctccaattgagatgaaaaaggcttccaaccccgttgaagtgggaatccaagtcactccagaagatgacgattgcctgtcaacttcatcccggggcatatgtccaaaacaggagcacatagctgacaaactcctccattggcggggactgagctcccctagatcagcccatggtgcactcattcccacacccggtatgtcggccgaatatgccccgcaggggatctgcaaagatgagccgtcctcctacacttgcacaacctgtaagcagcctttcacatctgcatggttcctgttgcagcacgcacagaacacgcatggcctcagaatctacctcgaatcagaacacgggtctccgttaactcccagagtgttgcacacgcccccatttggggtggtcccccgcgagctgaaaatgtgtggctccttccggatggaagcaagggaaccgttatcgagtgagaagatctag

SEQ ID NO: 109454 - DNA, 2397 bp, synthetic construct
  misc_feature 1..2397: note = Description of Artificial Sequence: Synthetic coding sequence
  source 1..2397: mol_type = other DNA
atgtcgaagggcaccgatgaagatattttctccggggtgtcattctttctgaccagactgtctaggtgcgaaccttctcggcggccgccaccagccccccaacctactatgtcaagaaggaaacaagggaaaccccaacacctttctaaaagggagtttagtcccgaaccccttgaagccattctgaccgacgacgagcccgatcatggccccttaggagcaccagaaggtgaccatgatttacttacatgtgggcagtgccagatgaatttcccactcggcgatatcctgatctttatagagcacaagcggaaacagtgcaatggctccctgtgccttgaaaaagccgtcgacaagccaccgtcaccctctcccatcgagatgaagaaggcctccaatcccgtggaagtagggatccaagtgacacccgaagacgatgactgcctgtccacatcgtctcggggcatttgtcccaagcaggaacatatcgccgacaagctgctacactggcggggtctcagctcccctaggtctgcccatggagcccttatcccgacccccgggatgtcagcagagtacgccccccagggcatatgcaaggacgaaccttcctcttacacttgcaccacatgtaagcagcccttcacctctgcgtggttcctccttcagcacgctcagaacacccatgggctgcgtatatatttggagtctgaacacggctcacctttgactccgagagtggggatcccgagcggcttgggggctgaatgtccaagccaaccccctctgcatggaattcacattgcagacaacaacccattcaaccttctgagaattcctggttctgtatcacgggaggcctccggcctcgccgagggtcgattccctccaacaccaccacttttctcaccaccacctcggcatcacctcgatccccacaggattgagagacttggggctgaggagatggccttagccacccaccatccttcagcctttgacagagtcctgagattaaaccccatggctatggagccaccagccatggacttttcgcggagattacgagagcttgccggaaacacatcctccccgccgctttctcccggaaggccaagtccaatgcagcggttactgcaaccctttcaacccggatcaaagcctcccttccttgccactccaccactacctccactccaaagcgctccccctccaagtcagcccccagtcaagtcaaagagctgcgagttttgtggaaaaacattcaaatttcagtctaacttagtggtgcaccgaagaagtcataccggggagaaaccctataagtgtaacctttgcgaccacgcctgcacacaggcttctaaactaaaaaggcatatgaaaacgcacatgcacaagtcttcgccaatgaccgtgaagtcagatgatggtttaagcaccgctagttccccagagccaggtacatcggacctggtggggagcgcctcctccgccctcaagtcagtggttgcaaagtttaaaagtgagaatgatcccaatctgatccccgaaaatggcgatgaggaggaggaagaagacgatgaggaagaggaagaggaagaagaggaagaggaggaggaactgacagagtcagagagagtggactatggatttggtctatccctcgaggccgtagtgggtgtaggtgatgagagtagagctctgcccgatgtcatgcaaggaatggtgttatcatctatgcagcacttcagtgaagcatttcaccaggtgctgggggagaaacacaagaggggacacctggccgaggcagagggacatagagatacttgcgacgaggacagcgtggccggagagtctgaccgcatcgatgacggtaccgtcaatggcagaggctgttcgcctggggagagcgcaagcggcgggctcagcaagaagctacttttagggtccccttcatcgctaagtcccttctccaaaaggatcaagctagagaaggagtttgatttaccaccagccgccatgccaaacaccgagaatgtgtacagtcagtggctagccggctacgcagcgagtcgacagctgaaggatccctttctgtccttcggcgatagccgtcagtcccctttcgcgagcagcagcgagcatagctctgaaaacggatctctgcggtttagcactcctcccggcgaactggacggtggcatttccgggcgatctggcaccggatccgggggctccactccacacatatccggaccagggccaggacggccatctagcaaagaaggcaggagatccgatacctgttcctcccacaccccaatccggaggagtacacaacgggcgcaggacgtgtggcagttttcggatggcagttctcgggccctgaagttctag

SEQ ID NO: 109455 - DNA, 1329 bp, synthetic construct
  misc_feature 1..1329: note = Description of Artificial Sequence: Synthetic coding sequence
  source 1..1329: mol_type = other DNA
atgtcagcagagtacgcccctcaaggtatttgcaaagacgagcctagtagttatacctgcacaacgtgcaagcagcctttcaccagcgcatggttcctgctgcagcacgcccaaaatacacatggattgagaatttacctcgagtcggaacacggatccccgctgacacctcgatccaacctcgtcgtccataggagaagccatactggtgagaagccttacaagtgcaatttatgcgatcacgcctgtactcaagcctctaaactcaagagacatatgaagacacacatgcataagagttcaccgatgactgtgaagagcgatgacggactgtccacagctagctctccagagcccggtacatccgatctggtcggctcggcgtcgagcgctctgaagtccgtggtggccaaattcaagtctgaaaacgatcctaatctgatccctgagaacggcgacgaggaagaggaagaggatgacgaagaggaggaagaggaagaagaagaggaggaagaggaattgaccgaatctgagagagtggactacggattcggactctccctggaggctgcgcgacatcacgagaactcctccagaggcgccgttgtgggagtaggtgatgagagcagagccctgcccgatgtgatgcagggtatggtgctttccagtatgcagcacttttctgaggccttccaccaggtgctgggggaaaagcacaaacgcgggcatctcgccgaggctgaaggccatagagacacatgtgatgaagattccgtggccggtgaaagtgacagaatcgacgacggaacagtaaatggtcggggatgcagtccaggagagtcagccagcggcggcctttcaaagaagctgttgttgggcagcccgagtagtctatcaccatttagcaagaggattaaattagagaaggaatttgacttaccccccgctgcaatgccaaatacagagaatgtgtactcccaatggctcgctgggtacgctgcctcgcggcagctgaaggacccattcctttcattcggcgactccaggcagtctcccttcgccagttcaagtgaacacagtagtgaaaatggttccttgcgtttttccactccccccggcgaactggacggaggtatttctggccggagtggtacaggaagcggcggaagcactccacatatatcaggaccaggtcctggcaggccctcttccaaggaaggacgtaggagcgatacctgctcatcacatacccccatccgccgttccacccagcgagctcaggatgtatggcagttcagcgatggatcatcccgggcactgaagttctag

SEQ ID NO: 109456 - DNA, 2382 bp, synthetic construct
  misc_feature 1..2382: note = Description of Artificial Sequence: Synthetic coding sequence
  source 1..2382: mol_type = other DNA
atgagcaggaggaagcagggcaagccgcaacaccttagcaaacgcgagttttctccagagccactggaggctattctgaccgatgacgagccggaccatggacccctgggtgctccagagggggatcatgaccttctcacatgcggacagtgccagatgaacttccccctgggcgatatcctgatcttcatcgaacacaagaggaaacagtgcaacgggtccctgtgcttggagaaagctgtcgataagcctcccagtccatctccaattgaaatgaaaaaggccagcaacccagtcgaggtcgggatccaggtgacccccgaagacgatgattgtctgtccacaagctcacggggaatctgtccaaagcaggagcacattgccggtaaagacgaaccctcttcctacacttgtacgacatgcaaacaacctttcacttcagcttggttccttcttcagcatgcacaaaatacccacggcctcagaatctatctggagtctgagcacggatctccccttaccccacgggtggggattccgtccggtttgggggctgagtgtcctagtcagccgccattgcatggaattcacatcgccgacaataaccccttcaatctgctacgcatccccggctcagtgtccagggaggccagtggtcttgccgagggcaggtttccaccaactccacctctgttctcccctcccccacggcaccacttagatcctcaccggatcgaacggctcggcgccgaagagatggcgctcgcaactcaccacccttcagccttcgatagggtgctgcgcctcaatcccatggctatggaaccccccgccatggacttctccagacggctccgtgagctggctggtaatacctcttcccctccactcagcccaggtcgcccaagtcccatgcagcggcttctccagccctttcaacccgggtccaaacctccctttctggcgaccccacctctgcctcccctccaaagcgcaccgcctccatcgcagcctccagtgaagtctaagagttgcgagttctgtggtaaaaccttcaaatttcagtccaatctcgtggtgcacagaagatctcatacaggcgagaaaccctacaagtgtaatttgtgtgaccacgcttgcactcaggcaagcaagctgaaacgacacatgaaaactcatatgcataagagctctccaatgactgttaagagcgacgatggtctgtccactgcatcctctcccgaaccaggaacttcagatctagtgggatcagcctcctccgcgctaaagtctgttgtggcaaaattcaaatcagagaacgatccaaatctcatccctgagaatggggacgaagaggaagaggaggacgacgaagaagaggaggaggaggaagaagaagaagaggaagagctaacagaaagtgagcgggtggattatgggtttggactatccctggaggccgccaggcatcatgaaaattcatcaagaggcgcggttgtgggagtcggcgacgaatcccgggcactgcccgacgttatgcaagggatggtgctatcatctatgcaacacttttctgaggctttccaccaggtcctcggagaaaaacacaaacgcgggcacctcgccgaggctgagggccaccgggacacatgtgatgaggactccgtggctggcgaaagtgaccgcattgatgatgggacggtgaatggccgcgggtgcagtcctggggaaagtgccagtggcggtttgagcaagaaactactactgggcagcccctcatcactgtcgcctttctctaagcgcataaagcttgagaaagaattcgatctgccaccagccgctatgccaaacactgagaatgtttattctcagtggcttgccgggtacgccgcatcacgtcagctgaaagaccctttcctttccttcggagattcccgccagagcccatttgccagttccagcgagcattcttccgagaacggtagcttaagattctctacacctcccggtgaactggacgggggcatcagcgggcggagtggcacaggttcaggtggttcaacaccccacatatctggacctggccccggccgcccgtcatccaaagaggggcggcgcagcgacacctgcgagtattgcggcaaggtgttcaaaaactgctcaaacctgacagtgcaccggcgctcacacaccggggagcgaccttataagtgcgaactgtgcaactatgcttgcgcacagtcctcaaagctgacgcgtcacatgaaaacccacggccaggtgttacatacaccaccttttggagttgttccaagagagttgaaaatgtgtgggtcctttaggatggaggccagggaacctcttagcagcgagaagatttag

SEQ ID NO: 109457 - DNA, 2472 bp, synthetic construct
  misc_feature 1..2472: note = Description of Artificial Sequence: Synthetic coding sequence
  source 1..2472: mol_type = other DNA
atgtctcgtcgcaaacagggtaacccccaacacctatcacaacgggaactcattacccctgaggcggatcatgtagaggcagccatcctggaagaggacgaagggctggagatcgaggaacccagcggtttggggctgatggtaggtgggcccgaccccgatctcctgacatgtgggcaatgccagatgaactttccgctcggggacattctggtatttatcgaacacaaaaggaaacagtgtggaggctccctcggcgcctgttatgataaagcgttagataaggattcaccgccaccttcctcccgctccgagttaagaaaggtgtcagagcctgtggagatcggcattcaggtgactcctgacgaagacgatcaccttctgtcccctacgaagggaatatgtcctaaacaggaaaatatcgccggcaaagatgagccctcgtcatatatttgtaccacgtgcaagcagcccttcaactcggcttggtttctccttcagcacgcccaaaatacacacggctttcgtatttatctggaacccggtccagcttccagttctttgacacccagactcaccattccgccccccttagggcctgaggctgttgcccagagtccgctgatgaattttttgggtgactcgaacccgtttaatctgttacgcatgacaggcccaattctgcgcgatcaccctggttttggcgagggccgcctgcccgggacaccccccctattcagcccacctccgcgtcatcacctggatcctcataggctttcagccgaggaaatgggcctcgtcgctcaacacccctccgcttttgatcgtgttatgcgcctcaatcccatggccatcgacagtccagcaatggattttagcagaagactccgggaactcgccgggaattcctccactccaccgccggtgagtcccgggaggggcaatcccatgcatcggctgctcaatcctttccagccaagcccaaagagtcctttcctctcaacgcctcctttgccccccatgccaccgggcggcaccccacccccacagcctcccgcaaagagtaagagctgcgaattttgtggtaaaaccttcaaattccagtcaaatctgatcgtgcataggcggtcacatactggggaaaagccctataagtgtcagctgtgcgatcacgcatgcagtcaggcttccaaattaaaacgacatatgaaaacgcacatgcacaaggccggatccctggccgggcggtctgacgatggattaagcgcagcgagtagtccagagccaggcactagcgagctcgccggagagggcctgaaagccgcagatggcgatttccgtcaccacgaatcagacccaagccttggccacgaacctgaagaggaggatgaggaggaggaagaagaagaagaagaattgctactggaaaacgagagtaggcccgagagctctttctctatggactcagagctgtccagaaacagagagaacgggggcggaggcgtccccggcgtgccgggggcgggcggcggggcggccaaagcgctcgccgatgaaaaggctctcgtcctggggaaggtgatggagaacgtgggattgggcgcgttaccacagtatggagagctgcttgctgacaagcagaaaaggggtgcttttctgaaacgagctgctgggggcggggatgctggggatgatgatgatgccggcggatgcggggacgcgggggctggtggtgcagtgaatggcagaggcggaggtttcgccccgggcactgagccattccccggcctgtttccccggaagcccgcgcctttgccctccccggggctcaactctgcggctaaaaggatcaaagttgagaaagacctggaactgccgcccgccgcacttatccctagcgaaaatgtgtattcccaatggctggtgggatatgccgcatcgcggcatttcatgaaggatccttttctgggtttcacagacgcccgccagtctcccttcgccactagtagcgagcattctagtgaaaacggctctctccggttttccactcccccgggcgatctcctggatggcggactgtcaggtcggagcgggactgcctccggcggctcgaccccccacctgggtggcccaggcccaggcaggccgtccagtaaagaaggcaggaggtctgacacttgcgaatattgcgggaaagtttttaaaaattgcagtaatttgactgttcatcggcgatctcacaccggtgaacgtccatataaatgcgagctgtgcaactacgcgtgcgctcagagctccaagctaaccagacatatgaaaactcacggccagattggaaaggaggtgtatagatgtgacatttgccagatgccattcagtgtgtactcaactttggagaaacacatgaaaaaatggcatggcgagcacttactgacaaacgacgttaagattgaacaggccgagagaagttag

SEQ ID NO: 109458 - DNA, 2685 bp, synthetic construct
  misc_feature 1..2685: note = Description of Artificial Sequence: Synthetic coding sequence
  source 1..2685: mol_type = other DNA
atgagccgaagaaaacaggggaatccccagcacctgtcacagagagagcttattactcccgaggctgaccacgtcgaggcagccatactggaagaagacgagggattagaaatcgaggagccctctggactgggcctgatggtgggcggccctgaccctgatctgctgacttgcggacagtgccagatgaatttccctctgggggatattctcgtgtttatcgaacataagaggaagcagtgtgggggaagtctgggagcttgttatgacaaagcgttggacaaagactcaccgccacccagcagtcgctccgagttgcgaaaggtgtccgagccggtggaaatcggaatccaggtcacacctgacgaagacgaccacctgctttctcccaccaagggaatctgtccaaaacaagaaaacatagccgggccatgtcgcccagcccagctgcctgccgtcgcaccaatagcggcaagttcccaccctcattcctcagttattaccagtccactgcgagccctcggcgcactgcccccatgcttgcccctaccatgctgcagcgcgaggcccgtctccggagacggaactcagggcgaaggacagactgaagccccttttgggtgtcagtgtcaactttccggaaaagacgagcccagctcctatatttgcaccacttgtaagcagccctttaactccgcctggtttctgctgcagcacgcgcagaacacccacggatttcggatctacctggagccgggccccgcaagcagctccctgaccccacgactgaccatccctcctcccctcgggcccgaagctgttgcacagtctcctctgatgaatttcctgggggatagcaaccctttcaatctgttgcgcatgacagggccgatcctgagggatcatcccggatttggcgaaggaaggctgccaggaaccccgcccttattttcccccccacctaggcatcacctggacccacacaggctgtccgccgaggaaatgggacttgtggcccagcatccttctgctttcgacagagttatgcgccttaaccccatggcaatagacagccccgctatggacttctctagaaggctcagggagctggcaggaaattctagcactccaccgccagtgagtcccggaaggggcaaccccatgcacagactcttaaacccctttcagccatcacctaagagcccatttctctccacgcctccattacccccaatgcctcctggcgggactcctccaccccagcctcccgccaaatcgaagtcttgtgagttctgcggaaagacattcaagttccagtcaaatctgatcgttcaccgcagatctcacacaggagaaaagccatataagtgtcagctttgtgatcacgcatgttcccaggctagtaagctgaagcgccatatgaagacacacatgcacaaggcaggcagcctggccggtagaagcgatgacggcctgtctgctgcctcctcaccagaaccagggacatccgagctggcaggtgaaggactgaaagccgccgatggggatttccggcatcacgagtccgatccatcactggggcacgagcccgaggaggaagatgaggaagaggaagaggaggaagaagagctgctgctagaaaatgaatctcggccagaatctagtttttccatggattccgaactgagtcgcaaccgggagaatggcggcggtggggttcccggcgttcccggcgccggaggcggtgcagctaaagcactggccgatgagaaagctttggtacttgggaaggtgatggaaaacgtaggcttgggggcgcttccccaatatggtgaacttctggccgacaagcaaaagcgcggcgcattcctcaaacgggctgctggtggaggcgacgccggcgatgatgacgatgctggaggatgcggcgacgcgggtgcgggaggggcggtgaacgggcggggagggggctttgcgcccgggaccgagccgtttccaggcctgtttccacgcaaacctgcccccctcccgtcacccggactgaactctgcggctaaaaggattaaggtggaaaaggacctggaactcccgcccgccgcccttatcccatctgagaacgtgtattcacagtggttggttgggtacgccgcatccaggcatttcatgaaggacccattcttaggctttacagatgctcggcagtccccatttgctacttcctccgagcacagctctgagaatggaagtctgcgcttttcgacgccacccggtgatctcctggacggcgggctgtccggacgttcaggtaccgcgagtggggggagtacacctcatttaggagggcccggtcccgggcgcccgtcctcaaaggagggaaggagaagtgacacttgtgaatattgcggaaaggttttcaagaactgttcaaaccttacagtccatcggaggtcccataccggcgaaagaccttacaaatgtgaactgtgtaactacgcctgtgcccagtcctccaagctgactagacacatgaaaactcacggccaaataggcaaggaagtgtaccgctgtgacatttgtcagatgcctttttccgtttatagcacgctcgaaaaacacatgaagaagtggcacggcgaacacctactgaccaatgatgtgaaaatcgaacaggcagagcgctcctag

SEQ ID NO: 109459 - DNA, 1365 bp, synthetic construct
  misc_feature 1..1365: note = Description of Artificial Sequence: Synthetic coding sequence
  source 1..1365: mol_type = other DNA
atgcctcgttgtccagccggagctatggacgaggggccggtggatcttagaactagacctaaagccgccggcttgccgggtgccgcactgccactaagaaaaagaccacttcgcgcgccctctccagaacctgccgcccctcggggcgctgctggattggtggtacctctggatcccttaaggggcggctgtgatttgcctgcagttcctggccccccacatggccttgcccgccccgaggccctgtactaccctggagctttgctccctctgtatccaaccagggccatgggctccccctttccattagtcaacctgccaacccccctttatcctatgatgtgtcccatggagcatcccctgagcgccgacatagcgatggcaacgcgggcagatgaagacggcgacactcctctgcacattgcagtggtgcaaggaaatttgcccgcggttcaccgcctagttaaccttttccaacagggcggacgcgagctggacatctataataatctaaggcagaccccgctgcatcttgccgtgattacgacccttcccagtgttgtgagactgttggtcacagcaggtgccagccccatggccctggacagacatggccagacagccgcccacttggcatgcgagcacagaagtcctacttgtctccgggccctgcttgattccgctgcacccggcaccttggatctggaggcgcgcaattatgatgggctgacagccctacatgtggcagtcaatactgaatgccaagagacagtacaactcctccttgagcggggtgccgacatcgatgccgtggacattaaaagcgggcgatcaccattaattcatgccgtcgagaataattctctgagtatggtacagctcctcctccaacacggggcgaatgtgaatgctcagatgtactctggatcttccgcccttcactccgcatccggcagaggcctcctcccgctggttaggactctggtaaggtccggtgccgactcctctctcaagaactgtcataacgacacaccgctgatggtcgcccgctctagacgggtgattgatattttacggggtaaggccactagaccggctagtacatcccagcccgacccttcgcccgacagaagcgccaacacttcacccgaatcatctagtcggctttcgtccaacggcttactgtctgcatcgcccagcagttctccatcacagtcgcctcctcgggaccctcccggcttccccatggcaccgcctaatttttttctcccctctccgtctccgcccgcatttctgccatttgctggggtcttgaggggcccgggtcggcccgtgccaccatcccccgcacccggcggctcctag

SEQ ID NO: 109460 - DNA, 1071 bp, synthetic construct
  misc_feature 1..1071: note = Description of Artificial Sequence: Synthetic coding sequence
  source 1..1071: mol_type = other DNA
atggaagaggggagggagcggaaccgcagttggcctcctgccgagtgccagagcctgcccagggtgcgccttttcaccccaacaaaagaggagactgctcaacggggagaggtgtttggacaaggccatccggctagagccctactcccactataccccacccgggccatgggttcacctttcccactagtgaacctgccaacacctctttacccaatgatgtgtccaatggagcaccctctctccgctgatatcgccatggctacccgggcagatgaggacggtgatactcctttacacatcgccgtggtccagggaaatctgccagccgtccacagactggtaaatctgttccaacaggggggaagagagctggacatttacaataatctgaggcaaactcccttacacctcgcagtaattaccaccctgccctctgttgtgcgattgttggtgaccgccggcgcctccccaatggctctcgatagacacgggcagacagcggcgcaccttgcgtgtgaacacaggtccccaacatgtctgcgggcactgctggacagtgccgccccggggactctggatttggaagcccgaaattatgatgggctgaccgccctgcacgtggccgtcaatacagagtgccaggagacagtgcaacttttgcttgagagaggcgccgacatcgatgccgtggacataaagtctgggcgaagccccctaatccatgccgtagagaataatagcttgagtatggtgcaactgctgctgcaacatggcgccaatgtgaatgctcagatgtactctgggtcttcagcgctccatagcgcttccggcaggggcttgctcccactagtgcgtaccctggtgagaagcggggcagactcaagcttgaaaaactgtcataacgacacacccctgatggtggccaggtctcgcagagtgtctcgcggaagctgtggtcacgcgccctgtaccagagtgtccgcgggttggctgcaggctagtgtgcctgagcggagaggtgtgagggtgtctgtcccactccgtgggggcgagtgggtctctctgtag

SEQ ID NO: 109461 - DNA, 1440 bp, synthetic construct
  misc_feature 1..1440: note = Description of Artificial Sequence: Synthetic coding sequence
  source 1..1440: mol_type = other DNA
atgggcagccctgccgcgcccgagggcgctctggggtatgtgagagagtttacaagacactccagcgatgtgctgggcaatctcaatgaactacgcctgcgtgggatcttgactgacgtgaccctattggtgggtggccaacccctgcgtgcgcacaaagcagttctcatagcatgttccgggtttttctattcaattttccgagggagagcgggagtgggagtggacgtgctgtctttgccagggggccccgaagcgcgtggcttcgcacctctactagactttatgtataccagtagactcaggctatccccagcaacagcaccggccgtgttagcagcagctacatacctccaaatggaacacgtggtgcaagcctgtcacagattcatccaagccagctatgaacctctgggcattagcctacgccccctggaagctgaaccaccaacacctcccacggctccgcctcctggcagccctaggcggtcagagggccaccctgaccctcctaccgagtcacggtcatgcagccagggtccaccaagccccgctagcccagatcccaaggcgtgtaattggaagaaatataaatacatagttctgaattcccaggcaagccaggccgggtcattggtgggcgagaggagtagcggccagccatgccctcaggcaagattaccttccggagatgaggcatccagttcttcatccagctcctcaagcagcagcgaggagggcccaatccccggaccccagagtagactaagccccactgcagcaacagttcagttcaagtgcggagcacccgccagcactccctatttgcttacctctcaggcccaggacacatccggcagccccagtgaacgcgccaggccgttgccagggagtgaattcttcagctgccagaactgcgaggccgtggcaggatgctcaagcggtcttgactcccttgtgccgggtgacgaagataagccctacaagtgccaattgtgccggagttcctttcgttataaaggcaatctggcaagtcatagaactgtccatacgggggagaagccgtaccactgctccatttgtggagcccggtttaaccggcccgctaatctcaaaacgcattccagaattcactcaggagaaaaaccatacaaatgtgagacatgtggttctagatttgtacaagtggctcatctaagggctcacgtgctgatacatacaggagaaaagccctatccatgtccaacgtgtggcacccgtttccgtcatctgcagaccctgaagagtcacgtgaggattcacaccggcgaaaaaccctaccattgtgacccctgcggcctgcatttccgacacaaatctcaactccgcttgcatcttagacaaaaacacggagcagccaccaataccaaagtccactaccacattctgggtggcccatag

SEQ ID NO: 109462 - DNA, 129 bp, synthetic construct
  misc_feature 1..129: note = Description of Artificial Sequence: Synthetic coding sequence
  source 1..129: mol_type = other DNA
attcataccggtgaaaagccatatccctgccccacctgtggcacaaggtttcggcatttgcagacactgaaatcccacgtgcggatccacactggtgaaaagccatatcatgaaccagtgacttcctag

SEQ ID NO: 109463 - DNA, 633 bp, synthetic construct
  misc_feature 1..633: note = Description of Artificial Sequence: Synthetic coding sequence
  source 1..633: mol_type = other DNA
atgagcgggcgatctgtccgagccgaaacacggtcccgcgcaaaggacgacattaaaagagtcatggccgccattgaaaaggtgcgcaaatgggagaagaaatgggtcaccgtaggcgacacctcgctgagaatttacaagtgggtgccagtgaccgagcctaaggttgacgataagaacaagaataaaaagaaaggaaaggatgagaaatgtgggtccgaggtgactaccccagaaaattcctccagccccggcatgatggatatgcatgatgataatagcaaccaatcttctatcgctgatgcctcacctatcaagcaagaaaactcctctaactcttctccggcaccagagcccaattccgccgtccccagcgacggtactgaggctaaggtagacgaagcccaggccgatggaaaggagcaccccggggctgaggatgcctcagatgaacagaactcccagagctccatggaacatagcatgaacagtagtgagaaggtcgacagacagcccagcggcgatagtggcttagccgcagagacctctgccatttcccaggatctagagggcgtccccccctcgaaaaaaatgaagctggaggccagccagcaaaactctgaggagatgtag

SEQ ID NO: 109464 - DNA, 696 bp, synthetic construct
  misc_feature 1..696: note = Description of Artificial Sequence: Synthetic coding sequence
  source 1..696: mol_type = other DNA
atgagcgggagaagtgtgagggccgagacaaggtcaagggcgaaggacgacatcaagcgagtcatggccgctatcgaaaaagtgcgtaagtgggaaaaaaagtgggtgaccgtcggcgatacgtccttgaggatatataagtgggtgccagtgactgagccgaaagttgacgacaaaaataagaataagaaaaagggcaaagacgagaagtgtggaagtgaggtaaccaccccagagaactcgtcttcacctggaatgatggatatgcacgatgacaacagcaaccaaagtagcattgccgatgcctcgcccataaaacaggagaatagcagtaattccagccctgccccggaacctaacagtgctgtcccctcagacggcacagaggctaaggtcgatgaagctcaagcagatggaaaagaacaccccggagcagaagacgcttctgacgagcagaactcgcagtccagcatggaacacagcatgaatagcagtgaaaaggtggatagacagccctccggtgattcagggctcgccgccgagacaagcgcgatttcacaggtgccacggtctcgatcccagagagggtcccaaattggccgagaacctatcggcctgagtggcgacctggagggggttcctccctctaagaaaatgaagctggaggcgtcccagcagaactctgaagaaatgtag

SEQ ID NO: 109465 - DNA, 528 bp, synthetic construct
  misc_feature 1..528: note = Description of Artificial Sequence: Synthetic coding sequence
  source 1..528: mol_type = other DNA
atggccagtagaaaagcaggtacaaggggcaaagtggctgctactaagcaggcccagcgggggagcagtaatgtgttctccatgtttgagcaggctcagatccaagagtttaaagaggcttttagctgcatcgatcagaacagagacgggatcatctgcaaagccgacctgcgcgagacctacagtcagctgggcaaggtgagcgttcctgaggaagaactagatgccatgcttcaggagggtaagggtcctatcaactttactgtctttttaactctgtttggcgagaagctgaatgggactgatccggaggaagccattctttctgcttttcggatgtttgacccatccggtaaaggagttgtgaacaaagatgaattcaagcaactgctcctcacgcaggccgataagttcagtcccgctgaagtggaacaaatgttcgccctgacccctatggatctggcagggaacatcgattacaagagcttgtgttatatcatcacccacggcgacgaaaaggaggaatag

SEQ ID NO: 109466 - DNA, 438 bp, synthetic construct
  misc_feature 1..438: note = Description of Artificial Sequence: Synthetic coding sequence
  source 1..438: mol_type = other DNA
atgtccggcaggtctgttcgcgccgagactaggtctcgagccaaggacgatatcaaaaaggtgatggcagccatcgaaaaagtgcggaaatgggagaaaaagtgggttaccgtcggcgacacgtcactcagaatctttaaatgggtgcccgttactgactcaaaagagaaagaaaaatctaagtccaactctagtgcggctagggaaccaaacggcttcccatctgatgctagcgccaattcgtccctcctactagaatttcaggaaccgtcactgccctcgtcagaagtggcagacgaacctccaacgctgaccaaagaagagccagtgccactggagacacaagtggtggaggaggaagaagactccggggcaccacctctgaagagattttgtgtggatcagcctaccgtccctcagacagcctcagaatcatag

SEQ ID NO: 109467 - DNA, 867 bp, synthetic construct
  misc_feature 1..867: note = Description of Artificial Sequence: Synthetic coding sequence
  source 1..867: mol_type = other DNA
atgaaggatagaactcaggaattaaggagtgccaaggacagtgatgacgaggaagaggtggttcacgtggaccgcgaccactttatggacgagttctttgagcaggtggaagagattcgtggctgcatagagaaactcagtgaggatgtggagcaggtgaaaaaacagcatagtgctattttagctgccccgaaccccgacgagaagactaagcaggagctcgaggacctgaccgcagacatcaagaaaactgctaacaaagtgcggagcaaactcaaggcaatcgagcagagtattgagcaagaggagggtctgaaccgttcctcggcagatctgcgtattcggaagacacagcactcgacactttcccggaagttcgtcgaggtgatgaccgagtataatgccactcagagtaaatatcgtgatcgatgtaaagacagaatacagcgacagctagaaattactggaaggactaccaccaacgaggagctagaggacatgctcgagagcggaaaactcgccatattcacagacgatattaaaatggacagccaaatgactaagcaggccttgaacgaaatcgagacgcggcataatgagattatcaagctggagacgtccattcgggaactgcatgatatgttcgtcgatatggcgatgttagtcgagtctcagggcgaaatgatcgatcggatagagtacaacgtcgagcactctgtcgattatgtggagcgggccgtctccgataccaaaaaggccgtaaaataccaatccaaagcacgcagaaaaaaaattatgatcataatctgctgtgtcgtgcttggcgtggtgctagcctcatcaatcggagggaccctgggtctatag

SEQ ID NO: 109468 - DNA, 729 bp, synthetic construct
  misc_feature 1..729: note = Description of Artificial Sequence: Synthetic coding sequence
  source 1..729: mol_type = other DNA
atggcagggcggacggtaagagccgaaacacgcagccgcgctaaggatgatattaaaaaggtcatggccactatcgagaaagtacgcagatgggaaaagcggtgggtgacagtaggagacacttctctgcgcatctttaaatgggtgccagtcgtagaccctcaggaggaggaaaggcggagagcaggcgggggggctgaaagatccagaggtcgggagcgcaggggtcgcggagcctcaccaagaggagggggccccctcatccttctcgacctaaacgacgaaaacagtaatcagagcttccattcagaaggctcactccaaaagggaacggagccctcaccggggggtacaccccagcccagccgcccagttagcccggctgggccccccgagggagtgcctgaggaagctcagcctcctaggctgggccaagaacgcgaccccggtgggatcactgctgggagcactgatgagcccccaatgctgacaaaggaagaaccggttcccgagcttctggaggccgaggactcaggggtgaggatgacacgtagggccctccacgagaagggcctgaaaaccgagccattgcggcgcctactcccgaggagaggcctcaggaccaatgtccggcccagcagtatggctgtccccgacactcgcgccccaggtggcggatcaaaggcccctagggccccgaggaccattccccagggtaagggaagatag

SEQ ID NO: 109469 - DNA, 1680 bp, synthetic construct
  misc_feature 1..1680: note = Description of Artificial Sequence: Synthetic coding sequence
  source 1..1680: mol_type = other DNA
atgcattcgtttatacatgccgccatggggatggtcatggcttggtgcgccgccgtcatcactcagggccagtattcgtttttggtggtgccttgtactggcactaactccttcggatcgcctgcggcccaaacttgcctgaatgaataccacttgttcttcctcctgaccggggcattcatgggatatagttactcactgctctactttgtgaacaatatgaattatctgcctttccctattatccagcagtacaagttccttcgcttccgccggagcttgctgctccttgtcaaacatagctgtgtagagtcgctattcttagtacggaatttctgcatactttactactttcttggttatatcccgaaagcttggatcagcacagcgatgaatctccacatcgacgagcaggtacatcggcccctcgataccgtcagcggtctattgaatctttccttactctaccatgtctggctgtgcggagttttcctgctgacaacctggtacgttagctggatcttgttcaagatctatgcgacagaagcacatgtgttccccgtgcaaccgccattcgctgaagggtccgacgagtgccttccaaaggtcctgaatagtaacccaccccccataatcaaatatcttgccctacaagacctgatgttgctgtcccaatattcgcccagccgaagacaggaagtgttctccttgtcccagccaggcggccatccgcacaattggactgctattagtcgtgaatgtctgaacctcctaaatggcatgactcagaaactgattctctatcaagaggccgccgctactaatgggcgtgtatctagcagctatccagtggagcctaagaagttgaattcaccggaggagacagcctttcagacacccaaaagtagccagatgccccgcccaagcgtgcctccccttgtgaagacctccctgttctctagtaaactgagcaccccggatgtcgtgtctccattcggaactcccttcggtagcagcgtgatgaaccggatggcaggtattttcgacgtcaacacatgttacggcagcccccaaagtccccagctcatacggcgtggcccaagattgtggacatcagctagcgaccaacaaatgactgaattctcaaatccctccccaagtacatccatttccgccgagggcaagacaatgaggcagccctcagtgatctattcttggattcaaaataaaagggagcaaatcaagaattttctgtccaagagggtgttgataatgtacttcttctcgaaacatcccgaagcatcaattcaagccgtgttctcagacgcacagatgcacatttgggccctcgagggcttgtcgcatctagtcgccgcgtctttcactgaggatcgtttcggggtggtgcagaccactctccctgctattctgaacacactgctgactctgcaagaggctgtggataaatatttcaaactgcctcatgcatccagtaagccaccccggatctccggcagtctggtggatacatcttacaaaaccctgagattcgctttccgggcctctctaaagaccgctatctatcgcatcactacaacatttggcgaacacttgaacgccgtccaggcatcagccgagcaccaaaaaagactgcagcaatttcttgagttcaaggagtag

SEQ ID NO: 109470 - DNA, 4500 bp, synthetic construct
  misc_feature 1..4500: note = Description of Artificial Sequence: Synthetic coding sequence
  source 1..4500: mol_type = other DNA
atgaggatcctcgcaaacaaaacccgtctgcctcatcctcggcggagagaagcccccggttctcctccgctgtcaccacgaggccactgtcctcccgcacctgctaaacccatgcatcccgagaacaagctgaccaaccatggaaagacgggcaatggcggggcccagtctcagcatcaaaatgtcaaccaagggcccacctgtaacgtggggagtaaaggcgttggcgctggcaatcatggagctaaagccaaccagatcagtccatctaatagcagcttgaagaacccacaagctggtgtaccgcccttttcctctctcaaagggaaggtcaagcgggatcgttccgtgtcagtggacagtggggaacagcgggaggccggaacaccatcgttggattcagaggcaaaagaggtcgctccgcggtcaaaacgacgctgcgttctcgagcgaaagcagccatacagcggcgatgaatggtgctcaggccccgattcagaggaggatgataagccaattggagccacacataattgcaacgtagccgaccctgccatggctgcgccacagttgggacctggccagacgacacagctgccactgtcagagtcatctgtgccgggagctccacacggacctccacccggtctccggcctgatgctccggggggaggtgggggcggtggtggggtccccggaaaacccccaagccaattcgtctacgtctttactactcacctggcgaatactgccgcggaagccgtcctccagggcagagctgatagtattttggcctaccaccaacagaacgtaccgcgtgcgaagctcgaccaggcacccaaagttccacctacccccgagcccctgccgctgtctacaccctctgcaggaaccccccagtcacagcctccccccctccctccccctccgccgccagccccagggagtgcgcccccggccctacctcccgaagggccacccgaagactccagtcaggatctcgcgccgaattcggtcggggcagccagcaccgggggaggaactggggggactcaccccaacacccctacggccacaactgccaataacccactgccacctggtggagatcccagctccgcgcccgggccagctctgctcggtgaagccgcggcaccaggaaatggacaaaggtcacttgtgggatcagagggcctctcaaaggaacaacttgagcaccgtgagcgctcactgcaaactctgcgggacattgaaaggctgttattaagaagtggggaaaccgagcctttcctgaagggccctccagggggtgccggcgagggaggcccacccgcacaggcccctcctcccccccagcagcctccaaccgctccaccaagcggattgaaaaagtatgaagagccactccaatccatgatctcccagacccagtcactgggggggccaccattggagcacgaggtacccggacatccccccggcggagacatggggcagcagatgaacatgatgatccagaggcttgggcaggattccttgacaccagagcaggtggcatggcggaagctgcaggaagagtactacgaagaaaaacggcggaaagaggagcagataggtctacatgggtcaagacctctgcaggatatgatgggcatgggaggaatgatggtgcgcgggccacctcccccctatcactcaaagccaggggatcagtggccccccggcatgggggctcaactcaggggccctatggatgtgcaggaccctatgcagctgagagggggtcctccttttcctggcccccgatttcccgggaatcagatccagcgagtcccaggattcggcggcatgcagagcatgccaatggaggtgcccatgaatgcaatgcaacgcccagtgaggccggggatgggctggactgaggacctccccccaatgggggggccgtctaacttcgcccagaatacgatgccctacccaggaggccagggagaggccgaaaggttcatgacacccagagtgagagaggagcttttgcgtcaccagttgctcgagaaaagatccatggggatgcaacgtcctttgggcatggccggttcaggcatgggtcagtctatggagatggagcggatgatgcaggcccaccgccagatggatcccgccatgttccccggacagatggctgggggggaaggtcttgctgggacgccaatgggaatggagttcggcggtggccggggtttgctctccccacctatgggccagtctgggttgcgggaagtggaccctcccatgggtccaggaaatcttaatatgaacatgaatgtgaatatgaacatgaatatgaatcttaacgtgcagatgactccccagcagcaaatgttaatgtcccaaaagatgcgcggaccaggagacctgatgggcccccaagggctgagccctgaggagatggctcgcgtccgcgcgcagaactcttccggggttatgggggggcctcagaagatgctaatgccctcccagttccccaatcagggtcagcagggattcagcggagggcaaggcccgtatcaggcaatgtcccaggacatggggaatacacaagacatgtttagccctgaccagtcctcaatgccaatgagcaacgttggaactacacggttaagccatatgccacttcctcccgctagcaacccccccggtacagtccactcggcccccaaccgtggcctcggaaggagacctagtgacctgaccatttccatcaatcaaatggggtcaccaggcatggggcacttgaagagtccaacactgagccaggtgcatagccccctggtgacatcaccaagtgctaacctgaagtctccacagacaccttctcagatggttcccctcccgagcgcaaatcctccgggacccctaaagtccccccaggtgctaggaagctccctgtccgttcggagtcctacggggtctccctcacggctgaagtctccttccatggccgtgcccagcccaggctgggtggcatcaccgaagaccgccatgccaagccccggagtgtcccagaataaacagccacccctgaacatgaacagcagtacaactctgtctaatatggagcaaggcaccctccccccctctggcccacgcagcagcagcagcgcacccccagcaaaccccccttctggcctgatgaaccccagcctgccctttacgtcatctccggaccccacgccaagtcagaaccctctctcactgatgatgacgcagatgagtaagtacgccatgccttcaagcacgccactgtatcataatgccatcaagacaatcgccacaagcgacgacgagcttctcccagatcgtccattactgccaccgccaccccccccccaggggtcaggaccaggcatatctaattctcagccctctcagatgcaccttaactcagccgctgctcagtccccaatgggaatgaacctacccgggcagcagccactgtctcacgagcccccccctgccatgcttccatccccgaccccactcggcagcaacataccgctgcatccaaacgcccagggaactggcggaccgccccagaactctatgatgatggctcccggaggccccgacagtctgaatgccccatgtgggccagtgccttctagcagccagatgatgccatttccaccgaggttacaacaaccccatggtgcaatggcacctactggcggtggcggtggaggaccaggcttacaacaacactaccccagcggaatggccctgcccccagaagatctgccaaatcagccgcccgggcccatgccaccccagcagcacctaatggggaaagccatggccggacgaatgggagatgcttatccccccggtgtattgcctggcgtagcctccgtgcttaacgaccctgagctctcagaggtcatcagaccaacacccactgggatccctgaatttgatctgagccgcatcataccttctgagaaacccagttccaccctgcaatacttcccaaagagcgagaatcaaccgccaaaggctcagcctcctaatctccacttgatgaatctgcagaacatgatggctgaacaaacaccctctcggccaccaaatctcccggggcagcagggggtgcagcggggcttaaatatgagtatgtgccatcccggtcagatgtccctgctcgggcgcactggggtgcccccccagcaggggatggttcctcatggcctgcaccaaggtgtgatgagtccccctcaagggcttatgacccagcagaattttatgctgatgaaacagcgaggcgtgggtggtgaggtttattcccaaccacctcacatgctctctcctcagggttccctaatggggcccccgcctcagcagaatctcatggtttctcaccctttgcgacaacggtccgtgagcctggacagtcagatgggctacttacccgcacccgggggaatggccaatctgccattttag

SEQ ID NO: 109471 - DNA, 4188 bp, synthetic construct
  misc_feature 1..4188: note = Description of Artificial Sequence: Synthetic coding sequence
  source 1..4188: mol_type = other DNA
atgcggattctggcaaacaagacccggctgccccatccgaggcgccgggaagcccccggctctccacctctgagcccaagaggacactgtcctcccgcacctgcgaagcctatgcatcccgagaacaaactgactaatcatggaaagaccggtaacggaggagctcagtctcaacaccaaaatgtaaatcagggacctacctgcaacgtgggtagtaaaggcgtgggagccgggaatcacggagcgaaggctaaccagatctctccctccaacagtagcctgaaaaatcctcaggcgggtgttcctccctttagttcactcaagggcaaggtgaaaagagatcgatccgtctccgttgatagcggcgagcagcgagaggcgggtacaccgagccttgactcagaagccaaagaagtggcccctcgcagcaagaggcggtgcgtgttggagcgaaaacagccttacagtggcgatgagtggtgcagtggcccagacagcgaggaggatgataaaccaattggtgcgacacataactgtaatgtggccgatcccgcaatggccgcacctcaactcggtcctggtcagaccacccagctgccactctccgagagcagtgtcccaggtgcgccacacggaccccctcctggtctgcgacccgacgccccaggcggcggaggaggcggcggcggcgtgcctggaaagcctccctcgcagttcgtgtacgtttttaccacacatctggccaacacagccgctgaagccgtgctgcaggggcgtgctgatagcatcttagcttatcatcaacagaatgtgccaagggccaagctggatcaggctcccaaggtgcctccaacacctgaacccctgcctttatccacgcccagtgccggaactccacagtctcagcccccccccctgccacctccacctccacctgcgccaggttcggcgcccccagcccttccccccgagggcccccctgaagacagctcacaggatttagctcccaattctgtgggagccgcatctacgggcggtggcacaggtggcactcacccaaatactcctactgcaaccaccgctaacaacccccttccccccggcggggatccttcttccgctcctggcccagctctgttaggcgaagcagcagcccccggcaacggtcagcggagcctggtgggtagcgagggactgtccaaagagcagttagagcacagggaacgctctttgcaaactctgcgagacattgagaggctactgctgcggtctggcgagaccgagccatttctcaaaggacctccaggcggcgctggtgagggtggcccacctgcccaggctcccccacccccacagcagccgcctaccgcccctccctcagggcttaagaagtatgaggagcccctccaaagtatgatttctcaaacccagtcccttggcggcccccccttagaacacgaggtgccgggacaccctccaggtggggacatgggtcagcaaatgaacatgatgattcagaggctgggacaggactctctcactccagaacaggtagcctggcgtaaactccaagaggaatattatgaggaaaaaagacgcaaggaggagcagattggcttgcatggcagccggcccctgcaggacatgatgggaatgggaggtatgatggtgcgggggcctccgcccccgtatcatagcaagcctggagaccagtggcctcccggcatgggggcacagctgcggggccccatggacgtgcaggacccaatgcagctccgcggaggccccccttttcctggaccacgctttcctggcaatcagatccagagagtccccggatttggaggaatgcagagcatgcctatggaggtgcctatgaacgccatgcagcggccagtacggccgggaatgggatggaccgaagatctgcccccaatgggaggtccttcgaattttgctcaaaacaccatgccgtatcctggtggccagggtgaagccgaacggttcatgacaccgcgggtgcgggaagaacttcttaggcaccaactcttagagaagcgctccatgggtatgcagaggccactcggaatggcgggtagcggaatgggacagagcatggagatggagaggatgatgcaggcacacaggcagatggatccagccatgtttccaggtcaaatggcggggggtgagggcctggccggaacacctatgggtatggagtttggcggaggccggggactgctatcgccaccaatgggtcagagtggactgagagaggtagaccctcccatgggaccagggaatctcaatatgaacatgaacgtgaatatgaacatgaatatgaacctaaatgttcaaatgactccacagcaacagatgctgatgtctcagaaaatgcggggacctggtgatctgatggggccccagggcctgtccccggaggagatggcgcgcgttagggcacagaacagtagcggcgtcatggggggtccacagaagatgctgatgccttcccagtttccaaaccaggggcagcaggggttttccggcggacagggcccctaccaggcaatgtcgcaggacatggggaacacacaagatatgttttcccccgaccagtcttccatgccgatgagtaatgtagggactacacgcctgtcccatatgcccctgccacccgcctccaacccacccgggactgtacactcagcaccaaatagggggcttggtcgtcgacctagtgaccttaccatctctatcaaccagatgggctcccccggtatgggccacctcaagtctcctaccctatcgcaagtgcatagccccctggtgacatctcctagcgccaacctgaagtcccctcaaacaccttctcagatggtgccgttgccgtcggcgaatccaccaggccctttaaaatccccgcaggtgctagggagcagtttgtctgtgcggagtcctacagggagtccaagtcgcttgaaaagtccatcgatggccgtgccttccccagggtgggtggcttcccccaagacagcaatgcccagtccgggcgttagtcagaacaaacagccccccctcaatatgaatagctccactactctaagtaatatggaacagggtactctgcccccttcagggccacgaagctccagctccgccccacccgctaaccctccatctggtctcatgaaccccagccttcctttcactagcagtcccgatccaaccccatcacagaaccccctgtcactcatgatgacacaaatgtccaagtacgccatgcccagcagcacccccctttatcacaacgcaattaagactatcgctacctcagatgatgagctgttaccagataggcctctattgcccccaccacctccaccacaggggtctggccctggcatttcaaactctcagcctagccaaatgcacctaaatagtgccgcagcccagagtcctatgggtatgaacctaccaggccagcagccgctcagtcacgaaccccctccagcaatgctgccttctcctacaccattggggagtaatattccccttcacccaaatgcgcagggtacaggtggccccccacaaaacagcatgatgatggccccggggggcccggatagccttaatgcgccctgtgggcccgtgccctcgtcgagtcagatgatgccttttccaccgagactccaacagccgcacggcgccatggcaccaactggtggtgggggcggaggcccgggccttcagcagcattacccgtctggcatggctctaccccctgaggaccttcccaaccagcctccggggccaatgccccctcagcaacaccttatgggcaaagccatggccggcaggatgggagacgcctatccccctggcgttcttcccggcgtggcttcagtgctaaatgacccagagttgtccgaagtgattagacccacacccaccgggatccctgaatttgatctatcacggatcatcccttctgaattcctgcgtaccaggcctttcagcttttgtctgtacctactccgcattctttctctactgatgtggctcacccctctgccgcccctgcctgccggaggctggcctggcggtcaagtacccgctggcgcagttaacagggctctacgcttttgtgcgggtttgtgtgtctgttgcatctctgtgttttag

SEQ ID NO: 109472 - DNA, 4365 bp, synthetic construct
  misc_feature 1..4365: note = Description of Artificial Sequence: Synthetic coding sequence
  source 1..4365: mol_type = other DNA
atgaggattttagctaacaagacccggctgcctcatcccaggagacgggaagcaccggggtcacccccgctttcgccccggggacattgccctccagctcccgcaaagcccatgcacccagagaacaaactcaccaatcacggcaaaacagggaatggcggcgcgcaaagtcagcaccagaacgttaaccaaggtcctacatgcaatgtaggcagcaagggggtgggtgcaggaaaccacggggcaaaggcaaaccagattagccctagtaactcttctctcaagaatccacaggctggagtccctccttttagcagcctgaagggcaaggtcaagagagaccggtctgtgagcgttgactcaggggagcagcgcgaagccgggaccccatccttggactctgaggccaaggaagtcgctccacgaagcaaacgccgttgtgtactggaacgaaaacaaccgtacagcggggacgagtggtgtagcgggcccgactccgaagaggatgataagcccatcggcgctacccataattgcaatgttgcggacccagccatggccgctccccagctgggcccagggcagacaacacaactgccactcagcgagagtagtgttcctggagctccccatggacctcctccgggactgaggccggacgcgcctgggggaggaggcggaggaggcggggtacccggaaagccccctagtcagtttgtctacgttttcaccacccatctggccaataccgcagctgaagctgttctacaaggtcgggcagatagcattctggcataccaccagcagaacgtacctcgagcaaaacttgaccaagcccccaaggtgccccctacgcctgagccattgcccttaagcaccccaagcgccggtacgcctcagagtcaaccgccgccgttgccacctcctccccccccagccccaggctcagccccaccagctcttccaccagagggcccgcctgaagacagttctcaggacttggctcctaatagtgtaggagctgcgtccaccggcggtggcaccggcgggacacaccctaacactccgacagcaacaaccgctaataatcccctgcctcctggaggtgaccctagcagcgcaccggggcctgctttactgggggaggcagccgcgccaggcaatggccagcgatctctcgtcggatccgaaggactgtccaaggaacagctcgagcacagggagagaagtttacagacattgcgggatatcgaacggctcttgcttagatctggtgagacagaaccgttcctcaaggggccacctggcggcgcaggagaaggcggcccccctgcacaggcccctccacccccccagcagcctcctaccgcacctcccagcggattgaaaaaatacgaggaacccctccaaagtatgatctcacagacccaatccctgggaggtccgcctctggaacatgaggttccaggtcaccctcctggcggggacatgggtcaacagatgaacatgatgatacagcgcctcggccaggacagtctcactccagagcaggtcgcctggcgcaaactccaggaagagtattacgaagagaaacgcaggaaagaggagcagatcggcctgcacggcagcaggcctctacaggatatgatggggatggggggtatgatggtccggggtccccctcctccctatcactcaaaacctggcgaccagtggccccccggcatgggcgcgcagttaaggggtccgatggacgtacaggaccctatgcagctgaggggaggacccccgttccccggtccacgcttccccggcaaccaaatacagcgagtaccaggatttggtggcatgcagtccatgcccatggaagtcccaatgaacgccatgcagagacccgtaagacccggaatggggtggacagaagatctcccccctatgggaggtcccagtaacttcgcccagaatactatgccttaccctggcggccagggggaggcagagcgttttatgacccctcgggtacgcgaagaactcctaaggcaccagctgctggaaaaacggtccatgggtatgcagcggcccctgggcatggccggatccggaatgggtcagtccatggagatggaacggatgatgcaggcgcatagacagatggatcccgctatgtttcctggccaaatggccggaggcgaaggactggcgggcacaccgatgggcatggagttcggcgggggacgaggccttctatcacctccaatgggccagagcggcttacgggaggttgaccctccaatgggcccgggtaaccttaacatgaacatgaatgtcaatatgaatatgaatatgaacttaaacgtgcaaatgacccctcagcaacagatgttgatgagccaaaaaatgaggggccctggcgacctaatgggcccgcagggattgtctcctgaagagatggcccgagtccgagcacagaactcatcaggcgtaatgggcggtccgcagaagatgctcatgccctcacagttccctaaccaaggtcagcagggttttagcggagggcagggcccctaccaggcgatgtctcaggacatgggcaacacgcaggacatgttttcacccgatcagagtagtatgcctatgtctaacgtagggacaaccaggctgagtcatatgcctctgccacccgcatctaacccacccggtaccgttcacagcgcacctaataggggactgggccggcgtccctcggatctcactatctcaattaaccagatgggttctcccggaatggggcatctcaaatcaccaactctgtctcaggtgcattctcccctcgtgacctctccctccgcaaatctcaaatctccccagaccccaagccagatggtacctctaccttccgctaatccacccggtcctctcaagtcaccacaagttctcggatcgtccctctcagtgcgatctcctacaggtagtcccagtcggcttaagagccccagtatggcggttccatcccctggatgggtggcctcccccaagacagccatgcctagccctggcgtcagtcagaacaaacagcctccccttaatatgaacagcagtactaccctgagtaacatggagcaagggacattgcccccatccggtccacggtcctccagctccgcacctccagcgaatccgccatcaggattgatgaacccatcactcccattcacttcatcccctgaccctaccccatcccagaacccgctgtcactgatgatgactcagatgtcaaaatatgcaatgccctcatccacccctctgtatcataatgcgattaaaactatcgctacgagcgacgacgaactgcttcccgatagacccctgctgccccccccaccccctccccaggggagtggaccggggatttcaaattctcagccaagccagatgcatctgaactcggccgcggcccagagtcctatgggaatgaacttgcccggacaacaacccctgtcccatgagccccctcctgccatgttaccctctcccacccccctaggctccaacattcccctccatccaaatgcccaaggaaccggcgggcccccccagaacagtatgatgatggctccggggggaccggactccctgaacgcaccatgtggtcctgtgccatcttcatctcaaatgatgcctttcccaccaagactccagcagccccatggcgccatgatggccgggcgcatgggagacgcttaccctccaggagtgctgcctggagtcgccagcgtgttaaacgaccccgaactttcagaagtgattcgcccgactcctaccggcattcccgaattcgatctgtccagaatcatcccctctgagaagccaagtagtaccctgcaatactttcctaagtccgagaatcagcccccaaaagcccagcccccaaatttgcatctaatgaatctgcagaacatgatggcagaacagacaccatcaaggcccccgaatctgcctggacagcagggtgtgcagcgtggccttaatatgagtatgtgtcaccccggccagatgagcctattgggtaggactggggtgcctccccagcagggaatggtgccccatgggttacatcagggcgttatgagtccgccccaggggcttatgactcaacaaaatttcatgctgatgaaacagagaggggtaggcggtgaggtgtactcccagccacctcacatgctgtcccctcagggatcattgatgggccctcctccccagcagaacctaatggtttcccatcctctaagacaacgctccgtgtcacttgattcccagatgggatacttacccgcccccggcggaatggctaacctgccgttctag

SEQ ID NO: 109473 - DNA, 1401 bp, synthetic construct
  misc_feature 1..1401: note = Description of Artificial Sequence: Synthetic coding sequence
  source 1..1401: mol_type = other DNA
atgtcgacacggagcgtgtcatcaagctcatatcgtagaatgtttggtggtcccggtaccgcctccaggccttcctcaagtagatcctacgtcacaacctctactaggacctactctcttggttcagctttgaggccctcaacctcgagaagtctttatgcctccagccctgggggcgtatacgcaactaggagttctgcagtccggcttaggagttctgtgcccggtgtgcggctcctacaggattccgtcgacttcagcttagccgacgctatcaatacagaatttaaaaacacacggaccaatgagaaagtggagttgcaggaactgaacgatcggtttgcaaattatatcgacaaggtgcggtttttggagcagcagaacaaaatccttctcgccgagctggagcagttgaaaggtcagggcaaatcccgtttgggtgacctgtatgaggaagagatgcgggaactccgaagacaagtggaccaattgaccaacgacaaggcccgggtagaagtggagagagacaaccttgcagaggacatcatgcgcctccgagaaaagctgcaggaagagatgttacaacgggaggaggctgagaacaccctccagtcatttcggcaagacgttgataacgcgtctctggcgcgactggatcttgaaaggaaggtcgaatccctgcaagaggaaatagcattcctgaaaaagctccatgaagaagagatccaggagcttcaggcccaaattcaggagcagcatgtgcagattgatgtggacgtgtccaagcccgatcttactgccgctcttcgggatgtccgtcagcagtatgaaagcgtggccgctaagaaccttcaggaagctgaagaatggtacaagtctaagtttgcagatcttagcgaagccgcgaacagaaacaatgatgcgctcagacaggctaaacaagaatccaccgagtaccgtagacaagtgcaaagcctgacctgtgaggtggatgccctcaaaggcacaaacgaatccttagagcgccaaatgagggagatggaagaaaacttcgccgtggaagccgccaactatcaggataccattggccgacttcaagatgaaatccagaatatgaaggaagaaatggcacggcatctgcgagaatatcaagacctgctgaatgtgaagatggccctcgatattgagatcgccacttatagaaaactgctcgaaggagaggagagccgcatatcattgccactgcccaacttttcgtcacttaacctgcgggagacaaacttagattctctgcccctggtggatactcatagtaaacgtactctgctgatcaaaaccgttgaaactagggatgggcaggtaattaatgagacaagtcaacatcatgatgatctggaatag

SEQ ID NO: 109474 - DNA, 1302 bp, synthetic construct
  misc_feature 1..1302: note = Description of Artificial Sequence: Synthetic coding sequence
  source 1..1302: mol_type = other DNA
atggacaagttgaacaagattactgtgcctgccagccaaaaactgaggcagctgcaaaaaatggtgcacgacatcaaaaataatgagggcgggataatgaataaaattaagaagcttaaggtgaaggcgcctccttcggtgcctaggagagactacgcgagcgaatctccagcagatgaagaggagcaatggtcggacgatttcgactccgactatgagaaccctgacgagcatagtgactccgagatgtatgtcatgcccgctgaggagaatgccgatgactcatatgagccaccccctgtcgagcaagaaacccgcccagtccaccccgcactacctttcgcaagaggcgaatacatagacaaccgctccagccagagacatagccccccgttttcaaaaacactgccttctaaaccttcttggccttctgaaaaagctcgcctcacatctacacttccggcacttacggcactgcagaaaccacaggtgcctccaaaaccgaagggacttctcgaggatgaagctgactacgtggtgcccgtggaagacaacgacgagaactatatccatccaaccgagtcttccagccctcctccagagaaaggtcggaatagcggtgcatgggagacaaagtctccaccaccagctgccccatcccctctacctcgagccgggaagaaacctactacccctctcaagaccacccccgttgcctctcagcagaacgcgtcaagcgtgtgcgaggagaagccaattcccgcagagaggcaccgcggctcttctcaccgccaggaggccgtgcagagtccagtctttcccccggctcaaaaacagattcaccagaagcccatccccctgccacggttcactgagggcgggaatcccacagtggatggcccactgccctctttctcctcaaactcaacaatctctgaacaggaggccggggtgctgtgtaagccatggtacgccggcgcctgtgaccggaagtctgcggaggaagcacttcacaggagcaacaaggacggttctttcctgattagaaaaagttctgggcacgatagcaaacagccttacactttggtcgtctttttcaataagagagtgtacaacattccggtccggtttatcgaggccactaaacaatacgccttaggccggaaaaagaatggtgaagagtatttcggcagcgtggcagaaattatccgtaaccaccagcactcacccctggttcttatcgattcccagaataatactaaagacagcacaagactcaagtatgccgtcaaagtatcctag

SEQ ID NO: 109475 - DNA, 525 bp, synthetic construct
  misc_feature 1..525: note = Description of Artificial Sequence: Synthetic coding sequence
  source 1..525: mol_type = other DNA
atggataagctcaataagataaccgtgcctgcatctcagaaattgcgacagctccagaaaatggttcacgacattaaaaacaacgaaggcggcatcatgaacaagattaaaaagctgaaagtcaaggcccccccctcagtcccacggcgtgattatgcttctgagtcccctgccgacgaggaagagcagtggagcgacgatttcgactcggactacgagaacccagatgagcattctgatagtgagatgtacgtgatgcctgctgaagaaaacgccgacgactcatatgaacccccccctgttgaacaagagacacgcccggtacatccggctttacccttcgccaggggcgaatacatcattttcctctgtgacctgttgaagcagcagaataacatgccttgggctgagcgaaagatggttaaaagcactctggaggtgctgctgaagtctagcggaattatcaacattgtcctgtggttccttcttacagtcagaataacacagaaaatcccacccgactag

SEQ ID NO: 109476 - DNA, 558 bp, synthetic construct
  misc_feature 1..558: note = Description of Artificial Sequence: Synthetic coding sequence
  source 1..558: mol_type = other DNA
atggataagctcaacaagattaccgtgccggcaagtcagaagctgcgccagctgcaaaagatggtgcatgatatcaagaacaacgaaggagggatcatgaacaaaattaagaaactgaaagtgaaggccccaccctccgtgccgcggagggattacgcaagcgagagccccgcggatgaagaagaacaatggtccgacgatttcgacagtgactacgagaatccggatgagcactctgattctgaaatgtatgtgatgcccgcagaggaaaacgcagacgacagttacgaacctcctcctgtggagcaagagacccggcctgttcacccagctctaccattcgcacgtggagagtacatcgacaacaggagctcacagcgccacagcccacccttttcgaagacgttgccaagcaagcctagctggccctctgaaaagtacttcgggagtgttgccgagattataaggaaccaccagcattccccattagtgctgattgactcccagaacaacactaaggactcaacacgcttgaagtatgccgtcaaggtaagctag

SEQ ID NO: 109477 - DNA, 204 bp, synthetic construct
  misc_feature 1..204: note = Description of Artificial Sequence: Synthetic coding sequence
  source 1..204: mol_type = other DNA
ctcgactcgtattcatgtctgctgcagctgccgaatcgtatggataagctcaataaaataacagtcccagctagccagaagcttcggcagctgcagaagatggttcacgacataaagaataatgaaggcggcatcatgaacaagatcaagaaaacagccaccatgaagattcagatgagcactcgaactcaacgctgtacctag

SEQ ID NO: 109478 - DNA, 1215 bp, synthetic construct
  misc_feature 1..1215: note = Description of Artificial Sequence: Synthetic coding sequence
  source 1..1215: mol_type = other DNA
atggataagctgaacaaaattacagtccctgctagccagaaattgcggcaactgcagaaaatggtccacgacatcaaaaataacgagggtggcatcatgaataagattaaaaaattgaaagttaaagcccctcctagcgtgcctcgcagagactacgctagcgaatctccggccgacgaggaggagcaatggtccgatgattttgacagtgactatgaaaaccccgatgaacactcagactcggagatgtacgttatgcctgctgaggaaaatgccgacgatagctatgagcccccccctgtggagcaggaaacgcgacccgtccaccccgccctgccttttgctaggggtgagtatattgacaacagatcttctcagagacatagtccaccattctccaaaactctcccttctaagcctagctggcccagtgagaaagcgagactgacttctaccttgccagcgctgacagctctccagaaaccccaggtgcctccaaaaccaaagggcctcctggaagacgaggctgattatgtggtgcctgtagaagacaacgatgagaattatatccatccgactgaaagtagtagcccaccacctgaaaaagccccaatggtaaacagaagtacaaaacctaactccagcacacctgcttcaccacccggaaccgcatcggggagaaattccggggcttgggagacaaaaagcccaccccctgccgcgccttcaccgcttccaagggcaggtaagaaacccacaacccctctgaagacaacacccgtagcatctcagcagaacgcctcgtccgtatgtgaggaaaaacccattcccgcggagcgtcacaggggcagtagtcaccgccaggaggcggtgcaaagccccgttttcccacccgcacagaaacagatccaccagaaaccaatccctttgcctcgctttacagaagggggtaacccaaccgttgatgggcccctgcctagcttcagttctaacagcacaattagcgagcaagaggccggagttctgtgcaagccatggtacgccggagcctgcgatcgtaagtctgccgaagaagctttgcatcgcagcaacaaatacttcggctcagtggccgagattattagaaatcaccagcacagtccattagttctcattgattcccaaaataatactaaggactccacacgcctgaagtacgcggtgaaggtttcttag

SEQ ID NO: 109479 - DNA, 1266 bp, synthetic construct
  misc_feature 1..1266: note = Description of Artificial Sequence: Synthetic coding sequence
  source 1..1266: mol_type = other DNA
atggacaagcttaataaaataacggtgcctgcatcccagaagttgaggcagctgcagaaaatggtccatgacattaaaaacaatgaggggggcatcatgaataagatcaagaaactgaaagtcaaagcccctcctagtgtgccgcggcgggactacgcatcagagagccctgccgatgaagaagagcaatggtctgacgattttgactccgactatgaaaacccggatgaacactccgattccgagatgtatgtcatgccggcagaggagaatgccgacgattcttatgagcctccgccagtagagcaagagacaagaccagtgcatccggcgctgccttttgctcgcggcgaatatattgacaatagatcctcacagcggcactcaccccccttctccaaaacccttccctcaaagccatcatggcccagcgagaaggcaaggttaacatctacgctgcccgcactgactgccctacagaagccacaagtgcctcctaaacccaagggcctgcttgaagacgaagcggattacgtggtgccagtcgaagataatgacgagaactatattcatccaactgaatcaagtagcccgccacctgagaaggctcccatggtgaatcgcagtactaagccaaattcaagcacaccagcgtcaccacccggcaccgcatccggcaggaactccggcgcttgggaaactaagtctccacctcctgccgccccttctccattgcccagagccggaaagaaacccaccacaccactgaaaacgaccccggtggcgagtcagcagaatgcctcttctgtgtgtgaggagaagccgatcccagccgagagacaccggggatctagtcaccggcaggaggccgtgcagagtcccgtgtttccgccagcacagaagcaaatacatcaaaagcccattcccctgccccgctttacggagggggggaacccgacagtagacggccccctccctagttttagcagtaattcaacaattagtgaacaagaagctggagttctgtgtaaaccttggtatgcaggcgcttgcgaccggaaatccgcagaagaagcactccaccggagcaataaggatccccagcctcctctccccagcaagcaatgggaaacaaggaagctgcagtatttcgggtctgtggccgagataatccgcaaccaccagcactcccccttagtacttattgactctcagaataacaccaaagacagtacacgcctgaagtacgcggtgaaagtgtcctag

SEQ ID NO: 109480 - DNA, 630 bp, synthetic construct
  misc_feature 1..630: note = Description of Artificial Sequence: Synthetic coding sequence
  source 1..630: mol_type = other DNA
atggataagctcaataaaatcactgttcctgctagccagaaactgaggcagctccagaagatggttcatgacataaagaataacgagggggggatcatgaataaaatcaagaaactgaaggtcaaggcgccacctagcgtgcctcggagggactacgctagtgagagcccagcagatgaggaagaacaatggtccgatgactttgatagtgattatgagaaccccgacgagcactctgatagcgagatgtacgtaatgcccgccgaggagaatgctgatgactcctatgaaccacccccggtagagcaggagacacgaccagtacacccggctcttccatttgcccggggcgagtacattgacaacagaagcagccagcggcattcaccacccttctccaagactctcccctctaagccctcctggccgagcgagaaagcacgcctgaccagcacactgccagctttgacggctctccagaagccacaggtgccacccaagcccaaagggctacttgaggacgaggcagattacgtggtgccagttgaagataacgacgagaactacatacatccaacggagagttcctctcccccgcccgagaaaggtaaaaatcagcggcaccattag

SEQ ID NO: 109481 - DNA, 900 bp, synthetic construct
  misc_feature 1..900: note = Description of Artificial Sequence: Synthetic coding sequence
  source 1..900: mol_type = other DNA
atggataagttgaacaaaataactgtgccagcttctcaaaagttacggcagctccaaaaaatggtccatgatataaaaaacaatgagggcggcattatgaataagataaagaagctgaaagtgaaggccccgccatctgtgccgaggcgcgattacgccagtgagtcaccggccgacgaggaggagcagtggagtgatgacttcgactccgattatgagaaccccgacgagcatagcgatagcgaaatgtatgtcatgccagccgaggagaatgcagacgattcatatgaacccccccccgtcgagcaggagacacgccctgtacatccggctctgccgtttgcaagaggagagtacatcggcagaaacagcggggcctgggagactaaatcccctccaccagcagcgccttcgccactcccgcgggccggtaaaaagccaactacacccctcaagactaccccggttgcctcccagcaaaatgcttcatcggtgtgcgaagaaaaaccaattccagccgagagacatcggggctcctcccatcggcaagaggccgtgcaaagcccagtgtttccccccgcacagaaacagatccatcagaaaccaatacctttacctagattcaccgaaggcggcaacccgactgtggatgggccactcccctccttctcctccaattctacgatctctgagcaggaggccggagttctgtgcaaaccatggtacgccggggcatgtgatcggaaatcagccgaggaggccctgcataggtcaaacaagtacttcggctctgtagccgagatcattagaaatcaccagcactcccccttagtcctgattgattctcagaataacaccaaggacagcactagactaaagtatgccgtgaaggtgtcctag

SEQ ID NO: 109482 - DNA, 2358 bp, synthetic construct
  misc_feature 1..2358: note = Description of Artificial Sequence: Synthetic coding sequence
  source 1..2358: mol_type = other DNA
atgttacccgcggccccaggcaagggccttggtagccccgaccctgccccctgtggtcccgctccgcccgggaacaccaaggacattataatgatatatgaagaggacgccgaagagtgggccctctacctcactgaagtgttcctgcacgtcgtcaaacgagaagccatactcttgtaccgcttagagaacttcagcttcagacatctcgagctactgaacctgacaagctataaatgtaaactcttgatcctgtccaattccctgctgagagacctgacacccaagaaatgccagttcctagagaagatactccatagccctaaatcagtggttacattgctgtgcggggtaaagtccagcgatcagctctacgaactgctgaatatttcccaatctcgctgggagatcagcaccgagcaggagcctgaagattatatttctgtgatccagtctatcattttcaaagattccgaggactatttcgaagtcaacattcccacagacttgcgcgcaaagcattccggtgagatcagcgagagaaaagaaattgaggagctgtctgaagcttcacggaacaccatccctctggccgtggtgttgcctaccgaaattccttgcgagaatccgggtgaaattttcattatcctccgggatgaggtcataggggacacagttgaagtcgaatttacctcatccaataagaggatccgaacacggccggcactatggaacaagaaagtgtggtgcatgaaggctctggaattccccgctggctcagttcatgtcaacgtgtactgcgatggcattgtcaaagcaacaacgaaaatcaaatactacccaaccgccaaagcgaaagaatgtcttttccggatggctgatagcggggagtccctgtgtcaaaactcaattgaggagctggacggggtgcttaccagcatcttcaaacacgaaataccatactacgagtttcagtccctgcagacagaaatctgcagccagaacaaatatacccacttcaaggagctcccgaccctcctgcattgtgccgccaagtttggcttgaaaaacctggcgatacatctgctgcagtgttcaggcgctacatgggctagcaaaatgaagaacatggaaggttctgacccagcacacattgcagaacgacacggacataaggagctgaagaagatttttgaagatttctccattcaggagatcgatatcaacaatgagcaggaaaacgactatgaagaggatattgcgagcttctccacatacattccctccacccagaaccctgcgtttcaccacgagagccggaagacgtacggacaatcagctgacggggctgaagccaacgagatggaaggtgaggggaaacagaatggctctggaatggaaacaaagcactcgcctctcgaagtgggttctgagtcatcagaggaccaatacgatgacctctatgtcttcatacctggcgcggacccggagaacaactcccaggaacccctaatgtcttcgagaccaccactgcctccccctaggcccgttgccaacgccttccagctcgagcgtccccactttactcttccaggtaccatggtggagggccagatggagaggagccagaactggggacatcccggtgtccgccaagagactggagatgaaccaaaaggcgaaaaggaaaaaaaagaagaggaaaaggaacaggaagaagaagaggacccatacaccttcgcagagatagatgatagtgagtacgacatgatcttggccaacctgtccattaagaagaaaacgggctctagaagtttcattatcaatcgacctcccgcccccacacctcggccaacatctatcccaccaaaggaggaaaccacaccctacattgcgcaggtgtttcagcagaagactgccaggcgacagtctgatgacgacaaattctgtggtttacccaaaaaacaagatagagcccgtattgaatcacccgcgttttctacccttcgggggtgtcttacggatggacaggaagagctgatcctgctccaggaaaaggtgaagaatggcaaaatgagcatggatgaggccctagaaaaattcaagcattggcagatgggaaaatctggtctggaaatgattcagcaggaaaagcttcggcagctgagagactgcatcatcggtaagcgaccggaggaggaaaacgtttacaataagctaaccatcgtgcaccaccccggagggaaagagaccgcgcacaacgaaaataagttctataacgtccacttttcaaataaactgccagctagacctcaggtcgagaaagagtttgggttttgttgtaagaaagatcactag

SEQ ID NO: 109483 - DNA, 1959 bp, synthetic construct
  misc_feature 1..1959: note = Description of Artificial Sequence: Synthetic coding sequence
  source 1..1959: mol_type = other DNA
atgctgcctgccgcacccgggaaaggccttggctcccccgacccagcaccctgcggtcccgctccgcctgattccgaggattatttcgaggtgaatattccaactgatctacgggcaaagcactcgggtgagatttccgagcgcaaggagatcgaggagttgagcgaagcttcccgcaacaccatcccgctagccgtggtccttcctacagagataccttgtgagaatccaggggaaatttttatcatcctgcgggacgaggtgatcggggacaccgtggaggtcgagttcactagttctaataaacgcattaggaccagaccagcgttgtggaacaagaaggtttggtgcatgaaagccctcgagttccctgctggcagtgtgcacgtgaacgtctactgcgatgggatagtcaaggccacaaccaaaatcaagtactacccgaccgccaaggcgaaagaatgtttgttcaggatggccgacagcggggaaagcctgtgccagaactccatcgaggaactcgacggcgtgctaaccagtatcttcaagcacgaaatcccatattacgaatttcaatccctgcagactgaaatatgtagccagaataaatacacccacttcaaggagcttccgacactgttgcactgcgccgccaaattcggacttaagaatctggccatccacttattacaatgtagtggcgcaacatgggcttcgaagatgaaaaacatggaagggtcggaccctgcacatatcgcagagagacatggacacaaggagctgaagaaaattttcgaagatttttccatacaggagatcgacatcaacaacgagcaggagaatgattatgaggaagatattgcttccttctcgacctatatcccttccacacagaaccctgctttccatcacgaaagtcggaagacatacggtcagtctgccgatggggcggaggctaacgagatggaaggcgaaggaaagcagaatggaagcggaatggaaacgaaacactcgcctttagaggtgggtagcgaaagcagtgaggatcagtacgacgatctatacgtgtttatcccgggagccgaccctgagaacaattctcaagaacctttaatgtcttcccggcctcctctaccgcctccaaggcccgttgccaatgccttccagctcgaacgaccccacttcacccttcctggcacaatggttgagggccaaatggagcgaagccagaattgggggcacccaggtgtgcgtcaggagaccggcgatgagcccaagggagagaaagaaaaaaaagaggaggagaaggaacaggaggaggaagaggacccatacaccttcgccgagatcgatgacagcgaatacgacatgatattagctaacctgagcatcaagaagaagaccggaagccggtctttcatcattaaccggcctcctgctccaaccccacgacctaccagcattcctccgaaagaagaaaccaccccctacatcgcacaggtattccaacagaaaactgcccggagacaatctgacgacgacaaattctgtggtctgcccaaaaagcaggatcgggcgcgaattgagtctcccgccttttctaccctccgtggctgcctgactgacggacaagaggaactgattctgctgcaagagaaggtaaagaacggcaagatgtcaatggatgaggcacttgaaaaatttaagcactggcagatgggtaaatcaggccttgaaatgattcaacaggagaaactgagacagctgagggactgtatcatagggaaacggcctgaggaagaaaatgtgtataacaagttaacaattgtgcatcaccctggcgggaaggagactgcccacaatgagaacaaattctacaacgtgcacttctccaacaagctgcctgcccggccccaagtggaaaaggagttcgggttctgctgtaaaaaggatcattag

SEQ ID NO: 109484 - DNA, 2268 bp, synthetic construct
  misc_feature 1..2268: note = Description of Artificial Sequence: Synthetic coding sequence
  source 1..2268: mol_type = other DNA
atgatatatgaggaagacgccgaggagtgggctctgtacctgacggaggtattcctgcatgtcgtgaagagagaggccatcctcctgtatcgacttgagaatttcagctttcgccatctcgaactgttaaatctgacatcttataagtgtaaattacttatactgtctaactcgctgctccgtgatcttacccctaaaaagtgtcagtttttggagaaaattttgcacagcccaaagagcgtggtgaccctgctttgtggcgtgaagtcatcagaccagttgtatgagctgctgaatatctcacagtccaggtgggaaataagcacagaacaggagcctgaagattatatatccgtgattcaaagtatcattttcaaggacagtgaagactacttcgaggttaacattccaaccgacttgagggctaaacattctggcgagatttcagagagaaaggagatcgaagagttgtcggaagcatctagaaatacgatccccctggctgttgtcctgcctaccgaaatcccctgtgagaaccccggcgagattttcataatattgcgcgatgaggtgataggcgacacagtggaagttgagttcacgagctcgaataaaaggatccggacgaggcccgccttgtggaacaagaaagtgtggtgtatgaaagccctggagtttccggccggcagcgtgcacgtcaatgtatactgtgacggcatcgtgaaggcgaccactaaaattaagtactatcccaccgctaaggcgaaggaatgcctgttcaggatggccgactccggggagtctctatgccaaaattctatagaggagctagacggcgttcttacctcaatattcaaacatgagatcccctactacgaattccaaagtctgcagactgagatttgttcacaaaacaaatacacacacttcaaggagcttcccacgctactgcattgtgccgcaaagtttggcctcaaaaacctggcaatccacctgctacaatgctccggtgcaacctgggcatctaagatgaaaaacatggaaggctctgacccagctcacatagctgagaggcatggccataaggaactgaaaaaaattttcgaggacttctccatccaagagatcgacatcaacaacgaacaggagaatgattacgaggaggacattgcttcgttttcaacatacattcccagtacacagaaccccgccttccaccacgaatctcgcaagacgtatgggcagtctgccgatggcgccgaagccaatgaaatggagggcgagggaaagcagaatggctcaggaatggaaaccaagcacagtcctttggaggtaggttccgaatcttccgaagatcagtatgatgatctctatgtgttcatcccaggcgccgaccctgagaacaacagtcaggaacctctcatgtcttcgcggcctccactcccacctccccgacctgtcgctaacgcattccaactggagcggccccattttacccttccggggacaatggttgaagggcagatggagcgcagccaaaactgggggcatcctggagttagacaggagacaggggatgagcccaagggagagaaagagaagaaggaggaggagaaggaacaggaggaggaggaggatccctatacatttgccgagattgatgactcggaatacgacatgatactggcaaatctgagcattaaaaagaagacaggatcgcgctctttcatcatcaaccggcctcccgctccaactccgagaccaacatccattccgcccaaggaagagactaccccgtacatcgcgcaagttttccagcaaaaaaccgcaaggcgtcagagtgacgatgacaagttttgtggtctgcccaagaagcaggaccgggccagaatcgagtctcccgcctttagcacactccgaggatgccttacagacgggcaggaggaattgattctgctccaggaaaaggtcaaaaacggaaaaatgagtatggacgaggctctggagaagtttaaacattggcagatgggaaagtccggcctggagatgatacagcaggagaagttaagacagctgagggattgtataattggtaagcgacccgaagaggagaacgtctacaataagctgacgatagtacaccaccccggtgggaaggaaaccgcccataatgaaaacaagttttacaacgtgcacttctcaaacaaactgccagcacgccctcaggtggagaaagaattcggattctgttgtaagaaagatcactag

SEQ ID NO: 109485 - DNA, 2313 bp, synthetic construct
  misc_feature 1..2313: note = Description of Artificial Sequence: Synthetic coding sequence
  source 1..2313: mol_type = other DNA
atggtgaattgccacctgaaaatcggcaatactaaggatattatcatgatatacgaagaggatgcagaagagtgggcactgtatctaactgaggtcttcctgcacgttgtcaagcgagaggctatcttgctttacagacttgaaaatttttcctttagacacctggaacttctgaatctgacctcttacaagtgcaagttgctcatactgtccaactcccttctgagagacctgacccctaaaaaatgccagttcctggagaaaatacttcactctcctaaaagtgtagtgaccctgctttgtggggtgaaatctagcgatcaactatacgaactcttgaatatcagtcagagtaggtgggaaatctcaacagagcaggagccagaggactatatcagcgtaatccagtccataatatttaaagacagtgaagactattttgaagtgaacatccccactgacttgagggccaaacatagcggtgagatcagcgagcgaaaagagatagaagaattgtcggaggcctccagaaacactatacctctcgctgtggttctacccacagagataccgtgcgaaaaccccggggaaatcttcatcatcctcagagatgaagtgataggagacactgtcgaagttgagtttacgtcctccaacaagagaataaggacccggcctgctttgtggaacaagaaagtctggtgtatgaaagctctggagttccccgcaggctccgtgcatgtgaatgtgtattgtgacgggattgtcaaggctaccacaaaaatcaaatactatccaaccgctaaggcaaaggaatgtctgttccgaatggccgactccggcgaaagtctgtgtcagaattccatagaggaactcgacggggtgctgacatccatattcaagcatgaaatcccctattacgaattccagagtctccagaccgaaatctgctctcagaataagtatacacattttaaggagctacccacgctcctgcactgcgccgctaagtttggtttaaagaatctggcgattcacctgctccagtgttctggcgcgacgtgggcttctaagatgaaaaacatggaggggtcagaccctgcccacattgccgagaggcatgggcataaagaattgaagaaaatattcgaagacttctcaatccaagagattgacatcaacaacgagcaggagaatgactatgaagaggacatcgcctccttttcaacatatataccatccactcaaaaccctgcgtttcatcacgagagtcggaagacatacggccaaagcgccgatggagcagaggccaatgagatggaaggagagggaaagcaaaacggctccgggatggagactaagcattcacctctggaggtcggtagtgaatcaagcgaggatcagtacgatgatctgtacgtattcatcccaggtgcggatccggagaataactcacaggagccattaatgagctcccgcccaccccttcctccacctagaccagtcgctaatgcgttccagctagagaggccacatttcacactccctggtaccatggtggagggacagatggagagatcccaaaactggggccatcccggcgtgcgtcaagagacgggagatgagccgaagggggagaaagagaaaaaggaggaagagaaggagcaggaggaagaagaggatccttacactttcgccgaaatagacgattcagagtatgacatgattctcgccaacctttcaataaaaaagaagacaggaagtagatctttcattatcaaccgcccccccgcaccaactcccagacccaccagcatcccaccgaaagaggagaccacaccatacattgcccaggtgtttcagcaaaaaacggcgcgtagacagtcagatgatgacaaattctgcggtttgcccaaaaagcaggacagagcccgcatagagtcaccagctttcagcacactgcggggatgtctgaccgatggccaggaggagctcattttgctacaggagaaggttaaaaatgggaagatgagcatggatgaagctcttgagaagttcaagcactggcaaatgggaaagagtggcctggagatgatccagcaggaaaagctgcggcaactgcgggactgtatcataggaaaacggccggaggaggaaaatgtctacaacaaactgactatcgtgcaccacccaggcggcaaagagaccgcacacaacgagaacaagttttataacgttcatttcagtaacaagctgccagcaagaccgcaggtggagaaagaatttggattctgctgcaaaaaggaccactag

SEQ ID NO: 109486 - DNA, 1959 bp, synthetic construct
  misc_feature 1..1959: note = Description of Artificial Sequence: Synthetic coding sequence
  source 1..1959: mol_type = other DNA
atgctgcccgctgccccaggtaaaggcctcgggtccccagatccagctccctgcggcccagctccgcctgactccgaggattattttgaggtcaacatcccaactgatctccgcgcaaaacattccggcgaaatctcagaacgcaaagagatcgaagagctgtcagaagcatctaggaataccattcccctcgccgtggtcctgccaaccgagataccatgtgagaatcctggggaaatctttattattctgcgcgatgaagtgattggggatacagtggaagtcgagttcacatctagcaataagagaataagaacaagaccagcactttggaataagaaggtgtggtgcatgaaagccttggagttcccagccggcagcgtgcacgtaaacgtatactgcgacggcatcgtaaaagctaccacaaaaatcaaatactaccccacagccaaagccaaagagtgtctattcagaatggccgacagcggagaatccctgtgccagaattctattgaagagctcgacggagtcttaactagtatctttaaacacgagatcccgtactacgaattccagagcctgcagaccgagatttgttcccagaacaagtatacccactttaaagagctccctacgttattacattgtgccgcaaagttcgggctgaaaaacttggccatacatttgttgcagtgtagcggagctacttgggcatcaaaaatgaagaatatggaggggagtgatcccgcccacatcgcagagagacatggccacaaagaactgaagaagattttcgaggactttagtatacaggagatcgacatcaataacgaacaagaaaatgactacgaggaggacatcgcaagtttttccacctacataccttccactcaaaaccctgcctttcaccatgaaagccgcaaaacctacggtcagtctgctgatggagctgaagccaatgaaatggagggagagggtaaacagaatggcagtggaatggagaccaaacactctcctctggaggttggctcggaatcctcagaagatcaatacgacgacctctacgtgttcatacctggcgctgatccagaaaacaattcacaggagcctttaatgagttctcgaccgccactgcctcccccaagacctgttgccaatgcatttcaactggaacgcccgcactttacccttccaggaaccatggtggaaggacaaatggaacgatcacaaaactggggccaccctggggtcaggcaggagacaggggatgaaccaaagggcgagaaagagaaaaaggaagaggaaaaggagcaggaagaggaggaagacccctacacgtttgctgagatcgatgattccgagtacgatatgattttggcaaatctttcaatcaagaaaaagaccggcagtcgatcattcatcatcaataggccccctgcaccaactcctcgaccaacatccattccacctaaagaagagactacaccttatatcgcacaggtgtttcaacaaaagactgcccgccgacagtccgatgatgacaaattctgtggactccctaaaaagcaagatagagcacggatcgaaagcccagccttcagtaccctgcgaggttgcctgaccgatggtcaggaggaactcatccttctgcaggaaaaggtcaagaacggcaagatgtccatggatgaggccctggaaaagtttaaacactggcagatgggcaagtcaggactggagatgatccaacaggagaaattgaggcaactgagggactgtataattggcaaacgaccagaggaagagaacgtttacaacaagctgaccatagtacatcatccaggcggtaaggagacagctcataacgagaataaattttacaacgtccatttcagcaacaagcttcctgctcgcccccaggtcgagaaggaatttggcttctgttgtaaaaaggatcattag

SEQ ID NO: 109487 - DNA, 516 bp, synthetic construct
  misc_feature 1..516: note = Description of Artificial Sequence: Synthetic coding sequence
  source 1..516: mol_type = other DNA
atgcacccattttatacaagggccgcaacaatgatcggcgaaatagccgctgcagtgtcattcatcagcaaattcctcaggacaaagggacttaccagcgaacggcagctgcagacgttttctcagtcgcttcaggagctcctagcagaacattataagcaccattggtttcccgaaaaaccttgtaagggctccggctataggtgtatccgtattaatcacaaaatggatcctctgataggacaagcagcccagaggatcggactctctagccaggagctatttcgtctgttgccgtctgagctgactctgtgggtcgacccgtacgaggtctcttacagaattggcgaggatggctcaatctgcgtactctatgaagcttctcccgccgggggtagcacccagaacagcactaatgtccagatggtcgatagccggattagctgtaaggaggagctgctactgggccggacaagcccgtctaaaaactacaacatgatgacagtatccggatag

SEQ ID NO: 109488 - DNA, 672 bp, synthetic construct
  misc_feature 1..672: note = Description of Artificial Sequence: Synthetic coding sequence
  source 1..672: mol_type = other DNA
atgagggacgaaattgcaacaaccgtctttttcgtgaccagactcgtcaagaaacacgataaactgtcaaagcagcaaattgaggattttgccgaaaagctcatgactattctgttcgaaacataccgctcccattggcatagtgactgcccctctaagggtcaggcattccggtgtattcgcatcaacaataaccagaataaggatcccattctggagcgggcctgtgtcgaatcaaacgtggatttcagccaccttgggctgccaaaggagatgaccatctgggtggatcccttcgaggtgtgctgcagatacggcgagaaaaatcatccatttacagtcgcaagtttcaagggaaggtgggaagaatgggaactctaccagcagatttcttacgcagtttcccgtgccagttccgacgtcagctccggaactagttgcgatgaggagagctgcagcaaggaacctagggtaatcccaaaggtatcaaacccaaaaagcatctatcaggttgaaaatttaaaacagccctttcagtcttggctgcagatccccagaaagaaaaatgtcgttgacggaagagtagggctcttgggcaatacttaccacgggtctcagaagcaccctaagtgttatcgtccagcaatgcaccggctcgatcgaattctctag

SEQ ID NO: 109489 - DNA, 483 bp, synthetic construct
  misc_feature 1..483: note = Description of Artificial Sequence: Synthetic coding sequence
  source 1..483: mol_type = other DNA
atgcgggatgagatagccacaactgtgtttttcgtgacacgcctggtgaaaaaacacgacaaactgtctaagcagcaaatcgaggatttcgctgagaagttgatgacaatacttttcgagacataccgatctcattggcactcagactgcccttctaagggtcaggctttccgctgtattcgaattaacaataatcagaataaagaccccatcttggagcgggcatgcgtggagtcaaacgttgacttcagtcacctcggcctccctaaggaaatgactatttgggtggatccatttgaggtgtgctgtagatacggcgagaaaaatcatcctttcacagttgctagcttcaagggccggtgggaggaatgggaattgtatcaacagatttcatacgccgtttccagggccagcagcgacgtgagcagcgggacatcgtgtgatgaagagtcttgctctaaggaacccagagtgatcccctag

SEQ ID NO: 109490 - DNA, 1188 bp, synthetic construct
  misc_feature 1..1188: note = Description of Artificial Sequence: Synthetic coding sequence
  source 1..1188: mol_type = other DNA
atgtctctggtggatctaggaaaaaagctacttgaagcggcaagggctggccaggatgacgaggtgaggattttgatggcgaatggagcaccattcaccaccgactggctgggtaccagtccactgcacttggctgcccagtatggccactactccaccaccgaggtgctgctgcgagccggcgtcagtagggatgcaaggacaaaagtggaccggactcccttacatatggctgcctctgagggccatgccagcatagtcgaggtcctactcaaacatggagccgatgtcaatgctaaggacatgttgaagatgaccgcattacattgggcaaccgagcacaaccatcaggaggtcgtggagctgctgattaagtacggggctgacgttcacacacaatcgaagttctgcaagactgccttcgacataagcattgacaatggcaatgaagacctcgcggaaatcctgcagattgccatgcagaatcagattaatacaaaccctgagtccccagataccgtaacgatccacgccgcgaccccacagtttatcatcggacccggcggtgtggtaaatctgaccggtctcgtcagttctgaaaactcctccaaggcaactgacgagactggggtcagcgccgtacaatttggcaatagctcaaccagcgtcctggccaccctcgccgctctcgcagaagcctcagctccccttagcaactcttcggaaaccccagtcgtcgccaccgaggaggtggtgaccgcagaaagtgtcgacggcgctattcagcaggtggtgagttcaggcggacagcaggtcattactatcgttaccgacggcatacagttgggaaatctccatagcatccccacctcagggatcgggcagcctatcatcgtgacgatgcctgatgggcaacaggttttgaccgtcccagccaccgacatcgctgaggaaacagttatatcagaggaacccccggctaaaagacagtgtattgaaattatagaaaatcgggtagaaagtgccgaaatcgaagaacgggaagctctacagaagcagctggatgaggcaaaccgagaagcacaaaaatatcgacagcaattactcaaaaaagagcaggaggctgaagcataccggcagaagctggaggctatgacccgcctgcaaaccaataaagaagcggtctag

SEQ ID NO: 109491 - DNA, 555 bp, synthetic construct
  misc_feature 1..555: note = Description of Artificial Sequence: Synthetic coding sequence
  source 1..555: mol_type = other DNA
atggagcctagtcagtgcgttgaggaactggaggatgatgtttttcagcccgaagatggagaaccagtaacacagccaggtagccttctctccgctgatctgttcgcgcagtcgctacttgactgtcctctgtcaagactacagctttttccactcacacactgctgcggcccaggcctaaggcctacctcccaggaagataaagccacccagaccctgtcacctgcttcgccgtcccagggggtgatgctgccttgtggagtgacagaggaaccccagcgcttgttttatggcaacgccggctatagactccctcttccggcgagttttcccgcagttcttcctatcggtgagcagcctcctgaaggacaatggcagcatcaggcagaagttcagatcgccagaaagctgcagtgcatcgcggatcagttccaccgcttgcatgtgcagcagcaccagcagaatcagaaccgcgtgtggtggcaaatcctcctgtttctgcataacctcgccctcaacggcgaggagaatcgaaatggggccggcccccgctag

SEQ ID NO: 109492 - DNA, 555 bp, synthetic construct
  misc_feature 1..555: note = Description of Artificial Sequence: Synthetic coding sequence
  source 1..555: mol_type = other DNA
atggagccatcacagtgcgtggaagagctggaagatgacgtgtttcagcccgaagatggtgaaccagtcacacagcctgggtccctgctttccgcagatctgttcgcacagagcttgctagattgcccgctgtctaggctccagctgtttcccctgacccattgttgcggcccgggtctcagacctacttcccaggaagataaagcaactcaaactctgtcaccagctagcccttcccaaggtgttatgcttccgtgcggggttaccgaagagccccagcgcctgttttacgggaatgcaggctacaggttacctctgccggcgtcattcccagccgtcctgcccataggagagcagcctcccgaagggcaatggcagcatcaagccgaggttcagatcgctcgaaagcttcagtgcattgctgatcagttccatagactccatgttcagcagcaccagcagaatcagaatcgggtgtggtggcagatcctcttgtttctgcacaacctcgctctgaatggcgaggagaacaggaacggtgcgggcccgcgctag

SEQ ID NO: 109493 - DNA, 492 bp, synthetic construct
  misc_feature 1..492: note = Description of Artificial Sequence: Synthetic coding sequence
  source 1..492: mol_type = other DNA
atggagccctcgcagtgcgtggaggaactggaggatgacgtctttcagcctgaggatggcgaacccgttacccagccagggagcctgctatcggcggacctgttcgcccagtcactcttggactgtccactgtctcgcctccagctctttccactcacccactgctgtggcccaggcctgaggcccacctcgcaggaagacaaagccacacagaccctttcccccgcttctccaagtcagggggtgatgttgccttgcggcgtgaccgaggaaccgcaacgcctattttacggcaacgcgggatacagactgcctctgccagcctcttttcctgccgtcctgccaattggcgagcagccccccgaaggtcaatggcaacaccaggcagagcaccagcagaaccagaaccgcgtgtggtggcagatcctgctatttctgcacaacctggcactgaatggggaggaaaaccggaatggggcaggcccgcggtag

SEQ ID NO: 109494 - DNA, 186 bp, synthetic construct
  misc_feature 1..186: note = Description of Artificial Sequence: Synthetic coding sequence
  source 1..186: mol_type = other DNA
atggagccctcacagtgcgttgaggagcttgaggacgacgtgttccaacccgaggacggtgagcccgtcacccaacctggcagcctgctctccgctgacctcttcgcacagagcttgctggattgtccactctcgaggcttcaactgttccccctgacccactgctgtggcccgggattacggtag

SEQ ID NO: 109495 - DNA, 390 bp, synthetic construct
  misc_feature 1..390: note = Description of Artificial Sequence: Synthetic coding sequence
  source 1..390: mol_type = other DNA
atggagccatcccagtgcgtggaagagctcgaggacgatgtgttccagcccgaggacggggagccggtaactcaacccggcagtttgctgtcagctgacctattcgcacagtctctgcttgattgtcccctgtcacggttgcagctgttccccctcactcactgctgcggacccggtctgcgaccaacatcccaggaagacaaagcgacccagacactcagccccgcaagtccctcgcagggtgtgatgctcccctgcggagtgacagaggagccccagcgacttttttatgcccccgccgaacccaagtcgtgcgttgtcgccgaccctcccctaccagctcaaccttgtttcgagtggagaagagaacaggagcggggccgaccatag

SEQ ID NO: 109496 - DNA, 42 bp, synthetic construct
  misc_feature 1..42: note = Description of Artificial Sequence: Synthetic coding sequence
  source 1..42: mol_type = other DNA
atggaaccttctcagtgcgtggaagaactggaagacgactag

SEQ ID NO: 109497 - DNA, 555 bp, synthetic construct
  misc_feature 1..555: note = Description of Artificial Sequence: Synthetic coding sequence
  source 1..555: mol_type = other DNA
atggagccttcacagtgcgttgaagagctagaagacgacgtatttcagcctgaggacggagagccagtcacccagcctgggtctctccttagcgccgatctgtttgcacagagccttctcgactgccctctgagtagactccagttgtttccactcacccattgttgcggacccgggctgagaccaacttctcaggaagacaaggctacgcagaccctttcccctgctagtccaagtcagggcgtgatgctgccgtgtggcgtgactgaagagccccagcgcctcttttacggcaacgccgggtacagactgcccctgccagcctcttttcctgcagtcctgcctatcggagagcagcccccagaggggcaatggcagcatcaggcagaagtccagatcgctagaaaactccagtgtattgctgatcagttccataggctgcatgtgcaacagcaccagcagaatcagaacagagtttggtggcagattttactttttctgcataacttagcattaaacggtgaggagaacaggaacggcgcaggccccaggtag

SEQ ID NO: 109498 - DNA, 555 bp, synthetic construct
  misc_feature 1..555: note = Description of Artificial Sequence: Synthetic coding sequence
  source 1..555: mol_type = other DNA
atggagcctagtcagtgcgtcgaagagctggaggacgatgtgttccagcctgaggatggagaacccgtaactcagccgggttcactactctctgcagatcttttcgctcagtccctgctcgactgccccctgtccagactgcagctgttccctctgacccactgttgtggaccaggccttcgccccacatcccaagaagataaagctacccagaccctgtctcctgcgtccccttcccagggcgtgatgcttccgtgtggagtcactgaagagccgcagcggctcttctatggcaacgcggggtatcgcctccctttgcccgcttcatttccagcagtactgcccattggagagcagccccccgagggacagtggcagcaccaggccgaggtacagatcgcacgcaagcttcaatgtatagccgaccagttccacagactccacgtgcaacagcatcagcagaatcagaacagagtgtggtggcagatacttctttttctgcacaatctcgcattaaacggtgaggagaacagaaatggcgcggggcctcggtag

SEQ ID NO: 109499 - DNA, 585 bp, synthetic construct
  misc_feature 1..585: note = Description of Artificial Sequence: Synthetic coding sequence
  source 1..585: mol_type = other DNA
atgtctcagaacggcgcacctggtatgcaggaggagtcactacaaggttcctgggttgagttgcatttcagcaataacggcaacggaggctcggtgccagcatcagtttcgatttacaatggagatatggaaaagattctgctcgatgcccagcatgaaagcgggcgtagctcatccaaatcctcccactgtgactcaccaccgcggagccagacgccccaagatacaaaccgcgctagcgaaactgacacccactcaattggggaaaaaaacagcagccaatccgaagaggatgatattgaacggagaaaagaagttgagtcgatactgaagaagaattctgactggatctgggactggtcatcccggcctgagaatattcctcctaaggaattcctgtttaaacacccaaagagaaccgcaaccttgtccatgcgcaacacctccgttatgaagaaaggcggcatattcagcgcagagttcctaaaagtctttttaccttcccttctgctgagccacctgctcgctattggtctgggaatctacatcggcaggcgcctgactactagcacaagcactttttag

SEQ ID NO: 109500 - DNA, 543 bp, synthetic construct
  misc_feature 1..543: note = Description of Artificial Sequence: Synthetic coding sequence
  source 1..543: mol_type = other DNA
atgtcacaaaatggtgctccagggatgcaagaagagtccctccagggctcttgggtggagctccatttctcaaataacggcaacggaggctcggtgcctgcctctgtgtctatatacaacggcgacatggagaaaatcctcctggacgcgcagcacgaaagcggcaggagttcctctaagtcctcccactgtgattcccccccacggtcccagactcctcaagatacgaatcgcgccagcgaaactgatactcatagcattggcgagaagaactcctcccaaagtgaagaagatgacatcgaaaggagaaaggaggtcgagtcgatcttgaaaaagaattccgactggatttgggactggtcttctcgcccagagaacattccgccgaaggaatttttatttaagcaccccaagaggactgccactttgagcatgagaaatacgtctgtgatgaagaaaggggggatcttttcagccgaatttctcaaagtttttctcccttcattactgttgtcccatctcctggctatcggcctggggtag

SEQ ID NO: 109501 - DNA, 1071 bp, synthetic construct
  misc_feature 1..1071: note = Description of Artificial Sequence: Synthetic coding sequence
  source 1..1071: mol_type = other DNA
atgtcccggccattgctgattaccttcacaccagccaccgaccccagtgatttgtggaaggacggccagcagcagcctcagcctgaaaagccagagtcgactctggatggcgctgcagctttagctttctatgaagccctaattggtgatgagtccagtgcccctgactctcagcgaagccagacagaaccagcaagggagaggaagagaaagaaacggcgaattatgaaggctcctgctgcggaggctgtcgctgagggagccagtggcagacatggacaagggagaagtctggaagcagaagacaaaatgactcaccggatcttgcgagcggcccaggagggtgacctccccgagctccggagattgctggagccgcacgaagcagggggggctggcggaaatatcaatgcgagggatgctttttggtggacaccgctgatgtgcgctgctcgcgctggccagggcgccgctgtgtcatatttgctgggccgaggtgccgcctgggtcggggtctgtgagttatccggccgggacgccgcccaattggctgaggaggcgggctttcccgaggttgccaggatggtgcgagagtcccacggcgagaccagaagccccgagaatcgctctcccactccaagcctacaatactgcgagaactgcgatacacatttccaggactcgaatcaccgcacctccacagcccacctgctatctttgtcacaagggccacagccaccaaacctcccactgggtgtgccaataagttctcccggtttcaagctgctgctgcggggaggctgggaacccggaatgggactgggtccaagaggggaaggaagagcgaaccctatccccacagtcctgaaaagagaccaggagggactcggatatcggagcgccccacagccacgtgtaacgcacttcccagcttgggatacacgggcggtggccggaagagagcgaccccccagagttgccaccttaagctggagggaagaaagaagacgagaagaaaaagaccgggcctgggagcgggaccttagaacttacatgaacctggaattctag

SEQ ID NO: 109502 - DNA, 3399 bp, synthetic construct
  misc_feature 1..3399: note = Description of Artificial Sequence: Synthetic coding sequence
  source 1..3399: mol_type = other DNA
atggagccgaacgactccaccagtacagccgtcgaggagcccgacagcctggaggtgctggttaagaccctcgactctcagactagaacgtttatcgtcggtgcacaaatgaacgttaaggagtttaaggagcacatagccgcttctgtttctataccatccgagaaacagcgcctgatttaccagggacgggtcctgcaggacgataaaaaactgcaagaatacaatgtgggcggaaaggtgatccacctcgtagaacgcgctcccccacaaacacacctaccatcaggcgcaagttctggcacagggtccgcctcagcgacgcacggaggcgggagtccccctggtaccaggggtcctggggcatccgtccacgaccggaacgccaatagctatgtaatggtgggcacatttaacctgccctcggatggaagcgccgtggatgtgcacattaacatggagcaggcccccatacagtcggaacccagggtccgccttgtcatggcacagcacatgatccgcgacatacagactctcctgagccggatggaaactttgccgtatctgcaatgccgcggaggtccccagccacaacattctcagcctcccccgcagcctcctgctgttacacctgagccagtcgctttgtcttctcagacctccgagccggtggaaagcgaagctccccccagagagccaatggaagcagaagaagttgaggagagagccccagcacaaaacccggagttaacccccggccccgcccctgccggcccgacccctgctcctgaaacgaatgcccctaaccacccttccccagccgagtacgtcgaagtgctgcaggagctccaacgtctcgagagccgactccagccctttctgcagcggtactacgaagtgctcggagcagctgccaccacagactacaacaacaaccacgaaggccgcgaggaggatcagcgtttgatcaatctggtcggagaaagcctgcggcttttgggtaacacgtttgttgcactgtcagacctccgatgtaatctagcgtgcacgccgccccgacatctgcacgtggtgcgccctatgagccactacaccacacctatggttctgcaacaggccgctatcccaatccagattaacgtggggactactgtgactatgactggcaacgggaccaggccccctcccacccctaacgcggaagcaccacccccaggcccgggccaggcctcctcggtggccccttcttctacaaacgtggagtcgagtgctgaaggagctccaccccccggtccagcacctccacctgcgacatcacacccccgcgttatacgcataagtcatcaatctgtggaacccgttgtcatgatgcacatgaacattcaggatagcggcactcagccaggtggtgtcccttcagcccctaccgggccactgggccccccgggccatggtcagacactcggacagcaggtgcctggcttccccaccgctccaacacgggtggtgattgctaggcccaccccaccacaagcacgcccttctcaccccggcggaccgccagtgtcaggaacattacagggagcaggtctcgggaccaatgctagcctcgcccagatggtcagcgggctggtaggccagctgctgatgcaacctgtcctagtcgcccagggcacccccgggatggccccaccccccgctcccgcaaccgcaagcgcatcagccggcaccacaaatacagctaccaccgcgggacccgccccaggtgggcctgcgcagcccccaccaacacctcaaccttctatggccgacctacagttcagccagctgttagggaatctgttgggccccgctgggcccggtgcaggaggttccggcgtggcatccccgaccattacagtggctatgcccggcgtgccagcattcctccaggggatgaccgacttcttacaggccacccaaacagccccaccccccccgccccccccccctccgcccccacctgcgccggagcagcagaccatgcccccccccggcagcccatccggcggcgccgggtccccggggggactgggactggagtctctctccccagaattcttcacctctgttgtccagggggtactctcatctcttcttggttccctcggcgccagagctggatctagcgaatccattgctgctttcatacagcgactctcgggatcgtccaatatattcgaacctggtgctgacggggccctggggttctttggagccttgctgtccttgctctgccaaaatttctctatggttgatgtagtgatgctacttcatggccatttccagcctttgcagcgtctccaaccacaattgcgctccttttttcatcagcattatcttggcggtcaggagcccaccccgagcaacattcgcatggcaacccacacgctaatcactgggttagaggaatatgtgcgggaatcattttctctggttcaagtccagcccggagtcgacattatcaggactaatctcgagttcctgcaggaacagtttaatagcattgctgctcatgtgctgcactgcacggattcaggctttggggctaggttactagaactatgcaatcaaggcctctttgagtgtttggctttgaacctgcactgcctgggaggacagcagatggagttggccgccgtaatcaatggtaggatcagacgtatgtctcgcggcgtgaatccatctttagtgagttggctcactactatgatgggactgcgtttgcaggtggtgctggaacacatgccagttggaccagacgcgattcttcgttacgtcagaagagtaggcgatccccctcagcctcttcccgaggagcccatggaagttcaaggagcagagcgcgctagcccggagccacagcgagaaaatgcatctcccgcccccggcactacagcagaggaggcgatgtctcggggacccccccctgctccagagggaggaagtagagacgagcaggacggagcctctgcagagactgaaccttgggcagccgccgtcccccctgaatgggtccccataatacagcaggatatccagtctcagcgcaaagtcaagccacaaccccctctgagcgacgcatatctgtctgggatgccagccaagcggaggaagacgatgcaaggagaagggccccagcttctcctgtcagaggctgtctctagagctgcaaaggccgcaggcgccagacccttaacttctccggagagtttgtcaagggatctggaggctccggaagttcaggagtcttacaggcagcagctgcgctccgacattcaaaagcggctgcaagaggatccgaactattccccacagaggttccctaacgctcagagagcctttgccgacgacccctag

SEQ ID NO: 109503 - DNA, 3234 bp, synthetic construct
  misc_feature 1..3234: note = Description of Artificial Sequence: Synthetic coding sequence
  source 1..3234: mol_type = other DNA
atggagccaaacgattccacttccacggccgtggaagaacctgactctctggaggtactcgtaaaaacattggacagccagacccgaacattcatcgtgggtgcccagatgaacgtcaaggagttcaaagaacatatcgcagcatccgtctcaattccttccgaaaaacagagactgatctatcaggggagagtcctgcaggatgataagaagttacaagagtacaatgtgggagggaaggtcattcaccttgttgagcgggcaccaccgcagacacatctgccttccggagccagttctggcaccgggagcgcctcagcaacccacggaggcgggtcacctcctgggacccgaggaccaggcgcctcagtgcatgataggaatgccaacagttacgtgatggtgggtacatttaacttgcccagcgatggatctgcggtagatgtgcatattaatatggagcaggccccaatccagtccgaacctagggtgagactggtgatggcccagcacatgatccgagacatccaaacacttctttcccggatggaatgcagagggggccctcaaccacagcactcccagcctccaccccaacctcctgccgttactccagagcccgtggcactgagctctcaaacatcggagccggtcgagtctgaggccccgccacgcgaaccgatggaagccgaagaagtggaagaaagagctcctgcccaaaacccggagctaacacccggccctgccccagcgggtcctaccccagctcccgagacaaacgcacccaatcacccatcacccgcagagtacgtcgaggtgctgcaagaactccagaggttggagagtcgactccagccattcctgcagagatattacgaggtgctgggcgccgccgccacaaccgactataacaataatcacgagggtcgtgaggaggaccaacggcttattaacctggtcggagagtcccttagactcctggggaataccttcgtggccctgtctgacctgcgctgcaatctagcatgtacaccccctcgacacctgcatgtcgtgagacccatgtcccattacacaacccctatggtgctgcagcaggccgctattccaatccagataaacgtgggtactacagttaccatgacaggcaacggaacacgtcctcccccaacccctaacgctgaagccccaccccctggcccagggcaggctagctcggttgcacccagctctacaaatgtcgaatcatcagcagaaggtgctccacccccgggccccgcacctcccccagcgaccagccatcctcgggtgatcaggataagccaccaatccgtggagcccgtcgtgatgatgcacatgaacatccaggactcgggcactcagcccggtggggttcctagtgccccaacagggcctctaggcccccctggacacggacagactctcggtcagcaggtgcctggattcccaaccgctccaaccagagttgtgatcgcgaggcccaccccaccgcaggcccgcccttcacatccaggggggccaccagtgagtggcactctgcagggcgcgggtttgggaactaatgcaagtctggcccagatggtctcaggcctcgtggggcagctcctgatgcaaccagtcctagtggcccaaggtacaccggggatggcccctccgccagctcccgcaacagctagcgcaagcgcaggtaccactaatactgccaccacggcgggaccagcccctggcggcccggctcagcccccgcctacacctcagccctccatggcagatttgcagttttcccagttgcttggtaacctcctgggcccggccgggcccggcgcaggtgggtcgggtgtagccagcccaaccattacggtggccatgcctggtgtccctgctttcttgcaaggtatgaccgactttctgcaggcaacgcaaaccgcacccccaccacccccccctcctcctccccctcctcccgcaccagagcagcagacaatgccacctccaggtagtccctccggaggcgctggctccccgggcgggctgggcctcgaaagcctctcccccgaattcttcactagcgttgtccagggagtgctgtcatcactcttagggtcactgggcgccagggctgggagtagcgagagcattgccgctttcattcagaggctctctggatcaagcaatatttttgaacccggtgcggacggggccctcggattttttggtgccttgttgtctctcctgtgtcaaaatttctccatggtggatgtagtgatgctgctccatggacattttcagccacttcagcgactgcagccacagctgcgcagctttttccatcagcactacctcggcggtcaggagcccaccccatcaaacattaggatggccacacacactctgatcaccggcctggaagaatacgttagagaaagctttagtttggtgcaggtccagcccggcgtggatattatacgaaccaatctggaattcttacaggaacagttcaatagtatcgctgcccatgtgctccattgcaccgatagcggctttggagcccggcttttggagctgtgcaaccaagggctgtttgaatgcttggccctgaacctgcactgcctgggcggccagcagatggaactggccgccgtaatcaacgggcggattagacggatgtcgcggggggttaatcccagtttagtgtcgtggctaaccactatgatgggactccgcctgcaagttgttctggaacatatgccagttggcccggatgctatcctgcggtatgtgcgacgggtcggcgaccccccccagcctctccctgaagagcccatggaagttcagggcgccgagcgggctagtcccgaaccccagcgcgaaaacgcttctcctgctcccggtacgacggccgaggaggccatgagcagaggccccccccccgcccctgaaggggggtctagggatgaacaggacggagcatccgctgagaccgaaccatgggctgcagcggtgccacccgaatgggtaccaatcatccaacaggacatccagtcacagcgcaaagtgaaaccccagccacccctctccgacgcatacctaagtggcatgccggccaagcgaaggaagctgaggagcgacattcagaagagactccaagaagaccctaattattctccacagcgctttccaaatgcccagcgggcattcgcagacgacccatag

SEQ ID NO: 109504 - DNA, 3399 bp, synthetic construct
  misc_feature 1..3399: note = Description of Artificial Sequence: Synthetic coding sequence
  source 1..3399: mol_type = other DNA
atggagccaaatgactccactagcacagcagtcgaagaacctgattctttggaggtcctggtgaaaaccctcgattcccagaccagaacgttcatcgtcggggctcagatgaacgttaaggaattcaaagaacacattgccgcttcagtatctattccttccgagaaacaacggctcatataccagggccgggtgctccaggatgacaaaaaattacaggaatacaatgtcggtggaaaagtaattcatttagtggaacgggccccccctcaaactcacctgccttcaggggcatcctccggcacaggctccgcttctgctacacacggaggtggatctcctcctggaaccaggggacctggcgcgagtgttcacgatcggaacgccaatagttacgtaatggtgggaacttttaatctgccttccgacggctcagcagttgacgtccatataaatatggaacaagccccaatacaatcggagccaagagtgcgtcttgtgatggctcagcacatgatccgtgacattcagaccctgctgagccgtatggagacactgccgtacttgcagtgcagaggaggaccccagcctcagcattcccaaccacccccccagccccctgcggtgacccctgaacctgtagcgctctctagtcagacctctgaacccgtggaatctgaggctcctccccgggaacccatggaggctgaggaggtggaagagcgtgctcccgcacaaaacccagaactgacgccagggccggctcccgctggtccgacacctgcacccgagaccaacgccccaaaccacccgagccctgccgaatacgtggaagttctccaggagttacagaggctcgaatcaagactgcagcctttcctacagcgatactatgaagtcctgggcgccgccgccacaactgattataacaataaccatgaaggccgtgaggaggatcagagacttattaacctggtgggcgaaagtttgcgactgctcggcaacacctttgtggcattgtctgatctacgttgtaacctggcatgtaccccaccacgtcatctgcacgtcgttagacccatgtcccactatacaacacccatggtactccaacaagccgccatacccatacagattaacgtgggtactacagtgacaatgaccggtaatgggacaaggcccccacctacacctaacgccgaggctccccccccagggcctggtcaggcctccagtgtagccccctcatctacaaacgtggagtcttctgcagaaggcgctccaccgccaggcccagccccccccccagccacgtctcaccccagggttatcagaatttcgcaccagtccgtcgagcctgtggttatgatgcatatgaacatacaggacagcgggacacaaccgggcggcgtcccgagtgcacccaccggccccctgggcccacccgggcacggccagacgctgggccagcaggtgccgggttttcccaccgcgccaactcgagtcgtgatcgcccgcccaacccctccacaggctcgcccatcccaccctggcgggccgcctgtctctgggactctgcagggtgcagggttgggaactaacgcttccctggcacagatggtatctggacttgtgggtcagcttctcatgcagcccgttctggtggcccagggtacacctggcatggcacccccccccgctccagcgaccgccagcgcctcagcgggcactaccaacaccgcaacaaccgctggacctgccccaggaggccccgcacaacctccaccgacccctcagccatctatggccgatcttcaattttcccagttactggggaatctgcttggaccagccggtccaggagcaggtggctccggggtggccagtcctactatcaccgttgcaatgcctggggtcccagcttttctgcaaggcatgaccgatttccttcaggctacccagaccgctccgccgccaccaccacccccccctccaccacctcctgcccctgagcaacagaccatgccaccacctggcagcccttctggcggagcaggaagcccgggtggtttgggcttggagagtctaagcccagagtttttcacatcagtagtgcagggcgtgctatcttccctactcgggagtctcggtgctagggccggaagctccgagagtatcgcagcattcatccagaggctgtctggatcatcaaacatttttgagccaggagccgacggtgctcttggatttttcggggcactgctgagcctcctgtgccagaatttcagcatggttgacgttgtaatgctcctgcacggtcacttccagcccctacagcgtctgcagccccaattgcgttcttttttccaccaacactatttaggcggccaggagcctacccctagcaacattagaatggctacccatactctaattactgggctggaggagtacgtccgggagagtttttcacttgtccaggtgcagccaggcgtggatatcattagaacaaaccttgagtttctgcaggaacagtttaacagtatcgccgctcacgtactccactgtacagacagtggctttggagctagactgctagaactgtgcaaccagggcctcttcgagtgcctagcgctgaatttacattgtttaggcggccagcagatggaattggccgccgtgataaacgggcgcatcaggcgtatgtctcgcggggtcaacccctccctggtatcttggctgaccacaatgatgggtttacgccttcaggtcgtgctggagcacatgcctgtagggccagacgcgatattgcggtatgtgaggagagtaggtgaccccccacaaccactgcctgaggagccaatggaggtccagggggcagagagggcatcacctgagccccagcgtgaaaatgcatctcccgccccgggaactacggccgaggaagctatgagtaggggccctcctcctgcacctgaggggggctcgcgggacgaacaggacggggcaagtgcagaaacggaaccctgggcggcagccgtgccgccggaatgggtgccaatcattcagcaagacatacaatcacagcgcaaagtcaagccacaacctcccttgagtgatgcctacctgagtgggatgccagccaagcgtagaaaaactatgcagggtgaaggcccccagctcctgctgtcagaagccgtgagccgcgccgcgaaggcagctggggcacgcccacttacatcaccggaaagtttaagccgtgacctggaggcaccagaagtacaggagagctaccgccagcaacttcgctctgatatccagaaaagattgcaggaagacccaaactatagtccgcagaggtttcccaacgcccagagggccttcgccgacgatccttag

SEQ ID NO: 109505 - DNA, 3381 bp, synthetic construct
  misc_feature 1..3381: note = Description of Artificial Sequence: Synthetic coding sequence
  source 1..3381: mol_type = other DNA
atggaacccaacgacagcactagcacagccgtcgaggaaccggattcattggaggtcctggttaagacactcgatagtcaaactcgcacttttatcgtaggagcacagatgaatgtcaaagagttcaaagagcacattgcagcatctgtctccattccatcggaaaaacagaggttgatctaccagggtagggtgctgcaggacgataagaaattgcaggagtacaatgttgggggtaaggtcatccacctagtcgagcgtgccccacctcagactcaccttccatccggtgccagctctggcaccggctctgcttccgccacccacggcggcggcagcccacccgggacccgcggacccggggcttctgtgcacgaccgaaacgccaactcctatgttatggtcggtactttcaatctcccgtcagatgggtccgcagtagatgtccacattaatatggagcaggcacccatccagtcagagccccgagttagattagttatggcacaacacatgatccgcgacatacagaccctcctttctcggatggaatgtcgaggggggccccaaccccaacactcacaacctccccctcagccgcccgccgtgacaccagaacccgtcgcactgagttcccagacttccgaaccagttgagtccgaggcccccccccgagagcccatggaagcagaggaagtcgaagaacgggcacccgcccagaatcctgagctaacccccggtcctgctccagccggtccaacccctgcccctgagaccaacgcccctaatcatccctctcccgccgagtatgtggaggtgcttcaggaacttcaacggctcgaatcgagacttcaaccgtttctacagcggtattacgaagtactgggggccgcggccaccaccgactataataataatcacgagggccgagaagaagatcagcgcctgattaatctcgtgggagaatccttgcgcctgcttggtaatacgttcgttgcgcttagcgatcttcggtgcaatctggcttgcacacctcctagacacctgcacgtcgtacggccgatgtcacattataccacaccgatggtcttgcagcaagccgcaattcctatccaaatcaatgtcggcacaaccgtgaccatgactggtaatggcacgaggcctccccccacccccaacgcggaggcacctccaccagggcccgggcaggcttcatctgtagcaccaagttccactaacgtcgagtcttccgccgagggggccccaccccctgggcctgctcctcccccagcaacttcacatcctagagttatcaggatttctcaccaatcagtggaaccagtcgtcatgatgcatatgaatatacaggattccggtacacaaccgggcggggtgccttccgcgcctaccggccctctaggccctccgggacacgggcagacacttggccaacaggtgcctgggtttcctacggcaccgacgagggtggtcattgcccgaccaacaccaccacaggctcgcccatcacacccgggggggccaccagtgtccggcactctccagggggccggcctgggcaccaacgcatcgcttgcccagatggtatcaggacttgtcggccagcttttaatgcagccagtactcgtggcacagggcacaccggggatggccccgccccctgcacccgctacagcatcagcctcggcgggcaccaccaatacagctaccaccgctggcccagctcccggggggccggcacagccaccccctacccctcagccttctatggcagatctacagttttctcaactgctcgggaatctattgggtccagccggccccggggccggcggttctggagtcgcttccccaaccattactgttgctatgcccggtgtaccagccttccttcagggcatgacagacttcctgcaagcaactcagacagcaccacctccccctccacctccaccaccccctccaccggcgccggaacaacaaactatgcctccccccggctcaccatctggcggcgcaggaagccctggcggcctcgggctggaaagcctttccccagagttcttcaccagtgtggtgcagggtgtattgtcttcactcctgggaagtctgggagcccgggcaggttctagtgagtctatcgccgccttcatacagcgactctccggctcttctaatatattcgagccaggagctgatggcgccctgggtttctttggggctctcctgtcactactgtgtcagaactttagtatggtggatgtggtgatgctgctgcacgggcatttccaacccctgcagcggttgcagcctcagctgcgctctttcttccaccagcactatttgggaggacaggagcccaccccgtctaacataagaatggctacacatacactcataaccggcctggaggaatacgttagagagtccttttctctcgttcaggtccagcctggtgtcgacatcatccggactaacctcgagtttctgcaggagcagttcaactcgatcgcagcccatgtcttgcattgcaccgattccgggtttggagccaggctgctggagttgtgcaatcaaggcctctttgaatgtctggctctgaatctacattgcttaggtggacagcaaatggaactggccgccgtgatcaatggacgaatcagacgcatgtcacggggcgtgaacccatctcttgtgtcttggttgaccaccatgatggggcttcgactacaggtcgtcttggaacacatgcctgttgggcctgatgccatcctccgttatgtgcgacgggtgggagatcccccccaaccgctgcccgaggagcccatggaagtgcagggggccgaaagggcgagccctgaaccccagcgtgaaaacgctagtcctgcaccaggaaccacagccgaggaagccatgtcaagaggcccgccgccagcacccgaaggcggatcgcgcgacgagcaggacggcgcctctgccgagacagaaccttgggctgcggctgtaccacccgagtgggtcccaatcatccaacaggacattcaatctcagaggaaggttaagcctcaaccacctctctccgatgcctacttatccggtatgcctgcaaagcgccgtaagaccatgcagggggagggccctcagctcttgctctccgaagcggtctccagggctgccaaggccgctggagcacggcccctgacatctcccgagagtctctcccgcgaccttgaagccccggaagtccaagaatcataccgccagcagctgcgctcagacatccaaaagaggttacaggaagaccctaactactccccccagaggttccccaatgctcaaagagccttcgctgatgatccctag

SEQ ID NO: 109506 - DNA, 3381 bp, synthetic construct
  misc_feature 1..3381: note = Description of Artificial Sequence: Synthetic coding sequence
  source 1..3381: mol_type = other DNA
atggagccaaacgattcaacctccacagccgttgaggagcccgatagcctcgaggttctggttaaaactctcgattcacaaacacgaacatttatcgtgggagcacaaatgaacgtaaaggagtttaaggaacacattgctgcttctgtcagcattccatctgaaaagcaacgtttaatttaccaaggtcgggtgcttcaggacgacaagaagctgcaagagtataatgtcggaggtaaagtaatccatctggtagagcgcgccccacctcaaactcacctgccatcaggtgcaagctcaggaactggctccgcgtctgccacccatggggggggctcacctccaggcacgaggggccccggcgccagcgtgcacgatagaaacgcaaatagttacgttatggtggggacctttaacctacctagcgatggctcggcggtggacgtgcatattaacatggagcaggcacctatccaatccgagcctcgggtgcgtttggttatggcacaacacatgatccgcgatattcagaccctgcttagccggatggaatgcaggggtggacctcagccacagcatagccagccaccacctcaaccacctgccgtgacacccgaacccgtcgccctctctagccaaacctccgaacccgtagagagcgaggccccacctcgagagcctatggaagcagaggaagtcgaagaaagggcacccgctcagaacccagagcttactcctgggcccgctccagctggcccaacaccagcccccgaaacaaacgctccgaaccatcccagccccgcggagtatgtggaagttctgcaggaattacagagactggaatctagacttcagccgttccttcagcggtactatgaagtcctgggcgcagccgctaccaccgactacaataataatcatgagggccgcgaggaagaccagaggttgattaacctcgtcggagaatctcttagactcctcggaaatacatttgttgctctttcagatctccgctgtaacttggcctgcaccccacccaggcaccttcacgtggtgcggccaatgagccattacaccacccccatggtcttgcaacaggcagctatccccatccagatcaatgtgggcactaccgtgaccatgacaggcaacggtactcgccctcccccgactcctaacgctgaggcacctccacctggccctggtcaggcctcgagcgttgcaccctcgagcacaaacgtcgagtccagcgcggagggcgcgccaccaccaggccccgctccaccgcccgcgacctcccacccacgcgtgatcaggatttcccatcagtctgtcgagcccgtggtgatgatgcatatgaatattcaggatagtggtacccagcccgggggcgtgccaagtgcgcctacagggcctctgggacctccaggccacgggcaaacactgggccagcaggtgccaggctttccgaccgctcccactagggtggtgatcgctcgaccaactccgcctcaggcccgtccttcccatccaggcggcccacccgtgtcagggaccctacagggcgcaggactggggaccaacgcttcccttgcacagatggtctctggacttgtgggccagctcctcatgcagccagtgttggtcgcccaggggacaccagggatggccccacccccagctccggcgacggcgagcgcctccgcaggaacaactaacaccgctactactgcaggcccagctcctggggggcccgcacagcctccgcccaccccgcagccttctatggctgacctccagttcagccaattgttaggcaatcttcttggtcccgccggacccggcgccggcggatctggcgtagcctctcccaccatcactgtagctatgcctggagttcccgcattcctgcaggggatgaccgattttctgcaggccacccagacagcacctccaccccccccaccacctccaccccctcctcctgcacccgagcaacagaccatgcctcctcccggatcgcccagcggcggcgcggggtccccaggcggactcgggctagaaagtctgtctcctgaatttttcactagcgtggtccagggagtattatcatccttactggggtctttgggggccagagctggttcttctgaaagcattgcggcgtttatccagaggctttcaggaagctcgaatatcttcgaacctggggctgatggtgccttagggttttttggcgccctgctaagcctgctctgtcagaacttttcaatggttgacgtggtcatgctcctccatggtcacttccagcctttacagagactgcagccacagctgaggtcgttctttcaccagcactacctcggcggccaggagccaactcccagcaacatccggatggccacccacacgttaatcaccggactcgaagaatatgtgagggagagcttttcactcgtgcaggtgcagcccggtgttgacatcattcgcacaaatctggaatttttgcaagaacagttcaatagcattgccgcccacgtgttacattgcaccgatagcggatttggcgccagattgctggagctctgcaatcagggcctgtttgagtgccttgctctgaatttgcattgtctcggaggtcagcagatggagctggcagccgtaatcaacgggcgcattcgaaggatgtcccggggggtgaacccttcccttgtgagttggctcaccacgatgatgggattaagacttcaggtcgtactggaacatatgccagtgggccctgacgcaatcctgaggtacgtccgaagagtcggggatccccctcagccgctgcccgaagagccgatggaggtgcagggggccgaaagagccagcccggaacctcagcgagaaaatgcatctcccgctccggggaccaccgccgaggaggcaatgtcacgcggtccccctcctgcccccgaaggcgggtctcgcgacgaacaagacggggctagcgcggaaactgagccatgggccgctgcagttcctccggagtgggtaccaattatccagcaggatatccaatcacagaggaaggtgaagccccagccgcctctgtcagacgcctacctcagtggtatgccagctaagcggcgcaagacgatgcagggcgagggcccacagctgctcctgtctgaagccgtgtctcgagccgcaaaagctgccggcgcacggcctctgacttcccctgagagcctctcccgcgacctcgaagctcccgaagtgcaggagtcctaccggcagcagctacgctctgatatccagaaacggctacaggaggatcccaactacagcccacagcggttcccaaacgcccaacgcgcctttgccgacgacccctag

SEQ ID NO: 109507 - DNA, 3381 bp, synthetic construct
  misc_feature 1..3381: note = Description of Artificial Sequence: Synthetic coding sequence
  source 1..3381: mol_type = other DNA
atggagccaaacgattctacttcgaccgctgttgaggaacctgatagtcttgaggtacttgtcaagaccctggactcacagacgagaacctttatagtcggggcccaaatgaacgttaaggaattcaaggaacatatagcagccagtgtgagcataccttctgagaagcagagactgatctatcaggggcgcgtgttgcaagatgataagaaactccaggaatataatgttggggggaaggtgattcacctggtggagagagctcctccccaaactcatctcccaagcggcgcttcttccggaacgggttctgcctcggcaactcacggcggaggcagtccgcccggcacacgcggccctggcgcgtctgtgcatgataggaatgccaattcgtacgtaatggtggggacctttaacttgccgtccgacggttcagcagttgacgtgcacatcaatatggaacaggcccctatccaatcagagccaagagtgagattggtcatggctcagcacatgatcagggacatccagactcttctcagccggatggagtgtagaggaggtcctcagccccagcatagccaaccccctcctcagcctcccgcggtgacaccagagcccgtagccctgtccagtcaaacctccgaacccgtggagagtgaagcccccccaagggagcctatggaagcggaggaggtcgaggagagggcccccgcacagaatccagaactcacccccggccctgcccccgcaggtccgacccccgcccctgagaccaacgcacccaaccacccttcacccgcggagtacgtcgaagttctgcaggagctgcagcggctcgaatccagactgcaacctttcctgcagagatactacgaagttctgggcgctgccgccacgacggactacaataataatcacgagggacgggaggaggatcaacgccttatcaatctagtgggcgaatcactccgcttgctcggcaacaccttcgtggcattgtctgacctgaggtgcaacctagcatgtactccaccacggcacttgcacgtggtgaggccaatgtcccactacactacccccatggttttgcaacaggccgcgattccaatacagataaacgttggcacaaccgtgacaatgaccggcaacgggacacgcccccctcctaccccaaacgccgaggcccccccgccgggaccgggccaggcttcatcagtggctcccagcagcaccaacgtggaatcgtctgccgaaggcgctcctcctcccggtcctgcacccccgcctgccacctcccatcccagagtgatacgtatctcacatcagagcgtggagccagtcgtgatgatgcacatgaatatccaggactcaggaacccagcccggtggggtaccttcagctcccaccgggcccttaggcccccctggtcacggtcagacgctggggcaacaggtgcccgggtttccaactgcccccacacgggtcgtaatcgcccgccccacaccaccccaggcgcgtccgtcacacccgggcggaccaccagtgagcggcactctgcagggggccggcctgggaaccaacgccagcctggcccaaatggtatcaggacttgtggggcagctgcttatgcaacctgtcctcgtagcccaggggaccccaggcatggctccccctccagcgccagcaactgcttccgccagtgcaggtaccaccaacacagctaccaccgccgggccagcccccggaggcccagcacagccaccacccacaccacagccatcaatggctgacctgcagtttagccagctgttgggaaatctcctgggacctgccggacctggcgctgggggctccggcgtggcatcccctaccatcaccgtggccatgcctggcgttcccgcattcctgcagggcatgactgactttctccaggcaactcagacagccccacctcctcctcccccacccccacccccccctcccgccccagagcagcagaccatgcctcctcctggtagtccgagcgggggcgcaggatctcccggcgggctcggactggagtccctttcgccagaattcttcacatccgtggtacaaggagtcttgagttcactgttgggatcactaggggctcgggcgggcagctcagagtcaatcgctgcttttattcagaggttatccggctcaagcaatatcttcgagccgggcgcagatggggctctaggctttttcggcgccctcctgtcccttctctgtcagaacttctccatggttgacgtggtgatgcttttgcacgggcacttccagccactccagagactgcagccacagttgaggtcattctttcaccagcattatctgggagggcaggagcccacgcctagcaacatcagaatggccacgcacacactcattacagggctggaagagtacgtgcgggagtcatttagccttgtgcaggtccaaccgggcgtggacattatcaggaccaacctcgagttcttacaggagcaattcaacagcattgctgcccacgtcctgcactgtaccgatagtggctttggggcacggctgctcgagctgtgtaatcaggggttgtttgagtgtcttgcgctgaatctccattgcctgggtggacaacaaatggagttggcagcggtgatcaacggccgcatccgccggatgagtcgcggcgtgaatcccagtctggtgtcctggctgacaaccatgatgggcttaaggctccaagttgtccttgagcacatgccggtcggccctgatgccatcctgcgatatgtacgtagagtcggcgacccaccacagccattacccgaggaacctatggaggtacagggagccgagcgcgcatcccctgaaccccagcgcgaaaacgcctctccagcgcctggcaccacagctgaagaggccatgagcagggggcctccgccagctcctgaaggagggtctagggatgagcaagacggggctagcgcggaaacagagccttgggctgcagccgtgcccccagagtgggtgccaataatccagcaggatatccagagccagagaaaagttaaacctcagccaccactgtccgacgcgtacctttcagggatgccagcaaaacgtcgaaagaccatgcagggggagggtccgcagttactgctatcagaggccgtgagcagagccgccaaggctgccggtgcccggcccctcactagtccggagagcttgtcacgtgacttggaggctccagaggttcaggagtcctacaggcagcagctgcggtccgacatccagaagaggttgcaagaagatcccaactacagcccacagcgttttccgaacgcgcagcgcgccttcgccgatgatccctag

SEQ ID NO: 109508 - DNA, 3489 bp, synthetic construct
  misc_feature 1..3489: note = Description of Artificial Sequence: Synthetic coding sequence
  source 1..3489: mol_type = other DNA
atggagcccaacgattcaacttccacagctgtggaagaaccggactcactcgaagtgttggtcaaaacattggattcgcaaacaaggactttcattgttggggctcagatgaatgtcaaagaatttaaagaacacatagcagcctcagtgtccattccatccgaaaaacagaggctgatctatcaaggccgggtcttgcaggacgataagaagttgcaagagtataatgtcggggggaaagtgatacatctggtagaaagagctccgcctcagacccacttgccaagtggggcatcctctggcaccggttctgccagcgcaactcacggtggcggctcaccccccggcacgcgcgggcctggtgcgtccgttcacgatcgcaacgcaaactcctatgtgatggtgggtacctttaacctgccgtcagacggatcggcagtggacgtgcatattaacatggagcaagcacctattcagtccgagcctcgggtgcgactggtgatggctcagcatatgattagagacatccagacactcctgtcaaggatggagtgcaggggggggccacaaccccagcatagtcaaccaccaccccaaccccccgccgtcacacctgagcccgtagcccttagttctcagacatcagagccagtcgaatcggaagcacccccgcgggagccgatggaggccgaagaggtcgaagagagggcaccagcccagaatcctgagctcactccaggccccgcccccgccgggcctaccccagcgcccgagaccaacgctcccaaccatccaagccctgccgagtacgttgaagtgctacaggagcttcagcggctggagagccggctgcagccttttttacagcggtattatgaagtgctgggagccgccgccacgacagattacaacaacaatcacgagggccgggaagaggaccagagactgatcaacctggtaggcgagagccttcgccttttggggaatacttttgtggctttgtccgatctaagatgtaatcttgcttgtactccccctagacatctccacgttgtgcgtcctatgtcacactataccacccccatggtgcttcagcaggccgccatcccaatccagataaacgtgggcaccacagtcaccatgactggaaatggcacgcggccaccaccaactccgaacgccgaggccccacctcccggacccgggcaagcttcgtccgttgccccttccagcacaaacgtggaatcatctgccgaaggggcaccaccccctggcccagcccccccccccgctacatcacacccgagagtgataaggataagtcatcagagcgttgaacctgtagtaatgatgcatatgaatatacaagactctgggacgcagccaggaggcgtgccctccgcccccactgggcccctgggtccacccgggcacggacaaaccctggggagtaccttaattcagctgccatctctgccccctgagtttatgcacgctgtggctcaccagatcacacaccaggccatggtggcagcggtggcttccgctgccgccgggcagcaggtccccggatttcccaccgcgcccacccgagtggtgattgcccggcctacgccccctcaggcgaggcccagtcacccaggggggccacccgtgagtggcacccttcaaggcgccggcttgggtacaaatgcaagtctggctcaaatggtgagtggtctcgtgggacagctgctgatgcagcctgtcctggtagctcagggaacacctggaatggcgccgcctccagccccagccacagcttctgcctctgcagggaccactaacactgcaacaacagcgggccccgcaccgggcggccctgctcagcctccccctacgccacagccaagcatggccgatctgcagttctcacagctgctaggaaacctgctgggaccggcagggccaggtgccggagggagcggcgttgcttcacctacgatcaccgtcgccatgccaggagtacccgccttcctccaggggatgacagattttctgcaggccactcagactgcaccaccaccccccccgccgccccctccgccccccccggcccctgagcagcaaaccatgccacccccaggtagtcctagcggaggtgcagggtcccctggggggcttggcttggagagcctctcacccgagttttttacaagtgtggtgcagggcgtgctaagcagcctgcttggatctctgggtgcacgcgcaggcagctcagagagcatcgctgccttcatacagcgactgagcgggtcctccaatatctttgaacccggagctgacggggctctggggttcttcggagctctgttatccttgctgtgccagaatttctccatggtcgacgttgttatgctcctccacgggcattttcaacccttacagagactgcagccgcagctgaggtctttttttcatcagcactatctgggagggcaggagccgaccccaagcaatattagaatggccacacatactctcatcactggactcgaagagtatgttagggaaagctttagtctggttcaggtacagccgggtgtcgacattatacggacaaacctcgagttcctgcaagaacagttcaatagtattgccgcacacgtcttgcactgcaccgatagtggctttggggcccgtctgctcgagctgtgcaatcaaggcctgttcgaatgcttggctctgaatcttcattgtttgggaggtcagcagatggagctggcagccgtgattaatggacggatcaggagaatgagcaggggagtgaatccatctctggtgagttggttgacgacaatgatgggcctgcgcctgcaggtcgtccttgaacacatgcccgttggaccagatgccatcttaaggtatgtgagacgcgtaggagaccctccccaaccgctgccggaggagcccatggaagtgcaaggggccgagagagcttcccctgagccacagagggaaaatgcttcccccgcacccggcaccacagcagaagaggccatgtctcgcggcccacctcccgcgcctgagggcggctctcgggatgagcaagacggggcttctgcggagacagagccttgggcagccgccgtcccaccagaatgggtgccaattatacagcaggacattcagtcacagcgaaaggtcaagccacaaccacctctgtcagatgcgtacctctccggcatgccagctaagaggagaaaaaccatgcagggagagggaccccagctgctgctcagcgaagccgtgagccgcgccgccaaagctgccggggccaggccattgacctccccagagtctctgagccgcgatctggaggctcccgaagtgcaggagtcgtaccggcaacagctgcgctcggatatccagaagcgcttgcaagaagaccctaactactcaccacaacgcttccccaacgctcaacgcgccttcgcagacgacccttag

SEQ ID NO: 109509 - DNA, 738 bp, synthetic construct
  misc_feature 1..738: note = Description of Artificial Sequence: Synthetic coding sequence
  source 1..738: mol_type = other DNA
ccacctcgccaccttcatgtggtccggccaatgtcccactacaccacccctatggtactgcagcaggctgctatccctatccaaatcaatgttgggacgacagtaacaatgaccggaccggcccccccaccggctacttcccatccccgagtgatacggatttcccaccagtctgtagagcccgtcgtgatgatgcatatgaacattcaggatagtggcacacagcctggaggcgtgccaagcgctccaacaggacccctgggcccacctgggcatgggcaaaccctgggacagcaagtgcccggctttccaactgcaccaacgcgcgtagtgattgccaggcccactcctccccaggccagacccagtcaccccggaggtcccccagtatccgggacacttcagggggctggactcggcaccaatgcttcactggctcagatggtcagtggactcgtgggacaactgctgatgcagcctgttctagttgctcaggggactcccggaatggcccccccgcccgcccccgctactgcaagtgcgtctgccggtaccaccaacacagccacaactgcaggcccggcaccaggaggccctgcacaacctccccccacaccgcagccttcaatggcagacctgcaatttagccagttactgggtaacctgttgggcccagcgggtccaggagcagggggaagcggcgttgcctcacctactataactgtagccatgccctag

SEQ ID NO: 109510 - DNA, 3381 bp, synthetic construct
  misc_feature 1..3381: note = Description of Artificial Sequence: Synthetic coding sequence
  source 1..3381: mol_type = other DNA
atggagcccaacgactctaccagtacagccgtggaggaaccggacagcctcgaggtcctcgtgaaaactttggattcccaaacaaggacatttattgtgggagcccagatgaacgtgaaagaattcaaggagcatatcgctgcttccgtctccatacccagtgagaagcaacggcttatctaccagggtcgtgtcttacaggatgacaaaaagttacaggaatataacgtcggcggcaaggtgatccatctggtcgagagggcaccgcctcagacccatcttccttccggagcatccagcggtacaggctcagcttcggccacccatggggggggctcccctcccggtacgagaggcccaggagcgagcgtgcacgatcggaacgccaacagttatgtgatggtgggtacctttaatttgccatctgatggatctgctgtagacgtgcacataaatatggagcaggcaccgattcagtcagaacctcgagtcagactcgttatggctcagcatatgatcagagatatccagaccctcttaagtcggatggaatgtcgaggcgggccccagccccagcatagccagcccccaccccaacctcccgccgtcacacctgagcccgtggctctgtcctcccagaccagcgagccggtagagtccgaggctcccccgagggaaccaatggaggcggaggaggtagaggagagggcaccagcgcagaacccagaactgaccccaggacctgcccccgcgggacccactcccgcgccggaaactaacgcaccaaaccaccctagcccggctgaatacgtggaggttctacaagagttgcagagactggagtcccgcttgcagccattcctgcagcggtactacgaagtgctgggggccgcagctactaccgattacaataacaaccacgagggcagagaagaagatcaacgtctgatcaacctcgtcggagaatctctgcgtctcctcggtaatacatttgtggctctgtctgatcttagatgcaacctggcttgcacaccacccaggcatctccatgtcgtccgtccaatgtctcactatacgacaccaatggttctacagcaggccgctatccctatccaaatcaacgtagggacaaccgtgacaatgacaggcaacggcaccagacccccgcccaccccaaatgctgaggcgcccccgccgggaccgggacaggcttcttcggtggcgccttccagcaccaatgtggagtcaagcgcagaaggcgccccccctcctggccctgcccctcctcctgccacaagccatccccgcgtgatccgaatctctcatcagtcagtggagcccgtggtgatgatgcacatgaacattcaagactctggcacacaaccaggtggtgtcccgtccgctcccaccggtccactaggccctcccgggcatggacaaactctcggtcagcaggttcccggctttccaaccgccccgacccgcgtcgtgatcgcaaggcctacaccccctcaggcccgccccagccaccctggtggtccgcccgtgagcgggaccctacaaggtgcggggctgggtacgaatgcgagcctggcccagatggtgagcggcctggtaggacagttgcttatgcaaccagttctggttgcgcagggtactcccggcatggcacccccccccgctcctgccactgctagtgcctctgccgggactactaacacagccactacggctggccctgctcctgggggccccgcccaaccgccaccaacgcctcaacctagcatggctgacctccagttctcccagctgttagggaatcttctaggccctgcaggacctggggccgggggtcctggcgttgcttccccaaccataactgtggccatgcctggggttccagcgttcctgcaggggatgaccgactttctccaggctactcagacggctcccccccctccaccacccccacccccccctccccctgctccggagcagcaaaccatgcctccccctggaagcccgtcaggcggcgccggcagcccagggggcctgggactggaaagcctgtcccccgaattttttacgtctgtggtacagggtgttcttagtagcctgctgggctccttgggggcgcgcgctggatcttctgagagtatcgccgcattcatacaacggttgagtggtagctcaaatatcttcgagcccggagccgatggggctctgggcttttttggggctctgctgtccctgctgtgccagaactttagcatggtcgacgtggtgatgctgttacacggccacttccagcctttgcagcggctccagccacaactgagaagtttcttccatcagcactatctgggaggccaggaacctactccttctaacattaggatggcaacccataccctgatcactggcttggaggaatacgtgagagaaagttttagcctggtgcaggtacagcccggggtcgacattatccgcaccaacctggagttcctacaggaacagtttaacagcattgctgcacacgtgcttcactgcactgacagcgggttcggtgcccgcttactcgagctatgtaatcaaggtttgtttgaatgcctcgcactgaacttgcattgccttggaggccagcagatggagttggcagcggtcataaacggcaggatcagacgaatgtccaggggcgtgaatcctagcctcgtgtcatggctaaccacaatgatggggctcagattgcaggtggtgttggagcacatgcccgttggtcctgacgcaattctgcgctacgttagacgtgtcggtgaccctcctcagccactgcccgaggaacctatggaggttcagggggccgagcgagcatctcctgaacctcagcgagagaacgcatcccctgcccccggcacaacagccgaagaagcaatgtcacggggtccgccccctgctcccgaaggtggctctcgggacgagcaggatggcgcatccgccgagacggagccatgggctgctgccgtgcctcctgaatgggtccctatcatccagcaggacattcagtcccagcgcaaagtgaaaccgcagccaccactgagcgacgcctacctgtctgggatgccagctaagcggcgcaagacaatgcaaggggagggaccccagctgctcctgtccgaggccgtgagcagagcagccaaggccgctggagccagacctctcacctctcccgaatcactctcccgagacctcgaggccccggaagtccaagagtcatatcggcagcaactgcggtccgatatccagaagagactgcaggaagatcctaattatagtcctcaacgctttccgaatgcccaacgggcattcgccgacgacccctag

SEQ ID NO: 109511 - DNA, 789 bp, synthetic construct
  misc_feature 1..789: note = Description of Artificial Sequence: Synthetic coding sequence
  source 1..789: mol_type = other DNA
atggagccaaatgattccaccagcacagctgttgaagaaccggacagcttagaggttctcgtcaagactctggactcccagacacggactttcattgttggggcacagatgaatgtgaaagaattcaaggaacacatcgcagccagtgtctccattcccagtgaaaaacagaggttgatctaccaaggcagggttttacaagatgataagaaactgcaagagtacaacgtgggaggtaaagttattcacctcgtcgagcgcgcacccccgcagactcacctgccaagcggggcctcatctgggactgggagcgccagtgcgactcatggtggggggtccccccccggcactaggggtcccggtgctagtgttcacgatcgcaacgccaattcctacgttatggtgggcactttcaacctgccatccgacgggtctgctgtggatgtccacataaacatggagcaggcaccaattcagagcgagccccgggtacgtctggttatggcacagcacatgatccgggacatccagacacttctgagccgtatggaatgccggggaggtccacagccacagcacagtcagcctccaccacagccaccagctgttaccccagaacccgtagcattgagcagtcagacttcagagccagttgaatccgaggcaccgcctagggaacccatggaggcagaggaagtcgaagagcgggcccccgctcaaaaccccgagctcacccctgggccagctcctgccggacccacaccggcccccgagacaaacgctccatag

SEQ ID NO: 109512 - DNA, 717 bp, synthetic construct
  misc_feature 1..717: note = Description of Artificial Sequence: Synthetic coding sequence
  source 1..717: mol_type = other DNA
tcttccgctgaaggtgcaccgcctccaggaccagctccgcctccagctacttcccacccgcgagtgatccgaatatcacatcagtccgtcgaaccagtggtgatgatgcatatgaatatacagggaccgttatcattaagcccttgtccagatagtggtactcagcctgggggtgttccatctgcaccaacgggccccctgggacctcctgggcatggacagactctcgggcagcaagtccccgggttccctacagcacctacaagggtggtaattgctcgcccaaccccccctcaggcaagaccctcccaccccggcggaccccccgttagcggaaccctgcaaggcgcaggcctgggaaccaatgctagtctggctcagatggtctccggccttgtcggtcagctcctgatgcagcccgtccttgtagctcagggtacccctgggatggcgccaccacccgctcccgcaacagccagcgcctccgcgggcacaacaaacaccgcaaccacggccggcccagccccggggggacccgcccagcctcctccaactccacagcccagtatggcggacctccagttctctcaactgctcggaaacctattgggccccgccggaccgggcgctggcggccccggagtggcctcacctactattacagtggccatgcccggggtcccagcgtttctgcagggcatgacggatttcctatag

SEQ ID NO: 109513 - DNA, 3381 bp, synthetic construct
  misc_feature 1..3381: note = Description of Artificial Sequence: Synthetic coding sequence
  source 1..3381: mol_type = other DNA
atggagccaaatgattcaacatccaccgccgtcgaagaacccgactcgttagaagtgcttgtcaaaactctggatagtcaaaccaggacatttattgttggcgcccagatgaatgtcaaagaattcaaggaacatatcgccgcatcagtatccattccttcggaaaagcagcggctgatttatcaaggtcgcgtcctgcaggacgataaaaagcttcaggagtataacgttgggggtaaggtaattcaccttgtagaacgcgcccccccacaaacccacctacctagcggtgcctccagcgggaccggatcggcttccgccacacatggaggaggttctccccctgggacccgcggcccaggcgctagcgttcacgacaggaatgccaattcatacgttatggtcggcacctttaaccttcccagcgacgggtccgcggtagatgtgcacataaacatggagcaggctccgatccaatccgagcccagggtgcggcttgtcatggcccaacatatgatcagagacatccagacactgctgtcccggatggaatgcagaggtggcccgcagccacagcactcacagcctccaccgcagcctcccgcggtgacccctgagcctgtggcgctttccagccagaccagtgaacctgtggaatccgaggccccaccaagggagcccatggaagccgaagaagtggaggagcgcgcacctgctcagaaccctgagttgacccctggccccgccccagcaggacctacaccagcaccggagacgaacgcacccaatcacccatccccagcagagtacgtcgaggtcctacaagagctgcagcgactggagagcaggctgcagcctttcctccagaggtattatgaggtcctcggcgctgcagcaacgactgattataacaacaatcatgaaggacgggaggaagatcagcggctgataaacctcgtgggcgagagcctaagactgttgggcaatacttttgtggcgttgtcagacttaaggtgtaacctagcttgcaccccccctagacacctgcacgtggtgagacccatgagccattatactaccccaatggtcctacagcaggccgccatccccattcaaattaacgtcggcaccaccgttaccatgaccggaaacgggacccgaccacccccaactcctaacgcagaggctccacccccagggcccggccaggcttccagtgtggcccccagctccactaacgtcgaatcaagtgctgagggagcgcccccacccggcccagcgccacccccagccacaagtcatcctcgtgtgatcaggatctcccaccaaagcgtcgagcccgtcgtgatgatgcatatgaacatccaagactctggcacgcagccaggtggcgtccctagcgccccaacagggcccttgggccccccaggccacggacagaccctcgggcagcaagtccccggctttcctacagccccgactcgggtggtgatagctcgcccaacccctccacaagccaggccatcacaccctgggggccctcccgtctccgggacactgcagggagcgggactgggcaccaacgcaagcctcgctcagatggtaagtggattggtggggcaattgcttatgcagcccgtgctcgttgcccaggggacccctggcatggcccccccacctgcacctgccaccgctagtgcttccgccggaactaccaacacagccaccacggcagggcccgctcccgggggccccgcccagccaccccccaccccccagcccagtatggctgacttgcagttcagccagctgctcggaaacttactaggccctgctggccccggagcgggtggccccggcgtggcttcccccaccattaccgtggccatgcctggcgtgcccgcatttctgcagggaatgaccgacttcttgcaagcgacccagaccgccccccccccccccccccctcctcctcctccacccccagcgccagaacagcaaactatgcccccacccgggtcaccatcaggcggcgctgggagccctggagggcttgggctcgagagcctgagcccagaatttttcacctccgtggttcagggagtgttatcatctctactggggtcactaggcgctagggccggatcctctgagtccattgccgcctttatccaaaggcttagtggctcgagtaacatcttcgaacccggggcagatggagcactcggtttcttcggcgcactgctgagcctgttatgtcagaattttagcatggtggacgtggtcatgctcctccacgggcactttcagccgctccaacggctgcagccccagctgaggtctttcttccaccagcactacctggggggccaggaaccaacaccatccaacatacgcatggcgactcatacactgatcaccgggctcgaagagtatgtgagagaatccttttccctagttcaggttcagcccggggtcgacatcataaggactaacttagagtttctgcaggagcaattcaacagtatagcagcacatgttctacactgtacagactccggctttggcgcgcgactcctggaattgtgcaatcaaggcctgttcgagtgcctcgctctgaacttacattgcctggggggccaacagatggagctcgccgccgtgatcaatggaagaattagacgcatgagtcggggggtgaacccaagccttgtgagctggcttacgacgatgatggggttacggctgcaggtggtgctggaacatatgcccgtgggtcccgatgcaatcttgagatatgtgaggagggtcggtgatccgccccagccactcccagaggagcccatggaagtccagggggcggaacgcgccagtccagagccacagcgcgagaacgcctcgcctgctcccgggaccacagccgaggaagcaatgagcaggggaccacctccagccccagaaggtgggagcagagatgaacaggatggcgcatccgctgagaccgagccatgggccgccgcggtgccgcctgagtgggtgcctatcatccagcaggacattcagagtcaacgcaaggtgaagccccagccacccctgtccgacgcatacctgtctgggatgccggctaagcgccgaaaaactatgcagggggaaggcccccagcttcttttatctgaagctgttagtcgggccgctaaggcggctggcgcacggcctttgactagccctgaatctttgagcagggacctagaggcccctgaggttcaggagtcataccgccaacagctccgctcagacatccagaagagactgcaggaggatccaaactattctccacagcggtttccaaatgcccagagagcctttgctgatgatccgtag

SEQ ID NO: 109514 - DNA, 648 bp, synthetic construct
  misc_feature 1..648: note = Description of Artificial Sequence: Synthetic coding sequence
  source 1..648: mol_type = other DNA
atggagccgaatgacagtaccagtacagcagtcgaggagcccgactctctcgaagtgttggtgaaaaccctcgacagccagaccagaacctttatcgtcggagcgcaaatgaacgtaaaggaatttaaagagcatatcgccgcctctgtttcaattccttctgaaaagcagcgcctaatctaccagggacgcgtcctgcaggacgacaagaaactccaggaatacaatgtcggcggcaaggtgattcatttggttgaacgggcccccccacagacccatctgccatcaggggcctcctcagggacaggctccgccagcgctactcatggcgggggatccccccccggtactcgtggcccaggagcctccgtgcatgaccggaatgcaaactcgtatgtcatggtcggtacattcaacctgcccagcgaacctcgcgtaagactggttatggcccagcacatgatccgtgatatacagacactccttagccgtatggagtgcaggggcggaccgcaacctcagcactcacagcctccaccccagcctcctgccgtaactcccgagcccgtggccttgtcaagccagacaagcgaacctgttgagagcgaagccccccctcgagagccaatggaagctgaagaggtgtag

SEQ ID NO: 109515 - DNA, 789 bp, synthetic construct
  misc_feature 1..789: note = Description of Artificial Sequence: Synthetic coding sequence
  source 1..789: mol_type = other DNA
atggaaccaaacgatagtacctccactgcagttgaagagcccgacagcctggaggtgctcgttaaaaccctggactcccagacaaggacatttatagttggcgctcagatgaacgttaaagaatttaaagagcacatagccgctagcgtttcaatcccctccgagaaacagcggctaatctatcaaggccgtgtcctccaggatgacaaaaagctccaggagtataacgtcggcgggaaggtgatccacctcgtagaacgggctccgcctcaaacccaccttcccagcggggcttcttcagggactggatcagcatccgctacacatggcggcggtagcccccccggaacacgcgggcccggcgcaagcgttcacgaccgaaatgccaatagctatgtgatggtgggaacctttaatctgcctagcgacggttcagctgtggatgtccacattaacatggaacaggcccctatccagtcagagcccagggtcaggctggtgatggcacagcacatgatacgagacatccagacgctgttatcgcgtatggagtgccgcggcggcccacaacctcagcactcccaacccccaccccagccaccagctgtgacacccgagccagtggcactcagtagccagacgtccgaaccagtagagagtgaggctcccccacgggagcccatggaggcggaggaggtggaagaaagagcaccggctcagaatccggagctcacgcctggaccagcccctgcgggtcccacacccgcacctgaaacaaacgcgccctag

SEQ ID NO: 109516 - DNA, 2232 bp, synthetic construct
  misc_feature 1..2232: note = Description of Artificial Sequence: Synthetic coding sequence
  source 1..2232: mol_type = other DNA
atggagcctaacgacagcacgtcaactgcagtcgaggaacccgatagcctcgaggtcttagtcaagaccctggactcacagacgaggacattcattgtgggggctcagatgaacgttaaggaattcaaagaacacatcgctgctagcgtgtctatcccttcagagaaacagaggctgatttaccaggggagggtgctgcaggacgacaagaagctgcaggaatataatgtgggcggcaaggtcattcacctggtcgagcgggctccacctcagacccatctcccctcaggcgcctcttccggtactggcagtgcctccgccacgcatggtggtgggtccccaccgggaaccagaggtcccggcgccagcgtgcatgataggaatgctaactcttacgtgatggtggggacattcaacttaccgtcagatggcagtgctgtggacgtgcacattaacatggagcaggcccctatccagtccgaacctagagttaggctcgtgatggctcagcacatgatcagggacatccagacactcctgtctcggatggagtgccgcggtggcccccagccacagcactcacagccaccgcctcagccccctgcagttacccctgagcctgtggccctgagcagccagacttcggaacctgtagagagtgaagcaccccctcgagaacctatggaggctgaggaagtggaagaaagagcgccagcacagaaccctgagcttacccccggcccagcccctgctggccctacgccggcccctgagactaacgccccgaaccacccttcacccgccgagtacgttgaagtgcttcaggaacttcagcgactggagtctcgactgcagcctttcctgcagagatactacgaggtccttggggctgccgccacaactgattataacaataaccatgaaggacgcgaggaggatcagaggctgattaacctagtgggagagagtctcaggctgctcggaaatacattcgttgctttgtcagacttgcgatgcaatctagcatgcaccccaccgagacacctccatgtggtgagaccgatgtcacactatacaactcccatggttctgcagcaggcggccattcccatccagattaacgtgggcactactgtgaccatgactggtaatggcacacggccaccacctacccccaacgcggaagcaccgcccccggggccaggacaagcaagttcagtagcccctagctccaccaatgtagaatccagcgccgagggagctccaccgccagggccagctcctccacccgcaaccagccacccaagagtcatccgaatatcccatcagagcgtcgaacccgtagtgatgatgcatatgaacattcaggatagcggcacccagcccggcggagtacccagtgcccccaccggacccctaggtccccctggccatggtcagacattgggttcgaccctgattcagctaccatccttacctcccgaatttatgcatgcggtggctcatcaaattacccaccaggccatggttgcagcagtggctagtgctgccgccgggcagcaggtgcccgggttccctactgcacccacaagagtcgtgattgcacggccaacccccccccaggccaggccgagccatcccggcggccctccagtgtcaggcacattacagggcgcagggttgggcactaacgcatccctggcacaaatggtcagtgggctggtggggcaactgctgatgcagcccgtactggttgcacagggaacgccgggtatggctcccccacccgcccccgccacagcctctgcctccgcaggtacaacgaacacggcaacaacagcaggaccagctcccgggggtcccgcccagcctccaccaacccctcagccctcgatggcagaccttcagtttagccagttgctgggcaacctcctgggccctgcagggcccggggcagggggccccggggtagcctcacccactataacagtggctatgccgggagtccctgcttttctgcaggggatgaccgatttcctgcaggctacacaaacagcccctcccccgcctccccctcccccgccccctcccccagcacctgaacagcagacaatgccccccccgggatcaccaagtggaggtgccgggtctcctggtgggctgggcctagagagcttgtcacctgagttctttacgagtgtcgtccagggcgtactgagtagcctgctttag

SEQ ID NO: 109517 - DNA, 3381 bp, synthetic construct
  misc_feature 1..3381: note = Description of Artificial Sequence: Synthetic coding sequence
  source 1..3381: mol_type = other DNA
atggaacccaatgacagtacctcaaccgcagtggaggagccggactcactggaagtattggtaaagaccctggacagccaaacacgcacattcatcgtaggcgcccagatgaatgtgaaagaattcaaggaacatatagctgcgagcgtgagcatcccatcggagaagcagcggcttatctaccagggaagagtgctccaagatgacaagaagctgcaggagtacaacgtgggaggcaaggtgattcatttagtggagcgcgcccccccacagacccacctgccaagcggcgccagttctggaacaggctccgcctccgccacacacggtggaggctccccaccgggcactagaggtccaggtgccagcgtccacgaccgcaatgctaactcttatgtgatggtcgggacattcaacctgcccagcgatgggtcagccgtggatgtccacataaatatggagcaagcacccatacagagtgaacctagagtccgattggtgatggcccagcatatgatccgagacattcagacactactctccaggatggagtgccgcggcggtccccagccacagcacagccaaccccctccgcaaccaccagcagtcacgccagagcctgtggcgttaagcagccagacttcggaacccgtggaatcagaggcacctcctagagagccaatggaagctgaggaggtggaggagcgggccccagcacagaaccctgagttaacacccggccccgcacctgcggggcccacccctgccccggaaaccaacgctccaaaccaccccagccccgccgagtacgtggaggtgctgcaagagctgcagaggcttgagtctcgactccagccatttttgcagaggtattacgaggtcctgggcgccgctgcaaccacggattataataacaaccacgaagggcgtgaggaggatcaaagacttataaacctggttggggagagtctgcgactgctcggtaataccttcgtggcactcagcgacctgcggtgcaatctggcttgtacgcctcctcggcatttacacgttgtgcgcccaatgagccactataccactccaatggtgctccagcaggccgcgatccccatccagatcaacgtgggcacgactgtcacgatgaccggcaacggaacgagaccaccgcctacacccaatgcagaagcgcctcctcctggacccggacaggcttcatccgtcgcaccaagctcaaccaatgtggagagcagtgcagagggcgcaccaccaccggggcctgccccgccccctgccacctcacaccccagggtgatccgcattagccatcagagcgtggagcccgtggtaatgatgcacatgaacattcaggactccggaacccagccgggtggcgtgccgtcagcaccaacaggccctctgggtcccccaggacacggccaaacgctggggcaacaggttccaggctttccaacggctcccacccgggtcgtgatagcaagacctactccacctcaagctcgtccgtcacatccaggcgggccgccagtatcaggcacactgcagggagctggcctgggaaccaacgcctctctcgctcagatggtttccggactggtgggccagctgctgatgcagccagtgttagtcgcccaaggaacccccgggatggcgccgccaccagcgccggcaacggccagtgccagtgccggaactactaatacggcaacaaccgccggtccagccccaggaggccctgcacagcccccccctacacctcagcctagcatggctgacttgcagttctcccaattactgggcaatttgctcggtcccgcggggccaggcgcaggcgggcccggcgttgcctctccaaccataaccgtggctatgcctggtgtcccggcctttctgcaaggaatgaccgatttcctccaggccacccagactgcaccacccccccctcctcctccaccaccccctcctcctgcgcctgaacagcagaccatgccgcccccgggaagtccgagcgggggggccgggtcacccggggggcttggccttgagtccctgtcgccagaattttttacctcagtcgttcaaggcgtgctgagttccctgctcggctccctcggcgcacgcgccggctcctcagaaagcatcgccgcgttcatccagcgcctgagcgggtcgtctaacatatttgaacctggagccgacggcgcgcttggcttctttggggcccttttaagtctgctgtgccagaacttttccatggtcgatgtggttatgctcctgcacggccacttccagcccctccaacggctgcagccccagctgcgttcctttttccaccagcactatcttgggggccaggaacccacgccttcgaacatcaggatggctacacacacgttgattacaggactcgaggaatacgtacgcgaatctttttcattagtgcaggtgcagccaggcgtggatattattcgcacaaatcttgaatttcttcaggaacagttcaatagcatcgcggcacacgttctccactgcacggactctgggttcggggctaggctgctggaactgtgtaaccagggtctgtttgagtgcctagccttaaatttgcactgcttaggaggacagcaaatggagctggccgccgttatcaatggcagaatccgtagaatgagtcggggagtcaatccatctctggttagttggttgacgaccatgatggggctccgcttgcaagtcgtactggaacacatgcctgttgggcccgacgctatattgcggtacgtgaggagagttggtgatccaccccagcccctcccagaggaacccatggaggtccagggggcagaacgcgcgagcccagagcctcagcgtgagaatgcctcgcctgctcctggcacaacagcagaagaagccatgagccgggggcctccccccgcacccgaagggggaagccgcgacgaacaggacggggcctccgccgagactgaaccgtgggctgctgcagttccacccgaatgggtccccattatccagcaagacatacagtctcagagaaaagtaaagccacagcccccactatccgatgcctacctctctgggatgcccgccaagaggcgaaaaaccatgcagggggagggcccacagctactcctgtccgaggctgtgagccgggcagctaaggctgccggcgcccggccgctcacctccccagagtctctgtcccgagacctcgaggcacccgaagtgcaagagagctacagacaacagctacgctcagatattcagaagcggctgcaagaagaccccaattacagtcctcagagatttcctaacgcacagcgcgccttcgccgatgacccatag

SEQ ID NO: 109518 - DNA, 3381 bp, synthetic construct
  misc_feature 1..3381: note = Description of Artificial Sequence: Synthetic coding sequence
  source 1..3381: mol_type = other DNA
atggagcccaacgattcgacttccacagcggtggaggagcctgattcacttgaagttctggtcaagacattggatagccagacccggacttttatagtgggtgcacagatgaatgtgaaggaattcaaagaacatatagccgcctcagtttcaattcctagcgagaagcagcgcctgatttaccagggaagagtgctacaggacgataagaagctccaggaatataatgtggggggtaaggtcattcacctggtggaacgagctccccctcaaacccacctcccaagcggcgcaagttcggggaccggttctgctagcgctacgcatggcggagggagtccccctggtacccgcggccctggcgctagtgttcacgaccggaacgccaactcatatgttatggttggaaccttcaatctgccatctgacggtagtgccgtggacgtgcacatcaacatggaacaggcacccatccagagtgagccgcgggtccggttagttatggcacagcacatgatccgggacatccaaacactgctttctcggatggaatgccgcggaggtccccagccgcaacatagtcagcctcccccacagccacctgctgtgacgcccgaacctgtggccctgtcctcccagactagtgaacccgtcgagtctgaagccccccctagagagccaatggaggccgaggaagtcgaggagcgtgcacctgcccagaatcccgaacttacacctgggcctgcaccagcgggcccgaccccagcccccgaaaccaacgcgccaaatcacccatctccagccgaatatgtagaagtccttcaggagttacaaaggctggagtcacggctgcagccgtttctgcagaggtactatgaggtgctcggggccgctgccacgacagattataataacaatcacgagggacgagaagaagaccagaggctcattaatctcgttggggagagtttgaggttgctgggtaacacttttgtggcactctcggaccttaggtgcaatctggcttgtacccccccgcggcatctgcacgtagtcaggccgatgtctcactatactactcccatggtacttcagcaggcggccatcccaatccagataaacgtgggcactacagtgactatgacaggtaatggaacaagaccgccacctacacccaatgcagaggcccctcctcccgggcccggacaggctagtagtgttgctccctcctctactaatgtggagtcgagtgccgagggggctccccccccggggccagctcccccgccggcgaccagtcaccctagggttatcaggatttcacatcaatcagtagagcccgtcgtgatgatgcacatgaacatccaggattcaggcacccagccaggaggggtgccttccgctcctactggccctctcggcccccccggacatggacagacgttaggccagcaggtcccggggttcccgaccgccccgacgagggtcgtgatagcccgtcccacccctccacaggctcgccctagccacccaggggggccgcccgtgagtggcaccctgcaaggggccggactggggacaaacgcttcattggctcagatggtatctgggctcgttggacaactactgatgcagccagtactggtggcccaagggacaccaggtatggcaccaccccccgcccctgccaccgcctccgctagcgccggaaccaccaatactgccaccacagctggacctgcacctggaggtcctgctcaaccacctccaacacctcagccgtccatggctgatctgcagttctcgcaattactggggaaccttttggggcctgccggaccgggagctggcgggccaggggtagcatcacccacaattaccgtggctatgcctggtgtgcccgctttcttgcagggaatgaccgatttcctgcaggcgacacagaccgccccccctccaccgcctccaccgccaccacctcctccagctcccgagcagcagacaatgcccccccctggaagtcctagcggaggagcgggatcaccaggcggcctggggctggagagtctctcccccgaatttttcactagtgtggtgcagggcgtcctgagttctctgcttggcagtctgggagcccgggctggctcatcggagagcatcgctgcgtttatccagagactctccgggtccagtaacatttttgagcccggtgccgacggcgctctgggcttctttggtgccctcttatcactcctgtgtcagaacttttctatggtcgacgttgtgatgctgttacacggacatttccagcctttacagagactccagccccagctccggagcttttttcaccagcattacctcggggggcaagaaccaacaccaagtaatatccggatggctacccataccctcataactggacttgaagagtacgtgagagaaagcttttcccttgttcaagtgcagccgggtgtcgatatcatccgcactaatcttgagttcttgcaggaacagtttaacagcatcgcagcgcatgtgctgcactgtactgatagcggcttcggagcaaggctgctagaactgtgtaatcaggggttgtttgagtgcttagcgctgaaccttcactgcttgggcggacagcaaatggagctggcagcggtgattaacggtagaatcaggaggatgtcacggggcgtcaatccttctttggtttcttggctcacgactatgatgggtcttagactccaggttgtgctggaacacatgccagtcggacccgacgccatcctacggtatgtgcgtcgcgtgggcgatcccccccagcctttacccgaggaacccatggaggttcagggcgccgagcgcgcctcccctgaaccccaaagagagaatgccagccctgccccaggcacaacagccgaggaggccatgtcacggggacccccccccgcccccgagggcggctcccgcgacgagcaggatggtgcgtctgctgaaacggagccatgggctgctgcagtccccccagaatgggtgcccattatacagcaggatatccagagtcagaggaaggtcaaaccacaaccacccctatccgacgcttacctgtcggggatgccagcaaaaaggcgaaaaacaatgcagggagaaggcccacagttgctgctctctgaggcagtctccagggctgctaaagctgccggtgcacgccctctgacttctccggagagtctgagcagggacttggaggcacccgaagtgcaagaatcttatcgacagcagctgcgaagtgatattcagaagagactgcaggaggatcctaactattccccacaacggtttcccaacgcccagcgggctttcgcagacgacccctag

SEQ ID NO: 109519 - DNA, 411 bp, synthetic construct
  misc_feature 1..411: note = Description of Artificial Sequence: Synthetic coding sequence
  source 1..411: mol_type = other DNA
taaagaatgagtagaggagtaaacccatctctggtctcctggctaacgactatgatgggcttgaggctgcaagtcgtgttggaacacatgccagtggggcccgacgccattctgcgctacgttaggagagtcggagatccacctcagcccctgcccgaggaacctatggaggttcagggtgctgaacgggcatcacctgagcctcaggaatgggtccctatcatccagcaagatatacagtcccagagaaaagtcaaacctcagccgcccctctcggacgcctatttgagcggcatgcccgcgaaacgacggaagctcaggagcgatatacagaaaagactgcaggaggatcccaattactccccgcaaagatttcctaatgcccagcgcgcgttcgcagacgacccatag

SEQ ID NO: 109520 - DNA, 789 bp, synthetic construct
  misc_feature 1..789: note = Description of Artificial Sequence: Synthetic coding sequence
  source 1..789: mol_type = other DNA
atggagccaaatgactcaactagtactgccgttgaagagccagactctttggaagtcctggtgaaaactttggacagtcaaaccaggacatttatcgttggtgctcagatgaacgttaaagaatttaaagagcatatagcagcttccgttagcatacctagtgaaaaacagaggcttatataccaaggacgggtcctgcaggatgataaaaagctccaggagtataacgtaggtggtaaggtgatccaccttgttgaaagggccccgccccagactcacctgccgagcggggcttcctcggggacgggctcagctagcgctacacacggcggcgggtcccctccagggactcgcgggccaggggcgagcgtgcacgatcgcaacgccaactcttatgtaatggtgggtacattcaatttgcctagcgatggatccgcggtggacgtgcatataaacatggagcaggcacccatccagtctgaaccaagggttaggttagtgatggctcaacatatgatacgagacatacagactttactctcccgaatggaatgtcggggggggccgcagccacagcacagtcagcctcccccccagcccccagccgtgaccccagagcccgtggcattgtcctcacagacttctgagcctgtggaatctgaggcacctccaagggagccaatggaagccgaagaggtggaagagcgggcccctgcacagaacccggagctcaccccagggcctgccccagccggtcccacacccgctccggaaactaacgccccctag

SEQ ID NO: 109521 - DNA, 735 bp, synthetic construct
  misc_feature 1..735: note = Description of Artificial Sequence: Synthetic coding sequence
  source 1..735: mol_type = other DNA
atggaaccgaatgattccacttcgacagcagtagaagagccagattcattggaagtgctggtcaaaacgctggactctcaaacacgaaccttcattgtcggggcccagatgaatgtgaaagagttcaaagaacatattgcggcaagcgtgagcatcccctccgaaaagcagcggctcatttaccagggtagagtgctccaggatgataagaagttgcaggaatataatgtaggaggaaaagtgatccacttagtggagcgtgccccaccccagactcatctcccttccggagcctcttccggcactggttcagcctctgcaacacatggcggtgggagtcctcccgggaccagagggcccggcgccagtgttcatgaccgtaacgccaacagctatgtcatggtgggtactttcaacctgccatcggaacctagagttagactagtcatggcacagcacatgatcagagacatccaaacactactgtcgcggatggagtgcaggggtgggcctcagccccagcacagccagccacctccccaaccgccagctgttacgcctgaacccgtcgcactgtcaagccagacctccgagccggttgagtctgaggcccctccacgggagccaatggaggctgaggaagttgaggagagagctccagcccagaatcccgaactcacacccggacctgctccagccgggcccacccccgctccggaaacaaatgcgccctag

SEQ ID NO: 109522 - DNA, 594 bp, synthetic construct
  misc_feature 1..594: note = Description of Artificial Sequence: Synthetic coding sequence
  source 1..594: mol_type = other DNA
atggagccaaatgacagcacctccacagcagtggaagagcccgactcattagaggtcctggtcaagacactggattcacagaccaggactttcatcgttggggcccaaatgaacgttaaggagttcaaggagcacattgcagcatctgtgtctatcccttctgagaagcagcgtcttatctaccagggccgagtcctccaagatgacaagaagttgcaggaatacaatgtgggtggaaaagtgatccacttggtggaacgggctcccccccagacacacttgcctagcggagcgtcaagcgggacaggttccgcctctgccactcatggaggggggtccccacctggcaccagaggtcccggagccagcgtgcacgatcgtaatgccaattcctatgtgatggtggggacgttcaacctaccatccgatggttcggctgtcgacgtgcatataaatatggagcaggcgcccatccagtccgagccccgcgtgaggttagtgatggcccagcatatgattagagacattcagactctgctctccaggatggaatgtaggggaggcccccagccacaacacagccagcctccatag

SEQ ID NO: 109523 - DNA, 621 bp, synthetic construct
  misc_feature 1..621: note = Description of Artificial Sequence: Synthetic coding sequence
  source 1..621: mol_type = other DNA
atggagcccaacgatagcacctcgactgctgtggaagagcctgacagtcttgaagtgcttgtgaagacgctggactcacagacccgcaccttcatcgtcggggcccaaatgaatgtcaaagaatttaaggagcatattgcggcatccgtctcaattccttccgagaaacagcgcctgatctatcaggggcgggtcctgcaagacgacaaaaaactccaggagtataatgtagggggcaaggtgatccacctcgtggagcgggccccccctcagactcacctgccgtccggcgctagtagtggcacaggttcagcctctgccactcatggcggtggtagcccaccaggcacaagagggcctggggcaagcgtgcacgaccgaaatgcaaactcgtatgtgatggtgggcactttcaacctcccaagtgaacctagggtgcgcctagtgatggctcagcatatgattcgtgatattcaaaccttgctgtctcgtatggagtgcagggggggccctcagccccagcattcacagcctccgccgcaacccccagccgtaactccagagccagtcgcattatcatcgcagaccagcgagcctgttgaaagcgaagcaccaccatag

SEQ ID NO: 109524 - DNA, 735 bp, synthetic construct
  misc_feature 1..735: note = Description of Artificial Sequence: Synthetic coding sequence
  source 1..735: mol_type = other DNA
atggaaccaaacgactccaccagcacggctgtagaggagcctgactctctcgaggttctggttaagacgctcgatagccaaacgaggacttttatcgtgggcgctcagatgaacgtcaaggaattcaaagagcacattgcagcctctgttagcatccccagcgaaaaacagagactgatctaccaggggcgtgtgttacaggacgataaaaaacttcaggaatacaatgtggggggtaaagtaattcacctcgtcgagagagccccacctcagacccatctgccgtctggcgcctccagcggtaccggcagcgcctcagccacgcacgggggaggctcccctccaggaacgcgggggccaggtgcatctgtgcatgaccgaaacgccaactcgtatgtgatggtgggcacgttcaacctgccgtctgagcctagagtgcgactggtgatggctcagcatatgatcagagacatccagacactactcagtagaatggaatgccggggagggccgcagccacagcattcacaaccccccccacaacctcccgccgttactcctgagcctgtcgcactgtctagtcagacttccgaaccagtggaatcagaggcgccccctcgggaacctatggaggcagaagaggttgaagaacgtgccccagctcaaaacccagagcttacaccaggccctgcgccagccggacccacccctgcccctgaaactaatgccccttag

SEQ ID NO: 109525 - DNA, 3381 bp, synthetic construct
  misc_feature 1..3381: note = Description of Artificial Sequence: Synthetic coding sequence
  source 1..3381: mol_type = other DNA
atggagcccaacgattctacgagcaccgccgtagaagagcccgattccctggaagtactcgtgaaaacacttgatagtcaaacacggacattcatcgtcggcgctcagatgaacgtaaaggagttcaaagagcatatcgctgctagcgtttcaatacccagcgaaaagcagcgcctcatataccagggtcgagtgttgcaggatgataaaaagctgcaggaatataacgtgggcgggaaagttattcacctcgtagagagggcacccccacaaactcaccttccttctggcgcaagttctggaaccggttccgccagtgccacacatgggggcgggagccctccaggaactcggggccctggggcctccgtacacgacagaaacgcgaatagctatgttatggtaggaacattcaacttaccttctgatgggagtgctgttgacgttcacatcaacatggaacaggctcccatacaaagcgagcccagggtcaggctggtgatggctcaacacatgatcagggacatccagactctcctatcaagaatggagtgtcgtggaggcccccagccccagcacagccaacccccaccgcaacccccggctgtgacacctgagcctgtggctcttagtagtcaaacatcagagcccgtagagtctgaggctccgcccagggaacccatggaggccgaggaagtggaagaacgggccccagctcaaaatcccgagttgactccgggacctgctccagccggcccaacacctgcccctgaaaccaacgcccccaatcaccctagcccagctgagtatgttgaggtcctccaggaactccaaaggctggaatcgcggctccaacctttcctccagcgctactacgaggtgttaggcgcagcagcgacgaccgactataacaacaatcacgaaggacgggaagaagaccagaggctcatcaaccttgttggcgaaagtctgcgcctgctgggcaacacctttgtcgccttgtctgacttacgctgcaatctggcctgcactcctccccgccacctgcacgtcgttcggccaatgagtcactatacaacgcccatggtccttcaacaggctgctatccccatccagattaatgtcggtacaacagtcaccatgaccggaaatggcaccagaccgccaccaactccaaatgcagaggccccacctccaggacctggacaggcatcatctgtggcaccatccagtaccaacgttgagagctctgcagagggagcccctccacccgggccagctcctccgccagcaacctctcacccccgagttatacgaatcagccatcaatcagtcgagcccgtggtcatgatgcacatgaacattcaggactcgggcactcaaccggggggtgtccctagcgccccaacaggaccactgggtccccccggccatggccagacactcgggcagcaggtacctggctttcccaccgccccaacccgcgttgttatcgcacggcctactcccccgcaggcacgcccgtctcaccccggtggcccaccggtgtccggcactttgcaaggagccggattgggaaccaacgcttctcttgcacaaatggtgtcggggcttgtaggccaattactcatgcagcccgtgcttgttgctcaaggcacaccaggtatggcacctcccccagcacctgcaacagcttctgcctcagccggcactactaacaccgccactaccgctggcccagcccccgggggccccgcccagccacctcccacccctcaaccttcgatggccgacctacagttctcacagctactcggcaatctgttggggcctgcagggcccggagcaggtggtagtggcgtggcaagtccaacaatcacggtagcaatgcctggtgtgccagcatttttgcagggcatgacagactttctgcaggccacccagaccgccccgccacccccaccgccaccgccaccccctcctcccgcacccgagcaacagaccatgccaccaccgggttcccctagcgggggcgctggatcacccggcggcttagggctcgagagcctatcacccgagtttttcacatcggtggtccaaggcgttttatcctcgctgctgggatccttaggtgcacgcgccggctcctcggagtccatcgccgctttcatccagagactttctgggagcagcaacattttcgagcctggagccgacggagctctgggatttttcggcgcccttctgtctttgctgtgccagaattttagtatggtggatgtggtgatgctgctacacgggcattttcagccccttcaacgcctccagccccagcttcggagcttcttccatcagcattatctggggggccaggagcccacccctagtaacataagaatggctacgcacacactgattaccggtctcgaagagtacgttcgggagagcttctccctggtgcaggttcaacccggagtggacattatccggacgaacctcgaattcctacaggagcagtttaactccatagccgcccacgtactacattgtaccgattcaggattcggtgcgcgcttgcttgaactgtgcaaccaaggcttgttcgaatgcctcgctctgaatttgcactgcctgggcggccagcagatggaacttgccgccgtgattaacggaaggatcagacgaatgtctagaggcgtgaatccatctctagtctcctggctgaccactatgatggggttaagattacaagtggtgttagagcacatgccagtgggccctgacgccatcctaaggtacgttaggcgcgtgggggatcccccgcagccactccctgaggagccgatggaggtccagggggctgaacgggcctctcccgaaccccagagggagaacgcctcacctgcccccgggacaacagcagaggaggccatgtctagaggcccaccgcctgcccctgagggcggctctcgggatgagcaggatggagcctctgccgaaaccgagccctgggccgcagccgttcccccagaatgggtcccaatcatccaacaggatattcagtcgcagcggaaagtgaagccgcagcctccattgtcagacgcttacctgtcaggcatgcctgcaaagcgccggaaaactatgcaaggagagggccctcaactgttactctcggaagccgtgtcccgcgcagcaaaggccgccggcgctcgtccactgacaagtcctgagagcctgtccagagatctagaggcacctgaggtacaggaatcgtatagacagcagctcaggagcgatatccagaagaggctccaggaagatccaaactactcaccccaacggttccctaatgcacagagggccttcgctgatgacccctag

SEQ ID NO: 109526 - DNA, 735 bp, synthetic construct
  misc_feature 1..735: note = Description of Artificial Sequence: Synthetic coding sequence
  source 1..735: mol_type = other DNA
atggagccaaacgattctaccagtacggccgttgaggaaccggactcactcgaagtgctggtcaaaactttggatagccagacacgcacatttatagtcggcgcccagatgaatgtgaaggagttcaaggaacatatcgccgcttccgttagcattccgtccgaaaagcagcgtctcatctatcagggccgagtccttcaggatgacaaaaagcttcaggagtataacgtgggggggaaggtcattcacctggttgagagagctccgcctcagacacatttacctagtggggccagttcagggaccgggagcgcctccgctacccatggaggcgggagtccaccaggcactcgcggtcccggagccagtgtgcatgatcgtaacgccaactcctacgtcatggtgggaacatttaatttgccttctgaaccccgtgtgcgccttgtcatggcccagcatatgatcagagacatccagacactcctgtcgagaatggaatgtcgcggtggtccccaaccacagcacagccagccacccccgcaaccgccggccgtgacccccgagccggtcgccctaagttcccagacgtccgaacccgtggaatccgaggccccccccagagagccaatggaggccgaggaggtggaagagcgcgccccggcgcaaaatcccgagctgactcctggccctgcccctgctggtccgactcccgcccctgaaaccaatgcaccttag

SEQ ID NO: 109527 - DNA, 717 bp, synthetic construct
  misc_feature 1..717: note = Description of Artificial Sequence: Synthetic coding sequence
  source 1..717: mol_type = other DNA
agctccgctgaaggcgcaccaccaccagggcccgccccaccacccgcaacctcccacccaagagtaatccggataagtcatcagagcgtcgagccggtggtcatgatgcacatgaacattcagggccctctctcgttaagcccctgccccgactcagggacacaaccgggaggcgtgccatcagccccaaccggccctctgggcccccctggacatggccagactcttgggcagcaggtgcccgggtttcctacagctcccactcgggtcgtgatcgcccgacctactccacctcaggcacgccctagccaccccggcgggcccccagtgtccggaacattgcagggtgcgggcttaggcaccaacgctagcctcgctcaaatggtgtccggactggtgggacagttgctcatgcagcctgtgttagtcgcacaggggactccagggatggcaccacctcccgccccagcgaccgcaagcgcttccgccggtacgaccaacacggccacaacagctggccccgcacccggtgggcccgcccagcctcctccgacgccccaaccatctatggccgatctacagttttcacagttacttgggaaccttctgggcccagccggtccaggggcaggagggtctggcgtggcatctcccacgatcactgttgccatgcctggcgtgccagcctttctgcagggcatgactgacttcctatag

SEQ ID NO: 109528 - DNA, 735 bp, synthetic construct
  misc_feature 1..735: note = Description of Artificial Sequence: Synthetic coding sequence
  source 1..735: mol_type = other DNA
atggagccaaacgactctacgtcaaccgccgtggaagagccagactcactggaggtgctcgttaagacactggattcccaaaccagaacgtttatcgtaggtgcacagatgaacgtgaaggagttcaaggagcacatcgccgcaagtgttagtataccaagtgagaaacaacgcttgatatatcagggtcgggtcctgcaggatgataaaaagttacaggaatacaacgtcggtggcaaagtcatccatctggttgagcgagctcctccacagacacacttaccaagtggcgcttcctccggaaccgggtcagcaagcgctactcacggcggtggcagtccaccaggaacaagggggcctggagcctcggtgcacgacagaaacgctaattcctacgtaatggtagggactttcaacctgccctccgaaccccgagtcaggctggtcatggcacagcacatgatcagggacattcagacgctgctttccagaatggagtgtcgcggcggaccacagcctcagcactcccaaccccccccacagccccctgcagtgacgcctgagccagtggctctgtcctcccaaacgagcgagcccgtagagtccgaggcccccccaagggagccaatggaggcggaggaggttgaggagagagcccccgcacagaatcctgagctgacacctggtccagcacccgccggacccactccagccccggagaccaatgctccctag

SEQ ID NO: 109529 - DNA, 2232 bp, synthetic construct
  misc_feature 1..2232: note = Description of Artificial Sequence: Synthetic coding sequence
  source 1..2232: mol_type = other DNA
atggaaccaaacgactccacatctacagccgtggaagagccggattcattggaggtgttagtaaagactctcgattctcagactcgcacgttcatcgtgggagctcagatgaatgtcaaggaatttaaggagcatattgcagcatcagtgtctatcccatccgagaaacaacggctgatttaccaggggagggtcttgcaggacgacaaaaagctgcaggaatacaatgtcggcggcaaagtaatccacctcgtggaacgggccccgcctcagactcacctgccctctggcgcttcttccggcacaggcagcgcatccgctacacacggaggtgggtctccaccgggcacccgtggtccgggtgcctccgtacatgaccgcaatgccaattcctatgttatggtaggtacatttaatttgccctctgatgggagcgctgtggacgttcacattaacatggaacaagctccaattcaaagtgaacctcgggtaagattggtgatggcgcaacatatgatcagggacatccagacattgctgtctcggatggaatgcagaggggggccacagcctcagcacagtcagccccctccccagccccccgctgtgacacctgaaccagtggccctgagcagccagacctctgagccagtagagagcgaagcacctccaagggagcccatggaggccgaggaagtcgaagagcgcgccccagcgcagaatcccgagctaacccccggccctgccccagccggaccaacgccagcgcctgagacgaacgctccaaaccacccctccccagccgaatatgtagaggtcttgcaggaactccaacgcctcgagtctcgactgcagccttttctgcagcgctattatgaggtattaggcgcagctgccacaacagactataacaacaatcacgagggcagggaggaggaccagaggctgatcaacctggttggagaaagtttgaggctcttagggaacacatttgtggcgctgtctgatctgcgctgtaatctggcttgcacaccgcctcgacatttacatgtggtgcgtcctatgtcccactatacaaccccaatggtgcttcaacaggccgccattcccatccaaatcaatgtgggcacaactgtaactatgaccggcaacggaacacgccctccgccgacccctaacgccgaagcccccccaccaggtccgggccaagcaagtagcgtggcgccctcctcgaccaacgtagaatctagcgccgagggcgcccctccccccggtcccgcccctcccccagcaacatcccatccgcgggtgatcagaatcagccaccagagcgtggagcccgtagtgatgatgcacatgaacattcaggacagcggcacacagccgggaggggttccctccgctcctactggaccactgggaccccctggccatggccaaactctcggctcaacattgattcagctgcccagcttgcctcccgagtttatgcacgcggtggcacaccaaattacacaccaggcaatggttgccgcggtggcctcagctgctgccggccaacaggttcccgggtttcctacagcacccaccagggtggttatcgcccgacctacccccccgcaggcacgcccaagccatccagggggaccacccgtaagcggcacccttcagggagcaggcctcgggaccaacgccagtttggcacagatggtgtctggactggttgggcaactattgatgcaaccagttctagtggcccagggcacaccgggcatggccccaccacctgcgccagcgacagcgagcgccagtgctggcacaacaaatactgccacaaccgctgggcccgcccctgggggccccgcccagccaccccctactccccagccctcaatggccgacctgcagttctcgcagcttctagggaaccttctaggaccagcggggcctggcgctggtgggagtggggtggccagccccacaatcacagtagcaatgcctggcgtgccagccttcctccagggcatgacagattttttgcaggccacgcagaccgctccaccacctccaccaccacctcccccacctcccccagcacccgaacaacagaccatgcctccaccaggatccccttccggcggcgccgggagtcctgggggactgggattggaatccctgtcccccgagttcttcacttccgtcgtgcagggcgtcctctccagtcttctgtag

SEQ ID NO: 109530 - DNA, 477 bp, synthetic construct
  misc_feature 1..477: note = Description of Artificial Sequence: Synthetic coding sequence
  source 1..477: mol_type = other DNA
atggagcctaatgacagcactagtaccgctgtggaagaaccagactccttggaggtattggttaaaacactggatagccagacgcggacctttatcgttggagcacaaatgaacgttaaagaattcaaagagcacattgcagcctccgtctcaattccaagtgagaaacagcgcctcatttaccaggggcgtgttctgcaggacgataagaagctgcaagagtacaacgtggggggcaaggtgatccaccttgtggagcgggcaccccctcagacccacctcccatccggggcctctagcggcaccggatccgcgtccgccacccacgggggagggtcccccccaggaacgcgaggaccgggtgcctcagtgcatgacagaaatgccaatagctatgttatggtgggtacattcaacctgccttccgatgggtcagctgtggacgtgcacatcaacatggaacaggcacccatctag

SEQ ID NO: 109531 - DNA, 681 bp, synthetic construct
  misc_feature 1..681: note = Description of Artificial Sequence: Synthetic coding sequence
  source 1..681: mol_type = other DNA
tgaagtgggtttggagccagactgctcgaactgtgtaaccagggtctgttcgaatgtctggccctgaacctgcattgcctgggagggcagcaaatggaattggctgcagtgatcaacggccgcatccgaagaatgagtcgaggagtaaacccttcactggtatcatggctaaccaccatgatggggcttagactgcaggttgtactcgaacatatgccagtgggacccgatgctatactgcggtatgttagacgcgtcggggacccccctcagcccctcccagaggaacctatggaagtgcagggggcagagcgcgcctcccccgagccccagcgagaaaacgcatcaccagcccccgggactactgccgaggaggcgatgagtaggggcccccccccagcacctgagggcggctcaagggatgagcaggatggagccagtgctgagaccgaaccatgggccgcagcagtaccacccgagtgggttcccatcatccagcaggacatccagtctcagcggaaggtgaaaccccagcccccactgtcagatgcctacctcagtggcatgcccgccaagcgcagaaagcttcgaagtgacattcagaagcgcttgcaggaagatccaaactattctcctcagcgattccctaacgcacagcgagcctttgccgacgacccctag

SEQ ID NO: 109532 - DNA, 717 bp, synthetic construct
  misc_feature 1..717: note = Description of Artificial Sequence: Synthetic coding sequence
  source 1..717: mol_type = other DNA
tccagtgcagaaggagccccccccccaggccctgcccctcctcccgccacctcgcatcccagagtcatcagaatcagccaccaatccgttgaacctgtcgtgatgatgcacatgaacatacagggaccattgtccctctctccatgcccggatagcggaacccagccgggcggagttccctctgctcccacgggaccattgggacccccagggcacggtcaaaccctggggcagcaagtcccagggttccctaccgcgcctactcgggtggtcattgcacgacctacccccccgcaagcacgacccagccaccccggcggcccacctgtaagcggcaccctgcagggtgccggattggggacaaacgcatccctggcccagatggtctccggactggtcggtcaactacttatgcagcctgttctggtggcacaaggcactccaggcatggccccgcctcccgcgcccgcgaccgccagcgcatcagccgggactacaaataccgctacaaccgcaggccctgctccaggcggccctgctcagcccccccccactccacagccatctatggccgacctgcagtttagtcagctgctcggaaacctactcgggcccgccggccctggggcgggcgggcctggggtggcaagtcccacaatcacagtggccatgcccggagtcccagcctttctgcagggcatgaccgatttcctgtag

SEQ ID NO: 109533 - DNA, 3381 bp, synthetic construct
  misc_feature 1..3381: note = Description of Artificial Sequence: Synthetic coding sequence
  source 1..3381: mol_type = other DNA
atggagcctaacgacagcacctcgacagccgtggaggagccggatagcttggaagtccttgtgaaaactctggattcacagacaaggactttcatcgtcggagcccagatgaatgtgaaggaattcaaggaacacatcgccgcctcagtgagtataccgagcgagaagcagcgtctgatttatcaagggcgtgtcctccaggatgataaaaaactgcaggagtacaacgttggagggaaagtgatccacctggttgaaagggcccccccccagactcatctgccctcaggtgcctcttcaggtaccggtagcgcaagtgccactcatggcggaggatctccccctggaactcgaggacctggagcctcggtgcatgatcgcaacgccaatagctatgttatggtgggcacatttaatctgcccagcgatggctcggccgtggacgtccacattaacatggaacaggccccaattcaatctgaacctcgtgtgcgactggtgatggctcagcacatgatcagggatattcagacgctgctatcccgtatggagtgtaggggcggcccacagccacagcactcccagccccccccgcagcctcctgcagttacaccggagcccgtggcattgtctagccagacgtccgagcctgttgagagcgaggcccctccgcgtgaacctatggaagctgaagaagttgaggagcgagctcccgcccagaacccggaactcacccctggccctgctcctgccgggcctacccccgcacccgaaaccaatgcccctaaccacccctctcccgccgagtatgtcgaggtgctccaagaattgcagagactggagtcccggctccagccatttttgcagcgatactacgaggttctgggcgccgccgcgactacagactacaataacaatcacgagggcagggaggaagaccagcgcctgatcaaccttgtgggcgagagcctgcgccttctgggtaatacatttgtggccctgtctgacctgcggtgtaatttggcttgtactccccctcgacacctacacgtcgtgagacctatgtctcactacaccacccccatggtgctgcagcaggccgccataccaatccagatcaacgtcggaactactgtgactatgaccggaaatggcacccgcccgccaccgacgcctaacgccgaggcccccccaccaggccccggacaggctagctctgtggctccttcatccacgaacgtcgagtcaagcgccgaaggagcccctcctcccggacctgcgccaccccctgcaacatcacaccctcgggtgattcgcatctcgcaccaatcagtggagccggttgtgatgatgcacatgaatatccaggattctgggacccagcccggcggggtcccatctgcccctaccgggcccctgggcccgcccggtcacggccagacactcgggcagcaggtccctgggtttcctacagcaccaacacgggtggtgattgcacgacccaccccgcctcaggcaaggcccagccacccaggtgggcctccagtgtcagggacgctgcagggggccgggttgggcactaacgcatcactggcccagatggtatccggattggtgggtcagctgttgatgcagcccgtattagtagcacagggaacaccaggaatggcacctcctccagcgccggccacagcttcagcttccgccggcactacaaataccgccaccacagccgggcccgcaccagggggcccggcccagcctccccccacaccacagcccagcatggctgacctccagttctcacagctgttaggcaatttgctcggacctgctgggcccggggcggggggatccggtgtcgccagtcccactatcactgtcgctatgccgggcgttcctgctttcctgcaaggaatgacggactttttgcaagctactcagaccgcgcccccccctccaccgccgcctcccccccctcctcccgcgccggaacagcagacaatgcctcccccaggttctccctctggtggcgcgggctccccaggcggactcggcctagaatccttgagccctgagtttttcacaagtgtggtgcagggagtgctctcatctctgctcggatcccttggcgccagagcaggttcatctgagtcaattgccgcctttatccagaggctctcaggatcgagtaacatttttgaaccaggcgccgacggggccttgggattcttcggggccctgctgagtctactgtgtcagaatttcagcatggtagatgtggttatgctgcttcacgggcactttcagcctctgcagcggcttcagccacagcttaggtccttcttccaccagcactatcttggagggcaagagcctacaccgtccaacattcgcatggccacccacaccctgattaccgggctcgaagaatatgtgagagagtcctttagcctcgtccaggtgcaaccaggagttgacatcatccgcaccaacctggaattcttgcaggagcagttcaattccatcgccgcacacgtacttcactgcactgattccggttttggggctcgcctgcttgagctgtgcaatcagggattgtttgaatgcctggcgctgaacctgcattgtttaggaggccagcagatggagctggccgccgtgattaatgggcgtattagacggatgtctcggggtgtgaaccctagtttggtctcctggctgactacaatgatgggcctgcgcctgcaggtggtcctggaacatatgcccgtcgggccagatgccatcctgcgctacgtgagacgggtcggagaccctccccaacccctgccggaggagcctatggaagtacagggtgccgagcgggcatcccccgaacctcaacgcgaaaacgcttcacctgcccccggcacaaccgcagaagaggccatgagtagagggccacccccagccccggaaggaggcagccgggacgaacaggatggggcctcggcagaaacagagccctgggccgccgcagtgcctcccgagtgggtcccaatcatccagcaggacatccaatcccaaagaaaagttaagccccagcctcctttaagcgatgcgtacctcagtgggatgcctgccaagcgtagaaaaactatgcagggtgagggcccccagctcctactgagcgaagcggtctctagagcagccaaagcggctggtgcccggcctttgacctcacctgagtctctgtcccgcgacctcgaggcccctgaagtgcaggagtcttacaggcagcagcttagatcagacatccagaaaagattacaggaagacccaaattactctccccagaggtttcctaatgcgcagagagcatttgccgatgacccctag

SEQ ID NO: 109534 - DNA, 789 bp, synthetic construct
  misc_feature 1..789: note = Description of Artificial Sequence: Synthetic coding sequence
  source 1..789: mol_type = other DNA
atggagcctaacgacagtaccagcaccgcggtcgaggagcccgatagcctggaagtgcttgtgaaaactctcgattcccaaacacgcacttttattgtgggggcccagatgaatgtgaaggagtttaaagagcacatagccgcgtctgtgtctatcccctctgagaagcagagactgatctaccaggggcgggtccttcaggatgacaagaagctccaggagtacaatgtggggggaaaagttattcacttggttgaacgagcccccccacagactcacttaccctcaggtgcatcatctggcaccggctccgctagcgctactcatgggggcggttccccccccgggactaggggacccggagccagtgtgcatgaccggaatgcaaactcatacgtcatggtggggactttcaatctcccaagtgatggctccgctgtggatgttcatatcaatatggagcaagcaccaattcagagtgagccaagagtacgccttgtgatggctcagcatatgatcagggatattcagactttactatctaggatggagtgccgaggtggcccccagccacagcatagccagccccctccccagcctccagccgtaacgcccgagccggtagcactaagcagccaaacatctgagcccgtggaaagtgaggctccccctcgcgagccaatggaagcagaagaggtggaggagcgagcccccgcccaaaaccctgaactcacacctggccccgcacctgccgggccaactccggcccccgagactaacgccccctag

SEQ ID NO: 109535 - DNA, 477 bp, synthetic construct
  misc_feature 1..477: note = Description of Artificial Sequence: Synthetic coding sequence
  source 1..477: mol_type = other DNA
atggaaccaaatgactccacaagcactgctgtggaagaaccagacagcctggaagtgttagtaaaaacactggactcccaaacacggacattcatcgtgggtgcccaaatgaatgtgaaagaattcaaggaacacatcgccgcctctgtctccatcccatccgaaaaacaacgtcttatctaccaaggaagggtattgcaggatgataaaaagctgcaagaatacaacgtaggtgggaaagtgattcaccttgtagagcgggccccgccccaaacccacctgccgtcaggcgcctcgagtggcactggatctgccagcgccacacatggaggcggatcaccacctgggacacgcggcccgggcgcgtccgtccacgacagaaacgcaaatagctatgtcatggttggtacatttaatctgccttcagatgggtctgcggtggacgtgcacatcaatatggaacaggctcctatttag

SEQ ID NO: 109536 - DNA, 777 bp, synthetic construct
  misc_feature 1..777: note = Description of Artificial Sequence: Synthetic coding sequence
  source 1..777: mol_type = other DNA
atggagccaaatgatagcacgtccactgcagtcgaggagccggatagcctggaggtccttgtcaagaccttagactcccagacccgcacctttattgttggggcccagatgaacgtcaaggagttcaaagaacatattgcggccagcgtctcgatacccagcgagaagcagcgcctgatctatcagggaagagtcttgcaagacgataaaaagcttcaggaatacaatgtgggagggaaagtgattcacctagtcgaacgcgcgccgcctcaaacccacctgcccagtggcgcctcatctggcactggatcagctagcgccacacacgggggcggtagtcctccgggcactcggggtcctggtgcttctgtgcacgaccgtaacgcaaacagctacgtgatggtgggcaccttcaacttgccctcagatgggagtgctgttgatgtgcatatcaatatggaacaagcgccaatacagagtgaaccaagggtgaggcttgtcatggctcagcacatgatcagagacatccagacgcttctctcaagaatggagtgcagaggcggaccccagcctcagcactctcaaccacctccccagccccctgctgtgacaccagaacctgttgcactatcatcacagacaagcgaacctgtggagtcagaagctcctccaagggagccgatggaggcagaggaggtagaggaaagagctccagcccagaatccagaattgacccccggcccagcccctgccggtccaactccagctcccgagtag

SEQ ID NO: 109537 - DNA, 735 bp, synthetic construct
  misc_feature 1..735: note = Description of Artificial Sequence: Synthetic coding sequence
  source 1..735: mol_type = other DNA
atggagcccaatgattcaacatcgacggcagtggaggaaccagattccctggaagtcctggttaagacactagattcacagacgcgaacctttatcgtgggagctcaaatgaatgtgaaggagtttaaagagcacatcgccgcatcagtgtctatcccctctgagaaacagaggctcatctaccagggccgggttttacaggatgacaagaagttgcaagagtataacgtgggaggtaaagttatccacctagtggaacgggctcccccacagactcatctcccctcaggcgctagctccggcaccgggtcagcctcagccacccatggtggcgggagcccaccaggcacaagggggcctggtgcaagtgtccatgaccgtaacgcaaatagctatgtgatggttggaactttcaatctcccctccgagccccgcgttaggttggtaatggctcagcacatgatcagagacattcaaacactcctttctagaatggagtgccggggcgggccacagcctcagcactcccaacctcctcctcagccacccgctgtgaccccagaaccagtggcattatcaagccaaaccagcgaaccagttgagtccgaagctccaccgagggaacccatggaagctgaggaagtagaggagagagctccggcccagaatcccgagctgacccccgggccggcccccgcaggtcctactcccgcccctgagactaatgcaccatag

SEQ ID NO: 109538 - DNA, 1548 bp, synthetic construct
  misc_feature 1..1548: note = Description of Artificial Sequence: Synthetic coding sequence
  source 1..1548: mol_type = other DNA
atggagccaaatgattccacgagcacggctgtcgaggagcctgatagcctcgaggtcctggtcaagactctagattctcagactcggacgttcatagtgggggcccaaatgaatgtaaaagagttcaaagaacatattgccgcttccgtctcaatacccagtgaaaaacaaaggctaatataccagggccgtgtgctgcaggatgacaagaaactgcaagagtacaacgttggcggcaaagtaatccaccttgtcgaacgggcccctcctcagacacatttaccaagcggtgcctcttccgggaccggaagcgcttccgcaactcacggaggaggcagtcccccaggcactcgcgggccaggcgcgtcagtgcatgataggaacgctaacagctacgtaatggtcgggacattcaacctcccgagtgacgggagcgccgtggacgtccacattaacatggagcaggcccccattcagagcgaaccccgcgttcgcctcgtcatggctcagcacatgatcagagatatccagacactgttgagtcgcatggagtgcaggggagggcctcaacctcagcattcccagccacccccacagccccccgccgtcacacccgagcccgttgccctaagtagccagaccagtgaacctgtggaatccgaggctcccccacgggagcccatggaggcagaagaggtggaggaaagagctcctgcacagaacccagagctaacccccgggcccgcgcctgctgggccaacccccgcaccggaaaccaacgcccctaaccacccaagcccagccgaatatgtcgaggtacttcaggagctgcagagactggaaagccgcctgcagccattcctgcagcgatactacgaggtgcttggggctgccgcgacaacagattataataacaaccacgagggcagggaagaagatcagaggctcatcaaccttgtgggagaaagtttgcggctgttgggtaataccttcgtggccctcagtgatttgagatgcaatctggcatgcacaccgccccggcacctgcacgtggtgcgtccgatgtcccactataccacacccatggttctccaacaagctgccatccccatccaaattaacgtaggaaccaccgtaaccatgaccggtaacgggacccggcctcctcccacgcctaacgcggaggcacctcctcctgggccagggcaggcgtcctcagtggctccgtcatccaccaatgtggaatctagcgcagaaggggctccccccccaggtccggcccctccccccgcgacctcccaccctcgagtcatccgaatttcacaccagagcgttgaacccgtcgtcatgatgcacatgaacatacaggacagtggcacccagcccggaggcgtccccagtgcgccaacagggcccctgggacctccgggacatgggcagaccctcgggtcaacccttattcagctgccctccctaccccccgaatttatgcacgccgtggcccaccagataacacatcaggctatggtggctgcagttgcttcttag

SEQ ID NO: 109539 - DNA, 702 bp, synthetic construct
  misc_feature 1..702: note = Description of Artificial Sequence: Synthetic coding sequence
  source 1..702: mol_type = other DNA
atggaacctaatgattccacttccactgctgtggaggaacctgatagcctcgaggtccttgttaaaaccctggattctcagactcgcacattcatcgtgggagcgcagatgaatgttaaggaatttaaggaacatatagctgccagtgtgtccatcccctccgaaaaacagagattgatttatcaaggaagggttctacaggatgacaagaaactgcaggagtataacgttggtgggaaagtaattcatctcgtggagagagcacccccccagactcacttgccctctggcgctagttctggcacagggagcgcctcagcaacacacggaggggggtcaccaccagggacacgcggtcctggtgctagtgtacacgacagaaacgcaaatagctatgttatggtcggtacatttaacctacctagtgatgggagtgcggtggacgtgcacattaacatggaacaggcccctattcagtcagagccccgggtacgtctggtgatggctcaacatatgatcagagatattcagacattattgagtcggatggagactcttccatacctgcagtgtaggggcggaccccagccacagcattcacagccgccccctcagccccctgccgttaccccagagcctgttgctctgagtagtcaaacgtctgagcccgtggaatctgaagctcctcctagagagccctag

SEQ ID NO: 109540 - DNA, 3381 bp, synthetic construct
  misc_feature 1..3381: note = Description of Artificial Sequence: Synthetic coding sequence
  source 1..3381: mol_type = other DNA
atggagcctaatgacagcacttcgacagctgtggaggaacctgactcgttagaagtgctcgtcaaaacattagactcacagacgcgtaccttcatcgtgggggcacaaatgaacgtaaaagagttcaaggagcatatagccgccagcgtctcaatcccaagtgaaaaacagcgacttatttaccagggaagagtcctgcaagacgacaagaagctgcaagagtataatgtggggggtaaagtaatccatctcgtggagcgcgcccccccgcagacccacctgccatcaggagcgagctcggggacgggctctgccagtgccacccacggtggggggtctccacctggaaccagagggcccggtgcttcggtccacgacagaaatgctaattcatatgtaatggtaggaacttttaaccttccaagcgacgggtctgccgttgatgtgcacattaatatggaacaagctccaattcagagcgagcccagggtgaggttagtcatggcacagcatatgattagggacattcagaccctgctatcacgtatggagtgcaggggcggtccacagccccagcattcccagccaccaccacagcctcccgcagtaactcccgagcctgttgcacttagtagtcagaccagtgaacctgttgaatcagaagcaccacccagagagcccatggaggccgaagaagttgaggagcgtgcaccagcacagaacccagaactgaccccaggaccggcccctgcaggacccacgccagcccccgagaccaacgcacctaatcatccgtcaccggcagaatacgtcgaggtattacaagaattgcagcgcctagagagccgcctgcagccattcctccagcgctattatgaagtgctgggggcggcagcgactacagattacaacaacaaccacgagggccgtgaggaagaccagcggctgataaacctcgtgggtgagtcattacgcttacttggaaatacatttgtagctttgtctgacctacggtgcaatctagcttgtacgccaccaagacacttgcatgttgtgaggccaatgagccactacacgaccccgatggtgttgcagcaagcagccattcctattcaaattaatgtgggcacgacagtaaccatgactggcaacgggacacgcccaccgccgactcctaatgccgaagccccacccccaggtcccggtcaggcatcttccgtcgccccctcaagcacaaacgtggagtccagcgcagaaggcgcgccaccaccagggcctgctcccccacctgccacatctcacccaagggtgatcagaatcagtcaccagagcgtggagccagtggtaatgatgcatatgaatatccaggatagcgggacccagccagggggcgtgcccagcgctcccacagggcctctcggtcccccaggccacggacagactttgggccagcaggtccctggattcccaacagctccaaccagggtggtgatcgctcgaccaaccccacctcaggctcgcccttcccaccctggtggcccacctgttagtggcactctccagggagctggcctgggaactaacgcctccctggctcagatggtctcaggccttgttggtcaactgctcatgcaaccagttttggtggcccaaggcactcccggcatggctcccccgcctgcaccggccaccgcatctgcctccgcggggactacaaacactgcaaccacagccggcccagctcctggaggacctgcacaacctcctccgacaccccagccttccatggctgacttacagttctcccagttactgggaaatctgttgggaccagccgggcctggtgctggtggtcccggagttgcttctccgactatcactgtcgctatgccgggggtgccggctttcctccaagggatgactgatttcttacaggcaacacagactgccccccccccccccccccctccacccccacccccacctgcccctgagcagcagaccatgccccccccgggttccccttctgggggagctggaagcccgggaggtctgggacttgaatccttgtctcccgagttttttacctccgtggtgcagggggttctgtcttcgctgctggggtcacttggggctcgggctggctcaagcgagtcaattgctgcatttattcagaggctttctggaagctcaaacatttttgagccaggtgccgacggggccctgggatttttcggagcactcctctcacttctgtgccaaaatttctctatggtggacgtggtaatgctgctgcatgggcactttcaacctttgcagcgcttgcagcctcagttgaggtcattttttcaccagcattatctgggaggccaggaacctacccccagcaatatccggatggctacccacacactgatcactggactggaggaatacgtaagggagtcgttttcattggttcaggtacaaccaggcgtcgatattatcaggacaaacttggagtttttgcaggagcaattcaattccattgctgcacacgtactacactgcaccgacagcggctttggcgcccgtctgcttgagctgtgcaaccaaggactatttgagtgcttagctctcaacttgcattgtctgggtggccaacagatggagctggcagcagttatcaatgggcggatcagacgcatgtcgcgaggtgtgaacccatccttggtaagttggctcacgacgatgatgggccttcgcctacaggtagtgcttgaacacatgcccgtaggccccgacgccatcctgcgttacgtgagacgggtgggagatccaccacagccacttcccgaagagcccatggaagtgcagggggccgagagagcttcaccagaaccccagagagaaaatgccagccccgccccggggaccaccgcagaggaagctatgagccggggccctccccccgccccggagggtggttctagagacgagcaagatggggcctccgccgagacggaaccctgggcagctgccgtgccgcctgaatgggtccctattattcaacaggacatccagagccagcggaaggtgaagccacagccccctctcagcgatgcctacttatctggcatgccggctaaaagacgcaagaccatgcagggggagggaccccagttgttgctaagcgaggccgtgtcccgagcagccaaagctgctggagcccgccccctcacctcccccgaatccttgagccgagacttggaagctcccgaggtgcaggagagctaccggcagcaactgcgctccgatattcaaaagcgcctgcaagaagacccaaactactccccccagcgattccccaacgcccagcgggcttttgccgatgatccatag

SEQ ID NO: 109541 - DNA, 789 bp, synthetic construct
  misc_feature 1..789: note = Description of Artificial Sequence: Synthetic coding sequence
  source 1..789: mol_type = other DNA
atggagcctaacgactccacaagcacagctgtggaggagccggattcactggaggtgctggtcaagaccttggattcacagactcgtacattcattgtgggagcacagatgaacgtcaaagagtttaaagagcacatcgctgccagtgtgtctattccaagtgagaagcagcggcttatctaccagggcagagtgctacaggatgataaaaagcttcaagagtacaatgttggcggcaaagttatccatcttgtggagcgagctccccctcaaacacacctgccgtccggcgctagcagcgggactgggagcgcgagtgccacgcacgggggaggaagccctccaggaacaagaggtcctggcgccagtgtacacgataggaacgctaactcctacgtcatggtgggaactttcaacctgccaagcgatggatccgctgtcgatgtacatataaacatggagcaggcgccgatacagtctgaaccgcgcgtgaggcttgtgatggcccagcacatgattagggatattcagaccctgctgtcacgcatggagtgccggggtgggccacagccgcagcactctcagcctcctccccaacccccagctgtgacacccgagcccgttgcgctgagcagccagacaagcgaaccagtggagagtgaggccccacctcgagagccaatggaagccgaggaggtggaagagcgggcgccagcacaaaatcccgagctaacacctggtcccgccccagccggtcctacccctgctcccgagaccaacgccccttag

SEQ ID NO: 109542 - DNA, 411 bp, synthetic construct
  misc_feature 1..411: note = Description of Artificial Sequence: Synthetic coding sequence
  source 1..411: mol_type = other DNA
tgacggatgtcgaggggcgtaaaccctagtcttgtatcttggctgaccacaatgatgggtctcaggctccaggttgtgctcgagcatatgcccgtggggcccgatgccatccttagatacgtgcgaagagtcggggatccaccccagccactgccagaggagccaatggaggtccaaggggccgagagagcttctcctgagccccaggagtgggtgcctattatacagcaagatatccagtctcaacggaaagttaagccccaacctcccctaagcgacgcttacttgtccggaatgccagccaagcgcagaaaactgcggagcgacattcagaagagactgcaggaggaccctaactatagtcctcagaggttccctaacgctcaaagggcatttgccgatgatccctag

SEQ ID NO: 109543 - DNA, 558 bp, synthetic construct
  misc_feature 1..558: note = Description of Artificial Sequence: Synthetic coding sequence
  source 1..558: mol_type = other DNA
tgactggcatgtacccccccacgtcatctgcacgtggtccgacctatgtcacattacaccactccaatggtgctccagcaagcagccattccaattcaaatcaacgtaggtacgacagtgaccatgaccggaaacggaacacgacctccccccacccctaacgctgaagcacccccgccaggtcccgggcaggcttcttcagttgccccgtcttcaactaacgtggagagctcagccgaaggtgctccaccccctgggcctgccccaccgcccgccactagccacccacgcgttatcaggatttcccaccagagtgtggagcctgttgttatgatgcacatgaacatccagggccagcaggtgcctggattccctacagcccccacccgcgtggtaattgctcgccccactcctccccaggctcgacctagtcatcccggaggcccgcccgtctcggggactctgcagggagccgggctcgggactaacgcgtcccttgcacagatggtatcgggcctggttggtcagcttcttatgcagcctgtacttgtggcttag

SEQ ID NO: 109544 - DNA, 681 bp, synthetic construct
  misc_feature 1..681: note = Description of Artificial Sequence: Synthetic coding sequence
  source 1..681: mol_type = other DNA
tgatcaggctttggcgctcgcctgctggaactgtgcaatcagggcttgtttgagtgcctcgcgctgaacctccactgtttagggggtcagcagatggagctggcagcggtcattaatgggaggattcgtcggatgtcgcgaggcgtcaatcctagcttagtatcatggttgacaactatgatggggcttaggctccaggtggtactagagcacatgcccgtgggcccagacgccatccttcgctacgtgagacgggtgggcgacccaccacagcccctccccgaagaacccatggaggtacaaggggctgaacgagcttctcccgaaccccagcgcgaaaacgcctcccccgcacccgggaccacggcagaggaggctatgtcccgggggcccccccccgcacccgagggtgggagcagagatgagcaagacggggcatcagctgaaacagagccctgggctgctgctgtgccgcctgaatgggttcctattatccagcaggatatacaatcacagcggaaggtgaaacctcagccgccccttagcgatgcttacctatctggaatgcccgccaagcgcaggaaattgagatccgatatccagaagcgtcttcaggaggatcccaactactcccctcagagatttcccaacgcccaacgggcattcgctgacgacccctag

SEQ ID NO: 109545 - DNA, 594 bp, synthetic construct
  misc_feature 1..594: note = Description of Artificial Sequence: Synthetic coding sequence
  source 1..594: mol_type = other DNA
atggaacctaacgacagcacatccactgccgtggaagagcctgactcactggaggtgctcgtaaagactttagactcccaaactagaacttttattgtgggcgcacaaatgaacgttaaagagttcaaagagcatatagcggcctcagtttctattccatcagagaaacagcgcctgatttatcagggacgtgtgctgcaggacgacaagaaactacaggaatacaatgtgggtggtaaagtcattcatctggtggaaagggccccaccccaaactcatctaccctctggagccagcagtggaaccggtagtgcttctgcaactcatgggggtggcagtcctccgggcacgcggggacccggcgcgtccgtgcatgataggaacgcaaactcatacgtaatggtcggcacctttaacctccccagcgatggctctgcagttgatgtacatatcaatatggagcaagcccccatacaatccgagccacgtgtgaggctggtgatggcccagcatatgatccgtgatattcagaccctattatcgcgcatggaatgcaggggcgggccccagccacagcatagtcaaccaccttag

SEQ ID NO: 109546 - DNA, 648 bp, synthetic construct
  misc_feature 1..648: note = Description of Artificial Sequence: Synthetic coding sequence
  source 1..648: mol_type = other DNA
atggagccgaatgattcgacttctacggctgttgaagaacctgacagtttggaagtgcttgtcaaaacactcgactcccagaccaggacttttattgttggagcccagatgaatgtaaaagaattcaaagaacacatagccgccagtgtctctatcccgtcagaaaagcagcgccttatctatcagggccgagtgctgcaggatgataagaagttacaggaatacaatgtgggagggaaggtgatccatctggtggagcgggccccaccacagacacacttgccaagtggtgcaagttcaggaacaggctctgcctctgcgacacacggcgggggaagtcctccaggcaccagaggacccggagcgtccgtgcacgatcgtaatgctaacagctacgtcatggtggggacattcaatctcccttctgagccccgggttcgactcgtgatggcccaacacatgatccgggatatccagactcttctatcgaggatggagtgtagagggggaccgcagcctcagcatagccagcccccaccccagccaccggccgttactcccgagccagtagctctgagctcccagaccagtgaaccagtggaaagtgaggcacccccacgcgagccgatggaggctgaagaggtgtag

SEQ ID NO: 109547 - DNA, 702 bp, synthetic construct
  misc_feature 1..702: note = Description of Artificial Sequence: Synthetic coding sequence
  source 1..702: mol_type = other DNA
atggagccaaacgattctacaagcactgccgtggaagaacctgattctttagaagtcctggtcaagactctggattcccaaacccggacattcatcgtcggtgcgcagatgaatgtgaaggagtttaaggaacacatagccgcctcagtctccataccctccgagaaacaacgtctgatctatcaaggtcgggtgctacaagacgataaaaaactgcaggaatacaacgtaggcgggaaagtgatacatttggtggagcgcgcacctcctcagacacatctgccctccggcgccagcagcggcaccgggtctgcatccgcaacgcacggcggggggtctccaccaggtactagggggcccggggcttccgtgcacgatcggaacgcgaattcttatgtgatggtagggacattcaatctgccctcagacggtagcgctgtagacgtgcatataaacatggaacaggccccaattcagagcgagcctcgcgttagactcgtcatggcccagcacatgatccgcgacatccagactctgctctcaaggatggaaacattaccgtacctccagtgccgggggggaccacaaccgcaacatagccaaccaccaccccagccaccagcggtcacaccagagcccgtagcgctgtcctcccagacatcagaacctgttgaatccgaggcccccccccgggaaccctag

SEQ ID NO: 109548 - DNA, 777 bp, synthetic construct
  misc_feature 1..777: note = Description of Artificial Sequence: Synthetic coding sequence
  source 1..777: mol_type = other DNA
atggaacccaacgactccacatcaactgccgtggaagagcctgattcactcgaagtgttggtaaagacactggactcccaaacccgtactttcatcgttggtgcccagatgaatgttaaggagttcaaagaacacatagccgctagcgtgtctatcccttctgagaaacaaagacttatttaccaggggagggtccttcaggatgataagaagcttcaggagtacaatgtgggcggcaaggtcattcacctggtcgagcgggcacctcctcagacccatctgccctcgggagccagtagtgggacaggtagcgctagcgcaactcatgggggaggatctcccccggggacaagaggaccgggagcatcggtgcatgatcggaatgccaacagttatgtgatggttggtacctttaatctaccctctgacggcagcgccgtggacgtgcacattaacatggagcaggctcctattcagtcagaacctcgggtgagattagtgatggctcaacacatgatccgagacatccagacgctgttgtctaggatggaatgccgagggggcccacagcctcagcacagccagcccccaccgcagccaccagcagtcacccccgagccggtggcgctttcttcacaaaccagcgagcccgttgaatcagaagccccgccaagagagcctatggaggccgaggaagttgaggagagggcgcccgctcaaaatcctgagctcacccctggccctgcccccgctggcccaacccccgcacccgaatag

SEQ ID NO: 109549 - DNA, 411 bp, synthetic construct
  misc_feature 1..411: note = Description of Artificial Sequence: Synthetic coding sequence
  source 1..411: mol_type = other DNA
tgacggatgtccaggggagtcaatcctagcttggtgagttggttaacgacaatgatgggccttcgactgcaggtggtgttagagcacatgcctgtcggaccagacgccatcttgcgctatgtccgcagagtcggagatcctccacagcctttacccgaagaacctatggaagtgcagggcgccgagcgtgcatcgcctgagcctcaggagtgggtgccaattatccagcaggatattcagtctcaaaggaaggtgaaaccgcagccgcccctttcagatgcttatctgtcaggaatgccggctaagagacggaagctgcggagcgacatccagaagcggctccaagaagatcctaactactcccctcagcgcttccccaatgcacagcgcgcctttgccgatgatccatag

SEQ ID NO: 109550 - DNA, 780 bp, synthetic construct
  misc_feature 1..780: note = Description of Artificial Sequence: Synthetic coding sequence
  source 1..780: mol_type = other DNA
atggagcccaacgattctaccagcacagcagtggaggaaccagattccctggaagtcctggtcaaaacactggattcccaaaccagaacttttattgtcggagctcagatgaacgtcaaagagtttaaggagcacatcgccgcatctgtttctattccatctgagaagcaaagacttatataccagggcagagtgctccaggacgataagaaacttcaggaatataatgtgggtgggaaggtgatccatctagtcgagagagctcctccacagacacacctgccctcgggggcatcatccggaaccgggtccgcctctgcaacgcacggcggaggctcaccacctggcactcgcgggcctggggctagcgtgcacgaccgaaatgctaattcgtacgtgatggtgggaacttttaatcttccctcagacggcagcgccgtggacgtccacatcaacatggaacaggcaccaattcagagtgaacccagagtccggctggtgatggcacagcacatgataagggacattcagacccttctgtcccggatggaatgcagggggggaccccagccccagcacagccagccacccccccaaccgcctgctgtcaccccagaaccagtcgctcttagtagccagacctccgagcctgttgagtcagaggccccgccccgtgaaccaatggaggcggaggaagtcgaggagagggcccccgcacaaaacccagagttgacgcctggacctgcgccagcggggcctactccggcacctgagacatag

SEQ ID NO: 109551 - DNA, 2232 bp, synthetic construct
  misc_feature 1..2232: note = Description of Artificial Sequence: Synthetic coding sequence
  source 1..2232: mol_type = other DNA
atggagccaaacgacagcacgtctactgctgtggaagagcccgacagtctggaggtgctggtaaaaaccctggacagccagactcgtacatttattgtgggagcacaaatgaatgtgaaggaatttaaagaacatattgcagcatcggtctccattccatctgaaaagcagaggcttatttaccagggccgggtcctccaggacgataaaaagctgcaggagtataatgtgggaggcaaagtcattcacctggttgaacgagccccaccccagacccaccttccaagcggcgctagctcgggaacgggctccgctagtgccactcatgggggcggaagcccccccggaacccgcgggcccggagcgagcgtccacgataggaacgctaactcatacgtgatggttggcactttcaacctgccaagcgacgggtctgcggtggatgtgcacattaatatggagcaggcccccatacagtcagaacctcgagttagattggttatggcccagcacatgatcagagacatccagaccctgctgtccagaatggagtgccgagggggacctcagccccaacactctcagcctcctcctcagcctccggccgtgacgcctgaacccgtagccctgtcgtcacagacctctgaaccagtggagtcggaagcgccaccccgggaacctatggaggcagaggaggtggaggagagggctcctgcacaaaatccagagcttactccagggcccgcccccgcaggccctacaccagcaccagaaactaatgctcccaaccatcccagcccagccgaatacgtggaagtcctacaggaactgcagagactagagagccggctgcagccttttcttcagcgttactacgaagtgctgggggcagccgctaccaccgattacaataataatcacgagggtagagaggaagaccagcgtttgatcaacctggtgggagagtctctcagattgctcgggaataccttcgtggcactctccgacctgcgctgtaacctagcttgtacacccccccgacacctgcatgttgtccgccctatgagtcactacactacccctatggtcttgcagcaggcagccattccaattcagattaatgttggcactaccgtgaccatgacggggaatgggacacggccacctccaacccctaacgcagaggcccccccccccggccccggacaggcctcctcggtggccccaagcagcactaacgtagagtcaagcgcggaaggggcccccccccctggccctgcaccaccacctgccaccagccacccccgagtcattcggatttctcaccagtccgtcgaacccgtggtcatgatgcacatgaacattcaggacagcggaactcagcctggtggcgttccctctgctcctacaggccctctgggacctcctggtcacggccagacgctgggttcgactctgatccagcttccttcacttcctcccgaatttatgcatgctgtggcgcatcagattacccaccaggccatggttgccgcagtagcttccgccgcggccggacagcaggtgcccggcttccctacagcccctaccagggttgttattgcacgcccaactcctccacaggcacgccctagtcatcccggtgggccccctgtgtcaggcacccttcaaggcgccggcttaggcaccaatgcctccttggctcagatggttagcggcttggtaggacagctgctcatgcagccggtcctggtcgcacagggcacgcccggtatggctcccccccctgcccccgccacagcctccgcctcagctggtactacaaatacggctactacggcaggcccagcccctggcgggcctgctcagcctcctcctactccacaaccctcaatggcagatctgcagttttctcagcttctgggcaacctgctgggcccggccgggccaggcgctggcgggagtggagtagcttctccaaccataactgttgcgatgcccggggtccctgccttcttacagggcatgactgacttcctacaggcaacccagacggcaccaccaccaccacccccaccgcccccccccccgccagcaccggaacaacagacaatgccccctccggggagcccatcaggaggagcgggcagccctggaggactcggcctcgagtccctttctcccgagttcttcacctcggtggtgcagggcgtgctcagcagtctcctatag

SEQ ID NO: 109552 - DNA, 3399 bp, synthetic construct
  misc_feature 1..3399: note = Description of Artificial Sequence: Synthetic coding sequence
  source 1..3399: mol_type = other DNA
atggagccgaacgatagcacctcaaccgctgttgaggagccggatagtctggaggtcctggtcaagaccttggacagtcagactaggacttttattgttggcgcccaaatgaatgtgaaagagtttaaagaacacattgccgcatccgtgagcattccttctgaaaaacaacgcctgatttaccaaggacgggttctccaggacgataagaaacttcaagaatacaatgtggggggcaaggtaatccacctggtagagcgggctcccccccagactcacctcccctccggtgcatcttccgggactgggtcagccagcgctacccacggggggggctctccccccgggactagaggccctggcgccagcgtccacgatcggaacgcaaacagttacgtgatggtcggcactttcaatttgccttccgatgggagtgcagtcgacgttcacatcaacatggagcaggccccaattcagtccgaacccagagttcgacttgtgatggctcagcatatgatcagagacatacagacccttctcagcaggatggagactcttccctaccttcagtgtcgcggcggtccgcaaccccagcactcacagcccccacctcagcctcccgccgtgacaccagagcccgtggcgctgtctagccagacaagcgagcctgtagagtctgaagctcccccaagagaacccatggaggctgaagaagtggaggagcgcgccccggcgcagaacccagagttgacccctgggccagccccggccggaccgactcccgcacccgagacgaacgctcccaaccacccctcacctgctgagtacgttgaagttttgcaagagctgcagcgcttggagtcacggttacagcccttcctccagcgctattatgaggtgctgggtgctgcagctacaaccgattataataataaccatgaggggagggaggaggaccaacgcctcatcaaccttgtgggagagtcactgcggctcctagggaatactttcgtagctctgtccgacctgagatgtaatctggcatgtacaccaccacgccaccttcacgtcgtgagaccgatgtctcattatacgaccccaatggtgctgcagcaggcagccatccctattcagattaatgtgggaaccactgtaacaatgaccggcaatggcacgaggccaccgcccacaccaaatgccgaggcaccacctcctggacccgggcaggcctctagcgtcgcaccatctagcaccaacgtcgagagttcagcagaaggtgcacctccgcccggcccggcccccccaccggcaacgtcacatcccagagtcataagaatctctcatcaaagtgtagaacccgttgtcatgatgcatatgaacattcaggattcagggacccaacctgggggcgtccccagtgcgccgacaggccctctgggacctcccgggcacggacagacgttggggcagcaggtacctggatttcctaccgcacccacgcgagttgtgatcgccagacctactcccccacaggccagaccttcccatcccggtggccctccggtgtctggcacgctgcaaggcgccggcctgggcacgaatgcctccctggcccagatggtgagcggtctggtgggccagttgcttatgcagcccgtcctggtggcgcaaggaactcctggcatggcccccccaccagcgcctgccactgcctctgcttccgcaggcaccactaatacagccacaacagctggtccagcccctgggggaccggcacaaccaccccccacccctcaacccagcatggccgatcttcaattcagtcagctcctgggcaacctgctgggacctgctggtcccggcgcagggggacccggtgtcgctagtcccacaattaccgttgccatgccgggggtgcccgcattcctgcagggcatgacagattttctgcaggctactcagacagccccaccaccccctccccctccacctccacctccacccgcgccagagcaacagaccatgccgcctcccgggagccctagcggcggagccggaagccctgggggcctgggactggaatctttatcccctgaattttttacctctgtggtgcagggagtgctttcaagcctcctaggcagtctgggggctagagccggaagcagcgaatcaattgctgccttcatacagcggctgagcgggagttccaacatttttgaaccaggagctgatggagccctgggattcttcggcgccctgctcagccttttatgtcaaaacttctcaatggttgacgtagtaatgttgcttcacggtcatttccagcctttgcaacgactgcaaccacagctgcgaagcttcttccaccagcattatctgggcggacaggaacccactccttctaacatccgcatggcgacacacacgttaatcacaggtctcgaggagtacgtgagagagtctttttcactagtccaggtccaaccgggggtcgacatcatcaggacaaacctcgaatttctccaggaacagtttaacagtatcgccgcacacgtgctccactgcacagactcaggcttcggcgctcgtttgcttgagctgtgtaatcaaggactgttcgaatgcctcgctctcaacctgcactgccttgggggccaacaaatggagctcgcagccgtgattaacggcagaatacgtagaatgtcgagaggcgtgaacccgagcctggtgtcatggctgacaacaatgatgggtcttcggcttcaggtagtcctagaacacatgccagtcggtccagatgcaatcctgcggtacgtgagaagggtgggtgatccaccgcagccactgccagaagaacccatggaagtccagggcgccgagagggcaagccctgaaccccagagagagaatgcttcccctgcacccggcactaccgccgaggaggccatgagccggggcccaccgcccgctcccgaaggtggaagtcgtgacgagcaagatggagctagtgccgagaccgaaccatgggccgccgccgtgccccccgagtgggttccaatcattcagcaggacatccagagtcagcgaaaggtcaaaccacagcccccactgagtgacgcttacctctctgggatgcccgcgaagcgcaggaagactatgcagggcgagggaccccagctgctgctgagcgaggctgtgtcacgcgccgctaaagccgccggcgctcggccactgacaagcccagaaagcttgtctcgggatttggaggccccggaagtccaggaaagctaccggcaacagctgaggtccgatatacagaagcggttgcaagaggacccaaattatagcccacagcgattcccgaatgcacagcgggccttcgctgatgatccatag

SEQ ID NO: 109553 - DNA, 594 bp, synthetic construct
  misc_feature 1..594: note = Description of Artificial Sequence: Synthetic coding sequence
  source 1..594: mol_type = other DNA
atggaaccgaatgactcgaccagcacggctgtggaagaaccagattcccttgaggtgctcgtaaagacacttgatagccagactaggacattcatcgtaggagcccagatgaacgtaaaagaattcaaggagcatatcgcggcttcagtctccatcccttccgagaaacagaggctgatttaccagggacgtgtgctgcaagacgacaaaaaactgcaagaatacaacgtcggcggcaaggtcattcaccttgtggagagggctccgccccagacccacctcccatctggtgcctcatcgggcacaggcagcgcctccgccacccacggcggaggctcacccccaggaacacgagggcccggcgcctccgtgcacgaccgcaatgcaaattcctatgtgatggtaggtacctttaatctcccctccgatggctcagcggtggatgtgcacattaacatggaacaagctcctatacaatccgagcctagggttaggctagtgatggcccagcatatgatccgggatatacagacactgctatcccgcatggagtgccgcggcggcccacaaccacagcatagccaacccccatag

SEQ ID NO: 109554 - DNA, 735 bp, synthetic construct
  misc_feature 1..735: note = Description of Artificial Sequence: Synthetic coding sequence
  source 1..735: mol_type = other DNA
atggagcctaatgatagcactagtactgcagtggaggagcctgattccctcgaggtgctggtgaagacgttagatagtcaaacacgaaccttcatcgtcggtgcccaaatgaatgtcaaagagtttaaggagcatatcgctgccagtgtaagcatcccatctgaaaagcagagactgatttatcaaggcagagttctgcaggacgacaagaaactccaggagtataacgtcggaggcaaggtaatccacctggtcgagcgtgctcctccccagacgcacctgccatctggagcctccagtggtacggggtcagcctcagcaacccatggtggcggatctcccccaggcactcgtgggcccggagcatccgtgcacgatcgcaatgccaatagctatgtgatggtggggactttcaatttaccctctgaacccagggtaagactggtcatggctcaacacatgatcagagacattcaaaccctcctttctagaatggagtgtcgggggggtccgcagcctcagcactctcagccccctccccaacccccggccgttaccccagagcccgtggcccttagtagccagacgtcggaaccggtggagtccgaggctcccccccgcgagccgatggaggcggaggaggtggaagaaagagctcccgcccaaaatcccgaattaacccccggaccagcccccgcgggccctacgcctgctcccgagacgaatgcaccatag

SEQ ID NO: 109555 - DNA, 594 bp, synthetic construct
  misc_feature 1..594: note = Description of Artificial Sequence: Synthetic coding sequence
  source 1..594: mol_type = other DNA
atggaacccaacgactctacatccacagccgtagaggagccggatagtctggaggtgttggttaagacgttagactcccagaccagaacctttatagtcggagcccagatgaacgtcaaagagttcaaggagcacatagctgcctccgtgagcatacccagcgagaagcagcgtttgatctatcaggggagagtcctccaagatgataagaaactacaggaatataacgtgggcggtaaggtgatacatctggtggagagagcgccaccacagacccatctcccctcgggcgcgtcttctggtacaggaagtgcgagtgccacccatggcggaggttcgcccccagggactcgcgggccaggcgctagcgtgcatgaccgaaatgcgaatagttatgtcatggtgggtacgttcaacctaccgagtgacggcagcgccgtcgacgtgcatatcaatatggagcaggcacccattcagagcgaaccacgcgtccgactggtgatggcacaacacatgatcagggatattcagaccctcctttcacgaatggagtgccgtggtggacctcagccacagcacagccagcctccatag

SEQ ID NO: 109556 - DNA, 1548 bp, synthetic construct
  misc_feature 1..1548: note = Description of Artificial Sequence: Synthetic coding sequence
  source 1..1548: mol_type = other DNA
atggaaccaaacgactcaaccagtaccgcagtcgaagagccagacagcttagaagtgctcgttaagacccttgactcacaaactaggaccttcattgtgggggctcagatgaacgtgaaggagttcaaggagcacatcgcagcttccgtaagtataccctcagagaagcagagactgatttaccaggggcgtgttcttcaggatgataaaaaactccaggagtataacgtaggggggaaagtgattcacttggtggagcgggcccccccccagactcacctgccctctggcgccagttccgggacaggctctgcctccgccactcacgggggcgggtctccacctggaacccgcggaccaggagcaagcgttcacgaccgcaatgcaaattcctacgttatggtgggtacattcaacttgccctcggatggcagcgccgtagacgttcacatcaatatggaacaggctcctatccagtctgaacctcgtgtccggctcgttatggctcaacatatgatcagagacatccaaaccctgttaagccggatggagtgcagaggcggacctcagccccagcactcacagccccccccccagccacccgcggtcactccagaacccgtggccctctcttcccagacttccgaaccagtcgagagcgaggcaccccccagagagcctatggaagctgaggaggtggaggagagagctccagcccagaaccccgaactgacaccaggacctgccccagccggcccaaccccggctcccgagaccaatgcaccaaaccacccatcaccagccgagtatgttgaagtgctgcaggagctgcagaggcttgagtcccgattgcagccgtttttacagcgctactacgaggtcctgggggcagctgcaaccacggattataataataaccacgaaggcagggaggaagatcaaaggctcattaacctcgttggtgagtcacttaggcttctgggaaacacattcgtcgccttgagcgacctacggtgtaatctcgcatgtacaccaccacggcacctccatgtggtgcgccccatgtcccactacaccacacctatggtgctccaacaggccgcgatccctattcagatcaacgtgggcactaccgtgacgatgactggcaacggtacacggccccctccaactccaaacgccgaagccccaccaccgggccctggtcaggcctcgtctgtagctcccagcagcacgaatgtagagtcatcggccgagggagcaccgcctcctggtccggcccccccccccgccacgagccacccgcgcgtaatcaggattagtcaccagtctgtagagcccgtggttatgatgcacatgaacatccaagatagtgggacgcaacctggaggagtgccctctgcgccaaccggtcccctgggcccaccgggtcacggccagactctaggctccaccctgattcagctcccctccctcccccctgagtttatgcacgccgtcgcacaccagatcactcaccaggctatggttgccgcagtggcctcctag

SEQ ID NO: 109557 - DNA, 735 bp, synthetic construct
  misc_feature 1..735: note = Description of Artificial Sequence: Synthetic coding sequence
  source 1..735: mol_type = other DNA
atggagcccaatgatagcactagcaccgccgttgaggagcccgacagcctcgaggtcctggtgaagactctcgactcacagacccggacttttatcgtgggcgcccagatgaacgtaaaagagtttaaagagcatatcgctgcttccgtgtcgatcccaagtgagaagcaacgattgatctatcaaggtcgggtcctgcaagacgataagaaactccaagaatataacgttggagggaaagtaattcatcttgtcgagcgtgcgccgccccagacgcacctgccgagcggcgcatcctcaggaaccgggtctgcatccgcaacgcacgggggaggtagtccaccaggcacccgcggtccgggtgcctctgttcatgacaggaacgccaattcctacgtaatggtgggcacttttaacttgccttctgaaccgcgagtccgtctggtcatggcgcaacacatgattcgagacatacaaaccttactgtctagaatggagtgtaggggagggccgcagccccagcacagccaacccccgccccagccccctgcggtgacccccgagccagtggcgttgtccagtcagacgagtgagccggtggagtctgaagccccaccacgagagccgatggaggcagaggaggtggaggagagagcgcccgcacaaaatccggagttaaccccaggaccggcccctgctggacctactccggctcccgagacaaatgccccctag

SEQ ID NO: 109558 - DNA, 789 bp, synthetic construct
  misc_feature 1..789: note = Description of Artificial Sequence: Synthetic coding sequence
  source 1..789: mol_type = other DNA
atggaacccaacgactccaccagtacagcggtcgaggagccagacagcttggaagttctggtcaaaaccttagatagccaaacccgaactttcattgtaggggcccagatgaacgtgaaagaattcaaggagcacatagccgcttcagtaagcattccctccgaaaaacagcgactgatctaccagggtagagtgctccaggacgacaaaaagctgcaggaatataacgttgggggcaaagtaattcatctggttgagagagccccaccacagacgcacctacctagcggagcctccagcggcacgggatctgcgtcagcaacccacggcggagggagtcccccaggcacccgtgggcctggtgcctctgttcacgatagaaacgcgaacagctacgtgatggtggggactttcaaccttccctcagacgggtctgctgtggatgtccacataaatatggagcaagccccaattcagtccgagccgcgcgtcaggctcgtgatggcgcagcacatgattagagatattcagacccttctaagcaggatggagtgcagagggggcccccaaccccaacactctcagcctccaccccagccacctgctgtcacgccggaacccgtagcgctgtcaagtcagacaagcgagcccgtcgagagtgaggcgccacctcgcgagcctatggaggctgaggaggtcgaggagagagcccctgcccaaaatccagagctgacgccaggccctgcccctgccgggccaacacccgcccccgaaacgaatgccccttag

SEQ ID NO: 109559 - DNA, 789 bp, synthetic construct
  misc_feature 1..789: note = Description of Artificial Sequence: Synthetic coding sequence
  source 1..789: mol_type = other DNA
atggaacccaacgattcgaccagcaccgctgttgaagagccggacagcttagaagttttagtgaaaactctggactctcagacccgtactttcatcgtcggagcccaaatgaacgtaaaggagttcaaggaacatatagctgcttcggtgagcatcccctccgagaagcagagactgatctaccagggaagagtactgcaagatgataaaaaactgcaggaatacaacgtcggcggaaaggtaatccatcttgtggagagagcccccccccagactcacctgcccagtggcgctagctctggcaccggatctgctagcgctactcacggcgggggtagtccacccggcacaaggggacccggcgcttccgttcacgacaggaacgcaaattcatacgtgatggtggggacgttcaatcttcccagcgacggttctgccgtcgacgtgcatatcaatatggagcaggcaccgatacagtcagagccccgggtgaggcttgtgatggcccagcacatgattcgcgacatccagacccttctgtccaggatggaatgtagagggggacctcagccacagcacagccagccccccccccagccccctgctgttaccccagagcctgttgctttgtctagtcagacatccgagcccgtggagagtgaggccccgcctcgtgagcccatggaggcggaagaggtggaagagagggcccccgctcagaaccccgagctgacccccggtcctgcccctgccgggcctacgccagcaccagagacaaatgctccttag

SEQ ID NO: 109560 - DNA, 717 bp, synthetic construct
  misc_feature 1..717: note = Description of Artificial Sequence: Synthetic coding sequence
  source 1..717: mol_type = other DNA
tcatccgctgaaggcgcgccgcctccaggccccgctccacctccggctacctcacacccacgcgttatcaggattagccaccagtctgtggaacccgttgttatgatgcatatgaatatccaagggcctctgtccctctcaccgtgcccggactccggaacccagcccgggggtgtgcctagcgccccaacagggcccctgggcccccctggtcacggccagacattaggtcagcaggtcccgggattcccgaccgcaccaacccgcgtggtcatcgcccggccaacaccaccacaagccaggcccagccatccaggaggcccccccgtgtcaggaaccttacagggtgccgggctcggtaccaacgcctccttagcacaaatggttagcggtctggtaggccagctgttgatgcaacccgtgctggtggcccagggaacccccgggatggcccccccacccgcaccagcgacggcctccgcatcagccggaaccaccaacaccgccactaccgctggcccagcacccggggggcctgcccagcctcctccaactcctcaaccttccatggccgacctgcaatttagccagctgctcggaaacctgctcggaccagctggacccggggccggcgggtccggcgtcgcctcccctacaattacagtcgctatgccaggagtcccagctttcctgcaggggatgactgactttttatag

SEQ ID NO: 109561 - DNA, 735 bp, synthetic construct
  misc_feature 1..735: note = Description of Artificial Sequence: Synthetic coding sequence
  source 1..735: mol_type = other DNA
atggagccaaatgatagtacgtccaccgccgtggaagaaccggactctctggaggtgctggtgaagacactcgatagccaaactaggacattcattgtgggcgctcagatgaatgtgaaagaatttaaggaacacatcgctgcctcagtgagcattccttccgagaagcagagactaatctatcaaggccgcgtcttgcaggacgacaagaaattacaggaatataacgtaggtggaaaggtcattcacttagtggagcgagcccccccacagacgcatctgcccagtggggctagtagcggtacaggcagcgcatctgcaacgcacggcggtggcagcccccccgggactcggggccccggagcctctgtacatgacagaaatgctaattcttatgtgatggttggaacattcaatctgccatctgagccgagggtcaggctcgtgatggctcagcatatgattagagacatccaaaccttgctttccaggatggagtgtcggggcggaccccaacctcagcacagccagcccccaccacaaccgccagcagtgacccctgagcctgttgcactgtcttcccaaactagtgaacccgttgaatctgaggctcctccccgggagccgatggaagcagaggaggtggaagagagggccccagcccaaaaccccgagctgacacctggcccagcgccagcaggcccaacccccgcccccgaaaccaatgcaccttag

SEQ ID NO: 109562 - DNA, 621 bp, synthetic construct
  misc_feature 1..621: note = Description of Artificial Sequence: Synthetic coding sequence
  source 1..621: mol_type = other DNA
atggagcctaatgattctaccagcacagcagtggaggagccagactccttggaggtgctggttaagacccttgactcccaaacccgaacctttatcgtgggggcacagatgaatgtgaaggagttcaaggaacacattgcagcttctgtcagcataccttccgaaaaacaacggcttatctaccaaggtcgcgtgctccaggacgataagaaactgcaggagtataacgtgggtggaaaagtcatacatctagttgagagggcgccgccccagacccacctgccttcaggtgctagttctggcaccggaagtgcatctgctacacatggagggggcagcccacccggtacgcgaggaccaggtgcttctgtgcacgataggaatgctaatagctacgttatggtaggtactttcaacttaccgtctgaacccagggtccgtcttgttatggcccagcacatgatccgcgacattcagacattactgtctcgcatggagtgccgcggcggaccgcagccccaacactcccagcccccaccccagcccccagccgtcactccggagcctgtcgctctgtccagtcagacatcagaacctgtcgaaagcgaggcccccccttag

SEQ ID NO: 109563 - DNA, 735 bp, synthetic construct
  misc_feature 1..735: note = Description of Artificial Sequence: Synthetic coding sequence
  source 1..735: mol_type = other DNA
atggaacccaacgacagtacctcgaccgcggtggaagagcctgacagcctcgaagtgttggtgaagaccttggatagtcaaactcgtacatttatcgtgggagcacagatgaatgtgaaggaatttaaggagcacattgcagccagcgtgtctattccctccgaaaaacagcgacttatttatcagggtcgagtgctccaagatgataaaaaactgcaggaatacaacgttggcggtaaagtgatccatttggtagagcgcgccccccctcaaacacacctgccgagcggcgcctcgagcggcacgggcagcgcaagtgcaactcacggcggcgggtcccccccggggaccagagggccaggagcttctgtgcacgacaggaacgctaattcatacgtcatggtgggcaccttcaacctgccttctgaacccagagtgcgccttgttatggcccagcatatgattagggacatccagaccctgctatctcggatggagtgccgaggtggacctcaaccacagcattctcagcctccgccacagccaccagctgtgaccccagagcccgtagccttatcgtcacagaccagcgagccagtcgaaagcgaagcccctccccgagaaccaatggaagctgaggaagtggaggagagagctcccgctcagaacccagagcttactccagggccggcccccgccggccccactcctgccccagagacaaacgccccctag

SEQ ID NO: 109564 - DNA, 780 bp, synthetic construct
  misc_feature 1..780: note = Description of Artificial Sequence: Synthetic coding sequence
  source 1..780: mol_type = other DNA
atggaacctaatgactctacctctacagccgttgaggaaccagatagcctcgaggtgctggtgaagaccctcgactctcagacccgtacattcatagttggcgctcagatgaacgtgaaagagttcaaggagcacatcgcggcaagcgtttccattccatcagaaaaacaacgcctgatctatcaaggccgagtgctgcaagacgacaaaaagcttcaggagtataatgttggcgggaaggtcatccatctagtggagcgagcgccacctcagacgcaccttcctagcggggcttcctcagggacaggcagtgcttccgccacacatggcggcgggtccccgcccggaactcgaggccctggcgctagcgtgcacgatcggaacgccaactcatacgtgatggtgggaaccttcaatcttcctagcgatggctcagctgtcgatgtgcacattaatatggagcaagcacctatacagagcgaaccaagggtaaggttggtgatggcacaacatatgattcgggacattcagaccctgctttcaaggatggagtgcagggggggacctcagccacagcattcacaacccccccctcagccccccgccgttacccctgagccggtggccttatcaagccagacatccgagcctgtggagagcgaggcccctccacgagaaccgatggaagccgaggaagtggaggagcgggcacctgcccaaaatcctgaactgacccctggccctgcgcctgccggacctactccagcccccgagacttag

SEQ ID NO: 109565 - DNA, 558 bp, synthetic construct
  misc_feature 1..558: note = Description of Artificial Sequence: Synthetic coding sequence
  source 1..558: mol_type = other DNA
taattagcctgcactccccctcgccacctgcatgtggtgaggccaatgagccactacacaacgccaatggttctgcagcaggcagctatacccatacagattaacgtaggcactactgtaacaatgacaggaaatggcactcgccccccccctacacctaatgccgaggcaccccccccaggaccaggccaggcaagcagcgtggcccctagttcgactaacgtcgaatcttccgcagagggcgctccgcctccaggccccgctcctcccccagcgacaagtcaccctagggtcattcgaattagccaccagtcagtagaacctgtagttatgatgcacatgaacatccaggggcagcaggtgccggggtttccaacagctcccacacgtgtggtgatagcgcgcccaacccctccccaggctaggccatcgcaccctggcgggcccccagtcagcggaacacttcagggagccggtttgggtacaaatgcaagcctggcacagatggtgtccgggctggttgggcagttgctgatgcagccagtactagtggcttag

SEQ ID NO: 109566 - DNA, 621 bp, synthetic construct
  misc_feature 1..621: note = Description of Artificial Sequence: Synthetic coding sequence
  source 1..621: mol_type = other DNA
atggagccgaatgattccactagcaccgccgtcgaagagcctgattccttggaggtgcttgttaagaccttagactctcagaccaggacatttatcgtgggcgctcagatgaacgttaaagaattcaaggagcacatagccgcctcggtttccatcccctccgaaaagcaacgcctgatttaccagggcagagttcttcaagatgataagaagcttcaggaatacaatgtgggcgggaaagtgatccatctggtggagagagcccctccccaaacccatctgcccagtggggcctcttcgggaaccggctctgctagtgccacgcatgggggcggctctccccccgggactcgaggccctggagcctctgtgcacgatcggaacgccaactcctatgtgatggttggcacttttaacctgccttccgaaccccgtgttagactggtaatggctcagcacatgattagagacatccaaacccttctttctcggatggaatgccgcggcggaccccaaccacagcacagtcagcctcctccgcagcccccagcagtcaccccggaacccgttgctctgagctcacagacttctgaacccgttgagagcgaagctcccccatag

SEQ ID NO: 109567 - DNA, 735 bp, synthetic construct
  misc_feature 1..735: note = Description of Artificial Sequence: Synthetic coding sequence
  source 1..735: mol_type = other DNA
atggagcccaatgacagcacctcaaccgcagtcgaagagccagattctctcgaagtgctggtgaaaaccctcgactcgcagacccgtacttttattgtgggcgcgcaaatgaatgttaaagaatttaaggagcacattgccgcatctgtgagcatcccatccgagaagcagagactgatctatcagggaagggtacttcaggatgacaaaaaacttcaagaatacaacgtggggggcaaagtcattcacctggtcgaacgcgccccacctcagacccaccttccatctggtgcctccagcgggaccggcagcgcttcagcgacacacggcggggggagtcccccaggcaccaggggccccggcgcctccgtgcatgacagaaacgctaactcatacgtcatggttggaacattcaatctgccctccgaaccccgcgttcgcttggtaatggctcagcacatgatcagagatattcagaccttgttgtcccgcatggaatgcagaggcggtccacagccccaacattcgcagcccccacctcaaccacccgctgttacacccgagcccgtggccctgtcctcacagactagcgaaccagttgagagcgaggctcccccaagggagcctatggaggccgaagaggtggaggagcgggctccagcccagaacccagaattgactccaggccctgcccccgcaggacctacaccagcacccgagacgaatgctccctag

SEQ ID NO: 109568 - DNA, 1548 bp, synthetic construct
  misc_feature 1..1548: note = Description of Artificial Sequence: Synthetic coding sequence
  source 1..1548: mol_type = other DNA
atggagcctaatgatagtacttccactgcggtagaagaaccagactccctcgaagttcttgtgaagacattggattcacagacacggacgtttatcgtgggagcccagatgaacgttaaggagtttaaggagcacattgctgcaagcgtttccataccttccgagaagcagaggctcatctaccagggccgtgtactccaagacgataaaaagctgcaagagtataatgtgggcgggaaagtgatacatctggttgagagggcccctcctcagacccatctgcccagtggggcctcgtccggcacgggctccgcctctgccactcacggggggggatcaccaccaggaacaagagggcccggcgcttccgtacacgatcggaacgcgaattcatacgtcatggtcggcaccttcaacctgccctcagatggcagtgcagtggatgtgcacatcaacatggagcaggcaccaattcagtctgaaccccgggttcgcttagttatggcccagcacatgatccgagatatccaaacactcttgtcccgtatggaatgcagaggtggacctcagcctcaacactcccagccccctccccaaccccccgctgtaacccccgaacctgtggcgctgtcaagccagacatctgagcccgtcgagtcagaggcacctcctcgggagcctatggaggccgaggaagtagaggaacgcgcccccgcccaaaaccctgagttgactccagggcccgcccccgcagggcccacccccgctcctgagactaacgccccaaaccatccctcccccgctgaatacgtggaggtgttgcaggagttgcagcgactcgagtctcgacttcaacccttcctccagcgttattatgaggtgctgggggcggccgctaccacagattacaacaacaaccatgaaggcagagaagaggaccagcgactgatcaaccttgtgggagagagccttaggctgttaggaaacacctttgtcgctctgagcgacctccggtgtaacctggcatgtacaccgcccaggcacctgcacgtggtcagacctatgtcgcattataccactccaatggtgctgcagcaggctgccatcccaattcaaattaacgtgggcacaacggttaccatgactggcaatggcactcggccaccaccgactccaaatgctgaggcaccacctcctggccctggacaagcttccagcgtcgcccctagtagcactaatgtggagagctccgcagaaggggcccctcctcccggtccagcgccccccccagcaaccagtcaccccagggtgataagaatctcccatcagtctgttgagcccgtagttatgatgcatatgaatattcaagactccgggactcaaccaggcggtgtgccttctgcccctactggtcctctcggccctccaggccacggacagaccctgggcagtaccctcatccagctgccgtcactgccccccgaattcatgcacgctgtggctcatcagataactcatcaggcgatggtcgcggccgtggcttcctag

SEQ ID NO: 109569 - DNA, 717 bp, synthetic construct
  misc_feature 1..717: note = Description of Artificial Sequence: Synthetic coding sequence
  source 1..717: mol_type = other DNA
tcatccgccgaaggagccccgcctcccggccctgcacctcctccagccacatcccaccctcgcgtgatcaggatatcacatcagagcgtggaacccgtagtgatgatgcacatgaacattcagggacctttgagcctgagtccatgtccagatagcggcacccagccaggcggtgttccgtcagcccccaccgggccgctgggaccccccgggcacggtcagacgcttggccagcaggtacccggcttccccaccgctccgacacgggtagttatagcccggccgaccccaccacaggcccgtcccagtcaccccggaggtcctcctgtgagcggcacgctgcagggcgccggcctgggcacgaacgcatcactggcccagatggttagtggtttggtgggccagctattgatgcagcccgtcctggttgcccagggcacacccgggatggccccaccccccgcccccgctaccgcttccgcgtccgccggaacaacaaacactgcaactaccgccggtcccgcaccagggggacccgcccagccgcctccaaccccccagccatctatggcggacttgcagttctcccagctccttggtaatctgctcgggcctgcaggccctggcgcggggggtcccggagtagccagccccacgataaccgtcgctatgccaggcgtgcctgctttcctccagggtatgactgactttctctag

SEQ ID NO: 109570 - DNA, 648 bp, synthetic construct
  misc_feature 1..648: note = Description of Artificial Sequence: Synthetic coding sequence
  source 1..648: mol_type = other DNA
atggagcccaacgacagcacctctaccgcagtcgaggagcccgactcgctcgaggttttagtcaagacactggactcacagactcggacgttcatcgttggtgcccagatgaatgtcaaagagttcaaagaacacatagccgcctctgtcagcatcccatctgaaaaacaacgtctgatttaccagggtagggtcctccaggatgataagaagctgcaggagtataatgtggggggaaaggttatccatttggtcgaacgggcccccccacagacccaccttccgagtggtgcgtcgtcggggactggcagcgcatccgcaactcatggggggggatcccccccaggcacaagaggtccaggcgcatctgtgcacgaccgaaacgctaattcttacgtgatggttgggacatttaatttacccagcgaacctagggttagactggtgatggcacagcacatgatccgcgatatccagaccctactgtctcgcatggaatgcagaggaggcccgcagcctcagcactcccagcccccaccacaaccaccggcggttaccccagagcccgtagcacttagttctcaaacctcagagccagtcgagtccgaagcccctccaagggaaccaatggaggccgaggaagtatag

SEQ ID NO: 109571 - DNA, 477 bp, synthetic construct
  misc_feature 1..477: note = Description of Artificial Sequence: Synthetic coding sequence
  source 1..477: mol_type = other DNA
atggaaccaaacgactctacttccaccgcggtggaagagcctgattccttggaggtgcttgtgaagaccctggacagccagaccagaacgttcatcgtcggtgcccagatgaacgtgaaagaatttaaggagcatatagccgctagcgtaagcatcccctctgagaaacagcgtctgatttaccaagggagagtactgcaggacgacaagaagctccaagagtacaatgttggggggaaggtcatccatctcgtcgagcgggccccacctcagactcatctgccctctggagcctctagtggaacaggatccgcctcagcaacccatggagggggctcgccgccgggaacccgcggccccggagcgtccgtccatgaccgaaatgctaactcttacgtaatggtcgggaccttcaacctgcccagtgatgggtcagctgtcgacgttcacatcaatatggagcaagccccgatctag

SEQ ID NO: 109572 - DNA, 702 bp, synthetic construct
  misc_feature 1..702: note = Description of Artificial Sequence: Synthetic coding sequence
  source 1..702: mol_type = other DNA
atggagcctaacgacagcacttctaccgcagtggaggaacctgacagccttgaggtcctcgttaaaactctggacagtcagacccgtacttttatcgtgggcgctcagatgaatgttaaggagtttaaggaacacattgcagccagcgtgagcattccctccgaaaagcagcgcttaatttatcaggggagagtgctgcaagacgataaaaagctccaagagtataacgtgggtggtaaggtgatacacctcgtggagagggccccaccccagacccacctgccctctggtgcctcatcgggaacgggctctgcctccgccacacatggtggggggtcacccccaggaacgcgcggacctggcgccagcgtacatgatcggaatgcgaactcatacgtaatggtgggcacatttaacctgccttcggacggttctgctgttgacgtccacattaacatggagcaggccccaattcaatccgagccacgcgttaggctcgtgatggcgcagcacatgatccgcgacattcagactctgttatcccgcatggagacacttccttacctgcagtgccgaggcgggccacagcctcagcattctcaacctccaccacagccacccgctgtgactccagagcctgttgctctgagtagtcagaccagtgaacctgtggagagcgaggcgcctccaagggaaccatag

SEQ ID NO: 109573 - DNA, 780 bp, synthetic construct
  misc_feature 1..780: note = Description of Artificial Sequence: Synthetic coding sequence
  source 1..780: mol_type = other DNA
atggaacccaacgactctaccagtacggccgtggaggaaccagacagccttgaggtcctcgtgaagactctggacagccagacccgcaccttcattgtaggtgcccagatgaatgtcaaagaatttaaagaacatatcgcagcaagtgtcagtattccatcagaaaagcagagattgatttaccagggaagagtgctccaagatgataagaaactccaggaatacaacgtgggcggcaaagttatacacctggtggaaagggccccaccacagactcacctcccctcgggcgcttcatcaggcactggctctgctagtgccactcacggcggcggcagccctccgggcacacgtgggcccggggcgagcgtgcacgaccgcaacgcgaattcatatgttatggtaggcactttcaatctgccttccgacgggtccgccgtggatgtgcacattaatatggagcaggcacctatccagtcagagcctcgagtgcgcttggtgatggcgcagcacatgatccgggacattcagaccctgctgtccaggatggaatgtaggggagggcctcagccacagcacagccagccaccaccccagcctcccgctgtgacaccagaaccagtggcactctcctctcaaacaagtgagccagtagaatcagaagcacctccccgagagcctatggaggccgaggaagttgaggaaagggcccctgcccagaatccagagctcacacctggcccagcacctgcaggccctactcctgcccctgagacctag

SEQ ID NO: 109574 - DNA, 411 bp, synthetic construct
  misc_feature 1..411: note = Description of Artificial Sequence: Synthetic coding sequence
  source 1..411: mol_type = other DNA
tagcggatgtcgaggggagttaatccgagtctggtgagctggttaaccaccatgatgggcctgcggctgcaggtggtcctcgagcatatgccggtggggcccgatgctatcctgagatacgttcggcgggtaggagacccaccacagcccctcccagaggagccaatggaagtacagggtgccgaacgcgcctctcccgagccgcaggaatgggtgccgattattcagcaggacatccagtctcagaggaaggtgaaacctcagcctcctctcagcgatgcctatctttctggtatgcccgccaaaagacgcaagctacggtcagacatacagaagcgtctgcaggaggaccccaattacagtccgcagcgatttcccaatgcccagcgagcttttgccgatgatccatag

SEQ ID NO: 109575 - DNA, 735 bp, synthetic construct
  misc_feature 1..735: note = Description of Artificial Sequence: Synthetic coding sequence
  source 1..735: mol_type = other DNA
atggagccaaatgattccaccagtacagccgtcgaggaacctgactctctggaagttctggttaaaaccctggacagccaaacccgtacctttattgtcggggcacagatgaacgtgaaagagtttaaagagcacatcgcagcaagtgtgagcatacctagcgagaagcagcggctgatctaccagggcagggtgcttcaggatgacaagaaactgcaagaatacaacgttggtggaaaggtgatacatctcgtggaacgcgcccccccacagacccacttgccaagcggagcctcttccggaaccgggtctgcctccgccactcatggggggggctctcctcccggtacccggggtccgggcgccagcgtccacgaccggaatgcaaacagctacgtcatggtgggaacctttaacttgcctagtgaaccgcgtgtgaggctggtcatggctcagcacatgatccgggatatccagacgttgctgtctcgcatggagtgccgcggaggcccccagccccagcactcccaaccccctccacaacctcctgctgtgaccccagagccagtggctctctcctcccagacatcagaacccgtggaaagcgaggcccctccaagagagccgatggaggcagaggaggtggaggaacgcgcacctgcccagaatcctgagctcacacccggccccgccccagccggtcctaccccagcaccagagacaaatgctccttag

SEQ ID NO: 109576 - DNA, 3381 bp, synthetic construct
  misc_feature 1..3381: note = Description of Artificial Sequence: Synthetic coding sequence
  source 1..3381: mol_type = other DNA
atggaaccaaatgactcgacctctacagctgtcgaagagcctgacagtctcgaagtgctggttaaaaccctggattcccagaccaggaccttcatcgtgggagctcaaatgaatgtcaaagagttcaaagaacacatcgctgctagcgtttcgattcctagtgagaagcagagattgatctaccagggccgagtcctacaggacgataagaagctgcaagagtacaatgtcggcggcaaagtgattcatctggtcgaaagagcccctccccaaacccatctgccttctggcgcatcaagcggaacaggcagcgcttccgccacccacggaggtggatcgccacccgggacacgagggcccggtgccagcgtgcatgataggaatgctaacagctacgtgatggtggggacgtttaacctgccttcggacggatctgcagtcgacgtgcatatcaatatggagcaggccccaatccagtcggagcccagggtaaggctggtgatggcccagcacatgataagggatattcagacattgctgagccgcatggaatgtagaggaggcccgcagcctcagcactctcaaccacctccacagccacccgccgtgacccccgagcccgtcgccctgtcatcacagacatctgagccggtggagtctgaagccccccccagagagcccatggaggctgaagaggtagaagaaagagcaccagcccagaaccctgagttgacgcccggcccagcacccgcagggcctacacccgccccagagactaatgcccccaaccaccccagtcccgccgaatatgttgaagtcctgcaggaacttcaaaggctggagagcaggttacaaccctttctgcagagatactacgaggtgctgggagccgcggccaccactgactataataacaatcatgaaggccgtgaagaagaccagagactgattaatctggtgggagaatcacttaggctgctcggcaacacatttgtcgccttgtccgacttaagatgtaatttagcttgtacgccgcctcgtcacctgcacgtggtccgtcctatgtcccattacaccacccctatggtcttgcagcaggccgctattcccatccagatcaatgttggcacaacagtgacaatgaccgggaacgggacccgccccccaccaacacccaacgccgaggctcctccacctggtcccggacaggcgagttcagttgccccttcctccactaacgtggaaagctccgccgagggtgctcccccacctggccctgcccccccccccgcaacaagccacccaagggtgataaggatctcccaccagagtgtagagcccgtagtaatgatgcacatgaatattcaggattctgggacgcagcctggcggcgtaccttctgccccaacaggccctctgggtcctccaggacacgggcaaacattgggtcagcaggtccccggcttccccacggcaccaaccagggtggtcatcgcacgaccaactcctcctcaggccaggccatcccatcccggcggaccgccggtatctggaactctccagggcgccggcctaggaacaaatgcctctctggctcaaatggtgtctggactggtcggacagctcctcatgcagcccgtcctggtggctcagggtacgccaggaatggccccacctcccgcccccgctacggcctcagcctcagccggtactaccaatacagcaacaaccgctggccctgcaccaggaggtccagcacagccacccccgaccccgcagccatccatggccgacctgcaattttcacaattgctcggcaatctcctggggcccgccggtcctggcgctgggggccctggagtcgcgagccctacaatcaccgtcgctatgcctggcgttcctgcattcctccagggcatgacggactttcttcaggctactcagaccgctccccccccacctcctccccccccaccacccccacccgcaccagagcagcagactatgcctccgcccggttccccaagtggaggtgcaggctcccccggcggcctgggtctcgagagcctgagccctgagtttttcactagcgtggtgcaaggcgtgctgtcgtccctgctaggctctcttggagcccgggcaggttccagcgaaagcattgctgccttcatacaacgcctcagtggatctagcaatatcttcgaaccgggcgctgacggcgcacttggtttttttggagctctgttgagcttgctgtgccagaatttttctatggtagacgtggtgatgctgttacatgggcactttcagcccctgcaaaggctccaacctcagttgcgctcttttttccatcagcactacctcggcgggcaggagccaaccccttccaatatccgaatggctactcatactctgataacaggccttgaagaatacgttcgcgaaagcttcagcctggtacaagtgcaacccggagtggacatcataaggaccaatctcgagttcctgcaggagcagttcaacagcatagccgctcatgtgttgcactgtactgacagcgggtttggggccagattgctggaactgtgtaatcagggtctgtttgaatgcctggcactgaatttgcactgccttggaggacagcagatggaacttgccgctgtgataaatggacgcatccgtcgcatgagccggggcgtgaatccttctctcgttagctggctgaccacaatgatggggcttaggctgcaggtggtcctggaacacatgccagtagggcccgatgcaatccttagatatgtccggagagttggagaccctccccagcccttgccagaggaaccaatggaggtgcagggtgccgagcgcgccagtcccgagcctcaacgggagaacgccagccccgcccctggaacaaccgctgaggaagccatgtcacgggggcctccgccagctcccgaggggggttcacgcgatgaacaggacggggcatctgctgaaaccgagccttgggctgctgcggtgccaccagagtgggtgccaataatacagcaagacatacagagtcagcgcaaggtgaaacctcagccgcctctgagcgacgcttacctctctggcatgcccgcaaaaagaagaaagaccatgcaaggcgagggtccacaactcctgctcagtgaggccgtttcaagggctgccaaagccgcaggagccaggcccctgacgtctccagaaagtctttctcgcgatctggaagccccggaagtccaggagtcatatcgccagcagctgagaagcgacattcagaagcggctgcaggaggacccaaattactccccacaacggttccccaacgcccaacgggcatttgcggatgatccatag

SEQ ID NO: 109577 - DNA, 411 bp, synthetic construct
  misc_feature 1..411: note = Description of Artificial Sequence: Synthetic coding sequence
  source 1..411: mol_type = other DNA
tgaaggatgtcccgaggggtgaaccccagtcttgtgagctggctaacaactatgatgggtttgcgcttgcaggtggtcttagagcacatgccagtgggcccggacgcgattctgcgatacgtgagacgtgtgggtgatcccccacagccattgccagaggagcccatggaagttcagggagcagagcgggcttctcccgagccccaggagtgggtcccaatcattcaacaggatatacaaagtcagcggaaggtgaagccccagcccccgctcagtgatgcatatttgtccggcatgcctgcaaaaaggcggaaactgagaagcgacatccagaaacggttacaggaagaccccaactactcccctcaacggtttccgaatgcacagcgcgcctttgctgatgacccgtag

SEQ ID NO: 109578 - DNA, 648 bp, synthetic construct
  misc_feature 1..648: note = Description of Artificial Sequence: Synthetic coding sequence
  source 1..648: mol_type = other DNA
atggaacccaacgattccacatcaacggccgttgaagagcccgatagtcttgaggtgctggtcaagactttggattcacaaactcgtacatttatagttggcgctcaaatgaatgtaaaggaatttaaggaacatatcgccgcttcagtttcgattcccagcgagaaacagaggctgatctaccaagggagagtgctccaggatgataagaagctgcaggaatacaatgtaggaggcaaagtgattcacctcgtagagcgggctccaccccaaacacacctcccaagcggggctagctcggggactggctctgctagcgcaacacacgggggggggagtccccccggaacccgaggacccggggcctccgtgcacgaccggaacgccaactcctatgtgatggtgggaacattcaacctgcctagcgagccacgggtgagactagtcatggcccagcatatgataagggacatccagacactgctgagcaggatggaatgtcgcgggggcccacagccccaacactcccagccccctcctcagcctcccgccgtgactcctgagccggtggcactgtctagtcagaccagcgaacctgtggagagtgaggctcctccgcgcgaaccaatggaggccgaagaggtgtag

SEQ ID NO: 109579 - DNA, 594 bp, synthetic construct
  misc_feature 1..594: note = Description of Artificial Sequence: Synthetic coding sequence
  source 1..594: mol_type = other DNA
atggagcccaacgattccacgtcaacagcagtcgaggaacccgacagtttagaggtactggttaaaacccttgatagtcagactcggacctttatagtaggcgctcagatgaatgtgaaggaatttaaagaacacatagccgccagtgtcagtattccgagtgagaagcagcgactgatttaccaggggagagtcttgcaggatgacaaaaaactgcaggaatacaacgtcggcggaaaagtgattcacttagtagaacgggcaccacctcagacccacctgccgagcggggcaagttccggcaccggctcagcaagtgcaactcatggtggcggctccccacctggaacccgagggcctggcgcaagcgtccacgatagaaatgctaatagctacgtcatggttggtacttttaacctcccctccgacgggtcagctgtggatgtccatattaacatggagcaagcccctattcaatccgagcctagagttaggctagttatggctcagcacatgattcgagatattcagacacttctgtctcgcatggagtgccgcggcggaccccagccccagcactctcagcctccctag

SEQ ID NO: 109580 - DNA, 1548 bp, synthetic construct
  misc_feature 1..1548: note = Description of Artificial Sequence: Synthetic coding sequence
  source 1..1548: mol_type = other DNA
atggagccgaacgatagtacttccactgccgtcgaagagcccgactctctcgaagtgctagtgaagactttggacagccagacgcgcacttttatcgtgggcgcacaaatgaacgtgaaggagtttaaggagcatatcgctgcctctgtcagtataccgtccgaaaaacaaagattaatctaccagggccgggtactgcaagacgataaaaagcttcaagagtacaacgttggagggaaggtgattcatctagttgagagagctcctccacagacgcacctgcccagcggcgccagtagcggcactgggtctgcctcagcaactcacggggggggctcaccccctggaaccaggggaccaggggcatcagtccatgatcgaaacgctaactcatatgtgatggtgggcactttcaatctcccctccgatggtagcgccgtggacgtgcacatcaatatggaacaggccccaatccagtccgagccccgcgtgcggctcgttatggcccagcacatgattcgcgatattcagacattactatcacgcatggaatgtagaggagggcctcagccccagcacagccagcccccaccccagcctccggccgtgactcccgagccagtcgcactttcaagccagacatccgaaccagtggagtcagaggcacctcctcgggagcccatggaagctgaggaagtcgaagagcgcgcgcctgcacaaaaccccgaactgacacctggacccgctcctgccgggcccactcccgcccccgagacaaacgccccgaatcacccctcacccgccgagtacgttgaggtgctacaagagctgcagcgacttgagtcacgactgcagccatttttgcaacggtactacgaagtgcttggcgcagcagcaaccactgactataataataaccatgagggtcgtgaagaagatcagcgcttaattaacttggtcggagagtcccttcggctgcttggtaatacctttgtggcacttagtgacctccgctgcaatctcgcctgtacgccccctagacatctccatgtggtgcggcccatgtctcattatacaacacctatggtgttgcagcaggctgccattcccatacagatcaatgtcggcacgaccgtcacaatgaccggaaacggtacccgcccgccacccacaccaaatgctgaggcacctcctcctggccctggccaagccagctccgtcgcgccctcaagcaccaacgtggaatcgagcgcggagggcgctccccctcctgggccagcacccccccccgcaacaagtcatcccagagtcattcggataagccatcagagtgtggagccggtcgttatgatgcacatgaatatacaggacagcgggacccaaccaggcggcgtaccatcggcacccaccggcccattgggaccacccgggcatgggcaaacccttggaagcactctgatccaattgccttccctccccccagaatttatgcacgccgtggctcaccagattactcatcaagctatggtggctgccgttgcctcgtag

SEQ ID NO: 109581 - DNA, 738 bp, synthetic construct
  misc_feature 1..738: note = Description of Artificial Sequence: Synthetic coding sequence
  source 1..738: mol_type = other DNA
ccccctcgacatctgcatgttgtgcgtcccatgtctcactacaccacacccatggtgttgcagcaagctgccatccccattcaaattaatgtggggactacagtgacgatgacaggacccgcccctccaccagccaccagtcaccccagagtgataaggatttctcaccaatccgtggagccagtagtcatgatgcacatgaacatccaggattccggaacccaacctgggggagtgccttctgctcccaccggcccccttgggccgcccggccatgggcaaaccctgggtcagcaggtcccggggttcccaaccgcacccacccgggtagtgatagcaagaccgactccgccgcaggctcgcccatctcacccaggggggccacccgtcagtggaacactacaaggcgccggcctggggaccaatgcctcgctggctcagatggtgtcaggattggtggggcaattactgatgcagcccgtactcgtcgctcagggcacccccggcatggcccctccgccagccccagccactgcctcagcctcagcgggaacgactaacaccgctaccacagccggacctgccccagggggtccggcacagcctccccctacccctcagcctagcatggcagatctgcaattttcccaattgctcggaaacctgctgggacccgcaggacccggcgcaggaggccctggcgtggcctcccctactataaccgtggccatgccatag

SEQ ID NO: 109582 - DNA, 738 bp, synthetic construct
  misc_feature 1..738: note = Description of Artificial Sequence: Synthetic coding sequence
  source 1..738: mol_type = other DNA
ccaccacggcacttgcacgtcgtaaggcccatgtcccactatacaaccccaatggtcctgcagcaagccgccatcccgattcagataaatgtgggcactacggtgacaatgacggggcccgcgcctccacctgccacctctcacccacgcgtgatcagaatctctcatcaaagcgtagagcccgtggttatgatgcacatgaacattcaggacagcggcacccagcctgggggggtcccctccgctcccactggccctttgggcccaccaggccatggtcagacattaggccagcaggtccccgggtttcccaccgcccctacaagagtcgtgatagcaaggcccactcctccccaggcgagaccgtcacaccctggtggccctccagttagcgggactctgcaaggcgcagggcttgggacgaatgcttccctcgcacaaatggtgtcaggtcttgtggggcaactgctgatgcagcctgtgctggtggctcagggcacacccggcatggctcccccccccgcaccagccaccgctagtgcctcggctgggaccacaaatactgctacaacagcaggacctgctcccgggggtccagcccagccgccccccaccccccagccaagcatggccgacctgcaattttcacaactacttggcaacctgcttggacctgccggacccggcgccggtggtagcggagtggcctcgccgaccatcactgtcgccatgccttag

SEQ ID NO: 109583 - DNA, 777 bp, synthetic construct
  misc_feature 1..777: note = Description of Artificial Sequence: Synthetic coding sequence
  source 1..777: mol_type = other DNA
atggagccaaatgattcaacttcaacagccgtcgaagagcctgatagcctcgaagtgctggtgaagacacttgacagccaaacccgcacctttatcgttggcgcgcagatgaatgttaaagagtttaaggaacacatcgcagccagtgtgtccatcccaagcgagaaacagcgtctgatttaccagggaagggtccttcaggacgacaagaagttgcaggagtacaacgtgggtgggaaggtcatccatcttgtggagcgagctcctccacagacgcacctgcctagcggggccagctcaggaactggatcagcctccgccactcacggtggcggtagcccccctggaactcgtggacctggagcttctgtgcacgatcgcaacgccaactcctacgtcatggtgggcacctttaatctcccttccgatggttcagcggtagacgtacacattaacatggagcaggcccccatccagtccgaaccgcgcgtccggttggtgatggcgcagcatatgatcagagacattcagaccttgctgtcccgcatggagtgtagaggaggcccacagccccagcactctcaacctccccctcaacccccagcagttacgcccgagccagttgcactgagttcccagactagcgagccagtcgagagtgaggcccccccgagagagccaatggaagccgaggaggtcgaggagagagctccggcacagaaccctgagctcacacctgggccagcccctgcagggcctacgcctgcccccgaatag

SEQ ID NO: 109584 - DNA, 789 bp, synthetic construct
  misc_feature 1..789: note = Description of Artificial Sequence: Synthetic coding sequence
  source 1..789: mol_type = other DNA
atggagccgaacgactccacttccaccgctgtagaggagccggactcactcgaagtgctggtcaaaaccttggatagccagacacgcaccttcatagtgggcgcacagatgaatgtgaaagagtttaaagagcatattgccgcttcggtgagcatcccgagtgaaaagcaacggctcatataccagggaagggtgttgcaggacgataagaaactgcaggagtataacgtaggcggcaaagtgattcacctcgtcgagcgagccccccctcagacccaccttccgagcggcgcttctagcggaacagggtctgctagcgctacccatggaggagggtcaccgcctggaacacgtggacccggcgcctctgttcacgaccgtaacgctaacagctatgttatggtgggcacttttaacctgccctctgacggcagcgccgtggacgttcatattaatatggagcaggcacccattcagagcgagccacgggtacggctcgttatggcccagcacatgatcagagatattcagaccctgctgtcccgaatggagtgtagaggggggccgcagccacagcacagtcagccacccccccagccacccgccgttaccccggaacccgtggctctgtcctctcaaaccagcgagcctgtagagtctgaggccccaccgagagaaccaatggaggccgaagaagtggaggaacgcgcccccgcccagaaccccgagctcacccctggacctgcgccagctgggcccacacccgctcctgagacaaacgccccatag

SEQ ID NO: 109585 - DNA, 2232 bp, synthetic construct
  misc_feature 1..2232: note = Description of Artificial Sequence: Synthetic coding sequence
  source 1..2232: mol_type = other DNA
atggagccgaacgactctacttccacagccgtggaggaacccgattcactggaggttttggtaaaaacactcgatagccaaactcggacgttcatagtgggtgcacaaatgaatgtgaaggaatttaaggaacacattgcggcatcagtgagtattcccagtgaaaagcagaggctgatctaccaggggcgagtccttcaggacgacaaaaagttgcaggaatataatgtaggcggaaaggtgatccacctcgtggaaagggctcctcctcagacccacttgccctccggtgcaagttctggcaccgggtccgcaagcgcaacccatggtggtggttctccacctggcacacgcggtcccggtgctagtgtgcacgatcgcaacgctaacagttatgtcatggttgggacctttaacctgccaagcgacggttctgctgtggacgtgcatattaacatggagcaggcccctatccaaagcgaacccagggtgcggctggtgatggctcaacacatgattcgcgacattcagactctgctgagcaggatggaatgtagaggagggccccaacctcagcactcccagcctccgcctcagcctccagcagtgacccccgaacccgtggccctgtcttcgcaaacgagcgaacccgtcgaaagcgaagcccctccacgcgaacctatggaggccgaggaagtggaggagagagcgcccgctcagaacccagagctgacccccggccctgcacctgcaggtcccactcccgcgccagagactaatgcacccaaccatccctctcccgcagagtacgtcgaagttctgcaggagttgcagcggctggagtctcggctgcagcctttccttcaaaggtattatgaggtactaggcgcagctgcaaccactgactacaacaacaaccacgaggggcgggaagaagatcaaagactgatcaacctggtgggggagtccctgcgtctgttaggcaacacctttgttgcactttcagacctacggtgtaacctggcatgcacaccgccacgccacctgcatgtcgtgcgcccaatgtctcactatactaccccgatggtgcttcaacaggccgccatacctattcagattaacgtgggcactacagtaactatgactgggaatggtacacgtccccccccaacccctaatgctgaagctccaccaccaggacctggtcaggcgagcagtgtggctcctagctcgactaacgtggagtcttctgctgaaggcgcacccccccccggcccagctcctcctcccgctacctcacacccgagggttatcaggatctctcaccagagtgtagagcccgtggtcatgatgcacatgaatatacaggacagcggaacacagccaggcggtgtcccctccgcgcccactggtccactgggacctccaggccacggtcagaccctgggtagcaccctcatccagctccccagtctgccaccggagtttatgcacgccgttgctcaccagattacgcaccaggctatggttgcggccgtggcgtccgccgcagcgggccagcaggttccgggctttcccactgctcccactcgggtggttatcgccagaccaaccccacctcaggcccggccgagtcaccccggagggccccccgtgtcagggaccctgcagggagccgggctgggcacaaacgctagcctggcccagatggtcagcggtcttgtcggccagcttcttatgcagcctgtgttggtggcccagggcacccccggcatggccccaccacctgcgcccgccacagcctccgccagcgccggaacgaccaacaccgcgaccaccgctgggccggcgcccggcgggcccgctcaaccgccacctaccccccaaccaagcatggctgatctgcagttctctcaactgctggggaacctccttgggccagccggcccaggagcaggcgggagcggtgttgcttccccgaccatcactgttgctatgccaggggttccggccttcctgcagggaatgactgattttctgcaggctacccagaccgcaccacctccccccccaccacctcctccacccccaccggcacctgagcagcagactatgccaccacctgggagccccagcgggggagccgggagccccggcgggcttggtcttgaatccctctctcccgaattcttcacatctgttgtgcaaggcgtactgtcgtccctcctttag

SEQ ID NO: 109586 - DNA, 777 bp, synthetic construct
  misc_feature 1..777: note = Description of Artificial Sequence: Synthetic coding sequence
  source 1..777: mol_type = other DNA
atggagcccaacgacagcacatccactgctgttgaggagccggactcactggaggtactcgtgaagaccctagattcgcaaactcgcaccttcatcgtgggggcgcagatgaacgtaaaggaatttaaggagcacatcgcagcaagcgtcagtatcccgtctgagaaacagaggctgatctaccaggggcgggtattgcaagatgacaaaaaactacaagaatataacgtcggaggcaaggtgattcatctagtggaacgagcccctccccaaacacacctgccttccggagcgtcttcagggacagggtctgcctccgccacccatgggggaggcagtcccccaggcactagggggcctggcgcctccgttcacgaccgcaatgctaacagctatgttatggtcgggacgttcaacctacctagcgacgggagcgccgtggatgtccacatcaacatggagcaggcacccattcagagtgagccccgagtccgtctagtaatggcccagcatatgatcagagatatccaaactttgctcagccgtatggagtgtagggggggccctcagccccaacactcacagccaccacctcagcctcccgccgtaactccggagcccgtggcgctcagcagccagactagtgaaccagtcgagtccgaagcaccacctagagaaccgatggaggctgaggaggtggaagaacgagcccccgctcagaaccctgagttaactccgggccctgccccagcaggcccaacgcccgccccggaatag

SEQ ID NO: 109587 - DNA, 558 bp, synthetic construct
  misc_feature 1..558: note = Description of Artificial Sequence: Synthetic coding sequence
  source 1..558: mol_type = other DNA
taactggcatgcactccaccacgccacctgcacgtggtgagaccaatgagccactacaccacccccatggtcctgcaacaggcggcaatccctattcagatcaacgtgggaactacggtgaccatgaccggaaatggcactagacctccccccactcctaacgccgaggctcctcccccaggcccggggcaggcaagttccgtagccccctcttctacaaatgtcgagtcttctgccgagggggcacccccaccgggcccagctcctcctccagctacctcccatcctcgggttatccgcatctcccaccagtcggtggagcccgtggtgatgatgcatatgaacatccagggacagcaggtccccggcttcccaaccgcacctacacgggttgttattgcccggcccacacctccacaagcccgtccaagccacccaggcggaccacccgttagtgggactttacaaggggcgggcttaggtactaatgccagtctggcgcagatggtgagtgggctggttgggcagctgctcatgcagcccgtgctggtggcctag

SEQ ID NO: 109588 - DNA, 648 bp, synthetic construct
  misc_feature 1..648: note = Description of Artificial Sequence: Synthetic coding sequence
  source 1..648: mol_type = other DNA
atggagcccaatgactctacttcaaccgccgttgaggagccggatagcctggaggtgctggtcaaaacactggacagtcaaaccagaacctttatcgtgggagcccagatgaacgtgaaagaattcaaggagcatattgctgcttccgtgtccatcccaagcgaaaagcagaggctgatctaccagggccgagtgcttcaggacgataagaaattacaagaatataatgtcggggggaaggttatccacctcgttgaacgagcccccccacagacacacctgccctctggcgcctctagcggcactggctccgcctcagcgacccatggcggcggctctccaccaggcactcggggtcccggggcatctgttcacgaccgaaacgcaaacagctacgtgatggtcgggactttcaatttgcccagcgaacccagggtgaggctcgtgatggcgcagcatatgatccgcgatatccagaccctcctgtccaggatggaatgcagggggggccctcagccccagcatagtcaacctcctccccagccccctgcagtgacacccgaaccagtggccctgagctcgcagacatcagaaccggtcgagtctgaggcccctcctagagagccgatggaggctgaagaagtttag

SEQ ID NO: 109589 - DNA, 780 bp, synthetic construct
  misc_feature 1..780: note = Description of Artificial Sequence: Synthetic coding sequence
  source 1..780: mol_type = other DNA
atggagccaaatgatagcacatccaccgcagtcgaggaacccgactccctcgaggtactggtcaaaactctggattcacagacaaggacgtttatcgtgggcgctcaaatgaatgtgaaagagttcaaggaacatatcgcggcatccgtgagcatcccctccgagaaacagagactcatttaccagggtcgagttctccaggacgataaaaagctgcaagaatataatgtcggggggaaagttatccacctggtcgagagggcccctccgcaaacccatttgccgagcggtgcttcctccgggacaggctcggcgtcggcaacccacggaggtggaagtcctccaggcacacgaggtcccggtgctagtgttcacgatcgcaatgcaaactcttatgtaatggtcggcacatttaatctaccatccgacggaagtgccgtcgacgtgcacattaatatggagcaggctcctatccagtcggagcccagagttcgactcgtgatggcccagcacatgatacgcgatattcagaccctgctgagcaggatggaatgtcgaggcggcccgcagccccagcactctcagccaccccctcagccccctgccgttacccctgagccggtggccctcagctcgcagacaagtgagcccgtggagtccgaggccccccctcgcgagcccatggaggccgaagaagtggaagagagagccccagcccaaaatccagagctcaccccaggacccgcacccgctggtccgacacctgcgcctgagacctag

SEQ ID NO: 109590 - DNA, 477 bp, synthetic construct
  misc_feature 1..477: note = Description of Artificial Sequence: Synthetic coding sequence
  source 1..477: mol_type = other DNA
atggaacccaatgactccactagcacagcggtggaggaaccggattccctcgaagtactggtaaaaactcttgacagccagacaaggactttcattgtgggggcgcagatgaatgttaaggagttcaaagagcacattgccgcatcagtttcaattcctagcgaaaaacagcgcctgatttaccaaggtcgggtgctgcaggacgacaaaaagctgcaggaatacaacgtgggcggtaaagtaattcacttggtcgaacgagctccccctcagacccatttgccttctggcgccagttccggtaccggcagtgcctcagccactcacggcggcggttcaccgccaggcacgcgaggaccaggagcttccgtgcatgataggaacgcgaactcatatgttatggtcggcacttttaacctacctagcgacggctctgccgtagatgtccacattaacatggagcaggctcctatatag

SEQ ID NO: 109591 - DNA, 621 bp, synthetic construct
  misc_feature 1..621: note = Description of Artificial Sequence: Synthetic coding sequence
  source 1..621: mol_type = other DNA
atggagcccaatgattcaactagcaccgccgtggaggagcctgatagcctggaggtcctcgtaaaaaccttggacagccagacacggacattcatagtgggggcacagatgaatgtcaaggagttcaaggaacacattgcggcatctgtaagtataccttcagaaaagcagcggttgatttaccaggggcgggtactgcaggatgacaagaagctccaggagtacaatgtgggtggcaaggtgatccaccttgtcgaacgcgctcccccccagactcatctaccgtcaggagcttcgagcgggacaggttccgccagcgccacgcacggaggtggttccccgcctgggacccggggtcccggcgcctctgtccatgatagaaacgcaaactcctatgtgatggtagggacattcaatctcccgagcgagcccagagtgcggttagtgatggcgcaacatatgatcagggatatacagaccctcttaagtcgcatggaatgcagaggggggccgcaaccacagcattcacagccccctccacagcccccagccgtgacccccgagcccgtagccttgtcatcccagactagcgagccagtggaatctgaagcacccccatag

SEQ ID NO: 109592 - DNA, 2232 bp, synthetic construct
  misc_feature 1..2232: note = Description of Artificial Sequence: Synthetic coding sequence
  source 1..2232: mol_type = other DNA
atggagcccaacgattccacaagtacagctgttgaggaacccgatagtctggaagtcctggtcaagaccctagattcccagactcggaccttcatcgtgggtgcccagatgaacgtgaaggaatttaaagaacatatcgcagcctccgtgagcatcccctcagaaaagcagaggttgatttatcagggtcgcgttctccaggatgacaagaaactccaggagtataacgtgggcggcaaagtgatccatctggtggagagagccccaccacaaacacatctccccagcggagcctcatcaggaacaggatctgcctctgctacacacgggggcggatctccaccgggtactcgcggaccaggggctagtgtgcacgatcgcaacgccaacagctatgtgatggtgggcaccttcaacttgccctccgatggatccgcagttgatgtgcatattaatatggaacaggcaccaattcaaagtgaaccgcgcgtgcgtctagtcatggcccagcatatgatccgcgatattcagacgctgttgtcccgaatggagtgtcggggcggcccccagcctcagcatagtcagccccctccacagcctccagctgtgacacccgagcctgttgccttaagttcacagacgtccgagcctgtcgaatctgaggcaccaccaagagaaccaatggaggccgaagaagttgaagagcgtgcgcctgctcagaatccagaactcacgccaggaccagcccctgctgggcccacccccgctcctgagacaaacgcccctaatcatccgagtcctgccgagtacgttgaggtcctgcaggagctgcagagattggagtctcgcctccagccattcctccagaggtattatgaagtgctgggtgccgcggcgactactgactacaacaacaaccacgagggtcgcgaggaagaccaacggttgattaatctagtaggagaatcactcagactgctgggtaatactttcgtggcactgagtgacctgagatgtaatctagcttgtacacctcctcgccacctgcatgtggttcgcccgatgagccactacaccacccccatggtgttgcagcaagcagccatccctatccagattaatgtgggcactacagtgacaatgaccggcaacggcaccaggcctcctccgacacctaatgctgaggctccacctccgggtccaggtcaagcttcttctgtggccccgtcttctactaacgttgagagcagtgccgagggagcgcccccacccggcccggcaccacctcccgccacctcccatccgcgcgtgattcgcatcagtcatcagagtgtggagcctgtagtaatgatgcacatgaatattcaggactccggcacacaacccgggggtgtgcccagcgcacctacaggcccccttggtccccccggacacgggcagacactgggctctactctcattcagctgccctccctgccgccagaatttatgcacgccgtggcccaccagatcacccatcaggcaatggttgccgccgtggcctccgccgcagcaggacaacaagtacctggatttccgacagccccgactcgcgtcgtcatagctaggcctactcctccccaagctagaccatcgcaccccggcggacctcccgtgtcaggcactctccagggcgccggacttggcaccaacgctagtttggcccagatggtgagtggactcgtcggacagttactgatgcagcctgtactggttgcacaaggcacaccagggatggctcccccccctgcccccgctacagcctctgcatccgctgggacaacgaacactgcgactaccgctgggcctgctccaggcgggcctgctcagccacccccaacccctcagccctccatggctgacctccagttcagccagctgctcgggaatctattgggaccagcagggcccggtgcggggggcagtggggtagcatcccccaccattacggtggcaatgccgggtgttcctgcattcctccagggtatgacagacttccttcaggccacacagactgcccctcctccaccaccaccccctccaccccccccaccagcacccgagcagcagacaatgccccccccagggtcaccctccgggggagccgggtcacctggcggcctgggcctggaaagtttgagccctgagttctttactagtgtagtgcagggggtgctatcatccttgctctag

SEQ ID NO: 109593 - DNA, 681 bp, synthetic construct
  misc_feature 1..681: note = Description of Artificial Sequence: Synthetic coding sequence
  source 1..681: mol_type = other DNA
tagagtggtttcggcgctaggctcctggagctatgtaaccaagggcttttcgagtgtctggccctgaacctacattgtctgggcggccagcagatggaactggctgcggtgataaacggtaggatccgaagaatgtcacgaggagttaaccccagcttggttagctggctgacgacaatgatgggcttgcggctgcaggtagtgttagaacacatgcctgttggccctgacgccatactcaggtacgtgcgccgcgtcggtgaccctcctcagcctctgcctgaagagcctatggaagtccagggggccgaacgagcatcccccgagcctcaaagagaaaatgcaagccctgcccccggcaccactgccgaagaagcaatgagtagggggccgcctcccgcccctgaaggcggatctagggatgagcaggacggggcatctgccgaaacggaaccctgggccgccgcggtgccccccgagtgggtccctattatccagcaggacatacagagtcagaggaaagtcaaaccacagccaccgctgtcagatgcctacctatctggcatgcctgcaaaacgcagaaaactgaggtctgatatacagaagcggctgcaggaggatccaaactattcaccgcaacgttttcccaacgcccagcgtgccttcgccgatgacccctag

SEQ ID NO: 109594 - DNA, 594 bp, synthetic construct
  misc_feature 1..594: note = Description of Artificial Sequence: Synthetic coding sequence
  source 1..594: mol_type = other DNA
atggagcctaacgatagcaccagcactgctgtggaagaacccgattctctcgaggtattagttaaaactctggactcccagacccgaaccttcatcgtcggggcgcagatgaacgtgaaggagttcaaagagcacatcgccgcaagtgtgagcatccctagtgaaaaacagcgcttaatttaccaggggcgtgtcctgcaggacgacaagaagctgcaggaatacaacgttggtggcaaagtcatacatttggtagagagggcccctccccagactcacctgccctcaggggcatcgtccggcaccggcagtgcatctgccacgcacggcggtggaagcccccccggcacaaggggccccggcgccagcgtgcacgaccggaatgcaaatagctacgtcatggtgggtacattcaatctcccctcagacggatcagccgtggatgtgcacatcaatatggagcaggctcccatacagtcagagccacgcgtacgcctcgtaatggctcagcacatgattcgtgacattcaaactttattaagcaggatggaatgcaggggcgggccccagccacagcattctcaacctccgtag

SEQ ID NO: 109595 - DNA, 717 bp, synthetic construct
  misc_feature 1..717: note = Description of Artificial Sequence: Synthetic coding sequence
  source 1..717: mol_type = other DNA
tccagtgcggagggcgctccaccccctggtcccgcaccgccaccggcaaccagccatcccagagtgattaggatttctcatcagtctgtagaacccgtagtgatgatgcatatgaatatacagggacccctctccctgtccccgtgccctgattctggtactcaaccggggggggtgcccagtgctcctacaggcccgctgggtccacctggccacgggcaaacgctcggccagcaagtgcccggcttccctactgcacccactagggtggtcatcgccagaccaacacctccccaagctcgcccctcccacccaggcggaccgcctgtgagcgggacgcttcagggggctggacttggtacaaacgcctccttggcgcagatggttagcgggctcgtcgggcagctcttgatgcagcccgtgcttgtggctcagggaactcccgggatggctccacctcctgctcccgctactgcaagtgcatccgcgggtaccacaaatacagctaccacagctgggcccgcccccggcggcccggcacagccaccaccaacacctcagccatccatggctgacctgcagttctcacagctccttggcaaccttcttggtcccgcaggccccggcgccggagggtccggggtcgccagccccaccattacggttgccatgccgggggttccagccttcctgcagggcatgacagatttcttatag

SEQ ID NO: 109596 - DNA, 735 bp, synthetic construct
  misc_feature 1..735: note = Description of Artificial Sequence: Synthetic coding sequence
  source 1..735: mol_type = other DNA
atggaacccaacgattcaacctcgaccgcagttgaggagcccgactcactggaagtcctcgtgaaaacactcgacagccagacaagaacattcatcgttggcgcccagatgaacgtcaaggagttcaaggagcacatcgctgcatctgttagtattccgagcgagaagcaacgtctgatttaccagggtcgtgtcctgcaggacgacaaaaaactgcaagagtataatgttggcggcaaggttattcatctggtggagagagctcctcctcagacacatctgccatccggcgcttcatctggcacaggatccgcatccgctacacacggcggcggctctccacctggcacgaggggaccaggagcctctgtgcatgatcgtaacgcaaattcttacgtcatggttgggacctttaacctgccaagcgagcccagagtgagactggtgatggcgcagcacatgattcgggacatacagaccttgctgagcaggatggagtgccggggaggaccacagccacagcactcccagcccccccctcagccacccgcagtcaccccggagccggtggctttgtcgtcccaaaccagcgagcccgtggaatctgaagctccgccccgtgaaccgatggaagctgaagaagtcgaggaaagggcgccagctcagaatcctgagctcacgccggggcctgctcccgcaggccccacacccgcccccgagacaaacgcaccatag

SEQ ID NO: 109597 - DNA, 789 bp, synthetic construct
  misc_feature 1..789: note = Description of Artificial Sequence: Synthetic coding sequence
  source 1..789: mol_type = other DNA
atggagccaaatgactcaacttccacggccgtcgaagaaccggacagcttagaggttttagttaaaacactagactcacaaacacgcaccttcattgtgggagcacagatgaacgtaaaggagtttaaagagcatatcgctgccagcgtgagcatcccaagcgaaaagcagaggctgatctatcaggggcgggttctgcaggacgacaagaaactacaggaatataatgtcggagggaaagtgattcacctggtggagagggctccaccccagactcatctacccagtggcgctagttcgggcacagggagcgcaagcgccacccacgggggcggatcacctcctggcacaaggggtcccggcgcttcggtgcatgaccgcaatgccaattcatacgtcatggtgggtactttcaatctgccttcggatggcagcgctgtggatgtgcacattaacatggagcaggcccccatccagagtgagccccgagtccggctggtcatggctcagcatatgatccgggacatccagacacttctgagccgcatggaatgccgcggggggccacaaccgcagcatagccagcccccacctcagccccccgccgtgactcctgagcctgtggccctgtctagccagacctccgaaccggtggagtccgaggctccaccgcgagagccgatggaggctgaggaagtggaagagagggctcctgcccagaatccggaactaacacccgggcctgcgcctgccggccccacccctgcccccgaaactaacgccccctag

SEQ ID NO: 109598 - DNA, 2232 bp, synthetic construct
  misc_feature 1..2232: note = Description of Artificial Sequence: Synthetic coding sequence
  source 1..2232: mol_type = other DNA
atggaacctaatgacagcacatcaacagccgtcgaggagccggactcgctcgaggtcttggtcaaaacactggatagtcagactcggacctttattgtgggggctcaaatgaacgtcaaggagtttaaggaacacatcgctgcaagcgtctcaattccgagcgaaaagcagaggctgatctaccaaggaagagtgctccaggacgacaagaaactgcaggagtacaacgtaggcgggaaggtgatacacctggttgagcgcgccccaccccaaacacatctgccaagcggcgcctcttccggtaccgggtctgcgtcggctacccatggaggcggctcaccacccggcactagggggcccggggcctcagtccatgaccggaatgctaattcgtacgtcatggtcggcacatttaatctaccttctgatggatcggcagtcgacgtgcatataaatatggagcaggccccaatccagagtgaacctcgcgtcaggcttgtgatggcccaacatatgattagagacattcagaccctgctgagtcggatggagtgtagagggggcccacagccacaacattcccagcctccgcctcaaccccccgccgtgaccccagagccagtggccctgtcctcgcagacatctgaaccagtcgagagcgaagctccaccacgagagccaatggaagctgaggaggtggaagagagagcacctgcccagaacccagaactgactcctggcccagccccagccgggccgaccccagcccctgaaacgaatgcccccaatcatcccagcccagccgaatacgtagaggtgttgcaggaactacagaggctcgaatcccgcctgcagcctttcctgcaacgatactatgaggtccttggagcagcagcaactaccgattacaataataatcacgaaggcagggaggaggaccaaagacttatcaatctggtcggtgagagccttcgattactgggcaacacattcgtggcactgagcgaccttaggtgtaacctagcctgcaccccgccacgacacctgcacgttgtgcgccccatgtcccactacaccaccccaatggtgctgcaacaagcggcaatacctatccaaatcaacgtcggaaccacagtgaccatgaccgggaatggaacaaggcctccgccaacccccaatgccgaagcgccccctcccgggcccgggcaagcctcatccgtcgctccaagttcaactaacgtagaatcatcagcagaaggggctcctccccctgggccagcaccgccccctgccacctctcatcccagggtcataaggatttcccatcagtcagtggaacctgtagtgatgatgcacatgaacatacaggattctgggacacagcccggaggcgtgccatccgctcccacggggccactagggccccccggacatggccagactttggggagtacactcattcagctgccttccctccctccagagttcatgcatgccgtggctcaccagataactcaccaggcaatggttgcagcagtggccagtgctgccgccgggcaacaggttcctgggttccccaccgccccaactcgggtcgtaattgccaggcctactccccctcaggcacgcccgtcgcacccaggtgggccacctgtctctggcactctccagggcgccggtctgggcacaaatgcatcactggcccaaatggtctcaggcctggtaggacagcttttaatgcagccggttctggtggctcaggggactcccgggatggctcccccccccgccccggcaactgctagcgccagcgcagggacgactaataccgctacaaccgctggcccggctcctggaggccccgcccaaccacctcctacgccacagccaagtatggccgatctccagttctcacaactccttggaaacctgctggggcccgccggccccggggccggcgggccaggggtggccagtccaactataactgtagctatgcctggagttccagccttccttcagggtatgacagacttcctgcaggcgactcagactgcccccccccctcccccacccccacctcctccaccacctgcacctgagcaacagacaatgcctccccctggatccccaagtggcggcgcagggagtccaggaggtctgggactggaatccctgagtccggagtttttcacaagtgtggttcagggcgtactctcctctctactttag

SEQ ID NO: 109599 - DNA, 735 bp, synthetic construct
  misc_feature 1..735: note = Description of Artificial Sequence: Synthetic coding sequence
  source 1..735: mol_type = other DNA
atggaacccaatgacagcactagtactgcggtggaagaaccggactctcttgaggtgctcgtgaagacgcttgatagccaaacccgcacattcattgtcggggcccaaatgaatgtgaaggagtttaaagagcacatcgccgcgagcgtgtccatcccttcagagaaacagcggctcatctatcaaggacgcgtccttcaggatgataagaagctacaagagtacaacgtcgggggcaaagtcattcatcttgtggaaagggccccacctcagactcaccttcccagcggcgcttcctccggcaccggatctgccagcgctacccacggtggtggttccccacccgggacacgagggccaggcgcgagcgtgcacgacagaaatgctaacagctatgtgatggtagggacctttaaccttccttctgaaccccgggtcagactcgtcatggctcaacatatgattcgcgatattcagactttgttgtccaggatggaatgccgcggcgggccccagccacagcactctcagccacccccccagccaccagccgtgactcctgaaccagttgccctgtcatctcagaccagtgagcccgtcgagtccgaggctcctcccagagaacccatggaggcagaggaagtggaagagcgtgcccccgcccaaaaccccgagctgacccccggcccagccccggccgggccgactcctgcccccgagaccaatgctccgtag

SEQ ID NO: 109600 - DNA, 789 bp, synthetic construct
  misc_feature 1..789: note = Description of Artificial Sequence: Synthetic coding sequence
  source 1..789: mol_type = other DNA
atggaacccaatgactccaccagtaccgctgtggaagagcccgactccctcgaggtgcttgtgaaaaccctcgactcgcagacccgcacgtttatcgtgggtgcccagatgaatgtcaaagagttcaaggagcatatagctgcatccgtgtccatcccatccgagaagcaaaggctcatctaccaaggacgggtgctccaagacgataagaagctgcaagaatacaacgtgggcggcaaggtgatccacctcgttgagagagccccaccacagacccatctgccctccggtgcgtcaagtgggaccggctcggcatcggcaactcacgggggaggttcacctcccgggacccgcgggccaggagcctctgtccatgatagaaatgccaacagctacgtaatggttggcaccttcaatctgcccagcgatggttccgccgtggacgttcacattaatatggagcaggcaccaatacagtccgagcctagggtgcgtcttgtgatggcgcagcacatgattagggacatacagactctgttgtcacggatggaatgtcggggcggccctcagccacagcactcccagccccctccgcagccccccgcagtgactccagagcctgtggcgctaagctcccagacttcagaacccgtagagagtgaagctccaccaagagagccaatggaagccgaggaggttgaggagagagccccagctcagaaccccgagctgacaccaggtcctgctcctgccggtcctacgccggcccccgagaccaacgccccttag

SEQ ID NO: 109601 - DNA, 2712 bp, synthetic construct
  misc_feature 1..2712: note = Description of Artificial Sequence: Synthetic coding sequence
  source 1..2712: mol_type = other DNA
atggaacctaacgatagtacctctacagctgtggaagaaccggactctcttgaggttctggtgaagactctcgatagccagacacggacattcatcgtgggggctcagatgaacgttaaggaatttaaagaacatatagcagctagcgtgagcatcccctccgagaaacagagattgatctatcagggaagggtactgcaggatgacaagaaacttcaagagtataacgtaggcggcaaagtaatacatttggtggaacgagctcctccacaaacgcatctgcctagtggcgccagttctgggaccggatcagcgagcgctacccacggcgggggatctcctcccggaacaagaggtcccggggcaagcgtacatgacaggaacgctaactcctatgtgatggtggggacttttaatctcccgtccgatggttcagccgtcgacgtccatattaatatggaacaagctccaatacagtccgagccaagagtacggcttgtgatggcccagcacatgatacgcgatatccagaccctgctgtctagaatggagtgccgaggtggcccgcaaccgcaacacagtcagccgccaccacagccaccggcagtgacacccgaaccagtagcgttgtctagccagacaagcgagccagttgagagcgaagcaccacccagagaacccatggaggccgaggaagtcgaggagcgcgctcctgcacagaatcctgagctgactccgggccccgctccagcaggccccacgcctgcacctgagactaacgccccaaaccacccttcacctgctgaatacgtggaagtcctgcaggagctgcagaggctggagagtagactgcagcctttcctgcagaggtattacgaggtgctgggggccgcagctaccaccgattataataataaccacgagggcagagaggaagaccagcgacttatcaacctggttggagaatcactgagactcttaggcaacacattcgtcgccctctcagatcttagatgcaacctcgcatgcacgccaccaaggcacctccacgttgtgagacccatgagtcactacaccaccccaatggtacttcagcaggctgctattcctattcaaattaacgtgggtactaccgtgaccatgactggtaatggaacaagacccccgcccacacctaatgcagaggccccaccacctggccccggacaggctagcagtgtcgctcccagctccaccaacgtcgaatcctctgccgagggtgctccaccacctggcccagcaccaccccctgctacctctcatcctcgcgtgataaggatctcccatcagagcgtcgagcctgtagttatgatgcacatgaatattcaggacagtggtacacaacctgggggagtgcctagcgcaccaactggaccactcggaccccctggacacggccaaacgctggggcaacaggtgcccgggtttcctacagcgcctacacgcgtggtcatagcgcggccaacacctccccaggctcgtccatcgcaccccggaggcccacccgtgtctggcacattgggagcaggactcggcacgaatgccagcctggctcagatggtcagtggattggtgggccagctgctgatgcaacccgtacttgtggcacagggcactcccggttctcctggtggtctggggcttgagtctctgtctccggagttttttaccagcgtggtgcaaggtgtactttcaagtctcctcggctctctgggagcacgggcaggaagctcagagtctattgcagccttcatacaaaggctcagtggatcttccaacatatttgaacccggagctgatggcgcgctgggttttttcggggcactccttagcctgctgtgccagaacttttccatggttgatgtggtaatgctgctgcatgggcatttccagccccttcagcggctgcagccccagctgagaagctttttccaccagcattatctgggcggccaggagccgacaccatcaaacataagaatggctacccatacactaatcaccggcttggaagagtatgtgcgcgaatcgtttagtctggtgcaggtgcagccgggcgttgacatcattaggaccaatctagagtttctgcaggagcagttcaatagtatcgcggcgcacgttctgcattgtaccgacagcgggttcggagcgaggctgcttgaactgtgcaaccagggcctgttcgaatgcctggctctgaacctgcactgtctgggaggccagcaaatggagctggcagccgtgataaatggcagaattagacgcatgtcgaggggagtgaatcccagcctggtatcctggctcacaactatgatgggccttaggctacaagtcgtactcgaacacatgcctgtaggcccagatgctatcctgagatatgtaaggagagtgggggatccaccgcagcccctgcccgaagaaccaatggaggtccagggtgctgagcgcgctagtcccgaaccccaggaatgggttcccataatacagcaagacatccagagccagcgcaaagtgaaaccacagccaccactgtcagatgcttatttgagcggaatgccagcgaagagacgaaaactcaggagtgacatccagaagcgcctccaggaggatccgaattacagtccccaacgctttcccaacgctcagcgagcatttgctgacgacccctag

SEQ ID NO: 109602 - DNA, 558 bp, synthetic construct
  misc_feature 1..558: note = Description of Artificial Sequence: Synthetic coding sequence
  source 1..558: mol_type = other DNA
tagttagcttgtacgcctcctagacaccttcatgtagttcggccaatgagtcattacacgacacccatggtactgcaacaagccgctattccaattcagattaatgtgggcactacagtgactatgacgggtaacggcactaggccaccccccacaccgaacgctgaagccccaccaccaggaccaggtcaggctagttccgtggccccatccagcaccaatgtggaaagttctgctgagggagcccccccacccggccccgctccgccaccagcaaccagtcatccacgggtgatccgcatatctcaccaatctgtagagcccgtcgtgatgatgcatatgaatattcagggccagcaggtgccaggcttccccaccgcacctacaagggtcgttatagcccggcctacgccgccacaggcgaggccttcacaccctggaggcccacccgtaagcggtacgctgcaaggagctggactgggtaccaatgcttcactcgcgcagatggtgtcggggttggtaggccagctgctgatgcagcctgtcttggtcgcctag

SEQ ID NO: 109603 - DNA, 789 bp, synthetic construct
  misc_feature 1..789: note = Description of Artificial Sequence: Synthetic coding sequence
  source 1..789: mol_type = other DNA
atggagccgaacgatagcacttccactgctgtggaagagccagactcgttagaagttcttgttaagaccctcgatagccaaactaggaccttcattgtgggtgcacagatgaacgtcaaagagttcaaggagcatattgccgcatccgtgtccatccccagtgagaaacaaaggttgatctaccaaggtagggtactccaagacgacaagaagctccaagagtacaatgttggcggtaaggtgatacacttagtagagcgcgcgcctccgcaaacccacttaccttcaggagcttcgtctgggaccggctcagcctcagctacacatggaggtggaagtcccccaggcacgcggggacccggcgctagtgtgcacgatcgcaacgccaacagctacgtgatggtgggtactttcaatctgccgagtgatggcagcgccgtggatgtccatattaatatggagcaggctcccatccaaagtgaacccagggtgagactcgtaatggcccagcacatgattcgcgatattcagacactgctgtctagaatggagtgccgcggcggcccgcagccacagcattctcagccacccccgcagcccccagccgtgacgcccgagcctgtagctctgagctcccagacgtctgagccagtcgagtccgaagccccaccacgagaacccatggaggcggaagaggtggaagagagagcgcctgctcagaacccagagctgactcctggtccagcgccagcagggccaacacctgcaccggaaacgaatgcaccatag

SEQ ID NO: 109604 - DNA, 621 bp, synthetic construct
  misc_feature 1..621: note = Description of Artificial Sequence: Synthetic coding sequence
  source 1..621: mol_type = other DNA
atggaacccaatgatagcacgtctacggccgtggaggaaccggactctttagaggttcttgttaaaaccctggacagccagaccaggacattcatcgtgggcgcacaaatgaatgtgaaggagttcaaagagcacatcgctgcaagtgtgtccatcccttcagaaaaacagcgtcttatctaccaggggcgggtcctgcaggatgataaaaagctacaggagtacaacgtgggcggcaaggtgattcacttagttgagcgcgctccaccacagacccacctgccgagtggggcttctagcggtacaggtagtgcatccgctacacacggcggcggatccccacccggaacaaggggacctggagcctcagtccacgatagaaatgcaaactcttacgtcatggttggtactttcaatctccctagcgaaccccgagtccgcctggtgatggcacagcatatgatccgtgatattcagactctgctgtcgagaatggagtgtcgcggggggccacaacctcaacactcacagcctcctccccagcccccggccgtgacgcctgagccagtggcactgtcctcacagacctctgagccagtggaatcagaggcccctccgtag

SEQ ID NO: 109605 - DNA, 681 bp, synthetic construct
  misc_feature 1..681: note = Description of Artificial Sequence: Synthetic coding sequence
  source 1..681: mol_type = other DNA
taatccggctttggcgcacgccttcttgaattgtgtaatcagggcctgttcgagtgcctcgcacttaatctacattgtttgggggggcagcaaatggagttggccgcagtcattaatgggagaattcggcgcatgagtcgaggcgttaacccctcccttgtttcttggctaacgacaatgatggggttgcgtctccaggtggtgcttgagcacatgccagttgggcctgacgctatcctcaggtatgtgagacgggtcggtgacccccctcaacctttgccagaggaacccatggaagtgcaaggagccgaacgcgcaagcccagaacctcagcgcgaaaacgcaagtccagctcctggtactacagccgaagaggctatgagcagaggcccacctccagcccccgagggcgggtcacgcgatgagcaagacggcgcctctgcggagaccgagccatgggcagcagcagtcccccctgagtgggtacctattatacagcaggacatacagagccagaggaaagtgaaacctcaaccacctctgagcgacgcttacctctcaggaatgcccgccaagagaaggaaactccgatctgacatccagaaaaggctgcaggaggacccaaactacagtccgcagcggttcccaaatgctcagcgggcattcgcggacgatccctag

SEQ ID NO: 109606 - DNA, 780 bp, synthetic construct
  misc_feature 1..780: note = Description of Artificial Sequence: Synthetic coding sequence
  source 1..780: mol_type = other DNA
atggagcctaacgatagcacgagcacagctgtcgaagagccagattctctcgaggtgctggttaagaccttagatagccagacaaggacattcatcgtgggtgcccagatgaatgtaaaagagtttaaagagcacatcgcagcttcagtgagtatcccgtctgaaaaacagcgtctcatctaccagggccgagtgcttcaggacgataaaaaattgcaggaatataacgttggtggtaaagtaatccacctggtcgaacgagctccaccacaaacccacctcccatccggcgcaagtagtggtaccggctcggcttctgccactcacggtgggggatcacctcccggcactcgcggccctggagccagcgttcacgacaggaacgcaaattcatatgtgatggttggaactttcaatttaccttccgatggcagcgcagttgacgttcatattaatatggaacaggcacccatccagtccgagcctagggttcgcctggtcatggcccagcacatgatcagagacatacagaccctgctatcccgaatggagtgccggggcggtccgcagcctcaacatagccaaccgccgcctcagccacccgctgtgacaccggaaccagttgccctgtccagccagacctctgaacccgtggagagtgaggccccaccccgagagcccatggaagccgaggaggttgaggagagagcacctgctcagaatccagaactgactcctgggcctgcacccgccggcccaacgccagcaccagagacatag

SEQ ID NO: 109607 - DNA, 777 bp, synthetic construct
  misc_feature 1..777: note = Description of Artificial Sequence: Synthetic coding sequence
  source 1..777: mol_type = other DNA
atggaaccgaatgatagtacttcaaccgccgtcgaagagcctgactccctggaggtgctcgtgaagacactggactcacaaactaggacctttatcgtgggagcccaaatgaatgtcaaggaattcaaagaacatatcgcagcttctgtgagcatccctagcgaaaagcagcgcttgatctaccaggggagagtgctgcaggatgacaagaaactacaggagtacaatgtgggggggaaggttatccatctggtggagagggctccacctcaaacccatctaccctctggagcatcttccggcactgggagtgctagcgcaacacatggaggcggaagcccccctggcacgcggggcccgggtgcctctgtccatgacagaaacgccaattcttatgtcatggtcggcacttttaacctgccaagcgacggcagcgccgtcgatgttcatattaatatggaacaagcgcctatccagtcagagccgagagtccggctggttatggcccagcacatgataagagacatccaaactctcttaagcaggatggaatgtcggggaggcccgcagccccagcactctcaacctcctcctcagccccccgcagtgacacctgaacctgtcgctctgtctagccagacttccgagcctgttgaatccgaggcccccccgagagagccaatggaggcagaggaagtggaagagagggccccagcccagaacccagaactgactcctggaccagcacccgctgggcccactcccgctcccgaatag

SEQ ID NO: 109608 - DNA, 477 bp, synthetic construct
  misc_feature 1..477: note = Description of Artificial Sequence: Synthetic coding sequence
  source 1..477: mol_type = other DNA
atggaacccaacgacagcactagcactgccgttgaagagcccgactctctagaggtacttgttaaaacgctggattctcagactcgcaccttcattgtgggtgcacagatgaacgtcaaagagttcaaggagcacattgccgcctccgtgtctattccatctgagaaacagcgactgatataccaaggccgggtgttgcaggacgataagaagctgcaggagtacaatgtggggggcaaagtgatccacctcgtggaacgcgcccccccgcaaacccacctcccatctggcgccagctcaggcacgggctcagcatccgcaactcacggaggcggttcccctcccggtacacgaggtcctggggccagcgtccatgatcggaatgccaattcttacgtgatggtgggaacttttaacctgccctcagatggctccgctgtggatgtgcacattaacatggaacaggctcctatttag

SEQ ID NO: 109609 - DNA, 735 bp, synthetic construct
  misc_feature 1..735: note = Description of Artificial Sequence: Synthetic coding sequence
  source 1..735: mol_type = other DNA
atggagcccaatgactctacgagtacagccgtggaagaacctgattctctggaggtgcttgtaaagaccctagactctcagacaaggacattcatcgttggagctcagatgaacgtgaaggaattcaaagaacacattgcagcctccgtgagtattccctctgagaagcagaggctgatataccagggtcgcgtactgcaggatgataaaaaactacaggagtataatgtgggcggaaaggtgatccatctcgttgaaagagcacctcctcagactcacctgccaagcggagctagcagtggaactgggtccgcctccgcaacgcacggcggcgggagcccacctggaaccagagggcccggcgcaagcgtgcacgaccgcaacgccaactcttacgttatggtcggaacctttaatctccccagcgaaccgagagtccgactggtcatggcacagcacatgattagggatatccaaactcttttatctcgcatggagtgtaggggaggaccgcaaccacagcattcacagccacccccacagcccccggccgtcaccccagagccagtggccttgtccagtcaaacctccgagcccgtcgagtctgaggccccacctagagagcccatggaagcggaagaggtggaagagagggcccctgcgcagaaccccgaattaactcctggtcctgctcctgcaggcccaacaccagcgccggagaccaatgcaccctag

SEQ ID NO: 109610 - DNA, 3381 bp, synthetic construct
  misc_feature 1..3381: note = Description of Artificial Sequence: Synthetic coding sequence
  source 1..3381: mol_type = other DNA
atggaacctaacgattcaacctccacagccgtggaggagcccgattcacttgaagtacttgtgaaaacattggattcgcagaccagaacattcatcgttggggctcagatgaacgtgaaggaatttaaggagcatatcgccgctagtgtgtctatcccctcagaaaagcagcgtctcatctatcagggccgcgtgctgcaagacgataagaaacttcaggagtacaatgtaggaggaaaagtgattcaccttgtagagcgggctcctcctcaaacccacctgccaagcggagcgagtagcggaaccgggagtgcctccgcgacacatggtggaggttcaccacctggcacccggggccccggggcatctgtgcatgatagaaacgctaacagttacgtgatggtgggaacgttcaacttgcccagcgacggaagcgccgtagatgtgcacatcaatatggaacaggccccaatacaatcggagcctcgggtgcgcctggtgatggcgcagcatatgattagagatattcagactctcctgagcaggatggagtgccgggggggtcctcagccgcaacactcccagccccccccacaacccccagcagtgactccagaacctgtggccctgagcagccagacatcagaacctgtagaatcagaggcccccccaagagagcctatggaggcagaagaggtggaggagcgcgcacctgcgcagaaccccgagctgaccccgggcccagccccagccgggccgacccccgcccctgagaccaacgctcccaatcatccctctcctgctgagtacgtggaagtgctccaagaattgcagcgactcgaatccaggctccagccattccttcagcgatattatgaggtacttggtgcggcggccacaactgattataacaacaaccacgaaggacgagaggaagaccagcgcttgataaacttagtgggtgaaagtctgcggctcctcggaaatacctttgttgcactgtctgacctgcgctgcaaccttgcatgcacaccacccagacacctgcacgtcgtgcgccccatgtcccattacaccacccccatggtcttacagcaagccgccattccaatccaaattaacgttgggacaactgtcacaatgacaggtaacggcacccgtccccctcctaccccgaatgccgaggctccaccaccagggccgggccaggcaagtagcgtggcacctagttctacaaatgtcgagagcagtgccgaaggggccccacctcccgggcctgctcctccgcctgcaacatcacacccaagagtgattaggatcagccaccaaagcgtcgagccagtagttatgatgcacatgaacatccaggattcaggcacccagcctggcggagtgccctctgcgcctactggccctctagggcctcctggtcatggccagacattagggcaacaggtccccgggttcccaaccgcacccactcgggtcgtgatcgccaggcctaccccgccgcaggcaaggccaagtcaccctggaggcccccccgtgtccggaaccctccagggcgccggacttggcactaacgccagtctggcacagatggtgtccgggcttgtgggacagttactaatgcagcccgttcttgtggcccagggcacgcccggcatggccccgccacccgcaccagccaccgcatccgcatccgctggcaccaccaatacagctaccacagccggacccgcgccaggcgggccagcacagccccccccaactccccaacctagcatggcggatctgcagttttcccagttgcttgggaatctgttgggacctgccggaccaggcgccggaggctcaggcgtggcaagtcccacaatcactgtagccatgcccggagttcccgcgttcttgcagggaatgactgattttcttcaggccacgcagacagccccgcccccaccacctccaccccctccacccccacctgcacccgaacagcagactatgccaccgcctggaagtccatccgggggagccggctccccaggcggcctcggtcttgagagcctcagccctgaattctttaccagcgtagtgcagggcgtgttgagctcactgctgggatctctgggagccagagcagggtcttcagagagcatagccgctttcatccagagactctctgggtcttccaatatcttcgaacctggtgccgacggagccttaggctttttcggtgcccttctgtccttgctttgccaaaacttctcaatggtggatgtagtgatgctgcttcacgggcacttccaaccacttcaaaggcttcagcctcaactcagaagtttcttccaccagcactatctgggaggccaggagcccacaccctccaacataagaatggcaacacataccctgattacaggcctagaggaatacgtaagagaatcctttagtctagtacaggtgcagcctggggtcgatattattcgaacaaacctggagtttttacaggagcaattcaattcgatcgcggctcacgtcctgcattgcaccgactcagggtttggcgcgagactgctagagttatgtaaccaggggttgtttgagtgtttggcactcaatcttcattgcctcggcggccaacaaatggaacttgctgctgtgatcaacggacggataaggaggatgtcccgaggcgtgaatccttctcttgtgtcatggcttacaaccatgatgggattgaggttacaggtggtacttgaacatatgccagtggggcctgatgcaattttacgatacgtccgacgagtcggagacccccctcagccactgcccgaggagcccatggaagtgcagggcgcggaacgggcatccccagaacctcaacgggagaatgcatctcccgcccctgggaccacagcagaagaagctatgtcacggggtcccccccctgcccctgaaggcggatccagggatgaacaggacggcgcctccgcagagaccgaaccctgggccgccgcagttcctccagagtgggttccgataatccaacaggacatccaaagccagaggaaggtgaagccccagccaccattatcagatgcctatctgtctggaatgcctgctaagcggaggaagactatgcaaggggagggccctcaactgctactgtccgaggccgtctcccgcgccgctaaagctgcgggcgctaggccacttacgagcccagagtcacttagccgggacctcgaagccccggaggttcaggaaagctatcgccagcagctcaggtctgacatccagaagcgcctgcaggaggaccccaattactctccccagagattccccaatgcgcagagagccttcgccgacgacccttag

SEQ ID NO: 109611 - DNA, 735 bp, synthetic construct
  misc_feature 1..735: note = Description of Artificial Sequence: Synthetic coding sequence
  source 1..735: mol_type = other DNA
atggaacctaacgacagcacctccacggctgtggaagaacccgactccctggaagtactggtcaaaactctcgatagtcagacgcgtacttttattgtaggggctcaaatgaacgtgaaagagttcaaggagcatattgctgcctctgtcagcatcccatccgaaaaacagcgattgatttaccagggacgagtattgcaggatgacaaaaaactccaggagtataatgtgggcgggaaggtgattcatctggtagagagggctccccctcagactcacctgccctccggcgcttccagtgggaccggctctgcctccgctacccacggaggcggcagcccgcccggcactcgcggaccaggggcatcagtccacgacaggaacgccaactcttacgtgatggtggggaccttcaatctcccctctgagcctagagtcaggctggtcatggcccagcacatgatccgtgacatacagacactcttatcccgcatggaatgcagagggggaccccagcctcagcactctcagccccccccacagccccctgccgtcactccagagcccgtggctctgagttcccagacgtctgagccggtcgaaagtgaggctcccccccgagaacccatggaagcagaggaagtcgaagagagggctcctgcacaaaatccggagctcacccccgggcctgctcctgccggtcctactcccgcacctgagaccaatgcaccctag

SEQ ID NO: 109612 - DNA, 1548 bp, synthetic construct
  misc_feature 1..1548: note = Description of Artificial Sequence: Synthetic coding sequence
  source 1..1548: mol_type = other DNA
atggagcccaacgactccacctccacggcggttgaggagcccgatagcctggaagttctggtcaagaccctggattcccagactcggacttttattgtcggagcacagatgaacgtaaaggagtttaaggagcacatcgctgcctccgtttccatcccatccgagaagcagcggctgatatatcagggacgggtgctccaagacgataaaaagctgcaggagtataatgtgggcggcaaagtaatccatctggtcgaacgggctccgccacagactcacctccccagcggggcttcttctggtacaggctccgcctccgcaacccatggcggggggtctcctcccggcaccaggggacccggagcgagcgtgcatgatcgaaatgctaactcttacgtgatggtcgggacattcaacctcccatcagacggatcagcagtggacgtgcatataaacatggaacaggctccaattcaatcagaaccgagggtaagactagtgatggctcagcatatgattagggacattcagactctgctgagtagaatggagtgccgcgggggaccacagcctcagcactcccagcctcccccccagccccctgcagttacgccagaacctgtggccctgtcatcacagacgtcagagccggtcgaatctgaagccccgccccgcgagccaatggaggccgaggaggtggaggagagagcccccgcccaaaacccggagctgacccccggcccagctcctgccgggccaacacccgccccagagactaatgcacctaatcatccaagtccagctgaatatgtcgaggtgctgcaggaactgcagaggctggagtccaggctccagcccttccttcagcgttactacgaagtgcttggcgcagcggccactacggactataacaacaaccacgagggaagggaagaggatcagagattaataaacctggtgggcgagtcactgcggctcctcgggaacaccttcgtcgctttgagcgatctgcgctgcaatctcgcctgtacccctccgcggcacctccacgtggtgagacccatgagtcattataccacacccatggtcctccagcaggccgccattccaattcagattaatgttggaacgacagtgacaatgactgggaacggtactcgcccgcctccaacacctaacgcggaggcgcctcccccggggccaggacaggcaagctcagttgcgccctctagtacaaacgtggagagttccgcagagggcgcacctcctccagggccagccccgccaccagccaccagtcatcctagagtgatccgcatcagtcatcagtcagtagaaccagtcgtcatgatgcacatgaatatacaggattccggcacacaaccggggggggtacccagcgctcccacagggcccttgggacccccaggccacggccagaccctggggagcactctgatccagctgcccagtctgccaccagaattcatgcacgccgttgctcaccaaatcactcatcaggccatggtcgcagccgtagctagctag

SEQ ID NO: 109613 - DNA, 3381 bp, synthetic construct
  misc_feature 1..3381: note = Description of Artificial Sequence: Synthetic coding sequence
  source 1..3381: mol_type = other DNA
atggaaccaaatgactctacttctactgccgtggaagagcccgactctctggaagtgctcgttaagacactggacagtcagacccggaccttcattgtaggcgctcagatgaacgtgaaagagtttaaggaacatattgccgcttctgttagcataccgtcagaaaaacaacggctcatctaccaaggccgagtgctccaggacgataaaaagctacaagaatacaatgttggggggaaggttattcatctcgttgaacgggcgcccccccagacccacttgcctagtggtgccagttcggggactggttccgcttcggccacacatggaggcggttctcctcctggaacacggggtccaggtgcaagtgtccacgaccggaacgccaatagctacgttatggtcggcacattcaatctaccaagtgacgggtcagctgtggacgtccacatcaacatggaacaggctccgatccagtcagagcctcgcgtgcggctcgtaatggctcagcatatgatccgcgacatccagactctcttgtctcggatggagtgtcgcggcgggccacagccacagcactcccagccacccccacaacctccggccgtcacacccgagcccgttgccctgagctcccagactagtgaaccagttgagagtgaagcccccccacgagagccaatggaagcagaagaggttgaagaaagagcccctgcccagaaccctgagctgacccccggaccagccccggccggcccaaccccggcccccgaaacaaacgcccctaaccacccctctcctgccgagtacgtggaggtcttgcaggagctgcagcgcctcgagagcagactgcagcccttcttgcaacggtactacgaggtgcttggcgcagccgccaccactgactataacaacaaccacgagggacgagaagaagatcagagactgatcaacttggttggagagtccctgagactgctgggcaataccttcgttgcgctatccgatctcaggtgtaatctggcttgcacacctccaaggcacctgcacgtggtgcgacccatgtcacattacacaacaccaatggttctacagcaggcagctatccccatccagattaacgtcgggaccactgttaccatgacagggaacggcactcgcccgccccccactcccaatgccgaggcacctcctcccggacccggccaggcaagttctgtcgcccccagttcgaccaatgtcgagagcagcgcagaaggtgcccccccacctggtccagcccctccacctgccacgtcacatccgcgagtgatcagaatttctcatcaaagtgtggagcctgtagtgatgatgcacatgaatatccaggattccggcacccaacccgggggggtcccgtctgcaccaactggcccacttgggccgcctggccacgggcagacacttggacagcaggtgcccggttttccaaccgcacctactcgcgtagtgattgccaggccaacccctccccaggccagaccttcgcatccaggcggcccacctgtatcgggcacactgcaaggtgcgggtctagggactaacgcgagcctagcccaaatggtaagcggcctggtggggcagcttctgatgcagcctgtattggtcgcccaggggacacctggaatggccccacccccagcccccgccaccgcctctgcctctgccggaactaccaacacagcaacaacagcaggcccagccccagggggacctgcccagcctccccctactccacagccaagcatggcagatttacagttttctcagttgttaggcaatctactgggacccgctggcccaggagcaggtggctccggcgtggcctcccccaccatcactgttgcgatgccaggagtgccagcttttttgcaaggaatgacagactttctccaggcgacacagactgctcctccgcccccccctcctcctccacccccgccgcccgcaccagaacagcaaactatgccacctcccggcagcccatcaggtggagcgggatctcccggcggccttggtttagagagcctgagtcctgaattctttacgagcgtcgtgcagggcgttctctcctctctgctcgggagtctgggggcgcgagccggttcctccgaatcaattgccgcattcatccagagactttccggatcctccaacatcttcgaaccgggcgctgacggagccctgggctttttcggagctttgctgagtctgctgtgtcagaattttagcatggtggacgtcgttatgctgcttcatggccacttccagcctctacagcgtttgcaaccgcaactcagaagctttttccatcaacactacctgggaggccaggaacctacccccagcaatatcagaatggcaactcacaccctcatcaccggccttgaggaatatgtccgcgagagttttagcctcgtgcaggttcagccgggcgtcgatattatccgaacgaacctggagtttcttcaggaacagtttaacagcatcgccgctcatgttctgcattgcactgattccggattcggggcccgactgctggaactgtgtaatcagggcttatttgaatgcctggcgcttaatttgcattgcctgggggggcaacaaatggaactggccgcagtaatcaatgggcgcatcaggcgtatgagcaggggcgtgaatccatcactggtgtcttggctgactaccatgatgggcttgcgattacaagttgtgttggaacatatgccagtcgggcctgacgcgatactgagatatgtgagacgagtcggggatcccccacaacctctccccgaggaaccaatggaggtgcaaggagcggaaagggcctctcccgaacctcagagagagaacgcgtctcccgccccaggaacgaccgctgaagaggccatgagccggggccccccacctgcccccgagggtggctccagagacgagcaggatggggcctcagcagagacggaaccttgggccgccgccgtgccacctgagtgggtcccgatcatccagcaggacattcaatcccagcgcaaagtgaagccccagcctcctttgagcgatgcctacctgtctggcatgcccgctaaacgtcgcaagacgatgcagggagagggcccccagcttcttctgagtgaagctgtatccagggccgcaaaagcagctggcgccaggcctctgacatctcccgagtcgctttcaagagatctggaagcaccagaggttcaggagtcgtacaggcagcagctgcgatctgatattcaaaaacggctgcaagaagatccgaactactctcctcagcggttccctaatgctcagcgcgccttcgctgacgacccctag

SEQ ID NO: 109614 - DNA, 411 bp, synthetic construct
  misc_feature 1..411: note = Description of Artificial Sequence: Synthetic coding sequence
  source 1..411: mol_type = other DNA
tgaagaatgtcgaggggcgtaaatccatcactggtgagctggttaaccacaatgatgggactgcgtctgcaagtggtgctcgaacatatgcctgtaggcccagacgccattttgcggtacgtaagaagggtaggcgacccacctcagcccctgcccgaggaaccaatggaggtccaaggagctgaacgagcctctccggaaccgcaagaatgggtgccaatcatccaacaagatatacaaagtcagaggaaagtgaagccacaaccaccactaagtgacgcgtatctgtccgggatgcccgcgaaaaggagaaaacttaggtcagacattcagaagaggctgcaggaagatcctaactatagtccccagcgattcccaaatgcccagcgagccttcgccgacgacccatag

SEQ ID NO: 109615 - DNA, 3399 bp, synthetic construct
  misc_feature 1..3399: note = Description of Artificial Sequence: Synthetic coding sequence
  source 1..3399: mol_type = other DNA
atggagccaaacgatagtacctccaccgctgtggaggaacccgattcactcgaggttctggtgaaaactctggactcccaaacccgtactttcatcgtgggggcccaaatgaatgtcaaggagttcaaggagcacatagctgcatctgtctccatcccctccgagaaacagagactcatttaccagggtcgggtgctccaggatgacaaaaaacttcaggaatacaacgtaggtggtaaagtcatccatttggtagaaagggcgcctcctcagacgcacctccccagcggcgcctcctccggaaccgggtcggcctctgcaacgcacgggggggggtcaccgcctggaactaggggacccggcgcttcagtccacgatcggaacgctaactcttatgtcatggtcggtacatttaatctaccttcagatgggagcgcggtggacgtgcatatcaatatggaacaggcgccaattcagagcgaaccacgcgtccggctcgtgatggctcagcacatgatccgggacatccagacccttctgtcacgcatggaaaccctcccatacttgcaatgccgcggtggaccacagccgcagcactcccagccacccccgcagccacccgctgtgaccccagagcccgtggcattgagctcccagacgtctgaaccagttgagtctgaagccccacctcgcgagcccatggaggccgaggaggtggaggaacgggctcctgcacaaaatccagagctgacaccaggtcccgcccctgctggtcccaccccagctcctgaaacaaatgctccgaatcaccctagtcccgccgagtacgtcgaggttctgcaggaattgcagaggcttgaaagcagattgcagcctttcctgcagagatactatgaggtattaggagcggccgcaaccacggactataataataaccatgaaggcagggaggaggaccaacggttgatcaatcttgtgggagagagcctgagactgttgggtaataccttcgtggcattaagcgatctgagatgtaatctcgcttgtactcccccacgtcacctgcacgtagtgagacctatgagccactacacaacacctatggttctgcagcaggctgccatccctatccagattaatgtgggcaccactgtcacaatgacgggcaatggcactcggccaccgccaacacctaatgccgaagccccaccacccggccctggtcaagccagtagtgtggcgccttcgtcaaccaacgtcgagtcaagtgccgagggcgccccacctccaggtcctgcaccacctcccgcgactagccatccgagagtgatccgaatctcacatcaaagcgtcgagcccgtcgttatgatgcacatgaacatccaggacagcggcacccagcccggaggcgtacccagcgcacctacagggccactgggtccgcctgggcacggtcagaccctgggtcagcaggttcctgggttcccgaccgctcctaccagggtggtcatagccagacctacaccaccccaggcaaggccatcccatccagggggccctccagtgtcaggcactttacagggagctgggttgggtaccaacgccagtctggcacagatggtttcaggactggtcgggcagctgcttatgcaacctgtccttgtcgcccagggaaccccgggcatggccccacccccggcaccagctaccgcctccgcaagtgcgggtaccacaaatacggccactaccgccggacctgcacccggcgggccagcccagcctcctcccaccccgcaaccatccatggctgacctgcagttttcacagctactcggcaacctcctgggacccgccggacctggcgcaggagggcctggagttgcaagtccaaccattactgtcgccatgcccggggtacccgcctttctgcagggtatgactgacttcttacaggcgacacagacagcaccccctccacccccgcctcctccccccccgccgccagctcctgaacaacagactatgccccctccagggtctccatcgggcggcgccggttcccctggcggactgggtctggagtccctgtctccagaatttttcacctccgttgtgcagggggtgctgtccagtctgcttgggtccctgggtgcacgcgcagggagttctgagagcatcgccgcattcatccaacggctctccggctcctcaaatatctttgaacctggagctgatggggctttaggtttctttggagctcttcttagtctgctgtgccagaacttcagcatggtagacgttgtcatgttgctgcacgggcatttccagcctcttcagcggcttcagccacagctgcgcagttttttccatcagcactacttggggggtcaggagcccacaccgtctaacattagaatggctacacacactctcatcaccggccttgaggaatacgtccgcgaaagtttttcgttagtgcaggtccaaccgggagtggacattatacggacaaatcttgagtttctgcaggagcagttcaattctattgccgcccacgtgttacattgcaccgattccggctttggagctcgactgctggagctctgcaatcaggggctgttcgagtgcttagcattaaacctgcactgtctgggaggacagcagatggaactggcagccgtgatcaatggcagaatacggcgaatgtctcgcggagtcaacccctccctcgtcagttggctgacgacgatgatggggctgagactacaagtggttctcgaacatatgccagtggggccagacgcaatcctcaggtacgtaaggcgagtgggagatcccccacaaccactgcctgaagagcccatggaggtgcagggcgcagagagagcttcacctgagcctcagcgtgaaaacgcatcaccggcacctgggaccacagccgaagaagccatgtctcgtggtccgccccccgctccggagggtggcagtcgcgacgagcaggacggcgcctctgctgaaacagaaccctgggcagctgctgtgcctcctgaatgggtccctatcattcaacaggacatccagtcccagaggaaagttaaacctcagccacccttatcagatgcatacttgtcaggtatgcccgccaaacggcgcaaaaccatgcagggagaaggcccgcagttgctcttaagcgaagctgtcagtagagcggctaaggctgccggtgctaggcctctgacttcccccgagagcctaagccgtgatctggaagcaccagaagtccaagaaagttatcggcagcaactgagatccgatatccaaaagcgcctccaggaggaccccaactatagcccccaacgattccctaacgcccaacgagcgttcgccgacgacccatag

SEQ ID NO: 109616 - DNA, 702 bp, synthetic construct
  misc_feature 1..702: note = Description of Artificial Sequence: Synthetic coding sequence
  source 1..702: mol_type = other DNA
atggagcctaatgacagcacttccactgcagtggaagagcctgattccttggaggtcctggtgaagactcttgactcccagacgcggacctttattgttggagcgcagatgaacgtgaaagagtttaaagaacatattgccgcctccgtgtctatcccctccgaaaagcagagactcatctatcagggacgcgtgctccaggacgataaaaagctgcaagaatataatgtgggcggaaaggtgattcacctggtggaacgcgccccgccccagacacacctacccagtggtgcctcctcaggaaccggttcggcctccgcgactcacggcgggggaagtccccctggcacaaggggtccgggtgcaagcgtacatgacagaaacgccaactcatacgtgatggtcggtacatttaatctcccttcagacggcagcgcagttgatgtgcatattaatatggaacaggcgccaatacagagcgaacctagggttagacttgtcatggcgcagcacatgatcagggatattcagacattactttcaaggatggagacattaccttacctccagtgccggggggggccccagccccagcactcccagccacctccacaaccacccgcggttacaccagaaccagtggcactcagctcccaaacatcagaacccgttgagtccgaggcaccccctcgcgagccatag

SEQ ID NO: 109617 - DNA, 558 bp, synthetic construct
  misc_feature 1..558: note = Description of Artificial Sequence: Synthetic coding sequence
  source 1..558: mol_type = other DNA
tgattggcctgcacccctcccaggcatcttcacgttgtgcgtcccatgtctcattacacgacccctatggtactacaacaggcagccatcccgatccaaattaatgtgggaactacggtgaccatgaccggtaacggcaccagacctcccccgacacctaatgcagaggcccccccacccggtcccggtcaggccagcagcgtggcccccagctccacaaatgttgagagctccgcggagggagcccccccaccagggccagcaccccctccagcgacaagtcacccacgggtgatcagaatctctcaccagtcagttgagccagtcgttatgatgcacatgaacatccagggccaacaagtaccaggcttcccgaccgctcccacacgggtggtcatcgcccgacccactcctccccaggcccgcccaagccacccgggagggccccccgtgtctgggactctacagggcgccggtctgggcacaaacgccagtcttgcccaaatggtgtctggattggtaggtcagctgctgatgcagccggtgcttgtggcctag

SEQ ID NO: 109618 - DNA, 738 bp, synthetic construct
  misc_feature 1..738: note = Description of Artificial Sequence: Synthetic coding sequence
  source 1..738: mol_type = other DNA
cccccacgacatctgcatgttgtgcgcccaatgtcccactacacaacgcctatggttctccagcaggccgctatacctattcagatcaatgtgggaaccaccgttacaatgaccggccctgcgccaccccccgctacgagccacccacgtgttattaggatctcccatcagagtgtcgaaccagtcgtgatgatgcacatgaatatccaggacagcggaactcagcccggcggggtgccgagtgcccctactgggcctctgggacctcccggccacggtcaaactctgggacaacaggtaccaggcttccccaccgcccccacgcgcgtcgtgatcgctcggccaactccacctcaggcacgccccagccaccctggcggcccaccggtttcaggcaccctgcagggtgccggcttagggacaaatgcttcactagcacagatggtgagtggtctcgttggacaactgctcatgcagcctgtgcttgtggcccaaggaacccccggcatggctcctcctcctgcgcctgccacagcaagcgcttccgctggaacaaccaacactgccacaactgccggtcccgccccaggcggcccggcccagccaccccctacgccacagccaagtatggctgatctgcagttttctcagctgcttggtaatctgctgggaccagcaggccccggcgcagggggacccggggttgcaagcccaacaatcaccgtagccatgccatag

SEQ ID NO: 109619 - DNA, 702 bp, synthetic construct
  misc_feature 1..702: note = Description of Artificial Sequence: Synthetic coding sequence
  source 1..702: mol_type = other DNA
atggagcctaacgactccacctctacagccgttgaagagcccgactccctcgaagtgttggtcaagacgctggatagccagacaaggactttcatcgtgggggcccaaatgaacgtcaaggagttcaaagagcacattgctgcctctgtgtccatccccagtgaaaagcaacgcctgatttaccagggcagggttctccaggatgataaaaaactgcaagaatataacgtaggggggaaagtgatccatcttgtggaaagggccccacctcagactcatttacccagcggggcgagcagcggtacaggaagcgcatcggcgacccatggtgggggtagcccacccggcacccgcggccctggagctagtgtccatgatagaaacgccaattcttatgtgatggtcggcacgtttaacctgccttcagatggtagtgccgtcgatgtacacatcaatatggaacaggcccccattcagtcagaaccccgagttcgtctggtgatggcccagcacatgataagagacatccagacattactttcccggatggaaacgctgccctacctgcagtgtcgtggaggaccccaaccccagcatagccagccaccaccacagccacccgccgtgaccccggagccagtagccctgagttcacagactagtgagcctgtggaaagcgaggctcccccacgagagccatag

SEQ ID NO: 109620 - DNA, 780 bp, synthetic construct
  misc_feature 1..780: note = Description of Artificial Sequence: Synthetic coding sequence
  source 1..780: mol_type = other DNA
atggaacccaatgatagtactagcaccgccgtggaggagccagattcattggaggtgctggtgaaaactctcgactcacagacgaggactttcatcgttggggctcagatgaacgttaaagaattcaaggagcacattgcagctagcgtgagtattccatcagagaaacaacgactgatctaccagggacgagtgctgcaggatgacaaaaagctccaggaatataacgttggaggaaaggtgattcacctggtcgaacgggcgcccccacagacgcatctgccttcaggggcttcctctggcactggctctgctagcgctactcacggcgggggttccccacctggcactagagggcctggcgcatcagttcacgacaggaatgctaactcctatgtaatggtgggcacatttaatctaccatcggatggctctgctgttgatgtgcatataaacatggaacaggctcctatccagtccgagcctcgcgtgcggctggtgatggcacagcatatgattcgggatattcagactcttctgtcccgaatggagtgccgaggcggcccacagcctcagcactcccagccaccaccccagccccctgcagtgactcctgagcccgtcgccctgtcttcccagacttccgagcccgtcgagtcggaagccccacctcgggaaccgatggaagccgaggaggtggaagagagagcccctgcgcagaatcctgaactcacccctggaccagcccccgcaggtccaactcccgcgcccgaaacctag

SEQ ID NO: 109621 - DNA, 702 bp, synthetic construct
  misc_feature 1..702: note = Description of Artificial Sequence: Synthetic coding sequence
  source 1..702: mol_type = other DNA
atggagcctaacgactccacctctaccgccgtggaggaacccgatagccttgaggtactcgtcaaaacactggactctcaaacccggacttttattgtcggcgcacagatgaatgtcaaggagttcaaagagcacattgcagcaagcgtcagtatcccatcagagaaacagcggctcatctatcagggcagggttctccaggatgataagaagctgcaagagtataacgtgggtggcaaggtgatacatcttgtagagagagcacctcctcaaacccatctgccctccggcgcaagttccggcactggttctgcgtctgcgacgcatggtggcggatcgcctcctgggactagagggccaggagcctcagtgcacgataggaatgcaaattcctacgtaatggtgggcacgtttaacctgccctctgatgggtcggccgttgatgttcacatcaatatggagcaagcacccattcagtcagaaccccgcgttcgcctggttatggcccagcatatgatccgcgacatccagactttgctgtctagaatggaaaccctgccctatctccagtgtagaggggggccacagcctcagcatagtcagccccccccccagccaccagccgtgacccccgagcccgtggctcttagctcgcagacctctgagcctgtggagtctgaagcaccaccccgcgagccgtag

SEQ ID NO: 109622 - DNA, 1548 bp, synthetic construct
  misc_feature 1..1548: note = Description of Artificial Sequence: Synthetic coding sequence
  source 1..1548: mol_type = other DNA
atggagcccaatgattccacatcaacagctgtagaagaacccgattccctggaggttttggttaaaaccctggactcacaaacgaggacattcatcgtcggcgcccagatgaatgtgaaggagttcaaggaacacatcgcagcctctgtcagtatcccctcagagaaacagcgccttatttaccaagggcgcgttcttcaagacgacaaaaagctccaggaatacaacgtaggggggaaagtcattcatctggtggagagagcccccccgcagacacatctgcccagcggcgcctctagcggcactggctccgccagcgccacccacggcggcgggagccctccaggcactagagggccaggtgcctcggtgcacgatagaaatgcaaacagttatgtcatggttgggacgtttaatctgccttctgacggctccgccgtcgacgtccatatcaatatggagcaggcaccaatccagtcggagccgcgagtccgactggtaatggctcagcacatgatacgggatatacaaactctcctctcgagaatggagtgtcgcgggggcccacagccacaacattcacaaccccccccacagcctccagccgttacgccggagcccgtagctttaagctctcagacctccgagcccgttgaatctgaggctccaccgcgggagcctatggaggctgaggaagttgaggagcgagctccagcccagaatcctgaactgacccccggacctgcgccagctggcccgacccctgcgcctgagaccaacgccccaaatcatcccagccccgcggagtatgtggaagtgttgcaggaattacaaagactggagtcccgcctgcagcctttcctgcagcgctattacgaggtgctgggggcagccgctaccacagattacaataataatcatgaagggcgggaagaagaccagcggttaataaacctggtcggagagagcctcagactgctgggcaacaccttcgtggcattgtcagacctccggtgtaacctagcctgcactccgccacggcacctccacgtggtacgacctatgagccactacactaccccgatggtgctgcagcaggctgctattccaatacagattaatgtgggaactaccgtgaccatgactggcaacggcacaaggcctccacctacccctaatgccgaagcgccgcccccaggccctggtcaagctagttctgtcgctccatcctcgacaaacgtggaatcctccgctgaaggtgcccccccaccgggtcctgcgccacctcccgcaacctcgcatccccgagtcattcgaatctcgcaccagagcgtggaacccgtcgtgatgatgcacatgaatattcaggactcgggtactcagccaggaggcgttccgtccgcacctacaggccccttagggccaccaggccatgggcaaactctggggtcaacgcttattcaactgcctagcctcccgccagagttcatgcatgccgtcgcgcaccaaatcacccaccaagccatggttgccgccgtggcttcttag

SEQ ID NO: 109623 - DNA, 477 bp, synthetic construct
  misc_feature 1..477: note = Description of Artificial Sequence: Synthetic coding sequence
  source 1..477: mol_type = other DNA
atggagccaaacgacagtacctcaacagcagttgaggaaccggattctctagaggtgcttgtcaaaaccttggacagccagacgagaacattcattgtgggagctcagatgaatgtcaaggaattcaaggagcatatcgccgcgtcagtcagcatccctagtgaaaagcagcggctgatctaccaaggccgggtgctgcaggacgataaaaaactgcaagagtacaacgtgggaggaaaggtgatccacctggtcgagcgtgcgcctccacaaacgcacctcccaagcggggcctcaagcggtacgggaagtgcaagcgctacccacggaggcggctcgccacccggcacgagggggcccggggccagtgtccatgaccggaacgcgaactcctacgttatggtgggaacctttaacctgcccagcgacggttctgccgtcgatgtccacattaacatggaacaggctccgatttag

SEQ ID NO: 109624 - DNA, 702 bp, synthetic construct
  misc_feature 1..702: note = Description of Artificial Sequence: Synthetic coding sequence
  source 1..702: mol_type = other DNA
atggaacctaatgactccactagcaccgccgttgaagagcctgactctttggaggtgctcgtgaaaaccttagactcgcagaccagaacatttatcgtgggcgcacagatgaatgtgaaagaatttaaggagcacatcgccgcctccgtatcaatcccaagcgaaaagcaaagactgatctaccagggccgggtcctccaagatgacaagaaactccaggagtacaatgttggtggcaaagtcatacacctggtggagagggccccgccccaaactcacctacccagcggtgcatcttcaggcaccggatcggcctctgcaacgcatgggggtgggagtcctcccggaactcgaggccccggcgcttctgtgcatgatagaaatgctaacagctacgtgatggttgggacctttaatctgccttccgatggctctgcagtcgatgtgcatattaatatggaacaggcgcccattcagtctgagccccgggtaagactggtgatggcccagcacatgattagagatattcagaccctgctctcaaggatggagacactaccttacctccagtgtcggggaggacctcagccacagcactcccaaccccccccccagccccccgcggtaaccccggagccagtagccctgtcgtctcaaacgtccgaacccgtggagagtgaggcacctccacgcgaaccttag

SEQ ID NO: 109625 - DNA, 735 bp, synthetic construct
  misc_feature 1..735: note = Description of Artificial Sequence: Synthetic coding sequence
  source 1..735: mol_type = other DNA
atggaaccgaacgattccactagcactgctgtggaagagccagacagtctcgaagtcctcgtgaagaccctggattcgcaaactaggacattcatagttggggcacagatgaacgtcaaagagttcaaggagcacatagctgcctctgtctccattccttcagagaaacagaggttaatataccagggaagggtgttacaggatgataagaagcttcaggaatacaacgttggagggaaagtgatacacctggtagagcgtgcgccccctcagacccatctaccaagcggcgctagtagtggcacggggtccgcttccgcaacccatggagggggtagccctcccggcactcgaggtcccggggccagtgtccacgaccggaatgctaactcatacgtgatggtcggtaccttcaatttaccctcagaaccgcgagtacgcctggtgatggctcaacatatgattcgggacatccagaccctactttcgagaatggagtgccgggggggcccccaaccccagcattcacaaccgcccccacagcccccggctgtaacgcctgagccagtggccctgtccagccagacttccgagcctgtggaaagcgaagctccaccaagggagccaatggaggcagaggaagtggaagaacgcgcccctgcgcagaatccagaactgacacctggccctgctccagcaggaccaacgcccgcgcccgaaaccaatgcaccatag

SEQ ID NO: 109626 - DNA, 3399 bp, synthetic construct
  misc_feature 1..3399: note = Description of Artificial Sequence: Synthetic coding sequence
  source 1..3399: mol_type = other DNA
atggaaccgaatgacagcacatctacggctgtcgaagagccggattccttggaagtactggtgaaaacattagacagtcagacaagaacttttattgtgggcgctcaaatgaatgtgaaagaattcaaagagcacattgcggcatctgttagcatcccctctgagaaacaacgcctgatctaccaaggacgagtgctgcaggatgataaaaagctgcaggagtacaacgtcggcggaaaggtgattcacctggttgaaagggctccacctcagacccacctcccgagcggggccagctccgggactggaagtgcgtcagccacccacggaggcgggagtccacctggtacaaggggcccaggtgcgagtgtccacgatcggaacgccaacagttatgtaatggtggggaccttcaatctgcctagcgacggaagtgctgtggatgtgcacatcaacatggagcaggcgcccatccagtctgagccacgcgttcgtctggtgatggctcagcacatgatacgggacatacagacattactgtcacggatggaaaccctaccttatttgcagtgtcggggggggcctcaaccccaacattcacagcccccaccacagccgcccgcagttaccccagagcctgtggccctgagttcccagacttccgaacccgtcgagtctgaggcaccacctagggagcccatggaggccgaggaggttgaagagcgagctcccgcccaaaatcccgaactgacgccaggaccggcccccgctggacctacgcctgcgccagagacaaacgcccccaatcacccatcaccggcagaatacgtggaggttctccaggagcttcagaggctagaatcccgactccaacccttcttgcagagatattacgaggtgcttggcgctgcagcaaccaccgactacaataataatcatgagggtcgggaggaggatcagagactgataaatctggtaggtgagtctctgaggcttctgggtaacaccttcgttgctctgagcgatctgcgatgcaatttagcctgcactccccctaggcacttgcacgtggtgcggccaatgtctcactacacgaccccaatggtgttgcagcaagccgccattcctatccaaatcaacgtggggaccactgttacgatgacaggcaacgggacaaggccacccccaactccgaatgctgaagctcctcccccagggccaggacaagctagctcagtggcccccagctcaacaaatgtcgaatcatccgctgaaggggcacccccccccggccctgccccccctccggcgacatcgcatcctagagtcattaggatcagtcatcagtctgtagaacctgtggtaatgatgcacatgaatatacaagatagcggaactcagccaggcggggtgccatccgctcccacaggccctttgggcccacctggacatggccaaacgttaggccagcaagttccaggctttcctaccgcccccacaagagtggtgatcgctcgcccaacgccgcctcaggcacgcccttcccaccccgggggaccccccgtgagcggcacgctccaaggggcagggctcgggaccaacgcgtccctcgcccagatggtttccggtcttgtgggacagctgctgatgcagcccgtgctggttgcccaaggaacccctggcatggcccccccaccagccccagccaccgcatctgctagtgcaggaaccacaaatacagcaacgacggctgggcccgcgccaggaggcccggcccagcccccgcccactccccagcctagcatggccgacctgcagttcagccaattgctgggcaatctgttgggcccggccggcccaggcgcggggggctccggagtagctagccccacaattactgtcgctatgcccggggtccctgctttcctccagggcatgactgacttccttcaggcaactcagactgcgccacccccccccccccctccgccccccccccccccggctcctgaacaacagactatgccaccccccgggtcgccgagcggtggtgcgggcagtcccggcggattggggcttgaatctcttagccccgagttttttacttcagtcgtacagggcgttctcagcagtctgctggggtccctgggtgctcgtgcggggtcctcagaatccatcgctgccttcatccagaggctgagtggtagctctaacatctttgaacctggggcagatggggctctcggattctttggggccctactgagccttctgtgccaaaatttttcaatggtggatgtagtaatgctgctgcacggacacttccagccactgcaaagattacaaccgcagctgcgatctttcttccaccagcactatcttggaggacaggaacctacgccttccaatataaggatggctactcacactcttattaccggtctggaggaatacgttcgcgagagctttagtctggtccaagtgcagcccggtgtggacattatcagaacaaaccttgaattcctgcaagagcaatttaattctatcgcagcccacgtgttgcactgtactgactccggatttggagctcgcctcctcgaactgtgtaatcagggcctcttcgagtgtctggcactgaacctacactgcctgggagggcagcagatggagttggcagctgtaattaacggacggattcgcaggatgtctaggggcgtaaatccctctcttgtgagctggctgactacaatgatgggcctacgcttacaggtcgtgctggagcacatgcctgtgggccccgacgccattctgcggtacgtcaggcgcgtgggggacccgcctcagccccttcccgaggaacctatggaagtacaaggtgccgagagagcttctccagagccccagcgcgaaaatgctagtcccgctccaggtacaacagcagaagaagctatgtcacgcgggccacccccagcgccagaaggcggaagccgggacgagcaggatggcgccagtgctgaaacagagccttgggccgctgccgtaccccccgagtgggtgcctattattcagcaagacatccaatcacaaaggaaagtgaagccccagccacccttgagcgatgcctacttgagtggcatgcctgctaagcggaggaaaaccatgcaaggtgaggggccacagctgctgttgtccgaggccgtatcccgcgccgcgaaggcagcaggcgcccgacctctgacctcacccgaatcactgtcgagggatctcgaggcacctgaagtccaagagagctatcggcagcagctccgcagtgacatacagaaaaggctgcaagaggaccctaactactctccacaaagatttccaaacgcacagcgcgcctttgcggatgacccctag

SEQ ID NO: 109627 - DNA, 1548 bp, synthetic construct
  misc_feature 1..1548: note = Description of Artificial Sequence: Synthetic coding sequence
  source 1..1548: mol_type = other DNA
atggaacctaatgattcaactagcaccgctgtcgaggagcccgatagcctggaagttcttgtcaaaacactcgatagccagactagaaccttcatcgttggcgcacagatgaacgttaaggaatttaaggagcacatcgcagcaagcgtgtctattccaagtgagaagcagcgtcttatctatcaaggaagggttttacaggacgacaaaaagctgcaggagtataatgtcggcggcaaagtaatccatctagtggagagggcccctcctcagacccatctgccatcaggcgcatctagcgggaccggtagcgccagtgctacacacgggggcggtagtccgccaggaacccggggtccgggagcatctgtgcacgatcgtaacgcaaatagttatgtcatggttggcacctttaacctaccctccgacggatcagcagtcgacgttcatattaatatggagcaggcgcccatccagagcgaaccccgcgtgcgcctagtgatggcacagcatatgatccgcgacatccagactctcctaagcagaatggaatgcagaggtggaccccagcctcagcatagtcaacccccaccacaacctcccgccgtgacgcccgagccagtggccctatcttcccagacttccgagcccgttgaatctgaggcccctccccgggagcccatggaggcggaggaagtggaggaaagagctcccgcacagaaccctgaactgacaccggggccggcccctgcggggcctacacctgcccctgagacaaacgctcctaaccacccttccccagccgagtacgtggaagttctccaggagctgcagagactggagtccagactccaaccatttctccagagatactacgaggtgttgggggccgccgcaactacagactataacaacaatcatgagggccgggaagaagatcaacgactcatcaacctcgtgggggagtctctgcggctgctgggaaacacctttgtcgccctcagcgatctgcgctgtaacctagcttgtaccccgccacggcacctccacgtggtgaggccaatgtcgcactacaccactcctatggttctgcagcaggccgctatcccaatccaaattaatgtaggaacaactgtaacaatgaccggaaacggaacacgcccccctccgactcctaatgcagaggcaccccctccgggtccaggccaggcatctagtgtggccccatcttccaccaacgttgagagctcagccgagggcgctccacctccggggccggcccctcctcccgcgacttcccaccccagagtaataaggatcagccatcagtccgtcgagccggtggtgatgatgcacatgaatatccaagactccggcacgcagccagggggcgtcccaagcgctcctactggacctttaggcccaccgggccatggccaaacgctagggagcaccttgatacagctcccaagccttccaccggaattcatgcacgcagtggcccaccagatcacccatcaggcaatggtggccgctgtagcctcttag

SEQ ID NO: 109628 - DNA, 735 bp, synthetic construct
  misc_feature 1..735: note = Description of Artificial Sequence: Synthetic coding sequence
  source 1..735: mol_type = other DNA
atggagcctaatgacagcacctctacagctgttgaggagcctgacagcctggaggttctggtgaagacgctggacagccagacaaggacattcattgtgggagcacagatgaatgttaaagaattcaaagaacacatagctgcttctgtgtcgattccatccgagaaacagagactgatttaccaaggaagagttctgcaggacgacaaaaagctgcaggaatacaatgtggggggaaaggtgattcacctcgtcgaaagagccccaccccaaacacatttgccatcaggggcctcgtcaggcacaggttctgcgagcgccacccatggagggggatccccccctggcacacggggacccggtgccagcgtacatgatcggaacgctaacagttatgtcatggtgggaacattcaatctcccttctgagcctagagtacggctcgtgatggcccagcacatgattcgtgacatccagactttgctctcgcgtatggaatgccggggtggacctcagccccagcacagccagccacctccacagccacctgctgtcactccagaacccgttgctcttagtagccagaccagcgagccggttgagagcgaagcacctccacgggaacctatggaggctgaggaggtggaagagcgagcccccgctcagaatcccgaacttacccccggacccgcaccagctggcccaaccccagctcctgaaacaaatgcaccctag

SEQ ID NO: 109629 - DNA, 2232 bp, synthetic construct
  misc_feature 1..2232: note = Description of Artificial Sequence: Synthetic coding sequence
  source 1..2232: mol_type = other DNA
atggaacccaacgactctacttccacggcagtggaagagcctgacagcctcgaagttctggtgaagacgctcgactcacaaacccgtacctttattgtgggagcgcagatgaatgtgaaggagttcaaggaacacatcgcggcttctgtgtctatcccttcagagaagcagcggctgatttaccagggacgagtgctgcaggacgataaaaagctccaagagtacaacgtgggggggaaagtcattcaccttgttgaaagggcacccccgcaaacgcacctgcccagtggcgccagcagcggaaccggctccgcatctgctactcacggaggaggctccccccccggcacaagaggacccggtgcttctgtccacgaccggaacgcgaactcgtacgtgatggtgggcacgttcaatcttccgtctgacggctcggcagtcgatgtgcacatcaatatggagcaagcccctatccagagtgagccccgagttagactggtgatggctcagcacatgattagagatattcagactctgctttcccgtatggagtgcagaggtggtccgcagccacagcatagccagcctccaccccaaccaccagccgtcactcctgaacctgtggctctgtcctctcagactagcgagcccgtggaatctgaagctcccccacgagagcctatggaagccgaggaagtggaagagcgcgcgcccgctcagaaccccgagctgaccccgggaccagcccccgctgggcccacccccgcacccgagacaaatgccccaaatcacccctctccagcagagtacgtggaggtgctgcaagaacttcagagactggagtcgagactgcagccctttcttcaaaggtattacgaggtactcggagcggcagccaccactgattacaacaacaatcacgaggggagggaggaggaccagagactgatcaacttagttggagagagcctgcggctgttagggaacacctttgtggccctttccgaccttcgctgcaatctcgcttgtactcctccccgtcacctccatgtggtgcgacccatgtctcactacaccacacccatggtgctacagcaggctgccatacccatccagataaacgtcggaactaccgtaaccatgacgggtaacgggacaagacctccccccacccctaatgcagaggcaccgcccccagggcctggccaggcatcctctgtggcaccatccagtaccaacgtggagagcagcgccgaaggcgcacctccgccgggccccgctccaccccccgctacttcgcatcctagggtaatcaggatttctcatcagagcgtggagccggtggtaatgatgcacatgaacattcaggattcaggaacccagccgggtggcgtgccctccgccccgacaggtccactggggcccccgggacatgggcagactttaggcagtactctcatccagctcccaagcctacccccggagtttatgcacgccgtcgctcaccagataactcaccaagccatggtcgccgccgtggcttctgccgcagccgggcagcaggtgccagggttccctacagcaccaacccgggtcgtgatcgctcgcccaactccgccccaagctaggccctcgcatcccggcggacccccggtgtctggcacactccagggagcagggctggggactaatgctagtctggcgcagatggtcagcggcttagtgggacagctcctgatgcagccggttcttgtcgctcaagggacacccggaatggcacccccccctgcaccagccacagcatctgcgagtgcaggtaccaccaacacagcaacaacagctgggccagccccgggcggccctgcacagcctccccctacgccgcagccaagtatggctgacctgcagttcagtcagctgttgggtaacttactgggcccagctggaccaggtgctggaggccctggtgtcgcgtcaccaacgattaccgtggccatgccgggagtacccgctttcctgcagggtatgacagattttctgcaggcgactcagacggcgcccccaccccccccaccacctccccctcccccaccagcacccgagcagcagactatgccccctcctggctctccttcagggggggcagggtcccctgggggactcggattagaaagcctatctccagagttttttacaagtgtcgtgcagggggtgttgtccagtttactgtag

SEQ ID NO: 109630 - DNA, 735 bp, synthetic construct
  misc_feature 1..735: note = Description of Artificial Sequence: Synthetic coding sequence
  source 1..735: mol_type = other DNA
atggaacccaacgattcaaccagcacagccgtcgaagagcctgacagcctggaggtcctagtgaagaccttggacagccagacccgtacgttcatcgttggggcccagatgaatgttaaagaatttaaggaacacatcgctgcctcggtgtctattccaagtgagaaacagcgcctgatttaccaggggcgtgtgctccaggacgacaagaaactacaggaatataacgtcggggggaaggtcatccatttagttgagagagccccacctcagacccacctgccttcaggggcgtcatccgggactggcagcgccagcgccacccacgggggggggtcaccccctggcacacgaggacctggcgcctctgtgcacgacagaaatgccaactcttacgtcatggtgggtactttcaatcttccctcagagcctagagtccgtctagttatggctcaacatatgatcagggacatccaaacactgctttctcggatggagtgtagaggcggcccgcagccccagcattcccagcccccaccccaaccaccagctgttacacctgagcctgtcgctctgagcagccagacgtcagagccagtcgagtccgaggctcctccaagggagccgatggaagcggaagaggtggaagaaagggccccagcccagaaccctgagctaacgcccggtccagcccccgctgggcctaccccggctccagagacgaacgccccatag

SEQ ID NO: 109631 - DNA, 735 bp, synthetic construct
  misc_feature 1..735: note = Description of Artificial Sequence: Synthetic coding sequence
  source 1..735: mol_type = other DNA
atggagccaaacgattccacatccaccgctgtagaggagcctgatagtcttgaagtgctcgtcaagacactggattctcaaacccgaacattcatcgtgggcgcccagatgaatgtaaaggagtttaaggagcacatcgccgccagcgtaagcatcccaagcgagaaacagcggttaatctatcaaggccgcgtgttgcaggacgataagaaactgcaagaatacaatgtgggtggcaaggtgattcacctggtggagcgggcgccgccccagacacacctccccagcggtgctagctccggcaccggatctgcgtccgccacccatggcggaggcagtccacccggaacccgcggccctggggcttccgtgcatgaccgaaatgcaaactcatacgtgatggtgggtacatttaatcttccttcagaaccacgcgtgaggttggtgatggcccagcacatgataagggatattcagacacttctgagtcggatggaatgtcggggcgggccacaaccgcaacattcccagccccccccccaaccccccgctgtaacacccgagccggtggcactgagttcacagacaagcgagccagttgaatccgaagctcctccccgagagcctatggaggccgaagaggtggaagaaagagcgccagcacagaatccagaactgacccctgggccagctcctgctgggcctacgcctgctcccgagaccaacgccccatag

SEQ ID NO: 109632 - DNA, 3399 bp, synthetic construct
  misc_feature 1..3399: note = Description of Artificial Sequence: Synthetic coding sequence
  source 1..3399: mol_type = other DNA
atggagcccaacgattctacatctaccgccgtcgaggagcctgactcacttgaggttttggtcaagactctggatagtcaaaccaggactttcattgtcggcgcccaaatgaacgtcaaggaatttaaagagcatatcgcagcctccgttagcatcccctccgagaagcagcgactcatctatcaggggcgcgtgttgcaggatgataaaaagctccaggagtacaacgtgggagggaaagttatacatctcgtcgagagggccccaccacagactcacttaccatctggtgcctcatcaggaaccggttcggcctccgcgacacatgggggagggagccctccaggaacacggggacccggcgccagcgtccacgacagaaacgccaattcctacgtgatggtggggacattcaacctaccttccgacggtagcgccgtagatgtgcacattaacatggaacaggcccccatccagagcgagccccgggtacgccttgtgatggcccagcatatgatccgggatattcagaccctattatctcggatggagacactgccgtatctgcagtgtcgaggggggccacagccacagcatagccaacctcctcctcagccacctgccgtgacaccagaacctgttgctttgtctagccagacatcggagcccgtcgagagcgaagcgccaccccgcgagcctatggaagccgaagaggtagaggagcgcgcccccgctcaaaatcctgagctgacccctggacccgctcccgctgggcctacacccgcccctgagaccaacgccccaaatcacccttccccggcagagtacgtcgaagtgctccaggaactccagagactcgagtccaggttacagcctttcctccagagatactacgaggtgctgggtgcagccgccactaccgattacaacaacaaccatgaaggtagggaagaagaccagagactgattaacttggtgggagagtctttaagattgttgggaaacactttcgtggccctgagcgatctgcgctgcaatctagcttgtacccctccaaggcatctgcacgtggtgagaccgatgtcccattataccactccgatggtgctgcaacaggccgccatccccattcagatcaatgtagggacaaccgtcactatgacaggcaacggaactagacctccaccaactcctaatgccgaggcgccaccacctggacctggccaggcgtcttcagtggctccttcctcgaccaatgtcgagtcaagcgctgagggagcgcctccccccggtcctgccccccctcctgctacttctcaccccagagtaattaggatctctcaccagtcagttgagcccgtggtcatgatgcatatgaacattcaagatagcggtacacagccaggaggcgtgccgtctgctccaaccggccccctcggtcccccgggacatgggcagactctgggtcagcaggtacctggcttccctacagcaccaactcgtgtcgtaattgcccgccctacacccccgcaggcacgacccagccaccccggggggccacctgtttcgggcaccctccagggggctggcctgggcaccaatgcaagtttggctcagatggtgagcggccttgtgggccagcttctgatgcagcccgtgttggtcgcacaggggacacctggaatggccccaccccccgccccagccaccgcttctgcttccgccggcacaaccaatactgcaactacagcgggtcctgctcccggaggccccgcccagcctcccccaacccctcagccctctatggctgaccttcagttttctcagttgttaggcaacctgctggggcccgctgggccaggagctggcggcagtggcgtggccagtcccactatcactgtggccatgccgggagttccagcttttctgcagggaatgacggattttcttcaggcaacccaaacggctccacctccgcctccaccccccccccctccacctccggcccctgaacagcaaactatgcctccccccggatcaccaagtggtggagccgggtcccccggtgggctcggcctcgagtcactgtccccagagtttttcacctccgtcgtgcagggggtgttgtcttccctcctcggcagcctgggagcaagggcagggtcttctgagtccatcgctgcattcattcagcggctctccggttcaagcaacatttttgaaccaggcgctgacggcgcccttggtttcttcggggcattattatcacttctgtgtcagaacttctcgatggtagacgtagtgatgttattacacggccactttcagcctctccagagactacagccccaactgcgcagcttcttccaccaacactatctgggcggccaggagcccacaccctcaaacattaggatggccactcataccttaatcaccgggctcgaagaatatgtccgggagtctttctctctggtacaggtccagcccggcgtggatattattcgtacgaacctagaatttctccaagaacagtttaactcaatcgccgcacacgttttgcactgcactgattccggatttggtgctcgcttgctggaactgtgtaaccagggccttttcgagtgtctcgctctcaatcttcactgcctcggaggccagcagatggaacttgcagcggtgatcaatggccggatcaggcggatgtcccgcggggtaaatccatctcttgtttcctggctgactactatgatgggtctgagactgcaggtagtgctggagcatatgccagtgggcccagacgcaattctgaggtacgtcagaagagtgggggatcccccacagcccctgcctgaagaacctatggaagttcagggcgctgagcgagcaagtccagagccacagcgggaaaacgccagtcctgcgcccggaacgactgctgaggaggccatgagtcgggggcccccgccagcccctgaaggggggagccgcgatgagcaagatggtgcatccgcggaaaccgaaccatgggccgcagcagtgcctcccgagtgggtgcccatcattcagcaggatattcagtcacagcgcaaggtgaaaccgcagcctcctctgtccgacgcctacttaagtggaatgccggccaagcgccgcaaaaccatgcaaggcgaaggtccccagctcttgttaagtgaggcggtcagtagagctgctaaggctgctggcgcccggccactcacatcccccgaatctttatccagggaccttgaggccccagaggtccaagaatcataccgccagcagttaagaagcgacatccaaaaaagactgcaagaggacccaaattactccccccaacgtttccctaatgcccagcgggcttttgcggatgacccttag

SEQ ID NO: 109633 - DNA, 738 bp, synthetic construct
  misc_feature 1..738: note = Description of Artificial Sequence: Synthetic coding sequence
  source 1..738: mol_type = other DNA
ccgccccgccacctacatgtggttagaccaatgagtcattataccacacctatggtcctccaacaggcagctatacctatccaaatcaacgtcggcactacagtgacgatgactggtcctgccccacctccagctaccagccatccccgcgtgattcgcattagccaccagagtgtagagcctgtggttatgatgcatatgaatattcaggactccggcactcagcccggaggcgtgccttccgcacctaccggaccgttaggaccccccggccatggccagaccctagggcagcaagttcccggcttcccaaccgcccctacccgcgtagtgatcgcccggcctacaccccctcaggcacgccctagccacccaggcggcccaccagtttcgggaaccctccagggcgcaggccttggcactaacgcgtcactcgcccagatggtgagtggcctggtcgggcaactactgatgcagcccgtcttagttgcccaagggacacctggtatggccccgccaccagcaccagcaacagccagtgcgagcgccggtaccaccaacactgccaccaccgctggacccgcaccgggcggtcccgcccagccacctccaactccccagccatctatggcagacctgcagtttagccagctgctgggcaacctgcttggcccggcaggccccggggcaggagggccaggtgttgcctctcccacaatcactgtcgctatgccctag

SEQ ID NO: 109634 - DNA, 777 bp, synthetic construct
  misc_feature 1..777: note = Description of Artificial Sequence: Synthetic coding sequence
  source 1..777: mol_type = other DNA
atggaaccaaacgacagtacgagcactgctgtcgaagagcccgatagcctggaggttctcgtgaagacgcttgacagccagacacgcacatttatagtaggcgcacaaatgaatgtgaaggagttcaaggaacatatcgctgcaagtgtaagcatcccaagcgagaaacagcgcctcatctaccaaggtagagtcctacaggacgataaaaaactacaggaatataatgtcggcggaaaagtgatacaccttgtcgaaagggcacccccacagacccacctcccctccggcgcaagttccggaacgggcagcgcctccgcaacccatggcggtggaagtccccccggaacccgcggtcccggtgcttccgtgcacgaccgcaatgcaaacagttatgtaatggtagggactttcaacttgccatcagacgggtcagcagtggatgtgcatatcaatatggagcaagctcccattcagagcgaaccacgggtccgcctggtgatggctcagcacatgatccgggacatccagaccctgctcagccgcatggagtgtcgtgggggtcctcagcctcagcactcccaaccccctccccaaccgcctgccgtgaccccggaacccgtcgcactgtcttcccagacaagcgaacctgtcgaatcagaagctccaccaagagagccaatggaagctgaggaagttgaggaaagggcacccgcccagaaccctgaactgaccccaggaccggcccccgccggaccaacccctgcccctgagtag

SEQ ID NO: 109635 - DNA, 789 bp, synthetic construct
  misc_feature 1..789: note = Description of Artificial Sequence: Synthetic coding sequence
  source 1..789: mol_type = other DNA
atggagcccaatgactccacttctactgctgtagaggagcccgatagcctggaggtgttggtgaagactcttgacagccagacaagaacgttcatagtgggggcacagatgaatgtcaaggagttcaaagagcatatagccgctagtgtgagcatcccaagcgaaaaacagaggctcatttatcaagggcgagtacttcaggacgacaagaaactccaggaatacaacgtcggcggcaaagtaatccacttagtggagcgggcaccaccacagacccaccttcctagcggcgcgagtagcggcacagggtctgcatcagcaacccacggaggcgggagtccccccggcacccggggcccaggcgccagcgtgcacgaccggaacgctaactcctatgtcatggtaggcactttcaatctgccgtctgatggttctgcggttgacgtgcacatcaatatggagcaagctcctatccagtccgagcctcgggttcgcctggtgatggctcagcacatgattagggacatccagacactgttgagtcggatggagtgcagggggggcccccagccccaacatagtcagccgcctccgcagcccccagccgtgacaccagagcctgtcgctctttccagccagacttcagagccggtggagtctgaagctccacccagggaacccatggaagccgaagaggtggaagagcgggcacccgcccagaacccagaactgacccctgggccagccccggcagggcccacgcccgcccccgaaaccaatgctccttag

SEQ ID NO: 109636 - DNA, 789 bp, synthetic construct
  misc_feature 1..789: note = Description of Artificial Sequence: Synthetic coding sequence
  source 1..789: mol_type = other DNA
atggaaccaaatgacagcacaagcacagccgttgaagagcctgattcccttgaagtccttgttaaaaccctggacagtcagacgagaacttttatcgtaggcgctcagatgaacgtgaaggaattcaaagagcacattgccgcatctgtaagtatcccaagcgagaaacaacgtcttatttaccagggtagggtgctccaggatgataaaaaattacaggagtacaatgtcggaggaaaggtcattcacctggtcgagcgcgccccccctcagacccacctgccatcaggcgctagctcaggcaccgggtccgccagcgcgacacacggaggcggctcaccaccaggcacacgtggccctggagcctccgtgcatgatagaaacgccaactcctacgtcatggtgggtacctttaacttgcccagtgatggctccgccgtcgatgtgcatatcaatatggagcaggcacccattcaatccgaacccagagtaagactggtgatggcccaacatatgattagggacatccagactcttctaagcagaatggagtgtcgaggcggcccgcaaccacagcatagccagcctccgccacaaccccccgcagtgacccccgagcccgtagcactgtcaagccagacaagtgaacccgtggaatccgaagccccccctagggaacctatggaggctgaagaggtagaagagcgagcccctgcccaaaacccagaattgacccccggacccgcacccgcgggtcctaccccagctcctgagacaaatgcaccatag

SEQ ID NO: 109637 - DNA, 738 bp, synthetic construct
  misc_feature 1..738: note = Description of Artificial Sequence: Synthetic coding sequence
  source 1..738: mol_type = other DNA
cctcccaggcacctgcacgtggtacgacctatgtctcattacacaacccccatggttctgcagcaggccgctatacccattcagattaacgtgggcacaactgttaccatgaccggacccgcgcccccccctgcaacctcacaccctagggttataagaataagccatcagtcggtcgaaccagtagttatgatgcatatgaacatacaagattctggcacgcaacctggtggcgtgccaagcgctccaacaggccccttgggcccccccggtcacggacagaccctgggacagcaagtgcccgggtttccaaccgctcctacgcgggtggttatcgccagacccacaccaccacaagcaagaccttctcaccccggagggccacccgtgagcggcacccttcagggcgctggactgggaaccaatgcgtcccttgctcagatggtgtccggtcttgttggtcagctcctcatgcagccagtactggtcgcccagggaactcctggtatggcccccccacccgcacctgctaccgcgtctgcatctgccggaactacaaacactgccacaaccgctgggccggcgcccggaggccccgcccagcctccaccaacgccccaaccttcaatggcggatctccagttctctcagttgctcgggaatctgctcggcccagccgggcctggcgccgggggatccggcgtggcatccccaaccatcactgtggcgatgccttag

SEQ ID NO: 109638 - DNA, 648 bp, synthetic construct
  misc_feature 1..648: note = Description of Artificial Sequence: Synthetic coding sequence
  source 1..648: mol_type = other DNA
atggaacccaacgatagcacctccactgccgttgaagaaccagactctcttgaagtgttggtgaaaaccctagacagtcagacaaggacatttatagtcggcgcgcaaatgaatgttaaagaattcaaggagcatatcgcagcctctgtttcaatcccatccgaaaagcagcgtctgatttatcaggggagagtgctccaggacgacaaaaagctgcaagaatacaacgtaggaggaaaggtcatccacctggtggagcgcgcaccgccgcagacccaccttccctcaggtgcctcttcaggcaccggtagcgcaagcgcgacccatggaggaggaagcccacccggaacacgcggacctggcgccagcgtgcacgacagaaacgccaatagctacgtaatggtcggcaccttcaatctcccatctgagcctcgggtacggctggttatggcccaacacatgatccgagatattcaaaccttgctgagccgcatggagtgccgcggggggccccagccacagcattctcaaccaccacctcagccgcctgcggtgactcctgagcctgtcgcgctgagctcgcaaacaagtgagccagtggaaagcgaggccccaccgagagaaccgatggaggctgaagaggtctag

SEQ ID NO: 109639 - DNA, 735 bp, synthetic construct
  misc_feature 1..735: note = Description of Artificial Sequence: Synthetic coding sequence
  source 1..735: mol_type = other DNA
atggaacctaacgactctactagcactgccgtggaagaaccagactccctggaggtactggttaagaccctcgattcacagaccagaacttttatcgtgggcgctcagatgaatgttaaagagttcaaggagcacatagctgcttcagtctccattccctcagagaaacaacgactgatttatcagggtcgcgtcctgcaggatgataagaaactccaggagtacaacgtgggcggaaaagtaattcatctcgtcgaaagagcccccccccagactcatctgccctcaggcgccagctctggtacaggcagcgccagcgctacccacggaggtggcagccccccaggcactcgaggccccggcgccagcgtgcacgaccggaacgccaattcctatgttatggttgggacattcaacttaccaagcgaaccccgcgtgcgactggttatggcccagcacatgatcagagacatacagaccttgttgtcaagaatggagtgcagagggggaccacagcctcagcactcacagccccctccccagccacccgcagttacgccagaacctgtagccctgtcgtcacaaacctctgaacctgttgaatcagaagccccaccaagagaacccatggaggcagaggaagttgaggagagggcacccgcacagaatcctgagctgacccctgggccagccccagccgggcctacacctgcccctgagaccaacgctccatag

SEQ ID NO: 109640 - DNA, 558 bp, synthetic construct
  misc_feature 1..558: note = Description of Artificial Sequence: Synthetic coding sequence
  source 1..558: mol_type = other DNA
tgactggcttgcactccccctagacatcttcatgtagtccgtccaatgtcccattacacaactcctatggttctccagcaggcagctattccaatccagattaatgtcggcacaactgtgaccatgaccggcaacggaacgagaccaccacccacacctaacgcagaagcccctccaccgggccctggacaagcatcctccgtcgccccgtctagtaccaatgttgaatctagcgccgaaggagctccaccccccggccctgccccccctccggccacttcacaccctcgagtgattcggatatcacatcagagcgtcgagcctgtggttatgatgcatatgaacatccagggacagcaagttcccggcttcccaactgccccaactagagtcgtaattgcccgtcctacccctcctcaggcccggccatcacaccctggcggaccccctgtcagcgggacattgcaaggagcaggtctcggtaccaacgcaagtctagcacagatggtgagtggcctggtcgggcaactccttatgcagcccgtgctagtagcttag

SEQ ID NO: 109641 - DNA, 780 bp, synthetic construct
  misc_feature 1..780: note = Description of Artificial Sequence: Synthetic coding sequence
  source 1..780: mol_type = other DNA
atggagcccaatgattctacttcgaccgcagtggaggagcctgactcactggaagtgctggtaaagacacttgactctcaaaccagaacgtttattgtgggagcgcagatgaatgtgaaagagttcaaggaacatattgccgcctcagtttccattccaagcgaaaagcaaaggctgatttatcaaggtagagtgctccaggacgacaaaaaactacaggagtacaatgtgggtgggaaggttatacacttagtcgaacgcgccccccctcagacccacctcccaagcggagcgagctcaggaacaggtagcgcttccgccactcacggagggggcagccctcctggtacccgtggtcccggtgctagcgtacacgatcgcaacgccaactcatatgtgatggttggcactttcaatctccccagcgatgggtctgccgtcgatgtgcacatcaacatggagcaggccccaatccagtccgagccacgggtgcggctggttatggctcaacatatgattcgggatattcagacactcctttcccggatggagtgtagggggggaccccagccacagcatagccagcctccacctcagcccccagcagtgacacccgaaccagtggctctgagttcgcagaccagtgagcccgtggagtcggaagcgccgccaagggagccaatggaagcagaggaagtagaagagagagccccagctcagaaccccgagctgacaccaggacctgcccccgccggaccaacaccagctcctgagacctag

SEQ ID NO: 109642 - DNA, 477 bp, synthetic construct
  misc_feature 1..477: note = Description of Artificial Sequence: Synthetic coding sequence
  source 1..477: mol_type = other DNA
atggaacctaacgactctacaagcacagccgtggaagagccggattcattagaagtcctggtgaagactctggacagtcagacacgaacctttattgtcggcgcccaaatgaatgtgaaagagttcaaggaacacattgcagcatcggtctccattccttctgagaagcagagacttatctaccagggtcgagtgcttcaggatgacaaaaaattacaggagtacaacgtaggaggtaaggtaatacacctggtcgaaagagctcctccccaaacacacctgccgtctggggcttcgtcaggaaccgggagcgcctccgctacacatggcggcggatctccccccgggacccgcggcccaggcgcatcagtgcacgaccgcaatgcaaattcttacgtgatggtaggaacatttaacctaccctctgatggcagcgctgtcgacgtgcatatcaatatggagcaagcccctatttag

SEQ ID NO: 109643 - DNA, 621 bp, synthetic construct
  misc_feature 1..621: note = Description of Artificial Sequence: Synthetic coding sequence
  source 1..621: mol_type = other DNA
atggagccaaatgactctacttcaacagccgtggaggaacccgacagccttgaggttctggttaagaccttggattcacagacacgcacttttatagttggcgcccaaatgaatgtgaaagaattcaaagagcacatcgcagcaagcgtttccatcccatcggaaaagcagagactcatctaccagggcagagtactgcaggacgataaaaaacttcaggaatacaatgtgggaggaaaggtgatacatctggttgagcgcgcacctccacagacacacctgccctcaggggccagctcaggcaccggctcggcaagcgccactcatggaggaggcagtccacccgggaccaggggacctggggcctcagtgcacgatcgcaacgcgaatagttatgtcatggtaggaaccttcaatttgccatcagaacctcgcgtcagactggttatggcccagcatatgatcagagacatccaaacactgctgtcaagaatggagtgcagagggggccctcagccccagcactcacagccccctccgcagcccccagccgtcacaccggagcctgtggccctgtccagccagaccagtgagcctgtcgaatctgaggcacccccctag

SEQ ID NO: 109644 - DNA, 3399 bp, synthetic construct
  misc_feature 1..3399: note = Description of Artificial Sequence: Synthetic coding sequence
  source 1..3399: mol_type = other DNA
atggagcctaatgatagcacatctaccgccgtggaggagcccgacagtctggaggtcttggtcaaaaccctggacagtcagacgaggacattcatcgtcggagctcaaatgaatgtcaaagagtttaaagagcacattgcagctagcgtctccattccttcggagaaacaacggctgatataccagggacgtgtcttgcaagatgataaaaagcttcaggagtacaatgtgggcggaaaggtcatccacctggtggagagagcacctccgcagacccatcttccgagtggggctagctccggaacagggagcgcatccgctacccacggcggggggtcgcctcctggcacgcgtggcccgggcgccagtgtgcatgatagaaacgcaaactcttacgtgatggtgggtactttcaatctacccagtgacggctctgccgtggatgtacacattaacatggaacaggccccaatccagagcgagccgcgggtgcgccttgttatggctcagcatatgattcgcgatattcagactttgctctctcgcatggagacactcccctacctgcagtgtcgcggtggcccgcagccacagcacagccagccccctccgcagccccccgcagtgacccctgaacccgtcgccttatcatcccagacgagcgaacccgtggagtctgaagcccctccgagagagccaatggaggccgaggaagtcgaagaacgcgcacctgcccagaatcccgagctgacgccgggtccggcccccgccggtccaactcctgcacctgagactaacgctccaaaccatccatcacctgccgagtacgttgaggtgcttcaggaactgcagcgattggagtcaagactgcagccgttcctgcagcgctactatgaagtgctgggagcagccgctaccactgactacaataacaaccacgagggacgagaggaagatcagagattgattaatttggttggagagtcgctgcggctgttaggaaacacctttgtcgccctgtccgacctcaggtgcaacttagcgtgtactccaccaaggcatttgcacgttgtacgccctatgtctcattacaccacccccatggtattgcaacaggcagctatcccaatccagataaatgtcggcactacagtgacaatgaccggcaacgggacccgtccaccgcctacgcctaacgccgaggcccctccccccggacccggccaggcaagtagcgttgctccctctagtaccaatgtagagagtagcgctgaaggcgcccccccacccggacccgcacccccccctgcaaccagtcacccccgggtcataagaatcagccaccaatcagtcgaacctgtcgtaatgatgcacatgaacatccaggacagcgggacccagcctggaggagtgccatccgctcccactggcccattgggaccccccgggcacggacaaactctgggccagcaagttcctggttttcccactgctcccacaagggtagtcatagctcggcccacacctccccaggcgcgtccctctcaccctggcgggccccctgtttcaggaacattgcagggggcaggtttaggtaccaatgcctcactcgcgcagatggtgagcggcctggtcgggcagctgttgatgcagcctgtccttgtggcacaaggcacccctggtatggcccccccgccagcccctgccaccgcaagcgcatcagctggcactaccaacactgcgaccacagcaggaccagctcccggtgggcctgctcagccccctcctaccccgcagcccagcatggccgatcttcaattctcacagctgttgggcaacctgcttgggcccgccggacctggcgccgggggcccgggcgtcgcctcccccaccattacagtcgccatgcccggtgtgcctgcctttttacagggcatgacagactttttgcaggcaacccagaccgccccaccacccccaccccccccgccacccccccctccagcgcccgagcagcagactatgcctcccccaggcagtccctctggcggcgccggctcacccggcggtctgggcttggagtctctgtcgcccgagttctttacttctgtggtgcagggggtcttaagtagccttctggggtccctgggggcacgcgctggctcatccgaaagtatagccgcctttatccagcgactaagcggtagctcaaacatctttgagcctggagcagatggggctctaggctttttcggggccctgttaagtctcctctgccaaaacttttccatggtggatgtcgtgatgcttctccacgggcattttcagcctctgcaaaggcttcaacctcagctccggtcttttttccatcagcactaccttggaggccaggagcctacgccttctaacataaggatggccacccatacactgatcactggtcttgaggaatatgttcgtgagtccttttccttagtgcaggtccagccaggagtcgacattattcgcactaatctggaatttctccaagaacagttcaacagcatcgctgctcatgtcttacactgcaccgactcggggtttggagcgaggctgttagaactgtgcaaccagggcctgttcgagtgcctggcactaaatctgcactgtctggggggacaacagatggagttagccgccgtaattaacggccgcatccgaagaatgagtcggggcgtgaacccttcgcttgtgtcatggctaactaccatgatgggactccgcctccaggttgtgctggaacacatgcctgtgggcccggatgccattctacgttacgtccggagagtgggtgatccaccacagccgctcccggaagagccaatggaagttcagggcgcagagcgtgccagcccagagcctcaaagggagaacgccagcccagctcccggcacaaccgctgaggaagccatgtcaagagggcctcctcccgctcctgagggggggagcagggatgagcaggatggcgcctcagctgagaccgaaccatgggcagcagccgttccccctgagtgggtgcccataattcagcaggacatccagtcacagaggaaggttaagccacaaccaccactcagtgatgcttatctgagtgggatgcccgccaaaagacgcaagacgatgcagggtgaaggtccgcagctcctgctttctgaggcagttagtcgagctgctaaggccgccggcgccaggcccctcacttcaccagaaagcctgagcagggatctggaagctcctgaggtgcaggagtcctatagacaacagctgagatcagacatccagaagagactgcaagaggatcccaactactcaccccagagatttccaaacgcacagcgggcatttgcggatgacccctag

SEQ ID NO: 109645 - DNA, 717 bp, synthetic construct
  misc_feature 1..717: note = Description of Artificial Sequence: Synthetic coding sequence
  source 1..717: mol_type = other DNA
agtagcgccgagggggctccaccacccggccctgctccccccccagccacctcacatcctcgcgtgatcaggatttcccaccagagcgtagaacctgtggtcatgatgcacatgaatatccagggccccttgtccttatctccgtgtccggatagcggcacccagcccggaggcgttccctcagcccctacgggacccctcggtcctccagggcacggacaaacacttgggcagcaggtgcccggcttcccaacagctcccactcgcgtggtgatcgccaggccaacgccaccacaggcccggcccagccaccccggcggcccaccagtgagcgggaccctgcagggcgctggccttggaacaaacgccagtctggcgcagatggtgtctggtctggtggggcagctcctgatgcaacccgtgctcgtggcccagggcactcccggcatggctccaccccctgcgcccgccactgctagtgcatcggccgggaccactaacaccgccacaaccgccggcccggcgcccggaggaccagcccagcctcctccaacgccgcagccttctatggcggatctgcagttctcccaattgctggggaacctcctaggtcccgcagggcccggggccggcggctcgggagtggcctccccgacaattaccgtggccatgcccggcgtgccagcttttctgcagggcatgaccgatttcctttag

SEQ ID NO: 109646 - DNA, 621 bp, synthetic construct
  misc_feature 1..621: note = Description of Artificial Sequence: Synthetic coding sequence
  source 1..621: mol_type = other DNA
atggagccaaatgacagtacttccactgcagtcgaggaaccggactccctggaggtccttgtgaagactctggattctcagactagaacttttattgtcggcgcccagatgaatgtcaaagaattcaaagaacacatcgctgccagtgtgtcgatcccctcagagaagcagcgtctgatttaccaaggcagagtgctccaggatgataaaaaattgcaagagtacaacgtaggcggtaaagtaatccatttggtcgaacgggctccgccacaaacacaccttccaagtggggccagctcaggcactgggtccgctagtgccacccacgggggtggctcccccccaggcacgcgcggccctggcgcttccgttcacgacagaaacgccaattcctatgtcatggtgggtacatttaacctgcctagcgagccacgtgtccgcctggttatggcccaacacatgattcgggatatccagacactactaagcaggatggagtgtcgaggcggcccgcaaccacaacattcacagcctcctcctcagccccccgctgttacacctgaacccgttgctcttagttctcagacgagcgaaccggtggaatccgaagccccaccttag

SEQ ID NO: 109647 - DNA, 558 bp, synthetic construct
  misc_feature 1..558: note = Description of Artificial Sequence: Synthetic coding sequence
  source 1..558: mol_type = other DNA
tagcttgcctgcacaccgccacgccacctgcatgtggtgagacccatgagccactatacaacccccatggtcctacagcaagctgctataccaatccagatcaatgttgggacaaccgtcaccatgaccgggaatgggactagaccgcccccaacccctaacgccgaagccccacctccagggcccggccaagcctcttctgtggccccctctagcacaaatgtggaatcgagtgccgagggcgcccctcctcctgggcccgcccctcctccggccacaagccacccccgcgtgattaggatcagccatcagagcgtcgagcctgtggtgatgatgcacatgaacatacagggacagcaagtgcctggattccccacggcccccaccagagtggtaatcgcgcgccccaccccgccgcaggcgaggccatctcaccctggtggcccgcccgtatcaggcactctgcagggtgcaggtctcgggacaaacgccagcctggcccaaatggtcagcggactcgttggccagctcctgatgcagccagtgctggttgcctag

SEQ ID NO: 109648 - DNA, 648 bp, synthetic construct
  misc_feature 1..648: note = Description of Artificial Sequence: Synthetic coding sequence
  source 1..648: mol_type = other DNA
atggagccaaacgattccactagcacggccgtcgaggaacctgacagcttagaggtcttagtgaagacactcgactctcaaactcgcacattcatcgtgggagcccagatgaacgtgaaggagttcaaagaacatatcgcggcatctgtcagcatccccagtgagaaacagaggctcatctatcagggacgcgtactacaggacgataaaaagctccaagagtacaatgtcggcggaaaagtgattcatctcgttgagcgcgcacctccacagacacatctgccctccggggcctcatcgggaacgggaagcgcctcagcaactcacggggggggcagccctccgggaacaaggggccccggcgcatccgtccacgaccgaaatgctaattcttacgtgatggttggaacgtttaatcttcctagcgagccacgagtccgtctggtgatggcccaacatatgatccgcgacatccaaaccctgttgtctaggatggagtgtaggggcggccctcagccgcagcactctcagccccctcctcagccccctgccgtgacgcccgagccagtggccctgtcttctcagacatctgagcctgtcgagtcagaggcaccgcccagagagcccatggaagccgaggaagtatag

SEQ ID NO: 109649 - DNA, 789 bp, synthetic construct
  misc_feature 1..789: note = Description of Artificial Sequence: Synthetic coding sequence
  source 1..789: mol_type = other DNA
atggagcccaacgattctaccagcactgccgtcgaggaacccgactcattagaagtcctcgttaagaccctggacagccagactcgcacatttatcgttggcgctcagatgaacgtcaaagagttcaaggagcatattgctgcgagtgtgagcataccctcagagaagcaacgtctcatttatcagggccgcgtcctccaggacgacaagaagctgcaggaatacaatgtaggtggtaaagtgatacacctggtggagcgcgcaccgccccagactcacctgccttctggtgccagttctggcacagggtccgccagcgcaacacatgggggcggttcaccaccaggaactagggggcccggagctagcgtacacgatagaaacgctaacagctacgtgatggtaggaacttttaacctgccttcagacggaagtgccgtggatgtccacatcaacatggagcaggcaccaatccagagcgagccccgggtcagactggtgatggcacagcatatgatccgggacatacagaccctactgtcccgcatggagtgcagaggcggcccccagccccagcacagccagccaccacctcagcctccagccgtgacacccgaacctgttgctctctcaagccagacctccgagcctgtggagtctgaggcacctccacgcgaaccgatggaggccgaagaggtcgaggaaagggccccagcccagaatcccgagctgaccccagggcctgcgcccgcgggtccgacgccagcgccagagaccaatgcaccctag

SEQ ID NO: 109650 - DNA, 594 bp, synthetic construct
  misc_feature 1..594: note = Description of Artificial Sequence: Synthetic coding sequence
  source 1..594: mol_type = other DNA
atggagcccaacgatagcacctccaccgcagttgaagaaccggactcgctggaggtcttagttaaaacgctcgactctcaaacacgcaccttcattgtgggagcccagatgaatgtgaaggaatttaaggagcacattgccgcatcggtgtcaatcccatcggagaagcagaggctcatctaccaaggtagggtgctccaagacgataaaaagttacaggagtacaatgtcgggggcaaagtgattcacctggttgagcgtgctcccccccagacccatttaccaagtggcgcgtcatctgggaccggaagcgcctctgctacacacggcgggggctcaccaccggggactcgaggacccggtgcgagcgtgcacgaccgtaacgctaactcatatgtgatggtcgggacgttcaatcttcctagcgacggaagtgctgtagacgtccacatcaatatggaacaggctcctattcagtccgagccccgcgtgcggctcgtgatggctcaacatatgattcgcgacattcagacactgttatcccggatggagtgtcgaggagggcctcagccccaacattcccagccaccatag

SEQ ID NO: 109651 - DNA, 735 bp, synthetic construct
  misc_feature 1..735: note = Description of Artificial Sequence: Synthetic coding sequence
  source 1..735: mol_type = other DNA
atggagcctaacgactccaccagcacggctgtcgaggaaccagacagtctcgaagtactggtaaagactctcgactcccagactcgcacattcatagtcggtgctcagatgaacgtgaaagagttcaaggaacacatcgccgcctccgtgtcaatcccaagcgaaaagcagcgcctgatttaccagggtagagtgctacaagatgacaagaagcttcaggaatacaacgtagggggtaaggtgatccatttggtcgagcgggctccccctcaaacccacctcccaagcggcgctagttcgggcacaggatcagcttccgccacgcacggcggtggctccccgcctggaacccgaggcccaggggcatccgtgcatgacaggaacgctaattcatacgtaatggtggggacatttaacctcccctctgaacctcgagtgaggttagtcatggctcagcacatgatcagggacatccagacactactgtcacggatggagtgtaggggggggccccaaccgcaacattctcaaccacccccacagccgcccgctgttaccccagaacccgtagctctctcttcccagacttctgaaccagtggagagcgaagcccccccgcgcgaaccaatggaggcagaggaggtggaagaacgagctcccgctcaaaatccagagctcaccccaggtcctgctcccgccgggcccacccccgcaccagaaactaatgcgccttag

SEQ ID NO: 109652 - DNA, 681 bp, synthetic construct
  misc_feature 1..681: note = Description of Artificial Sequence: Synthetic coding sequence
  source 1..681: mol_type = other DNA
tagtccggctttggggcgaggttgttagaattatgcaatcagggtctcttcgagtgccttgctctgaatttgcactgcctaggaggacagcagatggaattggccgcggttatcaatggaagaatacgacgcatgtcaaggggtgtcaacccaagtcttgtgtcctggctgactaccatgatgggtcttcggcttcaggtggttctcgaacacatgcctgtgggtcctgatgcaattctgaggtacgtgaggcgagttggagacccccctcaacctctgcctgaagaacccatggaagtacagggagctgaacgagcatctccggagcctcagcgggaaaatgcaagtcccgctcctggtactaccgccgaggaagccatgagtagaggcccaccccctgcccccgaaggagggagcagagacgagcaggatggcgctagtgccgaaaccgagccttgggccgccgctgtgccaccagaatgggtgccaatcatccagcaggacattcagtctcagaggaaagtaaaaccccagccccctctctccgatgcttacctctctggcatgccagccaagcgccgtaagctacgctccgacattcagaaacggctccaggaggaccccaactactcaccgcagcggtttccgaatgcgcaacgtgcatttgcagatgatccctag

SEQ ID NO: 109653 - DNA, 738 bp, synthetic construct
  misc_feature 1..738: note = Description of Artificial Sequence: Synthetic coding sequence
  source 1..738: mol_type = other DNA
cccccgcgccacctgcacgtcgtgagacctatgagtcactatactacacccatggtgctgcaacaggccgctataccgattcagattaatgtgggcaccactgtgacaatgacagggcctgcacccccccccgcaacctctcatccccgcgtcatcagaatcagccaccagtccgtggaacctgttgtgatgatgcatatgaacattcaggatagtggcactcagcctggtggagtgccttccgcacctacggggccacttggaccacctggacacggacagacacttggccagcaggtccccggttttccaacagcgccaacaagagtggtaatagcacggcccaccccaccccaggctagaccctcacacccaggaggtccccctgtaagcggcacccttcagggtgctggactgggtaccaatgcaagcctggcgcaaatggtgtccggactggtagggcaacttctcatgcagccggtcctagtcgcccagggcacccccggcatggctcctccccccgccccagccacagcatcagccagcgccggcactactaacactgcaactaccgccggtccagcaccagggggacccgctcagcctcctcccacccctcagcctagcatggccgatttgcaatttagtcaactgctcgggaatttgcttgggcctgctgggccaggggctggaggcagcggagttgcctctcctactattacagtggctatgccctag

SEQ ID NO: 109654 - DNA, 681 bp, synthetic construct
  misc_feature 1..681: note = Description of Artificial Sequence: Synthetic coding sequence
  source 1..681: mol_type = other DNA
taaagcggctttggagctcggctgctggaattatgtaaccagggccttttcgagtgcctcgccttaaatcttcattgcctggggggccagcagatggaacttgccgccgtgattaatggaagaatcaggcgcatgagccgaggcgtcaacccatccttggtaagttggctgactactatgatgggcctgaggctccaggtcgtactggaacatatgccagtgggaccagacgcaatattgcggtatgtgcgcagagtgggagatcccccccagcccctgccagaggaacccatggaagtacagggcgcggaacgggcttcccccgagcctcagcgggaaaatgcaagccccgcgcccgggacaaccgccgaagaagccatgtctcgaggacctcccccagctcccgaaggaggatcacgggatgaacaggatggggcaagcgccgaaactgagccctgggcggctgccgtgccgccagagtgggtgccgatcatccagcaggatattcagagccagaggaaagttaagccccagccacccttgagcgatgcatatctgagcgggatgcctgctaaacggaggaaactccggagcgacatacaaaaaaggttgcaggaagatcccaattattcgccccagagattccccaacgcccagcgggcgtttgcagacgatccgtag

SEQ ID NO: 109655 - DNA, 681 bp, synthetic construct
  misc_feature 1..681: note = Description of Artificial Sequence: Synthetic coding sequence
  source 1..681: mol_type = other DNA
tgatcaggcttcggtgcccggctgctggaactgtgcaaccagggcttattcgaatgcttggctttgaacctccattgcttgggtggtcagcagatggaacttgcagcggtaattaacggccgaataagacgaatgtcaaggggcgtcaaccccagcctagtcagttggctgaccaccatgatgggcttacggctccaggtggtcctggagcacatgcctgttggacctgatgcaatcttgcgctatgtcaggagagttggtgatcccccccagccactcccggaggaacccatggaagtacaaggagctgaacgcgccagtccagagccgcagcgggagaatgcatctccagcccctggcacaactgccgaagaagccatgagtagaggtccacccccagcacccgagggagggagccgcgatgaacaagatggggcttccgcagaaaccgagccctgggcagccgcagtaccaccagagtgggtccccattatacaacaggatatccaaagtcagcgtaaggtgaagccccagcctcctctctctgatgcgtatctttccggcatgcctgccaaacgtaggaagttgagaagcgatatccaaaagcgactacaggaagatcccaactacagtccacagcggttcccgaatgctcaaagggccttcgctgacgatccttag

SEQ ID NO: 109656 - DNA, 777 bp, synthetic construct
  misc_feature 1..777: note = Description of Artificial Sequence: Synthetic coding sequence
  source 1..777: mol_type = other DNA
atggaacccaacgacagcactagcacagctgtggaggaacccgattccctcgaagtgttagtaaaaacactcgacagccagacaagaacttttatcgtaggggcccagatgaatgttaaagaatttaaggagcacatcgcggcttctgttagtatccctagcgagaagcagcgactgatctaccagggtcgagtactccaagacgacaaaaagctccaggagtacaacgtgggagggaaagtcattcacctggtagaacgcgcccctccccagacgcatctgcctagcggtgcatccagtggaactggctccgcttctgccacccacgggggcggatccccacctggaacccgaggacccggcgcgtctgtacatgatagaaacgccaacagctatgttatggtgggcacctttaacttaccctccgatggatctgccgtggatgtgcacattaacatggaacaggccccaatccagtctgagccacgtgtgcggctggttatggcccaacatatgattcgggacattcaaactttgttgtccaggatggagtgtcgtggaggaccacagccacaacattctcagcctcctccccagccacccgcagttactcctgagccggtggcactgtcttcacagacctccgaacccgtagagagcgaagcacccccccgggagccaatggaggccgaggaggtggaggagcgtgctccagcccagaaccctgagctgactccaggtccagcgcccgctgggcctaccccagctcctgagtag

SEQ ID NO: 109657 - DNA, 411 bp, synthetic construct
  misc_feature 1..411: note = Description of Artificial Sequence: Synthetic coding sequence
  source 1..411: mol_type = other DNA
tagcgaatgtctagaggtgttaacccaagtctagtctcctggctgaccaccatgatggggttgagacttcaagtcgtgctggagcacatgcccgtgggacctgacgcaatcctgcgctatgttagaagggtaggagatcctccccaacctttgcccgaggaaccgatggaagtgcagggtgccgaacgcgcttcccccgagcctcaggagtgggtgcctatcatccagcaggacatccaatcacagcggaaggtcaaaccgcagcctcctctaagtgatgcctacctgagcggaatgcctgccaagaggcgcaagcttcggagcgacatccagaaaaggctgcaggaggatccgaattatagtccccagaggttccctaatgcgcagagagcctttgcagacgatccatag

SEQ ID NO: 109658 - DNA, 3489 bp, synthetic construct
  misc_feature 1..3489: note = Description of Artificial Sequence: Synthetic coding sequence
  source 1..3489: mol_type = other DNA
atggagccaaatgatagtaccagcaccgctgttgaggaacccgactccctggaggtgttggtcaagactctggactcccaaactagaacatttatcgtgggcgcccagatgaacgtgaaggaatttaaggaacacattgcggcttcagtctccataccttccgaaaagcagcgactgatttaccagggacgagtgctgcaggatgataagaagctccaggagtataatgttggaggcaaagttatccacctagtggaaagagctcctcctcagacccacctgccgagcggagccagctcgggcaccggatccgcctccgcaacccatggcggtggaagcccacccggtacccgggggccaggggcctcagtgcacgatcggaacgccaattcctatgttatggtggggaccttcaatcttccttccgacggatcagcagtggacgtgcacatcaatatggagcaggcccccatacagagtgagccccgtgttcgccttgttatggcgcaacacatgattcgcgatattcagactttattatctcgcatggagtgccgcggcggtccacagccccaacactcccagccccctccgcaacccccagccgtgactccagaacctgttgcactttcgtctcagaccagcgagccagttgagagcgaggctcctccgagagagcccatggaagccgaggaggtagaggaaagggcacctgcccagaacccagagctaacccccgggcccgcccctgctggccccaccccagcaccggaaacaaatgctccaaaccacccctcccccgcggagtatgttgaggtgctccaggaactccagaggttagaaagtcgactgcagcctttccttcaaagatactacgaggtgctgggcgctgccgctaccacagattacaacaacaaccacgaggggagggaggaggatcagagactgattaatctggttggagaatcactgcgcctcctgggaaatacgttcgttgccctcagcgacttgagatgcaacctggcctgcaccccccctaggcacttgcacgtagtccgaccgatgtcacactacacaacgcctatggttcttcagcaggccgcaatccctattcagataaatgtggggacaacggtgactatgactggtaacgggacgagaccgccaccaacacctaatgcagaggctcctcccccagggccgggacaggctagctccgtcgcacctagctccacaaacgtcgaatcatccgctgaaggtgctcctccacccggacctgctccaccacccgcaacttcacatccccgcgtcatccggatcagtcaccagtctgtggagccggtggtgatgatgcatatgaacattcaagattctggcactcaacctggtggcgtgccttctgcacctaccgggccattaggtccacctggacacggccaaaccctcgggagtacccttatacagctgccctctctccccccggaattcatgcatgccgttgctcatcagatcactcaccaggcaatggtggcagccgtcgccagcgcggcggcaggccagcaagtccctggatttcccacagccccaactcgcgtagtaattgccagaccaacacccccacaggcccggccatctcaccccggcggccctcctgtctccggtacactgcagggggccgggttgggcacgaatgctagtcttgcccaaatggttagtggactggtgggtcagcttctgatgcaaccagttctcgtcgcccaaggaacccccggaatggcaccaccccccgcacctgccaccgctagcgcctctgctggaacgaccaataccgctactacagccggtcccgcaccaggaggacctgcacagccaccgccaacgccccaaccatcgatggctgatctccaattcagccaactgctgggtaatctcctgggccctgcaggaccaggcgctggtggacccggggtggcctctcccacgattaccgtggcgatgcccggcgttcctgcctttctgcagggaatgacagacttccttcaagccacacagactgctccaccgccgcctccgccaccgccccctccgccacctgcccctgaacagcaaaccatgcctccacccggctctccttcaggcggagcagggagtccgggcggcttaggtcttgagtcgttgagccctgagttctttacatctgtcgtccagggagtgctctcttccctgttgggaagtcttggcgctagagctgggagcagcgaaagtatagctgcttttatccagcgtttgagcggcagttctaatatcttcgagcctggagccgacggcgcactcggattttttggagctcttctttccctattatgccagaatttctcaatggtggacgtggtgatgttgctacacggtcattttcagccactccagcggctccaaccgcaattacgcagcttcttccaccagcactacctgggcggtcaggagcccacaccaagcaatatacgcatggctactcatactctgattaccggcttggaggaatacgtaagagagtccttttcgcttgtgcaagtccagcccggagtggacattatccggacaaacctcgaatttttgcaggagcagtttaactccatcgctgcccatgtactacactgcacagatagtggcttcggggctcggctgttggaactgtgtaatcagggtttattcgagtgcctggcgctgaacctccattgtctcggcggccagcagatggagctcgccgcagtgattaatgggaggatacgaagaatgtcacggggagtgaacccatcactggtgagctggctcactaccatgatgggactccggctccaggttgtgctggagcatatgccagttggaccagatgccattcttaggtatgtgcggcgcgtcggcgacccaccccagcccctgcctgaggagcctatggaggtgcaaggtgcggagcgcgcctcgcctgaacctcagcgcgaaaacgcctctcccgcccccgggactacagctgaagaagcaatgagtcgcggcccccctccagccccagagggggggtcgcgggatgagcaggacggagctagcgccgaaactgagccctgggcagcagccgtgccacctgagtgggtgcccataattcaacaagacattcagagccaaagaaaagtgaaaccacaacccccactgtcggatgcatacttaagcgggatgcccgcaaaacgacgcaaaactatgcaaggggaagggccccagctgttgttgtctgaggctgtgtctcgggccgctaaggcagctggggctcgtcctctgacctctcctgaatcactttccagagatctggaggcacctgaagtccaagagagctatcggcagcagctccggagtgacatccaaaagcgtctacaggaggatccaaactatagtccccaacgctttccaaacgcgcagagggcttttgcggacgatccatag

SEQ ID NO: 109659 - DNA, 2712 bp, synthetic construct
  misc_feature 1..2712: note = Description of Artificial Sequence: Synthetic coding sequence
  source 1..2712: mol_type = other DNA
atggagcccaatgattctacctctaccgctgtggaagagccagatagcctcgaggtcctggtgaaaacgctggattcacagactagaacgttcattgtgggcgcgcagatgaatgtgaaggaatttaaggagcatatcgcagcctccgtaagcatcccctctgaaaaacagaggctgatctaccaaggcagggttctgcaagacgataagaaactgcaggagtacaatgtcgggggcaaggttatccacctggtcgagcgcgcacccccccagacgcacctcccgagcggggcctcgtccgggacaggcagtgccagcgcgactcatggagggggttcgccaccaggtacacgcgggccaggcgcatcagtacacgatagaaatgcaaatagctacgtgatggtgggaacctttaatttgcctagcgatgggtccgccgtcgacgtgcacatcaatatggagcaggcaccaatacaatccgaaccccgcgtccgcctcgttatggcacagcacatgatcagggatatccagaccctgctatctaggatggagtgtcggggggggccccagccacagcactcccagcctccgccccagccaccagccgtgactccggagcctgtggccctgtccagccagactagtgaacccgtcgaaagtgaggcaccccctcgcgagcctatggaagcagaggaagtggaggaacgagctcccgcacaaaacccggagctgactcctggccccgcccctgctggccctactccagctcctgagaccaacgctcccaaccatccctctccagccgagtatgtagaggtcctacaggagctgcagcggcttgagtcacgactgcaaccctttctccagagatactatgaggttctgggcgctgccgctactacagactataataataatcatgagggacgggaggaggaccagaggctcatcaacttggttggagaatccctgagattgctcgggaatacttttgttgccttgagtgacctgagatgcaatctggcctgtactcccccgcggcacctgcatgttgtcaggcccatgagccactacaccacaccgatggttctccagcaggctgccattcctatccagatcaacgttggcacgacagtgacaatgaccgggaatgggacccgacccccgcctacccctaacgctgaggcgcctccccctggacctggccaagccagtagtgtggcgccaagttctaccaacgtggagagtagcgccgaaggggctccacccccagggccagccccccctccggcaacttcacaccctcgagtgatccgaatatctcatcagtccgttgagccggtagtcatgatgcacatgaatattcaagactccgggacgcaaccgggtggcgtgccatctgcacctacgggtcctctggggccaccagggcatggacagactctaggacagcaagtccccggcttccccaccgcccccacaagagttgtaatcgccaggccaacacctccccaggcgcggcccagccatccaggtggtcctcctgtcagcggcacgttgggagccggccttgggaccaacgcatctttagcacagatggttagcggtctggtaggtcagttgctaatgcaaccggttcttgtggcccaaggtacacccgggtcacccggcggcttgggccttgagtctctctctcccgaatttttcacgagtgtagtgcagggcgtgctgagctctctgctgggatctctcggagccagggccggctcatccgaatcaattgctgcattcatccagcgtctgtctgggagttcaaacattttcgaacccggtgccgatggtgccctgggtttttttggcgctctactgtcgctgttgtgtcagaactttagtatggtagatgttgtgatgctgctgcacgggcattttcaacctcttcaaaggctgcagccacagcttagatcatttttccatcagcattacctggggggtcaggagccaacgccatcaaacatcaggatggcgacccacaccctgatcactggattggaggaatacgtgcgagaaagcttcagtcttgtccaggtgcaacctggtgtcgacataatcagaacgaacctggagttcctccaggaacaatttaattccatcgccgctcacgtcctgcactgcacggattcggggttcggggcccgcctcctagagctctgtaatcagggcctgttcgagtgcttggcactgaatctgcattgccttggcgggcagcagatggagctcgcggccgtgattaacgggcggatcagacgaatgtcgcgcggagtcaatccttctttggttagctggttgacaacaatgatgggactccgcctccaggtggtgttagaacatatgccagtcggccccgacgcaatactgcggtatgtccgcagggtaggggatcctccccaacctctccccgaagaacctatggaagtccagggagccgagcgtgcatctccggaaccccaggaatgggtgccaatcatccagcaggacattcagagccagcgaaaagtgaaaccgcagccacccctgagtgatgcctacctgagcggtatgccagcaaaaagacgaaagttgagatctgacatccagaaacggctacaggaggatccgaactattcgccacagagattccctaatgcccagcgagcgtttgcggatgacccatag

SEQ ID NO: 109660 - DNA, 2712 bp, synthetic construct
  misc_feature 1..2712: note = Description of Artificial Sequence: Synthetic coding sequence
  source 1..2712: mol_type = other DNA
atggagcccaacgatagtacgtcaaccgctgtggaggagcccgatagcctggaggtcttggtgaaaactcttgatagtcagactagaacttttatcgtgggggctcagatgaatgtgaaggagtttaaggaacacatcgccgcaagcgtgagcattcctagtgagaaacagcggcttatctatcaggggcgagtgctccaggacgacaagaaattgcaggaatataatgtagggggcaaggtgattcaccttgtagaaagggcacctccacaaacacatctgccaagcggcgcatctagcggaactggttctgcatctgctacacatgggggggggagtcccccaggtacccgagggcctggtgcaagtgtgcacgatcgaaacgccaattcctacgtcatggtcgggaccttcaacctccccagcgacggatcagcggtggacgtccacattaatatggagcaagctccaatccagagcgaaccgcgggtacgcctagttatggcccagcatatgatccgagacattcagactctcctgtccagaatggaatgtagaggggggcctcagcctcagcactcacaaccaccccctcagccacccgccgtgactcctgagcccgtcgccttaagctcacagaccagcgagcctgtggaatccgaggcaccacccagagaaccaatggaagccgaagaagtggaagagagggctccagctcagaaccctgagctgacacccggtccagcacccgctgggccgactcctgctcccgagacaaacgctcctaaccatccttctccagccgagtacgtggaagtcctgcaggaactacaaaggctggagtcccgtctgcaaccatttctgcagcgatactacgaagttctcggagctgcggccacaaccgattacaacaacaatcacgagggtcgagaggaggaccaacggctgatcaacctcgtgggagagtccctgaggttgctgggaaacacatttgtggctctcagcgatcttcgatgtaatctggcttgcacgccgcccagacacctccatgtagttagacctatgtcgcactacacaactccaatggtcttacagcaagccgcgataccaatccagatcaacgtcgggacaactgtaaccatgactggaaatggaacaaggcccccacccactcccaacgccgaggccccaccccccgggccagggcaagcaagcagcgttgccccatcgtcaaccaacgttgagtcctctgctgaaggcgcccccccgccgggacctgcgcctccccctgcaaccagtcatccccgggtgatccgaatctcccatcagagcgtcgaaccagtggtgatgatgcatatgaatatccaggacagcggaacccagcccggtggggtaccgtctgcgccaacgggccccctaggtccacccggacatgggcagactctggggcagcaagtgcccggtttcccgacggctccaacccgagtagtaattgcgagacccacaccgcctcaggccaggcccagccatcctggcgggccgcctgtttcaggaactcttggcgcaggcctgggaaccaatgccagtctggcccagatggtgtcgggcctagtggggcaactcttgatgcagccggtgctggttgctcaggggactcccggctcacccggtggactgggcctggaaagcctgtcaccagaattcttcacaagcgtcgttcaaggggtcttgtcatctctgctgggatctctgggagcccgggcaggcagcagcgagagtatcgctgctttcatacagcggctatcagggtcatccaatatcttcgaacccggagccgacggggcgctcggcttcttcggcgccctgctcagcctgttatgtcagaactttagtatggtagacgtagtcatgctccttcacggccattttcagcctttacagcgcctccagccacagctgcgatctttctttcatcaacattatctagggggccaggagcccacgccaagcaatatacgcatggctactcatacactgatcaccggtctggaggagtacgtgagagaatccttcagcctagtccaggtgcagcccggtgtggatatcattaggacaaatctcgaatttctgcaggagcagtttaatagcatcgccgctcacgtgctgcactgcacggattccggattcggcgcccgccttttggagctctgtaatcagggtctgtttgagtgcttagccctgaacctccattgtcttggtggccaacagatggagttggcagcagtgatcaatggcaggattcgcagaatgtccaggggcgtgaatcctagtctggtgagctggttgaccaccatgatgggactcaggttacaggtggtcctggaacatatgcctgtaggtcctgatgcaatcctacgttacgtgcgcagagtcggcgacccgccccaaccactgccagaggaaccaatggaagttcagggagcagaacgtgcttcccctgagcctcaggagtgggtccccattatccaacaggacatccagagccagaggaaggtaaagccccagccccctttgtccgatgcttacctgagcggtatgcccgcaaaacgcagaaagttgcgaagtgacattcagaaaaggctgcaagaagatccgaactactcgccccaacgatttccaaacgctcagcgagcctttgccgatgatccttag

SEQ ID NO: 109661 - DNA, 3234 bp, synthetic construct
  misc_feature 1..3234: note = Description of Artificial Sequence: Synthetic coding sequence
  source 1..3234: mol_type = other DNA
atggaaccgaacgattctacctccactgccgtagaggagccagattcactggaagtgctggtgaagactctggacagccaaactagaacgttcatcgtcggcgctcaaatgaatgttaaagaattcaaggagcacatagctgcctctgttagtatcccttctgaaaaacaacgtctgatataccagggccgggttctgcaagatgacaaaaagctccaggagtacaatgtgggcgggaaagtgatccatctggtcgaaagagcgccacctcagacacacctgccctcaggcgccagcagtggtaccgggagcgcctctgccacccacggaggtggaagtcctccaggcaccagagggcccggagcctctgtgcatgaccgtaatgctaactcctacgttatggtaggaaccttcaatctgccctccgatggatccgcggtcgacgttcatatcaatatggagcaggccccgattcaaagcgaaccacgcgtgagactagtcatggcccagcatatgatcagggatatccagaccttactcagtcgaatggagtgccggggaggcccgcagccccaacattctcaacctcctccccagccacctgctgtcacccccgagcctgtcgctttgagctcacagaccagtgagcccgtggagagcgaagctccacctagggaaccaatggaggcggaggaagtagaggagcgtgcacccgctcagaaccccgaactgacccccggccccgccccagccgggcccacgccagcgcctgagacaaacgctcccaaccacccctcccccgccgaatacgttgaggtactgcaggagctgcagagattggaatccagattacaaccctttcttcagcgttactacgaggtcttgggagcagccgctactacagattataacaataaccacgagggaagagaagaggaccagcgcttaatcaacttagtgggtgaaagtctacgcttgctgggcaacactttcgtcgcactgtccgatttaaggtgcaatctggcttgcacccccccacgtcatcttcatgtcgtccgtcctatgtcccactataccacacccatggtgttgcagcaagctgcaatcccgatacagattaacgtcggaactacagttaccatgaccggcaacggaaccagaccaccgccaaccccgaatgccgaggcccccccccccggccccggacaggccagctcagtggcaccatcgtccaccaatgtggagagctccgccgagggagctcccccgcccgggccagccccaccccccgccactagtcaccctcgagtgataaggatcagtcatcaaagcgtagagccggttgtgatgatgcatatgaatattcaagactctgggacgcagcccggcggtgtgccttccgcaccaaccggtccattgggaccacccggccacggccagaccctcgggcagcaggtgcctggattccccaccgcccccacacgcgtcgtgatcgctagaccaactccccctcaagcccgacccagtcatccgggcgggccgcctgtttccgggactctgcagggcgcaggcttggggacaaacgcttcgctcgcccaaatggtgtccggtctggtgggccagctgctgatgcaaccagtgctcgttgctcaaggaacacccgggatggctccccccccagctccagctaccgcctctgccagcgcagggacaactaacaccgcaactacagcaggccctgccccggggggccccgctcagcccccaccaaccccacagccatcaatggcagatttgcagttcagccagctgctgggcaaccttcttgggcccgcagggcccggggccggggggtcaggtgtggcttccccgacgattactgtggccatgccaggcgtgccagctttcctccagggcatgacagacttcctgcaggctacccagaccgccccccccccaccgcctccaccgccacctcctccaccagctccagagcagcagacgatgcccccacccgggagcccttccggtggggccggtagcccaggaggtctggggctggagagtttgtctcctgagttcttcacttctgttgtccagggggtattatcaagtctgctcgggagtctgggtgcccgtgccggctcctctgaaagcatcgcagcctttatccagaggctttcagggtcctctaacatttttgagcctggggccgatggagctctggggttttttggcgccctcctgtcgctcttgtgccaaaacttcagcatggttgatgtcgtcatgctgctacatggtcacttccagccacttcagagattacagccgcagctgaggtctttcttccaccagcattacctgggaggtcaagagccaacgccatccaacatccgtatggctacacatacccttataaccgggttggaggagtacgtgagggaaagctttagcctcgtccaggtgcaaccgggcgtggacatcattcggaccaatctggaattcttgcaagaacagtttaatagtatagctgcccatgtccttcactgcacagactctggatttggagctcgccttctcgaactctgcaaccaggggttatttgagtgcctggccctaaatctgcactgcctcgggggacaacagatggaactggctgccgttattaacggcaggatccgtagaatgagcaggggggtgaatccctctttggttagttggctgaccactatgatgggcctgaggctgcaggtagtcctggaacatatgcctgtgggtcccgacgctatcctgcgctacgttaggagggtcggggacccgccacagcccctccccgaggaacccatggaagtccaaggagccgagagagcctctcccgaaccccagcgcgagaacgcttcccccgcccctggcacaaccgccgaagaagctatgagcagaggaccaccacccgctcctgagggaggatcccgggatgaacaagatggtgccagcgccgaaacggagccatgggcagccgccgtcccacccgagtgggtgcccataatacagcaggatatccagagccagcgtaaagtgaaacctcagccaccgctcagcgatgcgtacctctcaggaatgcctgccaagcgccgaaagctccggagcgatattcagaagagactccaggaggacccaaactatagtccccagaggtttcctaatgcccagcgcgcctttgccgatgatccttag

SEQ ID NO: 109662 - DNA, 3234 bp, synthetic construct
  misc_feature 1..3234: note = Description of Artificial Sequence: Synthetic coding sequence
  source 1..3234: mol_type = other DNA
atggagcctaacgactccacgagtaccgcagttgaagagccagacagcctggaagtactagtcaaaacactcgactcacagactcgcaccttcatagtgggagcgcagatgaatgtgaaggagtttaaggagcacattgcggcaagtgtgagtataccctccgaaaaacagcgcctgatctaccagggcagagtcctgcaggatgacaagaagcttcaggaatataacgtcggtggcaaggtgattcacttggtcgagcgggccccacctcagacccatctcccaagtggagcctcttccgggacgggcagtgcatccgccacccatggagggggctcacctcctggcacacggggacctggagcaagcgtacatgataggaatgctaattcctacgtgatggtggggaccttcaacctgccaagtgacggcagcgctgtagacgtccatataaacatggaacaggcgcccatccaatctgagcctcgtgtccgcctggtcatggcccagcacatgatacgagacatccagaccctcctgtcacggatggagtgccggggcggcccccagccacagcactcacagccacccccccagcctccagctgtcacccccgagcccgtggcattgagtagccagacctcagagcccgtggaatctgaagcccctccgcgcgagcccatggaagctgaggaggttgaagagagagctccagcccagaatcccgaactgactccaggcccagcgccagccggccctacaccggcccccgaaacaaacgcgcctaaccaccctagccccgctgaatatgtggaagttctccaagagttgcagaggctggagagtcgattgcagccttttctgcagcgttactatgaggtgctgggggctgctgctaccaccgattataacaataatcacgaaggcagggaggaggatcagaggcttatcaacctcgttggcgaatctctccgactcctgggaaacacctttgtagctttaagcgacttgcgatgcaacttggcctgtacacctcctcgccacctgcacgtggtgcgccctatgagtcactacactacaccgatggtgctgcagcaggcagctattccaatccagattaacgtgggaaccaccgtgaccatgaccgggaacgggactcgtcccccgcccacccccaacgcggaggcacccccacctggtccaggccaggccagctccgtggcaccgagcagcaccaacgtggaaagtagcgctgagggtgcccctcccccaggtcctgctccaccacctgctaccagccatcctcgagttatccgaatctcacaccagtctgtagagccagtggtgatgatgcacatgaatattcaggattccggcactcagcctggcggcgtgccctctgcgcccaccggacccttggggcctccgggacacgggcaaacacttggacagcaggtacctggcttccctaccgccccaacccgggttgtaatcgcccgccccactccaccccaagctcggcccagccatcccggcggaccgcctgtttctggtacacttcagggggcaggcctgggaacaaacgcaagcctggcccagatggtttccgggttggtggggcagctgctgatgcagcccgtcctagtggcacagggtacacccggcatggcgccaccgccagccccggctaccgctagtgcctctgcagggaccaccaacaccgccactactgccgggcccgcccctggcggacccgcacaaccgccacccacccctcaaccatccatggctgatctgcagttctctcagcttcttggtaacctcctgggcccagccggtccgggggctggggggccaggggtggcctccccgacgataaccgtggccatgccaggcgtcccagcctttctccagggaatgaccgatttcctccaggctacacaaactgcccctcctcccccaccgccacctcccccccctccaccagcacccgagcaacagactatgcctccccccggttccccttcgggcggggctggctcacccggtggcctcggacttgagtccttgagcccagagttctttacatctgtcgtccagggtgtgctcagtagcctgctgggcagcctgggcgcccgggctgggagctctgagtctatcgccgctttcattcaacgactgagtggctcatccaatattttcgagcctggcgctgacggggcattggggttcttcggcgccctccttagtctcctttgtcagaacttctcgatggtggacgtggttatgctcttacacggccatttccaaccattgcaacggctccagccacagctccggagtttcttccatcagcattacttaggcggacaggagccaacaccttccaatatccgaatggccactcacacactcattactggacttgaagagtacgttagggaaagtttctcactcgtgcaggttcagccgggcgtggacataatccgtaccaatctggagtttctgcaggagcaattcaattcaatcgccgcccatgtactgcactgcaccgattctggattcggagctcgtttattagagctttgtaaccagggtttgtttgaatgtctagccctcaatctgcactgtttaggggggcagcagatggagctcgctgcagtgattaatggacggatcaggcgtatgtccagaggggtgaacccaagcctggtttcttggctcactaccatgatgggcctgcggctacaagtcgtgctagagcacatgccagtcggacctgacgcgatactgcgttacgttcgtagggtgggagatccccctcagccactgcccgaggaacctatggaagtgcagggcgcagagcgcgcctcaccggaaccccagcgggagaacgctagtccggctccaggaactacagccgaggaggcaatgtctagagggccgccgccagctcctgaggggggcagcagagatgaacaagatggggcatctgcggagacagaaccctgggctgccgctgttccacccgaatgggtcccgataatccagcaggacatacagagccaacgcaaggtaaagcctcagcctccactatctgatgcctatctgagcggaatgcctgccaaaaggagaaagctgcgctctgacatccagaagcgcctgcaggaggatcccaattattccccacagcgctttcccaacgctcaacgagctttcgctgatgacccttag

SEQ ID NO: 109663 - DNA, 3489 bp, synthetic construct
  misc_feature 1..3489: note = Description of Artificial Sequence: Synthetic coding sequence
  source 1..3489: mol_type = other DNA
atggagcccaacgatagtaccagcaccgctgtcgaggagccggactccctggaggtgctcgttaaaacactggattctcagacaaggactttcatcgtgggtgcacagatgaacgtcaaggagtttaaagaacatatcgcggctagcgtgtccatcccaagtgagaaacagaggcttatctaccagggacgcgtacttcaggatgataaaaagctgcaggaatacaacgtgggtgggaaggtgatacacctggtggaacgtgccccaccacagacccacctgccttccggcgcctccagtgggacaggatctgcatccgccacccacggggggggctccccacctgggacaagggggccaggggcaagtgtacatgaccgtaacgcaaacagctacgtaatggtgggcaccttcaatttgccttccgacggatctgcagtcgatgtacacatcaacatggaacaggccccaatccagtccgaacctcgcgtccgcctggttatggcccagcacatgatcagggacatccagacgctgctgtcgagaatggagtgtcgcggaggaccgcaacctcagcacagccagcccccgccacaaccccccgccgtgacgcctgaacccgttgcactgagttcccaaacttctgagcccgtggagagtgaggccccgcctagggagccaatggaagcagaggaggtggaggaacgggcacctgcccagaacccagaactcacacccggtcccgctcccgccggacctacacctgctccagaaacgaatgcccccaaccacccatcccccgccgaatatgtcgaggtcttacaggagttgcaaagactggaatccagactccaacctttcctgcagaggtactatgaagtcctcggggctgctgcaactacagattataataacaaccacgagggacgcgaggaggatcagcgcctgatcaacctggtgggcgaatctttgagactcttgggaaacacattcgtcgcactaagtgatctgcggtgtaacctggcatgtactccacctagacatctgcatgttgtacggcctatgtctcactataccacccccatggtactccagcaggccgcgattcctatacagataaacgtcgggacaactgtaaccatgacgggtaacggcactaggcctccgcccacgcctaacgcagaggccccacctccaggtcccggccaggcgtctagcgttgcccccagctccaccaacgtggagagtagtgcagagggggccccaccccctggcccagcccctccaccagcaacttcccacccgcgcgtgattcgcatcagccatcagtccgttgagcccgtggtgatgatgcacatgaacattcaagattcaggcacccagcccggaggcgtgccttctgcacccacaggccctttaggtccccctggccacggccagacactcggtagcaccctgattcaactgccatcgcttcccccagaattcatgcatgctgtggctcaccaaatcacccaccaggcaatggtggcggcagtagcctcagccgccgctgggcagcaggtgccagggttcccaacggccccaacgcgggttgtcatagccagacctactccgccccaggccaggccgtcgcaccccggcgggccgcctgtgagtggaacacttcaaggtgccggtcttgggaccaacgcttcactggcccagatggtgtctgggctggtcggccagcttttgatgcagcccgtgctggtggcccagggaacaccagggatggctccacctccggcccctgcaactgcatccgcatccgcgggaacaaccaacaccgctacaaccgccgggcctgcacctggcggcccggctcagcctcccccgaccccacaaccaagcatggccgatttacagttctcgcaactactggggaatttgctgggaccagcaggccccggagctggtggccctggagttgctagtcccaccataactgtggccatgcccggcgttcccgctttcctacagggaatgaccgactttctgcaggcaacacaaactgccccccccccaccaccccctccccctccacccccaccagcccccgagcagcagaccatgccgcccccaggttcaccctcgggaggggcggggtccccgggcgggctggggttggagtccttgtcgcccgagttttttacgagcgtggtgcagggtgttcttagctcattacttggctcactcggagcccgcgccgggagctctgagtcgattgcagcctttatccagcggttatccggcagcagcaatatttttgaacctggagcggatggcgctctggggttctttggagccctgctgagcctgctgtgtcaaaatttctcaatggtggatgtcgtcatgctcctccacggacactttcaacccctccaaaggttacaaccacagcttagatctttttttcaccagcattatttgggaggccaggaaccgacacccagcaatattcgaatggccactcacacgttaataactgggttggaggagtatgtgcgcgagagtttctcgttggtgcaagtgcagcccggagtggacataatcagaaccaacttggagtttctgcaggaacaattcaattccatcgcggctcacgtgctgcattgcaccgatagcgggttcggcgccagacttcttgaactctgtaatcaggggctgttcgagtgcttggccctgaacctgcactgcctcgggggacagcagatggaactggcagctgttattaacgggcgcataagaagaatgtcccgtggcgtgaacccatctctcgtgagctggctaactacaatgatggggctgcggctgcaggtagtcctggagcacatgcccgttggtcctgacgcaattttgcggtatgttcggcgtgtgggtgaccctcctcagccgttgccagaagaacctatggaggtgcagggcgccgagcgcgcctccccggaaccccagagagagaacgcctcccctgctcccgggacaaccgcagaagaggccatgtcacgcggacctcccccagcaccagagggcgggagtagggatgagcaggatggggcgtccgccgagacagagccttgggcagccgccgtgccgcccgagtgggtgcctattatccagcaggacatccagagccagcgcaaagtcaaacctcagccacctttgagtgacgcctacctgtcaggtatgcctgccaaacgccggaagacaatgcagggggaggggccacagttactccttagtgaggctgtttcaagggctgctaaggccgctggcgcccgtccgctgacctcaccagagagcctgagcagggatctggaggccccagaagtgcaggaatcatataggcaacagcttcgttctgatattcagaagaggctgcaggaggatccaaattacagcccccaacgcttcccaaacgcacagagagcctttgctgacgacccttag

SEQ ID NO: 109664 - DNA, 3234 bp, synthetic construct
  misc_feature 1..3234: note = Description of Artificial Sequence: Synthetic coding sequence
  source 1..3234: mol_type = other DNA
atggagcctaatgattcaacctccaccgcagtagaggaacccgacagcctggaagtgttggtgaagactctggattcacagacaagaaccttcattgtcggagcccagatgaatgtgaaagagttcaaggaacacattgcagccagcgtgtccatacccagcgaaaaacaacggctgatctaccaagggagagtgctccaagatgataaaaagctccaggaatataatgtgggagggaaggtaatccacttggtggagcgggccccaccgcagacacacctgccttccggtgcttcttcggggacaggctctgccagcgctactcacggaggcggaagccctcccgggacccgaggccctggagcctccgtgcacgaccgaaacgcaaactcctatgtcatggtgggcaccttcaatctgccttctgacgggagcgccgtcgatgttcatattaacatggagcaggcacccatacagtcggagccccgcgtgcggctggttatggctcagcacatgatccgagacattcagactctgctctcaaggatggagtgtcgaggaggaccccagccccagcacagccagcctccacctcagccccccgctgtcacccctgagcctgtggccctgagcagtcagacatcggagcctgtagagagcgaggcgccccccagggagccaatggaggccgaggaagtggaggagagagctcccgcccagaatcccgagcttacacctgggccagcgcccgccggacctactcccgcacccgagaccaatgcacccaaccatccatctcctgccgagtacgtggaggtcctgcaggaattgcagcggttggagagtaggcttcagcccttcctgcagcgatactacgaagtcctgggagcggcagcgacgaccgactataataataatcatgaaggtagagaggaggatcagcgactcattaacctcgtgggcgagtccctgaggctattgggtaatacattcgtggccttgtcagacctccgatgcaatctcgcttgcacccctccacgccacctccacgtggtgaggccaatgagccactacactacacccatggtgctccagcaggcagcgattcccattcagattaatgtcgggacaacagttactatgaccggcaatggaacaaggccacctcccactcccaatgcggaagcccctccacccggtccaggccaggcaagtagcgtggccccatcgtctacaaatgtggagagttccgcagagggtgccccacctcccgggccggctcctccacccgccacctcacacccacgtgttatccggatttcccatcaatcagtggagcctgtggttatgatgcacatgaacatacaggattctgggacacaacccggaggggtgccatcagcccccactggcccacttggcccccctggtcacggacaaactctcggtcagcaggtgccaggtttccccaccgcgcccacccgcgtcgtgattgcaagacctacaccaccacaagcaagacccagccacccaggcggcccacctgtatcaggcaccctgcagggcgccgggctgggtacgaacgcctcgttggcccagatggtgtcaggcctggtggggcagctgctgatgcagccagtgctggtggcccagggaacaccaggaatggcccctcctcctgcaccagcaactgcatccgctagcgccgggacaaccaatactgccaccacagccggaccggcaccaggcggccccgcacaaccccctcccacaccgcagccgtctatggctgatctgcaattttcgcaactgctgggaaatctgctggggcccgccggtcccggcgccgggggaagcggtgtcgcatcaccaacgatcacagtcgcaatgccgggcgtaccggccttccttcaagggatgaccgatttcctgcaagctactcagactgcccccccccccccacctccccctcctcctcctcccccagccccggaacagcagaccatgcctcccccggggagcccctcaggcggcgcagggagtccgggggggttggggctggagtcactctcacccgagtttttcacgtcggtggttcagggcgtcctgtctagccttctgggttccctgggcgcaagagcgggcagctctgagtcaatcgcagcctttatacagaggttgtcgggctcctcgaacatattcgagccaggcgccgatggcgcacttgggttctttggagctctcctgtcactcctctgtcaaaatttttccatggttgacgtggttatgctgctccacggacatttccaacctctccagagactgcagcctcagctgcgatctttcttccaccagcactaccttggcgggcaggaaccgaccccctccaacatccgcatggctacccacaccctcatcactgggttagaggagtacgttagggaaagtttctcacttgttcaggtgcagcctggggtagacataatccgtaccaatcttgagtttcttcaggaacagtttaacagcattgccgctcatgttttgcattgtaccgacagtggtttcggggcccggctattagagctgtgcaaccaggggctcttcgagtgcctggccctcaacctacattgtttgggagggcaacagatggaactggccgcagttatcaacgggcggatccgccgcatgagccgaggggtgaatccctccttagtaagctggctcactacaatgatgggactcagactgcaggttgtgctcgaacacatgcccgttgggcctgatgcaatcttaagatacgtccgccgggtgggtgaccccccccaaccactgcctgaggagccgatggaagtgcagggcgccgagcgtgcctcacctgagccccagagggagaacgcatctccagcccctggaactactgctgaagaggctatgtctcgcggcccaccacctgcccccgagggcggcagcagggacgaacaggacggtgcgtctgccgagacagaaccatgggccgccgccgtgcctccggaatgggtgccaatcatccagcaagatatccaaagtcagaggaaggtgaagccccagccacccctgagcgacgcctacctgagcggcatgcccgccaaacgccgaaagctccggtcagatatacagaagcggctccaggaggaccccaactacagccctcagaggttcccaaacgctcagcgggcatttgctgatgacccctag

SEQ ID NO: 109665 - DNA, 2712 bp, synthetic construct
  misc_feature 1..2712: note = Description of Artificial Sequence: Synthetic coding sequence
  source 1..2712: mol_type = other DNA
atggagccaaacgatagcactagtacagcagtggaagagccagatagtctcgaagtgttggtgaaaaccctcgactcgcagacccgaacgttcattgtaggcgctcagatgaacgtgaaggagtttaaggagcacattgctgcgagcgtatctatcccatcggagaagcagaggctgatctatcagggccgggtactgcaagacgataagaagttacaggaatacaacgtgggtggtaaggtcatacatctggtggagagggctcctccacagacccacttgccctcgggtgcatcgagtggaaccggctctgcatcagcaacacacggcggcggcagtcccccagggactcgcggtcctggcgcttcagtgcatgaccgcaacgcgaattcctacgtgatggtgggtacctttaacctgcccagcgacgggtccgccgtggacgtgcacataaatatggaacaagcgcctattcagagtgaaccaagggttagacttgttatggctcagcacatgatcagagatattcagacacttttgtcacgcatggaatgtcgggggggaccccaaccacaacacagtcagccccctccccagcctcctgccgttacaccggaaccagtggctctgagcagtcaaacctctgagccagtagaatctgaagccccgcccagagaaccaatggaagctgaggaggtggaggaaagagcaccagcccagaatccagagcttactcccggacctgcaccggctgggcccacaccagccccagaaactaatgctcccaaccacccctctccagcagaatacgtggaagttctgcaggagttgcagaggctcgagagcagactccagccatttctgcagcgatactatgaggtcctcggtgcagcggccacgactgactacaacaacaaccacgagggcagagaagaggatcagcgcctgattaatcttgtgggtgagagcctccggttgttggggaacacttttgtcgccctaagcgacctgcgttgcaacctggcttgtaccccgccgaggcatttacacgtcgtgcgccctatgtcacactacacgacccccatggttttacaacaggccgcgatcccaatccagattaacgttggtaccacagtgacgatgacggggaatggcacaagaccaccaccaacccccaacgctgaggcacccccgcctgggcccggtcaggcatcctcagtggccccctcgagtacaaacgtcgagtcctcagctgaaggagctcctcccccaggcccggcacctccgcctgccactagccaccctcgagtcatacggatttcccatcaaagcgtggaacccgttgtaatgatgcacatgaacattcaggattccggcacccagcctggcggtgtaccttccgcacccacagggccactcggcccacctggtcacggacagactttagggcagcaggtaccaggcttccctacagcccccacacgcgttgtgatagcgcggcctacgcccccccaggccagaccctcccatccggggggaccacccgtgtctgggacccttggagcgggcctgggcactaacgcttcactcgcccaaatggtctcaggactcgtaggccagcttctgatgcagccggtcttagttgctcagggtactcccggaagccccggtggactcggcttggagagtctttctccagagtttttcactagcgtagtgcaaggcgtgttatcaagcctgttgggtagcctgggagcgagagctgggagctctgagtctatcgccgcatttattcagcgactttcgggatccagtaatatctttgagcccggggcggatggtgccttgggcttcttcggggcgctgcttagcttgctgtgccagaacttcagcatggtcgacgtggtgatgcttttgcacggtcatttccagccactgcagagattgcaaccccagctgaggtctttcttccaccagcattaccttggaggccaagaacctaccccttcgaatatacggatggcaactcacaccctgataactgggttggaagaatatgtgagagaaagcttctcccttgtccaggttcagcccggcgtcgacatcatccgtacaaacttggagttcctccaggagcagttcaacagtatcgctgctcacgtgttacactgtaccgattcggggtttggagctcgcctgcttgaactgtgcaatcagggacttttcgagtgcttggctctcaaccttcactgcctgggcggacagcagatggaacttgctgccgtgataaacggacggatccgaagaatgagcagaggggtgaatccaagcctggtctcatggttaactaccatgatgggcctgcgtctgcaggtcgtcctggagcacatgcccgtgggtccagacgctatcctgagatatgttaggcgggtgggagatccacctcagcccctgcccgaggaacccatggaagtccagggagctgagcgggccagtcccgaacctcaagagtgggtgcctataatacagcaagacatccagtcacagcgcaaagtgaagcctcaacccccccttagtgacgcttatctgtctggaatgcctgctaagcggcgaaagttaagaagtgacattcagaagagactgcaggaagaccccaattattcccctcaacggttccctaacgcccagcgagccttcgccgacgacccatag

SEQ ID NO: 109666 - DNA, 3489 bp, synthetic construct
  misc_feature 1..3489: note = Description of Artificial Sequence: Synthetic coding sequence
  source 1..3489: mol_type = other DNA
atggagccaaacgattccacctccaccgcggtggaagagcccgatagtcttgaagtgcttgtgaagaccctggactcccagaccaggacttttatcgtcggggctcagatgaacgttaaagagttcaaagagcacatcgcagcctctgtcagcatcccctcggaaaagcaacgactcatctatcagggtagggtgctccaagatgacaagaaattgcaggaatataacgtaggtggaaaagtgattcatctcgtggagagggccccacctcagacccatctcccaagtggcgcgagttcaggtactgggagcgctagcgccacccacggtggcggatccccaccaggaacccgggggccaggggcatccgtgcatgaccggaacgcaaattcttatgtgatggttggaacctttaacctgcccagcgatgggagcgccgtcgatgttcatatcaatatggaacaggctcccattcagtccgagccccgcgtgcggctggtaatggcccaacatatgatcagagatatacagaccttactctcaaggatggagtgtagagggggacctcagccacagcattcacagccgccgccgcaaccgcccgctgtgactcctgagccagttgctctgtcatcccagacatctgagccagttgagagcgaggcacctccgcgtgagcccatggaggcagaagaggtggaagagcgcgcacccgcccagaaccccgaactgactcccggacccgcgcccgccgggccgaccccagcgcccgaaacaaatgctccaaatcatcctagccctgccgagtacgttgaggtgctacaggaacttcagcggctcgagtctcggctgcaaccattccttcaacgatactacgaggtcttgggggcagcagctaccacggactataataacaatcatgaggggagggaggaggaccagagactgattaatttagtcggcgaatctttgcgactactgggcaatacctttgtggctcttagtgatttgcgctgtaatctggcctgtaccccaccacggcacctacacgtcgtgaggcccatgtcgcactacacaacacccatggtgttacagcaggccgctattccgattcagatcaatgttggcacaacggtgacgatgactggcaacggcaccagaccaccacctacgcctaacgctgaggcccccccccccggacctggccaggcaagtagcgttgccccttccagcaccaatgttgagagcagcgccgaaggcgctccaccccctgggccagctcccccacctgccacaagccatccgagggtgatccggataagccaccaaagcgtggaacccgtggttatgatgcacatgaacattcaggatagcgggactcagcccgggggagtcccgtccgcccccactgggcccttagggcctccggggcacggacagaccctgggttctactttgattcagctgcctagtttgccccccgagttcatgcatgcagtcgcccaccagatcacgcatcaggctatggtagccgccgtcgcctccgcggcagcaggacaacaggtgcctggttttcccacagcacccactcgtgtagtgatcgcaagaccaactcctccacaggctaggccttcgcaccccggtggcccccccgtcagcggcactctgcagggagcaggcctcggcacgaatgcatctctggcacagatggtgtccgggctggtaggacaactgctgatgcagcctgtactggtcgcgcagggaactcccggcatggcccccccgccggcgcccgcgacagcttccgcctctgccggaacaacaaataccgctaccactgcagggcccgccccagggggtcccgcgcaaccacccccaaccccccagccttctatggccgacctgcagttttcccagttactagggaacctgctgggccctgctgggcctggggctgggggctctggggtcgcgtcacccactattacagtcgctatgcctggtgtgccagcctttttgcagggcatgacagactttttacaagcaacccagaccgccccacctccgccgccaccacccccaccgcccccccccgcaccagagcagcagaccatgccacctccaggaagcccaagcggcggcgcgggctcacccgggggactcgggctcgaaagcttatcaccagaatttttcacatccgtggtacagggagtgctgtctagtctcctcgggtccctcggagcacgtgctgggtcaagtgaatccatagcagccttcatacagagactcagcgggtctagcaacatcttcgaaccaggagctgatggagcattaggattttttggagccctcttgtcacttctttgtcaaaacttttccatggttgatgtggtgatgttactacacggccatttccaaccactccagagacttcagccacagctccggagtttcttccaccagcattacctcggcggccaagagccgacccccagtaacatccgaatggcaacccacacgctgattacagggctcgaggagtacgtgcgggaaagcttttctctcgtgcaagtgcagccaggtgtagacatcatccggaccaaccttgagttcttgcaggagcagttcaacagcattgcagctcatgtgctgcattgtactgacagcgggttcggcgcacggctgctggagctctgtaatcaagggctgtttgagtgcctggccctgaacttacactgtctcggaggccaacagatggagctggccgccgtaatcaacggccgaatcaggcgcatgtccagaggtgtgaatccaagtttagttagctggcttacaaccatgatgggcctgcgactccaggttgtgctggagcatatgcctgtgggacccgatgcaattctgaggtatgtgcgtagagtgggagatcccccacaacctctgcccgaagagcctatggaggtacaaggagccgaacgggcaagccccgagccccagcgcgagaatgcctccccggctcctggcactacagctgaagaagccatgagccgcgggccgcccccagcacccgaaggtgggagcagagacgaacaggatggggcctcggctgagaccgagccctgggctgccgccgtgccccctgagtgggtgccgattatccagcaggacatacagtctcagcgaaaggtcaagccgcaaccccccctctcggacgcgtatctgagcggcatgcccgccaagcggcgaaagacaatgcaaggcgagggtccacagctgctgttatctgaggccgtgtctagagctgccaaggcggctggggccaggccgctgacctctcccgagagtttaagcagagacttggaggccccagaggtccaggaatcttacagacagcagctgcggagcgacattcagaaacgtcttcaagaggatcctaactacagtccccagcggtttccgaatgctcagagggccttcgccgacgacccttag

SEQ ID NO: 109667 - DNA, 3234 bp, synthetic construct
  misc_feature 1..3234: note = Description of Artificial Sequence: Synthetic coding sequence
  source 1..3234: mol_type = other DNA
atggaacccaacgactcaaccagtaccgctgtagaggaacccgacagcctagaagtgctcgtgaaaactctcgacagtcagacacgcacattcattgtgggagcacaaatgaacgtgaaagagtttaaagagcacattgccgcgtccgtgagcattcctagcgaaaaacagaggctcatctaccagggtcgcgtgctccaggacgataagaagctccaagagtacaatgttgggggaaaggtgattcatctggtggaacgggcaccaccgcagacccacctgccctccggcgcgagctcgggcaccggttccgcatctgctacacacggaggtgggtctccaccaggcacccgtgggccaggcgcctccgtgcacgacagaaacgccaattcgtatgtcatggttggtacctttaaccttcccagcgacggctctgccgttgacgttcacataaacatggaacaggccccaatccaatccgaaccacgcgttcgactggtgatggcacagcacatgatcagagatattcagacgctcctctctcgaatggagtgtaggggcgggccccagccccaacacagccagccaccaccccagccccccgctgtcacacctgaacccgttgccctgtcctcacagacttctgagcctgtagaatcagaggccccacctcgcgagcccatggaagccgaggaggtggaggaacgggctccagcccaaaatcccgagctgacgcctggccccgcccccgccggccccaccccggcccccgaaaccaacgctccgaatcacccatcacctgcggaatacgttgaagttttacaggagctccagaggctggagtccaggcttcagccttttctccaaaggtattacgaggtactaggcgccgctgcaactacagattacaacaacaaccacgaaggccgtgaggaagatcagcgactgattaatctggtgggcgagagccttcgccttctgggaaatacatttgtcgccctgtcagatctgaggtgtaacctggcatgcaccccaccccgccacttgcacgtcgtccgccccatgtcgcactacacaacgccaatggtactgcaacaggcggctatccccattcagataaacgttggaacaaccgtgactatgactggaaatggaacgcgaccccccccaactccgaatgcagaagcacccccgcctggacctgggcaagctagctctgtcgcaccttcatccaccaacgtggaaagcagcgccgaaggcgccccacccccaggtcctgccccaccgccggcaacatcccatccccgggttatccgtatttcacatcagtcggtagaaccggtagtcatgatgcacatgaacattcaggactctggcacacagcccgggggcgtgccgtctgctcctactgggccactaggcccccccggacatgggcagaccctcggacagcaggtgcccggcttccctactgcccccacccgcgtggttatcgccagaccaactccaccacaggctcgaccatcccaccctggaggcccccctgtgtccggaaccctccagggggccggccttgggactaacgctagtctcgctcaaatggtgagcgggctggtgggtcagttgctaatgcagcctgtcctggtggcccaggggacccccggcatggcaccgcctccggcccccgccaccgccagcgcttccgccggcactactaacacagctactaccgccggcccagctcccggcggcccagcgcagccaccgcccaccccacagccctcaatggcagatctgcagttcagccaactgctcggtaatctgttgggcccggctggaccgggagccggtggtcctggtgttgcaagtcctacaattactgtggccatgcccggtgttccggccttcttgcagggaatgaccgacttcctacaggccacgcagacagctccaccccccccccccccccctcctcctccgccccccgctcctgagcagcagacaatgccccctccaggctcaccaagcggcggagctggaagtccaggtggactgggccttgaatcactctctcccgagtttttcacatccgtcgtgcagggagtgctttcttctctgctgggtagccttggggctagggcaggctccagcgagtctatcgccgcctttatacagaggctgtcagggtcctctaacatttttgagccaggcgcggacggcgctctgggcttttttggagccttgctgtcactgctgtgccagaatttttccatggtggacgtggtgatgcttctacacggtcacttccaacccctgcagaggctacagcctcagcttcgcagtttttttcaccaacattacctgggaggccaggaacccaccccgtccaatatccgaatggccacacacacgctaattaccggactggaagagtatgtacgggaaagctttagcctggtccaggtgcaacccggggttgatattataagaacaaatctcgagttcctccaagagcagtttaactcaatcgcagctcacgtcctgcactgtacagactccggattcggggctcgcctgttggaactgtgcaaccaaggcttattcgagtgcctggccttaaatctgcactgtttaggaggtcagcagatggagctcgcggcggtgattaatggcaggatcagacgaatgtccaggggcgtgaacccatctctcgtttcctggctgacaaccatgatggggttgagactccaggtggtcttagagcatatgcctgtgggacccgacgctatactgagatacgtccggcgagtgggcgatcctccacagcctttgcccgaggagcccatggaggtacagggagcagagagagctagccctgaacctcaaagggagaatgcgtctccagcacccggcacaactgccgaggaagccatgagtaggggcccaccaccagcccccgagggaggaagcagagacgagcaggatggcgctagtgccgagaccgaaccatgggctgccgcagtgccccctgagtgggttccaatcatccagcaagatatacagtcgcagagaaaagtcaagcctcagcccccgctgtctgacgcatatttgagtggtatgcctgcgaaacgccgaaagctcagaagcgatatccagaagaggctccaggaggaccccaattactccccacaacgctttcccaacgcccagagggcctttgctgatgacccctag

SEQ ID NO: 109668 - DNA, 2712 bp, synthetic construct
  misc_feature 1..2712: note = Description of Artificial Sequence: Synthetic coding sequence
  source 1..2712: mol_type = other DNA
atggagcccaatgattccacgagcactgcggtggaggaaccagactctctggaagttttggtgaagacattggattcccaaacgcgaaccttcattgttggggcccagatgaacgtaaaagaattcaaggagcatattgccgcatctgtgtctataccatccgagaagcagcgattaatttatcagggccgcgtattacaggacgacaagaagctgcaagagtataatgtgggtggaaaggtgatccatctggtggagagagccccccctcagacccacctgccctcaggcgcttcgagcgggaccggcagcgctagcgccacccacggcgggggctctccacccggcacacgcggccccggtgcatcagtacatgaccgcaacgccaactcatatgttatggtgggcacctttaacctaccatcagacggctctgcggtagacgtacacatcaacatggaacaggccccgattcagagcgagcctagggtgaggctggtaatggcgcagcacatgattcgagacatacagaccctcctgagccgaatggagtgcagagggggtccacagccacagcacagccagccacctcctcagccgcccgccgttaccccagaacctgttgcactcagtagtcagacaagcgagcctgtagagagcgaagccccaccgagggaaccaatggaggcagaggaggtggaggaaagggcccccgctcagaatcctgaattgaccccagggcctgcaccagcaggtccgaccccagcccccgagacgaacgcgcctaatcatccatcacccgcggaatacgttgaggttctgcaggagctgcaacgcttggagtccagactgcagccttttctccagcggtactacgaggtgctgggggcagctgccacaaccgactacaacaacaaccacgaaggaagggaggaggaccaaagacttatcaacctcgtgggcgaatccctacgactgctcggcaacactttcgtcgctcttagtgacttgaggtgcaatctggcttgcacacccccacggcacctccacgtggtacggccaatgagccactacacaacacctatggttctgcaacaggcagctatccccatacagataaatgtgggcacaactgtaaccatgactggcaatggcaccagaccaccgcccactcccaatgcagaggcgcctcccccaggaccagggcaagcttctagcgtggctccatcctctacgaacgtggagtcctctgcagagggagcccctccgccaggccctgcacccccccctgcaacctcacacccaagggtgattcgcatctcccaccagagtgttgaacccgtcgtgatgatgcatatgaacatccaggatagtggtacacaaccggggggagtgccttccgctcctacaggcccattgggcccccccggtcacggtcagacattgggacaacaggtgccaggtttcccaaccgctcccacacgcgttgtcatagcgcgtcctaccccaccccaagctcggcctagtcatcccggaggcccacccgtgagcggcactttgggggctggcctgggtacaaacgcttccttggctcaaatggtctcggggctggttggtcagttactgatgcaacccgtgctggttgcccagggcacaccaggttctcctggcgggctaggattagagtctttatcacctgagttctttacctccgtagtccagggagtactgtcctccttattgggttcactaggggcacgcgctggatccagtgaatcaatcgccgctttcattcagaggctgtccggatcaagtaatatcttcgagcccggagctgacggggccctagggttttttggggcgttgctttctctcctttgccagaacttcagtatggttgacgttgtgatgctccttcacgggcactttcaacccctccagcggttgcagccacagctgagaagttttttccatcagcattatctgggaggccaagaaccaaccccatcaaatatacggatggcaactcacactttaataacaggcctagaggagtacgtgcgagagtcttttagcctggtccaagtgcagcccggcgtggacatcattaggaccaacttggaattccttcaggagcagttcaactccatcgccgctcacgtgctgcattgcaccgattctggattcggcgcacgcctcctggagctgtgtaaccaggggttgtttgagtgcctcgcccttaacctacactgcctgggcgggcagcagatggagctcgccgccgttattaacggtcggattcgccgcatgtctcgcggggtgaacccaagcctcgtaagctggttgaccaccatgatgggattgcggctgcaggtcgtgctagaacatatgccggtagggcctgacgcaattctgagatatgtacgccgggtgggcgatccacctcaaccccttcctgaggaacccatggaggtgcagggggcagagcgggcctctcccgaacctcaggaatgggttcctattatccagcaggacattcagagtcagcgaaaggtgaagccccagccaccactgagcgacgcctatctgtctggcatgcctgctaagagaaggaagctcaggagtgatatccaaaagaggttgcaggaggaccccaactatagtccgcagagatttcctaacgctcagagggccttcgcagacgacccgtag

SEQ ID NO: 109669 - DNA, 2712 bp, synthetic construct
  misc_feature 1..2712: note = Description of Artificial Sequence: Synthetic coding sequence
  source 1..2712: mol_type = other DNA
atggaaccaaacgactccacctccactgccgtggaagagccagatagtctggaggtgctagtcaaaaccttggatagccagactcggacatttattgtgggggcacagatgaacgtcaaggagtttaaagagcatattgcggcatcggtgtcgataccgtctgagaaacagagattaatctaccagggccgagtgctgcaggatgacaaaaaactccaagaatataatgtaggtggtaaagtcattcatttggttgagcgcgccccgccgcagacgcacctgcccagcggagcttcctctggcacgggcagcgcttcagctacccacggcggaggcagcccacctgggaccaggggccccggagcctcagtacacgaccggaacgcaaattcatacgtgatggtcggaacgtttaatctgccctccgacggaagcgcagtggatgtccacatcaacatggagcaggctccaattcagagtgagccacgggtcaggctcgtaatggcccagcatatgatcagggacatacaaactctgcttagcaggatggaatgtcgcggtggccctcagcctcagcatagccagcctccccctcagccccccgctgtgactcctgaaccagtcgccctatcatctcagactagcgagcccgtggagagtgaagctccccctcgcgagcccatggaggctgaggaggtcgaagagcgcgcccccgcccagaatccagagctgaccccaggacctgcgccagcaggcccaacccccgcacccgagactaacgcgcctaaccatccaagccctgcggagtacgtggaagttcttcaagagctgcagagacttgagtctcgccttcagccttttctgcagcggtactatgaagtactgggagcagccgccactacagactacaataataaccacgaggggagagaggaagaccagcgactaattaatctggtgggtgaatccctgcgtttactggggaacacatttgtggcactatcagaccttcgctgtaacctggcatgcacgcccccacgccacctgcatgtggtccggccaatgtcacactatactactcctatggtgctgcagcaggccgccatacccattcagatcaacgtcggaacaacggttactatgacaggcaatggaacgcgcccaccccccacacccaacgcagaggccccaccgccggggccaggccaggcgagctctgtggcaccctcctctaccaacgtcgagtcgtctgctgagggagctccaccccctgggcctgctccacctccagctacaagtcacccacgcgtgattaggatctctcaccagagtgttgaaccggtcgtgatgatgcacatgaacatccaggactctggcacacagccgggaggcgtgcccagtgcgccaaccggcccactggggcctcccggtcacggacaaacactagggcagcaggtacctggatttcctactgcccctaccagggtcgtgatcgctagacctactccaccacaggctcgaccttcccaccctggcggaccgcccgtcagtggcacgctgggagccggactcggaactaatgcatctttggcacagatggtgagtgggctcgtcgggcagctgctgatgcagccggtgctggttgcacagggcacccccggctcacctggcggactagggttggaaagtttgagccccgagtttttcaccagcgtcgtgcagggcgtgttgtctagtctgctgggttccctgggggcacgagcgggctcatctgaatctatcgccgcattcatccagagactttccggcagttctaatatctttgagcccggagccgatggagcactgggcttttttggcgcccttctctccctgctttgccaaaactttagtatggtggatgtcgtgatgctcctacacggccacttccagcctctgcaaagactgcaaccccagcttaggagcttctttcatcagcactacttgggcggccaggaacctacgccctctaatatccggatggccacacacactctcataacaggtctcgaggagtacgtccgggaatcattcagcctcgtccaggttcaacccggcgttgacataatcagaacaaacctcgagtttttacaggaacagtttaacagcattgccgcgcacgtgttgcactgcaccgactccggattcggggcccggctgctggagctgtgtaatcagggactgtttgagtgccttgccctaaatcttcattgccttgggggacaacagatggagctggcggcagtaatcaacgggcggatcaggaggatgagcagaggcgtcaacccatctttggtgtcttggttgaccactatgatgggcctgaggctccaggtggtcctggagcatatgcctgtgggccccgacgccattctcaggtacgtgaggagggtaggtgacccgccccagccacttcctgaggaacctatggaagtgcagggagctgaaagggcatcacccgaacctcaagagtgggttccgataatccagcaggatatccagagtcagaggaaggtcaagcctcaacctcctctgtcagatgcttacctgtccggcatgccggctaagagacgtaagctgcggtctgacatccagaagagactgcaggaggaccctaattacagcccacagcggtttcccaatgctcagagggccttcgccgacgacccgtag

SEQ ID NO: 109670 - DNA, 3489 bp, synthetic construct
  misc_feature 1..3489: note = Description of Artificial Sequence: Synthetic coding sequence
  source 1..3489: mol_type = other DNA
atggaacccaatgatagcacctcaacagctgtggaggaaccagattctctcgaggtacttgtaaagaccttggattctcagactcgtactttcatcgtgggggcccagatgaacgtgaaggaattcaaggagcatatagctgccagcgtgagcattcccagcgaaaagcaaagactgatttatcaaggacgcgtgctccaggatgacaagaaactccaggagtacaatgttgggggtaaagtcatccatttggtggagagagctcccccccagactcacctgcctagtggcgcaagtagcgggacgggctctgcctctgcaacgcacggcggaggaagtccacctggaactagaggccccggcgcttctgtgcacgacaggaatgccaacagctacgtaatggtaggtaccttcaatcttcccagcgacggcagcgccgtcgacgtccatattaacatggaacaggcgcccattcagtccgaacccagagtgagacttgtcatggctcaacatatgattagggatatccaaactctcctctctcgcatggaatgccgggggggacctcagccccagcacagtcaaccacctcctcagcctccggctgtgactccagagccggttgcgttatcatcccagacttccgaacctgtggagtctgaagcacccccacgcgagcctatggaagccgaagaggttgaggaacgcgcaccagcgcaaaaccccgaactgacccctggcccagcacccgccggaccaaccccagccccagagaccaacgccccaaaccatcctagcccagctgaatacgttgaagtgctacaggagctgcagcgactagagtcccgactgcagccattcctccagcggtactatgaggtactaggggcagccgctaccacggattacaacaataaccatgaaggccgagaggaagaccagcggctgattaacttggtgggcgagtcgttgcgattactggggaacacctttgtcgccctcagtgacctgagatgcaatctcgcttgtacccctccacgtcacctgcacgtggtgagacccatgtcccactacacaactcccatggttctacaacaggccgcgatcccaattcaaatcaacgtcggcaccacagttaccatgactggcaacggcacgcgacctcctcccacacctaatgccgaagctcccccacccggacccggacaggccagctcggtggcccccagtagcaccaatgtagaaagcagcgctgaaggtgcaccccctcctgggccagctcctcctcccgctacgtcccatccaagagtcattagaatttcccaccagtctgtggaacctgttgtgatgatgcacatgaacattcaagacagtggaacgcaacctggtggcgttccctccgcacctaccgggccccttggccccccgggccacgggcagactctaggatccaccctgatccaactcccaagcctgccaccagaatttatgcacgctgtcgcccaccagattacccatcaggctatggtagctgcagttgcctctgctgcagctggccagcaggtgcccggctttcccactgcccccacacgggtggtaatcgcgcgcccaacacctccccaagcccggccctcccacccaggcggcccgccagtgtccgggacattgcagggtgccgggctggggactaacgcgtccctcgctcagatggtttctggcctcgtgggtcagcttctgatgcagcccgttctggtagcacaagggacaccaggaatggcaccacccccggctccagccactgccagtgcttcagctgggactactaacacagccacgacagccggccccgcacctggaggtcccgctcagcctccgccgacaccccagccatccatggccgacctgcaatttagtcagctgctcggcaacctcttgggaccagcaggaccaggggccggaggatcaggagtggcctccccgacaatcacagtcgctatgccaggagttcccgcgttcctgcaggggatgacagattttctccaagcgactcagactgcccctccaccaccacctcccccaccccccccaccaccggcaccagagcagcagacgatgcctcccccgggcagcccttcaggaggcgcagggtcaccggggggtcttggcttagagtctctgtctcccgagtttttcacatccgttgttcaaggggtgctaagttccctgctgggctctctaggggcccgggccggttcatcagagtccattgccgccttcatacaacgcctgtcgggaagctcgaacatattcgagcccggcgccgatggcgccctgggttttttcggtgccctactgtcattgttgtgccaaaatttctctatggtggatgtggttatgctgttgcatgggcacttccaaccactgcagcggctgcagccacaattacgctctttcttccaccagcattaccttgggggccaggagcccaccccaagcaacataagaatggctacccacaccttgatcacgggtctggaagaatacgtaagggaatccttctccctggtccaggttcagcccggggttgatatcatcaggaccaatctggaattcctgcaggagcaatttaattccatcgccgctcatgtcctgcactgtacggattctggctttggggcgcggctgttagagctgtgcaatcagggattatttgagtgcctggccttaaatctccattgtctcggcgggcagcaaatggagctggcagccgttatcaatggcaggattcgacgcatgagccggggagtgaatccaagccttgtcagctggttgacgaccatgatgggtttacggctgcaggtggtattagaacacatgccggtaggaccggatgcgattctccggtatgtaagaagagtaggggaccctccgcagcctttgccggaggaaccaatggaggtccagggcgccgagagagcctcccctgaaccccagcgggaaaacgccagtcccgcgcctggaactacggcggaagaagccatgtcaagaggcccccctccagctcccgaaggaggaagtagagatgagcaggatggcgcatcggccgaaacagaaccttgggccgccgcggtgccaccggaatgggtccctatcatacagcaggacattcaaagccaaaggaaagttaagccgcagccacccctatctgatgcatatctgagtggcatgcctgctaaaaggagaaagacaatgcagggggagggtccacaattgctactttcagaggctgtcagccgggctgctaaggcagccggggcccgacccctcacatcacccgaatctctctctagggatttggaggctcccgaagtccaggagtcttataggcagcaactccggagtgatatccaaaagaggctgcaggaagatcccaattactctcctcagcggttccccaacgctcaacgtgcctttgccgatgatccgtag

SEQ ID NO: 109671 - DNA, 3489 bp, synthetic construct
  misc_feature 1..3489: note = Description of Artificial Sequence: Synthetic coding sequence
  source 1..3489: mol_type = other DNA
atggaaccgaacgacagcaccagcactgccgtcgaggagcccgacagtctggaagtcctcgtaaaaactctggacagccaaacacgaaccttcatagtcggtgctcagatgaatgtgaaggaatttaaggaacatattgccgcctccgttagcatcccaagcgagaagcagcgcctcatttaccagggtcgcgtgctccaggacgataaaaaactgcaggaatacaatgtcggcggcaaagttatccatctagtggagcgcgcgcccccacagacacatcttcccagtggggcttccagcggcacaggctctgcatctgccacccatgggggaggatccccgcccggcaccagaggtccaggagctagcgtgcatgatagaaatgctaactcctacgtcatggtgggcactttcaacctgccctccgatggctccgcagtggacgtccacattaatatggagcaggctccaattcagtcagaacctcgagtgcggctggtaatggctcagcacatgattagagacatccagacattattgtctaggatggagtgccgcggaggcccacaaccacagcattctcagccacctcctcagcctccggccgtcactcccgagcccgtggcactgagctcgcaaacatctgagccggtcgaaagtgaggcccccccccgagaaccaatggaggccgaggaagtggaggaacgcgctcccgcacagaatcctgaattgacacctggacctgcccccgcaggacccacgcctgcaccggagacgaacgccccaaatcacccttccccggccgagtatgtggaggtcctccaggagttgcagcgcctggagtcaagacttcaaccttttctccaacgctactatgaagtgttgggagcagccgctactaccgactataacaacaatcacgaaggccgggaggaggaccagcggctaatcaatctggttggcgagtccctcaggctgttgggaaatacattcgtcgccttgtccgacctgaggtgtaatttggcctgcacgccaccacgccatttgcacgttgttaggcctatgagccactacacaacaccaatggtgctacagcaggctgccattccaatccagattaacgtaggcacgacagtcacaatgaccggcaacggaactcgccctcctccaactccgaacgcagaagcccctccaccaggcccaggtcaagcctcctccgtggctccctcctccaccaatgtcgagtcttcggccgagggtgctcctccacctggccccgcccctcctccagccacgtcacatccccgcgtgatacgcatctcacatcagtccgtcgaacccgtggtgatgatgcacatgaacattcaggactctgggactcagcctggaggcgtccccagcgcaccaactgggcctctcgggcctcctgggcacgggcagactttgggttcaacccttattcagctcccgtcactacctcctgagtttatgcacgcagtcgcacaccagattacacatcaggccatggtagctgccgtcgcatctgccgcagcaggacagcaggtgcccggctttccaactgctcctactcgggtcgttatcgcgcggcctacaccgccacaggctcgccctagccaccctgggggcccaccagtgtccggcactttacagggtgcagggctcggcactaacgcgtctctcgcccaaatggtctccgggcttgtggggcagttactgatgcagccagtcctggtcgcccaagggaccccgggcatggccccgcctccagcaccggcaaccgctagcgcaagcgccggaacaactaatacagccaccaccgccggccccgcaccgggtgggccagctcagccaccccctaccccacaacctagcatggcagacctgcagttttcccaactgctgggcaaccttctggggccggccggacctggcgctggcgggcctggcgtggctagccctacaataacggtggcaatgcctggtgtaccagcattcttacaggggatgactgatttcctgcaggcaacccagaccgcaccccctccacctccgcctcctccaccacctcctcctgcccccgagcagcagacaatgcctccaccaggcagccctagcggaggtgccggctcccccggaggacttgggttggaatcacttagcccagagttttttaccagcgtagtccagggggtcttgagcagtttgctaggttctcttggagcccgcgcaggctccagcgagagtattgcagcatttatccagagactcagcggatcctccaatatcttcgagccaggagccgacggggcactgggcttcttcggtgcattgctaagtctgttatgccaaaatttctcaatggtggatgtcgttatgctactgcatggacactttcagccactccaaaggttgcagccacagctgcggagtttttttcatcagcactacttgggaggacaggagcccactcctagtaacatacggatggccacccacacactaatcaccgggctggaagaatacgttagagagtccttcagtctggtccaggtgcaacctggcgtggacatcattagaacaaatcttgagtttctgcaagaacagttcaacagtatagccgctcacgtgcttcattgcactgactccgggtttggcgctagactcctggagctatgcaatcaaggattgttcgagtgtctggcactgaatctccactgcctggggggacagcaaatggagctagcagccgttatcaatggaagaatcaggaggatgtctcggggggttaacccaagcctggtctcatggctgaccaccatgatgggactccggttacaggtggttcttgaacatatgcccgtgggtcctgatgcaatcctgcgatatgtaaggagggtgggggatcctccgcagcccctgcctgaggaacccatggaggttcagggcgctgagagggccagtccagaacctcagagggaaaacgcctctcccgcgccggggactaccgctgaggaagctatgtctcgcggaccacctccggctcctgaaggcggatcacgcgatgaacaggatggcgcttccgcagagaccgaaccttgggctgccgcagttccgcccgaatgggtgccaattatacagcaggacattcagtcccaaaggaaggtgaagccgcagccccccttgagtgacgcctacctcagcggcatgccagccaagcgtcgtaaaacgatgcagggtgagggaccccaactcctgctgtccgaggcagtgagtcgggcggcgaaggcagccggagcgagaccgcttacctctcctgaatctctctcgagagacttagaggctcccgaagtgcaggagagttacagacagcagctgaggagcgacatccagaaaaggcttcaggaagatccaaactatagcccacaaagatttcccaacgcacagagagccttcgccgatgatccatag

SEQ ID NO: 109672 - DNA, 3489 bp, synthetic construct
  misc_feature 1..3489: note = Description of Artificial Sequence: Synthetic coding sequence
  source 1..3489: mol_type = other DNA
atggaacctaacgattctaccagtacagccgtggaagaacccgactctctggaggtccttgtgaaaaccctagattcacagacaaggacatttattgtgggagctcagatgaatgtgaaggagttcaaagagcacatcgccgcctccgttagtatcccctcagaaaagcaaaggctgatctatcaagggagggtcttgcaagacgacaagaagttgcaggagtacaacgtgggtgggaaggtgattcacttggtcgaacgtgccccccctcagactcacctgcccagcggggccagttctggaactggcagtgcgtctgctacccatgggggaggctcacctccaggcacacgcggtcctggggctagcgtccacgatcgcaatgctaatagctacgtgatggtgggaacgtttaatttaccgagcgacggctccgctgtggacgtccatatcaatatggaacaggcacccattcagagcgagccaagagtgaggctggtgatggctcagcacatgatcagagacatccaaacactgttgagccggatggaatgccggggaggaccacagccgcagcactctcagcccccgcctcagcctcccgcagtgacccccgagcccgtagcactctcatcacagacctctgaaccagtggaatctgaagctcccccacgcgagcccatggaggccgaagaagtcgaagagcgggcgccagcccagaatcccgagctaacccctggcccagctcccgcgggccctacaccggcaccagaaactaatgcaccaaatcacccaagccccgccgagtacgtcgaggtgctgcaggagctgcagcgccttgagtctagactccagccgttcttacaacggtattacgaggtcctcggcgcagcagctacaactgattataacaataaccacgaaggccgcgaagaggatcaacggctaatcaacctggtgggggaatccctccggctcctcgggaacacctttgtggccctgagtgacctgcgatgtaatctggcttgtacccccccccgacatctccatgttgtccggcccatgagtcactacactaccccaatggtactacaacaagccgctatcccgatccagatcaacgttgggaccacagtaaccatgaccggaaatggaactcggccaccaccgacaccaaacgccgaggcaccaccccccggccccgggcaggcctcctctgttgctcctagtagtaccaacgtagaaagctcagccgagggggctcctcctccaggcccggcacccccacccgccacctcccacccgcgggtcatacggatcagccaccagtcagttgagcctgtcgtgatgatgcacatgaatatccaggacagtgggacccaacccgggggtgtcccctccgcaccaacaggaccattgggacccccaggtcatggtcaaacactgggcagcacgttgattcagctcccgagtctgccacccgaattcatgcacgcagttgcccatcagatcacccatcaagccatggtggcagcagtggcctctgctgctgctggccagcaggttccagggttccccacagcccccacgcgggtggtaatcgcacgccctacaccacctcaggccagaccttcacaccctggcggaccccccgtgagtggaactctccaaggcgccggtctgggaacaaatgcgagcctcgcccaaatggtgagcgggcttgtgggccagctgctcatgcaaccagttctcgtggcgcagggcacccctggaatggccccaccccctgccccggccaccgcttctgcaagcgccgggacaaccaacaccgcgactacagctgggcccgcacccggggggcccgcccagcctccacctactccccagccctctatggccgatctccagttctcacaactgctgggtaatctgctggggccagctgggcctggcgcgggtggatccggcgtggcctcgccaacaattactgtggccatgcctggagtgcctgcattcctccaaggcatgacagatttcctgcaggccacacagactgcaccaccccctcccccgccccccccacctccacctcccgccccagagcagcaaacaatgcctccccctggaagcccctcaggaggagccggttctccgggaggtctcgggctcgaaagtctgtcacctgaattcttcactagtgtcgttcagggggtgctatcttcacttctaggatctcttggggcgcgcgccggcagctctgagtccattgccgccttcatccagaggctctcaggctcatccaacatttttgaacctggagccgacggcgcactcggcttcttcggagcactgttaagcctactatgccagaacttcagcatggtcgatgtggtgatgctgttgcacggtcactttcagccactgcaaaggctacagcctcagctgcgctctttcttccatcagcattacctggggggtcaggaaccaaccccctcgaacatcaggatggctactcataccctcattacaggactagaagagtacgtgcgggagtcattcagcttggtgcaagtacagcctggagttgatattatcagaactaatctggaatttctccaggagcagtttaacagcattgctgctcacgttttgcactgcacggattccgggttcggggcgcgccttttggagttatgtaatcaaggcctgttcgaatgcctggctctcaacctccactgcctcggaggacagcagatggaactggctgcagtcatcaatgggcgaattcgtcgaatgagccgcggcgtgaaccctagtctggtctcatggctcacaactatgatgggccttagactgcaagtagtgctagagcacatgcccgtgggtcctgacgccatccttaggtacgttcggcgagttggcgatccaccacagcctctgcccgaagagccaatggaagtgcaaggcgcagagagggcaagtccagaacctcaacgggaaaatgcgagtcccgcacctggcaccacagccgaagaggccatgagcagaggcccccctccagcaccagagggagggagccgcgacgaacaagacggggctagcgccgaaacagaaccctgggccgccgctgtgcctcctgaatgggtccccatcatccagcaggatattcagtctcagcgcaaggtgaagccccaaccacccctctctgatgcttatctgagcggaatgcccgcgaagcgacgaaagacaatgcaaggggagggccctcagctgctcctctccgaagcagtgtcccgcgctgctaaggccgcaggcgccagacccctgacctctcccgagtctttgtcccgggatctggaagctcctgaggtgcaggagtcataccgtcaacaattgcggtctgatatccagaagagactccaggaggatccgaactacagcccccagcgatttcctaacgcccagcgggctttcgcggacgacccatag

SEQ ID NO: 109673 - DNA, 3234 bp, synthetic construct
  misc_feature 1..3234: note = Description of Artificial Sequence: Synthetic coding sequence
  source 1..3234: mol_type = other DNA
atggagcccaacgactcaacaagtacagccgtcgaagagcccgattccctggaggtactggtcaagacactagatagtcagacccggacctttatagtgggtgcccagatgaacgtcaaggagttcaaagagcacattgccgcttccgtgtcgatcccatctgagaagcaacggctgatttatcaaggacgggtcctccaggacgacaagaaattgcaggagtacaacgtggggggtaaagtgatccatctggtcgaacgggccccaccccagactcatctccccagcggagcctcctctggcacagggtcggcctcagccacgcatggcggggggtcaccaccaggcaccaggggacctggcgcgagcgtacatgataggaacgccaatagttatgtgatggttggaacctttaacttacccagtgatggcagtgctgtggacgtccacattaatatggagcaagcacccattcaaagtgaacctcgtgtccgccttgtgatggcccagcatatgatccgggacattcagaccctgctctccaggatggagtgccgcggcggaccacagccacagcatagccaaccaccaccacagccccctgccgtcacgcctgaaccggtggcactgagctctcaaacaagtgaaccagtcgaatcagaggcacctccgcgtgaacccatggaggccgaggaggtggaagagcgggcacccgcccagaatcccgagctgactccaggtccggctcccgctggccctacaccggctcctgagaccaatgctccaaatcacccttcccccgccgagtacgttgaagtccttcaggaactccagcggttagaatccagactccagccattcctgcagcgctactatgaagtgttgggcgcagccgcgacaaccgactacaataataatcatgaaggacgagaagaagaccagaggctgatcaacttagtgggcgaaagtctacggctacttggcaatactttcgttgccctcagtgatctgcggtgtaatctagcctgtacaccaccacggcacctccacgtggtgcgtccaatgtcccactacaccacaccaatggtgcttcagcaagctgccattcccattcaaatcaatgttggcaccacagtgaccatgaccggtaatgggacccgcccccctccgactccgaatgccgaagccccacccccaggccccggacaggcaagcagcgtagcgccttcatccactaacgtggagagcagcgctgagggagctcctcctccaggccctgccccaccacccgcaacaagccaccctagagtaattagaatttctcaccaatcagttgagcctgtggttatgatgcacatgaatattcaggattcaggaacacagccgggcggggtgcctagcgcccccaccggccccctgggcccaccgggccatggccagacgctgggccagcaggtgcccggcttcccaactgcacccaccagggtcgtgatcgcgaggccaacccccccccaggcgcgcccctcccatccaggggggccacctgtctctggcacattgcagggcgccggattgggcactaacgcttctctggcacagatggtcagcggactggtcgggcagttactgatgcagccagtgctggtagcacagggcacacctggcatggctcctcctcccgccccagcaaccgcaagcgcgtcagcaggcacaaccaacacagccacaactgcgggacctgcacccggtgggcctgcccaaccgccacctactccgcagccaagcatggctgacctacaatttagtcagctactaggaaatcttcttggacccgccggtccaggggccgggggacctggtgtggctagccctaccatcaccgtggccatgccgggtgtgccagcgttcttacagggtatgactgacttcttacaggcaacccagactgctccacccccccctcctcccccgcccccaccacctcccgcccccgaacagcagaccatgccccctcccggcagtccatccggcggcgctgggtcccctggcgggctgggtctggagtccttgtcaccagagttctttacgtccgttgtccagggtgttctctccagcctcctgggcagcctcggcgcaagagctgggagctccgagagcatagccgctttcatccagcgcctgagtgggagtagcaacattttcgaaccaggtgcggacggcgccctgggtttctttggagccctcctatccctcttgtgtcaaaatttctctatggttgacgtggtgatgcttctgcatgggcatttccagcccctgcagcgcctccaaccccagctacggagcttcttccaccaacactacctgggtggacaggaacccacaccctccaatatccgtatggctacccacactttgatcacaggcctagaggagtacgtcagagagtcctttagtctagtgcaagtgcagccaggcgtggatataatccgcacaaaccttgagtttcttcaagaacaattcaacagcattgcagcccacgtgttgcactgcactgactctggctttggggcaagactgttggaactatgcaaccaggggctgttcgaatgtctggcgctgaacctgcactgtttagggggacagcaaatggaactcgctgccgttatcaatggtagaattcgcagaatgagtcgcggagttaatcccagtttggtgtcatggctaacaacgatgatgggccttcgccttcaagttgtgctggagcacatgccagtaggccccgacgcaatcctgcgatatgtgcgcagagtgggggaccccccacaaccactccctgaagaacccatggaagtccaaggggccgagagagccagcccggaaccacaacgcgagaatgctagccctgctcctggtacgacagccgaggaggccatgagccgcgggcccccgccagcccctgaaggcggaagcagggatgagcaggatggcgccagcgcggaaactgagccttgggctgccgccgttccaccagaatgggtcccaatcatccagcaagacattcaatctcagcgaaaagtgaaacctcagcctcctttatcagacgcctacttgtcaggtatgcctgcaaaaagacggaagcttcgctccgacattcagaagcgtctgcaagaggatccaaattatagcccacagagattcccaaatgcgcagcgagcattcgccgacgacccctag

SEQ ID NO: 109674 - DNA, 3234 bp, synthetic construct
  misc_feature 1..3234: note = Description of Artificial Sequence: Synthetic coding sequence
  source 1..3234: mol_type = other DNA
atggagcccaatgacagcacatcgactgctgtggaagagccagacagtctcgaggtgcttgtgaaaacactcgactcacaaacaaggaccttcatcgtcggtgctcagatgaatgttaaagaatttaaggaacatatcgccgcctctgtctctatcccatccgagaaacagaggctgatttaccaggggagagtgctacaggatgacaaaaagctgcaggaatataatgtcgggggcaaggtcattcacctcgtcgaacgggcccctccacagacccacctcccatctggcgcatcttcgggtactggatccgcttccgccactcatggcggcggaagtccacccggaacgagagggcccggggctagcgtgcacgatcgaaatgcaaatagttatgtcatggtggggacatttaacctcccctccgatggttctgctgtcgacgtccatatcaatatggaacaggcccccatccagtccgagccaagggtccgcctggtgatggcgcagcacatgatccgagacattcagactctgctgtccagaatggagtgccggggcggtcctcagccacagcattctcaacctccacctcagccacctgccgtcacgcccgagccagttgccctgagtagtcaaacatccgaaccagttgaatccgaagcacctcccagagagcccatggaggcggaggaggtggaggagagggctccagctcagaaccccgaactcacacctggtcccgctccagctgggcctacccctgctccagagaccaacgcgcccaatcatccctcccccgccgagtatgtggaggttctgcaggagcttcaaagactcgagtccagactgcagcccttcctccagcggtactatgaagtattgggtgccgccgcaacgaccgattataacaataaccatgaggggagagaagaagatcaaagactgattaacctggtcggcgagtccctacgcttgctgggaaatacatttgtagcactgagtgacctgcgatgtaacctggcctgcaccccgcccaggcacttacacgtcgttcgccccatgagtcactatactacaccaatggtactccagcaggccgccatacccatacagattaatgtaggcaccaccgtgaccatgacaggcaacggcactagaccccctcctactcctaacgctgaagcccctccccctggcccagggcaggcttcatccgtggcgccatcaagcaccaatgttgagtccagtgctgaaggagcccccccccccggtccggcacctccccctgccacatcacatcctagagtcatcaggatttcacatcaaagtgttgagccagttgttatgatgcatatgaacatccaggacagcggaacccagcctgggggcgttcctagtgctccaactggacccttgggcccccccggtcacgggcagacactcgggcagcaggtgcccggctttcctaccgccccaactagggttgtgatcgcccggccaacacctccacaggctcgcccgagccaccctggtggccctccagtctctgggacgctccagggagctggactgggcaccaacgcaagcctcgcacaaatggtgtctggactggtgggccagctgcttatgcaaccagtgctcgttgcccaaggaaccccgggtatggctccgcctcccgctcctgccaccgcctccgccagtgcaggtacaaccaacactgccactaccgccggcccagcacccggcggtccagcacagcctccccctacacctcagcccagtatggctgacctgcagttctcccagctccttgggaacctgttaggccccgccggaccgggcgctgggggatctggagtggcaagccccacaatcactgtggcaatgccaggcgtgcctgctttcctccagggaatgacagattttcttcaagccacacagactgcccccccaccaccccctcctccgcctccccccccccccgcaccagaacagcagacaatgcctccaccagggagcccgtctggaggcgcaggttctcccggcggactcggtctggagagcctttctccagagttcttcacgagcgtggtgcaaggcgtcctgtccagtctgctgggctcactgggcgctagggctggctcctccgagagcattgccgcttttatccaaaggttgtcgggctcttcaaacatcttcgaaccgggtgctgatggtgctcttggtttttttggggctctacttagtcttctgtgtcagaacttcagcatggtagacgtggtgatgctcctccatggacattttcagcccctacagcgcttgcagccacagctgcgctcattttttcaccagcattacctgggaggtcaggagccaactccgtccaacataaggatggccacacacaccctgatcaccggtcttgaggagtatgtgcgtgagtcattctcacttgtgcaggttcagcccggggtggatataattcgtacgaacctcgaatttctgcaggagcagttcaattctattgctgcccacgtattgcactgcacagattctggattcggtgctaggttacttgaactatgcaatcaggggctgttcgagtgccttgccctcaatttgcattgcctgggcggccagcagatggagctggcggccgtgattaatgggcgaatccggcggatgtcccgaggcgttaatccatctctcgtttcctggttgacaacaatgatgggcctgcgcttgcaggtagtccttgagcacatgccagtgggaccagacgcaatactgaggtatgtcagacgcgtgggagacccaccgcagcctctccccgaagagcctatggaagttcagggcgcagagcgcgccagtcccgagccccaacgagagaatgcaagcccagcgcccggcacaaccgcagaggaggcaatgagccgggggccgccccccgcacccgaggggggcagcagagatgagcaggatggcgctagcgctgaaactgagccctgggcagcagcagtgcctcctgagtgggttcccatcattcagcaggatatccaaagccagaggaaagtaaagccccaaccacctttatcagacgcctatctgtcaggtatgcctgccaagcggaggaagctcaggtcagatatccagaagagactgcaggaggaccccaactactctccccagagattcccaaacgcccaacgagcttttgccgacgacccctag

SEQ ID NO: 109675 - DNA, 2712 bp, synthetic construct
  misc_feature 1..2712: note = Description of Artificial Sequence: Synthetic coding sequence
  source 1..2712: mol_type = other DNA
atggaacccaatgatagcacatcaactgccgttgaagaacctgatagcctcgaggttctcgtgaagacactggacagccaaactcgcacattcattgtgggggcccagatgaacgtgaaggaattcaaggagcacatagcagcatccgtgagcataccgagcgaaaagcagcggcttatctatcaaggccgggtgttgcaggacgacaaaaaactccaggagtacaacgtgggcgggaaggtgatccatttagtggaaagagcccctccgcagacacatttgccgtccggtgcaagttctggaaccgggagcgcctctgccacccatggaggggggtctccaccaggaacccgcggacctggcgcgtccgtacacgaccgaaatgctaattcatacgtgatggtgggcacgttcaacctccccagcgacggttcagccgtagatgtccacataaatatggagcaggcaccaatacagtcagagccacgggttagactcgtaatggcccaacacatgatccgagatatccaaaccctgctgagcagaatggaatgcaggggcggtccacagccccagcacagccaacctcctcctcagcctcctgccgtgaccccagagcccgtcgcgctgagctctcagacttccgagcccgtggaatcagaagccccaccccgggagccaatggaagccgaggaggttgaggaaagggcccccgcccagaatccagagctcactccagggccagcccctgccggccctacaccggctccggagaccaacgctcccaaccacccctcccctgccgaatatgtagaagtgcttcaagaattgcaaagacttgaatcaaggctgcaaccttttctccagaggtactacgaagttctcggcgccgccgcaactactgactacaataacaatcacgaagggagagaagaggatcagcggcttattaatctcgtgggtgaaagtttgcgcttgctaggcaatacattcgtggccctgtccgatctgagatgcaaccttgcctgtacacctcctagacatcttcacgtcgttagacccatgtcacactacactacacctatggtgttacaacaagctgccatccccatccagattaatgtcgggacaacggttacaatgacggggaatggaacaaggcctccacctacacctaacgccgaggcacccccaccgggaccaggtcaagcatccagcgtagccccatcaagcaccaatgttgagtcctctgcagaaggagcaccacctccaggcccagccccccctcccgccacctcacacccaagggttattcgcatttcgcaccagtcagtggaacccgtggtgatgatgcacatgaatattcaggatagcggtactcagcctggaggggtgccttcagcacctaccgggcctctcgggccaccaggccacggacagaccctggggcagcaggtcccaggattccccaccgctcctacgcgcgtcgttatagcaaggccaaccccgcctcaggcccgtccttcccaccccggaggtcctcccgtgtccggcactctgggcgctggacttggcaccaacgcctcgcttgcccagatggtatcaggcctggtggggcaactcctgatgcagcccgtgctggtcgcccagggcacgcctggaagccccggcggtctcggcctggagtctctgtccccagaatttttcaccagtgtcgtccagggcgtactgagcagtcttctggggtcactgggagctcgggctggatcctccgagtccattgccgcttttatccaaagattgagcggctccagcaatatattcgagcccggtgcggatggcgcgctcggcttctttggcgcgctgctttctctgctctgccaaaatttctctatggttgatgtggtcatgttgctccacgggcactttcaaccgctgcagcgtttacagcctcaactgcggagtttcttccatcagcactacctggggggccaagaaccaactccctccaacattcggatggcaacacatacgctgatcaccgggttagaggagtacgtcagagaatcgttttcattggtccaggtccagcccggagtcgatatcatcagaaccaaccttgagtttttgcaagagcagttcaattcgatcgcggcacacgtgctgcactgcactgattctggcttcggggcgcgacttttggagttatgcaaccagggcctgtttgaatgtttggccctgaatctgcactgcctgggtggtcagcagatggaactcgcagctgtgattaacggacgaattcgccgaatgagtaggggagtgaatccctcccttgtctcctggctcactaccatgatgggtttgagattacaggtggtgctggagcatatgccagtaggccctgacgctatcttaaggtacgtccgccgagtgggagaccccccccagccgctgccagaagagcccatggaagttcaaggagcagaacgtgccagccctgagccccaggagtgggtgcctatcattcagcaggacattcagtcacagcgaaaggtaaaacctcaacctcctctctctgatgcctatctcagcggcatgccggcaaaacgccggaaactgcgaagtgacatacagaaaaggctgcaagaggaccccaactatagcccccagaggttccctaatgcccagcgggcctttgccgacgatccatag

SEQ ID NO: 109676 - DNA, 417 bp, synthetic construct
  misc_feature 1..417: note = Description of Artificial Sequence: Synthetic coding sequence
  source 1..417: mol_type = other DNA
atgaaggaatactctgggtttgctggcgtgagccggcctcggggtactttctttaggattcggggtaggggccgggccagaggcgtctttgctggaaccaatactgggcccaacaacagtaatactaccttccaaaagcgacccaaagaagaggagtgggaccctgagtatactcccaagagcaaaaaatacttcttgcatgatgatcgcgatgacggggtcgattactgggccaagaggggcagaggaagagggacatttcagcggggccgaggccgatttaattttaaaaaatccggcagtagcccgaaatggacacacgacaaataccagggcgacggcattgtcgaagatgaagaggagactatggaaaataatgaggagaagaaggacaggcggaaagaggaaaaagagtag

SEQ ID NO: 109677 - DNA, 2610 bp, synthetic construct
  misc_feature 1..2610: note = Description of Artificial Sequence: Synthetic coding sequence
  source 1..2610: mol_type = other DNA
atgggtaggagtaactcacggtcgcattcatcacgctcaaagtctcggtctcaaagctcatctagaagtagaagtcgctcccactcccggaaaaaaagatatagatcccgaagtcgaacatacagcaggtccagatctcgagacaggatgtactcccgggactataggagagattacaggaacaaccggggaatgcgcaggccatacgggtacagggggcgcggcaggggatattaccaaggaggcgggggtcggtaccacagaggaggctaccgtcccgtgtggaaccgaaggcactccagatccccgcggagaggtaggtcgcggtctagaagccctaaacgaagatcagtgtccagccagcgctctagatctcggagtaggagatcctacagatccagccgctcgcctagatctagcagtagcaggtcctcctccccatattcgaaatccccagtgtcgaagagaagggggtcccaggagaagcagacgaagaaggctgagggagagccccaggaggaaagtccccttaaaagtaaatcccaagaagaaccaaaggacacattcgagcacgacccttctgaaagcatagatgaattcaacaagtcctcagccacatcaggggatatctggccgggcctgagcgcttacgacaattccccgagatcaccgcactccccatcaccaattgccacgcctccatctcagtcgtcctcttgttctgacgcccccatgctcagtacggtgcactcagccaagaacactccctcacagcatagccatagcatacaacatagcccagagagatcaggctcaggtagcgtggggaacggaagctctcgatacagcccgagccagaatagtcctattcaccacattccaagtcggaggtcccccgcaaaaacaattgctccacaaaatgccccaagggacgaatcgagggggcggtccagcttctatccggatggaggcgaccaggagacagccaaaactggtaagtttctaaagcgcttcactgatgaagagagcagggtttttctactggatcgagggaatacaagggataaggaggccagtaaagaaaagggatcagaaaaaggtagggctgagggcgaatgggaggaccaagaagctctggactatttcagcgacaaggagagcggaaagcagaaattcaacgattcagagggagacgacacggaagagaccgaggattaccgacagttcaggaaatccgtgttggcagaccaaggaaaatcttttgctactgcgtcacacaggaatacagaggaagaaggcctcaaatataagagcaaagtgtccctaaaaggaaatcgcgagagtgatgggttcagggaagaaaaaaattacaaactgaaagagactggctacgtggttgagcgcccatcaactacgaaagacaagcataaggaggaggataagaactcagagcggataacggtcaagaaggaaacacagagtcctgaacaagtcaagagcgaaaaacttaaagatttatttgattatagtccccccctacacaaaaatttagacgctcgggagaagtctacattcagggaggaaagccccctgcgaatcaagatgatcgcatctgattctcaccgacccgaggtgaagctgaagatggcacctgtgcctctggatgattcgaacagacctgcttcattgaccaaagataggctgctggctagcacccttgttcactctgtgaagaaagagcaggaattcagatcgattttcgatcatatcaagctgccacaggccagcaagtcaacttctgagtctttcatccaacacatagtgtcgctagtccaccacgtaaaggagcaatatttcaagagcgccgcgatgaccctcaacgagaggtttacatcataccagaaggccacagaagagcactcaactcggcaaaagtctcctgagatccatagaaggatcgacatcagtcccagtaccctcagaaagcataccaggctggcgggggaagagagggtctttaaagaagagaatcagaagggtgacaagaagctgcgctgcgacagcgccgatcttcgccacgatattgatcggcggcgtaaagagcggtctaaagagcggggggactcgaaggggagccgagagtcttcaggctcccgtaagcaggagaagacccccaaagactacaaggagtataagtcttacaaagacgacagcaagcacaagagagaacaagatcacagtcgctcctcctccagctctgccagccccagcagcccgagtagtagagaggaaaaggagagcaagaaagaacgcgaggaggagtttaaaacgcaccacgaaatgaaggaatattctggctttgctggcgtgtcaagacctagaggaactttccatgacgaccgggatgacggagtcgactattgggctaagcggggaaggggccggggtacctttcagaggggaagagggcgctttaatttcaagaagtctggaagtagtcctaagtggacacacgacaagtatcaaggagatggaatagtagaagatgaagaggagactatggaaaacaacgaggagaagaaggatcgtcgaaaggaggaaaaagagtag

SEQ ID NO: 109678 - DNA, 2610 bp, synthetic construct
  misc_feature 1..2610: note = Description of Artificial Sequence: Synthetic coding sequence
  source 1..2610: mol_type = other DNA
atggggaggtctaactcgcgaagccactcctctcgcagcaagagccggagccaatcaagctctaggtctagatcccgaagccattctcgcaaaaagcgttatcgatctcgatctagaacatactcacggagccggagtagagaccgcatgtactcgcgcgattacaggagagactaccgaaacaatcgtggtatgaggagaccctatggatacagaggtaggggtcggggttactaccagggaggtggtggtagatatcatcgtggtggataccgacccgtgtggaacaggcgccacagccggtccccacggcgcggacgctctagaagtcgcagcccaaaaagaagatccgtcagcagccagcggagtcggtcacggagtcgacgctcctacagaagcagccgctccccacgatcttctagctcccgctccagtagcccatattccaagtcgcccgtgagtaaaaggaggggcagtcaggaaaagcagaccaaaaaagctgaaggagaacctcaggaagagtcccctctgaagtccaaaagccaggaagaaccaaaagacacctttgaacatgacccttctgagtccatcgacgagttcaacaagagcagcgcgacgtccggcgatatttggccgggcctttccgcctacgataattcccccaggtctccgcattctccctctcccatagccacccccccctctcagagcagcagctgctctgacgcacctatgctatccacggtgcatagtgcaaaaaacacccctagtcagcactctcactctattcagcactcacctgagagatcgggttcaggaagtgtcggcaatggttcatccagatactccccttctcagaatagcccgatccaccacatccccagccggaggtctcccgcgaaaacaattgcccctcagaacgccccccgcgacgaaagcaggggtcggtcatctttttatcccgacggcggggaccaggagacggcgaagaccgggaagttccttaaacgattcaccgatgaagaatccagagtgttcctgctcgatagaggcaatacccgagacaaggaagcctctaaggagaaaggctctgaaaagggtcgtgctgagggcgagtgggaggaccaggaagctctggattatttctccgacaaagagtcagggaagcagaagttcaatgacagtgagggcgacgataccgaagagacagaagactaccgccaatttcggaagtccgtcttggcggatcaaggaaagtctttcgcaaccgcctcccatagaaacacggaggaggaagggctcaaatataagagtaaggtttccctgaaagggaaccgtgagtcggacggatttagggaggagaagaattacaaactgaaagaaactgggtatgttgtggagcgcccgagtactactaaggataagcacaaggaggaggacaagaattcagagcgcattactgtgaagaaagaaacccagtccccagaacaggtgaagtcggagaaattgaaagacctatttgactacagccctccacttcacaaaaatttggacgctcgggaaaaatctactttccgcgaggaatcgcccctgagaatcaaaatgatcgcatctgacagccaccggccggaagtaaagctcaagatggctcccgtacctctggatgactctaatcgtccagcatctcttactaaagaccggctgcttgcatcaactcttgtacattcagtaaagaaagaacaagagtttagatccatctttgaccacattaaactgccccaagctagcaaatcgacctccgagagtttcatccagcatatcgtttcactggtgcaccacgtgaaggaacaatactttaagagtgccgctatgacacttaatgagcgcttcacaagctaccagaaggctaccgaggagcactccaccagacagaagtcccccgagattcaccggaggatcgatatctccccgtcaacactacgaaagcacacgaggctggccggggaagagagggttttcaaggaggaaaaccaaaaaggagacaaaaagttgcggtgtgactccgctgatctgagacatgatatcgaccgcaggcgtaaagagcgaagtaaagagcggggcgatagcaagggcagcagagagtccagcggatctagaaagcaggaaaaaacacctaaggattacaaggagtacaagtcctataaggatgactctaaacacaaaagagaacaggaccactctcgcagttcgtcttcttctgccagccctagctctccgagctccagggaggagaaggagtctaagaaggagcgagaggaggagttcaagactcaccatgagatgaaagagtacagcgggtttgcaggggtgagtcgaccgcgagggacatttcatgatgacagggatgatggggtggactactgggccaaacggggccgaggtcgtggcacttttcagaggggaagaggtaggttcaattttaaaaagagcggcagtagcccgaagtggactcatgacaaataccagggcgatgggatcgtcgaggatgaagaggagaccatggaaaataatgaggaaaaaaaagacaggcgtaaagaggagaaggaatag

SEQ ID NO: 109679 - DNA, 2757 bp, synthetic construct
  misc_feature 1..2757: note = Description of Artificial Sequence: Synthetic coding sequence
  source 1..2757: mol_type = other DNA
atgggcaggtccaactcccgctcgcactcttcgaggtcaaagtctaggagccaaagtagctcacggtctaggagcagatcccacagcaggaagaagcgctataggtccaggtccaggacgtactcaagaagccggagcagagaccgaatgtatagcagagattataggcgggattatagaaacaacaggggaatgagacgtccatacggataccgtgggcgaggtcgcggctactatcaaggaggcggcggcaggtatcatcggggggggtatcgccccgtgtggaacaggcggcacagtaggtcaccccggcgagggcgatccagatcccggtcccccaaacgacgaagcgtctctagccagcgctctcggtctaggtctaggcggagttacaggtcaagcagatctcctcggagctcctcaagtaggagcagttccccttacagcaagagcccggtatctaaaagaaggggttcccaggagaaacagacaaaaaaggcagaaggcgaacctcaagaggaatctcctttgaaaagcaagtcacaggaagagcccaaggacacctttgagcacgacccctcggaatccattgacgagttcaataaatccagtgcgacgtctggagatatttggcccggcctctctgcatacgacaatagccctcgttctccccactcccctagcccaatcgccaccccaccaagccagagctcttcctgtagcgacgccccaatgctgtctaccgtccacagtgctaaaaacaccccctctcagcatagccacagcatccagcatagtcccgaacgatctgggagcggctctgttggtaatggctcttcgcgatactctccttcacagaacagtcccattcaccacatcccatcaaggagaagtccagctaagactatagctcctcaaaacgcccctagggatgagtcgcgcgggcgttccagtttctatccggatggaggcgatcaggaaactgccaaaacaggtaagttcctgaagcgctttaccgatgaggaatcacgagtgtttctactggaccgagggaacactagagacaaagaggcctcgaaagagaagggtagtgagaagggccgggccgagggtgaatgggaggatcaagaggcattggattacttttcagataaggagtcgggcaaacagaaatttaacgattctgaaggcgacgacaccgaggagactgaagactaccggcagtttaggaaaagcgtactggcagaccaaggcaaatcctttgctacagcttcccatcggaataccgaagaggaagggctgaaatacaaaagtaaggttagcctgaagggaaacagggagtcagacgggtttcgggaggaaaaaaattataaactgaaggagaccggctatgtcgtagagcgacccagtactaccaaggataagcataaagaagaggataagaacagcgagaggattaccgtgaaaaaggagactcaatcccccgagcaggtaaaatctgaaaaattaaaggatttgttcgattattcccccccattgcataaaaacctggacgcgcgggagaaatctacctttagggaggagagcccactacgcattaaaatgattgccagtgattcccacaggcctgaggtcaagctgaagatggccccggtgcctctggatgatagtaacagaccggccagtctgactaaggaccggctcctagcttccacattggtgcactctgtgaagaaggagcaggaattccgctctatatttgatcatattaagctgccccaggcctctaaatcaacaagcgaaagctttattcagcacatcgtatctctggtccaccatgtgaaagagcaatacttcaaaagtgcggcgatgacattaaatgagcgattcacctcttaccagaaggccacagaggagcatagtacgagacaaaagtctcccgaaattcataggcgaattgacatcagtccatctacgctcagaaagcacacccgcctggccggggaagagagagtatttaaggaagaaaatcagaaaggcgacaaaaaactccgatgcgattctgcagatctacgacacgacatagatcgaaggcgaaaagaaagaagcaaggagaggggagatagcaagggctccagagagtcctcgggctctaggaagcaagagaagactcccaaagactataaagaatataaatcatacaaagacgacagcaaacataaacgggagcaagaccacagtcgatcatcctcttcttcagcctccccctcaagtccttcatctagagaggagaaggagtcgaaaaaggagcgagaagaggagtttaaaactcatcatgagatgaaagaatattccggctttgccggagttagtcgtccgcgaggcaccttcttccgaatccggggaagggggagagccaggggggtgtttgcggggaccaacactggcccaaataactcaaacacaacatttcaaaagcgacctaaggaggaagaatgggaccctgagtacacccccaaaagcaagaagtattttctgcacgatgatcgagacgatggtgtagactattgggcgaagcgaggccgagggaggggaacattccaaaggggacgcggccgattcaacttcaagaagtctggcagctcccctaagtggacccacgataagtaccaaggggatgggatcgtggaggatgaagaggaaactatggaaaacaatgaggaaaagaaggatagacgtaaggaagagaaagagtag

SEQ ID NO: 109680 - DNA, 2244 bp, synthetic construct
  misc_feature 1..2244: note = Description of Artificial Sequence: Synthetic coding sequence
  source 1..2244: mol_type = other DNA
atgggtaggtcaaatagtcggtctcactcttctcggagcaaatccagatctcaatcaagcagccggtctaggtccaggtctcattcccggaagaaacggtattcctctcggtcacgcagtcgtacctatagtagatcacgctctagggacaggatgtatagtcgggactacagacgagactatagaaacaatcgcggtatgaggcggccttatggctaccgcggacgggggcgcgggtactatcaaggaggtggaggccgataccatagagggggatacagaccggtgtggaacaggaggcatagtcgcagtcctagacgcggtcgatcacgtagccggtcacctaagcgacgctctgtcagctcccagcgctcaaggagccggtctcgccgttcataccgctcatcaagatctccacgttccagctctagcagatcatcatccccctacagtaagtccccggttagcaagcgcagaggcagccaggaaaagcagacaaaaaaagcagaaggggagccccaggaagaatccccgctcaaatccaagagccaagaagagccaaaagatacttttgagcatgacccatcagagagtattgacgagtttaacaagagtagcgcaacctctggtgacatatggcccggactgtctgcttatgacaatagcccccggtctcctcattctccaagtcctattgcaacgcccccaagtcagtccagttcatgcagtgacgcccctatgttgtcgaccgtgcattctgccaaaaatacaccaagtcaacactcccattccatccaacattcaccggaaaggtccggctctgggtcggtgggcaacgggtcgagtaggtatagtccttcccagaacagcccgattcaccatatcccatctcggagatctccagctaaaacaattgcaccacagaatgcaccgcgagatgagagcagaggcagatcgagcttctatcccgacggcggagatcaggaaaccgccaaaaccggtaaattcctcaaatcaccaccacttcacaagaaccttgacgcacgcgagaagagcacattcagagaggaatcaccgctcaggataaaaatgatcgcctcagatagccataggcctgaggtgaagcttaagatggcccctgtccctctggacgacagcaaccggcctgcctcactcaccaaagaccggctgcttgcttctacccttgttcactcagttaaaaaggaacaggagttcaggtccattttcgaccatattaagttaccacaggcatcgaagtctacatccgagtctttcatacagcacattgtgagcttagtgcaccatgttaaagagcagtactttaaaagcgctgccatgacacttaatgagagattcacctcgtatcaaaaagctaccgaggagcactcgactcgacagaaaagccccgagattcatcgccggatcgacatcagtcccagcacgctgagaaagcacactaggctggcaggggaagagagggtgttcaaggaagaaaaccagaaaggcgacaaaaaactgaggtgtgacagtgctgacctgaggcatgatatcgaccgcagacggaaagagcgcagtaaggagagaggtgactctaagggctcacgtgaatcttcaggatcacgaaaacaggagaaaactcccaaggactacaaggagtataagtcctacaaagatgacagcaagcacaagcgtgaacaggaccactcccggtcaagttcttcatctgctagcccctcctctccatctagcagagaagaaaaggaatcaaagaaagaacgcgaagaagagttcaaaacccaccatgagatgaaggaatattctggtttcgcgggtgtgtccagacctcgcggaactttcttcaggataaggggccgcggccgggcacggggagtcttcgctgggacaaataccgggcccaacaactcaaacactaccttccagaaacggcccaaggaagaagagtgggacccagagtatactccaaaatccaagaagtactttcttcatgacgaccgggacgacggagtggattattgggcaaaacgaggtaggggcagggggaccttccagcggggcagggggagattcaatttcaaaaaaagcggaagttccccgaagtggacgcacgacaaatatcaaggcgacggcatagtagaagacgaagaggaaaccatggaaaacaatgaagagaagaaagacaggcgcaaggaagaaaaagaatag

SEQ ID NO: 109681 - DNA, 2763 bp, synthetic construct
  misc_feature 1..2763: note = Description of Artificial Sequence: Synthetic coding sequence
  source 1..2763: mol_type = other DNA
atgggcagatcaaatagccgctctcattcttccaggagtaagagccgctctcagagctcctcaagatcacggagtcgctcccatagccggaagaaacggtattcatcacggagtaggagcagaacttacagtcgttccaggtcacgggaccggatgtatagccgggattaccgaagggattacagaaacaatcggggaatgaggcggccctatggctatagaggcaggggccggggatattaccaaggtggggggggccgctatcatcggggaggctatcggccggtgtggaacagaaggcactctcgatccccccgccggggccgttccaggagcagaagccccaagcgcaggtcggtttcttctcaacgcagtcggtccaggtcccggagatcttataggagcagtagatcccctcgttcctcttccagccgatcgagtagtccttattctaagtcacccgtgtccaagaggcgcggaagccaggagaaacagacgaaaaaggcagagggtgagccgcaggaggaatctccactgaaatccaagtcccaggaggagcctaaggatacattcgaacacgatcccagtgagtcgattgatgagttcaataaatctagtgcgactagcggggacatttggcctgggctgtccgcatacgacaactcacctcgtagcccccatagcccctcacccattgcaactccccccagccagagcagcagttgctccgatgcaccaatgctctccaccgtgcattctgcaaaaaacaccccctcacagcactcccactctatccagcactcccccgaacggtccggcagtggttcagttggcaacggctccagccggtatagtccatcacagaacagccccattcaccatatccccagtcgcaggagtcctgccaaaacaattgctcctcagaacgcccccagggatgagtcaaggggccgcagctcattctaccctgacggaggcgaccaggaaacagcgaagaccggcaagttcctcaaacggttcaccgatgaagagtcccgtgtttttctgctcgacagaggcaatacccgtgataaggaggcaagcaaagaaaaaggcagcgagaaggggagagcggaaggagaatgggaggaccaggaagcactggactacttttccgacaaagaatctggtaagcagaagtttaatgatagcgagggtgacgatacagaggaaaccgaagactaccggcaatttcgcaaatctgtcctcgccgatcaaggtaagtccttcgctacggcaagtcacaggaacactgaagaagagggactgaaatacaaaagcaaagtgtcgctgaaaggtaatagagagagcgacggctttagagaggagaaaaattacaagttaaaggaaactggatacgtggtggagcggcccagtactacaaaagacaaacataaagaggaagacaagaattccgagaggattaccgtgaagaaagagacacaatcccccgagcaggtgaagagcgagaagttaaaggatttgtttgattatagcccaccactgcacaaaaacttggatgcccgggagaaaagcacgttcagggaagagagtcctctgcggatcaaaatgattgcctctgactcacacaggcctgaagtgaaacttaaaatggcacctgtacccttagacgattcgaatcgaccggcatccctgacaaaagatcgcctcttggcctctacactggtgcactctgttaagaaggagcaggaattcaggtctatcttcgatcatattaagttaccccaggcatccaaaagtacctccgaatcgttcatccaacacattgtgagcctcgttcaccacgtcaaagaacaatattttaaatcagccgccatgacgctcaacgagagatttacttcctatcaaaaagccaccgaggaacactccactagacaaaagagccccgagattcacagaagaatcgacatttccccgtctaccctgagaaagcacacccggcttgcaggcgaggaacgcgtgtttaaagaagagaaccagaagggggacaagaaactgagatgtgattctgccgatctgagacatgatatagatcggcggaggaaggagagaagtaaagagcggggggatagtaaaggaagcagagagtcatctggatccagaaagcaagaaaagacacctaaagactacaaagagtataagtcatacaaggatgactccaagcataaaagggagcaagaccatagtcgctcttcgagttctagtgcaagtccatcaagtccgtcgtcacgagaggagaaagagtctaaaaaggagagggaggaggagtttaagacccatcatgagatgaaggaatatagtggctttgctggtgtgtcgcgacctaggggtacattctttagaatcagaggtcggggccgggccagaggtgtgttcgctgggactaatacagggccaaataacagcaataccacttttcagaagagaccgaaggaggaggaatgggacccagagtatactcctaagtctaaaaaatattttctacatgatgatagggacgacggagtggactactgggctaaaagagggcgtggccgtgggacttttcagcgcggcagaggaagatttaactttaaaaaatcgggtagctcaccgaagtggacccatgataaataccagggcgacgggatcgtggaagacgaagaagagactatggagaacaatgaggagaaaaaagaccgccgcaaggaagagaaggagtag

SEQ ID NO: 109682 - DNA, 531 bp, synthetic construct
  misc_feature 1..531: note = Description of Artificial Sequence: Synthetic coding sequence
  source 1..531: mol_type = other DNA
atgggtcgccctgctggccttttccctcctctgtgccccttcctaggatttagaccagaggcctgttgggaacgccacatgcagattgaaagggccccttcagtgccaccttttctcagatgggcaggttacaggcctgggcccgtgagaaggagggggaaagtggagctcatcaaattcgttcgcgtacagtggcgtcggcctcaagtggagtggcgcagaaggcgctggggccccggaccgggggcctcgatggctggttccgaggaactggggctgcgtgaggatacactgagggttctggcagcctttcttagaagaggggaggccgccgggtctcccgtacccactccacctaggcctagctatagccggttgctttgcttcggtgggcccgccgccggaacagctggcccgagggccgctgaaatttctgcccagccaaggattaccggaagccccatcgacagagaggggagccacacagcagaggccggaggacctgctggcggaggcggacggagccattag

SEQ ID NO: 109683 - DNA, 1005 bp, synthetic construct
  misc_feature 1..1005: note = Description of Artificial Sequence: Synthetic coding sequence
  source 1..1005: mol_type = other DNA
atgggccgtccggctggcctcttcccccctttgtgtccctttctgggattccggccggaggcctgttgggaaagacatatgcagatcgaacgagctcctagtgtgccaccatttctccgttgggccgggtatcgtcccggtcccgtgagacggcggggcaaggtggagttgatcaagttcgtacgcgtacaatggagaaggccccaggtggaatggcgaagaaggcggtgggggccaggacccggtgcatccatggcaggtagcgaggaactagggctgcgtgaggatacattgagggtgctcgcagccttccttcggaggggcgaagcggcagggtcacctgtcccaacacctcctagatctcccgctcaagaggagccaaccgattttctgtctcgcctgcgcaggtgtctcccttgctcactgggccgcggcgccgctccatccgaaagcccgcgcccttgctcgttaccgatcagaccatgttacggcctggaacccggtcccgccacgccagacttttacgccctcgtcgctcagaggctggagcaactagtccaagaacagcttaagagccccccgtcacctgaacttcagggacctccctccaccgagaaggaggcgatcctgcgaagactggttgcactgctcgaggaagaagcagaggtgataaaccagaagctcgcgagtgatcccgcactacgcagcaagctggtgagactatcatcggatagcttcgctcggttggtcgagctcttttgtagccgagacgattcaagtcgaccaagccgggcctgtcccggacctcctccccctagtcccgagcccctagctagactcgccctggcaatggagctatcgcgacgggtggctgggctgggcggcacgctggcgggcctaagcgtcgagcacgtccactcttttacaccctggatacaagctcacggtggctgggagggtatccttgcagtgtctcccgtggatctcaacttaccccttgactag

SEQ ID NO: 109684 - DNA, 1002 bp, synthetic construct
  misc_feature 1..1002: note = Description of Artificial Sequence: Synthetic coding sequence
  source 1..1002: mol_type = other DNA
atgggtcggcctgctggattgtttccccccctgtgcccttttcttggatttagaccagaggcatgttgggaaagacacatgcagatcgagcgcgctccttcagttcccccttttctaaggtgggccggttacaggccaggccctgttcggaggaggggaaaggttgagttaatcaaatttgtgcgagttcagtggaggaggccacaagtggaatggaggaggcgcaggtggggcccgggccctggggcctcgatggccggcagcgaggaactcgggctaagagaggacacactccgagtcctggcagcatttcttcgacggggcgaggccgccgggtctcccgtgcccactccacccagtcctgcgcaagaagaacccactgacttcctctccagactaagacgctgcctgccatgttcgctagggcgtggcgccgcaccgtctgaatcaccacggccgtgtagcctgccaatacgcccctgctacgggctggagccagggcctgctactcctgacttctacgctctagttgctcagagactcgagcaactggttcaggagcagttaaagtccccaccatcgccagagttacagggcccccccagtaccgagaaagaagcgatcctgaggcgcctggtggctctcttggaggaagaggcagaggtgattaaccagaagctggcttctgacccggcactgagatcaaaactagtccgtctctcgagtgactcctttgcaaggctcgtagagctcttctgttcgagggacgacagttccagaccctcgcgcgcctgccctggacccccccctccaagtccagaacccttagctaggctggctttggcgatggagctttctcggagagtagccggcttggggggaaccctcgctggcctgtccgttgagcatgtgcactcctttacgccgtggatccaggctcatggtgggtgggaggggatcttagccgttagccctgtagacctcaacttgccactggattag

SEQ ID NO: 109685 - DNA, 5166 bp, synthetic construct
  misc_feature 1..5166: note = Description of Artificial Sequence: Synthetic coding sequence
  source 1..5166: mol_type = other DNA
atgttgagtgcaactcccttatacggaaatgtgcactcttggatgaatagcgaaagagtccgaatgtgtggcgcatctgaagaccgcaagattctcgttaatgacggcgatgcctcaaaagcccgcctagaactcagggaagaaaacccgctgaaccacaacgtggtcgacgccagcaccgcgcataggatagacggtcttgctgcactgtctatggacaggacgggcttaataagagaaggtttaagagtcccagggaacatcgtttattcctcgctgtgcggtttgggaagcgaaaagggtcgggaggccgccacgagtaccctcggcggactggggttcagcagcgagaggaatccagaaatgcaatttaagcccaacacgcccgagactgtcgaggcgtctgccgtgtctggcaaaccacccaacgggttcagtgctatctataaaacaccacctgggatacaaaagtccgccgtcgccactgctgaggcactcggcctcgaccggcccgctagcgacaagcagtcacccctaaacatcaatggggctagctaccttaggttaccttgggtaaatccatatatggagggggccacacccgctatctatccgttcctcgactccccaaacaagtactcactaaacatgtataaggcattgctgccccagcagtcatattccctcgcccagccgctgtactctccggtgtgcacaaatggagagcgattcctgtaccttcctcccccccactacgtaggcccacatatcccaagctcgctggcgagccctatgaggctgtcgacaccatccgcctcacccgctatccccccactggttcactgcgcggataaaagtctcccatggaagatgggcgtgagccccggtaaccctgtagatagtcacgcttacccccatatacaaaatagcaagcaaccccgggtgccctctgccaaagccgtaacaagcggattgcccggggacacggctctgctcttgcccccaagtccacggccaagcccacgagtgcacctgcccacccaacctgccgccgatacgtattcggaatttcacaaacactatgctcggatcagcacaagccctagtgttgcgctgagcaagccgtatatgacagtcagctcggagttcccggccgctcgcctgtcgaacggcaagtaccctaaggcccccgagggcggcgaaggtgcacagcctgtgcccgggcacgcccgaaagactgccgtccaggaccgcaaagacggaagtagtccacccctgctggagaaacagacagtcacaaaagacgtcaccgataagcctctggatcttagcagcaaggtcgtggacgtagacgcatcaaaggccgatcacatgaagaagatggctcctactgtgttagtgcattccagggctggctctggtctggttctaagtggaagcgagattccaaaagaaacactctcccctccgggaaacggatgcgcaatatatagatcagagataataagcactgcaccaagtagctgggtggtcccaggaccctccccgaacgaggagaacaacggcaaatctatgtcgttaaaaaataaggcactggattgggctatcccccagcagcggtcttctagctgcccgagaatgggggggacagatgcggtgatcaccaacgttagtgggtctgtgtccagtgcgggaagaccagccagcgccagtcccgctcctaacgccaatgcagacggcactaagacatctcgctcctctgttgaaaccacgccgtctgttattcagcacgtgggccaaccaccagctacgcccgccaaacactcgagtagcacctctagtaaaggagctaaggcgtctaacccagagcctagtttcaaagccaacgagaacgggcttcccccttcttctatttttctgagccccaatgaggcttttaggtcccctcccatcccatatccccgaagctatttaccttatcccgcacctgaaggaatcgcagtttcccctctgtctctgcacggcaaaggcccagtgtacccacaccccgtcctgcttccgaacgggtcactgttccccgggcacctggcaccgaagcccgggctcccatacggacttccaaccggccgccctgaatttgtcacataccaggatgccctaggtctgggaatggtgcaccctatgttgatcccccacactcccattgaaatcacaaaggaagagaagccagagcggcggagtagatcacacgaacgggcccgctatgaggatccgacactgaggaacagatttagcgaaatcctggagactagctcaacgaaactgcatcccgacgttcctaccgacaaaaacctgaaaccgaatcctaactggaaccagggcaagaccgtggttaaaagcgataagctggtgtacgtggacctgctgcgcgaggagcctgacgccaagacagataccaacgtgtcaaagccttcctttgcggctgagtctgtcggacagagtgccgagccacctaaaccctctgtggaaccagcattacagcaacatagagatttcatagctttgcgcgaggagctcggccgtatctctgacttccacgagacctacaccttcaaacagccagtcttcaccgtcagtaaggatagtgtacttgccggcaccaataaagaaaatctcggactgccggtgtctactccttttctggagcccccccttggctctgacggacccgctgtgaccttcggaaagacccaggaagaccccaagcctttttgtgtcggaagcgcacccccctccgtcgacgtcacacccacatatacaaaggatggagctgatgaggccgaatcaaacgatggcaaggtcttgaagcccaagccttccaaactggccaagagaatcgcgaactctgccggttacgtgggagaccgatttaagtgcgtgacgaccgaactctacgccgacagctcgcagttgtccagagagcaacgagccttacagatggagggcctgcaggaggactctattctgtgtttgccggctgcatactgcgagcgcgcaatgatgagattctccgagttagagatgaaagaacgggagggaggccatccagcaacgaaagacagcgaaatgtgcaaattttcccctgccgattgggaacggcttaaggggaaccaggataagaagcccaaaagtgtaaccttagaagaggccattgccgaacagaatgaatctgaacggtgtgagtattcagtgggaaacaagcacagggatcctttcgaggcccctgaagacaaggacctgcctgtggagaagtactttgtggaacgtcagcccgtcagcgagccgccggcggaccaggtcgcaagcgatatgccgcacagtcccactctacgcgttgatcgcaagcggaaagtgtcaggcgatagcagtcacacggagaccacagcggaagaagtacccgaggaccctttgctgaaagcaaagcggcgaagagtatctaagggcctgcaccctaagaagcagcggcatttactccatttacgcgaaagatgggagcagcaagtatcggccgccgatggcaagcccgggcggcagagtaggaaagaagtcacccaggccactcagcccgaagccatccctcaggggaccaatattacagaggaaaaacctggtcgaaaacgcgcagaagccaaagggaaccggtcatggtcggaggagtctcttaagccctctgacaacgagcagggcttgccagtcttctctggctcaccccctatgaagagccttagcagcacttccgctggtggcaagaaacaagcccagccgtcctgcgccccagcatctcgccccccagcgaagcagcaaaagatcaaggaaaatcagaagacagacgtgctctgtgccgacgaggaagaggactgtcaagctgccagcctgttacagaaatatactgacaattcagagaagccaagcgggaaaagactctgtaagaccaagcatctaattccacaggagagccgtagaggcttgccactgaccggggagtattacgtggagaacgctgatgggaaagtaactgtccgacgatttcggaagcggccagagccatctagcgactacgatttatcccctgctaaacaggaaccgaaacctttcgaccgcctgcagcagttactccccgcatcccagtcaacacagctgccatgcagcagctcaccacaggagaccacccagtcccgccccatgccaccagaggctaggagactgattgtgaataaaaatgctggagaaactctgctgcagcgtgcagctcgcctggggtacgaagaggttgtgctctactgtctggagaataagatctgtgatgtaaaccacagggataacgcaggctattgcgccctacacgaggcttgcgccagaggttggctcaacatcgtgagacacctgctggaatacggagcggacgtaaactgctccgctcaggacggcactaggccactccacgatgccgtggagaacgatcatctggaaatagtacgcctcctacttagctatggagccgacccaacactggccacctatagtggacggaccataatgaaaatgacccattcagagctgatggagaagtttctgaccgattatctgaatgacctgcagggtcgcaacgatgacgacgcttctgggacatgggatttctacggatcttctgtgtgtgaacccgacgacgaaagtggctacgacgtattagccaatcctcctggacctgaagatcaggatgacgatgacgacgcctactccgacgtgtttgagtttgagttctccgaaacccccctgttgccctgctacaatattcaggtatcagtcgctcaagggcccaggaactggttactgctgtcagacgtgttaaaaaagctcaagatgtcttcaaggatcttccgttgcaacttccccaacgtggagatcgtgactattgcagaggctgagttttatcgtcaggttagtgcttccctgctcttctcatgctctaaagatctagaggcctttaaccctgagagcaaggagctgttagatttagtggaatttacaaacgagatccaaactctgcttggcagctccgtcgaatggctgcatccgtctgacttggcttcagacaattattggtag

SEQ ID NO: 109686 - DNA, 5268 bp, synthetic construct
  misc_feature 1..5268: note = Description of Artificial Sequence: Synthetic coding sequence
  source 1..5268: mol_type = other DNA
atgctgagtgctactccactgtacgggaatgttcacagctggatgaacagtgagcgggtgcggatgtgtggcgcttctgaagacagaaaaatactggtgaacgatggcgacgcttccaaggcccgtctggagctaagagaggaaaatcccctgaaccataacgtagtggacgcttctactgcccacagaattgatggcctcgcagccctgagcatggacaggacaggcctgatacgagagggactgcgagtgccaggcaatatcgtgtactcttcactctgcggcctgggatcagagaagggacgcgaggcagcaacatctactttggggggcttgggcttttctagtgaacggaatcccgaaatgcagtttaagccgaatacgccagaaacagtggaggcctctgccgtttccgggaagcctcctaacgggttctctgccatctataagacgccccctggcatccagaaatctgctgtggctacagcggaagctctagggctggatcggccggctagcgataaacagtcacctcttaacatcaacggggccagttacctgcgtctgccttgggtgaacccctacatggaaggtgctacccctgccatctatccatttcttgactctcctaataaatactctttaaatatgtacaaagcactgctgccgcagcagtcctactccctcgcccaaccactgtactcacccgtgtgtacgaacggagaaaggtttttgtacttgccaccccctcactatgtcggcccccatattccttcttccttggcctctcccatgagactaagcaccccgagtgcgtcccctgccatcccaccgttggtgcactgtgcggataagagcctaccctggaaaatgggggtctcacccgggaacccggtggacagtcatgcttatcctcatatccagaacagtaaacagccaagggttccgtccgcaaaagcagtgacctctggcctacctggagatactgccctgctgttgccaccatccccccgaccatctcccagggttcatttgccaacccagcctgccgcagacacatatagcgaatttcacaagcattacgccaggataagcacaagccccagtgttgctctatccaagccgtacatgaccgtgtctagtgagtttcccgcagctcgcctgtccaatggaaagtacccaaaggctccggaagggggcgagggtgcgcagccggtgcctggccatgccagaaaaactgcagtgcaagatcggaaggacggctcttcaccacccttacttgagaagcagacggtcacaaaagacgtaacggataaacccctggatctgtcctccaaggttgtcgatgtggacgcaagcaaggcggatcacatgaaaaaaatggccccgaccgtgctcgtgcatagccgagccggatcagggctggtactttcaggctctgagataccaaaggagaccttgtcaccccccgggaatggctgcgcaatctacagatccgagattatctccaccgcaccatcaagctgggttgttccaggcccctcccccaatgaggaaaataacggtaaatctatgtccctgaagaacaaggccctcgactgggcaatcccacaacagcggagctctagctgcccgaggatgggcggcactgatgccgtgatcacaaatgtgagcgggagtgtatcctcagccggtagacccgctagcgcaagcccagccccgaacgctaacgccgatgggacaaaaacctcaaggagcagcgtggagactaccccctcagtcattcaacatgtgggccaaccgcccgcaactcctgccaagcactcttcctcgacttcctccaagggggccaaagcttccaatcctgagccctcctttaaggctaatgagaacggcctgccgccttctagtatctttctctctcctaacgaggcttttcggagccccccgatcccgtaccccagaagctatctcccttatcccgcgcctgaggggattgcagtgtcacctctcagccttcacggaaagggtcctgtctacccgcacccggtcctccttccaaacggtagtctgttccctgggcacctggcgcctaagcctggcctaccttacggccttcctacggggcggcctgagtttgttacttatcaggacgctttgggactagggatggtacacccaatgctgataccccacacgcccattgagattacaaaggaagagaagccagagcgacgaagccgaagtcacgaaagggccaggtacgaagacccgaccttgagaaaccggttctccgagatcctggaaacttcatccacaaaactacatcctgacgtaccaacagataaaaatctcaaacccaaccccaactggaatcagggaaaaacagtggtgaaatctgacaagttagtctacgttgatctcctgagagaagagcctgacgcgaaaacggacaccaacgtgagcaaaccttctttcgcggccgaaagcgttggccagtcagccgagcctccaaagcctagtgtggagcccgccttacagcagcatcgagactttatcgctcttcgtgaggagctcgggcgaatcagcgatttccacgaaacgtatacgttcaagcaaccagtgttcaccgtgagtaaggacagcgttctggccgggacaaataaagaaaatctcggcttacccgtttctacgccatttctggagccccctctcggtagcgacggacctgctgtgacatttggcaagacacaggaggaccctaaacctttctgtgtgggaagtgccccacccagtgtggatgtgaccccgacatataccaaagatggcgccgatgaagctgagagcaacgacggaaaagtccttaaacccaaaccctcaaagttggccaaaaggatagcaaatagcgctggatacgttggggacagatttaaatgcgttactaccgagctctatgcggattctagccaactgtctcgggagcagagggcactgcagatggagggattacaggaagacagtatactctgcctcccagcagcatactgtgagcgcgctatgatgcggttcagcgagttggagatgaaggagagagaaggagggcatccagccactaaagattcagagatgtgcaagttctctcccgctgattgggagcggctaaaggggaaccaggataaaaaaccaaaatccgtgacccttgaagaggcaatcgccgaacagaatgagagcgagagatgtgagtacagcgtggggaataagcacagagaccctttcgaggcgcccgaggataaagatctccctgttgaaaagtactttgtcgaaaggcagcccgtgtccgagccacctgccgaccaggtggcctcagatatgccccacagccccacactgcgggtcgatcggaagcgcaaggtaagcggagacagctcccacacagagactaccgcggaagaagtgccagaggatcccctcctgaaagccaagcggaggagggtgagcaaggacgattggccggaacgtgagatgacaaactcttcctccaaccacctggaggacccgcactacagtgaactgacaaacctaaaagtctgcatcgaacttacagggctgcaccctaagaagcagcgacatctgctgcacctccgcgaaagatgggaacagcaggtgtcagcagcagatgggaaacccggccgccagtccaggaaggaagtgactcaggctacgcagccagaagccatcccacagggcactaatataactgaggagaagcccggcagaaagcgggcagaagctaaagggaaccgcagctggagcgaggagagcttaaaacctagcgataatgagcagggtctgccagtcttctcgggtagcccgccaatgaaatccctctcctctaccagtgcagggggtaaaaagcaagcacagccttcttgcgcaccagcgagccgccctcctgctaaacaacagaaaatcaaggagaatcagaagacggacgtcttgtgtgccgatgaggaagaagattgtcaagcggcatcccttctccagaaatataccgacaatagcgagaagccgtccggaaaacggctgtgcaaaaccaaacacctgattccgcaggagtcccggaggggcctaccccttactggcgaatattatgtggaaaacgcggatggaaaagttacagtgcgccgtttccgcaagagacccgaaccttcttccgactatgatctgtcaccggccaagcaggagccaaaacctttcgataggctacaacagctgctccccgcaagtcagagcactcaactcccttgcagctcatcccctcaggaaacaacgcagtcccgccccatgccccccgaggcaagaagactaattgtcaacaaaaatgcgggagagacgctgttgcagcgggcagccaggctgggatatgaggaggttgtcctgtactgtttagagaacaaaatatgcgatgtgaaccatcgcgacaacgctgggtattgcgctctgcatgaggcctgcgcaaggggctggctgaacatcgttcggcacctgctagagtatggggcagatgttaattgttcggcacaggatggtacacgcccactgcatgacgcagtggagaatgatcatctggagatcgtgcgcctattgctgagttacggagcggaccctacgttagctacctacagcggcagaacgattatgaaaatgacccactccgagcttatggagaagttcctgacagactatctgaacgacctccagggcaggaatgacgatgacgccagtggcacctgggatttctatggtagctccgtttgtgaaccagacgacgagagcggatatgacgtactcgcgaatcccccaggacccgaagaccaagacgatgacgacgatgcctattctgatgtcttcgagtttgagttctctgaaactcctcttctgccctgctacaatatccaggtgtcagtggctcaagggccaaggaactggttactgttgtccgacgtgctgaagaagcttaagatgtcatcccggatcttccgctgcaactttccgaacgtcgaaattgtgactattgccgaggcggaattctataggcaagtgtctgcgtcccttttgttttcctgttctaaggatctggaagccttcaacccggagtccaaagaactgctggatttagtggaatttactaatgagatccaaacacttctgggaagcagtgtggagtggttgcaccccagcgacctggcctctgacaattactggtag

SEQ ID NO: 109687 - DNA, 5112 bp, synthetic construct
  misc_feature 1..5112: note = Description of Artificial Sequence: Synthetic coding sequence
  source 1..5112: mol_type = other DNA
atgctgagcgccactcctttgtatggaaacgtacactcctggatgaattcggaacgcgtgcgaatgtgcggggcaagtgaggaccgaaagattctagtgaatgatggtgacgccagcaaggcgaggttggaactcagggaggagaatcctctgaatcacaatgtggtggacgccagcacggctcatcgcattgatggccttgctgccctttccatggacaggacagggctgatacgcgagggcctccgcgtcccaggcaatatcgtgtatagctctttgtgcggcttgggatccgaaaagggccgggaagctgctactagtactctgggagggctggggttctctagtgagaggaatcctgagatgcaatttaagccgaacacacccgaaacagtagaggccagcgcagttagcggcaaaccacctaatggtttcagcgcaatttacaagacgcctccgggcattcagaagtccgcggtggcgacagccgaggccttgggactggatcggcctgcctctgataagcagtcgcccctgaacattaatggggcttcctatttaaggctcccgtgggtaaatccgtacatggaaggtgccacacccgcgatctatccattcctcgattcgccaaacaaatatagcctgaatatgtacaaagcgctgctacctcaacaatcatacagcttagctcagcccctgtacagcccggtgtgcaccaacggagagagattcctctatctgccccctccacactacgtggggcctcacatcccatcatcgttggcaagtccaatgcggctctcaaccccatcagccagtcctgctatacccccccttgtgcactgcgcggataaatccctcccttggaaaatgggagttagcccgggaaatcctgtggacagtcatgcatacccccatatccagaattcaaagcagcctcgtgtgccttcggcgaaagccgttacctcaggactgccaggagacacggctctgttactcccgccaagcccccggccttcccctagggtgcaccttccaacacaacccgcggcggatacctacagtgaattccacaagcactatgccaggatcagcacatccccgtctgttgctctttcaaagccttacatgacagtgagttctgagtttcccgccgctagactgtcaaatggtaaatacccgaaagctcctgagggaggggagggcgcccagcctgttccaggacacgcgagaaagacagccgtccaagacagaaaagacggatcctcaccacctctactcgagaaacagaccgtcacgaaagatgtgaccgacaagcccctcgatttgagcagcaaggtcgtcgatgtagatgcctcaaaagcggaccatatgaagaagatggcacctacagtgcttgtccacagtcgagctggttcagggctcgtgttgtcagggtcagaaatccctaaagagacgctgtcaccacccggcaatggttgtgcgatctatcggagtgagatcatcagtaccgctccaagctcctgggtcgtgcctggcccttccccaaatgaagagaacaacggaaaatcaatgtcacttaaaaacaaggcgctggattgggcgataccacaacagaggagcagtagttgccctcgtatgggcggcacagatgcagtgataaccaatgtctcgggatctgtctcctcagcgggtaggcccgccagcgcctccccagctccgaacgccaacgcggacggaacaaagacatctcgcagttcagtcgaaacgacccctagtgtgattcagcacgtggggcaacctcccgccactccggccaaacactcgagctccaccagttccaagggggcaaaggcttccaacccagaaccatccttcaaagcaaatgagaatggactacccccatcatctatattcctgtctcccaatgaggcgtttcgatctcctcctataccttacccccgaagctatctgccctatccagcacctgaggggattgccgtcagcccactgtcattacatggtaagggacccgtgtacccacatcctgtgctactgcctaacgggtcccttttccccggccacctggccccgaaacctggactgccatatgggctgcctaccgggcgccccgagtttgtcacctatcaggacgcccttggcttaggcatggtacatcctatgttgattccgcatactcctatcgagattacgaaggaagaaaagcccgagcggagatctcgctcacacgaacgggcaaggtacgaggaccctactcttagaaatcgatttagcgagattctcgagacctcctccactaaacttcatcccgacgtccctacagataagaacttaaaacccaatccaaactggaatcaggggaaaacggtcgtcaagagtgataagctggtatacgtagacttactgcgggaggagccagacgcgaagactgacaccaacgtctccaagccatcctttgccgccgaaagcgtcggccagtcggccgagccgcccaagcctagcgtggagcccgctctgcagcagcaccgcgatttcatcgcccttagagaggaattggggaggatttccgacttccacgagacctatacctttaagcagcctgtattcaccgtgagcaaggattccgtactggctggcacaaataaagaaaatctgggcttgcccgtttcgacacctttccttgaaccccccttgggctccgatgggccagccgtcactttcgggaaaactcaggaagaccctaagcctttctgtgtggggtctgctcctccttccgtggacgtcaccccgacctacaccaaggacggggcagatgaagccgagtcaaatgacggcaaagtcctcaagcctaagcccagtaagctcgccaaacgcattgctaatagtgcggggtacgtgggcgatcggttcaagtgcgtgaccaccgagctgtatgcggattcctcccagcttagtcgggaacaaagggctcttcagcgggccatgatgagattttcggagcttgaaatgaaagagagagaaggagggcacccagccacaaaagatagcgagatgtgcaagttttctccggccgactgggaaagactgaagggcaaccaagataaaaaacccaaaagtgtgacgctcgaggaggccatagctgaacagaacgaaagcgagaggtgtgagtattctgtgggaaataaacatagggatccgtttgaggcgcccgaggacaaggatttgcccgtcgagaagtattttgtggagcggcaacctgtctctgaaccgcctgctgaccaggttgcctcagacatgcctcacagtccaacactacgagtggaccgaaagcggaaagtgagtggcgattctagccacactgaaaccacggctgaggaggtgccagaagaccccctgctgaaggctaagaggcgacgggtgagcaagggcctgcaccccaaaaaacagcgtcatctgcttcacctgcgggaaagatgggaacagcaagtgagcgccgcagacggcaagcctggccggcaaagccggaaggaggttacccaggccacacagcccgaagctattccccagggaacaaacatcaccgaagaaaagccgggtaggaaaagggcagaagctaaaggtaacagaagctggtcagaggaaagcctgaaaccctcagataatgagcagggtctgccagtgttttccggaagccctcccatgaaaagcctctcatccacctcagcggggggcaagaagcaggcccaacctagctgcgcccctgcctcaagaccacccgctaaacagcagaaaatcaaagaaaaccagaagaccgacgtgctttgcgccgacgaggaggaggactgtcaggccgccagcctcctgcaaaagtacacggataattctgaaaagccatcgggtaaacgcctctgcaagaccaagcatctcatccctcaggagagccggcgagggctcccactcacaggcgaatactacgtggaaaatgcggacggtaaggtgacagttcgtagatttaggaagcgtcccgagccatccagtgattacgatctgagcccagcaaagcaggaacctaaaccattcgatcggcttcaacagttgcttcccgcatcccaatctacacaactaccttgctccagctctccacaggaaacaactcagagtcgccctatgccaccagaagcccggaggctgatcgtcaataagaatgccggggagacgctgcttcagcgagcagcccgtttagggtatgaagaagtggtcctctattgcctggagaataagatatgtgatgtcaaccatagggacaacgccggatattgcgcgttgcatgaagcctgcgcccgcggatggctcaacatagtaaggcacctgctcgagtatggtgctgatgtgaattgcagcgcccaggacggcacccggccccttcacgatgccgttgagaatgaccacctggagatagtgagacttctgctgtcctacggggctgatccgacactcgccacctacagtggccgcaccatcatgaaaatgacccactcagagttgatggaaaagttcctgaccgactacttgaacgatctccaaggcagaaatgacgatgatgcctctggtacatgggacttctacggcagtagtgtgtgcgaacctgacgacgagagcggatatgacgtcttggccaatcctcccggccctgaagaccaagacgacgatgatgatgcctacagtgacgtttttgaattcgagttttcggaaacacccctactgccctgctacaatatccaggtttcagttgctcaggggccacgtaactggctgcttttgtccgatgtcctgaaaaagctgaagatgtctagccggatttttcgctgcaatttcccaaatgtcgagatcgtcaccatcgccgaggcagagttctatcggcaggtatctgcatccctcctattctcatgcagcaaagacctggaagctttcaatcctgagtcgaaagagctccttgatctggtggagttcacaaatgagatacaaacattattgggcagttctgtggaatggctacaccccagcgacttagctagcgataactattggtag

SEQ ID NO: 109688 - DNA, 1869 bp, synthetic construct
  misc_feature 1..1869: note = Description of Artificial Sequence: Synthetic coding sequence
  source 1..1869: mol_type = other DNA
atgcctcactctcctacactacgtgtcgatcggaaaaggaaggtctccggagactcatcccacacagagacaacagcagaggaggtcccagaggaccctcttcttaaggccaaaaggcggcgagtgagcaagggcttacacccaaagaaacaaaggcatttattgcaccttcgtgagcgctgggaacagcaagtaagcgcagctgacgggaaaccaggcagacagtctagaaaagaggtgactcaggccacccagccggaggccatcccccaaggtacaaatattacagaggagaagccgggaaggaagagagcagaagctaaagggaataggtcttggagcgaagagagtcttaaaccctctgacaatgaacagggactgccagtcttctccggcagccccccaatgaaatccttgtcaagcacaagcgcgggcggtaaaaagcaggcacagccctcatgtgctcccgcttcccggccacctgctaaacagcagaagattaaggagaatcagaaaaccgacgtgctctgtgcagatgaggaggaggattgccaggccgccagccttcttcagaagtacactgacaattctgagaagccttcggggaagcgactgtgtaaaactaaacacctgatcccacaagaatctcgtagggggctgccactgacaggagagtattatgttgaaaacgccgacggaaaggttacagttcgcagatttagaaagcgccctgaaccgtctagtgactacgatctgtcgcccgccaaacaggaacctaaaccatttgaccggttacagcagttgttgcccgcatctcagtccacgcagctgccctgctcaagcagcccccaagagactacacaaagtcggcccatgccccccgaggcccgcaggttaatagtgaataaaaacgcaggcgagaccctcctgcagcgagctgcaaggctggggtacgaagaagtcgtactgtactgcctcgaaaacaagatctgtgatgtgaaccatcgtgacaatgccggatactgcgccctgcatgaggcctgcgcccgcggctggctgaacattgtgagacatttgctcgaatacggagctgacgtgaattgcagcgcccaggacgggactagacccctccatgacgctgtggagaatgatcacctggaaatcgtgaggctgctgctatcatacggcgccgacccaacactggccacttactcagggcggaccataatgaagatgacacattcagaactgatggagaaatttctgaccgattacttgaatgatctgcagggtaggaacgacgatgacgcctctgggacctgggacttctatgggtcgtctgtgtgtgagcctgacgatgagagcggctatgacgtactggccaatccaccgggccccgaagaccaggatgatgatgacgatgcttactctgatgtgtttgaattcgagttttcagaaaccccactgctgccttgctataacatccaagtctccgtcgcacagggcccccgcaactggctcttgctttccgatgtcctaaagaagctaaaaatgagctcgagaatatttaggtgtaactttccaaacgtggaaatcgtcaccattgctgaagccgaattttaccgtcaagtcagcgcctccctcctgttcagttgcagcaaggaccttgaagctttcaatcctgagtccaaagaactcctcgacctggttgaattcaccaacgaaattcagactttactgggcagctctgtggaatggctgcacccaagcgacctcgccagcgacaattactggaaatcaccgcagattgcacgcggcagcgtggaaggtaagaagacagacgacaagacttccaagaccgatctctag

SEQ ID NO: 109689 - DNA, 5166 bp, synthetic construct
  misc_feature 1..5166: note = Description of Artificial Sequence: Synthetic coding sequence
  source 1..5166: mol_type = other DNA
atgctttcggcaacccccctgtacggcaacgttcactcgtggatgaactctgagcgagtgaggatgtgcggtgcatccgaggaccgcaagattctagtgaacgatggagatgcttcgaaggcgcgcctggaacttagggaggagaacccactgaaccataacgtcgttgatgcaagtactgctcatcggatagacggccttgcggccctgagtatggaccggacgggacttattcgtgagggcctgcgagtaccaggcaacattgtgtattcttcgctgtgtgggcttggttcagagaagggccgcgaggcagccaccagcacactgggaggcctcggcttctcctccgagcgtaacccagagatgcagtttaaacctaacactcccgaaactgtggaggcgtccgccgtttctgggaaacctcccaacggtttctcagctatctataagacaccccctggcatacagaagagcgctgtggcgacagcagaggctctggggctcgaccgccccgcaagcgacaagcagtcacctctgaacattaatggcgcgtcatacctgagacttccatgggtgaacccatacatggagggggccacccctgccatctacccttttctcgacagcccgaacaaatatagcctgaatatgtataaagctctattgccacagcaatcttacagcttagctcagcctctctactcgcccgtttgcactaatggtgagcgctttctgtacctgccgccccctcattacgtgggcccccatattccttcttcgctggctagccctatgagactatccaccccaagcgcgtctcccgcaattcctcctctggttcattgtgctgacaagagcctgccatggaagatgggggttagtcctggcaaccctgttgactcccacgcatatccacacatacagaactccaaacaacccagggtgccatcagcgaaagctgtcacatctggactccctggcgacaccgccctcttgttgcccccatcccctcgccctagtccaagggtgcacttgccaacacagccagccgctgacacctattccgaattccataaacactatgctcgaatttctactagcccctccgtcgcactctccaaaccatacatgaccgtgtcttcagaatttccagccgcccggctcagcaacgggaaatatccgaaagctccagagggcggcgagggtgctcaacctgtccccgggcatgctcggaaaacggccgtgcaagacaggaaggacgggtcttccccgccactcctagaaaagcagactgttacaaaagatgtgaccgataagccactagacctgagcagcaaggtggtggatgtggatgctagcaaggcagatcatatgaagaagatggcgccgactgtgttggtccatagccgcgccgggtcaggtctggtgctgtcaggctccgaaattccaaaagagacactatccccgcccggaaatggctgcgcgatctaccggtccgaaatcatttccactgccccaagttcatgggttgttccggggccctcccctaacgaagagaataatggaaaatccatgagcctgaaaaataaggcattggactgggctatccctcagcagagatcttccagttgccctagaatgggagggaccgacgccgtcattactaatgtgtctgggagcgtctcaagtgctgggcgccccgcttcagcgtctcccgcgcctaacgcaaacgcagacggcactaaaacctcccggtctagcgtcgaaacaaccccgtcagttatacagcatgtgggtcagccccccgcaaccccagctaagcacagttcgtcaacgtccagcaagggtgccaaggccagtaatccagagccatctttcaaggcgaatgagaatggtctcccaccatcctctattttcctgtcgcctaatgaggcttttcggtcgccgcccatcccctaccctcgctcttacctgccttaccccgctccagagggcatagctgtgtctcctttgagtctccatggaaaggggccggtatatccccacccagttcttctgcctaacggttctctatttcccggacacctggcccccaagcccggccttccctatggtctcccgacggggagacccgagttcgttacgtaccaggatgctttaggcctggggatggtgcacccgatgctgatcccccacacccccatagagattactaaagaggagaaaccagaaagacgcagcagaagccatgaaagagcgcgttacgaggatccgacgctgcgtaatcgctttagtgaaatcctggagacctcttcaaccaagctccatccagacgtgccaacggataagaatctgaagccgaatccgaactggaaccaagggaagacagttgtgaagtccgacaaattggtttatgtcgatttattacgggaggaacccgatgctaaaactgacaccaacgtctctaaaccttcctttgctgccgagtcagtgggtcagagcgccgagccacctaagcccagcgtggagccggcacttcaacagcaccgggatttcattgcgttacgggaggagctcgggcgtatatcagacttccacgaaacatacacattcaagcagcccgttttcactgtctctaaggactccgtgttggcgggcaccaacaaggagaatctaggcctgcccgttagcaccccattcctcgaaccacctctgggaagcgatggacctgctgtgacatttggcaaaacgcaagaggaccctaagcctttctgtgtcggcagcgctcctccaagtgttgacgtgacccccacttatactaaggatggcgccgatgaggccgagagcaacgacggtaaggtgctgaagccaaagccatctaaactggcaaagaggatagcaaattccgcagggtatgtgggggacaggttcaagtgcgtgacgactgaactgtacgccgactcctcccagctgagtagggaacagcgggccctccagatggaagggttgcaagaggactcgatcttgtgcctccccgcggcctactgtgaacgcgccatgatgagattttcagaactcgagatgaaggagagggaaggaggacaccctgctactaaggactctgaaatgtgtaagttctcaccggccgattgggagcggctgaaaggcaaccaggacaagaaaccaaagtctgtgacgctggaagaagctatcgctgagcagaatgaaagcgagcgctgcgagtacagtgttgggaacaagcaccgcgatccgttcgaggcacccgaggacaaggacctgccagtggagaagtattttgtggagcgtcagcccgtctccgagcctccagcagatcaggtggctagtgacatgcctcacagccccacccttcgtgtggacaggaagcgtaaagtaagtggggactcttcccacaccgagacaacagcggaagaggtccctgaggaccctctcttaaaagccaagcgacgacgagtttcaaaagggctgcatcctaagaagcaacgccacctgttgcacttaagagaacgttgggagcagcaagtgagcgctgcagatggtaaacctgggcggcagtctcggaaggaggttacacaagccacccagcccgaggcaattccccagggaacaaacatcaccgaagaaaagccaggaagaaaacgcgctgaagccaaagggaatcgctcatggagcgaggaatctctgaaaccctccgataatgagcaggggctgcccgtgttttccggaagcccacccatgaagagcctgagttccacctctgctggcggcaagaagcaagctcagcctagctgcgcccccgcatctagacctccagcaaaacagcagaaaattaaagagaatcagaagacagatgtcctgtgtgccgatgaagaagaagactgtcaggccgcgagtctgctgcagaagtatacagacaacagcgaaaaaccatccggcaagcgcttgtgcaagacgaagcatcttattccccaggagagtcgcagagggctccctcttactggggaatactacgtggagaacgcggatggcaaagtgactgttaggcgatttcgcaagcggccagagccctcatccgactacgacctgagccctgccaagcaggaaccaaagccattcgaccgattgcagcagctgttgcctgcaagccaaagcacccagctaccctgttccagttctccacaggaaactactcagtctcgtccgatgccacccgaggcccggaggctgattgttaacaaaaatgccggggagaccctcctgcagcgcgccgcccggcttggatacgaggaggttgtcctctactgcctcgaaaacaaaatctgcgatgtaaatcaccgggacaatgccggctattgcgcactgcatgaagcttgcgcacgcggctggttgaacatcgtccggcacctcctggagtacggcgccgatgtgaattgctcggcccaggatgggacaaggcccctgcacgacgccgtcgagaatgaccacttggagattgtgcgtctgctgcttagctatggagcagacccaactcttgctacttacagcggcaggactatcatgaaaatgacccactctgagttaatggagaaattcctgaccgactacttgaatgatttgcagggcaggaatgatgatgacgccagcggcacgtgggacttctatggcagctccgtgtgcgagccagacgatgagtctggatatgatgtactcgccaatccacctggacccgaagaccaagatgatgatgatgacgcatactctgacgtgtttgagttcgagttcagtgagacccccctgcttccctgttacaatattcaggtgagtgtggcacaaggtcccagaaactggcttcttctgtcagatgtcttgaagaagctcaaaatgagttcacgtatatttcgctgtaatttccccaacgtggagatagtcacaatcgcagaggccgaattctatcgacaggtaagcgcctctctgttattttcatgcagcaaggacctggaagctttcaacccggagtccaaagagctgctggatctcgtcgaattcacaaacgagatacagaccctgctgggcagcagtgtagaatggctgcacccttcagacttggctagtgacaattactggtag

SEQ ID NO: 109690 - DNA, 87 bp, synthetic construct
  misc_feature 1..87: note = Description of Artificial Sequence: Synthetic coding sequence
  source 1..87: mol_type = other DNA
atgctctccgccaccccactctacggcaacgtgcattcctggatgaattccgagagagtgcggatgtgcggggcctctgaagactag

SEQ ID NO: 109691 - DNA, 1236 bp, synthetic construct
  misc_feature 1..1236: note = Description of Artificial Sequence: Synthetic coding sequence
  source 1..1236: mol_type = other DNA
atgacacggccggcttttcaaccgccagctacacccgccaagcatagctcttccacctcgtctaagggagcaaaggcatccaacccagagccgagcttcaaagcgaacgagaatggcttgcctccctcctcgatttttctgagtcctaatgaagcattccgaagtccccccatcccctaccccagatcttacctgccctatcctgctccagaaggaatcgctgtttccccgctgtccctgcatggcaaagggcccgtttatccacatcctgtcctgttgccgaacggatccttgtttccgggtcacctcgctcctaaacccggtctgccttacgggctgcctacaggccggcccgaatttgtcacgtaccaggatgccttaggactagggatggtgcacccaatgcttattcctcacactcccatcgaaatcaccaaagaggagaaacccgaacgcaggtctaggagccacgagcgtgcacgttacgaggaccccacacttagaaataggttctcagagatcttggagaccagctccaccaaactccaccctgatgtgccaactgataagaatttgaagccaaacccgaactggaaccagggcaaaacggtggttaaatctgataaactagtgtatgttgaccttctgcgagaggagccagatgccaagaccgatactaacgtttctaagccctcctttgccgcggagtccgtgggccagagcgccgaacccccaaagccaagcgtggaacccgcccttcaacagcaccgcgattttattgcgttgcgggaggagttgggcaggatctctgattttcacgaaacatatacatttaagcagcctgtgttcacagtctctaaagactcggtgctagctggcactaataaagagaatttgggtctgcctgtgagcactccatttttagagccgccattgggctcggatgggcctgccgtgacctttgggaaaacccaagaagatccaaaacccttctgcgtcgggtccgccccaccttccgttgatgtcactccaacgtacaccaaagatggcgcagacgaggccgagagtaacgacgggaaggtcctgaagccgaagcctagcaagctggctaaacgaatcgctaattccgccggatacgtgggcgataggttcaagtgcgttaccactgagttatacgccgattcttctcagttgtctagagaacagcgtgctctccaggtctcccctcccacttag

SEQ ID NO: 109692 - DNA, 2238 bp, synthetic construct
  misc_feature 1..2238: note = Description of Artificial Sequence: Synthetic coding sequence
  source 1..2238: mol_type = other DNA
atgccagtcttgagcagaccaaggccgtggcgaggcaacaccctgaagagaactgccgtgctactagccctcgcagcttatggcgcccacaaagtgtaccctctggttcgacagtgtcttgcccctgctagagggctccaggcacccgctggagaaccgacccaggaggcctccggcgtagcggccgcaaaagccggtatgaatagggttttcttgcagagactattatggcttctgaggctcctcttcccacgtgtgctctgtcgggaaacaggtctgctcgcgcttcacagtgcagctctggtcagccgaaccttcctgtctgtatatgttgcaagacttgatggaagacttgccagatgtatcgttcgaaaggatcccagagcctttggatggcagttactgcagtggcttctgattgcgcttcccgctacctttgtgaattctgccatccgttacctggaggggcagctggccctgagcttcaggtctagacttgtagcccatgcgtatagactgtacttctcacagcagacctattaccgagtctccaacatggatggccggctcagaaatccggaccaatccctgaccgaggatgtggtagctttcgccgcatctgtggcccatctatactccaacctcaccaaacctttactggatgtagcagtgacttcttataccctcctgagggccgccaggagcaggggagcgggaacagcatggcccagcgcaattgccggtctggtagtattcctcacagcgaacgtcctcagagcgttcagccccaagtttggcgaactggtcgctgaggaggctagaagaaagggtgaactgcgttatatgcactcacgcgtggttgcaaatagcgaagagatagccttctatggcggccacgaggtggaactggcgttgcttcaacggagctaccaggaccttgcatcacagatcaacctcatcttgttagaacgtttgtggtatgtgatgctggagcagtttctgatgaagtacgtgtggagcgcaagcggcttgctcatggttgccgtccctattatcactgccactggctacagcgaatctgacgcagaggcagtgaagaaggccgctctggagaagaaagaagaggaattggtttccgagaggaccgaagcgtttacaatcgcccgtaatttactgacagccgctgctgatgctatcgaaagaattatgtcttcatacaaggaagtgaccgaactggccggctacactgccagagtccacgaaatgtttcaagtcttcgaggatgtgcagcggtgccacttcaagaggcccagggaactggaagacgctcaagccggctctggtaccattggccggtccggcgtacgcgtggagggccccttgaagattcggggtcaagtagtcgacgttgaacagggaatcatttgtgagaacatccctatcgtgactcccagcggagaagtggtggttgcgagcctgaatatccgagtggaggaggggatgcacctcctcatcactggacccaacgggtgcggtaaaagttcactctttcggattttaggaggattatggccaacctatgggggggtgctttacaaacctccgccacagcgtatgttctacattccgcagcggccctacatgagtgtcgggtcactgcgagaccaggtgatctatcctgatagcgtggaagacatgcaacggaagggctacagtgagcaagacctggaagctatcctggacgtggtgcatctgcaccatattctgcagcgggaaggagggtgggaagccatgtgtgattggaaggatgtgctgtctggcggagagaagcagcgaattgggatggccagaatgttttaccatcgcccaaaatacgccctcctagacgagtgcacatcagcggtgagcatcgatgtggaaggtaaaatttttcaggcagctaaagacgccggcattgccctgctgagtatcactcacaggcctagtttatggaaatatcacacccacctgctgcagttcgatggagaaggtggatggaaattcgaaaaacttgacagtgctgcaagactgagcttgactgaggaaaaacagcgtctcgagcagcagctcgccggaatacctaaaatgcagagacggctgcaggaactgtgtcagatactgggcgaggcagtggcccctgctcacgttcctgcacccagcccacaaggaccgggagggcttcagggcgctagcacctag

SEQ ID NO: 109693 - DNA, 5358 bp, synthetic construct
  misc_feature 1..5358: note = Description of Artificial Sequence: Synthetic coding sequence
  source 1..5358: mol_type = other DNA
atgattagcactgcccccctgtatagcggggtccataactggactagcagtgatagaatccggatgtgtggtattaatgaagaacgtcgtgcaccactctctgacgaggaaagcacaacgggagactgtcagcacttcgggtcgcaggagttttgtgtgtcttcctctttttctaaagtggaactgactgcggtcgggtccggaagcaacgcccgcggagctgacccggatggttccgctaccgaaaaactgggtcataaatcagaggataaaccagatgacccacaacccaagatggattatgccggaaatgtggccgaggcggaggggttcctcgtgccactgtcctctccaggagatggcttgaaattgccagcatcagattctgcagaagcttctaactccagggctgattgctcctggacccctctgaacactcagatgtcaaaacaggtggattgcagtcctgctggcgtgaaggccctggactcgagacagggcgtgggtgagaaaaacacgtttattctggctacactgggaaccggcgttcccgtggaaggcacacttcccctggtcactactaacttcagtcccctgcccgcaccaatctgtcccccggccccaggcagcgccagtgtgccacacagcgtccccgatgcattccaggtcccgttgagtgttccagcccctgtgccccatagcggcctagtcccagtgcaggtcgccactagcgtgcctgcaccctctccacccctcgctccagtgcccgcactggctcctgcccccccttccgttcccacgttaataagtgatagcaaccctctttcagtctccgccagtgtcctcgtgccggtacctgcaagtgcaccaccgagcggcccagtcccactatccgctcccgctcctgctccactgagtgttcccgtttcagccccacccctggccctgatccaagccccagtcccaccatccgctccaaccctggtgctggctcctgtacctaccccagtcttagccccgatgcccgcaagcaccccacccgctgctcctgcgcccccctcggtccccatgccaacgcccactcccagttctggccctccgtccacacctactctgatcccagccttcgcccccacccccgttcctgctccgacacctgctccaatcttcaccccggcgcctacacccatgcctgctgcgacaccagcagctatccccacgtccgcgcctatcccagctagtttcagcctctcacgcgtgtgtttcccagccgcccaggcccccgcaatgcagaaagttcccttgagtttccaaccaggcacagtgctcacaccatcccaacctttggtctacatacctcctcctagttgtggtcagccactgtcagttgctacccttccaactactctcggcgtgagctcgaccctcaccctgcctgtgctgccttcatacctgcaggataggtgtttgccaggcgtactggcctccccagaactgcggagctacccgtatgccttttcagtcgcgaggcctctcacatctgattccaagctagttagcctggaggtaaaccgtcttccctgtacaagcccatctggatctaccactacacagcccgcccctgatggtgtgccagggcctttggccgatacaagtttggtaaccgcttccgctaaggtgctacccactccacaacccctcctgcccgcccccagcggctcctcagctcctcctcacccagccaaaatgccgtctgggactgagcaacagactgaaggcacatccgttacctttagcccactgaagagccccccacagttagagagagagatggccagtcccccagagtgcagcgagatgccgctcgacttatcatctaagtccaaccgacagaaactcccgctgcctaatcaaaggaagacaccgcccatgccagtgctgacccccgtccatacaagcagtaaggctctgctgtccacagtcctgagccgtagtcagcgaacaacgcaggccgctggcgggaatgttacaagctgcctcgggtcaacaagtagcccattcgtaatcttcccggagattgtgagaaatggcgatccctccacctgggttaagaattcgaccgcactcattagcaccataccaggtacttatgttggggtcgccaatcctgtgccagcctcactgcttttgaataaggatcctaacctcggactaaatcgagatcctcgtcaccttcccaagcaggagccaatctccattatcgaccagggagagcccaagggaacaggcgccacctgcggaaaaaagggaagtcaggcgggagctgaaggtcagccatccaccgttaagaggtacacccccgcgagaattgctcccgggctgcccggatgccagaccaaagagctctccctttggaagccaacggggccggcgaacatctacccacgatgtagcgtgaacggcaaacctacctcaacccaggtgttgccggtcgggtggtctccttaccaccaggcctccctgctttcgataggcatctcttccgcaggacagctgactccctcccaaggcgctcctattcgccccacgtccgttgtttcagagttctccggagtccccagcctttccagctcggaggcggtccatggtcttccagaaggtcagcccaggccaggcggtagctttgtccctgagcaagacccagtgactaaaaacaagacttgtagaattgctgctaagccatatgaagagcaggtgaacccggtgctgctcacattgtctccacagacagggacattagcgctaagcgttcagccttccggtggggacatccggatgaatcagggcccagaggaaagcgaatctcacctgtgctcggattccacgccaaaaatggaggggcctcagggggcctgcggtctgaagttggccggggacacaaaacccaagaaccaggtcctggctacttatatgtctcacgagcttgtgcttgcaactcctcagaaccttccaaagatgccagagctgcctctcctgccacacgatagccaccctaaagagctcatcttagatgttgtgcccagtagccgacgaggtagctcaaccgaaaggccgcagctcggaagtcaggttgatctggggagggtgaaaatggaaaaagtggatggcgacgtagtgtttaatctggctacctgttttcgagccgacggcctgcccgtggccccccagagaggacaggccgaggtcagagccaaagcaggacaagccagagtaaaacaggaaagcgttggagtattcgcgtgcaagaataagtggcagcccgatgatgttaccgaaagcctcccccccaaaaagatgaagtgtgggaaggaaaaagatagcgaagagcagcagttgcagccccaggcaaaagcggttgtacgctcaagtcataggccaaagtgcaggaaactaccctccgatcctcaagaatcaaccaaaaaaagtccacggggcgcttccgacagtggtaaagaacacaacggcgtgcggggcaagcacaagcatcgcaagcccaccaaacccgagtctcaatccccggggaaaagggctgatagccacgaggaaggctcactcgaaaagaaggctaaaagttcattcagagacttcattcctgtggtattatccacacgcacgcggagtcagagcggctcaatttgttcaagcttcgctgggatggccgacagcgacatgggaagccaggaagtgttcccaacggaggaggaggaggaggtgacaccaacaccagccaagaggaggaaagtgaggaagactcaacgtgacacccagtacagatcacatcatgcacaggataagtctctgttaagccaaggccgacggcacttgtggagggctcgggaaatgccctggcgcacggaagccgcacgccagatgtgggacacaaatgaagaggaagaagaagaagaggaggaggggcttcttaagcgcaaaaagaggcggagacaaaagagccggaagtatcaaacaggagaatacctcacagagcaggaagacgaacagcgccgcaagggacgcgctgaccttaaggcccgtaagcagaaaacatctagtagccagagtttggagcatcgtctccggaaccggaaccttcttctgcctaataaggtgcagggaataagcgattcacctaacgggttcctccccaacaacttggaagagccggcatgcctggagaatagcgagaagccgtctggcaagcggaagtgtaagaccaagcatatggctactgtctctgaagaggccaagggtaaggggcggtggtctcaacagaagacaagaagtccgaaatcacctaccccagttaagccaacagaaccctgcaccccttcaaagtcgaggagtgcctcatctgaggaggcttctgaaagccctactgctcgccagattcctcccgaggcacgacgtctaatcgtgaataagaacgctggcgaaactctcctccagagagccgcacgattggggtataaggacgtggtgttatactgcctgcaaaaagattccgaagacgttaatcatagggataatgcaggatacacagccctgcacgaggcctgtagccggggctggactgacatcttgaatattctactcgaacacggtgctaatgtcaactgtagcgcgcaggacggcacaaggccagttcacgacgccgtcgtaaacgacaatctggagacaatttggctcctcctctcttacggcgccgaccccaccctggctacctacagtggacagaccgctatgaagcttgctagctcagacaccatgaaaaggtttctcagtgaccacttgagtgacctgcagggaagagcagaaggagatcccggggtcagctgggatttctacagctcatcggtgcttgaggagaaagacggctttgcctgtgatctgttacacaatcccccaggctcttccgatcaggagggtgatgaccctatggaggaggatgactttatgttcgagctctctgacaagcccctgctgccttgttataacctgcaggtgtctgtatctaggggcccctgtaactggttcctcttttctgacgttctgaaacggctgaaactgtcaagcaggatcttccaggcccgctttccacactttgagattacaaccatgccaaaggctgaattttatcgccaagtcgcaagttctcagctgctcacgcccgctgaacgccccggagggttagacgacaggagtccccccgggtccagcgagacagttgagctggttcggtacgagcccgacctcttgagactgttggggagtgaagtggaatttcagtcctgcaactcttag

SEQ ID NO: 109694 - DNA, 4746 bp, synthetic construct
  misc_feature 1..4746: note = Description of Artificial Sequence: Synthetic coding sequence
  source 1..4746: mol_type = other DNA
atgatatccaccgcccccctttactcaggcgtgcacaactggacatcttcagatagaattcgcatgtgtggtattaacgaggagcgccgggctcccctttccgacgaggagtcgacaactggagactgccagcatttcggcagtcaggaattctgcgtatcctcaagtttttctaaagtcgagttgactgccgtgggttccggctccaacgctcgaggagccgatcccgatgggtcagctaccgagaaactcggtcacaagagcgaggacaaaccggacgacccccagccaaagatggattacgcagggaatgtggccgaagcagagggcttcctggtgccactctcatcacctggcgatgggctgaaattacctgctagcgattcggccgaggctagcaacagcagagctgactgctcctggactcccctcaacactcagatgagcaagcaggttgattgttcaccggctggagtgaaagccctggactcaagacaaggtgtgggggagaagaatacgttcatcttggccactctcggaacaggggtcccggttgaagggacgttaccactggtcaccactaattttagccctctccctgcccctatttgccctcccgctcctggttccgcttccgtcccccacagcgtgccagacgcatttcaagtgcccctgagtgtacccgcacctgtcccacatagcgggcttgtgcctgtccaagtagccacatctgtgcccgctccttctccgcccctggcaccggtgcccgctttggccccagctccgcccagcgtacccactctgatctctgatagcaatcccctgagcgtctccgcaagtgtgctggttccagtgcctgcgtccgcccctcccagcggccctgtcccgctttccgcacctgcccctgcccccctttccgtgcccgtgagtgcaccacccctcgcactgatccaggctcctgtgcccccaagtgctccaaccctggtccttgcccccgtcccgactcctgtcttggcgccgatgcctgcctcaacccctcccgccgcgccagcccctccctccgtccctatgcctacccccacgccttcatcaggcccacccagtactcctacactcatccccgcttttgcgccgacacccgttccagcacctactccggcacctatctttacccccgctccgacgcctatgcctgctgccacaccagccgcaatccctaccagtgcgcccatcccagcctcattctcactttcaagagtgtgcttccctgctgcccaggcccctgctatgcagaaagtcccactgagtttccaacctggtactgttcttacaccctcccagcctcttgtatatatccctccgccatcgtgcggacagcccctgtctgtcgctacattgcctactaccttgggtgtgtcatccactttgaccctgccagtgctgccgtcatatctgcaggatcggtgtctcccaggggtattggccagcccagaactgcgaagttatccctacgccttctctgtagcacgaccactcaccagtgattctaaattagtgtctttggaggtgaatcgactcccttgtacatccccttctgggtcaacgactacacaacctgcgccagacggtgtgccgggccccttggccgacacatccctggttaccgcctccgcgaaggtcctgccaactccccaaccactgcttcccgccccatccggaagctctgccccgcctcacccagccaagatgcctagcgggaccgagcagcagactgagggcacttcagtaaccttctcaccactgaaaagtccccctcaactcgagcgtgaaatggcttctcccccagagtgttccgagatgcctctcgatctgagcagcaaatccaaccgccagaagttgccactccccaaccagcgcaaaaccccacctatgcctgtcttaacccccgtacatacttcttctaaggctttgttatctacagtgctgtctaggtcccagcgtaccactcaggctgcagggggcaacgtaacttcgtgtctggggtctacctcatctccttttgtgattttccctgaaatcgtgcgcaatggcgatccttcgacctgggtgaaaaattcgaccgcgttaatttccacaatccccgggacctatgttggcgtggctaaccctgttccggcctccctgcttctgaataaggaccccaatcttggcttaaaccgtgatccacgccatctgcccaaacaggagccaatcagtatcattgatcagggggagcccaaaggcactggggccacgtgcggaaaaaaggggagtcaggcaggcgctgaaggacagccatctaccgttaagagatacacaccagcacggattgcacctgggctcccgggttgccagactaaagagctgtctctgtggaaaccaaccggccctgcgaatatttaccctcgatgtagcgtgaacggaaagccaacatccacccaggttttgcctgtgggatggagcccatatcaccaggcatctctgctgagtatcggcattagcagcgccggacagctcactccttcccagggggctccaatccgacctacctcagtagtgagtgaatttagcggtgtgccatcattgagctcaagcgaggctgtacacgggctacctgaagggcagccccgaccaggggggagcttcgtgcctgagcaggaccccgttactaagaacaagacttgccgaatagccgcaaagccctatgaggagcaagtgaatcccgtgctgctgacactgagccctcaaacaggcactctggccctgtctgtgcagcccagtgggggtgatattcgaatgaaccaaggccctgaggaatctgaatcacatctctgcagtgatagcactccgaagatggaggggccgcaaggtgcttgtgggctcaaactggctggtgacactaagcccaagaaccaagtgcttgccacctacatgtcacacgagttggtgctggccacacctcagaaccttccaaaaatgccggaattgcccttacttccacatgacagccatccaaaagaactcattctagacgttgtgccaagctcaagacggggtagtagcaccgagcgcccccagctcggctctcaggtggacctaggaagagtgaagatggagaaagttgacggagacgttgtgttcaacctcgctacatgcttcagggccgacggactccctgtcgcccctcagcgtggacaagcagaggtaagggcgaaggccggccaagcccgggtgaaacaggagtctgtcggtgtgttcgcgtgtaaaaataagtggcagccagacgacgtgaccgagtcgttgccccctaagaagatgaagtgcggtaaggaaaaagatagcgaggaacagcagctgcagcctcaggcgaaggccgtggttcgctcgtcccataggcctaagtgcagaaagctgccatccgatcctcaggaaagcaccaagaagtcgcctcgaggagcgtcagacagtggcaaagagcacaacggggtgcgcgggaagcacaagcaccgaaagcccacaaagcccgagtctcaatcccctgggaagcgggctgactctcacgaggaaggaagtctggaaaaaaaagctaaaagctcattcagagactttattcctgtcgtactgtcaacaagaacgaggagccagtccgatttgaaggcaagaaaacagaagacctcaagttcccagtccctcgagcaccgtctgagaaataggaacctgctgctacctaataaagtccaaggaatatccgattctccaaacgggttcctgccaaataacctggaagagcccgcgtgtctagaaaactctgaaaaaccctcaggaaagcgcaagtgtaagacaaagcacatggccactgtctctgaagaagccaaggacgttgtgctttattgtctgcagaaagatagtgaagatgtgaatcaccgcgataatgctggctacactgccctgcacgaggcctgtagcagaggatggactgacatcttgaatatcctgctggagcatggcgctaatgtcaattgtagcgcccaggatggaaccagacctgtacatgacgccgtcgtgaatgataatctggagactatttggttgctcctctcttacggggccgaccccaccctggctacttactctggtcagaccgctatgaagctcgcaagcagtgatactatgaaacgctttctgtccgaccacctgtccgacctgcaggggcgtgctgaaggtgacccaggcgtcagttgggatttctattcatcctcggtactcgaggaaaaggatggattcgcctgcgatctgttacataacccacctggcagctcagatcaggagggggatgacccaatggaagaggatgactttatgttcgaactcagtgacaaaccattgttaccatgttataacctgcaggtctccgtgagcagagggccatgcaactggttcctgttctcggacgtccttaaaaggctcaagctgtccagcagaatctttcaggctcggtttccacactttgagattacgacaatgccaaaagctgagttctatcgtcaggttgcgtctagccagctcttgactccggcggaaaggcccgggggcctggacgataggtctcctccaggatctagcgagactgtggagctggtgcgctatgaacctgacctcctgcggctcctgggaagcgaagtagagttccaatcttgcaacagctag

SEQ ID NO: 109695 - DNA, 2226 bp, synthetic construct
  misc_feature 1..2226: note = Description of Artificial Sequence: Synthetic coding sequence
  source 1..2226: mol_type = other DNA
taacccttactgccagccccaagtggttcatctgctccacctcatcctgccaaaatgcccagtggcactgaacagcaaactgagggcacctctgtgactttctcgccgctcaaaagtcctccccaactggagcgtgagatggcgtctccaccggagtgctcagagatgccacttgatctgtctagcaagtctaacaggcaaaaactccccctcccaaaccagcgtaaaacccctcctatgcccgtactaacacccgttcatacttcttctaaggcactcttgtccactgttctctccagatcccagcgcacaacccaggcagcaggaggcaacgtgaccagttgtctaggatccacttcaagccccttcgtcatatttccagagattgtcaggaacggcgaccccagcacttgggtgaagaactcaacagccctcatatcgacaattcccggcacgtacgtgggcgtcgcgaacccagtcccagcttccttgctgttgaataaagacccaaatctgggcctgaatagggatccgcggcatctccccaagcaagaaccaatcagtatcatcgatcagggggaacctaaaggaacaggcgcaacctgcggtaagaaagggagtcaggcaggcgctgaagggcagccaagcaccgtcaagcgatatacccctgcccgaattgcaccaggtctaccggggtgtcaaactaaggagttgagtttatggaagccaacggggccagctaacatttatccaaggtgttctgtgaacggtaaacccaccagcactcaggtcctgccagtgggctggagcccttaccatcaagcttccctcctcagcatcggtatcagctcagctggacagctgactccttctcagggggcccccatcaggcctacctctgtggttagtgaattcagcggcgtgcctagcctctcaagctctgaagcggtgcacgggctgccagagggccagcctcggccgggcggcagtttcgttccagaacaggaccctgttaccaaaaataaaacctgccgaatcgctgccaagccatatgaggagcaagtgaaccccgtgttactcaccctcagcccccagacaggaactcttgctctctcggtacagccttcaggaggggatatcagaatgaatcaaggccctgaggaaagtgagagccacttatgcagtgattccacccctaagatggaagggccccagggggcttgcggcctgaagcttgctggagatactaagcccaagaatcaggtcctcgcaacgtatatgtcgcacgagcttgtgctggcaaccccccagaatcttcccaagatgccagaactaccactgttacctcatgactctcatcccaaggaactgatcctggacgtggtccctagttcaaggcgcggctcatccaccgaaagaccccagctgggctctcaagtcgacctcggtcgtgtgaaaatggaaaaagtggacggggatgttgtttttaacttagcaacttgctttagagcagacggcctgcctgttgcaccccagagggggcaggcggaggtccgcgccaaggccggccaggctagagttaaacaggagagcgtgggagttttcgcttgcaagaataagtggcagcccgatgacgtgactgagtctctacctcccaagaagatgaaatgtggcaaagaaaaggacagtgaagagcagcagttgcagcctcaggctaaggcagtcgtccgctcctcccatcgcccgaagtgcagaaagctgccctctgatccacaggagtccacgaagaaatcaccccgcggcgcaagtgactcagggaaagagcacaatggagtgcgtgggaagcacaagcatcgtaaacccactaagccagaatcacagagtcctgggaaaagggcagactcgcacgaagaggggtccctggaaaagaaagccaagagttcctttcgggattttatcccagttgttctttctacccgcacccgctcacagtctgaccttaaggctcgtaagcagaagacatcaagttcgcagtctctcgagcatcgactcaggaataggaatcttctgttgccaaacaaggtgcaggggatttccgattcccccaatgggttccttccgaataatctcgaggaaccggcctgtctggaaaactccgagaaaccctctgggaaacggaaatgcaagacgaaacatatggcaaccgtgtctgaggaagccaaatag

SEQ ID NO: 109696 - DNA, 4158 bp, synthetic construct
  misc_feature 1..4158: note = Description of Artificial Sequence: Synthetic coding sequence
  source 1..4158: mol_type = other DNA
actcccgcggccattcccacatccgcccccatccccgcctccttttcactcagtcgggtctgctttcccgctgcacaggcccctgccatgcagaaggtccccctgtctttccagccggggacagtcctcaccccttcccagcccctggtgtatattccaccaccaagctgtggccagcccctgagtgtggccaccctgcccaccacccttggtgtgagcagcaccctcacactgcctgtgctgccgagttacctacaagatcgatgtctgccaggggtgctcgcgagccctgagctgcggtcctatccctacgctttctccgtagcccgacctctcacctcagattctaagttagtgtctctggaggtgaataggctgccgtgtacctccccttccggttctactaccacccagcccgcccccgatggcgtgcccggaccactggcagatacaagcttggtaacagcctctgcaaaggttcttcctacgcctcaacctctcttgccagccccctctgggagctccgcaccaccacatcccgcgaagatgccatcgggaaccgagcaacagactgagggcacttctgtgacattcagcccgttaaaaagccccccccaattagaacgtgaaatggcgtcccccccagaatgttctgaaatgccgttggacctgagctcaaagagtaaccggcagaagctgccccttcctaaccagcgcaaaaccccccccatgcccgtattaacacctgtacatacctcgagcaaggccttactcagcactgtactatcgcggagccagcgcaccacccaggccgccggcggaaacgtgacaagctgtctcggttcaactagttccccattcgttatttttcccgagatcgtaagaaatggcgatccttccacctgggtgaagaactccacggcgcttatcagcacgattcctggcacctatgtgggcgtcgctaaccccgtgccagcctccctgttgctgaataaagacccaaatttaggcttgaatcgtgatccgagacacttgccaaagcaagaacctatctccatcatcgaccagggtgagccaaagggaacaggtgcaacatgcgggaagaagggctcacaggccggcgccgagggacagccttcaactgtgaagcggtacactccggcaaggattgccccagggctcccgggctgccagaccaaagagctgtccttgtggaagccaacgggaccggctaacatttatccacggtgcagcgtgaacggtaagcccaccagcacccaagtgcttcctgtagggtggagtccgtaccaccaggccagcctgctgagtattggaatttcaagcgcaggccagctgaccccctcccaaggtgcacccattcggcccacgtccgtcgtgagtgaattctcaggggtaccctctctctctagctcagaagcggttcacggattgcctgaaggtcagccacggccaggcgggtccttcgttccggaacaggatccagtgacgaagaataagacatgccgcatcgcagctaagccgtatgaagaacaggtcaatcccgtcctcctgaccctgtccccgcaaacggggaccttggccctaagcgtacaaccatcaggaggcgacatcagaatgaaccaagggcccgaagagagcgagtctcacctctgcagcgattctactccgaagatggaggggcctcagggagcttgcgggctgaaactggccggcgacacgaagccgaagaaccaggtgctggccacctacatgtcacacgagctggtgctggccactccacagaacctgcccaagatgccagagcttccgctcctgccccatgacagccaccccaaggagctcatcctcgacgtagtcccaagctcccggcgggggagctcaaccgaacggccccagctcggctctcaggttgacctgggcagagttaagatggagaaggtcgacggagatgttgtgtttaatcttgccacctgctttagggcagatggtctacctgttgcaccgcagagagggcaagccgaggtgagagccaaagccggacaggcccgcgtgaagcaggaatcagtgggcgtctttgcctgtaagaataaatggcagcctgatgatgtgactgaatcactgccaccaaaaaagatgaagtgcggcaaggagaaggattccgaggagcaacagcttcagcctcaggctaaagccgttgtgagatccagccaccgtcctaaatgcagaaaactgccttcagatccacaagagagtacaaagaagagcccccgcggcgcctccgacagtggcaaagagcataatggagtacgcgggaaacataagcaccgaaaacccaccaagccagagtcacagagccctggcaaacgcgcagactcacatgaggagggcagtctagaaaagaaagcgaaaagcagtttcagagatttcattccagttgtactctccactcgcaccaggagccagagcggcagtatttgctctagcttcgcgggcatggctgacagcgatatgggtagtcaggaagtctttccaactgaagaggaagaggaagtgactcctacacccgccaagcgtcgtaaggttcggaagacccagagggacactcagtaccggtctcaccacgcgcaagataagagccttctgtctcagggcaggcgtcacctgtggcgggcccgagaaatgccttggcggaccgaggctgccaggcagatgtgggataccaacgaagaggaagaagaagaggaggaggagggactgcttaagcggaaaaagaggagacggcaaaaatccaggaagtaccagacgggcgagtaccttaccgagcaggaggacgaacagaggagaaaagggagagccgaccttaaagcaagaaaacaaaaaacatcttcttcgcagagccttgagcatagactcagaaaccgtaacctgcttcttcctaacaaggtacaaggtattagtgactctcccaatggctttttacccaataacttggaagagcctgcctgtttggaaaactccgaaaagcctagcgggaaacgcaagtgcaagactaagcatatggccactgtctctgaggaagcgaagggaaaaggccgctggagtcagcagaagacccgcagcccaaagtccccaaccccagttaagcccacagaaccttgcaccccctccaaaagcaggtcagctagcagcgaagaggcctctgagagcccaactgcccgtcagataccgccagaggcaaggcggctgattgtcaacaagaacgcaggcgagaccttgctgcagcgcgccgctaggctcggatacaaagacgttgtgctgtactgcctccaaaaggattcagaggacgtgaaccatagggacaacgccgggtataccgccctccacgaggcatgctcacgaggctggactgacatcctgaacattttattggagcatggcgctaacgtgaattgttcagcccaggacgggacacgcccggtacatgatgctgtggtgaacgataacctggaaacgatttggcttcttctctcttatggcgccgatcccaccctggcaacctactctggccaaacggccatgaagctagcaagttcagataccatgaagcgatttcttagtgaccacttaagtgatctgcaaggccgagctgagggtgatccaggtgtatcctgggatttttactcttccagcgttctggaggaaaaggacggtttcgcttgcgacctacttcacaaccccccggggtcatcagaccaagagggtgacgaccccatggaggaggatgattttatgtttgagctgtccgacaagcctctcctgccatgctacaatctgcaggtatccgtgtcaagggggccatgcaactggttcctgttttcggacgtgctaaagagacttaaacttagcagtaggatttttcaagctaggttcccccactttgagataactacaatgccaaaagctgagttctacaggcaagtcgcttcttctcagctgctcacgcctgccgaacggcccggaggcctggacgaccgctcccccccaggatcctccgagaccgtcgaactcgtaaggtacgagcctgatctgcttcgcctgctgggtagcgaggtagagttccagtcgtgtaatagttag

SEQ ID NO: 109697 - DNA, 5136 bp, synthetic construct
  misc_feature 1..5136: note = Description of Artificial Sequence: Synthetic coding sequence
  source 1..5136: mol_type = other DNA
atgatttccaccgcaccactttacagtggcgttcataactggaccagctcagaccgcattaggatgtgcggcatcaatgaggaacgccgcgcaccactgagcgacgaagagtccactaccggggactgccagcacttcggctcgcaggagttttgtgtctcaagcagtttttccaaagtagagctgaccgctgtggggagcggctccaatgcccgtggtgccgaccctgacggaagcgccacggaaaagttgggccataaatcagaggataaacccgatgacccccagccaaagatggactatgcgggtaacgttgccgaagccgagggcttcttggtccccttgagttctcccggagacgggttgaagttacctgcatctgattccgctgaggcctccaattccagagccgattgttcatggacgccacttaacacccaaatgagcaagcaggtggactgcagtcctgcgggcgtgaaggccctcgacagccgccagggcgtgggggagaagaatacatttatcctggctaccctgggtaccggcgtgccagtggagggcaccctacccttggtcacgacaaatttctcacctttgcccgcccctatttgtcctcccgctcccggctctgcctcagtcccgcatagcgtgcctgacgcgtttcaggtaccactgtccgtcccagccccagtaccccactcagggttagtgcccgtccaagttgcaactagtgtgccagccccctccccaccactggctcccgtacctgctttggcccccgcaccaccatcagtgcccacgctgatctccgattctaacccattatcagtgagcgcttccgtcctggtcccggtcccagcttccgcaccccctagcgggccggtacctcttagcgcccctgcccccgcccccctgagcgtgccagtgtccgcccctccactggctctcattcaagccccagtgccccctagtgcccccaccctcgtgttggcgccagtgcctactcctgtgcttgcaccaatgcctgcctcaactcccccagcggcccccgctcccccttcagtgccaatgcctaccccaacacctagctctggtcctcctagtaccccgactctaatccctgcctttgccccgactccggttcctgccccaacccctgcgcccatctttaccccagcccccactccaatgccagccgccacacccgctgccatccccacatccgctcctattccagccagcttcagcttgagccgcgtctgtttccccgctgcgcaggcaccagcaatgcaaaaggtgccattgagttttcaaccaggcaccgtcctgacaccctcccaaccgttagtgtatataccccccccttcatgtggccagcctctgagcgtcgctactttaccaacaaccttgggcgtgtcaagtactttaacgttaccagtgctcccatcttatcttcaggacaggtgtttgccaggtgtgttggcttctcccgaattgcgaagttatccttacgccttctccgttgcccgccctctaaccagcgactctaaactcgtttccttggaagtcaaccgtctgccctgcacatctccaagcggatcaacaacaacacagcctgcgcccgatggggtgccggggccacttgcggacacttcactggtgaccgcaagtgccaaggtgttgccaacaccacaaccgcttttgccagccccgtccggctcttccgcaccaccccatcctgccaaaatgcccagtggcactgagcagcaaacagagggcacctctgttaccttcagtcctctcaagtcacctccacaattggagcgggaaatggccagcccccctgagtgcagcgaaatgccactggatttgtcatctaaatctaaccgacagaaactgcccctcccgaaccagagaaagacaccaccaatgcctgtgctcactcctgtgcacacttcttctaaagcacttttaagtactgttctctcccgatcacagaggaccacccaagccgccggtggcaatgtgacatcttgtttgggatcaacatcttctccattcgtcatcttccccgagatcgtccgcaatggggaccctagcacatgggtgaaaaattcaacagccctcatttcaaccattccaggaacatacgtcggcgtagcaaaccccgtgcctgcctccctgctcctgaacaaagatccaaatctgggtctaaatcgcgacccccggcaccttccgaagcaggagccaataagcataatcgaccagggtgaaccaaaggggaccggcgctacgtgcggcaaaaaaggcagccaggccggtgccgagggccagcctagcaccgtgaaaagatatactcccgcgcggatcgcccccggtttgcccgggtgccagacaaaggagctgagcttgtggaaacctaccggaccagccaacatttatcctaggtgcagtgtaaacggcaagcccacatctacccaagtcttgccagtcggctggtcgccttaccatcaggcctccctcctgtcgatcggaatttctagcgctgggcaactcacgccgagccagggcgctccaattagacctacctccgtcgtgtccgagttttccggagtcccgtccttaagcagctcagaagccgtgcacgggttgcccgagggacaaccgagaccagggggctcgtttgtgcccgagcaagaccctgtgacaaagaataaaacttgccggatcgccgccaagccttatgaggaacaggttaacccagtgctcctgactttaagcccgcagactggcaccctcgctttaagcgtccagccatctggcggtgacatcaggatgaaccaggggccggaggaaagcgagagtcatctatgttcagatagtactcctaagatggagggcccacagggtgcatgcggcttaaagctcgcaggggacactaaaccaaagaatcaggtgctcgcaacatacatgagccatgaattagtcctggcgactccgcaaaacctgccgaagatgcccgagctgccactcctacctcacgatagccatccgaaagagttaatactggacgttgtcccaagcagcaggaggggcagcagtacagagcgccctcagttaggctcccaggtagatcttggtagggtcaagatggagaaagtggacggcgacgtagttttcaacctcgcaacttgcttccgcgccgacgggctccccgtagccccgcaaaggggacaggctgaggtgcgggctaaggctggccaggctcgagttaaacaggagagcgttggtgtgttcgcttgtaagaacaaatggcagccagatgacgttacagagagtctgccgcctaagaaaatgaagtgtgggaaggagaaagatagcgaggaacagcagctccagcctcaggcaaaggctgttgtgaggtcctcgcaccggcctaagtgtaggaagctgccgtccgatccccaagagtctactaaaaaaagtcctcgcggggcatcggattcgggtaaagagcataacggcgtaagaggcaagcacaaacatcgtaagcccacaaagcccgagagtcaatctcccggtaaacgggccgattcccacgaagagggtagtttggaaaaaaaagcaaagagttcattccgtgacttcatccctgtggtgctgtcaactcgaaccagatctcagagtggatctatctgttccagtttcgctggaatggccgactcagatatgggcagccaggaggtgtttccgaccgaagaagaagaggaggtcacgcccactccagcaaagcggagaaaagttagaaagacacagcgagatacccagtaccgctctcaccacgcccaggacaaatctcttctcagccaggggcgacgccatttatggcgagcacgagagatgccatggagaactgaggctgcccggcagatgtgggatacaaacgaggaggaggaagaggaggaggaggaggggctccttaaacgcaagaaaaggaggcgccagaaatctcgcaaataccagacaggggagtatctcactgagcaggaggacgaacagaggcggaaggggcgggcagacctgaaagctcgcaagcagaagactagtagcagccagtcactagaacacagactacggaatcggaacctcttgctcccgaacaaagtccaaggaatctcggactcacccaacggcttcctacccaataaccttgaggagcctgcatgcttggaaaattctgagaaaccttcaggcaagcgtaaatgtaagacaaaacatatggctacggtcagcgaagaagccaaggacgttgtcctgtactgtttacagaaagatagtgaagatgtgaatcaccgcgataacgccggttataccgccttgcacgaagcgtgttctagggggtggaccgacatactcaacatcctccttgagcatggcgcgaatgtgaattgttctgctcaggacgggactagacctgtccatgatgcggtggtcaacgacaatctagaaaccatctggttattgctctcctacggagctgaccccacgttggccacctacagtggacagacagccatgaagttggcatcctccgataccatgaagcgattcctgtccgatcacttaagtgacctgcaaggtcgcgcagaaggcgaccctggggtgagctgggacttctactccagttcagtgctggaggaaaaagatggtttcgcctgtgacttactccacaatcccccaggatctagcgaccaggagggagatgatcctatggaggaagatgacttcatgtttgagctgtcagacaagccattactaccatgttacaatctgcaggtgtcagtcagccggggcccatgtaactggttcttgttcagtgacgtcctgaaaagactgaagctgagctcgagaatcttccaggcaagatttccacatttcgagatcaccacaatgcccaaggccgagttttaccgccaggtggctagcagtcaactcctaacaccagctgagcggccaggaggactggacgacagatcccccccaggaagctctgagacagtggaacttgtgaggtacgagcccgacctactcagactactggggagtgaagtcgagttccagagttgtaactcatag

SEQ ID NO: 109698 - DNA, 1260 bp, synthetic construct
  misc_feature 1..1260: note = Description of Artificial Sequence: Synthetic coding sequence
  source 1..1260: mol_type = other DNA
atgccactgtcagatttcatcttagcactgaaagataacccttatttcggcgcgggatttgggctcgtcggggtcggcactgctctggccctggcccgcaaaggagtacagctcggccttgtggccttcagacgccattatatgattactttagaggttccagcgcgggacagatcatatgcatggttactttcatggctcactcggcacagtacaaggactcagcatctctccgtggagactagctatctccagcacgagtcaggccgcatctccactaagttcgagtttgtgccatctccgggcaaccattttatctggtacagaggaaagtggattcgggttgagcgatcccgcgagatgcaaatgatagacctgcaaactggaaccccgtgggaaagcgtgacattcactgctcttggcaccgacaggaaggtgtttttcaacattcttgaagaggctcgagagttggctttacagcaggaggaaggcaagaccgtgatgtacaccgcagtgggcagtgaatggcggccatttgggtatccacgacgtagaagaccattgaatagtgtggttctgcaacagggcctggcggaccgtatcgtgagagatgtccaggaattcattgacaatccaaagtggtacactgataggggcattccctatcgcagaggatacctgttgtacggtcctcccgggtgcgggaagtccagcttcatcacagccttggctggagagctggagcattccatctgcctgcttagtctgacagactcaagtttatcagatgaccgactcaatcacctgctgtccgtggccccccagcaatccctggtgcttctggaggacgtggacgccgcgtttcttagcagagatctcgctgttgagaacccggtgaagtaccaggggttaggcaggctgaccttttcaggactgttgaacgccctggatggcgtggcgagcactgaggctcgcatcgtgttcatgacgacaaatcatgtggaccgactagatcccgctttgattcgccccggccgggtggatctgaaggagtacgttggttactgctcccactggcaactcacgcagatgtttcagcgattctaccctggacaagcccccagcctcgcggaaaacttcgctgagcacgtgttacgcgctaccaaccaaatttctcctgctcaggttcaggggtattttatgctgtataaaaacgaccccgttggtgcaattcataatgcagagtccttgcggaggtag

SEQ ID NO: 109699 - DNA, 1260 bp, synthetic construct
  misc_feature 1..1260: note = Description of Artificial Sequence: Synthetic coding sequence
  source 1..1260: mol_type = other DNA
atgcccctgtctgattttatcctggccctgaaagacaatccttactttggagcaggctttggccttgttggagtggggactgcactggctctggcacgcaaaggcgtgcagctggggctcgtggccttcaggagacactatatgattacgctggaggtacctgcccgggacagatcttatgcctggctgctgagctggctaactcgtcattcgacccgtacccaacacctatctgtggagacctcctatttacaacatgagtccggcagaattagcaccaaattcgaatttgtaccttcacccgggaaccacttcatctggtacaggggaaagtggatcagagtagagcgctcccgcgagatgcagatgattgacctccaaacaggcacaccttgggagtccgtgacgttcactgcgctcggaaccgatcggaaagtcttttttaatatcctggaggaggcaagggagctggcattgcagcaggaagaagggaaaacagtaatgtacaccgcggtgggatctgaatggcgtccattcggttacccacgtaggcggcggccgctgaactccgtcgtactccagcagggactggccgaccgtatcgtccgggatgtgcaggaattcatcgataacccaaagtggtataccgatcggggaattccctataggcgggggtacctactgtatggcccgcctggctgcgggaaaagctctttcattaccgcccttgcgggcgaactggagcactctatctgcctattgtccttgaccgactctagcctctccgatgacagacttaaccacttattgtccgtggcaccccagcagagcctcgtcttactcgaggacgtcgatgcagccttcctgagccgagatctcgcggtggagaatcccgtaaaataccaaggcttgggccgactgacattcagcggactcttgaatgctttggacggtgtcgcgtccacagaggctcggatagttttcatgacaacgaatcatgtggataggctggaccctgctttgatacgcccaggtagggttgatctgaaagagtatgtcggatactgttcacattggcagttgacgcaaatgttccaacgtttctatcccggacaggcaccctccctggccgaaaatttcgctgagcatgtgctcagggctacaaaccagatttcccccgctcaggtgcaaggctatttcatgctgtacaaaaatgatcctgtgggtgccatccataatgccgaatccctcagacgctag

SEQ ID NO: 109700 - DNA, 1260 bp, synthetic construct
  misc_feature 1..1260: note = Description of Artificial Sequence: Synthetic coding sequence
  source 1..1260: mol_type = other DNA
atgcctttaagtgactttatcctggcccttaaagataatccttacttcggagccggattcggactggttggggtgggaactgctcttgccctggcccgaaagggcgttcagctcggtttggtagcgtttcgcagacactacatgatcacattggaggtgcctgctagagaccgcagctacgcctggctgctcagctggctgacacgccactctactcgcacacaacatctctccgtcgagacatcttatttgcaacacgaatctggcaggatctccacgaaatttgagttcgtcccctcacctgggaaccattttatctggtaccgtggcaagtggattagggttgaacggtctcgagagatgcagatgattgacctgcagaccggcacaccctgggagtctgtgacttttaccgcattgggaactgacaggaaggtttttttcaatatactggaagaggctcgtgagcttgccctccagcaggaggagggtaagacagttatgtacaccgcggtgggaagcgagtggcggcccttcggatatccgagaaggagaaggccactgaacagcgtggtgctgcagcaaggactggccgaccgcatcgtgcgggatgtgcaggagttcattgataatccaaaatggtatacagacagaggaatcccttataggcgcggctatctactgtacggcccacccgggtgcggtaagagcagtttcattaccgccttggctggagagctggagcacagtatatgcctcctttcactgacagactcctccctgtctgacgacaggctgaaccatcttttatcagttgccccgcaacaaagtctggtgctgctggaagatgtcgatgccgcctttttatccagggatctggccgtcgaaaacccggtaaagtatcagggattgggccggttgacatttagtggactgcttaatgcacttgacggagttgcctctacagaggcccgcatcgtatttatgaccacaaaccacgttgatcgtttggacccggcgctgattaggccaggtcgcgtcgacctgaaggaatatgttggctactgctcacactggcaactcactcagatgtttcagagattctatcccgggcaggccccgtccctggctgagaacttcgccgagcacgtgctgcgcgctaccaaccaaatttccccggcccaggttcagggctacttcatgctgtacaaaaatgaccccgttggcgctatccacaatgcagagtcactgcgcaggtag

SEQ ID NO: 109701 - DNA, 1260 bp, synthetic construct
  misc_feature 1..1260: note = Description of Artificial Sequence: Synthetic coding sequence
  source 1..1260: mol_type = other DNA
atgccactgagtgattttatcctcgccctaaaagataatccatacttcggcgccggctttggacttgtcggcgtgggcacagctctggccctggcgcgtaaaggggtgcagctcggacttgtggcttttcgtcgccattatatgattacactagaggtgccggccagggataggagctatgcttggctcctgtcctggcttactcggcactcaacccggacacagcatctttctgtggaaacttcctacttgcagcatgaaagcggaaggatctctacaaagttcgaattcgtgccttcccctgggaatcatttcatttggtaccgcgggaagtggatccgggtggagagaagtcgggagatgcagatgatcgacctgcaaacgggcaccccttgggagtcagtaacattcacagcattgggcacggatcgcaaagtgttcttcaatattctggaagaggccagagaactcgccctgcagcaggaggaggggaaaacggtcatgtacaccgccgtgggctctgagtggaggccatttggttatcctaggcgtaggcggcccctgaatagcgtggtcctgcaacagggccttgccgatcggatcgtgagagatgttcaggaatttatcgacaaccccaagtggtacaccgatagagggattccatacagacgcggttacctgctctatgggccccctggatgcggcaaatctagcttcatcactgctcttgcaggagagctcgagcacagtatctgcctgctgtctttgacagacagttcactgtcagatgatcgcctgaatcatttacttagcgtggcaccacagcagtcgctggtgctactcgaggatgtggacgccgcctttctctctcgtgatcttgctgtggaaaatccagttaagtaccagggcctcgggaggctgaccttcagcggtctgcttaatgccctggatggcgtcgcctcaacagaggctcgtattgtgtttatgactactaaccacgtggacagacttgatccggcgctaattaggcctggccgcgtggatctcaaggaatacgtgggatactgcagtcattggcagcttacacagatgttccaacgattttacccgggacaagcaccttctctggcagaaaacttcgcggaacacgtgttgagggctaccaaccagatttctcctgcacaggtccaaggctacttcatgctatacaaaaacgatcccgttggagctatacacaatgcagaatcactaaggagatag

SEQ ID NO: 109702 - DNA, 1260 bp, synthetic construct
  misc_feature 1..1260: note = Description of Artificial Sequence: Synthetic coding sequence
  source 1..1260: mol_type = other DNA
atgcctctctcagacttcattctcgcactgaaggacaacccctactttggtgcaggcttcgggttagtgggggtggggaccgcccttgctcttgcgagaaagggggttcaactgggtctagttgcgtttcgtcgccactacatgataactctcgaagtcccagcccgagatcggtcttatgcctggctgctttcctggctcacccggcacagcacaagaacccagcacctgtcagtggagaccagctacttgcagcacgagagtgggcgtatcagcacaaagttcgaatttgtgccttcccccggtaaccatttcatctggtataggggtaagtggatccgggttgagcgcagtcgtgagatgcagatgattgacctgcagaccgggaccccctgggaatctgtcacctttaccgccctgggcactgatcggaaggtgttctttaacatcttagaagaggccagagaactggctctccagcaagaagaagggaagacagtgatgtacaccgctgtgggttctgagtggcgcccgtttgggtatcccagaagacgccgacccctgaatagcgtggttctccagcagggcttagcagacagaatcgtgagggatgtgcaggagttcatcgataacccgaagtggtacactgaccgtggcattccctatcgcaggggctaccttttatatgggccacctgggtgtggtaaaagttcattcatcactgcactggccggagaactggagcacagcatttgcctgctgtccctgacagattcatcactatccgatgacagactcaatcatctgctgagtgtggctcctcagcagagcctggtgttgctggaagacgtcgacgcggctttcctgtccagagatctagctgtggagaatccagtgaaataccagggactggggcggctcacctttagtgggttgctcaatgccctcgatggggtggcgtcgaccgaggccaggatcgtattcatgacaactaaccacgttgacaggttagacccggccctcatacgacccggccgcgtcgacctgaaggaatacgttggatactgtagtcactggcagttgacacagatgttccagcggttctatcccggccaggccccctcgctggctgagaacttcgctgaacatgtacttcgggcaacgaatcagatctctccagcccaggtgcagggttatttcatgctgtataaaaacgatccagtgggcgctatacacaatgcagagagtctgaggcgctag

SEQ ID NO: 109703 - DNA, 333 bp, synthetic construct
  misc_feature 1..333: note = Description of Artificial Sequence: Synthetic coding sequence
  source 1..333: mol_type = other DNA
atgcccttatccgattttatcctggcacttaaagacaacccctacttcggagcggggttcgggctggtgggggttggcacagctttggctcttgcaaggaagggggtgcagcttggactcgtagcatttaggcgacattatatgatcacactggaggtccctgcacgggacagaagctatgcttggctgctttcatggttgacaaggcatagcacccgcacacaacaccttagcgtggaaacaagctacttacagcacgagagtgggagaatttctactaaattcgagttcgttccgtcccctgggaaccactttatatggtataggggatag

SEQ ID NO: 109704 - DNA, 234 bp, synthetic construct
  misc_feature 1..234: note = Description of Artificial Sequence: Synthetic coding sequence
  source 1..234: mol_type = other DNA
atgccgctgtctgactttatactagctctgaaggacaatccctatttcggcgcgggctttggcctcgtgggcgttggaaccgccctcgcactggctagaaagggtgtccaacttggtctcgttgcatttcgaagacattatatgatcacgctcgaagttccagcacgcgacaggagttacgcctggctgcttagctggttaactaggcacagtacgaggacccaacacttatag

SEQ ID NO: 109705 - DNA, 621 bp, synthetic construct
  misc_feature 1..621: note = Description of Artificial Sequence: Synthetic coding sequence
  source 1..621: mol_type = other DNA
atgccactgagcgacttcatcctggccctgaaggacaacccttacttcggagctggcttcggcctggtgggagtggggaccgccctggccctggcacgcaaaggagtgcaactggggctcgttgcatttaggaggcactatatgataaccctggaggtcccagcaagagacaggagctacgcttggctcctctcatggcttactcgccactcaaccaggacgcagcacctgagcgtcgaaacaagctatctgcagcacgaatcaggcaggatttccaccaaattcgagttcgtgccctcccctggcaaccactttatttggtatcgcggcaaatggatcagggtggaaagaagtcgcgagatgcagatgatagacctgcagaccggtaccccttgggagtcagtgacctttacagctctaggcacagataggaaggttttctttaatattctcgaagaggcgagggaactggcattgcaacaagaggaaggtaaaaccgtcatgtacactgctgtggggagcgaatggagacccttcggctatccgagacgtcgtaggcctctcaacagcgtggtgctacagcagggtctggctgaccgaatcgtgagagacgttcagtag

SEQ ID NO: 109706 - DNA, 1260 bp, synthetic construct
  misc_feature 1..1260: note = Description of Artificial Sequence: Synthetic coding sequence
  source 1..1260: mol_type = other DNA
atgcctctgtccgactttattctggcactgaaagataatccctacttcggggcaggattcgggctcgtgggagtggggactgcgctggccctggctcgaaaaggcgtacagctgggactggttgctttcaggagacactatatgatcaccttagaggtgcctgctcgtgaccgcagctatgcttggctcctaagttggctgacccggcactcaactcggacgcagcacctttcagtagagacatcatacttacagcacgagagtggccgcataagcaccaagtttgaattcgttccctcccctgggaaccacttcatctggtaccgggggaaatggataagagttgagcgatctcgggagatgcagatgatcgatctccagacaggtactccttgggaatctgtaacctttactgctttagggacagatagaaaagtgtttttcaacatcctcgaagaggctcgagagctggccctgcagcaagaggagggcaaaactgtgatgtacacagccgttggcagcgagtggagacccttcggctatccacgtagacggcggcctctgaactctgtggtgctgcagcaagggctcgcagatagaatcgtgcgcgatgtgcaggagtttatcgataacccaaaatggtataccgatcggggcatcccatatcggaggggatacttgctgtacggcccaccgggatgcggtaagagtagctttattacagccctggccggagaactggagcatagcatctgcctcttatcccttacagattcctctctgtctgatgacagactgaatcacctgctcagtgtggcaccccaacagtcgttagttcttctagaggacgtcgacgctgctttcttatcaagagatctggccgttgaaaatcctgtgaaatatcaggggttgggcagactaaccttttcaggactgttgaatgccctggatggcgtcgcgagcactgaggcccgaattgtgtttatgacaacgaatcacgtcgacagactagaccccgccctgatacgacccggccgcgtcgacctgaaggaatatgtgggatactgttcccattggcaattgacacagatgttccagcgtttctatccaggacaggctcctagcttagcggagaatttcgctgaacacgtcctccgcgccacgaaccagatttcccccgcacaagtgcaaggctacttcatgctgtacaagaacgacccagttggagccatccataacgctgagagtctccgcaggtag

SEQ ID NO: 109707 - DNA, 1260 bp, synthetic construct
  misc_feature 1..1260: note = Description of Artificial Sequence: Synthetic coding sequence
  source 1..1260: mol_type = other DNA
atgcccctgtctgatttcatcctggccctcaaagataatccttacttcggcgccggtttcggacttgtgggcgttgggactgctttggccctggctcgaaagggtgtgcagttgggactcgtggctttccggcgacactatatgatcactctcgaggtgcccgccagggacagatcctacgcctggcttctgtcatggctcacccggcatagtactaggacacagcatctatcagtcgagacttcatacctccaacatgaatctggaaggatctcaaccaagttcgaatttgtaccatcaccagggaaccattttatttggtaccgggggaagtggatcagagtagagaggagtcgcgaaatgcagatgattgacttgcagacaggtaccccatgggagtccgtcaccttcaccgcactcggtactgataggaaagtattctttaatatcttggaggaagctcgggagctagcccttcaacaagaggaaggaaagacagtgatgtatacagctgttggcagcgagtggcggccattcgggtacccacgacgcaggcgccctcttaattccgtcgtgctgcagcagggcttagcagaccgcatagtgagggacgttcaggaatttatcgacaaccccaaatggtatactgatcgtggaattccttatcgaagaggctatttgctctacgggcctccaggctgtggtaagtcctctttcattaccgcactggcaggtgaactggagcactcaatttgcctgctttccctgaccgactcttccctctcagatgacaggctgaatcacctgctgtccgtcgctccacaacaaagcctggtactgctcgaggatgttgacgcagctttcctgtcacgagaccttgctgtggaaaacccagttaaatatcagggattgggcaggctgaccttttcagggctcctgaatgctctggacggagttgcaagtacggaagcccggattgtgttcatgacgactaaccatgtggatagactcgaccctgctctgatccgcccgggcagagtggacttaaaggaatatgtgggctactgcagccactggcagcttacccagatgttccagcggttttatccaggccaggcacccagtctcgctgaaaatttcgccgagcacgtgctgcgggcaactaatcagatctctcccgcacaggttcagggttacttcatgctttacaagaacgatcctgtaggggcgattcataacgctgagtctttacggcggtag

SEQ ID NO: 109708 - DNA, 621 bp, synthetic construct
  misc_feature 1..621: note = Description of Artificial Sequence: Synthetic coding sequence
  source 1..621: mol_type = other DNA
atgccactgtccgactttattctggctctgaaagataatccttattttggcgcaggcttcggcctcgtcggcgtggggacagccctagccctggcccgcaaaggcgtccaactggggctcgtcgccttccgaaggcattacatgataacacttgaggttccagccagagatagatcttacgcctggctgctgtcttggctgacccgccactctacgagaacccagcatttatcggtggagacaagctacctgcagcatgaatctggacgcatttctactaagttcgagttcgtaccatctcctgggaaccattttatttggtatcgcggcaagtggatccgtgtggagcgctctagggaaatgcagatgatagatctccagaccggcacaccctgggagtccgtgacttttaccgctcttgggactgaccggaaggtgtttttcaacattctggaggaggcgagagaactggctctgcagcaggaggagggcaaaacggtgatgtataccgcagttggcagcgaatggcgaccattcggctaccctaggagaaggcggccattaaatagcgtcgtcttacagcaaggcctggccgaccgcatcgtgagggacgtacagtag

SEQ ID NO: 109709 - DNA, 1623 bp, synthetic construct
  misc_feature 1..1623: note = Description of Artificial Sequence: Synthetic coding sequence
  source 1..1623: mol_type = other DNA
atgtatgagaacgaatgtgagtgtcagctgcttttgaaagagatgttagagcggttaaataaggaagctgatgaagccctgttgcataacctgagacttcaattggaagctcagtttttacaggacgacatttctgcggccaaagatcggcataagaaaaatctgctggaggttcagacttacatctcaatactacagcaaatcatccataccacaccaccagcaagcatcgtgacatcagggatgcgggaggagaagttgctaacagaacgtgaggtcgcagccctccgttcgcaactcgaggagggacgggaggtgctgtcccacctgcaggctcagcgggttgagttgcaggcacaaaccaccacactcgaacaggccattaagtctgcacatgaatgctatgatgacgagatccagctttataatgagcagatcgaaacactgcgtaaggagatagaggagacggaacgcgttctggaaaagtcttcatatgactgcagacagctggccgtggctcagcagactttaaaaaatgaactagacaggtaccacaggatcattgagatcgagggaaacagacttacttccgcctttattgagaccccaatccccctgtttacccagtctcacggcgtaagcctgtccactggatccgggggcaaagatctgacaagagcactgcaagacattacggcagcaaagcccagacagaaagcattgcccaagaacgttcctaggcgaaaagagatcatcaccaaagataaaacaaatggggcactcgaagacgctcctttgaaaggactggaagacaccaagctcgtgcaggtggtgctgaaagaggagtccgagtctaagtttgaatcggagtcaaaagaggtgagcccattgacgcaagaaggcgcccctgaagacgttccagacggggggcagatttcaaagggatttggaaagctctatagaaaggtgaaggagaaagtcagaagccctaaggagccagaaactcccactgaactatacactaaggagagacacgtgctggttacaggcgacgctaattacgtggaccccagattctatgtatctagtataacagccaaagggggggtggccgtgagtgtggccgaggattctgtgttatacgatggccaggtggagccctcgccggagtctcctaaaccccctctggaaaatggacaggtcggcctacaagagaaggaggatggacagcccatcgatcagcagcccattgataaggagatcgagccggacggagctgagctggaaggcccggaggaaaaacgcgagggcgaggagcgcgatgaggaatcacggagaccttgtgccatggtcaccccaggcgcagaggagcccagcatacctgagccacctaagccagccgctgaccaggacggggctgaggtgttgggaacccgcagccggtcattgcctgaaaaagggcctcccaaggcactggcctacaaaacagttgaagtggtggaaagtatcgagaaaatttctacggagagcatccagacgtacgaagaaactgcggtgattgtggagactatgattggtaagaccaagtctgacaagaaaaagtctggggagaaatcatcgtag

SEQ ID NO: 109710 - DNA, 1998 bp, synthetic construct
  misc_feature 1..1998: note = Description of Artificial Sequence: Synthetic coding sequence
  source 1..1998: mol_type = other DNA
atgtaccgccggtcctatgtgttccagactcggaaggagcaatacgagcacgccgatgaggcgtctcgggccgccgaacctgagagacccgcagacgagggatgggccggagcaaccagcctcgctgcactccagggtctgggtgaacgagtggccgcgcacgttcagcgcgcacgagctctcgaacagagacacgctgggctccgcaggcaactggatgccttccagcgcctcggggagctcgccggtccagaagatgcgctggcccgtcaagtggaatctaaccgacagagagttcgagatctggaggctgaacgcgcacgattggagcgtcaaggaactgaggcacagcgggcattggacgaattccgatcaaagtatgaaaatgagtgcgagtgtcaactgttgctcaaggagatgctcgaacgactgaacaaagaagcggacgaggcgctactccacaatcttagactgcagctcgaggcgcagtttctgcaggatgacatcagtgccgcaaaagacagacataaaaaaaatcttctggaagtgcagacatacatctcaattttgcagcagattatccataccaccccccccgcctcaatcgtgacgagtggaatgcgggaagaaaaacttctgaccgagagggaagttgcagccctgagatctcagctcgaggaaggcagggaggttctgtcccacctgcaagcacagagagtagagctgcaggcccaaaccaccacccttgagcaggccataaagtcagcccatgagtgctacgatgacgagatacaattatataacgaacagatcgagaccctgaggaaggaaattgaggagacagagcgcgtgctggaaaagagctcctatgactgtcggcagctcgccgttgcccaacagacactgaagaatgaactggatcgctaccacagaattattgagatcgaagggaatcgcttgaccagtgccttcatcgagacccccatccctctgttcacccagtcccacggcgtatcattgtctacgggctctggagggaaagatctgacacgcgcgcttcaggatataacggctgccaagccgaggcagaaggcgctgcctaaaaatgttccccggagaaaagagatcatcaccaaagacaagactaacggggccttagaagatgcccccctaaagggtcttgaggatacaaaactcgtacaggttgtcctgaaggaagaaagtgaatcaaagttcgaatccgagagcaaggaggtatccccattgactcaggaaggggcccctgaggacgtgcctgatggcggccaaatctcaaagggcttcggaaaactctacaggaaggtaaaagagaaagtccggtcccccaaagagccagagactcccaccgagctctacaccaaagagcggcatgtgctggttacgggggacgcaaactatgttgacccacggttttatgtttcatcaatcacagccaagggcggggttgctgtcagtgtggcagaggactccgtcctgtacgatggacaggtcgagccgtcccctgagagtccaaagcccccgctcgaaaacggccaagtcgggctgcaggaaaaagaagacggacagccgatcgaccaacaacccatagataaagaaatcgagcccgatggcgccgaactggagggacccgaggagaaacgagagggagaggaacgcgatgaggagagccggaggccttgtgctatggttacaccaggtgcagaggagcccagcattcccgaaccgcccaagcccgcggcagatcaagacggagcggaggttttgggcacccggagtcgtagccttcctgaaaaaggaccccccaaagccctggcgtataagaccgtcgaagtggtggaatctattgagaaaatctctacggagagcattcagacatacgaggagactgccgttatagtggagacaatgatcggcaagactaagtccgataaaaagaagtcaggggagaagagcagctag

SEQ ID NO: 109711 - DNA, 1581 bp, synthetic construct
  misc_feature 1..1581: note = Description of Artificial Sequence: Synthetic coding sequence
  source 1..1581: mol_type = other DNA
atgctcgagcgactgaacaaagaggccgacgaggctctgctgcacaacctgcgcctgcagttggaggcccagtttttacaggatgacatctcggccgctaaagatcgccataagaaaaacctgcttgaggtgcaaacgtacatttctattcttcagcagattatccacaccactccacccgccagcatcgtcacaagtggcatgcgggaggaaaagctgttgactgaacgggaagtggcagccctgaggtcccagcttgaggagggcagggaggttctgtctcacttgcaggcacagagagtggagctccaggctcagactacaacccttgagcaggcaattaagagcgcacacgaatgttatgatgatgagatccaactttacaacgaacagatcgaaaccttgcgtaaagaaatcgaggaaaccgaaagagtgctggaaaagagcagctacgattgtagacagttagctgtcgctcaacagacgcttaagaacgagctcgatcggtatcataggatcatcgagatcgagggtaaccggctgacgtctgccttcatagagactcccattccactgtttacccagagccacggcgtatctctgtcaactggcagcggtggcaaggatctaacacgcgcattgcaagacatcacggcggctaagccaaggcaaaaggcactgcctaaaaatgtgcctcggaggaaagaaatcatcacgaaggacaagacaaatggcgccctggaagacgcacccttaaagggtctcgaggacaccaagctagttcaggtagtgctgaaggaggagtctgagtcaaagtttgagagcgagtcaaaagaggtcagccccttgacgcaggagggggcgccagaggacgtgccagatggggggcagatatcaaagggattcggaaaactgtatcggaaggtgaaagagaaagtacgttctcctaaggaacctgagaccccaactgagctgtataccaaagagagacatgtacttgttaccggggacgctaactacgtcgaccccagattctatgtgtctagcatcacggccaaaggaggggtggcagtctcagtggccgaggattcggtactctatgatggccaagtggagccttcaccagaatctcctaagccccccctggagaacggccaggtaggcctgcaggaaaaggaagacggacaaccaattgatcaacagcccattgacaaagaaatagagcccgatggagctgaactcgaaggacccgaggagaaacgagagggggaggagagggacgaagagagcaggaggccttgcgccatggttacccctggggccgaggaacccagcattcctgaacctcccaagcccgcggccgatcaagatggggctgaggtgttgggcactagatcacgctcccttcctgaaaaaggcccccccaaagctctcgcatacaagacagttgaagtggtggagtccatcgagaaaatcagcaccgaatcaatccagacttacgaagaaaccgcagtcatcgtcgagaccatgattggaaaaactaaaagtgacaagaaaaaatctggtgaaaagagcagctag

SEQ ID NO: 109712 - DNA, 1581 bp, synthetic construct
  misc_feature 1..1581: note = Description of Artificial Sequence: Synthetic coding sequence
  source 1..1581: mol_type = other DNA
atgcttgagcggctgaataaagaagccgatgaagcactgctccacaatctgcggttgcaactagaagcccagtttctgcaggatgatatcagtgctgccaaagatcgccacaagaagaatctgttggaagtgcagacatacatcagtatcctgcaacagattattcacacgacacctcctgcaagcattgttacatccggcatgcgggaagaaaaactgctcactgaaagggaagttgcagcactgagatcacagctagaggaagggagagaagtgctgtcccatctccaggcccagagagtggaattgcaggcgcagaccaccacccttgagcaagcaatcaaatcagcgcatgagtgttatgatgacgagatccagctttataacgagcagatcgagaccctgcggaaggagatcgaagagaccgaacgagttctcgagaaatcgagctacgattgtagacagctggcagtcgcgcaacagacactcaaaaacgagctggatcggtatcatcgtatcattgaaattgaaggaaatagactgaccagtgcgttcattgagactcctattcccctcttcacgcagagtcacggcgttagcctgagcaccggctccggaggcaaggatttgacccgggcgctgcaggacattaccgccgctaagcctaggcagaaagccctgccaaaaaacgtgccacggaggaaggaaataataaccaaggataagacaaacggtgcactcgaggacgcgcctctcaaagggttagaggacaccaagcttgtccaggtggtgttgaaagaggaatctgagagcaaattcgagtcagagtccaaggaggtgtcccccctgacccaggagggggctccagaggacgtacccgacggcggccaaatttcaaagggcttcggaaagctgtaccggaaagtcaaggaaaaggtgcgttcacctaaggagcccgaaacacctacagagctgtatacaaaagagcgacacgtgctcgttacaggtgatgccaattacgtggaccctcgtttctatgtaagctctattaccgcaaaaggaggcgttgcagtgtcagttgcagaagattcagtcctctatgacggtcaggtcgagccttccccagagtcccctaaaccacccttggagaatggacaggtcggtctccaggagaaggaagatgggcagccaattgaccagcagccgatcgacaaggagatcgagcccgatggtgcagaactggaaggtcctgaagagaagcgtgaaggtgaagaacgcgatgaggagtcccgacgaccatgtgccatggtgactcccggcgccgaggaaccgtccatccccgagccgcccaagcctgctgcagaccaagatggtgccgaagtgttaggaaccagatcccggtcactccctgaaaaaggtccacccaaggctttagcctacaagaccgttgaggtggtggagagtatcgaaaagatctccacggagtccattcagacctacgaggagacagccgtaatcgttgagacaatgatcggtaagacgaaaagtgacaagaaaaagtccggcgagaaatcatcttag

SEQ ID NO: 109713 - DNA, 1248 bp, synthetic construct
  misc_feature 1..1248: note = Description of Artificial Sequence: Synthetic coding sequence
  source 1..1248: mol_type = other DNA
atgtctgaacgacgggtggtagttgacctcccaacttctgcaagttcctccatgcccctacagcggcgccgcgcctcttttaggggcccgcggtcgagcagctctctggaaagcccccctgcctctcgtacgaacgcgatgtccggtcttgttcgcgcacctggggtttatgtcggcactgctccaagtggatgcattggaggcctcggcgccagggttacgagacgggccttaggcatcagctccgtcttcctgcaaggattgaggtcgagcggtttagcaacagtcccagcgcctggtctggaacgggaccatggggcagtcgaagacctgggaggatgcctggtcgaatacatggccaaggtacatgcactcgagcaggtttcccaggagcttgaaacccagctgaggatgcatttagaaagtaaggcaactcggagcggtaactggggcgcgctacgcgccagttgggcctcctcttgccagcaggttggagaggccgtactggaaaatgcgcgtctgatgctccagaccgaaacgatccaagccggtgcagacgactttaaggagcgctatgagaacgagcagcccttcaggaaagctgccgaggaagaaattaacagcctctacaaggtcatcgacgaggcgaacctgaccaaaatggacctcgaatcacagatagaatcgcttaaggaggagcttggaagcctgtcccggaactacgaagaagacgttaaacttcttcataagcagctcgccgggtgtgaactagagcaaatggacgccccgataggtaccgggctcgatgatattctggaaaccataagaattcaatgggagcgcgacgtggagaagaatagggtagaagccggcgctctgctccaagcaaagcaacaggctgaggtagcgcatatgtcgcaaacccaggaggaaaagctcgcagcggccctccgggtagaactgcacaacactagttgccaggttcagagtttgcaggctgagaccgagagcttacgtgccctgaaaaggggcttagaaaatacccttcacgatgctaaacactggcatgacatggagcttcagaacctgggcgcagtggtgggccgactcgaggccgaacttagagaaattcgcgccgaggccgagcagcagcagcaagagagagcgcacctgttagccaggaagtgccaactccagaaagatgtggcctcataccacgccttgctggacagagaggagtctgggtag

SEQ ID NO: 109714 - DNA, 1353 bp, synthetic construct
  misc_feature 1..1353: note = Description of Artificial Sequence: Synthetic coding sequence
  source 1..1353: mol_type = other DNA
atggagggaagcaagacaagtaacaactccactatgcaggtgtcatttgtgtgtcagagatgtagccagcctcttaaacttgacacgagctttaagatcttggaccgggtaactatccaggagctgaccgctccccttttaacaacagcccaggcaaagccgggcgaaacccaagaagaagaaactaactctggagaagaaccatttatcgagaccccccgtcaggacggagtttcgcgccgctttattcctcccgctaggatgatgagtaccgagagtgccaactctttcacactcatcggcgaggcttcagatggaggcactatggaaaatctgtccaggcggcttaaggtaaccggtgatctgtttgatattatgtcgggacagacggacgtcgatcatcctctgtgcgaagaatgtaccgacacattgctcgatcagctcgacacacagttaaatgtcacagagaacgagtgtcagaactataagcggtgcctggagatcctggagcagatgaacgaggatgattccgaacagctgcagatggaattgaaggaactggcactcgaggaggagcgacttatccaggagttggaagatgttgaaaaaaaccgcaagattgtggctgagaacctggaaaaagtacaggccgaagctgagaggcttgaccaggaagaggcacagtatcagcgtgaatattcggaatttaagaggcagcaacttgaacttgacgatgaacttaaatctgtggagaatcagatgcgctacgcccaaacacagctggataagcttaagaaaacaaatgttttcaacgccacttttcatatttggcactcaggccaattcggcacaattaataactttcggctaggccgcctcccttctgtaccggtcgagtggaatgaaattaacgctgcttggggacaaaccgtgctcctgctgcatgccctggcaaacaagatgggcctgaagttccagagataccgcttagtgccgtacgggaatcattcctatctggaaagtctgacagacaaaagtaaagaactcccgctctattgctctggtggcttgcgcttcttttgggacaataaattcgatcacgctatggtggcttttcttgattgtgtccagcaattcaaagaggaggtagaaaagggtgagacacgcttctgcctgccctacaggatggacgtagagaagggcaagattgaggataccggtggcagcggcggatcttactctataaagactcagttcaactccgaagaacagtggactaaggccctgaaatttatgctgactaatctcaagtggggcctggcctgggttagctctcagttctacaacaagtag

SEQ ID NO: 109715 - DNA, 840 bp, synthetic construct
  misc_feature 1..840: note = Description of Artificial Sequence: Synthetic coding sequence
  source 1..840: mol_type = other DNA
atggagggttccaagacatctaataacagcacgatgcaggtctcttttgtttgtcagaggtgctctcagcccctcaagctggataccagctttaaaatattagatagggtcacaatccaggaactcactgctcctctacttactacagcgcaggcaaaaccgggggagacccaggaggaggagacaaattctggtgaggagccgttcattgaaacccctaggcaggatggcgtatctagaagatttatccccccagctcgacgctgcctggaaatcctcgaacagatgaacgaagacgacagtgaacagcttcagatggaattgaaggagctcgcactggaggaagaacggcttatccaggagctggaagacgtggaaaagaataggaagattgtggctgagaacctggagaaagtgcaggcggaggctgagcgtcttgaccaggaggaggcacagtatcaaagagaatatagcgagtttaagcgacagcagctcgaattagacgacgagctaaagtccgtggagaaccagatgaggtatgctcagacacagctcgacaagctgaaaaagactaacgtatttaacgccacattccacatctggcacagcggacagttcggtactataaataactttagattaggcagactgccatctgtgccggtggagtggaatgagataaatgcagcctggggccagacagtactcttattacatgctcttgctaacaagatgggactcaagttccagcgttatcggctcgtgccgtatggaaaccattcatatctagaaagcctcaccgacaaaagtaaggacggctgtggcgaaaggcaggactag

SEQ ID NO: 109716 - DNA, 1092 bp, synthetic construct
  misc_feature 1..1092: note = Description of Artificial Sequence: Synthetic coding sequence
  source 1..1092: mol_type = other DNA
atgatgtctaccgaaagcgcaaatagcttcacactgatcggggaggcatctgacggcggcaccatggagaatctgagtagacggctgaaagtgactggcgacctctttgatataatgagtgggcagacagacgttgaccaccctctttgcgaggagtgtaccgatacactcctcgaccagctcgacacacagcttaatgtgactgagaacgagtgtcagaactacaagcgatgtctcgagatccttgaacagatgaatgaggacgacagcgaacagctgcagatggagctcaaagaattggcactggaagaagagcgcctgatccaggagcttgaggatgtggagaaaaaccggaagatagtcgccgagaatctcgagaaagtgcaggctgaagcggagcgtctggatcaggaggaggctcaataccagagagagtacagtgagttcaagagacaacagcttgagcttgacgacgaattgaaatccgtcgagaaccagatgcgctacgctcaaactcagcttgataaactgaagaagacaaacgtcttcaatgccacatttcatatatggcactctggtcaattcgggactattaacaactttaggcttggccgactcccctctgtgccagttgaatggaacgaaatcaacgcagcatggggccaaacagttcttctcttacacgcgctggccaataaaatggggttaaaattccagcgctataggctagtgccctacgggaatcactcgtaccttgagagcttgacagacaagagcaaagagctgcccctgtactgttctggcggactacggtttttttgggataacaaatttgaccacgcaatggtggctttcttggattgcgtacagcagtttaaagaggaagtcgagaagggtgagaccaggttttgtctgccctatcgcatggatgtggagaagggaaaaatcgaggatacaggtggcagcgggggatcttatagcatcaagactcagtttaattcagaagaacaatggacaaaggccctgaaatttatgcttacgaatctgaaatggggattggcctgggtttctagccagttttataacaagtag

SEQ ID NO: 109717 - DNA, 5394 bp, synthetic construct
  misc_feature 1..5394: note = Description of Artificial Sequence: Synthetic coding sequence
  source 1..5394: mol_type = other DNA
atggaacagctcacaaccttaccaaggcccggcgatccaggcgccatggaaccatgggctcttcccacctggcacagttggactccagggagagggggtgaaccctctagtgccgccccatcaatcgccgacacaccacccgctgccttacagcttcaggaactgcgctcagaagaaagcagcaagcccaagggcgatgggtccagtaggcccgtgggcgggaccgatccagagggggctgaagcttgcttgcctagcctgggacagcaggcctcttccagcgggcctgcctgtcagcgtccagaagatgaagaggtggaggccttcctgaaggctaaactgaacatgtcgtttggggaccgacccaaccttgagctgctccgagctctgggagagttaaggcaaaggtgtgccatcctgaaggaggaaaatcagatgctgcggaagtcatcttttcccgagactgaggagaaagtgcgtcggctgaaaaggaaaaatgctgagttggcagtgatcgccaaacgtctggaggagagggccaggaagttacaggagacaaacctccgagtcgagggccctcagtggcttcacgtgagggatttcgatcggctacttagggaatcccagagagaggtgctgcggctgcagcggcagatcgccctacgaaatcagcgagagacacttccccttcctccatcgtggccccctgggcctgctctgcaggcccgggcaggagctccagccccaggggcaccgggggaagcgacccctcaagaagacgccgacaaccttcctgtcattctcggcgagcccgaaaaagagcagcgggtgcagcagttagaaagtgaactttcaaagaaaagaaaaaagtgtgagtcactggaacaggaggcacggaagaaacaacgaaggtgtgaggagctggagttgcaacttcgccaggctcagaacgagaatgcccgcctcgtggaagaaaacagtaggttgagcggccgggctactgaaaaagaacaggtggaatgggagaacgcggaactgcgaggccaactgctgggcgttacccaggaaagggattctgccctccggaagtcccagggcctgcagtctaaactggagagtcttgagcaagtcctcaagcacatgagggaagtggctcaaagacgtcaacagttagaagttgagcatgagcaagcaagattatccctgcgggaaaagcaggaagaggtgcgaaggctccaacaggcgcaggccgaggcacagagggagcacgagggggcagtgcagttgctcgagagcaccctggactccatgcaggcgcgcgtccgcgaactcgaggaacagtgtaggagccagaccgagcaattctcattactggctcaggagcttcaggcctttcgactccatcccggacctctggatcttttaactagtgccctggattgcgggtcacttggcgattgcccccctccaccttgttgttgttcaatcccccagccgtgcagagggagcggcccgaaggacctggacctcccccccggatccccaggaagatgtacaccgaaaagcagtgagccagcacctgcgaccctgacgggggtccctaggcgcactgccaaaaaggccgagtctctgagtaattccagccactctgagagtattcacaactccccaaagagttgcccaacccccgaggtcgatacagcaagcgaggtcgaagaattggaagctgacagcgtctcccttctgccggccgctcctgaggggtccagaggcggcgccagaatccaggtgttcctcgccagatactcttacaatcccttcgagggcccgaatgagaaccctgaagccgagctcccactgacagcaggggagtacatctacatttacggtaatatggacgaggacggcttcttcgaaggagagctgatggacggccggcgcggcctggtgccaagcaactttgtggagcgggtgagcgacgacgatctgttaacttcacttccccccgagttggcggacctgtctcactcaagtggtcccgagctctcatttctgagtgtgggtggcggagggtcctccagcggcggccaatcttccgtaggccgctcccagccgcggccagaggaagaagacgcaggggacgagcttagcctgtcacctagtccggagggcttgggcgagccaccagctgtgccgtatccgaggagactggtggttctgaaacagcttgcccactctgtcgttctagcatgggagccccctccagagcaggtcgaactgcatgggttccatatctgcgtgaatggcgagttaaggcaggcactgggacccggcgctccacctaaggcagtgcttgagaacctggacctctgggctggtcccttgcacatctccgttcaggctttaacttcccggggatcaagcgacccgctacggtgttgtctggccgttggtgcccgagccggagtggtcccctctcagctgcgcgtacataggttgacagcaaccagcgcagagattacttgggtgccgggcaattctaacctagcccatgctatttatctgaacggagaagagtgtcccccagcatcccctagtacctattgggctaccttctgtcatcttagaccagggacgccttatcaggcacaggtggaagcacaacttccaccacagggtccctgggaaccaggatgggagcggttggagcaaagagctgctacacttcagtttaccacgcttcctgcagggcctcccgatgccccgctggacgtgcagatcgaaccaggcccaagccctggcatcttaataatcagctggttgcccgtaaccattgatgctgccggaacctccaacggagtacgagtgacagggtatgcgatctacgcagatggccagaagattatggaggtcgccagtcctacggcaggcagcgtattggtggagctgagccagctgcagttgctccaagtgtgtcgcgaggtggtggtcagaaccatgtcacctcatggcgaaagtgctgatagcattccagctccaattacccccgccttggcccctgctagcctccctgcacgcgtctcctgtccaagtcctcacccatctcctgaggccagggccccactggcctccgcatctcctggtccaggcgatccctcctctcctttgcagcatcccgcccccctgggaacgcaggagccccccggagcaccaccagctagtccatctcgggagatggcgaagggctctcacgaagacccccccgctccgtgctcacaggaggaggccggggcggctgtgctgggcacctcagaggaacgaaccgcttctacctccaccctaggcgagaaggacccaggcccagctgctccgagccttgcaaagcaggaagctgagtggaccgcaggcgaagcctgtccagcaagttctagcacccagggcgccagagcgcagcaggccccaaacacagagatgtgccagggcggggacccgggctctggccttcgacctcgagccgagaaggaggataccgccgaactcggtgtccatctggtgaattctttagttgaccatgggagaaattccgatctgtccgatattcaggaggaagaggaggaggaggaagaggaggaagaagaggagctgggctctagaacgtgcagcttccaaaagcaggtagctggtaactcaattcgcgagaatggggcaaaaagccagcctgaccctttttgtgagaccgatagtgacgaagaaattctggagcagatcctagaattacccctgcagcagttttgcagtaagaagctgttttcgattccggaggaagaggaggaagaggaggaagacgaagaagaggaaaagtctggcgcaggatgttccagcagagaccccggcccacccgagcccgccctactgggactgggttgtgacagtggccagccccgcagacccggccagtgcccattatcgcctgagtcttcgcgtgcaggcgattgtctagaggacatgcccggcctggtcgggggctctagtcggagacgcggtggcgggtcacctgaaaaacccccttcccgcaggagaccacccgatccaagggaacactgttctaggctattgagcaataacggacctcaagcaagcggaagacttggacctactcgggagcgggggggattgccggtgattgagggacctaggactggactggaggccagcggaagaggccggctggggccctcccggcggtgttcccgcggacgggcactggagcccggacttgcctcgtgcctcagtcctaagtgcctcgagatatccatcgagtacgacagcgaggacgagcaagaggctggctccggcggaatttctatcacatccagctgttatcctggcgacggagaagcctgggggactgcaacagtggggcggccacgaggtcccccgaaagcaaacagcggcccaaagccctacccaagactgccggcttgggagaagggagaaccggagcgcagagggaggagcgcgaccggcagggctaaggaacctttgtcccgggcaacagaaacaggagaagcgcgcggacaggacggcagcggccgacgcggaccccagaagcggggcgtgcgggtgttgcggcccagcacagcagaactggttccagctaggtcgccaagcgagacacttgcctaccaacacctgcctgtccgcatcttcgtggcactcttcgactatgacccagtctcaatgagtcccaatcccgacgccggggaagaagaacttccttttcgtgagggccagatcctgaaggtgttcggtgacaaggatgctgacgggttctaccagggggaggggggcggcagaacggggtacattccttgcaacatggttgccgaagtggccgtggattctcccgcaggcagacaacaactgctgcagcgtggttatctatcccccgatatcctgttggaggggtcagggaacgggccctttgtttattctactgcgcacaccacagggcccccacccaagcctcgacggagcaaaaaggccgagtcggagggccctgctcagccatgtcccggacctcccaaattagtgccctctgccgatctcaaggcccctcactcaatggtcgccgccttcgactataatccgcaggaatccagtcccaacatggacgtggaagcagaattgccgttccgtgcgggggacgtgatcactgtattcggaggtatggatgacgacggattctactatggtgaactcaacgggcaaagagggctcgtaccttccaacttcttggagggccccggtcccgaggcaggaggtctggatcgagaaccacgcacaccacaggcagagtcacagcgcactcgccgtcgccgggtgcagtgctag

SEQ ID NO: 109718 - DNA, 5574 bp, synthetic construct
  misc_feature 1..5574: note = Description of Artificial Sequence: Synthetic coding sequence
  source 1..5574: mol_type = other DNA
atggagcaacttaccaccctcccgcgaccgggcgacccaggcgcgatggaaccgtgggccctcccgacgtggcattcctggactcctggcagggggggcgaacctagttctgccgcccctagtatcgccgatacccctcctgcggctcttcaattgcaggaactgcgaagcgaggagagctcaaagcccaaaggcgatggctcatctaggcccgtgggcggtacggatccagagggcgcggaggcatgtctgcccagtctggggcagcaagctagtagtagcgggcccgcctgtcaaaggcccgaggacgaagaagtcgaggcttttttgaaggctaaactgaatatgtcttttggtgatcggcctaacctagagcttttgcgagcgctcggtgaactgagacagaggtgtgctattttaaaggaagaaaatcaaatgctgcgcaagtccagctttccagagacggaggaaaaagtccgccgtctgaagagaaaaaatgctgagcttgccgtgatagccaagcgactcgaagagcgagctcggaagctgcaggagactaatttaagagtcgtttccgctcccctgcctcgaccgggaaccagcctagaactgtgtagaaaagcgctcgcgagacaaagagctcgtgacctgtcggagaccgcttccgccctgctcgctaaggataagcagatcgcagctctccagagggagtgtcgcgaactccaggcccgcttgacactggttgggaaggaaggaccacaatggctacacgtgagagactttgataggctcctgcgtgaatcacagcgggaagtgctcaggttacagcggcagatagctctccggaaccaaagagagactctcccactccccccatcctggccgcctggccccgctctgcaggccagggcaggcgctcccgctccaggggctcctggagaggccaccccccaggaggacgctgataatctgcccgtcatcctcggggagccggagaaagaacaaagagtccagcagctggagtcggagctgagtaagaaaaggaagaagtgtgagtccttggaacaggaggccagaaaaaagcagcggagatgtgaagagcttgagctacagctgagacaggctcagaacgaaaacgccagactagttgaggaaaactcgaggctctcggggcgggctacagaaaaggagcaggtggagtgggagaacgcggagctgagaggccagctcctgggtgtgactcaggagcgtgattcagctctcagaaagtctcaaggtctgcagtccaagctggaatctctcgagcaagttttgaagcatatgcgtgaagtcgcccaacggcgtcagcagctcgaagtcgaacacgagcaggccagactcagtttgcgcgagaagcaggaagaggtgagacgccttcagcaagcacaggctgaggcacagcgtgagcacgagggggcggtgcagctgctcgagagcacgctggacagcatgcaagctcgggttcgcgaactcgaggagcagtgccggtctcagactgagcagttcagcctgctcgcacaggagttgcaggcatttaggttgcatcccgggcccctcgatcttctcactagcgcattggattgcggcagcctcggggactgcccaccgccaccatgctgctgtagcatccctcaaccctgcaggggcagcggcccaaaggatcttgatcttccgcccggtagtccgggacgatgcacgccaaagagctccgagccggcgccagccacgctgacaggggtgcctagacgaaccgccaagaaagccgagtcactttccaacagcagccatagcgaatctattcataactctcctaaaagttgtcctacccctgaggttgacactgcaagtgaggtagaagagctcgaagctgacagcgtctcactcctgcctgctgctcctgaagggtcccggggaggagcaaggatccaggttttcctggctcggtatagctacaatccattcgagggacccaacgaaaatccagaggctgagctgcctctcactgcaggagagtatatctacatttacggaaacatggacgaagatgggtttttcgagggtgaactcatggacggcagaagagggcttgttccaagcaattttgtagaaagggtctctgacgatgacctgctcacaagtttgcctccagaactggcagacttgtcccacagcagcggccctgagctgagcttcctgtcagtggggggtggtggctcctcttctggcggccagtctagtgtcggccggtctcagcctagacccgaggaggaggatgccggagatgaattaagtctgtcaccaagccccgaaggccttggggagccccccgcagtgccctatccgcgtcgtctcgtggtgctcaagcaactggcccacagtgtagtgctggcatgggaaccaccacccgagcaggtggagctccacggcttccatatctgcgttaacggtgaactccggcaagcattgggccccggagcacctccaaaggccgtcttggagaacttggacctgtgggcgggtcccttgcacatctctgtgcaggctctcacctcacgaggctcctctgatcccttgcgctgctgcttggccgtcggtgctcgagccggagttgtccccagtcaactgcgcgtgcatcggttgacggccacctccgcagagatcacgtgggtccccgggaacagtaacttagcccacgcaatctatctgaatggcgaggagtgtccgcccgcctcaccctccacatattgggccactttttgccatctgaggcccggcacgccgtatcaggctcaggtcgaggcacaactgcctcctcaggggccatgggaaccggggtgggagcggctggaacagcgcgcggcgaccctccagttcaccaccctcccagctggcccacccgacgctcctctagatgtgcagatcgaacccggaccttccccaggcatacttattatctcctggctgcctgtcaccattgacgcggcaggaacttccaacggcgtgagggtgactgggtacgccatttatgccgatggtcagaaaatcatggaagtggcatcccccactgccggctccgtgctggtggagctatcacagctccagctgctgcaagtatgtcgcgaagtcgtagtgaggacaatgagtccgcatggcgaaagcgccgactccatcccagcccctattactcctgccctggctccagccagcctgccagcgcgagtgagctgcccgtccccccaccccagtcccgaggctagagcacccctggcatccgcttctcctggacctggggatcccagctcccccttacagcatcccgcacctcttggcactcaggagccccctggcgcccctccagcgagtcccagtagagagatggcgaaggggagtcacgaggatcccccagcgccctgctcacaggaggaagctggcgccgcagtgctgggcacctccgaggaacgcaccgcaagcacctccaccttgggcgagaaggatccaggtcccgctgcaccctctctggcaaagcaggaggccgagtggaccgctggagaggcctgccccgccagcagtagtacacagggcgcacgtgcccagcaggcccctaataccgagatgtgtcaaggtggggacccaggtagcggactgcggcctcgggctgagaaggaagatactgccgagttgggcgtgcacctagtgaactccttagtggaccacggcaggaactctgacctcagtgacattcaagaggaggaggaggaagaggaggaagaggaggaggaagagctaggctcccgaacatgcagcttccagaagcaagtcgcgggcaattcaatccgagaaaatggagccaaatcccaaccggaccccttctgtgagaccgattctgatgaggagattctggaacagatccttgagctgcctctacagcagttctgttccaagaagctgttctccatacctgaagaagaagaggaggaagaggaggacgaggaggaagagaagagcggagctggatgttcctcccgggacccaggcccaccagaacctgcactgttgggcctcggctgtgactccgggcagcctcggagaccaggccagtgccctctgtctccggagagcagtcgcgctggcgactgcttggaagatatgccgggactggtcggcggctcctccagacgacgcggtggtggctcgcctgagaagcccccgtctcgacgcaggccacccgatcctagggagcactgcagccgattactctctaataacggtccccaggcatcaggacgcctgggtccaaccagagagcgcggcggactccccgtgatagagggacctcggactggcctggaagcctccggcaggggacgccttggaccttctaggagatgttctagaggaagggctttggagcccggcctcgcgtcctgtctgtcaccgaagtgcctcgaaatttcaatagaatacgattcagaggacgagcaagaggcgggatctggcggaatcagcattacgagtagctgttacccaggggatggcgaggcatgggggaccgcgacggttggcaggcctcgtggaccaccgaaggctaactctggccctaagccgtaccctaggttgccagcctgggaaaagggtgaacctgagaggaggggccggagcgccaccggtagggccaaggaacccctgagcagggcgactgaaaccggagaggccagagggcaggacggaagtgggcgtagaggtccgcagaagcggggagtgcgcgttctgcgaccaagcaccgccgaattagttccagccaggagtccaagcgaaacactggcttaccagcacttgccagtgaggattttcgtggcactgtttgactacgaccctgtgtccatgtcccctaatccagatgctggcgaagaagagttgcccttcagggaaggacagatcctaaaagtcttcggggataaagatgccgatggcttctatcaaggagagggaggaggtagaaccgggtatatcccatgtaacatggttgcagaggtagccgtagactctcctgctggacgtcagcagctactccaaaggggatacctgagcccggacattctgctcgaaggttctggaaacggaccctttgtatactctacggcacataccacaggcccacctcccaagccccggcggagcaaaaaggccgaaagcgaagggccagctcagccctgcccaggtcctccaaaactggttccatccgccgacctgaaggctccgcacagtatggtggctgccttcgactacaatccccaagaaagctctcctaatatggacgtggaagccgaattacctttccgggccggggacgttatcactgtattcgggggaatggacgatgacggcttctactacggggagcttaatggccagcgggggcttgtgccgagcaacttcttagagggtccagggcctgaagctggcgggttagaccgggaacccaggactccccaggctgagtcacagaggacacggcgccggcgcgtccaatgttag

SEQ ID NO: 109719 - DNA, 5724 bp, synthetic construct
  misc_feature 1..5724: note = Description of Artificial Sequence: Synthetic coding sequence
  source 1..5724: mol_type = other DNA
atggagcaattgaccactttgcctcggcccggcgaccccggggccatggagccctgggccctgcctacctggcactcctggaccccaggtaggggaggggagcctagctctgcagctccttcaatcgccgacacacctcccgcagccctgcaattgcaggaactgagatctgaggagtcaagtaagccgaagggcgatgggtcatccaggccagtcggaggaacggacccagagggggcagaggcttgcctgccaagcctcggacagcaggcttcaagctcaggaccagcctgtcagagacctgaggacgaggaggtggaagcattcctaaaggcaaaactcaacatgtcgttcggggatcgccctaatctcgagctccttcgagcactgggggagcttagacaacgctgtgctatactcaaggaggagaatcagatgctgcggaagagttcatttcccgagaccgaggagaaagttagaagattgaaaaggaaaaacgcagagttagccgtgatcgccaaacggctggaagaaagggctcggaaattgcaggagacaaacctacgggttgtgtccgctccgctgcctagacccggcacgtcacttgaactctgccgtaaggcactggcaaggcagcgcgcccgggacctgtctgagaccgccagcgccctgttggccaaagataagcagatcgctgccctacagcgcgagtgtcgcgagttacaggcaagactgacccttgtggggaaggaggggccccagtggctccacgtccgagactttgataggctgctgcgcgagtctcaaagagaggtccttagactgcagcgtcagatcgcccttaggaatcagagagaaaccttgcccctgcccccctcatggccacccggcccagcactgcaggcacgcgcaggagctcccgcaccaggagctcctggcgaggccacacctcaggaagacgcagataatttgcccgtgatcctgggcgaacccgagaaagagcagagggttcaacagctcgaatcagaactgtccaagaagagaaagaaatgcgaatcactggaacaggaagcccggaaaaaacagaggagatgtgaagagctcgagttacagctgcgccaggcccaaaatgaaaacgcccgtctggtggaggagaactccaggctgtccggcagagctacagaaaaagaacaggtagaatgggaaaacgccgaactgcggggacagttgctgggggtgactcaggagcgagactccgccctacgcaagagccaaggtctacaatccaaacttgaatcgctcgaacaggtgctgaaacacatgcgcgaagtggctcagagaagacaacagctcgaggtcgaacacgaacaagccaggctctcgctacgagagaagcaagaggaggtgaggcgtctgcagcaggcacaggcggaggcacaacgggagcatgaaggcgcggtgcagttattggagagtaccctggactctatgcaggctcgagtccgggaactcgaagagcaatgtaggtctcagactgagcaattctccctgttggcacaggagctacaagcattccggctccaccccgggcccctggaccttttgacctctgctctcgactgtggatccctgggggattgcccacctcctccctgctgttgttccatcccacagccatgtaggggcagcggtccgaaggatctggacctgcccccggggtccccaggaagatgcactcctaagtctagtgagcctgcccccgcgactctcaccggcgtgccgcgcagaactgccaagaaagccgaaagcttatcaaactcatcccacagcgaatccatacacaactcccccaaatcgtgtcccacgcctgaagtagataccgctagcgaagtggaggaactggaagcggatagcgtgtctctgctgcctgctgcccccgagggctcccgagggggggcgaggattcaggtctttctcgcccggtactcctataaccctttcgagggtccaaacgaaaaccctgaagcagagcttcctctgactgcaggagaatacatctacatctacgggaacatggatgaggacggatttttcgaaggagaattgatggacggccggcggggtctggtaccatctaattttgttgaaagggtctccgacgacgacctgcttactagcctccctcctgaacttgcagatctgagccatagttctggccccgaactgagctttctgtcggtcggcggagggggcagtagttcagggggacagagctctgtcggccggtctcaacctcgaccggaagaagaggacgctggcgatgaactgtctctgagcccctcaccagagggattgggagaaccaccggccgtcccataccccagacggctggtggtgcttaaacagttggcgcattccgtcgtgctggcttgggaacccccccccgaacaggtcgagctgcacggcttccatatctgtgtgaatggtgaattaaggcaggccctgggtcccggggcacctccaaaggccgtgctggaaaatttagatttatgggcagggccactgcacattagcgtgcaagcactaacgtctcgcggctcttctgaccctctgaggtgctgtcttgcggttggcgcaagggccggagtcgtcccaagccagctgcgcgtacaccggcttactgctacatccgccgagatcacgtgggttcccggaaatagtaacctcgctcacgcaatctacttgaatggggaggagtgtccaccagcctcaccttcgacatattgggccacattttgccacctgcggcccggcaccccctaccaagcacaagtggaagcccagctgccccctcagggcccgtgggagcctggctgggaaaggctagagcagagagcagccaccttgcaatttaccaccctgcccgcaggcccaccagatgcgcctctggacgtccagatcgaacctggaccatcacccggaatcctaattatttcttggttgcccgtcacaatcgacgccgctgggaccagcaacggcgtgcgcgtaaccggctacgccatctacgccgacggacagaagatcatggaggtagccagcccaacagcaggttctgtgctggttgagttaagccagcttcagttactccaagtctgccgcgaggttgtcgtccgcacaatgagtccccatggggaaagcgcggactcgatcccagcccctatcaccccagccctggcacctgcatccctgcctgccagggtgagttgcccgagcccccatccctctccagaagctcgagcccccttggcctcagcaagcccagggcctggcgaccccagcagccctctacagcacccagctccattggggacccaggagccgcctggagctccaccggcatcccccagcagagagatggcaaagggatcccacgaagatccgcctgctccctgtagccaggaagaggctggcgcagccgttctgggcacctcagaggagcgaacggcctcaacatcaactctgggggagaaagatcctgggccagctgctccttcactggctaagcaggaagctgagtggactgctggggaggcttgcccagccagttcaagcacccagggagccagggcacaacaagccccaaataccgagatgtgccaaggcggagaccccggatcaggactcagacccagggctgaaaaagaagatactgcagagttgggggtgcacctggtgaattcactggtggaccatggcaggaactctgacctgtccgatatccaggaggaagaggaggaagaggaggaagaagaggaagaagagctcggctcaagaacctgctctttccagaaacaggtggccggcaactcaatccgagagaatggtgctaagagccagccagacccattctgtgagaccgacagtgatgaagagatcctcgagcagattctggaactgccattgcaacaattttgctccaagaagctcttttccattcctgaggaagaagaagaggaggaggaagatgaagaggaggaaaaatcgggtgccggatgtagcagccgggacccaggaccccccgaaccggcccttttagggctcggctgcgatagcgggcaaccacgccgccccggtcagtgccccctgtcacctgaatcctccagggcaggcgactgcctcgaggatatgccggggcttgtgggggggtcctctagaagacgcggtgggggctctccagaaaagccacccagtaggcggcgccccccagatccgcgggagcactgctctcgcctgttgagcaataacggccctcaggcgagcggacgactgggcccgacacgggaacggggcggactgccggtgatcgaaggccctagaaccggccttgaggcctcaggcaggggccggctgggtccctcaagacgatgcagtaggggtcgcgcactggagcccggcctggccagctgcttgtcccccaagtgcctggaaatctcaatcgaatacgactcagaggatgaacaggaagccggttcagggggaatctcaattacctcatcatgctacccaggggatggagaggcatggggcacagccactgttggtagaccccggggccccccgaaggctaacagcggaccaaaaccctatcctcggttgccagcttgggaaaagggggaacctgagaggcgcggacgctccgcaacaggaagagccaaggaacccctcagcagagcaaccgagacaggagaggctcgggggcaggatggaagtgggaggcgcggccctcagaagcggggagttagggtactccgcccctctaccgccgagctggtgcctgcccgctcgccttctgagacactggcttaccaacacctgcctgtgcggatatttgtggccctcttcgattacgatcccgtcagcatgtcaccaaatcccgacgctggcgaggaggaacttccatttcgggaaggccaaattctgaaggtatttggcgacaaggacgccgacgggttttatcaaggggaaggtggtgggcgaacaggctacatcccatgtaatatggtggcggaagtcgccgtggactcccccgcggggcgccagcagctcctacagcgtggatatctgtctccggatattctattggagggctccggcaatggaccttttgtttactccaccgctcatactaccggcccccctcccaagccgcgaaggtctaaaaaggccgagtctgaaggtcctgctcagccctgccccggaccacccaagctggtgccatcggccgacttaaaagcaccccatagcatggtggcagccttcgattataatcctcaggagtcttctcccaacatggacgtcgaggcagagctgccatttagggccggagatgtcatcaccgtgttcggcggcatggacgacgacggcttctactacggagagctaaatggtcagagaggactggtccccagtaactttctcgaaggcccaggtcccgaggcaggaggccttgatagggagccccgaactccacaggcggagtcacaggattggggctgcacaacacaagggtcacccggaccacccggaggcccatgcaccccatcatctgggagcgctcctcggatagagaggggtgagccccagggtcggagcgagaaagtttggggattttttagtaagggcaagcagttattgcgccggttggggtctggtaaaaaagagtag

SEQ ID NO: 109720 - DNA, 864 bp, synthetic construct
  misc_feature 1..864: note = Description of Artificial Sequence: Synthetic coding sequence
  source 1..864: mol_type = other DNA
atggtgaacgacccaccagtccctgctctgttgtgggcccaagaggtcgggcaggtactggccggtagggctcggcgactgcttttgcagtttggagtcctgttttgcacaattcttctcctcctgtgggtcagtgtttttctatacggatcattctactactcctacatgcccactgtgagccatctaagtcctgttcacttctactaccgtaccgattgtgacagcagtaccacaagtctatgcagcttcccggtggctaatgtcagtctgaccaaaggaggacgggatcgggtcttaatgtatggccagccctacagggtgacgttagaactagaacttcctgagtcccctgtaaatcaagacctggggatgttccttgtaaccatttcatgctatacccggggcggacggatcatcagtacctcctcccggtcagtgatgcttcactatcgatccgacctccttcagatgctggacaccctcgtctttagcagcctcttgctgttcggctttgccgaacagaagcagctcctggaggtcgagctgtacgccgattatcgcgaaaactcatacgtgcccactaccggtgccattatcgagatccattcgaaacgaatacaactttacggcgcatacctaaggatccacgctcactttacagggctcagattaacctcagagaaggaaactatcccgggaagaaagagtaatgagggctctctcctaatttcccagggactgaaggcacgccggtcacaactgcggaatcaaatgctccagaggatggtccgcgctcttaagattccccaaggacaacgcgtgtcttgccctcgccgacgtaatcagatctctagtccatag

SEQ ID NO: 109721 - DNA, 1389 bp, synthetic construct
  misc_feature 1..1389: note = Description of Artificial Sequence: Synthetic coding sequence
  source 1..1389: mol_type = other DNA
atgagcacggaaaaggtcgaccagaaagaggaggcgggggaaaaggaggtgtgcggggatcagataaagggtcccgataaagaagaggaaccccctgctgccgcctcgcatgggcagggttggagaccaggagggcgtgcagcacgaaacgccaggccggagccaggtgcccgccacccggctctgccagcgatggtaaatgaccccccagtgcccgcgctgctgtgggctcaggaagtgggtcaggtcctcgccggtagagctaggcggcttctgttgcagtttggggtgctgttttgtaccatcctgctgcttctgtgggtgtcagtgttcctttacggctccttttactatagttatatgcctactgtatcccacctgagtccagtacacttctattaccgcactgactgtgactcttccactacaagtctgtgctcattccctgtggctaacgtgtccctcacaaaggggggcagagatcgagtgctgatgtatggacagccatatcgcgtgaccctggaactggaattacctgaaagccccgtcaatcaggacctggggatgtttttggtgacaattagctgttataccaggggtggaaggatcatttccacttccagtaggagtgtcatgttgcactatcgtagcgacctgctccaaatgctggacactctagtgtttagttcattactgttatttggttttgctgagcagaagcagctcttggaagtcgagctgtacgcggactacagagagaattcttacgtgccaactacaggcgcaatcattgagatacatagcaagaggattcagctgtacggcgcgtatctgcgcatccacgctcacttcaccggccttagatacctcctgtacaattttccaatgacttgcgccttcatcggagtggcctccaactttacgtttttgtcagtgatcgtgctcttctcttacatgcaatgggtgtggggaggaatttggcctcggcataggttctcgttgcaagtgaacatcaggaagcgggacaactcaaggaaagaagtacaacggagaatttctgcgcaccagcccggtcctgagggtcaggaggaatccactccccagagcgacgttactgaagacggggaatcccccgaagacccaagcggcaccgaaggacagctgtctgaagaagaaaagcccgatcagcaacctctgagcggagaggaggagcttgaacctgaggcgtccgatggcagtggctcctgggaggacgctgcccttctcaccgaagcaaacctgcccgccccggccccagcttcggccagcgcaccagttctggagaccttgggaagttccgagccagctgggggagctctcaggcagcgccctacctgctctagctcctag

SEQ ID NO: 109722 - DNA, 1197 bp, synthetic construct
  misc_feature 1..1197: note = Description of Artificial Sequence: Synthetic coding sequence
  source 1..1197: mol_type = other DNA
atggtaaacgacccacctgtgcccgccctgctgtgggctcaggaagttggccaagtgctggccggcagagcccgcaggttattactgcagttcggcgttctgttctgtacaattctcctgctcctttgggtaagcgtctttttatacgggtccttctattatagttatatgccaactgtgtcccacctaagccctgtgcacttttactacaggactgattgcgatagctcaacaacctcactttgttccttccctgtggccaatgtgtctctaactaaaggaggcagggatcgcgtgttgatgtatggccaaccctatcgcgtgaccctcgagctggagctgccggaaagtccagtgaaccaagaccttgggatgttcctggtcactatcagctgctacacaaggggaggccggatcatttccacttcttcccgctcagtgatgttacactatcgttccgacttgctgcagatgttagatacgctggttttctcttctctcttactgttcggttttgctgagcagaaacaattactcgaagtggagctgtacgcggactacagagagaatagctacgtacccaccacaggtgccatcatcgagatacactctaaaaggatccagctgtacggcgcgtacctgcgcatccacgcccactttaccggcctccgctatctcttgtacaacttcccaatgacctgcgcattcatcggagtggcttccaattttacgttcctgagcgtgatcgtactgtttagttatatgcagtgggtctggggcgggatctggccgaggcacaggttctcactccaggtaaatattcgtaaaagggataattcgagaaaagaagtgcagcgaagaatctccgctcatcaacccgggcccgaaggccaagaggaaagcacaccccaaagcgacgtgaccgaggacggagaaagtcccgaggacccatccggcaccgaaggtcagttgtcagaggaggaaaaacccgatcaacagcctttgagcggggaagaagagctggagcccgaagccagcgacggttccggctcttgggaagacgcagcactgctcaccgaagccaatttgccagcccccgcccccgcatccgcaagcgcaccagtgctggagactcttgggtcaagcgagcccgctggaggcgcactgagacaacgtccgacgtgcagtagcagttag

SEQ ID NO: 109723 - DNA, 1197 bp, synthetic construct
  misc_feature 1..1197: note = Description of Artificial Sequence: Synthetic coding sequence
  source 1..1197: mol_type = other DNA
atggtgaacgatcctcctgtgcccgctcttctatgggctcaagaggtgggccaggtgctcgctggtcgagccagacgcctcttgctgcagtttggcgtacttttctgcaccatcctgctactgctgtgggtgtccgttttcctgtatggatctttctattatagctacatgcccaccgtgtcccacttgagtcctgtgcacttctattataggaccgattgtgatagttccaccactagcctgtgttccttccccgtggctaatgtgtcccttactaaaggcggccgcgaccgagtcctgatgtatggacagccttatcgcgtgaccctcgagttggaattacctgaaagcccagttaatcaagatctgggcatgttcctggtgaccatctcctgttatactcgcggaggtcgaatcatcagcaccagcagccgctcggtgatgctccattatcgaagcgacctcttgcagatgctggacaccctcgttttctcctctctgctgctcttcggctttgcagagcagaaacaactacttgaagtcgagctgtatgccgactaccgggagaatagctatgttcctaccacgggggcaataatcgaaattcacagcaagcgaatccagctgtatggggcctatctaagaatacatgcccacttcaccggtctacgttacctgttgtacaacttcccaatgacatgcgctttcatcggcgtggcctctaatttcactttcctatcagtgatagtgttgtttagctacatgcagtgggtctggggtggaatatggccaagacataggtttagcctgcaggtaaatatcagaaagcgcgacaattctcgaaaggaggtccagcggcggatctcagctcaccagccaggcccagaaggtcaagaagagtctacacctcagtctgacgtcactgaagatggggagtcaccagaggatccatccggaactgagggacagctgagcgaagaggaaaaacccgaccaacagccgttgagcggcgaagaggagctcgagcctgaagctagtgatggtagcggctcctgggaagatgccgccctgctgactgaggcaaatcttccagcacctgcacccgcaagcgcctccgcccccgtgcttgagactctcgggtcctctgagcctgccggtggcgccctccgccagagacctacctgctcatctagctag

SEQ ID NO: 109724 - DNA, 1197 bp, synthetic construct
  misc_feature 1..1197: note = Description of Artificial Sequence: Synthetic coding sequence
  source 1..1197: mol_type = other DNA
atggtgaatgatccacccgttccagccctgctttgggcccaggaggtgggccaggtgctcgccggtagggctcgccggttgctactccagttcggagtacttttttgtacaattctactgctgctttgggtgagcgtgtttttatatggaagtttttattactcttacatgcccaccgtgagccacctcagtcccgtacacttctactatcgtactgattgtgacagctccacaacaagcctctgctccttccctgtggcaaacgtctctctgacaaagggagggcgcgaccgcgttctgatgtatggtcagccttatagagtcacattggaactcgagttacccgaaagcccagttaaccaggacctggggatgttcctagtgactatcagttgctacacaagaggagggcgtataatttccacctcctctcgatccgttatgctgcactatagatctgacttactgcaaatgttggataccctggtgttcagctctctccttctgttcggatttgcagaacagaagcagctgctggaggtggagctttatgccgactatcgcgagaacagctacgtgccaaccacaggggccatcattgagattcattccaaacgcatacaattgtatggggcttacttgcgtatccatgctcacttcacagggctgagatacttgttatataattttcctatgacatgtgcctttatcggtgtcgcaagtaacttcacgtttttatctgtgattgtattatttagctacatgcagtgggtttggggcggcatctggcctcggcataggttttcccttcaggtgaatatccgaaagagggataattccaggaaggaagttcaaaggcgaatttctgcacatcaacccgggcctgaaggacaggaggaaagtaccccgcagtccgacgttaccgaagacggcgaaagcccggaagacccttccggaacagaggggcagctttctgaagaggaaaaaccagaccaacaacctctgagcggagaagaagagctggaacctgaggcctccgacggctctggtagctgggaagacgcagccttgcttaccgaggccaatcttccagcaccagctccagcatccgcctcagcccccgtgctggagactctaggttcatctgagcccgccggcggagccctcaggcagcggccaacatgttcttccagctag

SEQ ID NO: 109725 - DNA, 1389 bp, synthetic construct
  misc_feature 1..1389: note = Description of Artificial Sequence: Synthetic coding sequence
  source 1..1389: mol_type = other DNA
atgagcactgagaaggtcgaccagaaggaagaggctggcgaaaaggaggtctgcggggaccagatcaaaggaccggataaagaggaggaaccacctgccgctgctagccatggacagggctggagaccagggggtagagccgctcggaacgctagaccagaacctggtgccagacacccagcccttcctgcaatggttaatgaccccccggtgcccgccctgctttgggcccaagaggtgggccaggttctcgccggtagagcccggcgactgttgttgcagttcggagtgctgttctgcacgatcctactgctgctatgggtgagtgtttttctgtatggtagcttttactatagttacatgccgacagtctcgcacctgagtcccgtgcacttctactataggaccgactgtgacagcagcaccacatctctgtgttcttttcccgtggcaaacgtgtccctcactaagggagggagagacagagtgctgatgtatggccagccatacagagttacacttgaactggaacttcctgagtccccggtgaatcaggacctgggtatgtttttggtgactatctcatgctatacccgcgggggccgaattatatctacaagttctcgctcagtgatgctccattacaggtccgatctgcttcaaatgctcgacaccctggttttcagttctctcctgctttttgggttcgctgagcagaaacagctccttgaagtggagctgtacgcggattaccgagaaaattcatacgtgccaaccactggcgccatcatcgaaatccacagtaagcgaatccagctgtatggggcttatctgagaattcatgcacatttcacagggcttcgttatctcctgtacaatttcccaatgacatgcgccttcatcggcgtcgctagtaatttcacatttctctcggtgattgtgctgtttagctacatgcagtgggtgtggggaggaatttggcccagacacaggttcagcctccaggtcaatattcggaagagggataatagccgcaaagaagtgcagcgcaggatcagcgcgcaccagcccggacccgagggccaggaagagtcaacacctcagagcgatgtaactgaagacggagagagtcctgaagacccaagcgggacagaaggtcagctctctgaggaagagaagccagatcagcagccactgagcggcgaggaggagctcgaacccgaagctagcgacggcagcggttcttgggaggatgcagcactgttaactgaggctaacctgcctgccccggcccccgccagtgcatcagcccccgtgttggagaccctcgggagttccgagccagcgggtggcgcactgcggcagagacctacttgctcctccagttag

SEQ ID NO: 109726 - DNA, 672 bp, synthetic construct
  misc_feature 1..672: note = Description of Artificial Sequence: Synthetic coding sequence
  source 1..672: mol_type = other DNA
atggtgaacgacccacccgtgcctgccctgttgtgggcacaagaagtgggccaggttctggctgggagggcacgcaggcttctcttacagttcggagtcctcttctgtactatactgctgctcctgtgggtgtccgtttttctgtatggaagcttttactactcgtatatgccaaccgtctcccacctcagtcccgtccacttttattaccggaccgactgtgatagctccactacctctctttgcagctttcccgtggccaatgtgtctctcacgaagggcggtagggatcgcgtccttatgtatggccaaccataccgggtcaccctcgaactcgaactgcccgaaagtccagtcaatcaggacctcgggatgttcctggtgacaatatcctgctacactcgaggcgggaggatcatcagcacttctagcaggtcagtcatgctccattatcgttctgacctgttgcagatgctagataccctcgtattctcttctcttcttctgttcgggttcgcagagcagaaacaattgttggaggtggaactttacgcagactatcgcgagaattcttatgtccccacgacgggagccattattgagatccacagtaagagaattcagctttacggagcctatctgcgaatacacgcacacttcacaggcctctag

SEQ ID NO: 109727 - DNA, 282 bp, synthetic construct
  misc_feature 1..282: note = Description of Artificial Sequence: Synthetic coding sequence
  source 1..282: mol_type = other DNA
atgtccacagaaaaggtagatcagaaggaagaggctggggaaaaagaagtgtgcggtgatcagattaaaggccctgacaaggaagaagagccacctgctgctgcgtcacacggccagggatggcgcccgggcggaagagcggcgcgcaatgccagaccagagcccggtgctcggcatcccgccttgcctgccatggtcaacgacccccctgttccggccctgttatgggcgcaggaggttggacaggtactggcaggtagggctaggaggctgctgttatag

SEQ ID NO: 109728 - DNA, 681 bp, synthetic construct
  misc_feature 1..681: note = Description of Artificial Sequence: Synthetic coding sequence
  source 1..681: mol_type = other DNA
atgtcaacagagaaggtggaccagaaagaggaagccggggagaaggaggtctgtggcgaccagatcaaggggccagataaagaggaagagccgccagcggctgcatcacatggacagggctggcgtcccggtggtcgcgctgcgaggaatgcgagacctgaacccggagcacgtcaccccgctctgcctgcaatggtcaatgatccacctgtgcccgctctgctttgggcgcaggaggtcggccaggtgctggctgggagggctagacgcctgcttttgcagtttggcgtactgttttgtacaatcctgctattgctgtgggtatcagtgtttctctatggttcattttattactcatatatgcccaccgtgtctcacctgagtcccgtgcacttctattatcggacggactgtgattctagcacaacgagtctctgttcatttcctgtagccaacgtctcactaactaaaggagggcgcgatagggtgcttatgtacggtcagccatatagagtgacattggaacttgaactcccagagagtccggtgaatcaggatctcggcatgtttctggtcaccatatcatgctacaccagaggggggaggattatttctaccagctcaagaagcgtaatgctacattataggtcagatctgctccagatgctagatacactatag

SEQ ID NO: 109729 - DNA, 72 bp, synthetic construct
  misc_feature 1..72: note = Description of Artificial Sequence: Synthetic coding sequence
  source 1..72: mol_type = other DNA
atgtcaacagagaaggtcgatcagaaggaggaggccggtgagaaggaggtctgtggggaccagattaaatag

SEQ ID NO: 109730 - DNA, 87 bp, synthetic construct
  misc_feature 1..87: note = Description of Artificial Sequence: Synthetic coding sequence
  source 1..87: mol_type = other DNA
atgtcgacagagaaagtagatcagaaagaggaagccggcgaaaaagaagtctgtggggatcagatcaaaggcccggacaaagaatag

SEQ ID NO: 109731 - DNA, 372 bp, synthetic construct
  misc_feature 1..372: note = Description of Artificial Sequence: Synthetic coding sequence
  source 1..372: mol_type = other DNA
atgtcaaccgagaaagtggaccagaaagaggaggccggcgagaaggaagtgtgcggagaccagatcaaaggccctgataaagaagaggaaccccctgcagctgcctctcacggccaagggtggcgtcccggcgggcgcgccgctagaaatgcccggccagaacctggtgcccggcacccggccctgcccgccatggtaaatgaccctcccgtccccgcgctgttatgggcacaggaagtgggccaggtgctcgccggacgggctcgccgcctgttgctccaatttggtgtcctcttttgtacaattctgttgcttctgtgggtcagcgtgttcctatatgggtccttttactatagctacatgcccacgtag

SEQ ID NO: 109732 - DNA, 300 bp, synthetic construct
  misc_feature 1..300: note = Description of Artificial Sequence: Synthetic coding sequence
  source 1..300: mol_type = other DNA
atggtcaacgatccacccgtacccgcgttactttgggcgcaggaggtaggccaggtactggcaggtcgagcacggagactgttactgcagtttggagtcctgttttgcaccatcttgttgttactatgggtgtcagtgttcctctacggttctttttactacagctatatgcctacagtaagtcaccttagccctgtgcatttctactaccgcaccgattgcgacagtagcactaccagcctgtgttcattcccagtggcgaacgtgtcacttaccaaaggcggtcgggaccgcgtgtag

SEQ ID NO: 109733 - DNA, 879 bp, synthetic construct
  misc_feature 1..879: note = Description of Artificial Sequence: Synthetic coding sequence
  source 1..879: mol_type = other DNA
atggagttccagcccaaccaggaggatgaggaagacgctcacgcaggaattattggacgatttctcgggctgcagagccatgatcaccaccccccccgggcaaactcccgcacgaagcttttatggccgaagagagagagcctcctgcacgaaggtctgcccaaaaatcataaagccgctaagcaaaacgtacgcggacaagaagacaacaaggcctggaaactcaaagccgtggatgctttcaaatctgcgcccctatatcagcgccccggatattactctgctcctcagaccccgctgagtcctactcctatgtttttccccctagaaccttcagccccctccaagctgcacagtgtaaccggcattgatactaaagacaaatctcttaagaccgtctccagcggggccaaaaaaagcttcgagctgctctcggaatctgatggtgcactgatggaacacccagaagtttcgcaggtgagaaggaagaccgtggagtttaacttgactgacatgccggaaatccctgagaaccacctgaaagaacctctcgagcagagccccaccaatattcacactaccctgaaagaccacatggacccttactgggccctggaaaataggtctgtcctacatctaaatcagggacactgtatagccttgtgccctacccccgctagtttggccctgtcactgccgttccttcacaacttcctgggctttcatcactgccagtctactttggacctgagaccagcactagcatggggtatttatctcgcaaccttcacaggaattcttggaaagtgctctgggcccttcctgacttccccatggtaccatccggaagacttcctgggaccaggggaaggccggtag

SEQ ID NO: 109734 - DNA, 1497 bp, synthetic construct
  misc_feature 1..1497: note = Description of Artificial Sequence: Synthetic coding sequence
  source 1..1497: mol_type = other DNA
atgtttgagaaactgacattgtattgtgactcttacattcagttgattcccatcagcttcgtactgggattctatgtgacccttgttgtgactcggtggtggaatcagtacgagaacctgccgtggcctgatcgactgatgtcgctggtgtccgggtttgtggagggtaaggatgagcagggaaggttgttgagacggacactcatacgctacgccaacttgggaaatgtgctgatcctgaggtctgtgtccacagcagtttacaaaagattcccatctgctcagcacctcgtgcaggccggtttcatgaccccggccgagcataagcagctggagaaattatccctgccccacaacatgttttgggtgccttgggtgtggtttgctaacctgagcatgaaagcctggctaggtggcagaatccgcgacccaatactcctacagagtctgctcaacgaaatgaatacccttagaacacagtgtggccacctgtacgcatacgattggatttccatccctttagtgtatacccaggtggtgaccgtggcagtatatagcttctttctgacgtgtctagtgggtaggcagtttctgaaccctgccaaggcatacccgggacacgagctcgacctggtcgtgcctgtcttcaccttcctgcagttttttttttacgtcgggtggctgaaagtgtcactgctggccgttgacgagatgcaccaagaccttcctcggatggagcccgacatgtactggaataagcccgagccccagcccccatatactgctgccagcgcacaatttagaagggcaagttttatgggttctactttcaacatcagtttaaataaagaggagatggagtttcagccaaatcaggaggatgaagaggatgcacacgccggaatcattggacgatttctggggctgcagtctcatgaccatcatccacccagagcaaacagtagaacaaaactcctgtggccaaagcgagaatcattgctacatgaggggctacccaagaaccacaaggccgcaaaacagaacgtgcgtggacaggaggacaataaagcatggaagctcaaggcagtggatgcctttaagagtgctcctctgtaccagaggcccggctactacagcgcaccacagactcccctttctcctacgcccatgtttttcccactggaaccctctgccccctcaaagctgcattcagtgacaggaatcgatacaaaggacaagtctctgaaaactgtgagtagcggagccaaaaagtcctttgaattgctgtcagagtctgacggcgcattgatggagcaccctgaggtgtcccaggttaggcggaaaaccgtcgaattcaacttaaccgatatgccagagattccggaaaatcatctcaaggaacctttagagcagagtcctacaaatatacacaccactctaaaggaccacatggatccgtactgggccttggaaaaccgcgatgaagcacatagctag

SEQ ID NO: 109735 - DNA, 1758 bp, synthetic construct
  misc_feature 1..1758: note = Description of Artificial Sequence: Synthetic coding sequence
  source 1..1758: mol_type = other DNA
atgaccattacatacactagccaggtcgccaacgcaaggctggggtccttctcccggctgttactctgttggcgcgggtctatctacaagctcctgtacggcgagtttctcatctttctgctttgctactacattatcaggtttatatacaggctggctctcacagaagagcagcagctcatgtttgaaaaattaactttatactgcgacagctacatccaacttatcccaatttcgttcgtcctgggtttctacgtgacacttgtggtcacacgatggtggaaccaatacgaaaatctgccatggccggaccggctcatgagccttgttagcgggtttgttgaaggcaaggatgagcagggccgcctcctccgacggactctaataaggtacgccaatttaggaaatgtcctgattttaagatccgtttccacagctgtttacaaacgcttccccagcgcacagcaccttgtgcaggcagggttcatgactcccgccgaacacaagcagctggaaaaattgtcattaccgcataacatgttctgggttccgtgggtatggtttgctaatctgagcatgaaggcctggctcggcggtcgcattagagacccaatcttgttgcaaagcttgcttaatgagatgaatacactgcgcacccaatgtggtcatctctacgcctacgactggatcagcattccgttagtgtatacacaggtggtcaccgtcgccgtctattcattttttctaacttgcctcgtaggtcgacagtttcttaaccccgccaaagcctatcccggtcatgagttagatctagtcgtcccagttttcactttccttcagttttttttctatgtcggctggctgaaggtggccgaacagttgatcaatcctttcggagaagatgacgatgatttcgagactaactggattgtggacaggaatctgcaggtatcgctgctggcagtcgatgaaatgcaccaggaccttccgagaatggagcccgacatgtattggaataaaccagaacctcagcctccttataccgctgcctccgctcagttccgacgagctagctttatggggtcaacatttaatatatccttaaataaggaagaaatggagttccagcccaatcaggaggacgaggaagacgcacatgcggggattatcggtcgctttttaggccttcagtcccatgaccatcacccacccagagccaactctcgcacaaaactgctttggcccaaaagggagagcctacttcacgagggcttgcccaaaaaccacaaagccgctaaacagaatgttcgcggacaggaagacaacaaggcgtggaagctgaaggccgtagacgcctttaaatccgcccctctataccagcgacctggatactacagcgctccccagacgccactgtcacccacccctatgtttttccctcttgaaccaagcgccccgtccaaacttcattccgtaactggtatagatactaaggacaagagtttaaaaaccgtgtcttctggagccaaaaagtcattcgagctgctgtcggagagtgacggggctctgatggaacatcctgaagtctcccaggttcgtcgcaagacggtggagtttaatctgaccgacatgccagagatcccggagaatcacttgaaggagcctctggaacagtcacccaccaacatccacacgaccttaaaggatcacatggatccttactgggctctagagaaccgagacgaagcacacagttag

SEQ ID NO: 109736 - DNA, 813 bp, synthetic construct
  misc_feature 1..813: note = Description of Artificial Sequence: Synthetic coding sequence
  source 1..813: mol_type = other DNA
atgacgattacgtacactagtcaagtagcaaacgctagactggggagcttctcccgtcttctcctgtgttggaggggttcgatttacaagctgctgtacggagaattcttgattttcctgctgtgctattacattatccgcttcatatatcgattggcactaactgaggaacaacagctgatgtttgaaaaattgaccttgtactgcgacagctacatccaactcatcccgatcagctttgtgcttgggttctatgttacgttggtcgtcacaaggtggtggaatcagtatgagaatttgccatggccagaccgcctgatgagtttggtgtcaggtttcgtcgaaggaaaggacgaacaggggagactgctcagacgaaccctcatacgatacgcgaacttaggcaatgtgcttatcctcaggtccgtaagcaccgcagtttacaagagattcccctctgctcaacacttggtacaggcaggttttatgactccggctgagcataagcaactggaaaagttatccctaccacataatatgttctgggtgccttgggtatggttcgccaatctaagtatgaaagcatggctgggtggtagaattagggacccaatactgctgcaatcactgttaaacgagatgaacaccctgcgaacccagtgcggacatctctacgcttatgactggatttcaatacccctcgtctacacccagcccgagcagagaggggatggagtgccagcacagagcggtggccggggagggtgctcacggtggcaccactggccactgccgcggcccgcggtgccgtag

SEQ ID NO: 109737 - DNA, 1815 bp, synthetic construct
  misc_feature 1..1815: note = Description of Artificial Sequence: Synthetic coding sequence
  source 1..1815: mol_type = other DNA
atgtttgagaagttaaccttgtactgtgattcgtacatccaactcattccaatatcttttgtgcttggcttctacgtgactttggtcgtaacccgttggtggaaccagtatgagaatctgccttggccagataggctgatgtctctcgtcagcggctttgtggaagggaaagacgaacaaggccggttactgagacggaccctaattaggtatgctaacctcggtaacgtattgattctgcgcagtgtgagcacagcagtatataagcgcttccccagcgctcaacacctggtgcaagcaggtttcatgacacccgcggaacataaacagctggagaaactcagcctaccccacaatatgttttgggtcccgtgggtgtggtttgccaatctctctatgaaagcttggcttggcggtagaatcagggatcccatactgctgcagtccctcctgaatgagatgaatacccttcgaacccagtgcggccacttatacgcttatgattggatttctatccccttggtctacacacaagtcgttacagtggccgtgtacagcttttttctaacgtgtcttgtggggaggcagtttctgaatcccgccaaagcgtatccaggccacgaactggatctcgtggtccctgtgttcacgttcctgcagtttttcttctatgttgggtggctgaaagtcgctgagcaactgattaatccatttggcgaagatgacgacgattttgagacgaattggattgtggaccgcaatctccaagtctcgctgctggcggtcgacgagatgcaccaggatctgcccaggatggagccagacatgtactggaacaaaccagaaccacagcccccctacacagcagcatccgcacagttcaggcgggcttcctttatgggctccactttcaacatttcactgaacaaagaagaaatggagttccagccaaaccaggaggacgaagaggatgctcatgccggaatcatcggaaggttcttagggctccaatcacatgaccatcatcccccgagggctaatagtcgcactaagctgttatggccgaagcgagagagcctgctccacgagggcttgccaaaaaaccacaaggctgcaaagcagaacgtgagaggtcaagaggataacaaggcttggaaactcaaggccgtcgacgcatttaaaagcgccccattatatcagcggcctgggtattattcagcccctcagacgccattgagtcccacacctatgttttttcctctcgagccttccgccccaagcaaacttcactctgttactggaattgacactaaagacaaaagcctgaagacagtttcctccggagctaagaagtcctttgagctcttgagcgagtccgatggcgctttaatggagcaccctgaagtgagccaggtccggcgcaagactgtcgagtttaaccttacagatatgcctgagattcccgaaaatcacctgaaggagcccctggagcagagcccgacaaatattcataccaccttgaaggatcatatggacccctattgggccctcgagaaccgatccgtgctgcacctaaaccaggggcactgtatcgccctgtgtccaaccccagccagcctagctctgtctcttcccttcttgcataatttcttggggttccatcattgtcaatcaactctggatctccgccctgccctggcctggggaatctatctggcgacctttactggaattctaggaaaatgttcagggccttttttgacctccccttggtaccatcccgaagatttcctcgggccaggcgagggaagatag

SEQ ID NO: 109738 - DNA, 1530 bp, synthetic construct
  misc_feature 1..1530: note = Description of Artificial Sequence: Synthetic coding sequence
  source 1..1530: mol_type = other DNA
atgactgtgacatacacagcaagggtcgccaatgctcggtttgggggattctctcagttgcttctattatggagaggctctatctacaaactgttatggagagagttgttatgcttcctcggtttttatatggccttaagcgctgcctatcggttcgtccttaccgagggccagaaacgctatttcgagaagctggtcatttattgtgatcagtacgcaagcctgatacctgtcagcttcgtcctgggtttttacgtgacattggttgtgaatcgctggtggtcccagtacttgtgtatgccactcccagatgcccttatgtgcgtggtcgcaggaactgtccacggtcgggatgatcgcggccggttgtatagaaggactttaatgcggtatgccggtctctcagcagtgctgatccttaggtccgtgagcacagcagtgttcaagagattccccacaatcgaccatgtagtggaggcaggtttcatgactcgcgaagagcgtaagaaatttgagaacttgaattcctcttataacaagtactgggtgccctgtgtgtggtttagcaatcttgctgctcaggcccggagggagggaagaatccgggacaattccgccttgaagctgcttcttgaggaactgaatgtattcagaggtaagtgcggaatgctctttcattacgactggatatccgtgcccttagtctacactcaggtggtaaccattgctctgtattcttattttctggcatgtctgattgggagacaattcctggacccagcccaaggttataaggatcacgatctggacctctgtgttccaatctttactcttctccaatttttcttctacgccgggtggctcaaggtggccgaacagctaattaacccctttggtgaagacgatgatgatttcgaaacaaattttctcattgatcggaactttcaggtgtctatgctcgccgtcgacgagatgtatgatgacttagccgtcctggagaaagatctgtattgggatgccgctgaagcgagggctccttatacggccgcgacagtgttccagttacgccagccctctttccagggtagcactttcgacatcacattggccaaagaagatatgcagtttcagcgcctggatggcttggatgggcctatgggggaggccccaggagattttctccaacgactcttgcccgcgggcgccggcatggtggctgggggaccgctgggtagaaggttatcctttctgctccgtaaaaacagctgtgtgagtgaagcctccaccggggcaagctgttcttgcgctgtggtgcccgaaggggccgcgcctgagtgctcttgcggggatcctcttttggaccccgggctgccggagccagaggcacccccccccgcaggaccagagccactgacactgattccgggacctgtggagcccttcagtattgtcaccatgcccgggcctaggggccccgcccctccctggctcccctctccgatcggggaggaagaggaaaacctagcctag

SEQ ID NO: 109739 - DNA, 1530 bp, synthetic construct
  misc_feature 1..1530: note = Description of Artificial Sequence: Synthetic coding sequence
  source 1..1530: mol_type = other DNA
atgaccgtgacttacaccgccagggtggctaatgccaggtttggcggtttctcccagttgctcctgctgtggcgaggctccatttacaaattactatggagggaattgttgtgcttcctgggcttttacatggcccttagtgcggcctacagattcgtcttgaccgaaggacagaagcggtatttcgagaaactcgttatttactgtgaccagtatgcttctttgatcccagtttccttcgtgctcggattctacgttaccctggttgtgaaccgctggtggagtcagtacctgtgtatgccgctgccagatgcactgatgtgtgttgtagctgggaccgtacatggccgggacgaccgcggtaggctatatcggagaaccctgatgaggtacgcaggcctatctgccgtcctgatcctgaggtccgttagtactgcggtgtttaaacggttccccacaatcgaccatgttgtcgaggcaggatttatgaccagggaagagcgtaagaaatttgaaaaccttaattcatcttacaacaaatattgggtcccttgcgtgtggttttctaaccttgcagcccaagcccgaagagagggcaggatccgagataattccgcgctaaagttgctgctcgaggagctcaatgttttcagggggaaatgcggaatgctcttccactacgactggatctcagttccactggtatacacacaggtggtcaccatcgcgttatattcatatttccttgcctgccttattggccggcaattcctggatcccgcccaaggatacaaagatcacgatttggacctatgcgtacccatatttacactgttacaattcttcttttacgcagggtggctaaaggttgcagaacagctcatcaacccttttggtgaggatgatgacgattttgagaccaacttccttatcgatcgcaatttccaagtttcaatgctcgccgtcgacgaaatgtacgacgacctggcagtcctggagaaggacctttactgggacgccgcagaggccagggccccctacaccgccgccaccgtgtttcagttgcgccagccctcattccaaggatccacattcgatattactcttgctaaggaggatatgcaatttcagcgcctagacggcctagatggacctatgggagaagctcctggcgacttcttgcagaggctcctccccgccggcgcaggaatggtggctgggggcccactgggaaggcgcttgtcttttctcctgaggaaaaactcttgcgtgtcagaagcctccactggagcctcttgcagttgcgctgtggtaccagaaggtgctgctcccgagtgctcctgcggggatcctctgttagatccaggtctgcccgaacccgaagctcctccacccgccggcccagaaccactgaccctgatccccggacctgtggagcctttcagcatcgtcactatgcccggaccccggggccccgcacctccttggctcccgtcaccgataggggaggaagaggaaaatttggcctag

SEQ ID NO: 109740 - DNA, 1530 bp, synthetic construct
  misc_feature 1..1530: note = Description of Artificial Sequence: Synthetic coding sequence
  source 1..1530: mol_type = other DNA
atgaccgtgacatacaccgcgcgggtagctaacgcacggtttggcggcttttctcagctcttgctcctctggagggggtcaatctataagttgttatggagggagctgctgtgctttctgggcttttacatggcactctcagccgcatacagattcgtgctcactgaggggcagaaaagatactttgaaaagctcgtgatctattgtgatcagtacgcgtcattgattcccgtgagcttcgttctgggattctacgtgactctggttgtgaataggtggtggagtcagtatctgtgtatgcctttgccagacgctttgatgtgcgtggttgctggaactgtgcatggaagagacgaccgggggcggctctaccgacgtacacttatgcgatatgcaggcctgtcagcagtgctgatccttcggtctgtcagcaccgctgtctttaagcgattcccaactattgatcacgtggtagaagctggtttcatgacccgcgaggagagaaaaaaattcgagaatttgaatagtagttacaacaaatattgggttccgtgcgtttggttcagtaacctggcagcgcaggctcgaagagagggtcgcataagagacaatagcgcgctcaaactcttactggaggagctcaacgttttcagggggaagtgtgggatgctctttcactacgactggatctctgttcctctagtgtatacacaagtggttaccatcgccctttactcatacttcctggcatgccttatcggcaggcagtttcttgacccagcgcaaggttacaaggaccacgacctggatttgtgcgtccccatcttcaccctgctacaattttttttctatgctgggtggctcaaggtggccgagcagctgattaaccctttcggcgaggacgacgacgatttcgagactaacttcctcatagatcgtaattttcaagtgtccatgctcgcagtagatgaaatgtacgatgacctcgcagtgctggaaaaagacctgtattgggacgccgccgaagccagggctccctatactgccgccacagtgttccagctaaggcagccctcgttccagggaagtacatttgatataacactggcaaaagaggacatgcagttccagcgcctcgatggcttggatggccccatgggcgaagcgcccggcgatttcttgcagagactgctgcctgccggagcgggcatggtggctggaggccctttggggaggcgtttaagcttcttactgcgaaaaaacagttgcgtctcggaggcctccactggggcctcgtgctcctgtgctgtggttccagagggcgccgcacccgaatgtagctgcggcgaccctctgctggatcccggattgcctgagcctgaggctccccctcctgccggtcctgaaccacttactttgatacctggacctgtagaacctttcagtatcgtcactatgcctggcccccgcggccccgccccaccttggctcccctcccctatcggagaagaagaggaaaacctggcctag

SEQ ID NO: 109741 - DNA, 219 bp, synthetic construct
  misc_feature 1..219: note = Description of Artificial Sequence: Synthetic coding sequence
  source 1..219: mol_type = other DNA
atgtttcttatctcctcgagcgtccatggtagtgatgagcacggtagactcctcagaagaacgctcatgcggtatgtgaatctcactagccttttgatatttcgatcagtttctactgccgtctacaagaggttcccaaccatggaccatgtggtcgaggctgaaaggacggggatgaaaccgatactgccttctagctttgagatgcagagcttctag

SEQ ID NO: 109742 - DNA, 2007 bp, synthetic construct
  misc_feature 1..2007: note = Description of Artificial Sequence: Synthetic coding sequence
  source 1..2007: mol_type = other DNA
atgaccgttacatattccagtaaagtggctaatgctaccttcttcggttttcatcgactcctgctgaaatggcgcggaagcatatacaagcttctgtacagagaattcatcgtgtttgctgtgctgtatacggctatcagcctggtgtacagactgctcctgacgggagtgcagaaacgttacttcgaaaagttgagcatctattgcgacagatacgccgagcagataccagtgaccttcgtgttgggcttttacgttaccctggttgtgaaccggtggtggaatcaattcgtgaacctgccttggcctgacagattaatgtttttgatcagttcgtccgtgcacgggtccgatgagcacggcagactgttgaggaggactctcatgcgctacgtgaacctcacatccctgctaatcttcagaagcgtgagcaccgccgtgtacaagcgtttcccaaccatggatcatgtcgtggaggctggtttcatgactacggatgaacgcaagctattcaatcacttgaagtcacctcatctgaagtattgggtgccgtttatttggttcggcaacttggccaccaaggcccgaaatgaaggccgcattcgggattcggtcgacctccaatctttaatgaccgagatgaatcgataccgaagctggtgctcactgctgttcggttatgactgggtaggcattccactcgtgtatacgcaagttgtcacgcttgccgtgtacacttttttttttgcctgccttatcggtaggcaattcctggatcccacgaagggctacgctggccatgacctggacttgtacattcctatctttaccctgctgcagttctttttctatgccgggtggctgaaagtggcggaacaactgatcaacccattcggtgaggacgatgatgacttcgagaccaactggtgcatcgatcggaatcttcaggtttccctgctggctgttgatgaaatgcacatgtcccttcctaagatgaaaaaggatatttactgggatgacagcgccgcgagacccccctatacgcttgctgcagcagattactgcatccctagttttctggggtccacagtgcagatgggattaagcggtagcgattttcccgacgaggagtggctgtgggattatgaaaaacatggtcacaggcacagcatgatccgacgcgttaagaggtttctctctgcccatgagcacccatccagccccaggagacgcagctacagaagacagaccagcgactcctccatgttcttgccccgcgatgatcttagtcccgctcgggaccttctcgacgtcccctcacgaaaccctcctcgggcctcccccacatggaagaaatcctgcttccctgaggggtcaccgactctacacttcagcatgggggagttatccaccatacgcgagacatctcagactagtactctgcagagcctaaccccacagagctccgtccggactagccccatcaagatgcctctggttccagaagtgctaatcaccgctgctgaggctcccgtcccaacctccggaggataccatcacgattcagccactagcatcctgtcaagcgagttcaccggggtccagccgagcaagaccgagcagcaacagggaccgatgggttcaatcctgtccccgtcagaaaaggagacacctcctggcggcccttccccacagacagtgtctgcttctgccgaggaaaatatattcaactgcgaggaggatccaggtgatacttttctaaagagatggagtttgcctggattcctgggctctagtcatacctcgctcggaaacctctcgcccgaccctatgagctcccaaccagcactgctcattgacaccgagacttccagtgaaattagcggaatcaatatcgtggccgggtcacgggttagttctgacatgctgtacttaatggaaaatcttgacacaaaggagaccgatatcatcgaactcaacaaggaaacagaagagtccccaaaatag

SEQ ID NO: 109743 - DNA, 1197 bp, synthetic construct
  misc_feature 1..1197: note = Description of Artificial Sequence: Synthetic coding sequence
  source 1..1197: mol_type = other DNA
atgacggtcacctatagttcaaaagtggcaaatgccacatttttcggcttccatcggctcctgctaaagtggagaggcagcatttataagcttctgtatcgggagttcattgtcttcgcagtgctttacacagcgatctctttggtataccgcctgctgctaacaggagtccagaagaggtactttgagaagctttccatctactgtgatagatatgcggaacaaattccagtgacttttgttctcggcttctacgtgacgctggtcgtgaacaggtggtggaaccagtttgtcaatctcccatggccagaccgcctaatgtttttgattagttcttcagtgcacggatctgatgagcatggtaggctgttaagacgcacgctgatgcgttatgtgaatcttacctcactgcttatcttcagatcagtgtctacagccgtttacaagcggtttccaaccatggatcacgtcgtggaggccggcttcatgacaaccgacgaacggaagctcttcaaccaccttaaatcaccacatttgaagtactgggtcccatttatatggttcggcaatctcgcaactaaagcaaggaacgaaggcaggatccgagacagtgtggaccttcagtcactgatgaccgagatgaatcgctatcgaagctggtgtagtctcttattcgggtatgattgggtcgggatccccctcgtatacacccaggtggtgacacttgccgtttacacctttttctttgcatgcctcatcgggaggcaattcctggacccgacaaagggctacgccggccacgaccttgatctgtatattcccatcttcacgctcctacagttctttttttatgccggatggctgaaggttgccgagcagttgattaatccctttggcgaggatgacgatgactttgaaactaactggtgtattgacagaaacctgcaggtaagcctgctggccgtggatgagatgcacatgagtctgcccaaaatgaagaaagacatttactgggacgacagtgcagcgaggccgccctacacactggccgcagccgactactgtatcccttcattccttggcagtacggtgcagatgggaaagcagatgcccaaaaacgagtggaagatggaggacatcaaaattcctctgccccagccccagtttcagtgcgctaagtcagacccaggaggatag

SEQ ID NO: 109744 - DNA, 219 bp, synthetic construct
  misc_feature 1..219: note = Description of Artificial Sequence: Synthetic coding sequence
  source 1..219: mol_type = other DNA
atgttccttatctcatcttctgttcacggctctgacgagcacggccgcctgcttagaagaacgttgatgcgatatgtcaatctgacaagcctgctcatattcaggagtgtttcaaccgcagtgtacaagcgatttcccactatggatcacgtggtggaggctgaacggactggcatgaagcccatcctcccttcctcttttgagatgcagtccttctag

SEQ ID NO: 109745 - DNA, 1368 bp, synthetic construct
  misc_feature 1..1368: note = Description of Artificial Sequence: Synthetic coding sequence
  source 1..1368: mol_type = other DNA
atgactacggatgagagaaagcttttcaatcatctgaagtctcctcacttgaagtactgggtccccttcatatggtttggcaacctcgcaaccaaggctcgcaacgaggggagaatcagggactcagtcgacctacagtccctcatgactgaaatgaaccggtacaggagttggtgttcacttctgtttggctatgactgggtgggaatccccctggtgtatactcaggtggcagagcagttaatcaatccctttggcgaggatgacgatgactttgagaccaactggtgcattgatagaaatctgcaggtcagtcttcttgcggtggatgaaatgcacatgtcgctccctaagatgaagaaggacatttattgggacgacagcgctgcgcgccctccatataccctcgccgcggctgattactgcatcccctcatttttaggatccacggtgcaaatgggactgagcgggtcagatttcccagatgaggagtggttgtgggactatgaaaaacacgggcatcggcacagcatgatcagaagagtaaaaaggttcctgtcagcccacgaacaccccagctccccccgtcgaaggtcgtacaggcgccagactagcgactcttctatgttccttccacgggatgacctgtctcctgcaagagatttattggatgtaccgtcccgcaacccccccagagcctcacctacttggaagaagtcctgcttcccagaaggctcccccaccctgcatttctccatgggagagttatcaaccattagggagacctctcagactagcacgctgcagtcactcaccccccagtcctccgtgagaacctcccccattaagatgccccttgttcctgaagtactgataacagcagcagaagcacctgtgccaacgagtggggggtatcaccatgattctgctaccagcatattgtccagcgaattcaccggggtccagccttccaagaccgagcagcagcaaggacctatggggtcaatcttgtcaccctccgaaaaagagactccgccaggggggccctctccgcaaaccgtttccgcgagcgctgaggaaaacatcttcaactgtgaggaggaccccggagatacatttctgaaaaggtggtccctccccggatttctgggatcaagccatacgtctctgggcaacctctcgccagaccccatgtcatcgcagcctgctctactgatagacacagagaccagcagcgaaatcagcggaattaatatcgtcgctggtagccgcgtgtcgtctgacatgctttatctgatggaaaacttggatacaaaggaaaccgacataatcgaactgaacaaagagactgaagagagtcctaaatag

SEQ ID NO: 109746 - DNA, 219 bp, synthetic construct
  misc_feature 1..219: note = Description of Artificial Sequence: Synthetic coding sequence
  source 1..219: mol_type = other DNA
atgttcctgatctctagcagcgtccacggaagcgatgaacacggcagacttctcaggagaacacttatgaggtacgtgaacctgaccagcctgctgatctttcggagcgtgagcacggctgtctataaacgcttccctaccatggatcacgtagtggaggccgagcgcaccgggatgaaacccatcttacctagttctttcgaaatgcagtcattttag

SEQ ID NO: 109747 - DNA, 1422 bp, synthetic construct
  misc_feature 1..1422: note = Description of Artificial Sequence: Synthetic coding sequence
  source 1..1422: mol_type = other DNA
atgactgtatcatatactctcaaggtcgccgaggcccgtttcggtggtttctccggtctgctgctcaggtggaggggttccatatacaagcttctgtacaaggagtttcttctttttggagctctctacgccgtgttaagtatcacctatagactgctgttgacacaggagcagcggtatgtttacgcgcaggtagcaaggtattgcaacaggtcagccgatttgattcccctgtcatttgtcctcgggttttatgtgaccttagttgtgaatagatggtggagccagtacacctcgattcctcttcctgaccagctcatgtgtgtgatcagcgcctccgtgcacggggtggaccaaaggggacggctgcttagacgaaccctgatcagatacgccaatcttgcctctgtgcttgtcctgagaagcgtgtcaacccgcgtattaaaacgttttcccacaatggaacacgtagtagatgccggattcatgtcccaggaggaacggaagaagttcgaatcactgaagagtgatttcaataagtattgggtgccttgtgtttggttcacgaacttggccgctcaagcccggcgtgacgggcggatcagagacgacatcgctctttgcttgctcctcgaggagctgaacaagtaccgcgcaaaatgcagcatgttatttcattatgattggatttcaatcccgctagtatatacgcaggtcgtaacaatcgccgtgtattctttctttgctctgtctttagtcggccgccagtttgtggagcccgaagccggagcggctaagccccagaagctgctgaagccgggccaggaacccgcccccgctctgggagatcctgacatgtatgtgcccctcacgactctgctacagttcttcttctacgcaggctggctgaaggtggccgagcaaatcatcaatcctttcggcgaagatgacgatgattttgagactaatcagctgatcgatcggaacttgcaggtttctctgttatcagtcgatgagatgtatcaaaatcttcctcctgcagaaaaagatcagtactgggacgaagatcagcctcaacctccctacacagtggctacagctgccgaatccctgcggccctctttcctgggaagcacatttaatctgagaatgagtgacgaccctgagcagtcgctccaggtggaggcctctcccggaagtgggcgcccagctcctgcagcacaaacgcctcttctcggccgtttcctcggagtgggtgctcctagtcctgctattagtttgcgcaatttcgggcgggtgcgcggcactcctcgaccccctcacctgcttcgcttccgggccgaagagggcggcgatccggaggccgccgctcggatcgaggaggagtcagccgagtccggggacgaggctctggaaccatag

SEQ ID NO: 109748 - DNA, 294 bp, synthetic construct
  misc_feature 1..294: note = Description of Artificial Sequence: Synthetic coding sequence
  source 1..294: mol_type = other DNA
atgtacttgggaattactccaagtgtgacttgcaataatagctctaagaacgagttttctctcatccttgaaaagaatcccctggtagagttcgtggaagaattaccagctggtaggtcttcactctgttactgcaacctgctttgcgggatcattagaggtgcactagaaatggtgcatctagctgccgacgtgactttcttgcaggaccggctgaagggcgattcagtgaccgagattgggattacgttcttgaaaaagcgggatgagaagaagtaccggggaaagaagtag

SEQ ID NO: 109749 - DNA, 546 bp, synthetic construct
  misc_feature 1..546: note = Description of Artificial Sequence: Synthetic coding sequence
  source 1..546: mol_type = other DNA
atgagccgcccagcccatcgcaggcctgaatatcacaagataaacaaggacctgttcgtgctgacatatggagcgttggtggcacagttgtgcaaagattacgagaaagatgaagatgtgaaccagtatctggacaaaatggggtatggtatcgggaccagactcgtggaagacttcctcgctcgttcgtgtgtcgggagatgtcatagctatagcgagatcattgacatcatagcccaagtggcattcaagatgtatcttggcatcaccccttccgttacatgtaataatagctctaaaaatgagttctctctcattcttgagaaaaacccacttgtggagttcgtggaggagcttcccgccgggagatctagtctatgttactgcaatttactgtgcgggatcattagaggagcccttgagatggtccacctggccgcagatgtcacattcctgcaagatcgactcaagggggattcagtcactgaaatcgggatcacattccttaaaaagcgggatgagaagaagtaccgcggaaaaaagtag

SEQ ID NO: 109750 - DNA, 504 bp, synthetic construct
  misc_feature 1..504: note = Description of Artificial Sequence: Synthetic coding sequence
  source 1..504: mol_type = other DNA
aataaggacctgttcgtgctcacttacggcgcccttgtagctcagttgtgtaaggactatgagaaagatgaggatgttaaccagtacctggacaaaatgggatatggcatcggaacgcgtttggtcgaggacttcctcgccagatcatgtgtcggacggtgtcatagctacagtgagatcatcgatatcatcgcgcaggttgcttttaagatgtatctgggcatcacaccttcggtcacttgcaataactcatccaaaaacgaattttctctaattctggagaagaaccccctggtggaatttgtggaggaactccctgctggaagatcatctctctgctattgtaacctcctgtgtggtataatccgtggagccctggaaatggtccacttggccgctgatgtcacctttctccaggacagactaaagggagacagtgtgacggagatcggcattacattcttaaagaaacgagacgagaaaaaatacaggggaaagaagtag

SEQ ID NO: 109751 - DNA, 1497 bp, synthetic construct
  misc_feature 1..1497: note = Description of Artificial Sequence: Synthetic coding sequence
  source 1..1497: mol_type = other DNA
atgcgaccccctgcctgctggtggctactcgcaccccccgccctcctggccctgttaacatgttcactcgcctttggcttggcctcagaagatactaagaaggaggttaagcaaagtcaggacctggagaaaagcggcatctcccgaaagaacgacatcgacctcaaggggattgtgtttgtgatccagtctcagtcaaactcatttcacgccaagcgggcggagcaattaaagaaaagtatactcaaacaagcggccgacctgacccaagaactcccatcagtgctcctgctccaccagctggccaaacaggaaggggcttggactatcttgcctctgctaccacacttttccgtgacatactcgcgaaactcaagttggatctttttctgtgaggaggagactaggattcagataccgaagctgttggaaactctgcgtcgttatgatccctcaaaggagtggtttttgggtaaggctctgcacgacgaagaggcaaccataatccatcactacgcctttagcgagaatcctacagtgttcaagtatcctgacttcgccgcagggtgggcactgagtatccctctggtgaacaaactaactaaacgcctgaaatccgagtcccttaagtctgattttacaattgaccttaagcacgaaatcgctctatacatctgggataaaggagggggccctccccttacaccagtgcctgagttctgcacaaacgacgtcgacttttactgtgcgaccacatttcattcttttctcccactgtgtcgtaaaccggtgaagaagaaagacatttttgttgcggtgaaaacctgcaaaaagttccacggggaccgcattccaattgtgaaacagacttgggaaagccaggcttctctgatcgagtattatagtgattataccgaaaacagtatcccgacagtggacctcggcatcccgaatacggatagggggcactgcgggaagactttcgctattctggaaagattccttaacagatcacaggacaagaccgcgtggctagtgatagtggatgacgataccctgatcagcatcagtcgcttgcagcatctcttgtcctgctacgattccggcgaaccagtatttttgggggagaggtacgggtacggattggggacagggggatattcttacatcaccggcgggggtggcatggtattctctcgggaggccgttcgtagactgctagcctcaaagtgtcggtgttatagtaatgacgccccggacgacatggtactgggtatgtgcttttctggactgggcatccccgttacacatagtcccctctttcaccaggcacgacctgtggactatccaaaagattatctgtctcaccaggtgcctatcagttttcataaacactggaatatcgatcccgttaaagtttacttcacttggttagcaccctctgacgaggataaggcacgtcaggaaacacaaaaaggcttccgtgaggagctgtag

SEQ ID NO: 109752 - DNA, 1005 bp, synthetic construct
  misc_feature 1..1005: note = Description of Artificial Sequence: Synthetic coding sequence
  source 1..1005: mol_type = other DNA
atgccaaagcgtagggatatcctcgctatagtattaatcgtgctgccgtggacactgctgatcaccgtgtggcatcaatcaactttagccccactcctggccgtgcacaaggatgagggcagcgacccccggagagagactccccctggagccgatcctagagaatactgcactagcgacagagacattgtcgaggtggttagaacagaatacgtgtatactaggccacctccttggtcagacacacttcccacaattcacgttgtaacccccacgtattctcgtcccgtccaaaaagccgaattaacgcgaatggccaatacgctcctgcatgttcccaatctccattggctggtagtcgaggacgccccccgccggacacccctgacagctagactacttcgcgatacggggctgaactatactcacttgcacgtggaaacgcctcgcaactacaaactgcgaggagatgcacgggaccctaggatcccccgaggaacaatgcagcggaatttagccttgaggtggttaagagagacctttccacggaattcctcccaacccggggtggtgtatttcgctgacgatgataatacgtattcactggaactctttgaagagatgaggagtacgcgccgggtgtctgtgtggcctgtggcattcgtaggaggcctgcgatatgaggcgcccagagtcaatggggccgggaaggtggttggctggaagacagtttttgacccccataggcccttcgcaatagatatggccggtttcgctgttaacctaagacttatcctgcaaagaagtcaggcatatttcaaactgagaggcgtcaagggtggataccaagagagcagtttgcttcgggagctggtcactctgaacgacctagagcctaaggccgcgaactgcactaaaatccttgtgtggcacactcgcacagagaagcccgtgctggtgaatgaggggaaaaaaggattcactgatccatcagtggagatatag

SEQ ID NO: 109753 - DNA, 1005 bp, synthetic construct
  misc_feature 1..1005: note = Description of Artificial Sequence: Synthetic coding sequence
  source 1..1005: mol_type = other DNA
atgcccaaacgccgggatatccttgccattgtcttaattgttctgccatggacacttctaattaccgtctggcaccagtctacattggctccattactggccgtccacaaagacgagggttcagaccctaggagggagacgccacccggcgcagatccgcgggaatactgcactagtgaccgcgatatcgtggaagtggtccgtaccgaatacgtgtacacaagacctcccccgtggtctgacactctgcctaccatacatgtggtaacaccaacttattctagaccagtgcagaaggccgaactgacacgcatggcaaatacccttcttcatgtccccaatctgcactggctcgtggtggaagacgcccctagaaggacgcccctgactgcccgcctgctccgcgataccggactgaactacacccatctgcacgtcgaaaccccaagaaactacaagctgcgcggagacgctcgcgacccacgcattcctcggggcacgatgcaacgaaatctcgcactgagatggctgcgggaaacctttccccgcaattcttcccaaccaggagtcgtctatttcgcagacgatgataatacatatagcctcgagttgtttgaggaaatgaggtctacgcggagggtcagcgtgtggccggtcgcttttgtagggggacttcggtatgaagcgcccagagtgaacggagccggcaaggtggtggggtggaaaactgtttttgatccgcaccgcccgttcgctatcgacatggcaggtttcgccgtgaatctccgcctgatattgcaacggtctcaggcctattttaagcttcgcggcgtcaaaggcggttatcaggagtcatctttactgcgagaattggttacactcaatgacctggagccaaaggcggctaactgtaccaaaattttggtatggcacacgcgcacagaaaaacctgtccttgtgaatgaaggaaagaagggatttaccgatcccagcgtggagatttag

SEQ ID NO: 109754 - DNA, 1005 bp, synthetic construct
  misc_feature 1..1005: note = Description of Artificial Sequence: Synthetic coding sequence
  source 1..1005: mol_type = other DNA
atgcccaaacgcagggatatattggccatcgtcctgatagttctgccatggaccctactcattacagtctggcaccagtccacactcgctcctctgctggcagtgcacaaagatgaaggaagcgaccctcgccgggaaacaccacctggggccgatcccagagaatattgcacctctgatcgagacatcgtggaagtcgtcaggactgaatatgtgtacactcgcccccccccctggtccgacaccttgccaacaatccatgtggtcacccctacctatagtcggcctgtccagaaggcagagctgacgagaatggcaaataccctgctgcatgtgcccaacctccactggttagttgtggaagatgcaccccgacgaactcccttaaccgctagactgttaagggacacaggactgaactatacacatctccacgtcgagaccccaagaaactataagctaagaggtgatgccagagatccccggatccctcgagggactatgcagcggaatctggccctgcggtggctcagagagacgttcccccgcaacagctcacagccaggcgtggtttattttgccgatgacgacaacacttacagcctagaattgttcgaggagatgcggtctaccaggagagtgagcgtgtggcccgttgcctttgtggggggactgcgatacgaggcacccagggtgaatggagctggcaaagtggtgggatggaaaactgtgtttgaccctcacagaccttttgctatagatatggctggtttcgcagtgaaccttcgcctcatcttgcagaggtcccaagcctactttaagctgcgtggggttaaaggaggctatcaggagtcatccttgctcagggagctagtgacattgaatgacctggaacctaaggccgccaactgtaccaaaattctcgtgtggcatactcgcacagagaaacccgtgctggtgaacgaaggtaagaagggatttacagacccttcagtcgagatttag

SEQ ID NO: 109755 - DNA, 1044 bp, synthetic construct
  misc_feature 1..1044: note = Description of Artificial Sequence: Synthetic coding sequence
  source 1..1044: mol_type = other DNA
atgggaaacgaagaaccttgggtgcagcctgccctggagatgcctaagaggcgggatattctagctatcgtactcattgtgcttccctggacgttactgatcacagtctggcaccagagcacactggctccactgttggctgttcacaaggatgagggcagcgacccaagacgggagacccctcccggagccgaccctcgagaatactgcacttctgatcgggatatcgtggaagtcgtaagaactgagtatgtgtacactcgacctcccccctggtcggacactctaccaaccatacacgtagtgacacctacttactcacggcccgtccagaaggccgagttgactagaatggccaatacactgttgcatgtgccgaatcttcattggttggtggtggaggacgctcctcgccgcacaccattaactgccaggcttcttagagacactgggttaaattatacccatctacatgtcgagactccacgaaattataagctgcgcggtgacgctagggacccaagaatccccaggggcactatgcaaaggaatttggcactcaggtggctcagagagacatttcctagaaacagcagccaacctggggtggtatatttcgccgatgatgacaatacttacagcctggaactgtttgaggagatgagatctactaggagggtgagcgtgtggcccgttgctttcgtcggcggactgagatatgaggccccccgcgtcaatggtgccggcaaggtcgtgggatggaaaactgtcttcgatccacacagaccatttgctattgacatggcaggatttgctgttaatttgagactcatcctccagcgcagtcaggcttacttcaagctgcggggagtcaaaggcggttaccaggaatccagtctgctgagggaactggtgacattgaatgacttggaacccaaggcagccaattgcactaagattctggtgtggcatactagaacagagaagccggtgctggtgaacgagggtaagaagggatttacggacccctccgtagagatctag

SEQ ID NO: 109756 - DNA, 1008 bp, synthetic construct
  misc_feature 1..1008: note = Description of Artificial Sequence: Synthetic coding sequence
  source 1..1008: mol_type = other DNA
atgaagctgaaactcaaaaacgtattcctcgcatacttcttggtgtccatcgctgggctcttgtatgcactggtgcagctgggacaaccgtgcgattgcctgccccccctcagagccgcggccgagcagctgcggcagaaggacctgaggatctcgcagcttcaggctgagttgcggaggcccccgccagctcctgcccagcctccagaacctgaggctctgccaacgatttacgtggtgacacccacatatgctaggctcgttcagaaagccgagttggttcgattatctcagacgctcagcttagtacctcgcctacactggctgctcgtggaagatgctgaggggcccacccccctggttagcggcctgctggcggctagcggactcctgtttacacaccttgttgttctaacacccaaggcgcagcgcctgagagagggggagccgggttgggtgcacccccggggtgttgagcaacgaaataaagctttggactggctcagggggcgggggggcgctgtgggcggggagaaggatccccccccaccgggaacccagggagtggtgtattttgccgacgacgataacacctatagccgcgaattgttcgaggagatgcgttggacaaggggtgtgagcgtttggcctgtggggctcgtaggggggctccgcttcgaagggccacaggtacaggatggaagggtggtcgggttccacactgcctgggagccaagcaggccttttccagtggatatggccggtttcgcggtcgcactgcccctcctcctggacaaacccaacgcacagttcgattcaacagcccctcgcggccacctcgagagctcactcctgtcacatctggtggacccaaaggacctggaacctagggcagccaactgtacccgagttcttgtgtggcacacaagaactgaaaagccaaaaatgaagcaagaggagcaactgcagaggcagggcagaggatccgacccagccatcgaggtatag

SEQ ID NO: 109757 - DNA, 948 bp, synthetic construct
  misc_feature 1..948: note = Description of Artificial Sequence: Synthetic coding sequence
  source 1..948: mol_type = other DNA
atgaagctcaagcttaagaatgtgttcctggcctactttctcgtttctatcgccggtcttctttatgccctggtgcaattgggacaaccatgcgactgcctccctccacttagagcggcagcagaacaactgcgtcagaaagacctccgaatcagccagctccaggcagaactccgacggcccccccccgcacctgctcagcccccagagcccgaggccttgccaacaatttatgtggtcacacctacctatgcccgcctagtacagaaagccgagcttgtcagactttctcagacactgagtctggtgccacgcctgcactggcttctcgttgaggatgcagagggcccgactccactggtgagtggcctgttagcggcaagcggcctgctgttcactcacctggtcgtgctgacaccgaaggcacagagactgagagagggggagccagggtgggtccacccccgcggtgtggaacagagaaataaggctttggactggcttcgaggccgtggaggagcagtcggaggcgaaaaggaccctcccccacctggtactcagggtgtggtgtatttcgccgatgatgacaacacctactccagagaactttttgaagagatgaggtggacacgcggagtctccgtctggccagtcgggctcgtcgggggactgcgcttcgagggaccacaggtccaagatggccgggtcgtcggcttccatacagcctgggaacctagtcgtccattccctgtcgatatggccggcttcgcagtcgcactgcccctcctgcttgacaaacccaacgctcagttcgattccactgcaccccgggggcacctagagagttcactcctgagtcacttggtggacccaaaggacctggagccacgggcggctaactgcaccagaactgagtctcgatgtgttactcaggccggggtccagtag

SEQ ID NO: 109758 - DNA, 2997 bp, synthetic construct
  misc_feature 1..2997: note = Description of Artificial Sequence: Synthetic coding sequence
  source 1..2997: mol_type = other DNA
atggggtccccaagagctgcacggcccccccttctcctgcgaccggtcaagctattaaggaggaggttcagactccttctggccttagccgtggtgtctgtgggactctggacactatacctggaactggtggcaagcgcacaggtcggtggaaatccgctgaatcggcggtacggctcctggcgggaacttgctaaggctttggcttcacggaacataccagccgtggacccgcacctacagttttatcatccccagcggctgtctctagaggatcacgatattgatcaaggggtctcttccaatagtagttaccttaagtggaacaaacccgtcccctggctcagcgaattccggggtcgtgctaacttgcacgtatttgaggattggtgtggctccagtatacaacagttacgtcgcaatttacacttcccactctatccacatataagaaccactctgcgcaaactggccgtgagtcccaaatggacaaattatgggctgaggatcttcgggtatctgcatccattcacagacgggaagatccaattcgctatcgccgctgatgacaatgctgagttttggctgagtcttgacgatcaagtgtctggcttacagctcctggcaagcgtgggcaaaactggtaaagagtggacagctccgggggagttcgggaaattccggtcccaaatcagtaaacccgtgagtctaagcgcaagccacagatactatttcgaggtgttgcataaacaaaacgaggaaggaaccgatcatgtggaagttgcctggagaaggaacgacccgggcgccaagtttacaattattgactccctgtctctgagcttattcacgaatgagacctttctgcagatggacgaagtgggtcatatcccacaaacagcagctagccatgtcgattcatccaacgctctcccaagggacgagcagccaccagccgatatgctcaggcccgacccacgcgataccctctaccgcgtacctctcattcctaagtcccatctgagacatgtgttgcccgactgtccatacaaaccaagttacttggtggacggcctgcccttgcaaaggtaccaggggctgcgttttgtccacttatcttttgtgtaccccaatgattacactcgcttgagccacatggaaacccacaacaaatgcttctaccaagagaacgcctactaccaagatagattttcgttccaggaatatatcaagatagatcaacctgaaaaacagggactagagcagcccggtttcgaggagaacctcctggaagagtctcagtacggggaggtggctgaagagacgcctgcctctaacaatcagaatgcacgaatgttggagggacggcagacacctgcatcaaccctggagcaggatgccacagactaccgactgcgtagcctgcgaaaactgctcgcccagccccgtgagggactgctcgctcccttttcaaagagaaactcgactgccagtttcccaggacgcacttcacacattcctgtccagcagccagaaaaaagaaaacagaaaccttcccctgaaccttcacaagattccccccactcagacaagtggccacccggccaccctgtgaagaaccttccccagatgcggggaccaagacccagacccgccggtgactcccctaggaagacccaatggctaaatcaggtcgagagctatatcgcagaacagagacgcggggacaggatgaggccgcaggcgcccggccgcgggtggcacggcgaagaagaggtggtggcggccgccgggcaggaaggccaagtggagggagaggaggagggcgaagaggaggaagaagaggaggatatgtcagaggtcttcgaatatgtgccagtgtttgatcctgttgttaattgggaccaaacattcagcgctaggaatctcgatttccaggccctgcgcaccgattggatcgacctctcatgcaacacctccggtaacctgctgcttcctgaacaggaggctctagaggtgactcgcgtgtttctcaagaagctcaatcagcggagtcgtggacgttatcaattgcagcggattgtgaacgttgagaaacgacaagatcagcttcgaggagggcggtacctactcgagctggagttattggagcaggggcagcgtgtcgtcaggctctccgagtatgtgagcgcaaggggctggcagggcattgaccccgctgggggtgaagaagtcgaagcgagaaatcttcaggggcttgtgtgggatccccataaccgacgacggcaggttctgaatacgagggcccaggaaccaaagttatgctggcctcagggctttagctggagtcatcgggccgtggtgcatttcgtcgtgcctgtgaagaatcaggcccgctgggtgcagcagttcataaaagacatggaaaaccttttccaggtgaccggcgacccgcattttaacatcgtcattactgattattcttccgaagacatggacgtggagatggcactgaagagatccaagctgcgcagctaccaatatgttaaactgagtggaaatttcgaaaggtctgctggactccaggcaggaattgacctggtaaaggatcctcactccatcatattcctttgcgacctgcacatccacttccctgctggggtgatagatgcgattagaaaacattgtgtagaagggaagatggcctttgctccaatggtgatgcgtctgcactgtggtgccacaccccagtggcccgaagggtattgggaagtgaacggctttgggttattaggtatttacaaatcagatctggatagaataggcggaatgaacaccaaggagttccgcgacagatgggggggcgaagattgggagcttttagatcgcatactccaggctggcctggacgtggagaggttaagcttacggaacttcttccaccacttccacagtaagcgcgggatgtggagtagaagacagatgaaaactctctag

SEQ ID NO: 109759 - DNA, 306 bp, synthetic construct
  misc_feature 1..306: note = Description of Artificial Sequence: Synthetic coding sequence
  source 1..306: mol_type = other DNA
atgtcgcggtccgtggcactcgctgtgctcgccctcctcagcctgtctggccttgaagcaattcaaagaacccctaaaatccaggtgtactctagacatccagcagagaacggtaagtccaatttccttaactgttacgtgtccggattccatccgagtgacatcgaggtggatctgttaaagaacggtgaacgcatagaaaaggtagagcactcggacctgtctttctcaaaggactggtctttttacctgctctactacactgagtttacaccaaccgaaaagatgtccatgcctgcagtctag

SEQ ID NO: 109760 - DNA, 369 bp, synthetic construct
  misc_feature 1..369: note = Description of Artificial Sequence: Synthetic coding sequence
  source 1..369: mol_type = other DNA
atgagccggagcgtggccttggctgtgctggctctactgagtctgtctggcttggaggctatacagagaacccccaagatacaggtgtacagtaggcaccctgccgagaacgggaagagtaactttctgaattgctacgtgagcggttttcacccctccgatatcgaagtagatttactgaagaatggagaacggatcgaaaaagtggaacacagcgacttatcgttttcaaaagactggtcattctatctactgtattataccgaattcacaccaacagaaaaggacgaatatgcctgcagagtaaaccacgtcaccctgagccaacctaagattgttaaatgggggaagtcttacatactgctctag

SEQ ID NO: 109761 - DNA, 360 bp, synthetic construct
  misc_feature 1..360: note = Description of Artificial Sequence: Synthetic coding sequence
  source 1..360: mol_type = other DNA
atgagccggagcgtggccctggctgtcttggccttactctcattatccggcctggaagctattcagaggacacccaagattcaagtgtatagccgccacccagcggagaatgggaaaagtaacttcttgaactgctatgtaagcggctttcatccttctgacattgaggtggatttgctgaagaatggggagcgtattgaaaaggtagaacattctgacctgtccttctcaaaagactggtccttctacctcctctactacacagagttcaccccaactgaaaaggacgaatatgcatgccgagtgaaccacgtcacactcagtcaacccaagatcgtgaaatgggaccgcgatatgtag

SEQ ID NO: 109762 - DNA, 369 bp, synthetic construct
  misc_feature 1..369: note = Description of Artificial Sequence: Synthetic coding sequence
  source 1..369: mol_type = other DNA
atgtccaggagtgttgcgctcgccgtactagccctgctctccctcagtggattggaggccatacagagaactccgaaaatccaggtctattcacgtcaccctgctgaaaacgggaagtccaacttcttaaactgctacgtgtccggtttccatccttccgacatcgaggtggacctgctgaaaaacggagaacggatagaaaaagtggagcattcagatctttccttctctaaggattggtcgttttatcttctgtattacactgaatttactcccaccgagaaagacgaatatgcctgtcgcgtgaatcacgtcaccctgagccagcctaagatcgtaaaatggggcaagagttatatactactgtag

SEQ ID NO: 109763 - DNA, 360 bp, synthetic construct
  misc_feature 1..360: note = Description of Artificial Sequence: Synthetic coding sequence
  source 1..360: mol_type = other DNA
atgagccggtcggtcgcactcgctgttctggcgctgctctcactgtctgggttggaggccatacagaggacgcctaagatccaggtgtactccaggcatccagctgagaacgggaagtctaacttcctcaattgttacgtcagtggattccatccatctgacatcgaggtggatctgctgaaaaacggagagcggattgaaaaggtggaacacagcgatctctctttctcgaaggattggtcattctacctactctactacaccgagtttactcccactgaaaaagatgaatatgcatgtagggtgaatcatgtcacactctcgcagccaaagatagtgaaatgggacagggatatgtag

SEQ ID NO: 109764 - DNA, 360 bp, synthetic construct
  misc_feature 1..360: note = Description of Artificial Sequence: Synthetic coding sequence
  source 1..360: mol_type = other DNA
atgagtcggtccgtggcgctcgccgtcctggctcttctttccctgagcggactcgaggccatccagcgcacaccgaagattcaggtatactcccgtcaccctgccgagaacggcaagagcaattttctgaactgttacgtgtctggattccatcctagcgacattgaagtggacttattgaaaaacggagaaagaatcgagaaggtggagcactccgatctttctttctcaaaggactggtctttctacctgctgtattatactgaatttacacctaccgaaaaggacgaatacgcttgtagagtcaatcacgtcaccctcagccagcccaagatcgtcaagtgggaccgcgacatgtag

SEQ ID NO: 109765 - DNA, 1644 bp, synthetic construct
  misc_feature 1..1644: note = Description of Artificial Sequence: Synthetic coding sequence
  source 1..1644: mol_type = other DNA
atggacattatctttggccgtaatcggaaggagcaactggagcctgtaagggccaaagtaaccggcaaaattcctgcatggctacaaggcactctgctacgaaacggcccgggcatgcacaccgtgggggagagtaggtataaccactggtttgatgggctggccctgcttcactcattcacaattagagatggagaagtgtactatcgatccaagtacctccggagtgacacttacaatactaacatcgaggctaatagaatagtggtgtctgagttcgggactatggcctatcccgacccatgtaagaacatctttagcaaagcctttagctatttgtcccacactattccagactttactgataattgcttgattaacataatgaagtgcggcgaggatttctacgccacctcagagactaactacattcggaagattaatcctcagaccctcgaaactttggaaaaggtggattaccgcaagtacgtggccgtgaatttagcaactagccaccctcactatgacgaggccgggaacgttcttaacatgggcacgagcatagtggagaaggggaaaactaagtatgttatcttcaagatacctgccaccgtgccggagggcaagaaacaaggcaagtcgccttggaagcatactgaggtgttttgctcaatcccgtctcggagtttgctctcacccagctattaccacagcttcggggttaccgagaactatgtgattttcctggaacagccatttagattggatattctgaagatggctacagcgtacattaggcgaatgagttgggcatcatgcttggcctttcacagggaggagaagacatacatccatattattgaccagcgtacccgacagcctgtccagacaaagttctacactgatgcaatggtggtgtttcatcatgtaaatgcatacgaggaagatgggtgcatcgtcttcgacgtgatcgcctatgaagataactccctttaccaactcttctacctggccaacctgaaccaagacttcaaagagaactctcgccttacatcagtgcctaccttaagaagatttgccgtgcctctccacgtcgataaaaacgctgaggtgggaaccaatctgatcaaggtcgcatcaaccactgcgacagccctcaaggaggaggatgggcaggtctactgtcagcctgaatttttgtacgagggattggagttgcccagggttaattacgcccacaatgggaaacaatatcgctatgtgttcgcaactggggttcagtggagtcctattcctaccaaaatcataaagtacgatatcctgacgaagtcaagtctaaagtggcgtgaggacgattgctggccggctgagcctctttttgtacccgctcctggcgccaaagatgaggacgacggagtcattcttagtgctatcgtgtctacggatccgcagaagcttcccttcctcttgatcctagacgcgaagtcatttaccgagctggctagggctagcgttgatgtggacatgcatatggatcttcacgggctctttattacagacatggattgggacacgaaaaaacaggccgcctctgaggagcagcgcgatcgtgcttcggattgccacggagcgcccctcacctag

SEQ ID NO: 109766 - DNA, 1437 bp, synthetic construct
  misc_feature 1..1437: note = Description of Artificial Sequence: Synthetic coding sequence
  source 1..1437: mol_type = other DNA
atggctgccggcaaccccgcgcctcaatgggcctgggacgcgcattcttggggcgtgcaaatccagcccctcgtgcgtcgaccatgccctgccccccagctgcatcaccagagacgcgccttcagctacctgtcacacaccatccccgatttcaccgacaactgtctgattaacatcatgaagtgtggcgaagacttctacgccacatcagaaaccaattatatccgcaagatcaaccctcagaccttagagacgttagagaaggtcgactatagaaagtacgtggctgtgaatctggccacaagccatccacactacgatgaagccggtaatgtactgaatatgggaacttctattgtcgagaagggcaaaaccaaatatgtgatattcaaaatcccagcaaccgtgcccgagggaaaaaaacagggcaagagcccctggaaacataccgaggtattttgtagcatcccgtctagatcgttgctgtctccttcctactaccactctttcggagtcaccgaaaactatgtgatcttcttggagcagccatttcggctggacattttgaagatggccaccgcatacatacgacgcatgtcttgggcgagctgtctggccttccacagggaggagaaaacttacatacacatcatagatcaacggacaagacagcctgtgcaaacaaaattttacaccgacgccatggtagtttttcatcatgtcaacgcctacgaggaagacggctgtattgtcttcgacgtcatcgcctatgaggacaacagcttataccagctgttttatctggctaacttgaatcaggactttaaggagaacagcagactgacctctgtcccaactttaagaagatttgccgttcccctgcatgtagataaaaacgcagaggttgggaccaacctgatcaaagttgcatctactacagccacagccctaaaagaagaggatggtcaagtgtattgtcagcccgagttcctttacgaggggcttgagctgccaagagtaaattacgcccacaatgggaaacagtatcggtacgtgttcgccacaggtgtacaatggtcccctataccaacaaaaataatcaagtacgatatactcaccaagagtagcttaaagtggagggaggacgattgttggccagctgagcctctgttcgtgcctgcacccggggccaaggatgaggatgacggcgtgatcttgagcgccattgtgagtacagatccccagaaactgccttttctgctcatcctggacgcgaagtcctttacagagctcgcacgagcgtctgtcgatgttgacatgcatatggacctgcatggactctttattactgacatggactgggatacaaagaagcaagccgcatccgaggagcaacgcgatagagcttccgactgtcacggagcgccgcttacctag

SEQ ID NO: 109767 - DNA, 1740 bp, synthetic construct
  misc_feature 1..1740: note = Description of Artificial Sequence: Synthetic coding sequence
  source 1..1740: mol_type = other DNA
atgttctttagggtatttttacatttcattaggagccatagtgccactgctgtagattttttaccagtcatggtgcacaggctccctgtctttaaaagatacatgggtaacacaccccagaagaaagccgtgttcggtcagtgtcgtggtctcccttgcgtcgctcctctgctcactaccgtggaagaagcaccacggggaattagcgctcgagtgtggggacattttccaaagtggctgaatggctcactgctcagaatcggacccggcaaatttgagttcgggaaggataaatataatcattggttcgatggcatggccctgttacaccagtttcgcatggcaaaggggaccgtgacctaccgcagtaaattccttcagagtgatacgtacaaagcaaattcggccaaaaatcgcatcgtgatctccgagttcggtactctggctctaccagacccctgtaagaatgtatttgagcggtttatgtctcggttcgaactgcccggaaaggccgccgcaatgacagacaatacaaatgtcaattatgtgcgctataaaggtgattactatctgtgtacagaaaccaactttatgaacaaggtagacatcgagactttggaaaaaactgaaaaggtggactggtccaagtttattgccgtaaatggagcaactgctcacccccattacgaccttgacggtaccgcatacaacatgggtaactcttttggtccctatggtttcagttataaagtaattcgtgtcccgcccgagaaggtcgatctgggagaaacgatccacggagtgcaggtgatctgctctattgcctctaccgaaaaaggaaagccatcgtactaccatagcttcggcatgacaaggaactacattatctttatcgaacagcccctgaagatgaatctctggaaaattgccacttctaagatccgcggcaaagccttcagtgacggcatcagttgggagccccagtgtaataccagatttcacgtggttgagaagcgcaccggccagctcctccccggccggtactactcaaaaccttttgtgacctttcaccagattaatgcattcgaagatcaggggtgcgtcatcatcgacttgtgctgtcaggacaacggccggacgttggaagtttaccaactgcagaatcttaggaaggcaggggaaggattagatcaggtgcataactccgcggctaaaagtttccctcggaggtttgtactgccacttaacgtctcacttaacgctccagaaggtgataacctgtctcccttgtcttatacctccgcctccgctgtgaaacaggctgatggtactatttggtgcagccatgagaacctgcatcaggaggatttagagaaagagggagggatcgaattcccacaaatatattacgataggttctccggcaagaaataccatttcttttatggttgcggcttccgccacctggtaggggactctttgataaaggtcgatgtggtgaacaagaccctcaaggtgtggagggaggacggcttttatcctagcgagcccgtgttcgttccggctccgggtacaaatgaggaggacggtggtgttatcctgtcagtggttatcacgccaaaccagaacgagagtaattttatccttgtgctcgatgccaaaaactttgaagaactgggcagggcagaggtcccagtccagatgccctacggctttcatggtacctttattcctatctag

SEQ ID NO: 109768 - DNA, 1638 bp, synthetic construct
  misc_feature 1..1638: note = Description of Artificial Sequence: Synthetic coding sequence
  source 1..1638: mol_type = other DNA
atgggtaacaccccccagaagaaagccgtcttcggacagtgccgtggactgccctgtgtcgctcctctgctcacaaccgttgaagaggctccacggggaatctcagcgagagtgtggggtcacttccctaagtggcttaacggaagcctcctgcgaattggacctggcaagttcgaatttggcaaagacaagtataaccactggtttgacggtatggcattattacatcagtttcggatggccaagggcaccgtgacataccgttcaaaattcttgcagtccgacacctacaaggccaacagcgcaaagaatcgtattgtgatctcagaattcgggactctggcactcccggacccatgcaaaaacgtttttgaacgctttatgtcccggtttgagctgcctggaaaggccgcagccatgacggataataccaacgtgaactacgtccgttataagggtgattactatctatgcaccgagaccaactttatgaataaggtggatatagaaactcttgagaaaaccgaaaaggtggactggtctaaatttatcgccgtcaacggggcaactgcgcatcctcattatgacttagacggcaccgcatataacatgggcaacagttttggaccctatgggtttagttacaaggtgattcgcgttcctccagagaaggtggacctaggtgaaacaattcacggcgtgcaagtcatatgctccatcgcctctactgagaagggaaagccctcttattatcattctttcggcatgacacggaactacatcattttcatcgaacagccattgaagatgaacctatggaagatcgcaaccagcaagattcggggcaaagcattctccgatggaatctcttgggaaccccagtgtaataccaggttccacgtagtcgagaagaggaccgggcagctcctgcctggaagatattactccaagcccttcgtaacatttcaccagatcaatgcctttgaagaccaggggtgcgtcatcatagatttatgctgccaggacaacgggaggacgctggaggtttaccagctgcaaaacctgcgcaaagcaggggaaggactagatcaggtgcacaacagcgcggctaagtccttcccaagaaggtttgtcctaccactgaacgtttcactgaatgccccagagggggacaacctctcaccactgagctacacttctgcttctgccgttaagcaggcagacggcacaatttggtgttcccacgaaaacctgcaccaagaggatcttgaaaaggagggtggcatcgagttcccacagatctattacgacagattctcaggaaagaaatatcacttcttctatggctgtgggttccggcatctagtcggggatagcttaatcaaagtcgacgtggtcaacaagacccttaaagtgtggagagaagatggtttctacccatctgagcctgtgtttgtacctgcaccaggaaccaacgaagaagacgggggcgtgattctttctgttgttataacgcctaaccagaatgagtctaacttcattcttgtcctagatgcaaaaaattttgaagagctcggcagggcagaagtacccgtgcagatgccttatggtttccacggcacatttatccctatttag

SEQ ID NO: 109769 - DNA, 1638 bp, synthetic construct
  misc_feature 1..1638: note = Description of Artificial Sequence: Synthetic coding sequence
  source 1..1638: mol_type = other DNA
atgggaaatacaccgcagaagaaggcagtgttcggtcagtgtcgtgggcttccctgtgtcgcccctctgttaactacggtcgaggaagcacccaggggaattagcgccagggtctggggccactttccaaagtggcttaacgggtcactgctacgcattggccccggtaagttcgagttcggtaaggacaaatacaaccactggttcgacggaatggcgctcctccatcagttccgtatggcgaaaggcaccgtgacctaccggtctaagttcctgcagagtgacacgtacaaggccaactctgcaaaaaaccgaatcgtgataagcgagttcggcactttggccctgccagatccttgcaagaacgtctttgagcgcttcatgtcgcgcttcgagcttcctggcaaagcagctgccatgacagacaataccaatgtgaattatgtgagatacaaaggggactattatctgtgcacggagactaactttatgaataaagtggacattgagacactggagaagactgagaaagttgactggtcgaaatttatcgcagttaatggcgccaccgctcatccgcattatgacttggacggaaccgcgtacaacatgggaaatagtttcggcccctacggcttttcctataaagtaatccgcgttcctccagagaaagtggatttgggagaaaccatacatggggtgcaggtcatctgttctattgccagcaccgagaagggaaagccttcctactaccactctttcggcatgacgaggaattacatcatttttatagagcagcctctgaagatgaatctttggaagattgctaccagcaagattcgtggcaaagcgtttagcgacggtatttcttgggaacctcaatgcaatacccgcttccacgtagtggagaagcgtactggccaacttctgcccgggagatactatagtaaaccctttgtcaccttccaccaaatcaacgccttcgaagatcaggggtgcgtcatcattgacctctgctgtcaggacaacggccgcaccctggaagtttaccaacttcaaaaccttcgcaaggctggcgaagggttagatcaggtgcacaactcagcagccaaaagcttccccagacgcttcgtactgccgttgaatgtctctcttaacgccccagaaggcgacaacctgagccccctgtcctacacctcagcctctgctgtcaagcaggctgatggaaccatttggtgttcacatgagaacctgcaccaggaagatctggagaaggaaggggggattgagttcccccagatctactacgataggttcagtgggaagaaataccactttttctatggttgcggtttccgccatctggttggcgactcactgattaaggttgatgttgtcaataagacattaaaagtgtggagggaggatggcttctaccccagtgagccagtttttgtgcccgcccctggcaccaatgaggaggatggcggcgtgatcctgtcggtagtgattacgcccaatcaaaacgagagcaatttcatactagtacttgacgccaaaaacttcgaagaactgggcagggctgaggtgcctgtgcagatgccatacggttttcacggaacctttatcccaatctag

SEQ ID NO: 109770 - DNA, 1620 bp, synthetic construct
  misc_feature 1..1620: note = Description of Artificial Sequence: Synthetic coding sequence
  source 1..1620: mol_type = other DNA
atggggaacaccccccagaagaaggccgtatttggtcagtgcagaggtctgccatgcgtggcaccccttctgaccacggtggaggaagccccaaggggcattagcgccagagtgtgggggcattttcctaaatggctgaatgggtccttgttacgtatcgggcccggcaaattcgaattcgggaaagacaagtacaaccactggtttgatggcatggccctgctgcatcagtttcggatggcaaaaggtaccgtgacttatagaagcaaatttttacagagtgacacatataaggccaatagcgcaaaaaatagaattgttatcagcgaattcgggacactggcactgccggacccatgcaagaacgtcttcgaaaggtttatgtcgcgttttgaattacctggaaaggccgcagccatgactgacaacacaaacgtcaactacgttcgctataaaggggattattatctttgcaccgagacaaatttcatgaacaaagtcgatattgaaactctggagaagactgagaaggttgactggagcaagtttattgccgtaaatggtgctactgcccacccgcactatgaccttgacggaacggcctataacatgggtaactctttcggaccttatggcttttcctataaggtgattagagtccctccagaaaaggtcgatctgggtgagaccatccatggcgtgcaggtgatctgctctatagccagcacggaaaaaggtaaacccagctattaccactcctttggtatgaccagaaactatatcatattcatcgagcagccacttaagatgaacctttggaagatcgctacaagcaaaatcaggggcaaggccttttcagacggaatttcatgggagccccagtgtaatacgcgtttccacgtcgtggagaagaggacaggccagctgctgcctggaaggtattatagcaagccttttgtaacgtttcaccagatcaatgcgttcgaggaccagggatgtgtgatcattgatctgtgttgtcaggataatggtagaaccctcgaggtctatcaactgcagaatctcagaaaggcaggtgagggtctcgaccaggtgcacaacagtgcagctaagtccttcccgagacgattcgtgctccctttaaacgtctcactcaacgcgcccgagggggacaatctgtctccattgtcgtacactagtgccagcgcagttaaacaggcagatggcactatatggtgtagtcatgaaaacctgcaccaggaagacctagagaaggagggtggtattgaattcccacaaatatactacgacagattctctggaaagaaataccacttcttctatggctgtggcttcaggcacttggtcggagactcactcatcaaggtagatgtcgtctggagagaggacgggttctacccgtcggagccagtgtttgtacccgcgcccggtaccaatgaggaagatggcggagtgatcttgtctgtggttatcacccctaaccagaacgagagcaacttcatactcgtgttggatgcaaaaaatttcgaagagttaggccgtgccgaggtgcctgtccaaatgccctatggattccacggtacattcattccaatctag

SEQ ID NO: 109771 - DNA, 1638 bp, synthetic construct
  misc_feature 1..1638: note = Description of Artificial Sequence: Synthetic coding sequence
  source 1..1638: mol_type = other DNA
atggggaacaccccccagaaaaaggcagtctttggacaatgtcgtggacttccttgcgtagcccccctgttaaccacagtcgaggaggcaccacgcggcatctccgctagagtctgggggcacttcccgaaatggctcaacggctccctactacggatcggcccaggcaagttcgaattcggtaaggataagtacaaccactggttcgacggcatggctcttctgcatcagtttagaatggccaagggtactgtgacataccggagtaagtttcttcagtccgacacgtacaaagcaaactctgccaagaaccgcatcgtgatttctgaattcggcacactcgccctcccagacccatgcaagaatgtttttgagagattcatgtcccgatttgaactgcccgggaaagcagctgccatgacggataatactaatgtgaattacgtccgctataaaggagactactacctttgcacggaaaccaattttatgaacaaagtggacatcgagacactcgaaaagaccgagaaagttgattggagtaaattcattgctgtgaatggtgccaccgctcatccccactatgatttggatggaacagcatataatatgggaaactccttcgggccttatggtttttcatataaagttattagagtaccaccagagaaggtcgacctcggagaaacaatccatggcgtgcaggtgatctgttctatcgcctctacagagaagggaaagccatcctactaccattcctttgggatgactcggaactatattattttcatcgaacaacccctgaagatgaatctgtggaagatcgctactagcaagatccgagggaaggcatttagtgacggtataagttgggagccccagtgcaatactcggttccatgttgtggagaagagaacaggccagttgttgccagggcgttactactccaagccctttgtaacctttcatcagataaacgcatttgaagaccaggggtgcgtcatcattgacctgtgctgccaggacaatggccgaacactcgaggtgtaccagctgcagaacctacgaaaggcaggagaaggcctcgaccaggtgcataattcagcggcgaagagcttccctcggcggtttgtgctgcccctcaacgtaagtctcaatgcccccgagggagataatctgagccctctgtcctacaccagcgctagcgctgtcaagcaggcagatggtacaatatggtgttcacacgagaacctacaccaggaggatctggagaaagagggagggatcgaatttcctcagatttactacgacagattcagcggcaagaaataccattttttctacggatgtggttttaggcatctagtgggagactcactaataaaagtggacgttgttaacaaaacgttgaaggtgtggcgagaggatgggttctacccaagtgaacctgtgtttgtgccagccccaggcacaaacgaggaagacggcggtgtgatcctctccgtggttatcacaccaaatcagaacgaatccaactttatattggtgctagatgctaagaatttcgaggaactcgggagagccgaagttccagtccagatgccctacggcttccatgggacattcatccccatttag

SEQ ID NO: 109772 - DNA, 1221 bp, synthetic construct
  misc_feature 1..1221: note = Description of Artificial Sequence: Synthetic coding sequence
  source 1..1221: mol_type = other DNA
atgcctccagtcggagggaaaaaggcgaaaaagggtatactggaaaggttgaacgccggtgagattgtgattggagatgggggtttcgtttttgccttggaaaagcgcgggtacgtgaaagctgggccatggacgccagaagctgccgttgagcacccggaggccgtgcgccaactgcatcgggaatttctcagagctggctcaaatgtgatgcagacctttacattctatgcctccgaggacaagctggaaaatcgggggaattacgtactagagaaaatctccggacaggaagtgaacgaagccgcttgtgatatcgcccggcaggttgccgacgaaggggatgcacttgttgctgggggcgtgtctcagacccccagctatctgagctgtaaatccgaaacagaagtcaagaaagtgttcttacaacagttggaggtgtttatgaagaaaaacgtggacttcctcattgcggagtatttcgaacacgttgaagaggcagtctgggcagtcgagaccctgatcgccagtggtaaacccgtggcagctaccatgtgcatcggcccagagggagacctgcacggagtgcctccaggggagtgtgccgtgaggttagtaaaggcaggtgcaagcattataggggtgaactgtcactttgatcctaccatttccttgaagactgtgaagctcatgaaggagggtctcgaggcggccagattgaaggcccatcttatgagccagcctctggcatatcatacgcctgactgcaacaaacagggcttcattgacctgcccgagttccccttcgggctggagccaagagtagctacccgctgggatatccagaaatacgccagggaagcttacaacctgggcgttcgatatatcggcgggtgctgtggattcgagccatatcacattagggccatcgcagaggagcttgcccccgaacgagggttcttgccccctgcaagcgagaaacacggatcctggggtagtgggctagacatgcacactaaaccctgggtgcgcgctagggcaagaaaggagtattgggagaatttgaggatcgcgtccggccggccctacaacccaagcatgtccaagcctgacgggtggggagtcactaagggaactgctgaactgatgcagcaaaaggaagcgaccaccgagcagcagctaaaggagctcttcgagaagcagaaattcaaaagtcagtag

SEQ ID NO: 109773 - DNA, 612 bp, synthetic construct
  misc_feature 1..612: note = Description of Artificial Sequence: Synthetic coding sequence
  source 1..612: mol_type = other DNA
atgccccctgtgggtgggaagaaagcaaagaagggcattttggagcggctgaacgcgggggaaattgtgatcggcgacgggggtttcgtgttcgccctcgagaaaagaggctatgtcaaggccgggccctggacacctgaggctgccgtggaacatcctgaggccggagcgtccattatcggcgtcaactgtcattttgaccccactatctcgctcaaaacagtgaaattgatgaaggaagggttggaggccgctagacttaaggcccatctgatgagtcagccactggcttatcatactccggactgcaataaacaaggatttattgatctacccgagttcccatttgggctggaacctgagctcccccctgatggcatcttcaaaaacacccccgagcgcccaaccacttggggctctgggacattggcgggggcggtagacctttcacccaccaccagcggccagctgcaacgctcctggccccagaaaggagccttctgtcaccagctgcagaaaaatatggccgctggagaggtggtgtggacttgcacacccaatccgggattggagcaggggcccggaaggaacactgggcgtatcttcggatag

SEQ ID NO: 109774 - DNA, 1092 bp, synthetic construct
  misc_feature 1..1092: note = Description of Artificial Sequence: Synthetic coding sequence
  source 1..1092: mol_type = other DNA
atggctccggcgggccgcccgggcgcgaaaaagggcatcctggagaggttggaatcaggtgaggtcgtaatcggcgatgggtccttcctgatcaccttggaaaaacgtggctacgtgaaagccgggctctggacccccgaggcggttatagagcatcccgatgccgtgagacagctgcacatggagttcttgagagcaggcagcaatgtgatgcagacctttacgtttagcgccagtgaggacaatatggagtccaagtgggaagacgtcaacgctgccgcctgcgacctggcccgggaggtggctgggaagggagacgcattagttgcagggggcatctgccaaacctctatttataaataccaaaaagacgaagctcggatcaagaagctttttcgccagcagctggaggtgttcgcctggaagaacgtggatttcttaattgctgagtacttcgagcacgttgaggaagcggtatgggcagttgaggttctgaaagaaagcgacagacccgttgctgtgaccatgtgtatcgggcccgagggggacatgcatgacattacgccaggtgaatgcgcggtgcgattggtgaaggccggggcgtcaatagtcggcgtaaattgtagattcgggccggatacaagtctgaaaaccatggagctcatgaaagagggactagagtgggccggcctgaaggcgcatctcatggttcaacccctggggttccatgcccccgactgtggcaaggaggggtttgtggacctaccagagtatccttttggtctcgaatcaagagtcgccacacgatgggacatacagaaatatgctcgcgaggcctataacctcggagtacgttatatcggtgggtgctgcggatttgagccataccacatacgggctatcgccgaagaactggcccctgaaaggggcttcctgccgcccgcgagtgaaaagcatgggtcctggggtagtggcttagatatgcatacaaagccatggatcagggcgcgagcccgccgagagtactgggaaaatctgctcccggcaagtggccgccccttctgcccatcactgtctaagcctgatttctag

SEQ ID NO: 109775 - DNA, 900 bp, synthetic construct
  misc_feature 1..900: note = Description of Artificial Sequence: Synthetic coding sequence
  source 1..900: mol_type = other DNA
atggctccggctggccggcccggtgctaagaaggggatcctggagaggttggaatcgggagaggttgtgattggcgatggatcgttcttgatcaccctggagaagcggggctatgtgaaagcaggcctgtggacgcctgaagcagttatcgagcaccctgacgcagtgcgccagctgcatatggagttcctcagggctggctccaatgttatgcaaactttcactttttcggcttcggaggacaatatggagagcaagtatttcgagcacgtggaggaagccgtatgggcggtggaagtactgaaagaatccgatagacccgtggccgtgaccatgtgtatcgggcccgagggcgatatgcatgacatcactcctggagaatgtgccgtgcggctggtgaaggccggtgcctcaattgtcggcgtgaactgcaggtttggcccagatacaagcctgaagaccatggagctgatgaaagagggcctggagtgggcaggtttaaaagcacatctcatggttcagccgcttggcttccacgcccctgattgtggcaaggagggctttgtagacttgcctgagtaccctttcggtctggagtctcgagtggcaacaagatgggatatccagaaatatgctcgggaggcctacaatttaggggtgcgctatatcggaggatgttgcggatttgagccttaccatattcgtgcaatcgccgaggaactggcacccgagcgtgggttcctgcctccagcttcagagaaacacggttcctggggctccggccttgacatgcataccaagccatggataagagcaagagctagacgggaatattgggagaatttgctgcctgcttcaggcagacccttttgcccatccctgtctaaacctgacttctag

SEQ ID NO: 109776 - DNA, 639 bp, synthetic construct
  misc_feature 1..639: note = Description of Artificial Sequence: Synthetic coding sequence
  source 1..639: mol_type = other DNA
atgatcataggcgggatcgatcacagtctctacacaggatccctgtggtatacacccattagaagagagtggtactacgaggtaatcatcgtacgcgttgagatcaatgggcaagatctaaagatggattgcaaggagtataactacgacaagagcatcgtcgactccgggactactaacctgcggttgccaaaaaaagtgtttgaggcagccgtgaagagtatcaaggcagcctcatctactgaaaaatttccagacggcttttggttaggcgagcagctagtgtgttggcaggctggtacaacaccttggaacatcttccctgttatctctctgtatcttatgggggaagtcactaatcagagcttcagaattactattctgcctcagcaatatctgcgatggaagatgtggccacggcccaaaaccactgtaacttgccacctgacggtaattcacgggcactgttatggcagttgctatcacgggggtctgctcctcagtctgataggccccgaaaacgagctggccctattgtccgcattggcgatgtgcactatgtcttctggtaggcagcgctggaaggcatgccacttaggacatggccggctctggcttcagcattccacagacagatag

SEQ ID NO: 109777 - DNA, 1506 bp, synthetic construct
  misc_feature 1..1506: note = Description of Artificial Sequence: Synthetic coding sequence
  source 1..1506: mol_type = other DNA
atggcccaggctctcccttggctccttttatggatgggtgccggagtgctgcctgcacacggcacgcagcatggtatccggttgccactccgctctggactaggtggcgcccctctgggcttgagactgccccgtgaaaccgacgaagaacctgaggaacctggacggcgggggtctttcgttgagatggtggacaatcttcgtgggaagtctgggcagggatattacgtcgagatgacagttggcagtccaccacagaccctgaatatacttgttgacactgggtcaagtaactttgccgtcggggcggctccacatccgttcctgcatcgatattaccagcgccaactctccagtacctaccgcgatctccgtaaaggagtctatgtgccttatactcagggcaagtgggagggagaactgggcacagacctcgtgagcatccctcatggaccgaacgtgactgtgcgcgccaacatcgcagcaatcaccgagtcagataagttttttatcaatggatctaactgggaaggcatactcggcctggcatacgccgagatcgctagaccagacgacagcctggaaccgtttttcgattccctggttaagcaaacccatgtccctaaccttttttccctccagctgtgcggcgccggattccccctgaaccagagcgaagtcctagcaagtgttgggggttcaatgatcatcggcggaattgatcattccctctataccggctcgctgtggtatacacccatcaggagagagtggtactacgaggtcataatcgtccgtgtggaaatcaatggacaggatttaaaaatggactgtaaggagtataactacgataaaagtatcgtggactcaggcactacaaacctacggctgccaaagaaagtttttgaggcggctgtgaaatctattaaggcggcttccagtacagaaaaattccctgacggattttggttaggtgagcaactggtgtgttggcaggcgggcaccaccccctggaatatcttccctgttatttcgctgtacctgatgggtgaagtaacaaaccagtcctttagaataacgattctgccacagcaatatctgcgccctgtggaggatgtggccacatctcaggacgattgctacaagttcgccatctcccagagctccaccggcaccgttatgggcgcggtgatcatggaaggcttttacgtggtgtttgacagagctcgcaaacggattggcttcgccgtttccgcttgtcatgtccatgatgagtttcgcactgccgcagttgagggcccctttgtcacccttgacatggaagactgcggatacaatatcccacagacagatgagagcaccctgatgactatcgcctacgtgatggcggccatctgcgcactgtttatgctgccattatgtctgatggtttgtcaatggtgttgtctcaggtgtctccggcagcagcatgatgatttcgccgacgatatttccctcttgaaatag

SEQ ID NO: 109778 - DNA, 1299 bp, synthetic construct
  misc_feature 1..1299: note = Description of Artificial Sequence: Synthetic coding sequence
  source 1..1299: mol_type = other DNA
atggctcaagcattgccttggctgctgctttggatgggagcgggcgtgctacctgctcacggtacccagcatggcattcggttgccactacgctccggactcggcggtgcccctctgggactcaggttgcccagagagactgatgaggagccagaggagccagggcgtcgcggctccttcgttgaaatggttgataatctaaggggcaaaagcggtcagggctattatgtggagatgacggtgggctcccccccacagacacttaatattctggtcgataccggttcttcaaatttcgcagtgggggctgccccacatcctttcctgcatcggtattaccaaagacagcttagcagtacatatcgcgatctgcggaagggcgtgtacgttccttatactcaggggaagtgggagggagaattgggcactgatttgctctgcggagcaggatttcccctgaatcaatctgaggtgctggccagcgtcggtggttcgatgatcattggcggcatcgatcattctctttatacagggtcactgtggtacacacctatccgcagggagtggtactatgaggtcattattgtgcgcgtggaaatcaatggacaggatctgaagatggactgtaaggagtacaactatgataaatccattgtagactctggcacgacaaatctcagactccctaagaaggtgtttgaggcagcggttaaatcgatcaaggctgctagttcaaccgaaaaatttcctgatgggttctggctgggtgagcagttggtgtgctggcaggcaggcactaccccttggaacatcttcccagtgatatctctatacctgatgggagaagtgacaaaccaatctttccggattaccattcttcctcaacagtatttgcgcccagtggaagatgtggccacttcccaggacgattgctataagttcgctatcagccagagctctacaggcaccgtgatgggcgccgttataatggaggggttttacgtggtgttcgatcgagctcgaaaaagaatcgggtttgccgtgtctgcttgtcacgtccacgacgagttcagaactgccgctgtggagggccccttcgtaacgctggacatggaagattgcggctataacatcccgcagacagacgagtctacactgatgactatcgcttatgtgatggcagccatctgcgcactcttcatgcttccactctgtttaatggtttgtcagtggtgctgtctgaggtgcttaaggcagcaacacgacgattttgccgatgatatctccttgctcaaatag

SEQ ID NO: 109779 - DNA, 1374 bp, synthetic construct
  misc_feature 1..1374: note = Description of Artificial Sequence: Synthetic coding sequence
  source 1..1374: mol_type = other DNA
atggcccaggccctgccctggttgctgctctggatgggcgctggggttttgccagcccatggtacacagcatgggataaggctccctcttaggagcggattgggcggcgcgccactggggcttaggctgccacgcgaaactgacgaagagccggaggagccaggcagacgcggctcctttgtcgaaatggtggataacctcaggggtaaatcaggacaaggttactacgtggaaatgaccgtcggatctcccccccagacacttaatatcctcgtggatacagggagctctaactttgccgttggggcagctccccaccctttcctgcaccggtattatcaacgccagctgtcaagcacttatagggacctgaggaaaggcgtgtacgtgccatacacccaggggaaatgggagggggaactcggtaccgacctcccagatgacagcctagagccctttttcgacagcctcgtgaaacagacacatgtgcccaatctgttctcgctgcagttgtgcggcgctggcttccccctcaaccaatccgaggtgcttgcttccgtcggggggtcaatgattatcggcggcatagatcacagcctgtatactggatccctgtggtacaccccaattagaagagagtggtactacgaggtgatcatcgtaagggtggaaatcaatggacaggaccttaagatggactgtaaggagtacaactatgataagagtattgtggactcgggcacaactaacctgaggctccctaagaaagtgttcgaagccgctgtcaagtcaatcaaagctgcgtcttcaacagagaagtttcccgacggcttttggttaggggagcaactcgtttgctggcaggccggtacgaccccgtggaatatctttccggttatctcgctctacttaatgggggaggtcaccaatcagagcttcaggatcaccatcctcccacagcagtacctgagaccagtggaggacgtggctactagccaagatgattgctataagttcgcaatttctcagtcctccacgggcactgtaatgggtgcggtgatcatggaaggtttctatgttgtctttgatcgtgccagaaagcgaatcggctttgccgtgtctgcctgtcacgtccacgacgagttccggactgccgctgtggaggggcccttcgttacattagacatggaggattgcggctataacatcccgcagactgatgagtctaccctgatgacaatagcctatgtgatggcagcaatctgcgctctgtttatgcttcctctctgcctgatggtctgccagtggtgctgcctgaggtgcctaaggcagcaacatgacgactttgctgacgatatcagcctattgaaatag

SEQ ID NO: 109780 - DNA, 1431 bp, synthetic construct
  misc_feature 1..1431: note = Description of Artificial Sequence: Synthetic coding sequence
  source 1..1431: mol_type = other DNA
atggcccaagccttgccttggctcttgctttggatgggggcaggcgtgcttccagcccacgggactcaacacggaatcaggctaccattacggtcaggtctgggcggggccccactggggttgcgccttccgcgtgaaaccgatgaagagcctgaagagcccggcagacgaggatcttttgtggaaatggtcgataatctgagaggaaaaagcggccagggctactacgtggagatgaccgtaggttccccaccccaaaccctgaacattctcgtcgatactgggtcctccaattttgccgtgggagctgccccgcatccctttcttcacaggtactaccagaggcagctctctagtacgtaccgagatctgcgcaagggcgtctacgtgccgtatacacagggaaagtgggagggggaactgggaacagatctcgtgtctatacctcacggtcctaacgttactgtcagagcaaacattgcagctattacggaaagtgataagtttttcatcaacggatccaactgggaagggattttgggcctcgcttacgccgagattgcccgcttatgcggggccgggtttccactcaaccagagcgaggtactggcttccgtaggtggatcgatgatcatcggagggatcgatcatagtctatacactgggagtctctggtacacccctatccggagggagtggtactacgaagtgattattgttcgggtggagattaacggtcaggacctgaagatggattgcaaagaatacaactacgacaaatccattgttgatagcggaacgaccaacttgcgcctgcctaagaaagtcttcgaggctgcggtgaaatctatcaaggcagcctcctctaccgaaaaatttcccgatggattttggctgggcgaacaactggtttgctggcaggccggtaccaccccttggaacattttccccgtgatctccctgtatttgatgggcgaagtgaccaaccagtcattcaggattaccatcttacctcagcaatacttgcggccagtggaagatgtggccacatctcaggacgattgctataagttcgccatatcgcagagcagtaccgggactgtcatgggggcagtaatcatggagggtttctatgttgtgtttgacagagcccggaagcggatcgggttcgcggtgtctgcatgccatgtacatgatgagttcagaacagctgctgttgaaggtccatttgtgacactggatatggaggattgtggatacaatatcccgcagaccgatgaaagcaccctgatgaccattgcttacgttatggctgccatatgcgctcttttcatgttgccattgtgtctcatggtgtgccagtggtgttgcttaaggtgcctgagacagcagcacgacgactttgcggatgacatctctctcctgaagtag

SEQ ID NO: 109781 - DNA, 1131 bp, synthetic construct
  misc_feature 1..1131: note = Description of Artificial Sequence: Synthetic coding sequence
  source 1..1131: mol_type = other DNA
atggtccctttcatttatctgcaggcgcacttcacactgtgcagcggctggtccagcacctaccgtgacttgcgcaagggagtgtatgtgccgtatactcagggaaagtgggagggagagctcgggactgatctggtttcaatacctcacgggcctaacgtgactgtgcgtgctaacatcgccgccatcacagagtcagataaatttttcattaacggctcgaattgggagggcatcctcggcctcgcttacgccgaaattgccaggctctgcggagccggttttcccttaaaccaaagtgaggtattagcaagcgtaggtgggtctatgatcatcggagggatagatcatagtctgtacaccggcagcctgtggtacactccaattaggagagagtggtactacgaagtgatcatagtgcgtgtagagatcaatggtcaggatctaaagatggattgtaaggagtataattacgacaaatccattgtagacagtggcacaaccaatctgcgcttgccgaaaaaggtgtttgaggccgctgtgaagagcatcaaggcagcctcatcaaccgaaaagttccccgacggattctggctcggcgagcagctggtttgttggcaggccggaacgactccttggaatatcttcccagtaataagcctctacctcatgggtgaagtcaccaaccagagctttcgcatcacaatcttgccccaacagtaccttagacccgtggaagatgtcgccacctctcaagatgattgttataagttcgctatttctcaatcctccacaggtacagtcatgggcgcagtgatcatggaggggttttacgtagtattcgaccgcgccagaaagcggattggctttgcagtttcagcctgccacgtgcacgatgagttccgtaccgcggccgttgaggggcccttcgtgaccctggacatggaggattgtgggtacaacatccctcagactgacgagagcacacttatgaccatcgcatacgtcatggcagccatttgtgccctgttcatgctaccgttgtgcctgatggtttgccagtggtgctgccttagatgcttgcgtcagcagcacgacgatttcgccgacgacattagtctcttaaaatag

SEQ ID NO: 109782 - DNA, 1191 bp, synthetic construct
  misc_feature 1..1191: note = Description of Artificial Sequence: Synthetic coding sequence
  source 1..1191: mol_type = other DNA
atgggcgcattggcacgcgctttgctgctgcctctcttggcccagtggttgctaagagctgcgccagaacttgcacccgctccatttaccctgcctcttcgggtcgcagcagctactaacagggtggtggccccaactcccggtcccggcacccccgccgagcggcacgctgatggcctggcgctagcccttgagccggcactcgctagccccgctggggccgccaacttcctggctatggtagataacctacaaggcgatagtggacggggttattatctggagatgcttatcggcacacccccccagaaattgcaaattttggtggatacagggagctccaatttcgccgttgccggcacaccacattcatacatagacacttacttcgataccgagcgcagcagtacttacagaagcaaaggctttgacgtgaccgtaaagtacacacagggaagttggaccggattcgtcggagaggatttggtgactatacctaaagggttcaacacaagcttcctggtgaacattgctactatttttgagtccgaaaacttttttctcccagggattaagtggaacggtatcttaggtctagcctacgcaacacttgctaaaccatccagctctttagaaacgttctttgattcacttgtcacgcaagccaatattcccaatgttttctcgatgcagatgtgcggcgccggactccccgtggcgggtagcggaacaaatggcggctcactggtgctgggagggattgaaccaagtctctataaaggcgatatatggtatacaccgatcaaggaagagtggtactaccagatcgaaattttaaaattggaaattggggggcagagtcttaatctggactgtagagagtataacgccgacaaggcaatagtggactccgggacgaccttgctccggttgccccaaaaggtgtttgatgctgtcgtggaagccgtggcccgagcttccctcattcccgaattttcagacggtttctggaccggcagtcagcttgcctgctggacaaatagtgaaacaccctggtcttacttccccaagatctcaatttacctcagggacgaaaattctagtaggtctttcaggatcactatcctccctcagaaactccaggtgctgcagtgcttgaagttcccgggtctctcccagcagcgtatgtag

SEQ ID NO: 109783 - DNA, 1557 bp, synthetic construct
  misc_feature 1..1557: note = Description of Artificial Sequence: Synthetic coding sequence
  source 1..1557: mol_type = other DNA
atgggcgctcttgctagagcactgttgctgcccctgctggcacagtggttactccgggctgcacctgagctcgccccagcacctttcacgttgccactgagagtcgctgccgctacaaaccgggttgttgcccccacccctgggcccggtacacccgccgagcgccacgctgatggcttggctttggccctagagcctgccctggcctcacccgccggcgcagcaaactttctggccatggtggataacctccagggtgacagtgggagaggatattatttagaaatgctgatcggcacaccccctcaaaagctccagatccttgtcgatactggtagctctaattttgccgtcgccggcaccccgcacagctacatcgatacatactttgacaccgaaagatctagcacttacaggtccaaaggattcgacgtgactgtcaaatatactcaagggagttggacggggtttgtgggggaggacctcgtgactattcccaagggatttaacacatcttttctggtcaatatcgccaccatttttgaatccgaaaacttctttctgccaggtatcaagtggaacggcattctgggcctggcgtacgcaaccctggctaaaccttccagtagtcttgaaacattttttgactccctcgtcacccaggctaacatcccaaacgtcttcagcatgcaaatgtgcggtgcaggtctgcccgtggcagggagcgggactaatggcggatccctggtactgggcggcatcgaaccgagcttgtacaaaggtgacatctggtacacacccatcaaggaggaatggtactatcagattgaaatcctgaaacttgagataggtggacaatcacttaatctggattgtcgagaatacaatgccgataaagccatcgtggattctggtacaactctcctacgactccctcagaaagtattcgatgcagtagttgaggcggtggcccgggccagcttgatcccagagttctcagacggattttggacgggcagccaactagcctgctggacaaactccgagaccccatggtcctacttccccaagatttccatctacctgcgagatgagaattcctctcgatccttccggatcacgatcctgccgcagctgtatatccagcccatgatgggagctggtctgaactacgaatgttaccggttcggcatttcaccttcaacgaacgctctggttataggcgccaccgtgatggagggtttttacgtcatctttgatagggcacagaaacgcgtgggcttcgccgcgtccccctgcgcggagattgctggggcggcagtaagcgaaatttcgggtccattctcaaccgaagacgtggctagtaactgtgtgcctgcccagtcgttgtccgaaccgatcctgtggatcgtgagttacgccctcatgtctgtatgtggagccatcctcttggtgctgatcgtgctgctcctgttaccatttcggtgtcagcgccgaccgcgcgaccctgaggtggtcaacgatgagtcatcactcgtgcggcacaggtggaagtag

SEQ ID NO: 109784 - DNA, 1407 bp, synthetic construct
  misc_feature 1..1407: note = Description of Artificial Sequence: Synthetic coding sequence
  source 1..1407: mol_type = other DNA
atgggcgcacttgctagagctctgctgttacctctcctggctcagtggttgcttcgagccgcccctgagctcgcaccagctccgtttacccttcccctaagggtggctgcggcgaccaatcgggtagtcgcacctacgccaggacctggtacgcccgctgaaaggcacgcagatggtctcgccctcgccttagaaccagctctggcttcccccgcgggagccgccaatttcctggcaatggtggacaatcttcagggggattcggggagaggatattatttggaaatgctgatcggaacccctccccagaagttgcaaattcttgtcgatacaggatcaagcaacttcgcagtggctggaacaccccattcctatatagatacgtactttgacactgagcggtcctctacctaccggagtaagggctttgatgttactgtcaagtacacccaggggtcctggaccggcttcgttggggaagacttggtgaccatacctaaggggttcaatacgtctttcctggtaaatatcgcaaccatttttgagtctgaaaacttttttctccccgggataaagtggaacggtattctaggtctagcatacgctacgttagccaaaccttcctcttctctagagaccttcttcgacagcttggtgacacaggctaatatccccaatgtcttttccatgcagatgtgcggagcgggtctgcctgttgcaggcagcgggacaaacgggggctccctagtcttaggaggtatagagcccagtctgtacaaaggcgacatctggtacaccccgatcaaggaagagtggtattaccagatcgaaattctgaaactcgaaattgggggacagtctttgaacctggattgcagggagtataatgcggacaaagctattgtcgattccggtactactttgcttcgattgccacagaaagttttcgatgccgtggtagaggctgtggctagagccagcctcctatatatccagccaatgatgggagcagggctcaattacgaatgttaccgctttgggatctctccctcaacaaatgccctggtcatcggcgcaacagtgatggagggattttacgtcatctttgatagagcccagaaaagagtgggtttcgctgcaagcccatgcgctgaaatcgccggagccgctgtgtcagaaatcagcggcccattttctacagaagacgtggcttctaactgcgtacctgcccagagcctcagcgaacccattctgtggatcgtgagctatgccttgatgtccgtctgtggggctatcctcctggtcttgatcgttctgttgcttctcccattccgctgtcagcgacgccctcgagatcccgaagtagtcaacgatgagtcatcactggttagacaccgctggaagtag

SEQ ID NO: 109785 - DNA, 1272 bp, synthetic construct
  misc_feature 1..1272: note = Description of Artificial Sequence: Synthetic coding sequence
  source 1..1272: mol_type = other DNA
atgctgattggtaccccaccacagaagctgcagatcttggtagacaccggatcatcaaattttgcagtggccggaacaccacatagctacatcgatacatactttgacaccgaaaggtcaagtacttaccggagcaaaggcttcgatgtgaccgttaagtacacacaggggagctggaccggttttgtcggcgaagatttggtgacaatcccaaaaggttttaacactagctttctcgtgaatattgccactatttttgaatcggagaatttcttcctgccaggcatcaaatggaatggaatattaggcctggcctacgctactctcgcgaagccctcctcaagcctcgagacattctttgatagtctcgtgacccaggcaaatatacccaacgtcttcagcatgcaaatgtgcggagccgggttgcctgtggccggctctggtactaacggaggaagtctcgtgctggggggtatcgaaccctctctgtataaaggcgatatttggtacacccctatcaaagaggagtggtattaccaaatagaaatactcaagctcgagataggcggccaaagcctgaacctggattgtcgtgagtacaatgcagacaaagctatcgtagattctggaactacccttctgagattgcctcagaaggtgtttgacgcagtggtagaagccgtcgcgcgggcttctctgattccagaattcagtgatgggttttggaccggttcgcaattggcctgctggacaaattccgagacaccgtggagttacttcccgaaaattagcatatacctgcgcgacgaaaatagctctagaagtttccgtatcaccattctgccacagctatatatccaacccatgatgggggcaggtttaaactatgaatgctaccgttttggcatctcccctagtactaacgctttggtcataggcgccacagttatggaagggttctacgttattttcgatcgggcacaaaagcgagtgggcttcgctgccagtccctgcgcggagatagctggagccgccgtcagtgaaatcagcggcccgttcagtaccgaggacgtggcatcaaactgtgtacctgcgcagtcgttgagcgaacccatattatggatcgttagttacgccctgatgagcgtgtgtggcgcgattctgttggtgctgatcgtccttctcctactcccgttccgatgccagcgacgccctagagatcccgaggtagtgaacgacgaatcaagcctggtccggcatcggtggaagtag

SEQ ID NO: 109786 - DNA, 576 bp, synthetic construct
  misc_feature 1..576: note = Description of Artificial Sequence: Synthetic coding sequence
  source 1..576: mol_type = other DNA
atgccgcgttcactgtggctgggctgcagttccctcgccgacagtatgccgtccttacgctgcctttacaaccccggcactggcgctctgaccgctttccagaattcctccgagagggaggattgcaataatggggaaccaccaagaaagattatacccgaaaaaaattcactcagacagacctataacagttgtgcacggttgtgcttgaaccaggaaactgtttgcctggcgtccacggccatgaaaacagagaattgcgtcgccaaaaccaagctggctaacggcacatctagtatgatcgtaccaaaacaaaggaagctgtcagcctcctacgagaaggagaaagagctgtgcgttaaatattttgagcagtggtcagaatccgaccaggttgaatttgtggagcatctgatctcacaaatgtgccattaccagcatgggcatattaactcatatctgaaaccgatgctgcagagagacttcattacagcactccctgcccgtggactagatcatattgcagagaatatcctctcctatctggatgcaaaatcgctctgcgcagcggagtag

SEQ ID NO: 109787 - DNA, 1818 bp, synthetic construct
  misc_feature 1..1818: note = Description of Artificial Sequence: Synthetic coding sequence
  source 1..1818: mol_type = other DNA
atggaccctgccgaagccgtcctgcaggagaaggcccttaagtttatgtgctccatgcctcgctccctgtggctggggtgcagctccttggcagatagtatgccatcactacgctgtctctacaacccgggaactggcgccctcactgcatttcaaaacagctcagagagagaagattgtaacaacggcgaaccccccaggaagattatcccagagaagaactccctgcgacaaacttataactcctgtgcccgactatgtttgaaccaggagacagtgtgtctggcaagcacagccatgaaaacggagaactgtgttgccaagaccaaactggctaacggcacctcaagcatgatcgtgcccaagcaacgcaaactgagcgcgtcctatgagaaggaaaaggaactgtgcgtaaagtacttcgaacaatggtccgagtccgaccaggtggagtttgttgagcacctgatcagccagatgtgtcattaccagcatggacatattaatagttatctcaaacctatgctccagcgcgattttatcactgcgctgccagccaggggcctggaccacattgccgagaatatcctgtcttatctggacgccaaatcactgtgtgctgccgaacttgtgtgcaaagagtggtaccgagttacttccgacggcatgttgtggaaaaagttgattgagaggatggtacggaccgactcattgtggcggggactggcagaaagaagagggtggggacagtatctgtttaagaataagcctccagacggcaatgccccacctaactccttctatagagccttataccctaagattattcaggacatagaaactatcgagtcgaactggcgatgtggccgccattcactgcaacgaatacattgtcggtccgaaacatctaagggtgtgtattgtttgcaatacgatgatcagaagattgtatctgggctgcgcgataatacaatcaagatctgggataaaaacactctggaatgtaaaaggattctgactgggcatactggcagcgttctgtgtttacagtacgatgagcgtgtgatcattacgggctccagtgactctacggtgagggtgtgggatgttaatacgggagagatgctcaacactctgatccaccattgcgaggcggtcttgcatctgagatttaacaatggtatgatggtgacatgtagtaaggaccggtccatcgcagtgtgggatatggcatcccctactgacataaccctccgtagagtgctcgtaggtcaccgcgctgctgtgaatgtcgtagacttcgatgataagtacattgtttccgcaagcggagatagaaccattaaggtgtggaacacttctacctgcgaattcgtcagaactctcaacggccacaaacgggggatcgcttgcctccagtatagggatcgtctcgtcgtgtcggggtcctccgataacactataaggctctgggacattgagtgcggtgcgtgcctacgtgtgctcgaaggtcatgaggagctggtgcgatgcatccgtttcgacaacaagaggattgtcagcggggcctacgatggcaaaataaaagtgtgggatctagtggcagcactggaccctagggccccagccggcacactctgccttagaacccttgtggaacattctggacgcgtgtttcggctgcagtttgacgagttccagattgtgtcctcatcacatgatgacacgattctgatctgggactttttaaatgaccccgcagcacaggccgagccgccaaggtcaccaagcaggacttacacatacatcagtcggtag

SEQ ID NO: 109788 - DNA, 1695 bp, synthetic construct
  misc_feature 1..1695: note = Description of Artificial Sequence: Synthetic coding sequence
  source 1..1695: mol_type = other DNA
atgtgctccatgccgcgtagtctttggctgggatgctcctcactggccgacagtatgccgtctctgaggtgtctttataacccaggcactggcgccctaaccgcattccagacctacaatagctgtgcaaggctgtgtctgaatcaggagaccgtttgccttgccagcactgccatgaagactgagaactgcgtggcgaagacaaagctagccaacggtacctccagcatgatcgttccaaagcagaggaagctgagcgctagctatgagaaagaaaaggagctatgtgtcaagtatttcgaacagtggagcgagagcgaccaggtggaatttgttgaacacctgatctctcagatgtgccactaccaacacggacacattaattcgtacctgaagcccatgttacagcgagactttatcacggcgcttcctgctagaggacttgatcatatagctgagaacatcctgtcatatttggacgcaaaatccctctgtgccgcagagctagtatgtaaggaatggtatcgagtaaccagcgatgggatgttatggaagaaactgattgaacgaatggtgcggaccgactcactatggaggggactggccgaacgtagaggctggggtcagtatctgtttaaaaacaagccacccgatgggaatgctccccccaattcgttctatcgcgccctgtatcctaaaattatccaggatatagaaaccatcgagtccaactggaggtgtggtcggcattccctgcagcgtatacattgcaggtccgagacgtcgaaaggggtctactgtctgcagtacgacgatcaaaaaattgtgtcaggcctgcgggataacacgatcaaaatctgggacaagaacacactggagtgcaaacgtatactcacgggacacactgggtccgtattgtgtctccagtatgacgagcgtgtcataatcaccggaagcagtgactctactgtgcgggtgtgggatgtcaacacaggagaaatgctaaatactctcattcaccactgtgaagccgtgctgcatctgcgattcaataatggcatgatggtcacctgctctaaggacagaagcatcgccgtgtgggatatggcttccccaaccgacattaccttacggcgcgtattggtcggtcaccgcgctgcggttaatgtagtcgatttcgatgataagtacatagtgagtgctagcggagataggactatcaaagtctggaacacttctacatgcgagttcgtcaggacgctcaacggacacaaaaggggcattgcatgcttgcagtaccgggacaggttagtggtctccgggtcttcagacaacacgatcaggttgtgggacatcgaatgcggcgcatgcctccgggtcttagaaggacacgaggaacttgtccggtgcattagattcgacaataaaagaatcgtctccggagcttacgacggaaagattaaggtgtgggatctggtggccgcccttgatcctcgcgccccagccggcacgctgtgcctgcggactttggtcgaacactccggacgcgttttccgattgcagtttgacgaattccaaatcgtatcctccagccatgacgacactattctcatttgggactttctgaatgatccggctgcccaggccgagcctcctagaagcccctctcggacatacacctatattagtagatag

SEQ ID NO: 109789 - DNA, 1710 bp, synthetic construct
  misc_feature 1..1710: note = Description of Artificial Sequence: Synthetic coding sequence
  source 1..1710: mol_type = other DNA
atggacccagcggaggccgtgctgcaggaaaaggcccttaagttcatgaattcttcggaacgcgaggactgcaacaatggcgaacctccacgaaagattatcccagagaagaattcattaaggcagacttataacagttgcgctaggctttgtctgaatcaggagacagtctgtttggctagcaccgcaatgaaaaccgaaaactgtgttgccaagactaagctagcaaatggaaccagctcgatgattgttcctaagcagaggaagctgagtgccagctatgagaaggagaaggaattatgtgtgaagtactttgagcagtggtcggagagcgaccaggtcgaatttgtcgaacatctgatctctcagatgtgtcactatcagcatggtcacattaatagctatctgaaacctatgctgcagagagatttcattacagcgctaccggctagggggctcgatcacatcgccgaaaacatcctgagttatctggacgccaaatctttgtgtgcagccgagctggtttgtaaggagtggtatagagtcacgagcgacggaatgctgtggaaaaaacttatcgagcgcatggtgcgaactgacagcctgtggagggggttggcagagagacgcggatgggggcagtatttgttcaaaaacaagcctcctgacggcaatgccccccccaatagcttctaccgcgcactatatcctaaaattatccaggacatcgaaacaattgagtcgaactggcgttgcggcagacattccctccagagaatacattgcagatcggagacatctaaaggggtgtactgtctccagtacgacgatcagaagatcgtgtctggcctgagggacaataccataaagatctgggacaagaatacacttgagtgcaagcgcattctgacaggccataccggctccgtgctatgcctccagtatgacgagcgtgtgattatcactggctctagtgatagcacagtgagagtatgggacgtgaatactggtgagatgctgaatacgttgatccaccactgcgaggccgtcctgcacctgcgtttcaataacggaatgatggtgacctgctccaaggaccgaagtatcgcggtgtgggacatggcgtcgcctaccgatattaccttacgacgagtcctcgttggccacagggccgccgtaaatgtggtcgactttgacgataaatacatcgtcagcgcatccggagacaggactataaaggtgtggaacacctccacatgcgagtttgtccgcacactgaatggccacaagagggggattgcctgcctgcagtaccgcgaccgccttgtggtctccggaagctctgataatacaattcgcttgtgggacatcgaatgtggggcatgtctcagagtgctagaggggcacgaggagttggtgcgctgcatccgctttgataacaagcgaattgtctccggagcctacgacggaaaaattaaggtgtgggacctcgttgcagccctggaccccagagcccctgcaggaacgctttgtttgcgaactctggtggaacactcagggcgcgtctttcgcctccagtttgacgagtttcagatagtcagctccagtcacgatgacaccatcctcatatgggattttctgaacgatccggctgctcaagctgagccaccaaggtcaccctctcgaacttacacatatatctctagatag

SEQ ID NO: 109790 - DNA, 126 bp, synthetic construct
  misc_feature 1..126: note = Description of Artificial Sequence: Synthetic coding sequence
  source 1..126: mol_type = other DNA
atggatccagccgaggccgtgttgcaagaaaaagccctcaaattcatgacgtacaatagctgcgctcgtctgtgtctgaaccaggagactgtgtgcttagccagcacagcaatgaaaacggagtag

SEQ ID NO: 109791 - DNA, 327 bp, synthetic construct
  misc_feature 1..327: note = Description of Artificial Sequence: Synthetic coding sequence
  source 1..327: mol_type = other DNA
atggttaccttgctgccaatcgaaggccaagagattcactttttcgagatcttagaatcggaatgtgtgctgtatacaggatggattgagcgcgcaagcggctcctccatctatccggaagcaaaggcccgccttccgctcgaagctctccttggctcaaataaagaacccatgttacccaaagaaaccgtgctgagcctgaagagatataacctcggatctagtgctatgaaacgaaatgtccccggtcacgtgctgcagcgccccagctacctgacgcgcattcaggtgaccctgctttgtaacagttccgctgaagccctatag

SEQ ID NO: 109792 - DNA, 1521 bp, synthetic construct
  misc_feature 1..1521: note = Description of Artificial Sequence: Synthetic coding sequence
  source 1..1521: mol_type = other DNA
atggaacagctcgatgtcttcattagcataaaacctaaacctaagcagccatccaagtcagtgatcgtcaaaagcgttgagcgcaacgccctcaatatgtacgaagcacgaaaatgcctcctggggctggagtcttcaggggttactattgcgactagccccagcccagcttcatgcccagcaggactggcttgtccctctttggacatactggccagtgcaggactgggactgaccgggcttgggcttctgggtccgactactctctctctgaataccagcactacgccaaacagcctgctgaacgccttaaacagcagcgtttcaccactgcaatccccctcttctgggacaccatctcccactctctgggcgcccccattggctaacacttcttccgctactggcttcagtgcaattccacatcttatgatccccagcactgctcaggccactctgactaacatcctccttagcggagttcccacctatggccacacggccccatctccccctcccgggctcactccggtagacgtgcacattaattctatgcagactgagggcaaaaagatctcagctgccctgaatgggcacgctcagtcacctgacataaagtatggcgccatttccacctccagccttggggaaaaagtcctttctgccaaccatggtgacccgtccatccaaaccagcggatctgagcagacgtcacctaagtctagtccgaccgaaggatgcaacgatgctttcgtcgaagttggcatgccccgcagcccctcacactcaggtaacgcgggagatctgaagcaaatgatgtgcccatccaaggtgagctgtgccaagaggcagaccgttgagctgttacaaggcactaagaactcccacctgcactctacagacaggctcctaagtgatccggagttgtccgcgaccgagtcgccattagcggataagaaagctcccggatcagaacgagccgctgagcgtgccgctgctgcacagcagaacagcgagagagcacatctggcacccagaagctcttatgtcaacatgcaagcattcgattacgagcaaaaaaagctgctagccacaaaggccatgctcaaaaagccggtcgtcaccgaggtgagaactcctaccaatacatggtccggactgggattttctaaatctatgcccgctgaaactataaaggagttgcggcgtgcaaaccacgtgtcttacaaaccaaccatgactactacatatgagggaagtagcatgagcctgagtaggtctaacagccgagagcatttagggggggggtctgaatcggataattggcgggacaggaacggcataggccctgggtctcatagcgaatttgcagcaagtatcggttcaccaaaaagaaagcaaaacaaatcttcagagagatgtgtgctgtgtactcttctcgggattccaaggctggagtgtgtgtatcttggctggagcattacggactgtgggctatctgatttcaagtgccttgtgtag

SEQ ID NO: 109793 - DNA, 2925 bp, synthetic construct
  misc_feature 1..2925: note = Description of Artificial Sequence: Synthetic coding sequence
  source 1..2925: mol_type = other DNA
atggccgcacagggggaacctggttatctggccgcccagtccgatcccggttctaatagtgaacggtctaccgattctcccgttccaggctctgaagatgatctggtcgcaggcgctactcttcattcccctgagtggagtgaagaacgattccgggtggacaggaaaaagctggaggctatgctgcaggctgctgccgagggcaaaggtcgctccggcgaggacttcttccaaaaaatcatggaggagaccaacacgcagatcgcatggccgtcgaagctgaaaattggagcgaaatctaaaaaagatccccatatcaaggttagcggaaagaaagaggacgtcaaggaagccaaagagatgataatgtctgtccttgacacaaagagcaaccgggttaccctaaaaatggacgtgagccatacggaacactcccatgtgattggcaaaggcggaaacaacattaaaaaagtgatggaagagactgggtgccacatccatttcccggattctaacaggaataaccaagccgaaaaatcaaaccaggtctccattgcagggcaacctgcgggcgtggagtcagctagggtcagaatcagagagctgttacccctggttttgatgtttgagcttcctattgctggcatactgcagccagtccctgatcctaacagcccatcaatccagcatatttcacagacttataacatcagcgtttcctttaagcagcgctcccggatgtatggagctacagtgattgtgaggggcagccagaataacacgtctgcagtgaaggagggcactgcgatgctgcttgagcatctcgctggctctttggctagcgctatacctgttagcacgcagctagatattgccgctcagcaccacttgttcatgatgggaaggaatggatcaaatataaagcacatcatgcaacggactggcgcccagattcacttcccagatccatcaaaccctcagaaaaaaagtaccgtataccttcagggcacgattgaatccgtatgcttggcacggcaatatctcatgggatgcttgcccctcgttcttatgttcgatatgaaggaagagatagaagtcgacccacaattcattgcacagttaatggagcagttggatgtcttcattagcatcaagccaaaacctaagcagccaagtaagagcgtcatcgttaagtctgtagaacgaaatgcattgaatatgtatgaggctagaaaatgcctgttgggtctcgaaagctcaggagtcacaatcgccacgtcacccagccctgccagttgtccagcagggttggcatgccccagcctggacattctagcatctgccggccttggcctcacaggtttgggtctcttaggcccaactacgctcagcctaaatactagcaccactcccaacagcctgttgaatgcgctaaacagtagcgtctcgcctttgcagtctccctcctcaggcacccccagccccaccctgtgggctcccccattagccaataccagtagcgcaacaggcttcagcgccattccccatctgatgattccgagcacggcgcaggctacattaactaacattctgctcagcggcgtccctacctatggtcacaccgcacccagtccaccacccgggctgactcctgtcgacgtgcatatcaattctatgcaaacagagggaaaaaagatctcagctgcccttaatggtcatgcccagagccccgacattaagtacggcgcaatctccaccagctcactcggggaaaaagtgctctcggcgaaccacggagatccgagtattcagacaagtggtagtgaacagacttcacccaaatcttctcctacagaggggtgtaacgacgcatttgtcgaagtaggcatgcctagaagtccttcgcattccgggaatgctggagacttgaagcaaatgatgtgtcctagtaaggtgagttgtgctaagcgacagacagtggagctgcttcagggaactaagaattcgcaccttcatagcacagacaggctgctaagcgaccccgagctgtcagctactgaaagtccccttgccgacaaaaaagcacccggaagcgagcgagccgcggaaagggctgctgccgcacaacagaattcagaaagggctcacctggccccccgatcatcttatgtgaacatgcaagcgttcgattatgaacagaagaagttacttgctacaaaagccatgctgaaaaagcctgtcgtgacagaagtgagaacccccacaaacacctggtcagggctaggattctccaaatccatgcccgccgaaaccatcaaggaactcagacgcgcaaaccatgttagttataagcctacaatgaccaccacatacgaggggtcctctatgtcacttagtcgttcgaactctagggagcatctcgggggagggtccgagtccgacaactggcgggatcgcaatggaatcggcccaggctctcacagcgagtttgccgcctctatcgggtccccaaagaggaagcagaataaaagtactgagcattacctgtcttcatccaactacatggactgcatatctagccttacgggaagcaacggttgtaacctcaattccagtttcaaagggtctgatctgcccgagctgttctccaaactaggactagggaagtatacagacgtgtttcagcagcaggagatcgatctgcagaccttcctgacccttactgaccaggatctgaaggagctggggattaccacattcggggctagaaggaaaatgttgttggcgatcagcgagctgaacaagaataggagaaaactgtttgaaagtcccaacgcccggacttccttcctggagggcggagcttcaggtaggctgccaaggcagtaccactccgacatcgcttctgtgtcgggaaggtggtag

SEQ ID NO: 109794 - DNA, 2928 bp, synthetic construct
  misc_feature 1..2928: note = Description of Artificial Sequence: Synthetic coding sequence
  source 1..2928: mol_type = other DNA
atggcggccgaggaggtgttgcaaacggtcgaccactacaagacagagatcgaaagactcacaaaagagctgaccgagactacccacgaaaagatccaagcagcagaatacggactcgtggtgttagaagagaaactgaccctaaagcaacaatatgacgaattggaagccgagtacgacagtctgaaacaggagctggagcaactcaaggaggcctttgggcaatcttttagcattcaccgcaaggtcgctgaggacggcgaaacaagggaagaaaccctgctacaagagtcagccagcaaggaagcttactacctcggaaaaattcttgagatgcagaacgaactgaaacagtcacgagccgttgtaaccaatgtccaggccgaaaacgagaggctgaccgctgtggttcaggatcttaaagagaacaatgaaatggtcgagctacagcgaatccgtatgaaggacgagatccgcgaatataagtttagggaggcacgtctgctgcaggactatacagaattagaggaagaaaacattaccctgcagaaactggtgtctacgcttaagcagaatcaggtggagtacgagggtctaaaacacgaaatcaaacgcttcgaagaggagaccgtgctgttaaattcacaactcgaggacgccattcggctgaaagaaattgcagagcatcagttggaggaagcgctcgaaactttgaaaaacgaacgcgagcaaaaaaataacttgaggaaggagctatcacagtatatctccctcaacgacaaccacatctcaatctcggttgatgggctgaagtttgctgaagacggttcagagccaaacaatgatgataagatgaacgggcatatccatgggccactagtgaaactcaacggggactatcgtacacccacgttgcgaaagggcgagagcctaaaccccgtatctgaccttttctccgaactcaacatctccgaaattcaaaaattaaagcagcagctgatgcaggttgagagggaaaaggccattctcctggccaatctgcaggagagtcaaacacaactggaacacacgaagggcgctctgactgagcagcacgagcgagttcaccggttgactgaacatgttaatgctatgcgtggcttgcagtcctctaaggagctgaaagcagagctggacggcgagaaaggacgcgacagtggcgaagaggcccacgactatgaagtcgacatcaacggcctggagatccttgaatgcaaatacagggtcgctgtgacagaggttatcgaccttaaagctgagatcaaagctcttaaggaaaagtataacaagtcggttgaaaattataccgacgagaaagcgaagtacgaatccaagattcagatgtacgatgaacaggttacatccctggagaagaccactaaggaaagcggggagaagatggcccacatggagaaagagcttcagaagatgacatctatagcaaatgagaaccatagcaccctaaataccgcgcaggatgaattggttacgttttctgaagagctcgcccagctctaccatcatgtctgtctgtgtaataacgagacacctaaccgcgtgatgctggattactataggcagagtagagtgactaggagcgggagcttgaaaggacctgacgatcctagggggcttctgagcccccggctagcaagaagaggcgtctcatcgcccgtcgagacacgcacatcctctgaacccgtcgcaaaggagagtaccgaagcctctaaggagccctcgcctacaaaaactcctactatctccccagtgatcaccgccccgccttcttctcctgttctggatacctcagacattaggaaggagccgatgaatatttacaacctgaacgcaattattagagaccaaataaagcatctccaaaaggcggtcgatagatctctgcaactctctagacagcgcgcagccgcccgagaactagctcccatgatcgacaaggacaaggaggcacttatggaggagattctgaaactcaaaagcctgttatccacaaaacgagagcagatcgccaccctccgtgcggtgttaaaagccaataaacagacagccgaagtggcactggcaaacctgaagaataaatatgagaatgaaaaggccatggtgactgaaaccatgacaaagcttagaaatgagttgaaggcccttaaagaggacgctgcgacattcagcagtctccgggccatgttcgccacccgctgtgatgagtacgtcacccagctcgatgagatgcagcgccagctcgcagcggccgaggacgagaaaaaaacactcaacaccctcctgcgaatggctattcaacagaaactggctttgacccaacgtctcgaggacctggaatttgaccacgaacagtccagacgatccaagggtaaactaggaaagagtaagatcggatctcctaaggtgtcgggggaggcctccgtaacagtccccactatagatacatatctgctccatagccagggtccgcagaccccgaatatccgtgtcagctccggcacccaaagaaaacgccagttctctccatccctctgtgatcagagcaggcccaggacaagcggagcttcctaccttcagaacctgctgcgcgtccctcctgacccaactagtaccgaatcgtttctgctgaaaggacctccctcgatgtcagagttcatccagggccatcggttatccaaggagaagaggcttaccgtggccccacccgattgccaacagcctgctgctagtgtgccaccccagtgtagccaattggctggccgccaggactgtccaaccgtgagtccagatacagcactgcccgaagagcagccgcactcttcatcgcagtgcgcacctttgcactgcctttccaaacctccacatccatag

SEQ ID NO: 109795 - DNA, 2484 bp, synthetic construct
  misc_feature 1..2484: note = Description of Artificial Sequence: Synthetic coding sequence
  source 1..2484: mol_type = other DNA
atggcagccgaggaagtgctccagacagtggatcactataagacagagatcgagcgcctcactaaggagctcacagaaaccacgcacgagaaaatacaggccgccgaatatggcctggtcgttctcgaagagaaactgaccctcaagcaacaatacgacgaacttgaagccgaatacgacagcctgaaacaagaactcgagcagttaaaggaagcctttggccaaagcttttccattcatcggaaggtggccgaagacggggagactcgcgaggaaaccctcctgcaggaaagtgccagcaaagaagcctactacctgggtaaaattttggagatgcaaaatgaacttaaacagagtcgcgctgtggtcaccaacgtgcaggctgagaatgagcgcctaacggccgtggtgcaggatctaaaggagaataatgaaatggtggagttacaaaggattcgcatgaaggacgaaatccgagaatacaaattcagggaagcccgtttactacaggactatacggaactcgaagaggaaaatattacactccagaagctggtgagcacactaaaacagaatcaggtggagtatgaggggctaaagcacgaaattaagcggtttgaggaagagacagtcctcttaaacagccaactggaagatgccatccgtctgaaggaaatcgcagagcatcagctggaggaggccctggaaactttaaagaatgaaagagaacagaagaacaatctccgaaaggagctgtcacagtatattagcctcaacgataatcacatatccatctctgtagacggcctcaagtttgcagaggatggatcagagccgaacaacgatgacaagatgaacggacatatacacggtccactcgtgaaactaaatggcgactatcgtacacctactctgaggaaaggtgaaagcttgaacccagtgagtgatctattttcagagctcaatatcagcgaaatacaaaagctgaagcagcagctcatgcaggtcgaacgggaaaaagcgattttactggcaaacttgcaagaaagccagacacagctggagcatactaagggcgcattgacagaacaacatgaaagggtgcacagactgacagaacatgtgaacgctatgcggggattacaatcttccaaggagctgaaggctgaactggacggggagaagggcagggactccggggaagaggcgcatgactacgaggtggatatcaacggcttggagattttagagtgcaagtacagagttgctgttaccgaagttatcgatctcaaggctgaaattaaagcactcaaggagaagtataataagtccgttgagaattacacagacgagaaggccaagtacgaatccaaaattcaaatgtacgacgagcaggttacctctctcgaaaagacgactaaggagtccggagaaaaaatggctcatatggaaaaagagctgcagaaaatgacctctattgccaatgaaaaccatagcacactgaacacagcacaggacgagttagtaacgttcagcgaagagctcgcacagctgtaccatcacgtatgtctgtgcaacaacgagacaccaaatcgtgtaatgctggactactacaggcagagccgagttacccgatcgggaagtctgaaaggcccggatgaccccaggggattgttgtcacctagactggctcgacggggggtatcgtctccagtggaaaccaggacatcttccgagcccgtagctaaagagtccaccgaggcctcaaaggaaccatctcccacgaaaaccccaaccatcagcccagtgatcaccgccccaccttcgtcacccgttctggatacctccgacattcgaaaggaacctatgaacatctataacctcaacgccataatcagggatcaaatcaaacacctgcagaaggcagtggacagaagcttgcaactgtcgcggcagcgagcggcggcgcgcgaactagccccaatgatcgacaaagacaaagaagccctaatggaggagatccttaagctcaaatcccttcttagtactaagcgggaacagatcgccactctccgcgccgtgcttaaagccaacaaacaaaccgctgaggtggctttagccaacctcaaaaacaagtacgagaacgagaaggcaatggttactgagacaatgacaaaattgaggaacgagttgaaggccttgaaagaggacgcggccaccttttctagtcttcgcgccatgttcgcaaccaggtgcgatgagtatgtcacccaattagacgaaatgcagcgacagctggccgctgccgaggatgaaaaaaaaaccttgaacacgctgctgcggatggcgatccaacagaagctagccctcacccaaagactggaggacctggagtttgatcacgagcagtctcggcgcagtaagggcaagcttggaaagtcaaagatcggatcaccaaagaccatttttacttttcctctctag

SEQ ID NO: 109796 - DNA, 2508 bp, synthetic construct
  misc_feature 1..2508: note = Description of Artificial Sequence: Synthetic coding sequence
  source 1..2508: mol_type = other DNA
atggctgccgaggaggtgctgcaaactgtcgaccactacaaaacggagattgagagattgactaaagagctcacagagacaacccacgagaagatccaagcagctgaatacggtctcgtggtgctcgaggaaaagcttacactgaagcaacagtacgatgagctcgaagcagagtatgattcactgaagcaggagctcgaacagctcaaggaggcttttggacaatcctttagtatccacagaaaagttgccgaagacggcgagaccagagaggaaaccctcctgcaggaatctgcgagcaaagaagcatactatctgggcaagatcttggagatgcagaatgaactcaaacaatcccgagccgtcgtgacaaacgttcaggccgagaatgagaggctgaccgcagtggtgcaggatctgaaggagaacaatgagatggtggagctgcaacgtatcagaatgaaagacgagatccgcgagtataaattcagggaagctcgcctgcttcaagactatacagagctagaagaagaaaatatcaccttgcagaagctggtatccaccttgaaacaaaatcaggtagaatacgaaggactgaagcatgagataaagcgcttcgaggaggagacagtgcttctcaactcacagttggaagacgccatacgactgaaggagatagcagagcaccagctcgaagaggcgctagaaaccctgaaaaatgaacgtgaacagaaaaacaatcttaggaaggagctgagccagtatatcagcctgaacgataatcatatcagtatctcggtagatggacttaaatttgccgaggatggttccgagccgaacaacgatgataaaatgaacggccacattcacggaccgcttgtcaaactgaatggggattatcgaactcccacactgagaaagggtgaatcactcaaccccgtaagcgacctgttttccgaattgaacatatcggagatacagaaactgaagcagcagcttatgcaggttgagcgagagaaggcgattcttctggccaaccttcaggagagccagacacagcttgagcatacaaagggcgcacttacagagcagcatgaaagggtgcatcggctgacagagcacgttaacgcaatgcggggtctgcagtcctccaaggaactcaaggccgaacttgatggcgagaaggggagagattcaggggaagaagcacatgattacgaggtggatattaatggactggagatccttgagtgtaaataccgcgtggccgtgactgaggtaattgacctgaaggcggagatcaaagcactcaaagaaaagtacaataaatccgtggaaaattataccgatgagaaggcgaaatacgaaagtaagatccaaatgtatgacgaacaggtgacctctctggagaaaaccacaaaggagtcaggagagaaaatggcacacatggagaaagagctacagaagatgaccagcatcgcaaatgagaaccatagcaccctgaacacagcccaggatgaactggtgacattctcggaggaactcgcccaactatatcaccacgtctgcctgtgtaacaatgagaccccaaatagggttatgctggattactatagacaaagtagagtgactcggagcgggtccctcaaaggccccgatgatccaaggggcctgctgtcaccaaggctggcccgccggggcgtgtcttccccagtcgaaactagaacatcatcagaaccagtggctaaagagtctactgaagcttcaaaggagcctagccccacaaaaacaccaactatctcgcctgtgatcactgccccaccgtcctcaccagtactcgacacaagtgacatccgcaaagaaccaatgaacatctataacctcaatgctatcattcgcgaccagatcaagcatctgcagaaagcagttgatcgatccctgcagttgagccgtcagcgagccgcggcgagagagctggctccaatgatcgataaggacaaagaagccctgatggaggaaatcctcaaactgaagagcttattgtcaaccaaaagggaacagatcgctacccttagggccgtgttgaaggccaacaagcagacagcagaagtggccctggccaatttgaagaacaagtatgagaacgagaaagcaatggtgacagagacaatgactaagctgaggaacgagcttaaggctctcaaggaagacgcagcaactttttcctccctgagggccatgtttgcaacacgatgcgacgagtatgtgacgcaactagacgagatgcagagacagcttgccgccgcagaggatgagaagaaaactttaaataccttgctgcggatggcaatccaacagaaactggccttaacacagcgcctggaggatctagaattcgatcatgagcagagtcgccggtcaaaagggaagctgggcaaatctaaaatcggctcacctaaaattgtatcttcgctgctgcctccatacaggcatagtgcccacaattag

SEQ ID NO: 109797 - DNA, 2568 bp, synthetic construct
  misc_feature 1..2568: note = Description of Artificial Sequence: Synthetic coding sequence
  source 1..2568: mol_type = other DNA
atgtcagctcctagcgaggaagaggaatatgctaggctcgtgatggaagctcagccagaatggctgagagctgaagtgaaaaggctctcgcacgagttggccgagactactagagagaagatccaggccgccgagtacggactcgccgtgttggaagaaaagcatcaactgaagttacagtttgaggagctcgaggtggattacgaagccatcagaagtgaaatggaacaattgaaagaagctttcggtcaggcgcacacgaaccataaaaaagtagcagccgatggggaatctagagaagagtctctgattcaggagagtgcttctaaagaacaatattacgtgaggaaggttttagaactccagaccgaactcaaacagctaagaaacgtattaacaaatactcagagcgaaaatgagcggctcgcatctgtggcacaggagctgaaagaaatcaatcagaacgtggaaattcagagaggacggctgcgtgacgacatcaaagagtacaaattcagagaagctcggttactgcaggattacagcgagctggaagaagagaatatctcacttcagaagcaagtcagcgtgttgaggcagaaccaagtggagtttgaggggctaaaacacgagattaagcggctggaagaggagaccgagtacttgaactcacaactggaagacgctatccgcttaaaggaaatctccgagcggcagcttgaggaagctctggagaccctgaagaccgagcgggagcaaaagaatagcctccggaaggaactcagccactacatgtccatcaacgactctttctacactagccatctccatgtgtcactcgacggactgaagttctccgacgatgccgctgaaccgaacaacgacgctgaggccttggtaaatggatttgagcacggtgggcttgctaagcttcctctggataacaagacgtccacacctaagaaggaaggactggcacctccgtccccatcactggtctctgaccttctttccgagctgaacatcagcgaaatacaaaagttgaagcagcaactgatgcagatggaacgagaaaaggccgggctgttggctacgctgcaggacacccaaaagcaacttgagcatactagaggatcccttagtgagcagcaagagaaggtgacgcggctgacggagaatctgagtgccctgcggagattgcaggcatccaaggagaggcagaccgccttagacaatgagaaagatcgcgactcacatgaggatggcgactattacgaagtggacatcaacggacctgaaatcctcgcatgcaagtaccacgttgcagttgccgaggcaggagaacttagagaacaactaaaggccctaagatctacacacgaggcgagggaagctcagcacgctgaggagaaagggcgatacgaagccgagggacaggctctgaccgaaaaggtctccttactcgagaaggcgtcgagacaggatcgcgagctcctcgccagacttgagaaagagctgaaaaaggtctctgatgtagctggcgagacccagggatccctgtccgttgctcaggacgagctggtgaccttctctgaggaattagctaatctgtaccaccatgtgtgcatgtgcaataatgagactcctaacagagtcatgctagactattatcgagaagggcagggcggcgccggccggacctcccccggtggccggacatcgcctgaggctagagggcgtagaagccctattctgctccctaagggcctgctagcgccggaggctggccgtgcagacggagggaccggagattcctctccttctccgggatcgtctttgcccagtccgctgagcgatcccagacgggagccaatgaatatctataatttgatcgcaatcatccgagatcagatcaaacacctgcaggccgccgtcgacagaaccactgaactgagccgacagcggatcgcctcccaggagctgggacccgctgtcgacaaagacaaggaggccctgatggaggaaatcttgaaactcaaaagtctcctttcaacaaagagggaacagattacaacactgcgtaccgttctgaaggcaaacaaacagacagcagaggtggcccttgccaatctgaagtccaaatatgagaatgagaaagcaatggtgactgaaactatgatgaagcttaggaatgaactgaaggcgctcaaggaggacgcagcaaccttttccagcctgcgcgccatgtttgcaaccaggtgtgacgaatatattacgcagttagacgagatgcaaaggcaactagccgccgcggaggacgagaagaaaaccctaaacagcctcctccggatggccattcagcaaaaactcgccctcacgcagcggcttgaactgctggagctcgatcatgagcagacgagaagggggagggcaaaggccgcccctaagactaaacctgcgactccctccgtgagtcatacttgtgcttgcgctagcgaccgtgcagagggcactggtctcgctaatcaggtattctgtagcgagaaacattctatttactgcgactag

SEQ ID NO: 109798 - DNA, 2475 bp, synthetic construct
  misc_feature 1..2475: note = Description of Artificial Sequence: Synthetic coding sequence
  source 1..2475: mol_type = other DNA
atgagtgctcccagtgaagaggaggaatatgcgcgcttagtgatggaagctcaacctgagtggcttagggcggaggttaagcgtctttctcatgagctggccgagacgactcgggagaagattcaagccgccgaatatgggcttgcagtgcttgaagagaagcaccagctgaagctacagtttgaggagttagaagtggactatgaggctatcagatctgagatggaacagcttaaagaggcctttgggcaggctcacactaaccacaagaaggtggcagcggatggcgaatccagggaggagtcgctgatccaggaaagtgcctcaaaagagcagtactacgtgagaaaagtcctagagttgcaaaccgagttgaagcagctgcgtaacgtactgactaacacccagtccgagaacgagcgactagcgtccgtggcacaggaattgaaagaaataaaccaaaacgtcgagatacagcgtggcaggctccgggatgacataaaggagtataagtttcgcgaagcgcggctcttgcaggactactctgagctagaggaggagaatatcagccttcagaaacaggtgagcgtcctgaggcaaaaccaagtcgaattcgagggtttgaaacatgaaatcaagcgactggaagaggaaacagagtacttaaattcacagctcgaagacgctatcagactcaaagagatctccgagcgtcagcttgaagaggctctggaaacactaaagaccgagcgggagcagaagaactcactgcggaaagagctgtcacattacatgtcaatcaatgattcgttctacacttcgcacctccatgtctcattggacggactaaagttcagcgatgacgccgcagagcctaacaatgacgccgaagctctggttaacgggtttgagcatggaggactcgcgaagctgcctctggataataaaactagcactcccaaaaaggagggtctcgcgcccccctctccttctttagtaagcgatctgctgagcgagctgaacatctccgaaatccagaaattgaagcagcagctcatgcagatggaaagagagaaggctggcctgttggctaccttgcaagatacccagaagcagctcgagcatacaagaggatctctttctgagcagcaggaaaaggttacaagactgacagagaacctcagtgctctcagaaggctccaggcttccaaagaaaggcagacagctctggataatgagaaggatcgcgattctcatgaagatggcgactactatgaggtggacattaacgggccggagattctcgcctgtaagtatcacgtggctgtggcggaagcgggcgaactgagggagcagctaaaagctctgcgctctacacatgaagccagggaagctcagcatgccgaggagaagggaaggtacgaggctgaggggcaagcgctgacggagaaagtcagcttgttggaaaaggcgtcccgtcaagatagagagttgctcgcacgacttgaaaaggagctgaagaaagtcagcgacgtggcgggagagacccagggcagcctttccgtcgcccaggatgagctggtcactttttccgaggagctggcgaatttgtaccatcacgtgtgcatgtgtaacaacgaaacccctaatcgggtcatgctcgattattatcgagagggccagggtggggccggacggacgagtcccggcggtagaacaagccccgaggcccgcgggcgtaggagtcccatcttactgcccaaggggctcttggccccggaggcaggcagagcagatgggggtaccggcgattcatctccgtccccaggctccagcctgccttctcccttgagcgaccctcggagagagccaatgaacatttataacctcatcgccataatcagggatcagatcaagcacctgcaagcggcagtagatcgtaccactgagctgagtcgccaaagaatagccagccaggaattggggccagcagttgataaggacaaggaggctttgatggaagaaattctgaaactgaagtcgcttctctctaccaagagagaacaaatcacaacattacgaactgtgctgaaagcaaacaaacagactgcggaggtggccttggcaaatttaaagagcaagtacgagaatgaaaaggctatggtgacagaaacaatgatgaagttgagaaacgaactgaaggccttgaaagaagacgcagctaccttctccagcctgcgagcaatgttcgcaacaaggtgtgacgagtatatcacgcagcttgacgagatgcaacgccaactcgccgctgccgaggacgagaaaaagaccctcaattcgctcctgaggatggctattcagcagaagcttgcactcactcagcgactggagctcctggagcttgaccatgaacagaccagacgcggtcgcgcaaaagcagcacccaagacaaagcctgcaacccctagcctgtag

SEQ ID NO: 109799 - DNA, 1107 bp, synthetic construct
  misc_feature 1..1107: note = Description of Artificial Sequence: Synthetic coding sequence
  source 1..1107: mol_type = other DNA
atgtggcctctctggcgtctggttagtttgcttgccctgtcccaggcgctgccatttgaacaaagaggattctgggatttcacgctggatgatggcccctttatgatgaacgatgaggaagctagtggagctgataccagcggggtgctggatccagatagtgttacgcccacatacagcgctatgtgcccatttggatgccactgccatctgagggtggtgcagtgctctgatctgggtctgaagtctgtcccaaaggaaatttccccagacaccaccctgctcgatctgcaaaataatgacattagcgaactcagaaaggatgattttaaaggcctccagcacctgtacgctctggttctagtgaacaacaaaatatctaagatccacgaaaaggccttttcacccctccgcaagttgcagaagttgtacattagtaagaaccatttagttgagataccgcctaatctcccatcctctctggtggagctgaggatccatgataacaggattcgcaaggtcccaaagggagtcttttccggactgcggaatatgaattgcatcgagatgggagggaatcccctcgagaattcaggctttgaaccaggcgctttcgacggactcaaacttaactacctgaggatttcagaggccaaactcactggaatcccaaaggacctgccagagactctgaacgagctgcacctggatcacaataaaatccaggctatcgagctggaggatctcttgcggtattccaagctgtacagactgggcttggggcacaatcagatacgcatgatcgagaacggctcgctgagcttcctcccaaccctgcgcgagctgcaccttgataacaacaaacttgcaagagtgcccagtggccttcctgatttgaaactactccaggtagtatacctacactctaacaatatcaccaaggttggagtgaacgacttctgtcctatgggttttggggtcaaacgcgcttattacaatggcatatcgctgtttaataaccctgtgccatattgggaggtgcaacccgcaactttccgctgcgtgacggaccgcttggccatccagtttggaaactataagaaatag

SEQ ID NO: 109800 - DNA, 924 bp, synthetic construct
  misc_feature 1..924: note = Description of Artificial Sequence: Synthetic coding sequence
  source 1..924: mol_type = other DNA
atgtgtccctttggatgccattgccatctacgggtggtccagtgtagcgatctcggattgaagtctgttccgaaggagatctcaccagatacaacactgttggacctgcagaacaacgatattagtgaactgcgaaaggatgactttaagggtcttcagcatctgtacgcccttgttctggtaaataataaaattagcaagatacacgaaaaagcattctccccactccgcaaactccagaagttatacatcagcaaaaaccatctcgtggagattcctccaaatcttcctagctccctggtggaattaaggatccatgacaacaggattcggaaagtgcccaagggggtattttccgggctgagaaacatgaattgcattgaaatgggcggaaatccactggaaaatagcggctttgagccgggggctttcgatggcctgaaactcaactacctgcggataagtgaggcaaagttaacagggattcctaaggatctccccgaaaccctcaatgagctccatctggatcataataaaatccaggccatagagctagaagacttgctgagatactcaaagctttaccggctgggactgggccataaccaaatccgaatgatagagaatgggagccttagcttcctccctacattacgagagctccacctagacaataacaaattggctagggtacctagtgggcttcccgatttgaagcttctccaggttgtctatctgcacagcaataatatcaccaaagtcggcgtgaacgacttttgtcccatggggtttggtgtcaaaagggcctattacaacgggatttcgctgtttaataatccagttccatattgggaggttcagcccgcaaccttcagatgcgtgaccgatcggctggcaatccaatttggtaattacaaaaagtag

SEQ ID NO: 109801 - DNA, 924 bp, synthetic construct
  misc_feature 1..924: note = Description of Artificial Sequence: Synthetic coding sequence
  source 1..924: mol_type = other DNA
atgtgtccctttggctgccactgccacctacgagttgtgcagtgttccgacctgggactgaaatcagtgccaaaggagataagtcctgacacaaccctgctcgatctccagaacaacgatatctcagaactgagaaaggatgactttaaaggcctccagcatctctacgcactagttctggtgaataacaaaatcagtaagattcatgaaaaggctttttcgccattaagaaaactgcagaaactctacatttctaaaaaccacctcgtggagatccccccaaacctgcccagtagcctggttgagctgagaatacatgacaatcgcattaggaaagttcccaaaggcgtgttttctggactaaggaatatgaattgcatagaaatgggagggaacccgctcgagaactctggcttcgagccaggagccttcgatggactaaagctgaattacctgaggatcagcgaggctaagctcaccggcattcccaaggacctcccagaaacactaaacgagctccaccttgaccacaacaagatccaggctatcgaattggaagaccttctgagatattccaagctctacaggctaggactcgggcacaatcagatccggatgattgagaacgggtcactgtcgttcttgccgacactaagagaattgcacctggacaacaacaagctggcccgtgtgccaagtggtctcccggatctcaaactgctgcaggtcgtctatctgcacagcaacaacatcactaaggtcggtgtgaacgacttctgtccaatggggtttggagtgaagcgggcttactataatggcatcagcctgtttaacaatccagtgccatattgggaggtccaacccgccacattcaggtgcgtcaccgaccgtcttgcaatccagttcggcaactataagaagtag

SEQ ID NO: 109802 - DNA, 717 bp, synthetic construct
  misc_feature 1..717: note = Description of Artificial Sequence: Synthetic coding sequence
  source 1..717: mol_type = other DNA
atgtggccgctgtggagactggtgtctctgctcgcactgtcccaggctctgccctttgagcagaggggattctgggattttactttggacgacggcccctttatgatgaacgacgaagaggcctccggagccgacacctctggggtcttggatccggacagtgtgaccccaacttacagcgccatgtgcccctttggctgtcattgccacctaagagtcgttcagtgcagtgatctcggtctcaagtccgtaccgaaggaaatcagtcccgacactaccttgttggatctgcaaaacaacgacattagcgagctgcgcaaagatgattttaagggacttcagcatctgtacgtgaggagctgggaagagcctgcagggctgcagcagagggctggggttcgggctctcgtactggtgaataacaagattagtaagatccatgagaaggcctttagccccctgcggaagctgcagaaactttacatatccaagaaccacctcgtcgaaatccctccaaatctcccctccagtcttgtggagctgcgcattcatgacaacaggattcgcaaggtgcctaagggggtattttctggcctgaggaatatgaattgcatcgagatgggtggcaaccccctggaaaattcgggatttgaacccggcgcgtttgacgggttgaaactcaactaccttagaatatcagaagctaagctgacctag

SEQ ID NO: 109803 - DNA, 1257 bp, synthetic construct
  misc_feature 1..1257: note = Description of Artificial Sequence: Synthetic coding sequence
  source 1..1257: mol_type = other DNA
atgatccagctgactgctactcctgtgtcagccctggtggatgagccagtgcacattagagcaaccgggcttataccttttcagatggtctcattccaggctagtctggaggatgagaacggagacatgttctatagccaagctcactaccgcgcgaatgaatttggcgaggtcgatctgaatcatgcatcctcactggggggggactatatgggagtgcaccctatgggcctgttctggagcctgaagcctgagaaattgctgactcgtctgctgaagagggacgtgatgaaccgccctttccaggtgcaagtgaagctttatgatctggaattgatcgtgaataataaagtggccagtgccccaaaagccagcctcacgcttgagcgttggtacgttgcccctggagtcacacgaatcaaggtacgagagggcaggctccgcggagcacttttcctgccacctggcgagggacttttccctggagtaatcgacctttttggggggttggggggccttttagagtttcgggcctccctgctggccagccgagggtttgccagcctagctctcgcctaccacaactatgaggatctgccacggaagcccgaggtgactgacctcgagtattttgaggaggcagccaattttcttctgcggcacccaaaagttttcggatccggcgtcggtgtagtcagcgtgtgtcagggggtgcagattgggctgtctatggctatctaccttaaacaggtgactgctaccgtgctcatcaacggcacaaacttccccttcggcatcccgcaggtgtaccacggacagatccatcagcctctgccccatagcgcacaactgatcagcactaatgcccttgggctattggaactgtacagaacctttgagacaacccaagtgggtgccagccagtaccttttcccgatcgaggaggcacagggtcaattcctgttcatcgttggggaaggagataaaacaatcaacagtaaggcacatgctgagcaggccatcggccagctgaagcggcatggaaaaaacaactggaccctgctctcctatcccggggccggtcacctgattgagcctccctactctcctttgtgctgcgcctctacaacgcatgatctgcggctacattggggaggcgaggtgatcccccatgccgcggcccaggaacatgcgtggaaggaaatccagcgctttcttcgcaagcacctgattcctgatgtaacctcgcaactttag

SEQ ID NO: 109804 - DNA, 1257 bp, synthetic construct
  misc_feature 1..1257: note = Description of Artificial Sequence: Synthetic coding sequence
  source 1..1257: mol_type = other DNA
atgattcagctgactgctactcccgtctccgcactcgtagatgaaccagtgcatattagagcaacaggccttatccccttccagatggtgtcctttcaggcaagcctggaggatgagaacggagacatgttctacagccaagcccactatagggctaatgagttcggggaggtggatctgaaccacgcatcaagcctgggtggagattatatgggagtgcaccctatgggtctgttttggtcccttaaacctgaaaagctactgacgcgcctgctgaagagagacgtgatgaacagaccctttcaagtccaggtgaagctctacgatttggagcttattgttaataacaaggtggcttccgcacctaaagcatcattaactctcgagcggtggtacgtagccccaggggtgacaaggattaaggtccgagagggacgactgcgcggggctctttttctgccccctggagagggacttttccccggagttattgatctgtttggagggctggggggcctgctcgaatttagggccagtctgttagcctcacgtggcttcgccagcctggcactggcttatcacaactatgaggatttacctagaaagcctgaggttactgacctcgaatactttgaggaagccgccaacttcttacttagacaccctaaggtgttcggcagcggggtgggggtcgtgtccgtttgtcagggcgtccaaataggtttgagtatggccatctatttgaagcaggtgacagcaactgtgcttatcaatggtacaaattttcctttcgggatcccccaggtgtaccatggacagattcatcaacctctgccacactcagcacagttgattagcaccaacgctctggggctgctggagctttaccgcacctttgagaccacacaggttggcgcatcccagtacctcttccccatagaggaagctcaaggacagtttctgtttatcgtgggcgagggagataagactattaacagcaaggctcacgcagagcaagccatcgggcagctcaaaaggcacggcaagaacaattggacgctgctctcctatccaggtgctggacacttaattgaaccaccatactccccactttgttgtgcctcgaccacacacgatcttcgcttgcattggggcggtgaagttattccccatgctgctgcccaggagcatgcttggaaagagatccaaaggtttcttaggaaacacctaatccctgacgtgacttcacaactctag

SEQ ID NO: 109805 - DNA, 891 bp, synthetic construct
  misc_feature 1..891: note = Description of Artificial Sequence: Synthetic coding sequence
  source 1..891: mol_type = other DNA
atgaacgccgagcccgaacggaagtttggggtcgttgtggtgggcgttggcagggccggcagcgttcggatgagggacctgcgcaacccccacccaagcagtgcttttcttaaccttatcggctttgtgtcaaggcgagaacttggatctatcgatggggtccaacagatctccttggaagacgctttgtcctcacaggaagtggaggtcgcatacatatgttcggagagcagttcccacgaggactatattcgtcagttcctgaacgctggaaagcacgtgttggtagaatacccaatgaccctctccctcgccgctgcacaagaactctgggaactggcggagcaaaagggtaaggtgttacacgaggagcatgttgaactgttaatggaggaatttgccttcctgaaaaaggaagtagtaggcaaagatctcctcaagggctctttactgtttacagccggacccttggaggaagaacgattcggcttccctgccttttccggaatctcaaggctgacctggctggtgtccctctttggagaattgagcctcgtctctgcaactctagaggaacggaaagaagaccagtatatgaagatgactgtgtgcttggagacggaaaagaaaagccctctcagttggatcgaggaaaagggccctggcttaaagcgcaacaggtacctaagcttccactttaaatcgggtagcttagaaaatgtcccaaatgttggagtgaacaagaatatcttcctgaaggaccagaatatctttgtgcaaaagcttctgggacagttctctgagaaggagcttgccgctgagaaaaaacgcattcttcactgcctgggattggccgaagaaatccagaaatattgctgcagccgtaagtag

SEQ ID NO: 109806 - DNA, 891 bp, synthetic construct
  misc_feature 1..891: note = Description of Artificial Sequence: Synthetic coding sequence
  source 1..891: mol_type = other DNA
atgaatgccgagcctgagcggaaattcggggtcgtggtggtgggtgtggggcgtgccggttctgtccggatgagggatctccggaatccccatcccagctctgcctttctgaatctgattggatttgtcagccgccgagagttgggatccatcgacggggttcagcaaatcagtctggaggacgctctgagctctcaagaagtggaagtcgcttatatttgctcagagtcgtcgagccacgaagactacataaggcagttcctgaatgccgggaagcatgtgctggttgaataccctatgacactgagcttagccgccgcccaggagttgtgggagttggccgagcagaaggggaaggtgctgcacgaggagcacgtggagctgcttatggaggaattcgctttccttaaaaaggaagtggtgggcaaggatttgctcaagggatcacttttatttactgccggaccgctggaagaagagcgatttggttttcccgccttctctggtattagtcgactcacatggttagtgtcgctcttcggcgagctctcactggtctctgctacattggaagagaggaaggaggatcaatacatgaagatgaccgtgtgtctggaaacagagaagaaatctccactgagctggatcgaggagaaagggcctggtctgaagcgtaaccgttacctgagcttccactttaagtcgggttcactagagaatgttccgaacgtcggcgttaataagaatatcttcctgaaggaccaaaacatcttcgtgcagaagctcctcggccagttctccgagaaagaactcgccgcagagaagaagaggattttgcactgcctagggttagctgaagagatccagaaatactgctgctctagaaaatag

SEQ ID NO: 109807 - DNA, 309 bp, synthetic construct
  misc_feature 1..309: note = Description of Artificial Sequence: Synthetic coding sequence
  source 1..309: mol_type = other DNA
atgaacgccgagcctgagaggaaattcggcgtggtagtagtgggtgtgggcagggctggctctgtccgtatgcgggacttacgaaatccccacccctccagtgccttcttaaacctgatcggatttgtctccaggcgggaactgggctccattgatggggtgcagcaaattagtttggaagatgcattgtcttcccaggaagtcgaggtagcgtatatctgtagtgagtcctcttctcacgaggactatatcaggcagttcctcaacgcagggaaacatgttttagttgaatatcccatgaccttatag

SEQ ID NO: 109808 - DNA, 621 bp, synthetic construct
  misc_feature 1..621: note = Description of Artificial Sequence: Synthetic coding sequence
  source 1..621: mol_type = other DNA
atggcagtgaaaaagattgcaatctttggggccacggggcagaccggcctgactactcttgctcaagccgtgcaggcagggtacgaggttaccgtgctggttcgggactcaagcagactcccctctgaaggaccacggccagcccatgtggtcgtgggggacgttctgcaggccgcagacgtggacaagactgtagctggacaagatgcagtgatcgttctcctagggacacggaacgaccttagccccaccacagtgatgtccgagggcgctagaaatatcgtggccgcaatgaaggcacacggcgtggacaaggttgtcgcatgcacctctgcgtttctgctgtgggatcccaccaaagttccgcctcggctgcaggcagtgactgacgatcacatacgcatgcacaaggtgctgcgagaatctgggctgaagtacgtggccgtgatgccgccccacataggtgatcagcctttaacaggtgcctacacagttaccctcgatggtaggggacccagcagagttatcagcaaacacgacctgggccactttatgttgcgttgcttgactaccgacgagtacgacggacattctacatatccttcccatcaataccagtag

SEQ ID NO: 109809 - DNA, 399 bp, synthetic construct
  misc_feature 1..399: note = Description of Artificial Sequence: Synthetic coding sequence
  source 1..399: mol_type = other DNA
atggggtccttgatgttgctctttgtggaaaccacccgaaacagcagcgcatgtatatttccggtgatccttaacgaactgagcagcactgtggagaccatcacccacttccccgaggtgactgacggcgagtgcgtcttcccatttcactataaaaacgggacttattatgactgcattaaatctaaggcacggcataaatggtgctccctgaacaaaacttatgaaggatactggaaattctgttcagctgaggatttcgccaattgcgtgtttccgttttggtataggaggctgatatactgggaatgtacagatgacggcgaagcttttggaaagaaatggtgcagcctcaccaagaactttaacaaggaccgcatttggaagtactgcgaatag

SEQ ID NO: 109810 - DNA, 429 bp, synthetic construct
  misc_feature 1..429: note = Description of Artificial Sequence: Synthetic coding sequence
  source 1..429: mol_type = other DNA
atggccgcagccgccgagggcgtcctggctactcgctccgacgagcctgcgagggacgacgcagccgtcgagaccgccgaggaagccaaggagcctgccgaggcagatatcaccgaactgtgtcgcgatatgttctcaaagatggctacatatctgacaggcgagctcacagccacctccgaagactacaagttactcgagaatatgaacaagctgacctctcttaagtacctcgaaatgaaggatatcgcgatcaacatctcgcgaaacttgaaggacctgaaccaaaaatatgcaggtctgcagccctatctggatcaaatcaacgttatagaagaacaagtagccgcattggaacaggctgcttacaagcttgacgcttattctaagaaactcgaagccaagtacaaaaaactggaaaaacgctag

SEQ ID NO: 109811 - DNA, 225 bp, synthetic construct
  misc_feature 1..225: note = Description of Artificial Sequence: Synthetic coding sequence
  source 1..225: mol_type = other DNA
atgaataagctcacctctctgaaatatctcgaaatgaaagatattgccattaatatttcccggaatctcaaggatttaaaccaaaagtatgctggtctacagccctacttggaccaaataaacgtcatagaagagcaggtggccgcgttggaacaggccgcatataagttggacgcatactcgaagaaattagaggcgaagtacaagaagctggaaaagcgatag

SEQ ID NO: 109812 - DNA, 225 bp, synthetic construct
  misc_feature 1..225: note = Description of Artificial Sequence: Synthetic coding sequence
  source 1..225: mol_type = other DNA
atgaacaagcttacttcactcaaatatttggagatgaaagatatcgccataaatatctcgagaaatcttaaggatctgaatcagaaatacgccggactccaaccttatcttgaccaaattaatgttattgaggaacaagtggccgccctcgaacaggccgcctataagttggatgcttactctaagaaacttgaagccaagtacaaaaagttggagaagagatag

SEQ ID NO: 109813 - DNA, 300 bp, synthetic construct
  misc_feature 1..300: note = Description of Artificial Sequence: Synthetic coding sequence
  source 1..300: mol_type = other DNA
atgttcagtaagatggccacctatctaacaggggagcttacggcaacttcggaagattataagttgctcgaaaatatgaataagctgacatccctgaaatatctagagatgaaagacatcgctattaatataagcagaaacctgaaagatttaaaccaaaagtatgcaggactgcagccctacctggatcaaataaacgtgattgaggagcaggtggcagccttggagcaggctgcttacaaactggacgcctactctaaaaagctggaagcgaagtacaaaaagctcgaaaagaggtag

SEQ ID NO: 109814 - DNA, 609 bp, synthetic construct
  misc_feature 1..609: note = Description of Artificial Sequence: Synthetic coding sequence
  source 1..609: mol_type = other DNA
atggcttctcaaggtcgccgacgtcggcctcttaggcgtcctgaaacggtcgtgcccggtgaagcaaccgaaacagatagtgagcggtctgcaagtagctctgaggaagaagaactgtacctgggaccttctggtcctacaaggggacgaccgactgggctgcgagtggctggagaggccgcagaaactgattccgaaccagaacccgagcccgagccgaccgcggcaccgcgcgaccttcctcctcttgtagtgcagagagagtccgctgaggaggcctggggaacagaggaggcccccgctcccgcccccgcccgaagcctgttacagctgagactggcagagagtcaggctaggttagaccatgacgtggctgctgcagtgagcggggtatatagacgcgccggaagagacgtcgccgccctggcgtcccgcctcgctgctgcccaagccgcgggtctcgctgccgctcactcggtgcgcctggcccgcggcgatctgtgtgcactggctgaacgcctagacatagtagccggctgcaggttgctcccagatattcggggagttccgggcacagagccagaaaaagacccagggccaagggcctag

SEQ ID NO: 109815 - DNA, 1632 bp, synthetic construct
  misc_feature 1..1632: note = Description of Artificial Sequence: Synthetic coding sequence
  source 1..1632: mol_type = other DNA
atggcccatgcccacatacagggcggccggagggcaaaaagtcgatttgttgtgtgtatcatgtccggcgctcggagcaagttggcactgttcttatgcggctgttatgttgttgcgctgggcgctcataccggagaggagagcgtagccgatcatcacgaagccgagtactacgtggctgctgtgtatgagcacccttcaatcctttccctgaatcccctggccttgatatcgaggcaggaagctctggagcttatgaaccagaatctagatatatatgagcaacaggttatgacagccgcacagaaggacgtgcagatcatcgtatttcctgaagatggcatccatggctttaactttacaaggacatccatatacccctttctggatttcatgccatcacctcaggtggttagatggaatccttgccttgaacctcaccgtttcaacgacaccgaggtcttgcaacgactaagctgcatggccattagaggggatatgtttctggtggccaacttaggtactaaagagccttgtcacagctcagaccctcggtgtcccaaagatggtcggtatcagttcaacaccaacgtagtcttctcaaataatggtactctggtggaccgctacagaaagcacaacctctattttgaggcagcgtttgatgttccacttaaagtcgacttaattacatttgacaccccctttgccggccgatttggtattttcacctgtttcgacatcctatttttcgatcccgctatacgggtgctgcgtgactataaggttaagcacgtcgtgtatccgaccgcttggatgaaccagcttccattgcttgccgccatagaaatccagaaggcctttgcagtggcattcggcattaacgtcctcgctgcaaacgtgcatcatcccgtgctgggcatgaccggttcagggattcacacacctttggagagcttctggtatcatgacatggagaaccccaaatctcaccttattatcgcacaagtggcgaaaaatcctgtaggactcatcggcgccgagaatgccacaggagaaactgaccccagtcacagcaaatttttgaagattttgtcgggagacccatactgtgaaaaggatgcccaggaagtccactgtgatgaggcaactaagtggaatgttaacgcccctccaactttccacagtgaaatgatgtacgataatttcacactcgtcccggtctgggggaaggagggatacctccatgtgtgtagtaacgggctctgttgctacctcctgtacgaacgaccaactctttctaaagagctctacgccctcggtgtgtttgatggtttacacacagtccacgggacctactatatacaggtgtgcgcattagtgagatgcggcggcctggggttcgacacttgtggacaagaaatcacggaagccaccgggatcttcgagttccacctctggggtaacttttccacgtcttatatcttccctctcttcctgacctcggggatgaccctggaggtcccagatcagctcggatgggagaatgaccactacttcctgagaaaatctcgcctgtcatccggccttgttacggcggccctgtatggcagactttacgagcgtgattag

SEQ ID NO: 109816 - DNA, 1572 bp, synthetic construct
  misc_feature 1..1572: note = Description of Artificial Sequence: Synthetic coding sequence
  source 1..1572: mol_type = other DNA
atgtctggcgctcggtctaagcttgccctgttcctgtgtggatgctacgtcgtggcacttggagcacacaccggcgaggaatctgtggcggaccaccatgaagccgagtactacgtcgccgctgtgtacgagcaccctagcatcctgtccttgaaccctttggctcttatcagcaggcaagaggcactcgaactgatgaaccaaaatctggacatctatgagcagcaggtgatgactgcagcacagaaggatgtgcaaatcattgtgttccccgaggacggaatccatggattcaacttcactcggacatcaatctatccctttctggacttcatgccctcgcctcaagtggtcagatggaatccatgtctcgagcctcacagattcaacgacacagaagtgctacagaggctgagctgcatggccattaggggcgacatgtttctcgtagcgaatttaggcaccaaagagccttgtcactcgtcagatccaaggtgcccaaaagatggcagatatcaatttaatactaatgttgttttctcaaataatgggaccttagtcgatagataccggaaacataatctctactttgaggctgcctttgacgtgcccctcaaggtggacttgattaccttcgacactcctttcgctggccgattcggaatctttacctgcttcgacatattgtttttcgatccagctattagagtcctgcgcgactacaaagtaaagcatgttgtctatccgacagcttggatgaaccagctccccctgctggccgcgattgagatccagaaggccttcgccgtagccttcggcatcaacgttttagcggccaatgtgcatcatccagtgctcggaatgactgggagtggaatccacactcctctggaatcattctggtatcacgatatggaaaatcccaagagccacctaataatcgcacaggtcgccaagaacccagtagggctgatcggcgctgaaaatgccacgggagagacagacccttcccatagcaagttcctgaagatcttatctggcgacccttattgcgaaaaagacgctcaggaggtgcactgcgacgaggcaactaagtggaacgttaatgctccccctacttttcactccgaaatgatgtatgataatttcactctggtgccagtgtggggcaaggaggggtatctgcacgtctgtagtaatggcctctgctgttatcttctctacgaacggcctaccctcagcaaggagctctacgcattgggtgtgttcgacggtctacacactgtccatgggacctactatattcaggtatgtgcactggttcgatgtggcggcctggggtttgacacctgcggccaggagatcacagaggccaccgggatcttcgagttccacttgtggggcaacttcagcacctcttatattttcccgctctttttgacatccgggatgaccctggaggtgcctgatcagctcgggtgggagaatgatcactacttcctgcggaagagcaggctgtcctccggactggtcacagctgccctttacgggcggctctatgaacgcgattag

SEQ ID NO: 109817 - DNA, 1638 bp, synthetic construct
  misc_feature 1..1638: note = Description of Artificial Sequence: Synthetic coding sequence
  source 1..1638: mol_type = other DNA
atggcaagaaaggaaactcagttgattatcaagatgaatcatctggcccggtttgtggtctgcatcatgtcaggtgcacgtagcaaactagcccttttcttgtgtggctgttatgtggtggcactaggagcgcacactggggaggagtcagttgcagaccaccatgaggcggagtactacgtagccgccgtgtacgaacatccgtccattctctcactaaatcctttggccctgatctccagacaggaagcgctggagctgatgaatcagaacctcgatatttacgagcagcaggtaatgactgcagctcagaaggacgtgcaaattatcgtgttccccgaagatggaatccacggatttaattttacaagaaccagcatctatccctttcttgattttatgccctctcctcaggtcgtaagatggaacccatgccttgagccccacagatttaacgacactgaggtgttgcagaggctgtcttgtatggccattcgcggggatatgttcctggttgcaaacctgggcaccaaagagccttgccactctagcgatccccgttgtccgaaagacggccgttatcagtttaatactaacgtggtctttagcaataacgggacgcttgttgaccgatacagaaagcacaatctgtacttcgaagcagcctttgatgtgccactgaaagtggatctgatcacttttgataccccgttcgccggacgatttggaatcttcacctgcttcgatatcttgttttttgacccagcgattcgtgtgttacgggattataaagtgaaacacgtggtttaccccacagcttggatgaaccaactgcccctgttggctgccatcgagattcagaaagctttcgccgttgctttcgggatcaacgttctcgcagccaacgttcaccaccccgtgttgggcatgaccggtagtggaattcacactcctttagagagcttctggtaccacgatatggagaaccctaaatcacacctgattatcgcacaggttgccaaaaatcccgtgggactcatcggagccgaaaacgccacaggcgaaactgatcccagtcacagcaaattcttgaagatcttgtccggtgatccatactgtgaaaaagatgcccaggaggtgcattgcgacgaagccaccaagtggaacgtaaatgcaccaccaactttccactctgaaatgatgtacgataacttcaccctcgtaccagtctggggtaaggaaggttacttgcacgtgtgctccaatggcttgtgctgttacctgctgtatgaacggccaacgctttcaaaagagttatacgctctaggcgtgttcgacggcctgcacacagtgcacggcacctactacatacaagtctgtgccctggtacggtgcggggggctgggctttgatacgtgtggccaggaaatcaccgaagccacgggcattttcgaattccacctttggggtaatttctcaacttcctatatttttcctctatttctgacgagcggcatgacattggaggttcctgaccagttggggtgggagaatgaccattatttcctgaggaaatcccgactcagcagtgggctggttacagctgccctttacggtaggctgtacgaaagagactag

SEQ ID NO: 109818 - DNA, 1638 bp, synthetic construct
  misc_feature 1..1638: note = Description of Artificial Sequence: Synthetic coding sequence
  source 1..1638: mol_type = other DNA
atgcccgagggcggcggaacttcccgcaggttgctgcctatgcagtctcgattcgtcgtgtgcatcatgtcaggggcaaggtctaaattagccctttttttgtgcggctgttacgttgtagcactcggcgcccacactggcgaggaatccgtggccgaccaccatgaagcggagtattatgtggccgcggtgtatgagcaccctagtatactgtctctgaaccccctggccctgattagccgtcaagaagccctcgagctgatgaatcagaatctggatatctacgagcaacaggtgatgactgctgcccaaaaagatgttcagataattgtgtttcccgaagacgggatacacggatttaatttcacaaggacctctatctaccccttcttggactttatgccctctcctcaagtcgtgcgatggaacccgtgcctggaaccccatcgctttaacgacacagaggtactccagcggctgagctgcatggccattcgtggtgatatgttcctcgttgccaacctcggaactaaggagccttgccactcatctgatccacgctgcccaaaggacggcagatatcagttcaacacaaacgtggtttttagcaataacgggaccctagttgaccgatataggaaacataacctgtactttgaggccgctttcgatgtaccactgaaggtggatctcattactttcgataccccttttgccggccgattcggcattttcacctgtttcgacattcttttttttgaccccgcaattagggtgctccgcgattacaaggtcaagcatgtggtctatccgaccgcatggatgaatcaattacccctactcgccgctatcgaaattcagaaagcctttgccgtcgccttcgggattaacgtgctggctgcaaatgtgcaccaccccgtgctggggatgaccggatcaggcatccacactcccctagagtccttttggtatcatgatatggagaaccccaagagccacctcataatcgcccaggtcgccaaaaatccagtggggctgatcggcgctgagaatgccaccggcgagactgacccttcccatagtaagttcctgaagattctcagcggcgacccatattgtgagaaagatgcccaggaggtgcattgtgatgaggctacaaagtggaacgtaaacgctccacccacgttccacagtgagatgatgtatgataatttcacgctggtcccagtatggggaaaagaaggctacctccatgtctgctccaacgggctgtgttgctacctgttatacgagagacccacactgtccaaggagttgtacgctctgggtgtcttcgatgggctgcataccgtacatggaacatattatatacaagtgtgcgcccttgttaggtgtgggggcctgggcttcgacacctgcgggcaggaaattactgaggccacaggcatctttgagtttcatttgtggggaaacttttcgacctcttacattttccctctcttcctgaccagcggcatgaccctggaggtgcccgaccaacttggctgggaaaacgatcactatttcctgcgcaagtcacggctttcctcaggcctcgtgactgctgccttgtatggtcgcctgtacgaaagagactag

SEQ ID NO: 109819 - DNA, 585 bp, synthetic construct
  misc_feature 1..585: note = Description of Artificial Sequence: Synthetic coding sequence
  source 1..585: mol_type = other DNA
atgcccaggaatctcctttactcattgctgtccagccatctgtcccctcatttctctacttctgtgaccagcgcaaaggtagctgttaacggtgtgcagctccactatcagcagactggcgagggtgatcacgcagtactcctattgccaggaatgctgggctctggcgagactgacttcggcccccagctgaagaatcttaacaaaaaactcttcaccgtggtcgcttgggatcccaggggatacggccacagccgtcccccggacagggatttccctgcggattttttcgagcgagatgctaaagacgccgtggatctgatgaaggcactgaagtttaaaaaagtctccctgctcggctggagcgacggcggtatcacagctctcatcgccgcagccaaatatccttcctatattcataagatggttatctggggcgcaaacgcttacgttaccgatgaggactccatgatttatgaggggatcagagatgttagcaaatggtcggaaagaacccgaaagccgctcgaggcattatatggttggtccctaaccctgtcgcctggttggaatgctatggcctag

SEQ ID NO: 109820 - DNA, 825 bp, synthetic construct
  misc_feature 1..825: note = Description of Artificial Sequence: Synthetic coding sequence
  source 1..825: mol_type = other DNA
atgccccgcaatctactgtatagtctgttaagcagtcaccttagcccacatttttcaacgagcgttaccagcgctaaggtggccgtcaatggagtgcagctgcactaccagcagactggcgagggagaccacgctgtgctacttttgcctggaatgctcggatcaggcgaaacagattttgggccccagcttaaaaatttgaataagaaactgttcacagtagtggcctgggatccacgaggatacggtcacagccggccccctgatagggactttcccgctgatttctttgagagagatgcgaaggacgccgtggacctcatgaaagccctgaagttcaagaaagtaagccttctgggctggtctgacgggggaattactgctctcatagcagcggctaagtaccccagttatatccataagatggtgatttggggagcaaatgcttacgtaaccgacgaggatagtatgatctatgaggggattcgagacgtttctaagtggagcgaacgcacccgcaaacctctagaagcattgtacggctacgactattttgcaaggacatgcgagaagtgggttgacggcatccgacagttcaagcacctccccgatggaaatatctgtaggcatttgctgcctcgggtacagtgtcccgccttgatcgtgcatggagagaaggacccattagtgcccaggttccacgccgatttcatccacaagcatgtcaaagggagtcgacttcatcttatgcccgaaggaaagcataatctccacctgaggtttgccgatgaatttaataaattagctgaggacttcctgcaatag

SEQ ID NO: 109821 - DNA, 876 bp, synthetic construct
  misc_feature 1..876: note = Description of Artificial Sequence: Synthetic coding sequence
  source 1..876: mol_type = other DNA
atggtcgccgtgctggggggcaggggtgttctgcggttgcgccttttactgtccgcccttaaaccaggaatccacgtgcctcgagccggccccgcagcagctttcggaacctcagtaacttctgccaaagtggccgttaatggagtgcaactccattatcaacagacaggtgagggggaccatgccgtgctgctactacctggtatgctcggatccggagagacggacttcggcccacagttaaagaatttgaacaaaaaattgttcaccgtagtggcttgggacccccgcggttatggtcacagccgaccaccagatagagacttccccgccgattttttcgaacgcgacgccaaagacgcggtggacttgatgaaggcactgaagttcaaaaaagtcagcctcctgggttggtcagacggcggcatcacggccctgattgccgctgctaagtatcctagttatatccataagatggtgatttggggggctaatgcatatgttacagatgaagactcaatgatctacgagggaatccgcgatgtctcaaaatggtctgagagaacaagaaaaccattggaagccctgtatgggtatgactacttcgcacgcacatgtgaaaagtgggtcgacggaattcgacagtttaagcatttacctgatggcaatatctgccggcacctgctccctcgagttcaatgcccagctctgatcgtgcacggcgagaaagatccactggtgccaagattccacgccgacttcatacacaaacatgtgaaggggtcgagattacacctgatgccagaggggaaacacaatctgcacctgaggtttgccgacgagttcaataaactggccgaagactttctccagtag

SEQ ID NO: 109822 - DNA, 264 bp, synthetic construct
  misc_feature 1..264: note = Description of Artificial Sequence: Synthetic coding sequence
  source 1..264: mol_type = other DNA
atgtattgcctccagtggctgttaccagttctcctaatcccaaaaccacttaatccagctctgtggttctctcattcgatgttcatgggcttttacctgctctccttcttactcgaacgaaaaccgtgtactatttgcgcgcttgtatttctggcggccctatttctgatttgctactcttgttgggggaactgctttctttaccattgctccgactcgcccctgccagagtcagcacatgaccccggagtggttgggacatag

SEQ ID NO: 109823 - DNA, 264 bp, synthetic construct
  misc_feature 1..264: note = Description of Artificial Sequence: Synthetic coding sequence
  source 1..264: mol_type = other DNA
atgtactgcctgcaatggttgttgccagtgctgctgatccccaagcccctgaaccccgccttgtggttcagccattcgatgtttatggggttttacctcctcagcttcttgttagaaaggaagccctgtaccatttgcgcattagtatttcttgctgccctgttccttatctgttacagctgttgggggaactgcttcctataccattgcagcgactcaccgctcccagaatccgcccacgaccctggggtggtcggaacgtag

SEQ ID NO: 109824 - DNA, 264 bp, synthetic construct
  misc_feature 1..264: note = Description of Artificial Sequence: Synthetic coding sequence
  source 1..264: mol_type = other DNA
atgtattgcctgcaatggctgctgccggtgctcctcattcctaagcccttaaaccctgcattgtggttttcacactctatgtttatggggttttatctgctcagctttctgctggaacgcaaaccctgcaccatttgcgcactagtgttcttagcggcgctcttcctaatctgttattcctgttgggggaattgctttctttaccactgctcggattctcccttgcctgaatcagctcatgatcccggcgtcgtcggcacatag

SEQ ID NO: 109825 - DNA, 264 bp, synthetic construct
  misc_feature 1..264: note = Description of Artificial Sequence: Synthetic coding sequence
  source 1..264: mol_type = other DNA
atgtattgccttcagtggttgttgccggtactccttataccaaagccccttaaccccgccttgtggttcagccactcaatgtttatggggttctacctgctcagcttcctgctggaaaggaaaccttgcaccatttgcgctcttgtgtttttggctgccctgttcctgatatgctattcctgctggggcaattgttttctgtaccattgctccgattcccccctgcctgagagcgcccacgacccgggtgtcgtgggcacatag

SEQ ID NO: 109826 - DNA, 264 bp, synthetic construct
  misc_feature 1..264: note = Description of Artificial Sequence: Synthetic coding sequence
  source 1..264: mol_type = other DNA
atgtactgcctacagtggctgttaccggtgttactgatcccaaagccactcaatcccgccctgtggttttcccacagtatgttcatgggattctatctcctgtcatttttactggaacgcaagccatgtactatttgcgcacttgtgttcctggccgcactgttcctaatctgttacagctgctggggcaattgcttcctgtatcattgttctgactcacccttgcccgagtcagctcatgaccctggagtggtggggacatag

SEQ ID NO: 109827 - DNA, 189 bp, synthetic construct
  misc_feature 1..189: note = Description of Artificial Sequence: Synthetic coding sequence
  source 1..189: mol_type = other DNA
atgtattgcctacagtggctgctgcccgtgcttctcatccctaaaccactgaaccctgccttgtggtttagtcactcaatgtttatgggcttctatcttttgagctttctccttgagcgaaaaccgtgcactatctgtgccctcgttttccttgcagcattgtttctaatctgttactcttgttggtag

SEQ ID NO: 109828 - DNA, 264 bp, synthetic construct
  misc_feature 1..264: note = Description of Artificial Sequence: Synthetic coding sequence
  source 1..264: mol_type = other DNA
atgtactgcctgcagtggctgttaccagtcctgctcattccgaaacccctgaaccccgctctatggttttcccattccatgtttatgggtttctacctgctgagcttcctgttggaaagaaaaccatgtactatctgcgccctcgtctttctggccgccctcttccttatctgttacagctgctggggtaactgctttctctatcactgttctgactctccactgccagagagtgcccacgacccgggggtggtcggaacctag

SEQ ID NO: 109829 - DNA, 264 bp, synthetic construct
  misc_feature 1..264: note = Description of Artificial Sequence: Synthetic coding sequence
  source 1..264: mol_type = other DNA
atgtactgcttgcagtggctactccctgtcctgctgattcccaagcccctcaatccagcgctgtggttctctcattccatgttcatggggttctaccttctctcgtttctacttgagcgaaaaccatgcacaatttgcgcattggtcttcctagcagctttgttcctgatctgttatagttgctggggaaattgcttcttgtatcactgttccgattctccgctgccagagagtgcacatgaccccggcgtggtcggtacatag

SEQ ID NO: 109830 - DNA, 237 bp, synthetic construct
  misc_feature 1..237: note = Description of Artificial Sequence: Synthetic coding sequence
  source 1..237: mol_type = other DNA
atgtactgtcttcaatggctcctgcccgtgttgttaattcctaaacccctgaacccggccctgtggttctcacactccatgttcatgggtttttatttgctgtctttccttctggagcgaaagccatgtactatttgcgccctggtgttcctcgctgctctgttcttgatctgctattcctgttggggaaactgttttttataccattgtagcgattcaccactcccagagagctag

SEQ ID NO: 109831 - DNA, 24 bp, synthetic construct
  misc_feature 1..24: note = Description of Artificial Sequence: Synthetic coding sequence
  source 1..24: mol_type = other DNA
atgtactgcttgcagtggctgtag

SEQ ID NO: 109832 - DNA, 1368 bp, synthetic construct
  misc_feature 1..1368: note = Description of Artificial Sequence: Synthetic coding sequence
  source 1..1368: mol_type = other DNA
atgtcaagctccggcttaaacagcgaaaaggtggccgcacttatacagaagctgaacagcgaccctcagttcgttttagcccagaatgttgggacgacccatgacttgcttgacatttgtttgaagagggctaccgtgcagcgtgcacaacacgtgtttcagcacgcggtccctcaagaggggaaacctatcaccaatcagaagtcatctgggcggtgctggattttcagttgtctgaatgtcatgcggctcccatttatgaaaaagttaaatattgaggagtttgagttttctcagagctacttgttcttctgggataaggtcgaacgctgctatttcttcctaagtgctttcgtggatactgcacagcgcaaggaacccgaggacggaagacttgttcagttcttactcatgaatcctgctaacgacggtggtcagtgggatatgctggttaatattgtggaaaagtacggggttatccctaagaagtgtttccccgaatcctataccactgaggctacgaggcggatgaacgatattttaaatcataagatgcgggaattctgcatccggcttaggaacctcgttcactctggcgcaaccaagggcgagattagtgccacccaagatgtgatgatggaggaaattttccgcgtggtttgcatatgcctgggcaaccccccagagacttttacgtgggaatacagagataaagacaaaaactaccaaaagatcgggccgataactcctttagaattctaccgcgaacacgtgaagccacttttcaatatggaggacaagatttgcctagtgaacgatcctcgtccccagcataagtacaataagctctatacagtcgagtatctgagtaacatggtcggaggaagaaaaacactctacaacaaccagccaatcgattttctcaagaagatggtggccgcctctatcaaggacggcgaggcagtatggtttggatgtgatgttggaaagcacttcaacagtaaactcggtctttccgacatgaatctctacgaccacgagttggtcttcggagtgtcactgaaaaacatgaataaagctgagcggctcactttcggggagagccttatgactcacgcgatgaccttcacggctgtttctgaaaaggatgatcaggacggagccttcaccaagtggagagtcgaaaattcctggggtgaagaccacggccataaagggtacctctgtatgaccgatgagtggtttagcgaatacgtgtacgaggtggtagttgacaggaagcacgtgccagaagaggtgttagccgtgttggagcaggaacccataatattacctgcttgggatcctatgggtgccctggctgaatag

SEQ ID NO: 109833 - DNA, 1107 bp, synthetic construct
  misc_feature 1..1107: note = Description of Artificial Sequence: Synthetic coding sequence
  source 1..1107: mol_type = other DNA
atgtgcagctctacaccatgccctagacgggcttcccagagccccacccgacgtgcacaagtcgaacggtgttatttttttctctcagcctttgtagacactgcccagcgaaaggagcctgaggacgggaggctggtgcagttcctattaatgaatcccgcaaatgacggcggccagtgggatatgttggtgaatatcgtcgaaaaatatggcgtaatcccaaaaaaatgcttccctgagagttacacaacggaggccacacgccggatgaacgatattctcaaccacaagatgcgggaattttgcattcggctcagaaacctcgtccactccggggccaccaagggagagataagcgcaactcaagatgttatgatggaagaaattttccgggtcgtctgtatttgcctcggaaaccctcctgaaaccttcacttgggaatatagggacaaggacaagaactaccaaaaaatcggacctatcacccccctggaattctatcgcgagcacgtgaaacctttgttcaacatggaagataagatttgtttagtgaacgaccccagaccccaacacaaatataataagctgtacaccgtggagtacctctctaatatggtaggtggtcggaaaaccctttataacaatcaacccattgactttctgaaaaaaatggtcgcagcgagcatcaaagacggggaagcagtctggttcggttgcgatgtgggcaaacacttcaattctaagctcggcctctccgatatgaatctctatgaccacgagctagtttttggcgtgtccctgaaaaatatgaacaaggccgaacggcttacattcggtgagagcctaatgacgcacgccatgacatttaccgccgttagcgagaaagatgatcaagatggagccttcaccaagtggagggtggaaaacagttggggagaggatcacggccacaagggttacttgtgtatgaccgacgagtggttttccgagtacgtgtacgaagtggtcgtagaccggaagcacgttccggaggaagtacttgcagtcttagagcaagagccaattattttgccagcatgggacccgatgggtgctctcgccgagtag

SEQ ID NO: 109834 - DNA, 2241 bp, synthetic construct
  misc_feature 1..2241: note = Description of Artificial Sequence: Synthetic coding sequence
  source 1..2241: mol_type = other DNA
atggcaggatcaagaggtgctggtagaactgctgcccccagtgttagaccagagaagagaaggtcagaaccagaactggaaccggagccagaaccagagccccctctcctctgtacttctcctctgtcacactccaccggctccgactctggggtctcagactctgaagagagcgtgttttctggattggaagactccggttccgacagcagtgaggacgacgatgagggcgacgaagagggggaagacggcgcgctggacgatgagggccactctggtatcaagaagacgactgaagaacaggtacaagccagcactccatgtcccagaacagagatggcgtccgcccgcatcggagatgaatatgcggaggatagctctgatgaagaagacatcagaaacactgtaggaaacgtcccccttgagtggtatgacgattttccacatgtcggctacgatttagatgggcggcggatctacaaacccctccgcacgagagatgaattggaccaattcctcgataagatggacgatcctgattactggaggactgttcaggaccctatgaccggccgggatctgcgcctcaccgatgaacaagtggccctggtgagaaggctgcaaagcggccaattcggtgacgttggtttcaacccctatgaacccgccgtagattttttttccggagatgtaatgatacacccagtgacaaataggcctgcagataagcgcagtttcatcccaagtctggtcgagaaagagaaggtcagtcggatggtccatgctatcaagatggggtggatacagccaaggcgcccccgggaccccacgcccagtttttatgatctgtgggcacaggaagacccaaacgctgttcttggcagacacaagatgcacgtgcccgcaccaaaacttgcactgcccgggcatgcggagagttataacccccctcccgagtatctgctttctgaagaagaaagactggcctgggagcagcaagagcctggagaaagaaagctgagctttctccccagaaaatttcctagcctccgcgcagtgccagcgtacggcagattcattcaggagcggtttgaacgctgcttggatctgtacttatgcccccggcaaaggaagatgagggtcaatgtcgaccctgaggatctgatcccaaagttgcctaggccaagggacctgcagcccttcccaacgtgtcaggctttggtttaccgcggacatagtgacttggtccgctgcttgagtgtctcacctggcggacaatggttggtctctgggagcgatgacggctcccttcggctttgggaggtcgcgacagcccgttgcgttaggacagtccccgtcggcggtgtcgtgaagtctgtcgcttggaacccctcccccgccgtttgtctcgtcgcggctgctgtggaggatagcgtcctgctccttaatccggcactgggcgatcgcctcgtcgctgggtccaccgatcagttactgagcgccttcgtgccacccgaagaaccgccactgcagccggccaggtggctcgaagcttctgaggaggaacgacaggtaggtctgcgcttgaggatctgtcacggcaagcccgtgacccaggtgacctggcacggacgcggggattatttggccgtggtgttggcgacccagggtcatactcaggtacttatccaccagctgtctcgccggagaagccaatcacctttcaggagaagtcatggacaggtacagagggtggcttttcatcctgcacgacctttcttactcgtcgcaagccaacgctcagttcggttgtaccacttgttacgccaggaactgactaagaagctgatgccaaattgcaagtgggtgagcagcttagctgtgcacccggccggcgacaatgtgatctgtggttcatacgactcgaagctcgtgtggttcgacctggatctctctaccaagccgtatcgcatgctgcggcaccataagaaagctctgagagcagtagcttttcatcccaggtatcccctgttcgctagcggttccgacgacggctctgtgatagtgtgtcacggtatggtctacaacgatctcttacagaatcccctgcttgtgccggtgaaagtgctgaaagggcacgttttgaccagagatctgggggtcttggatgtgatcttccatcctactcagccctgggtctttagcagcggtgccgatggaaccgtccggctgtttacatag

SEQ ID NO: 109835 - DNA, 1083 bp, synthetic construct
  misc_feature 1..1083: note = Description of Artificial Sequence: Synthetic coding sequence
  source 1..1083: mol_type = other DNA
atgaattacactgagtcaagccccctaagagagtcgacagccattggtttcacaccggagctcgagtcgattattcccgtgccctctaataagaccacatgcgagaattggcgggaaatccaccacttggtttttcatgtagcaaatatctgcttcgcagttggcttagtgattcctaccaccctgcacctgcatatgatttttctcagagggatgctgaccctggggtgtaccctctacatcgtctgggctacattgtaccgttgcgcactcgatattatgatctggaacagtgtgtttctcggagtcaatatcttacacctgtcctatctgctgtacaaaaaacggcctgtgaaaatagaaaaagaactgtccggaatgtatcgtcgactgttcgagcctttgagagtccctcctgatttgtttcgcaggcttactggccagttctgcatgatccagaccttaaaaaagggccagacttacgctgcggaggataaaaccagcgtcgacgaccggttgtcgattcttttaaaagggaagatgaaggtgagttatcgcggccacttcctccataacatttatccctgtgcattcattgacagtcccgagttccgatccacgcagatgcataaaggggagaaatttcaagtcactataatcgctgacgacaattgtaggtttctatgttggtccagagaacgtctcacttattttctcgaatcagaaccattcctgtatgagatctttagatacctcataggaaaggatatcacaaataaattatattctcttaacgatccaacactcaatgacaagaaggcgaagaaactcgaacatcagcttagtctgtgcacccagatctccatgcttgaaatgagaaactcaatcgcttcctcttccgatagtgacgacggcttgcatcagttcctaagaggcacctcaagtatgtcatcccttcacgtgagttccccccaccagcgagctagcgccaagatgaaacccattgaggagggggccgaggatgatgacgacgtcttcgagccagcctctccaaataccctcaaagtacatcagctgccgtag

SEQ ID NO: 109836 - DNA, 1083 bp, synthetic construct
  misc_feature 1..1083: note = Description of Artificial Sequence: Synthetic coding sequence
  source 1..1083: mol_type = other DNA
atgaactacaccgagtcctctccacttcgggaaagcactgctattggctttaccccggagcttgagtccatcattcccgtgcctagtaacaaaactacttgcgagaactggcgggaaattcaccatcttgtgttccacgtggccaatatttgcttcgcagtaggactggtcatccctacaacccttcatctgcacatgatcttcctgcgcgggatgctgaccttgggctgtaccctatacatcgtgtgggccacgttgtaccggtgcgctttggatattatgatctggaactcggtgtttctgggagtcaacatccttcacctttcctacctgctctataaaaaaaggccggtcaagatcgaaaaggagctgtccgggatgtacaggagactttttgaacctctgagggtccccccagacttatttagacgtcttaccgggcagttctgcatgattcagacactgaagaaaggtcagacctatgcggcagaggacaagacttccgtggatgacaggctgagtatcctgctgaagggcaaaatgaaggtctcttacagaggtcacttccttcacaatatctacccttgcgcattcatcgattcccctgagtttagatctacccagatgcacaagggcgagaaattccaggttactattatagctgacgataactgcaggttcctctgctggtctagagagcggcttacgtatttcctcgagtcagagccatttttgtacgagatttttaggtacttgattggcaaggacattacaaataaactctattccctgaacgatccgacgctgaacgacaagaaagcgaaaaagctggagcaccagctgtctctgtgcacgcaaatctcaatgttggagatgcgaaattccatagctagttcctcagactccgatgacggcttgcatcaatttctcaggggaaccagcagtatgagctccttgcacgtctcctctccccatcagcgagcctccgcaaagatgaaacccatcgaagagggggccgaggatgatgacgatgtcttcgagcccgctagccccaacacactgaaggtgcaccagctcccttag

SEQ ID NO: 109837 - DNA, 1083 bp, synthetic construct
  misc_feature 1..1083: note = Description of Artificial Sequence: Synthetic coding sequence
  source 1..1083: mol_type = other DNA
atgaattacaccgagtcatcccccctacgggagtctactgccattggctttacccctgagttggagtcgatcatccccgtaccttccaacaagactacttgtgagaactggagggagatccaccacctcgttttccacgtggctaatatctgctttgccgtcggtctagtaatcccgaccacgctacacctacatatgatattcctgcgaggcatgcttacacttggatgtacgctgtatattgtgtgggctactctgtataggtgcgcattagacatcatgatttggaatagcgtattcctgggagtgaacattctgcacctgagctatctcttatataagaaaaggcctgttaaaatcgagaaggagttgtctgggatgtaccggcgcctatttgaacccctgcgcgtgccccctgacctgttcagaaggctaacaggacagttttgtatgattcagactttaaagaaaggacagacctatgccgctgaagacaaaacctccgtggacgatcgactctccatcctgctcaaagggaagatgaaggtctcctatcgagggcacttcttacataacatctatccatgtgcattcattgatagcccggagtttagatcaacccagatgcacaagggcgagaaatttcaggtgaccataattgcagacgataattgtaggttcctgtgttggtcacgagagaggctgacgtacttcctggagagcgagccctttttgtacgaaattttccgatatttgatcgggaaagacatcaccaataaactgtattctctgaatgatccaacgctaaatgacaaaaaggccaagaaactggagcaccagctgtcactgtgcacccagatctcaatgctggagatgaggaactcaattgcaagctctagcgattcagacgacggcctgcaccagtttcttcggggcacctctagcatgtcttctcttcacgtgtcttcaccccaccaaagagcgtctgcaaaaatgaagccaatcgaggaaggggcagaggatgacgatgacgtgtttgaaccagcctcccccaatacactcaaagttcaccaactgccatag

SEQ ID NO: 109838 - DNA, 783 bp, synthetic construct
  misc_feature 1..783: note = Description of Artificial Sequence: Synthetic coding sequence
  source 1..783: mol_type = other DNA
atggaccgtcactcgtcgtacattttcatttggttacagttagaactctgcgctatggccgtactcctaacaaaaggagaaatccgctgctactgcgatgccgcacactgcgtcgcgaccggttatatgtgcaagtcagagttgagcgcatgcttttcaaggctcctcgatcctcagaattcgaattcacctctgacccatgggtgcctggacagcctggccagtacgacagacatctgtcaggctaagcaggcaaggaaccacagtggcacaacgattccaacccttgaatgttgtcacgaagatatgtgcaactacaggggtctacatgacgtgctttcccctccgagaggtgaagcttccggacagggaaatcgctaccagcatgatgggtctaggaatctgataactaaggtgcaagagttaacatcctctaaggaactgtggtttcgcgctgccgtgattgccgttcccatagctggagggttaatcctggtgttactgattatgcttgctcttcgcatgctcagatctgagaacaaacgcctgcaagatcagcggcagcaaatgctctctcggctccattactcctttcacgggcaccactctaagaaggggcaggtggctaagctcgatctggagtgcatggttccagtgtctggccatgaaaactgctgccttacttgtgacaagatgaggcaggcagacctgtccaacgataagattctgagcttggtgcactggggaatgtattctggccacgggaagttggaatttgtgtag

SEQ ID NO: 109839 - DNA, 744 bp, synthetic construct
  misc_feature 1..744: note = Description of Artificial Sequence: Synthetic coding sequence
  source 1..744: mol_type = other DNA
atggatcgacatagctcctacatctttatttggctccaacttgaactgtgcgccatggccgtcctccttaccaagggggagatcaggtgttattgcgacgctgcgcactgcgttgcgactggctacatgtgcaaaagtgagctgtcagcatgcttcagccgcctgcttgatccacagaactctaattcacctcatatatgtcaagcaaaacaggcccgtaaccactctggaacaacaattccaaccctggaatgctgtcacgaagacatgtgcaattatagaggactgcatgacgtgttgtcgcctccaaggggcgaggcttctggccaggggaaccgctaccagcacgacggcagcaggaacctgatcaccaaagtgcaggagttaacctcaagcaaggagctgtggttccgagcagccgtgattgccgtgcctatcgcaggcgggctgatactggtgctcctcatcatgcttgccctccgtatgctgcggtctgagaacaagcgcctacaggaccaacggcagcagatgctttccaggttgcactacagctttcacggacaccatagtaagaaaggccaggtggctaaattagatttggaatgtatggtgcctgtttctgggcacgaaaattgctgcctcacttgtgacaagatgcgtcaagccgacctatctaatgataaaatcctgagccttgtgcattggggcatgtattccggccatgggaaactagagtttgtgtag

SEQ ID NO: 109840 - DNA, 2058 bp, synthetic construct
  misc_feature 1..2058: note = Description of Artificial Sequence: Synthetic coding sequence
  source 1..2058: mol_type = other DNA
atgctgtggttctctggagtcggcgctctggccgaaaggtactgccgtagatcccctggtattacctgctgcgttctgctactgctcaattgcagcggcgtccctatgagcctggcctcttcttttctgaccggctcggtggctaaatgtgagaacgagggcgaagtcctgcagatccctttcattacagacaacccttgcatcatgtgcgtgtgcctcaataaggaggttacatgcaaaagggaaaaatgtcctgtgctgtccagagattgcgctctcgcgatcaagcagaggggggcctgctgcgagcagtgcaagggttgtacttatgaggggaatacctataattctagctttaagtggcagtctcctgcggaaccctgcgtattgcggcagtgccaggaaggcgtggtgaccgaaagcggcgttcgctgcgtcgtgcactgcaaaaacccattagagcacctggggatgtgctgcccaacatgccccggatgtgtctttgagggggtgcagtaccaggaaggcgaggaattccagcctgagggctccaagtgcacaaagtgttcttgtacgggaggtaggacccagtgcgtacgcgaggtctgtcccatcctgtcatgcccccagcacctctcacatattcctcccggccagtgctgtcctaagtgcctgggccagagaaaggtgttcgatctgccatttggttcttgtctattccgcagtgacgtgtacgacaatggaagctcgttcttgtacgacaattgcactgcctgcacttgccgtgactctaccgtggtttgtaagcgcaaatgctctcatcccggggggtgcgatcaaggacaggaggggtgttgcgaggaatgcttgctacgagtgccccctgaagacatcaaggtgtgcaagttcggaaataaaatatttcaggacggcgaaatgtggagtagcatcaattgcacaatttgtgcctgcgtaaaggggcgtacagaatgtcgaaataagcaatgtattcccatcagcagctgcccacaaggaaaaattctaaatagaaaaggctgctgtcctatctgcacggagaaaccgggcgtttgcactgtgtttggagacccacactataacactttcgacgggcggacatttaattttcaggggacctgccagtatgttctcaccaaggattgctcatcgcctgcgtccccttttcaggttctggtgaaaaacgatgcaagaaggactcgatctttttcttggactaaatctgtggagctggtgcttggtgaatctcgagtctcgttgcagcagcacttgacagtgcgctggaatggcagccggattgccttaccatgccgggcccctcatttccatatagatctcgacgggtatctgcttaaggtcaccaccaaggccggcctggagatatcttgggatggtgatagctttgtggaagttatggcagcgccacacctcaagggaaagttgtgcggtctctgcgggaactacaacggccacaaaagagacgacttgattggcggagacggaaattttaaattcgacgtagatgattttgccgaatcctggagagttgaaagcaacgagttctgtaaccggccacagcgaaagccagtacctgagttatgccagggaactgttaaagttaagctcagggcccatcgcgagtgccagaagcttaagtcctgggaattccaaacgtgtcattcaaccgttgattacgccaccttctacagatcttgtgtaacagacatgtgcgaatgtccggtccacaagaattgttactgcgaatccttcctagcctatacccgcgcgtgccaacgggagggcatcaaggtccactgggagcctcagcagaactgcgccgctacgcagtgtaagcacggggccgtgtacgatacctgcggaccaggctgtatcaaaacctgtgataattggaacgagataggtccctgtaataagccgtgcgtagccggctgccactgtccagcaaatttggtcttgcacaaggggagatgcattaagcctgtgctctgtccacagaggtag

SEQ ID NO: 109841 - DNA, 2058 bp, synthetic construct
  misc_feature 1..2058: note = Description of Artificial Sequence: Synthetic coding sequence
  source 1..2058: mol_type = other DNA
atgctctggttctcaggcgtcggggccctggcggaacgttactgtcggagatcccccggcatcacctgttgcgtccttctgctgttaaattgcagtggcgtgcctatgtccctagcttcctcctttcttacaggcagcgttgctaagtgcgaaaatgagggggaggtgctgcaaatacccttcatcacagacaacccgtgtatcatgtgcgtctgcctaaacaaagaagtgacatgtaagcgggagaagtgtccggttctcagtcgggactgtgccttagcaataaaacagcggggagcttgctgtgagcagtgcaagggatgcacctatgagggaaacacttacaacagctcttttaaatggcagagccccgcggagccatgcgtgctgaggcagtgtcaggaaggagtagtaacagagtctggcgtgcgctgcgtggtgcactgtaagaatcctctggagcacctggggatgtgttgtcctacatgccctgggtgcgtattcgagggggtacagtaccaggagggggaagaattccagcccgagggcagcaaatgtactaagtgttcctgcacaggcggaagaacacagtgcgtccgggaggtgtgcccgattctgagctgcccccagcatttgtcacatatcccccctggccaatgttgcccaaaatgcctggggcagcgcaaagtgttcgaccttcctttcgggtcatgccttttcagatcagatgtatacgacaatggttcctcgtttctctacgacaattgtacagcctgtacatgtcgcgactccacagtcgtgtgtaaacgtaagtgctcccacccagggggctgtgaccaaggtcaggaagggtgttgtgaagagtgtttgctgcgagtcccgcctgaagacattaaagtgtgtaagtttggcaataaaatattccaggacggtgaaatgtggtccagcattaactgcacaatttgcgcatgcgttaaaggcaggacagaatgtcgtaataagcagtgcataccaatcagctcctgtcctcagggcaaaattcttaaccgaaaggggtgttgcccaatttgtaccgagaaacctggcgtgtgtaccgtgtttggcgatccccattacaatacttttgacgggcgcaccttcaactttcagggcacctgtcaatacgtgctgacaaaggactgttcctctcctgctagtcctttccaggtgctggtcaagaacgatgcgagacgtacccgaagctttagctggaccaaaagcgtcgagctggtgctcggcgaatctagggtgtccttgcagcagcatttaaccgtgaggtggaacggatctcgcattgctctgccctgtagagctccgcatttccacatcgatctcgatggctatttgttaaaggtgacaacgaaagccggtctggagatttcttgggacggagattcttttgtagaggttatggcagctccccacctcaaagggaaattgtgcggactgtgtggtaactataacgggcacaaacgagacgacctaatcggcggcgatggcaatttcaaatttgatgtcgacgacttcgctgaatcctggcgcgttgagtctaatgagttctgtaatagaccgcagcgaaagcctgttcctgagctctgtcagggaacagtgaaagtcaaattgagagcgcatcgggagtgccaaaagctgaaatcctgggagttccagacctgtcacagcaccgtagactacgccacgttctacagaagctgtgtgaccgatatgtgcgaatgtcctgttcataagaattgctattgtgaatcgttcctcgcatacactagagcctgtcagagggaaggcatcaaggttcactgggagcctcaacagaattgcgcagctactcagtgtaagcatggtgcggtctacgacacatgcggaccgggctgcatcaagacctgtgataattggaacgagatcggtccttgcaataagccctgtgttgccggttgccactgtccagcgaatcttgtcctacataaagggagatgcataaaaccagtactgtgcccacagcgctag

SEQ ID NO: 109842 - DNA, 2028 bp, synthetic construct
  misc_feature 1..2028: note = Description of Artificial Sequence: Synthetic coding sequence
  source 1..2028: mol_type = other DNA
atggatactaaaagtattttggaagagctgctcctaaaacgttcccagcaaaagaagaagatgagtccaaataattacaaagaacggttatttgtgttgaccaagaccaacctgtcttactacgagtatgacaaaatgaagcgcgggtctcgaaaaggcagcatcgagatcaaaaagattcgctgcgtagagaaagtgaacttggaggagcagacacctgtcgagcggcagtaccccttccaaatcgtatacaaggacggccttttgtacgtatacgctagcaacgaggagagcaggagtcagtggctgaaggccttgcagaaagagatccgcggtaatccacatctcctggtgaaatatcattccggcttttttgtagacgggaaattcttgtgttgccagcagtcatgcaaagccgctcctgggtgtactttgtgggaggcttatgcaaacctccatacagcagtcaatgaagagaagcatagggtccctacctttcccgatagagttttgaaaattcctagggccgtccccgtgcttaagatggacgctccttcatcatccacaactctggcacagtacgacaatgagtcaaaaaaaaattacggaagtcagcctccttccagctccacatccttggcccagtatgattccaactccaagaaaatctatggctcccagcctaatttcaatatgcagtacatccccagagaagatttccctgactggtggcaagtccgcaaactgaagtcatcaagttcctccgaagatgtggcttcatcaaaccagaaggagagaaatgtcaatcataccactagtaaaatttcatgggaattccccgaatcatcttcctcggaggaagaggagaatttggatgactacgattggtttgcaggtaacatctcgagaagccagagcgagcaactgctccggcagaaaggtaaggaaggggccttcatggtgaggaatagttctcaggttggaatgtatactgtgagcttgttctccaaagcggtgaacgataagaaaggcacagtgaagcattaccacgtgcacaccaacgctgaaaacaagctatatctggcagagaattattgctttgactcaatccccaagctgatccactaccatcagcacaatagcgcggggatgatcactcgtctgcgtcaccctgtgagcacaaaggccaacaaggtgccggactctgtcagcctgggaaatggaatctgggaattgaaacgtgaagagatcaccctgttaaaagagttagggagtggccagttcggagtggtgcagctcggtaagtggaaaggccaatatgacgtggcggtgaagatgatcaaagagggctctatgtctgaagacgagttcttccaggaagctcaaaccatgatgaagctgagtcaccccaagctggtgaaattttatggggtgtgttccaaagagtatcctatctatatcgtgacagaatacataagtaacgggtgtttgctgaattacttacgcagtcatgggaaaggtctagagccatcacagctactcgaaatgtgttacgatgtgtgtgagggaatggcatttctggagagccaccagtttatccaccgggacctagccgcccgcaactgccttgtagatcgagacctctgcgttaaagtgtcagacttcgggatgacgcgatatgtcctggacgatcaatatgtgtcatcagtgggaaccaaattccccgtgaaatggtctgctcccgaggtattccattattttaaatactcttccaagtcagacgtttgggcatttgggatactgatgtgggaggtgttttctcttggcaaacagccctacgatctgtacgataattctcaagtggtactgaaggtgtctcaggggcaccgcctgtacaggccacatctcgcctccgataccatctaccagatcatgtactcatgttggcatgaactacccgaaaaacgaccaacatttcaacagttactgagttcgatagagcctctgcgtgaaaaagacaaacactag

SEQ ID NO: 109843 - DNA, 2028 bp, synthetic construct
  misc_feature 1..2028: note = Description of Artificial Sequence: Synthetic coding sequence
  source 1..2028: mol_type = other DNA
atggatactaagtctattttggaggagctgctattaaaacggagccagcaaaagaagaagatgtctcccaataattataaagaaagactcttcgtcttgacaaagaccaacttgtcttattacgagtatgacaagatgaaaaggggtagtagaaaaggctccatcgagatcaagaagataagatgcgttgagaaagtgaacttagaggagcaaacccccgtcgaacgacagtacccctttcagattgtgtacaaggacggacttctttacgtatacgcgagtaatgaggagtcacgttcccagtggcttaaagcattgcagaaagaaatccgcgggaatcctcatttgttagtaaagtaccacagtggtttttttgtggacggcaagttcctgtgctgtcaacaatcctgtaaggccgccccaggatgtaccctctgggaggcctatgccaacctgcataccgcagtgaacgaggaaaagcatagggtgccgactttccccgatagggtcctaaaaattccgcgcgccgtgccagttctgaaaatggatgcacctagctcatcaacaactcttgcccagtacgacaacgaatcaaaaaaaaactatggaagccagcctccatctagctcaacttccctggcacagtatgactccaactcgaagaagatttatggttcacagcccaactttaatatgcaatatattccgcgagaagacttccctgattggtggcaggtgcgcaagctgaagtcctcaagtagttccgaagacgtggcttcctcgaatcagaaagagcggaacgttaatcacaccacatctaagatttcctgggagtttcctgagtcctcttcatcagaggaagaagaaaaccttgatgactatgattggttcgccggtaatatttctaggtcacagtcagaacagctgctccgacagaagggcaaggagggcgcgttcatggtaagaaacagttcccaagtgggaatgtatacggtgtctctattctcaaaggctgttaacgacaagaaagggactgtgaagcactatcacgtgcacaccaacgccgagaacaagctttacctggcagagaattattgttttgattccattcccaaactcatccactatcaccaacataactctgccgggatgatcaccagactccgccaccccgtgtccacaaaagccaacaaggtcccagattccgtatcactgggcaacggcatatgggaactcaagagagaagaaattaccttgcttaaggaactgggctcagggcaattcggcgtcgtccagctgggaaaatggaaggggcagtacgacgtggccgtgaaaatgataaaggaagggtctatgtcagaggatgaattttttcaggaagcccagacaatgatgaaattaagccaccctaagctcgtaaagttttatggggtgtgttcaaaggaatacccaatctacattgtgaccgaatatatttccaatggttgcctgctgaattatctgaggagccacggtaagggcctggagccatcccagcttctagaaatgtgctatgacgtgtgtgagggcatggccttcctcgaatcccaccagttcattcaccgggacctggccgctagaaattgtctggtcgaccgcgatctctgtgttaaagtgagtgatttcgggatgactcgctatgtgttggatgaccagtacgtttcatctgtggggaccaagtttccagtgaaatggagcgcgcctgaggtgttccattatttcaagtactcgtccaaatccgatgtctgggcattcggtattctgatgtgggaggtgttctcattgggcaaacagccctacgatctgtatgataacagccaggtggtcctcaaggtctctcagggacacagactgtaccgacctcatctcgctagtgatactatatatcagattatgtactcctgctggcacgaactccctgaaaagaggcccactttccagcagcttctttcctcaatcgagccactgagggagaaggacaaacactag

SEQ ID NO: 109844 - DNA, 2028 bp, synthetic construct
  misc_feature 1..2028: note = Description of Artificial Sequence: Synthetic coding sequence
  source 1..2028: mol_type = other DNA
atggatactaagtccatcttggaagagttactgcttaaaaggagtcagcagaagaagaaaatgagccccaataattacaaggaacgcctgttcgtgctgaccaagaccaacttaagctattatgaatatgacaaaatgaaacggggtagcaggaagggcagtattgaaattaaaaagatccgttgcgtcgaaaaggtgaacctcgaagagcaaacccccgttgagcgccagtatcctttccagatagtgtacaaagacgggctcctctatgtttacgctagtaatgaggagagtcggtcccagtggctaaaggctttacagaaagagatcagagggaacccccatttgctggtcaagtaccattcggggttcttcgtagacgggaaatttctctgctgccagcaatcctgtaaagctgcccctggatgtactttatgggaggcatacgcaaaccttcataccgcagtgaacgaggaaaaacatcgcgtcccaacatttcctgatcgagtgctgaaaatacccagagctgtgcctgtccttaaaatggatgcaccttcttcatccactaccctggcccaatacgacaatgaaagtaagaagaactacggatctcagccacccagtagctcaacgagccttgcgcaatacgacagcaattctaaaaaaatctacggttcccagcccaattttaatatgcagtacattcccagggaggattttccggattggtggcaggtgcggaaactcaagtcctcttcaagctcagaagacgttgcatcaagtaaccaaaaggaaaggaatgtgaatcacacaacaagtaaaatttcttgggagttcccggagtctagttcttctgaggaagaggagaatctcgatgattatgactggtttgctgggaacatttctcggtctcaaagcgagcaattgctccgacaaaagggaaaagagggcgctttcatggtccggaacagcagtcaggtgggaatgtatacagtgtccctcttttctaaagccgttaacgacaagaagggaactgtgaaacactatcacgtccacacaaacgctgaaaacaaattgtatttggcagaaaattactgtttcgactcgatccctaaactgatacattaccatcagcacaatagcgccggcatgattactagattgagacaccccgtcagcacaaaagcaaacaaggtgcccgacagcgtgtcactcggaaacggcatttgggagctgaaaagggaggagatcacactgctgaaagagctgggaagtggacagtttggcgtggtccagctggggaaatggaagggacagtacgatgtggccgtcaagatgatcaaagaaggatccatgagcgaggatgaatttttccaggaggcacagactatgatgaagctgtcacatccgaagctggtcaagttctatggggtttgctccaaggaataccctatctacatagtgacagaatatatttctaatggatgcctcctaaactatctacgatcccacggcaagggacttgagccatcacagcttctggagatgtgctatgatgtatgtgagggaatggcatttctcgagagtcatcagtttattcatagagacctggcagctagaaattgccttgtggatagagacctctgcgtgaaagtgtcagactttgggatgacacgttatgtgctggatgaccagtacgtaagctcagttggtaccaagtttcccgtgaaatggtctgcgcctgaagttttccattacttcaaatatagctctaagagcgacgtgtgggctttcggaattttaatgtgggaggtgttctctcttggtaagcagccctatgacctatatgataatagccaggtagttctcaaagtctcacaggggcacagactttatcgcccccacctggccagcgatacaatctaccagattatgtacagctgttggcacgaactcccagagaagcggcccactttccaacagctgctctcttcgatcgaacccctgcgggagaaggacaaacactag

SEQ ID NO: 109845 - DNA, 525 bp, synthetic construct
  misc_feature 1..525: note = Description of Artificial Sequence: Synthetic coding sequence
  source 1..525: mol_type = other DNA
atgacggaacttgaataccccaagggcagtagcatcatgcccgcagccggcacgatgtacctcactacttccacagggtacccttatacctatcataacggagtggcctatttccatacccctgaggttaccagtgtgccgccaccctggcccagtcgtagtgtttgctccagccctgtgatggttgctcagcccatttaccaacagcccgcttaccactaccaagccaccactcaatacctgcccgggcagtggcaatggtccgtgcctcagcccagtgccagcagcgccccttttttatatctccagcccagcgaagtgatatatcaacccgtcgaaatagctcaggacggtggctgcgtcccacctccgctttctctgatggagacatcagttcccgagccctattccgaccatggagttcaggctacttatcaccaggtgtatgccccaagtgcaatcactatgccggcccccgtgatgcagccagaacccattaagactgtctggtctattcattactag

SEQ ID NO: 109846 - DNA, 888 bp, synthetic construct
  misc_feature 1..888: note = Description of Artificial Sequence: Synthetic coding sequence
  source 1..888: mol_type = other DNA
atggagaccgaatctggaccacagacgtcaaaccagatgcagacagactcgctaagcccctcgccaaatccagtctcacccgttccgctgaacaacccaacaagtgcgcccagatatgggaccgtgatcccaaatcgcatcttcgtgggcggcatcgactttaagaccaatgaaagtgatctgcgcaaatttttcagccagtatggtagtgtgaaagaggtcaagattgttaacgacagagccggagtaagcaaaggctatggcttcgtaactttcgaaacacaagaggacgcacagaagattctgcaagaggcagaaaagctaaactacaaggataaaaagctcaatattggcccagctatcagaaaacaacaggttggcatccctcgatctagcatcatgcctgcagccgggacaatgtacctcaccacatctacaggatacccatacacttatcacaatggggtggcctacttccacacacctgaggtgacatccgttccacccccctggcccagccggagcgtgtgttcatctcctgttatggtggctcagcccatttaccaacagccagcgtatcattaccaagctacaacacagtacctgcccggacagtggcaatggagtgtgcctcaaccatcggcaagttctgccccgttcctctatctgcaaccaagtgaggtaatctatcagcccgtagagattgcccaagatggcgggtgcgtacccccacctctgtccttgatggaaacaagcgtgccagagccatactcagatcacggcgtccaggctacataccatcaagtgtacgcccccagcgccatcaccatgcctgcaccagtgatgcagcccgagcccatcaagaccgtatggtctatccactattag

SEQ ID NO: 109847 - DNA, 852 bp, synthetic construct
  misc_feature 1..852: note = Description of Artificial Sequence: Synthetic coding sequence
  source 1..852: mol_type = other DNA
atgcagactgatagtttgtcaccctcccctaatcctgtcagccccgtccccctgaataatcccactagcgctccgcgatatgggactgttattccaaacaggatcttcgttggcgggatcgatttcaagaccaatgaaagcgacctgaggaagttctttagccaatacggatcagtcaaggaggtgaaaattgtcaatgacagggctggtgtttctaaaggttatggcttcgttaccttcgaaacacaagaggacgcacagaagatactccaggaggctgaaaagctgaactataaagataaaaagctgaacatcgggcctgccattcgaaaacagcaggtcggcattccgcggagcagcattatgcccgctgccggcactatgtatctgaccacctccacaggatatccctacacctaccataacggtgtcgcctactttcacactccggaggtcacaagcgtcccccctccatggccaagccgtagtgtctgctcttctccagtgatggtcgctcagcccatttaccagcagcccgcctaccattatcaggccactacgcagtatctccctggccagtggcagtggtcagttcctcaaccctctgctagtagcgcccccttcctgtatttgcagccttctgaggtaatttaccagcctgtggaaattgcgcaggatggtggatgtgtgccacctcccctgtcactgatggagacgagcgtgcctgaaccatattctgatcatggagtccaggctacctaccaccaagtctacgcgcctagcgccatcaccatgccagcaccagtgatgcaaccagaacctataaagactgtttggtcaatacattattag

SEQ ID NO: 109848 - DNA, 852 bp, synthetic construct
  misc_feature 1..852: note = Description of Artificial Sequence: Synthetic coding sequence
  source 1..852: mol_type = other DNA
atgcagaccgactctctgtccccttcccccaatcccgtttcaccagtgccccttaacaaccccacctcagcaccaagatacggcaccgtgatccctaaccgaattttcgtgggcggtatagactttaaaaccaacgagagtgacctgcgaaagtttttttctcagtacggttctgtgaaggaagttaaaatcgttaacgatcgggctggcgtcagcaaagggtatgggtttgtgaccttcgagacacaagaggatgcccagaagatactgcaagaggccgagaagcttaattacaaggataaaaagctgaacataggccccgcaatcagaaagcaacaagtgggtatccctagatcatccataatgcctgcagcaggaactatgtacctcacaacctctacgggttacccatacacctatcacaatggcgtcgcctattttcacacaccagaagtgactagtgtccctccgccctggccatcacggagtgtgtgcagcagtcctgtaatggtcgctcaacctatctatcagcaacccgcgtatcactatcaggctactacacaatacctgcccggccagtggcagtggagcgtgccgcagccctcggcgtcgtcagctcctttcctgtacctgcagccctctgaagtcatttaccagcctgtggagattgcccaagacggcgggtgcgtgccaccaccattgtccctgatggaaacaagcgtgcctgagccgtacagcgatcacggagtgcaggctacttatcatcaagtctatgctccatctgcaattacaatgccagcccctgtgatgcagccagaaccaataaaaacagtttggtcgattcactactag

SEQ ID NO: 109849 - DNA, 414 bp, synthetic construct
  misc_feature 1..414: note = Description of Artificial Sequence: Synthetic coding sequence
  source 1..414: mol_type = other DNA
atgctatctggccggcttgtgctcggcctggtgagcatggcaggccgcgtgtgcttgtgccagggctctgcgggttctggggcaatcggcccagtggaggctgcgataaggactaaacttgaagaagcattatcccctgaggttcttgaactgcgcaatgaaagcggcggacatgccgtgcctcctggaagtgagacacactttcgtgtggcggtggtgtcctcccgtttcgaggggctgtccccactccagcgccacagattagtgcacgcggcactagccgaagaactgggcggcccagtacacgcccttgccatccaggcccggactcctgcgcagtggcgtgagaattcccagttagacaccagccccccctgccttgggggcaataaaaaaactctgggtactccatag

SEQ ID NO: 109850 - DNA, 414 bp, synthetic construct
  misc_feature 1..414: note = Description of Artificial Sequence: Synthetic coding sequence
  source 1..414: mol_type = other DNA
atgctgtcaggacgcctggtcctgggcctggtatccatggccggtagagtctgtttgtgtcaagggtctgcaggttccggcgccataggcccagtcgaggcagcaattagaacgaaacttgaggaggctctaagtcctgaggtgcttgagcttcgcaatgaatctggcggacatgcagtgcctcccgggtccgaaacacattttagagttgccgtagtgtcctcccggttcgagggtctgagtccactgcagaggcatcgccttgtgcacgccgccttggcagaggaactgggagggccggttcacgcactggcaattcaagctagaactcctgcccagtggcgggaaaattcccaacttgatacatcacctccctgcctgggaggaaataaaaagaccctcggaactccttag

SEQ ID NO: 109851 - DNA, 414 bp, synthetic construct
  misc_feature 1..414: note = Description of Artificial Sequence: Synthetic coding sequence
  source 1..414: mol_type = other DNA
atgctgtcaggccggttggttctgggtctggttagtatggcagggcgtgtgtgcctgtgtcagggaagcgccgggtctggggcaatcggacctgtagaagcggcaatcaggactaaactcgaagaagctctgagccccgaggtcctggaactgagaaatgaatcaggtggccacgcagtgccaccagggtctgaaacacacttcagggttgctgtcgtgtccagcagattcgagggcctgtcaccgctgcagagacaccgcctcgtgcacgccgctctcgccgaagaacttggcggtccagttcacgccttggctatccaggccagaactccggcgcaatggcgcgagaatagtcagctcgacaccagcccaccatgcctggggggcaataaaaagacccttggcacaccctag

SEQ ID NO: 109852 - DNA, 459 bp, synthetic construct
  misc_feature 1..459: note = Description of Artificial Sequence: Synthetic coding sequence
  source 1..459: mol_type = other DNA
atggcgtcggctaaaagcctggacagatggaaagcacgcttacttgagggcggttctaccgcactgacctacgcgcttgtgagggctgaggtcagcttcccagcagaggtggcacctgtgcgacagcaggggtctgtggccggcgctcgcgccggcgtagtttctctgttgggctgcagatcatcgtggaccgcagccatggagctgtcagcagagtacttgagagagaaactgcagagggatctagaagccgagcacgtcgaagtggaagataccactctgaacagatgtagctgttcttttcgtgttctagttgtgtcagcaaaattcgaagggaaaccactgttgcaacgccatcggttggtaaacgcttgcctggcggaagaattgccacacatccacgcatttgagcagaagacattgacccctgatcagtgggcaagagagcggcaaaagtag

SEQ ID NO: 109853 - DNA, 306 bp, synthetic construct
  misc_feature 1..306: note = Description of Artificial Sequence: Synthetic coding sequence
  source 1..306: mol_type = other DNA
atggccgcatggtcaccagcagccgctgcaccattgctcaggggaatccggggattgcccctgcatcaccggatgtttgcaacccaaacagagggagagctcagagtcacgcaaatcctcaaagaaaagttcccaagggcgactgctattaaagtgaccgacatctctggtaccaagcgccgcaatcaaagagacgcgtggatcgccgacatctacctctgcccacagaccctcactaccccctggctacacagatgctgctgtttgcgaccctggatgaatttcactgacataatcctaccttag

SEQ ID NO: 109854 - DNA, 324 bp, synthetic construct
  misc_feature 1..324: note = Description of Artificial Sequence: Synthetic coding sequence
  source 1..324: mol_type = other DNA
atggccgcctggagtcctgctgccgcggcccctctgctccgcggcattaggggccttccgcttcaccaccgaatgtttgccacccagactgaaggggaacttagggttactcagattctgaaagagaagtttccgcgtgcaaccgccattaaggtcacagacatctccggcggatgtggggcgatgtacgaaattaagattgagtctgaagagtttaaagagaagcgcactgttcaacaacaccagatggttaatcaggccctgaaggaggaaattaaggaaatgcatgggttgagaatctttacgtcagtgcctaagcggtag

SEQ ID NO: 109855 - DNA, 1200 bp, synthetic construct
  misc_feature 1..1200: note = Description of Artificial Sequence: Synthetic coding sequence
  source 1..1200: mol_type = other DNA
atggcccaaagacagcctcactccccaaaccagacgctgatctctatcactaacgacacggaatcgtcatcctctgtggtgagtaacgataataccaataagggctggagtggggacaactcacctgggatcgaagcgttgtgcgcaatttacattacgtatgccgtgatcatatctgttggtatccttggaaatgccatcctgatcaaggtgttttttaaaacaaagtccatgcagaccgtcccaaatatcttcatcacgtctctggcattcggggatctcctattattacttacttgtgtcccagtggatgccacgcactacctcgccgaggggtggctgtttggcaggattggctgtaaggttctgtccttcataagattgacatctgttggcgttagcgttttcactctgaccattctctctgccgataggtacaaagctgtggtgaagcctctggaaaggcaaccctcaaatgccattctcaaaacctgcgtcaaagcagggtgtgtgtggatagtgtccatgatcttcgcattgccagaagccattttctcaaacgtttatactttccgggatccaaataaaaatatgacatttgaatcctgcacgtcctaccccgtgtctaagaagctgctccaggaaatacactctctgctgtgctttcttgtattttatataattcccttgtccattatctcagtctattactcactgatcgctcggactctgtataaatcaacactgaacatccctaccgaggagcagagtcacgcacgaaagcagatcgagtctcggaaacgcattgcccgcacagttcttgttctcgtggcactatttgcactctgctggctgcccaaccaccttttatatctctatcatagtttcacctcacagacatacgtggatccgtcagccatgcatttcatttttacaatcttcagccgcgtcctagcgttcagtaattcttgcgttaatccttttgctctctactggctatctaagtcttttcagaaacactttaaggcacagctattctgttgtaaggctgagagaccagaaccacccgtggctgatacaagcctaactactctggcggttatgggcaccgtgccaggaactggttcaattcagatgtctgaaatttccgttacgtccttcaccggttgtagtgttaaacaggctgaagatcgcttttag

SEQ ID NO: 109856 - DNA, 303 bp, synthetic construct
  misc_feature 1..303: note = Description of Artificial Sequence: Synthetic coding sequence
  source 1..303: mol_type = other DNA
atgcgcgctctgaccctgctggcattgctggcattggctgcactgtgcattgctggacaggccggagccaagccttccggcgccgagagctcaaaaggcgccgcgtttgtgagtaagcaggaaggatccgaggtagtcaagcgccctaggaggtacctgtaccagtggctcggcgcccccgttccttacccagaccccctcgagccgagaagggaagtgtgtgagctgaacccagactgcgatgaacttgccgaccacattggtttccaagaggcatataggaggttctatgggccagtgtag

SEQ ID NO: 109857 - DNA, 957 bp, synthetic construct
  misc_feature 1..957: note = Description of Artificial Sequence: Synthetic coding sequence
  source 1..957: mol_type = other DNA
atggccgctcaaggctgcgccgcttcccgactgttgcagctgctgttacaattgctcctactgttgttgctgctagcagctggcggtgcgcgcgcacgttggaggggggaaggcacctccgctcatttgcgggatattttcttgggtagatgcgccgaatatcgggcgttgctgtcaccggaacagagaaacaaaaactgcacagcgatctgggaagccttcaaagtcgccctggacaaagatccctgttccgtcctgccctccgactacgacctgttcattaacctcagcaggcactcgattccaagagacaagtctctgttttgggagaattctcacctgctggtaaattcctttgccgataataccagaagatttatgcccctgagcgacgtactgtatggccgtgtcgctgactttttgtcttggtgcagacagaaaaacgactctgggctcgactatcagagctgcccgacatctgaggattgtgaaaataatccagtggacagcttttggaagcgggcttcaatccaatacagtaaggacagcagcggggttatacatgttatgctcaatgggagtgaacctaccggcgcctaccctatcaagggtttttttgccgactatgaaatccctaacctccagaaagagaagatcaccaggatcgaaatatgggtgatgcacgaaatcggcgggcctaacgtcgaatcttgtggcgaaggctctatgaaggtactagaaaagcggctgaaagacatgggcttccagtatagttgcattaatgattaccgtcctgtcaagttgctgcaatgtgtagaccactccacccaccctgactgtgccctgaagagcgctgccgccgccacacagaggaaggcgcctagtttgtacaccgagcagcgtgctggcttaattatccctctgtttcttgtgctggcaagtagaacccaactctag

SEQ ID NO: 109858 - DNA, 543 bp, synthetic construct
  misc_feature 1..543: note = Description of Artificial Sequence: Synthetic coding sequence
  source 1..543: mol_type = other DNA
atggcttccacttcttacgattactgcagggtgcccatggaggatggggacaaacgttgtaaattactgctggggatcggcatcctagtgctgctaatcatagtgatcctcggtgtgcctctgatcattttcacaattaaagccaactctgaagcatgtagagacggcctcagagcggtgatggaatgtaggaatgtaacccatctgctgcagcaggaactgaccgaggcgcaaaaaggattccaggatgtggaagcccaggcagccacatgcaaccacactgtgatggccctgatggctagcctggacgctgaaaaagcgcagggccagaagaaagttgaagagttggaaggtgagattacaacactaaatcataagctccaggacgcaagtgcagaggttgagcgactcagacgggagaaccaagtgctttctgtgcggatcgcggataagaaatattatccaagcagtcaggactctagtagcgctgccgccccccaactgctgatcgtgctcctgggcctgagtgctctcctccaatag

SEQ ID NO: 109859 - DNA, 651 bp, synthetic construct
  misc_feature 1..651: note = Description of Artificial Sequence: Synthetic coding sequence
  source 1..651: mol_type = other DNA
atggcaagcacatcgtacgattattgtagggtccccatggaagatggagacaagagatgcaaattgcttttggggattggaattctcgtgctcctgatcattgtgatccttggagtgccacttattattttcacgataaaggcgaattccgaagcctgtcgggatgggcttagggctgtgatggaatgcaggaacgtgacgcacttgctgcagcaggagcttacagaggcccagaaggggtttcaggatgttgaagcccaggccgccacttgcaaccacaccgtcatggcactgatggcgtcgctggacgccgagaaggcacaaggacagaagaaggtggaggagttggaaggtgaaatcacaactcttaaccacaagcttcaggacgcctcagcggaggttgagcgactacgccgagaaaatcaggtcctttccgtgcgtatcgctgataagaagtattacccctcctcacacttcccaagcactccccagtcccggctgcaaactcagttgaccaccctgaaaattgaaatggacgaggcaaaggcgcaggggacacagatgggagccgagaatggcgctctgaccggggctttaggctgcaagggtgttggacgagacagaagtggccgcagcctgggcgagtcatag

SEQ ID NO: 109860 - DNA, 1179 bp, synthetic construct
  misc_feature 1..1179: note = Description of Artificial Sequence: Synthetic coding sequence
  source 1..1179: mol_type = other DNA
atggtgctgctttcgattctcagaatcctgttcctttgtgagctggtccttttcatggaacatcgcgcccagatggctgaaggtggtcaaagttctatcgccttactagcagaggcaccaaccctccccctaatcgaagagctcttggaggaatcacctggggagcagccgagaaagcctcgcctgttgggccacagcctgcggtacatgcttgaattgtacagacggtctgccgacagccacggccatcctcgggaaaataggacaatcggagcgactatggtccgcctggtgaagccgttgaccaacgtcgctaggccccaccgtggcacatggcatatccaaattttgggttttccactgcggcccaatagaggcctataccaattggtgcgggccactgttgtgtacagacatcatctgcaattaactaggtttaatttaagctgccatgtagagccatgggtgcagaaaaacccaaccaatcactttccaagttccgaaggtgacagtagcaagccgagtctgatgtccaacgcctggaaggagatggatattactcagctggtgcaacaacgcttctggaataataaagggcaccggatcctaagactgaggttcatgtgccagcaacagaaggattccggtgggcttgagctctggcacggtacaagttctctggatattgctttcctcctcctctacttcaatgatacccataaatcaattcgcaaagctaaatttttgcccagagggatggaggaattcatggaacgagaaagcctactccgtaggacccgccaggccgacgggatatccgcagaggtgaccgctagcagtagcaaacattcagggccagagaacaatcagtgctccctgcatccatttcagatctccttccgtcagctgggatgggaccactggatcatcgcacctcctttctacacccccaactactgtaaagggacttgcctgcgcgtgctacgggacggcctcaattctcctaatcacgctattatccaaaatttaataaatcagctggtggaccaatctgtccctagacctagttgcgttccatacaagtacgttcctatcagtgtactgatgatcgaagctaacggaagtattctgtataaagagtatgaaggaatgatagccgaatcttgtacttgccgctag

SEQ ID NO: 109861 - DNA, 1419 bp, synthetic construct
  misc_feature 1..1419: note = Description of Artificial Sequence: Synthetic coding sequence
  source 1..1419: mol_type = other DNA
atggctggggctagccgactgctgttcctgtggctgggctgtttttgcgtgagcctggcgcagggcgagcggcccaagcctccttttccagaactgaggaaagccgtgccgggggatcgtaccgccggtggcggccctgatagcgagctacagcctcaggataaggtgagtgagcatatgctccgcctttacgacagatactctacagtgcaggctgccagaacgcctggatcactagagggcggttcccagccatggagacccaggttgcttagggaagggaatacggtacgcagttttagagccgcagctgccgaaactcttgagagaaagggactttacatttttaacttaacatccctgacaaagtccgagaatatactgagcgcaaccctctatttctgcataggagaacttggaaatattagcctctcctgccccgtgtccggcggctgcagtcaccatgcccagaggaagcatatacagatagacctctcagcctggacgctcaaattttctagaaatcagtcccagttactgggacaccttagcgtagacatggccaagagccatagagatatcatgtcgtggctcagtaaggacatcacacagctcctccggaaggcaaaagaaaatgaggagttcctgatcggttttaacatcacaagtaagggtcggcagctgcctaaacggagactgccttttcccgagccttacattctggtttatgctaatgacgctgccattagtgagcctgaatcagtcgtgtcgagtctccagggccaccgcaattttccaaccggcaccgttccaaaatgggactctcacatccgggccgctctatcaattgagcgcagaaagaaacgctctaccggcgtgctccttcccctgcagaataatgagttgcctggcgccgaatatcagtacaaaaaggacgaagtctgggaggagcgcaaaccgtacaagaccctccaggcgcaggcccccgaaaaatctaagaacaaaaaaaagcagagaaagggcccacacaggaaaagccagactctacagtttgatgaacagacattaaagaaagcccgtagaaagcagtggatcgaacctcggaattgtgctaggcgctatcttaaagtggattttgccgacataggatggtcagagtggattatttcgcctaaatcctttgacgcatattattgttccggcgcttgtcagttcccaatgccaaagagtctgaagccgtcaaatcacgcgacgatccagtccatcgtccgggccgtaggggttgtcccgggcattcccgagccctgctgcgtgcccgagaagatgagcagcttgtcgatactgttttttgatgagaacaaaaacgtagtgctcaaggtctatcccaatatgacggttgaaagttgtgcctgtaggtag

SEQ ID NO: 109862 - DNA, 213 bp, synthetic construct
  misc_feature 1..213: note = Description of Artificial Sequence: Synthetic coding sequence
  source 1..213: mol_type = other DNA
tgcttcttttactatctgaaaagcctaaagccatcgaatcatgccaccattcagtctatagtccgagcggtcggggtggtcccaggcataccagaaccttgttgtgtcccagagaaaatgagctccctgagcatactattctttgatgagaataagaacgtggttctgaaagtctaccctaatatgacagtggagtcttgcgcttgtcggtag

SEQ ID NO: 109863 - DNA, 1227 bp, synthetic construct
  misc_feature 1..1227: note = Description of Artificial Sequence: Synthetic coding sequence
  source 1..1227: mol_type = other DNA
atgattcccggtaaccggatgctgatggtggtgctgctgtgtcaggtcctccttggaggggcatctcacgcgtcccttattccagagaccgggaaaaagaaggtggccgagatccaggggcatgcagggggccggaggtccggacagtctcatgagctgctaagggactttgaggcgaccctgctccaaatgtttggcttgcgacggcgcccccagccctccaagagcgctgtaatacccgactatatgcgggacctctaccggttgcaatccggtgaggaagaggaagagcagatacatagcacaggactggaataccccgaacgacccgctagtcgcgcaaatacagttaggagcttccatcatgaggagcacctggagaacatccctggtacaagtgagaattcagcctttcggttcctattcaatttgtccagtattcctgaaaacgaagtcatttcgtccgccgaattaaggctgttcagagagcaagtggatcagggacctgactgggagcggggcttccatagaataaatatctatgaggttatgaagcccccagctgaggtcgtgccagggcacctcataacacgcctcttggacacccggttggtgcatcacaatgtgacccgctgggaaacttttgatgtgtcccccgccgtgcttcgatggacacgggagaaacaacctaactacggcctggcaatagaggtgacacacctgcaccaaacgagaacgcaccagggccagcacgtgaggatatctcggtcccttccacagggctcaggaaactgggcccagcttcgccccctattggtgacattcggtcatgacggccgcggccatgcattgaccaggcgtcgcagggctaagagatcgcctaagcatcactcacagcgcgcacgtaagaagaacaaaaactgtcgcaggcactccctctatgtggatttcagcgatgtaggttggaacgactggatcgtggccccgcccggataccaggctttctactgccacggagattgcccattcccactagctgatcaccttaatagcaccaaccatgcaatagtgcagactctggtgaattctgtgaactcttccatcccaaaagcttgctgtgtgccgaccgagctctcagccatttccatgctatatctggatgagtatgacaaggttgtgttgaagaattaccaggaaatggtggtggaaggctgtgggtgtaggtag

SEQ ID NO: 109864 - DNA, 1227 bp, synthetic construct
  misc_feature 1..1227: note = Description of Artificial Sequence: Synthetic coding sequence
  source 1..1227: mol_type = other DNA
atgatccccggtaaccgtatgttgatggtggtattgctgtgccaagtcctcctgggcggcgcaagtcatgcctctctgatcccagagacaggcaagaagaaggtcgcggagattcagggtcatgctggggggagacggtctggccaatcacatgaactcctgagggacttcgaggcaactttactgcagatgttcgggctgcggcgccgtcctcagcccagcaagagtgcagtcattcccgactacatgagggacctttacagactgcaaagcggtgaggaggaagaagaacaaatccactctaccggtctcgagtatcccgagaggccagcttctagggcaaataccgtgcgttcgttccaccacgaggaacacttagaaaacattcctgggaccagcgaaaattctgcatttcggttcctgttcaatctctctagcatacctgagaacgaagtcatctcaagcgccgagcttaggctgtttagggaacaggtcgatcagggtcccgattgggagcggggatttcacaggattaatatctatgaggtaatgaaacccccagccgaggtagtccctggccacctgattacgcggctgctggacacccgattggtccaccacaacgtgacacgatgggaaacttttgacgtctcgcctgccgtgttacgctggacgcgagaaaaacagccgaactatgggttggccatagaagttacgcatcttcaccagacacgaacacaccagggtcaacatgtccgaattagtcggagtctgccgcaaggctctggcaattgggcccagttgaggcctttacttgtgacttttggacatgacgggaggggacatgcgttgaccaggaggcggcgcgcaaaacggagccccaaacatcactcccagcgggcacggaaaaagaacaaaaactgccggaggcatagtttgtatgtcgacttttcagacgtggggtggaatgactggatcgtggcaccccccggctatcaggcattctattgtcatggtgactgccctttccccttagccgatcatctgaactccactaatcacgcgatcgttcagactttggtgaattcagtcaattcttccatcccgaaagcctgttgcgtccccactgaactgtctgccataagcatgttgtacctggatgagtatgataaagtcgtcctcaagaactaccaggagatggtggtcgagggatgcgggtgcagatag

SEQ ID NO: 109865 - DNA, 1227 bp, synthetic construct
  misc_feature 1..1227: note = Description of Artificial Sequence: Synthetic coding sequence
  source 1..1227: mol_type = other DNA
atgatcccagggaaccgtatgctgatggtggtcctcctgtgccaggtcctcctgggaggcgcctctcatgccagccttatccctgagacgggaaaaaagaaggttgcggagatacaaggacatgccggtggcagaaggagcgggcagagccacgagttgctgcgcgacttcgaagctacccttctgcaaatgtttggactgaggcggagacctcagccaagcaagtccgctgttatccctgactatatgagagacttgtaccgcctgcagtcgggagaggaggaagaggaacaaattcactcaacagggctagagtatcctgagcggcccgcatcgagagcgaacacagttcgaagtttccaccacgaagagcatctcgagaacattcctggcactagtgagaacagcgcatttcgcttcctctttaatttatcttccatcccggagaacgaagtcatcagctctgctgagctgaggctcttccgggaacaggtagatcaggggcctgactgggagaggggttttcataggataaatatttacgaagttatgaaaccacccgcggaagtcgtgccaggacatctgatcacaagactgcttgacacaagactggtgcatcacaacgttaccagatgggaaaccttcgatgtatcaccggctgttctcagatggacccgcgaaaaacagcctaattacggcttagctattgaggtgacacacttacatcagacccggacccatcagggccagcatgtacgcatttctcgcagcctcccccaggggagcgggaactgggcgcagctgcgcccgctgcttgtgacatttggtcatgatggccgaggacacgcccttactcgaaggaggagagctaaacggtctccgaagcaccacagccaacgtgctagaaagaagaataagaattgcaggcgccattctctgtacgtggacttttctgatgtggggtggaacgattggattgtagccccacctggataccaagccttctactgccacggagattgccccttccctcttgctgatcacttgaactctactaaccacgctatcgtgcagactttggtcaatagcgttaattcttcgatcccaaaagcgtgttgcgtcccgactgagctgtctgcaataagtatgctgtaccttgacgaatacgataaggtcgtgttgaagaattatcaggagatggtcgtggaaggatgcgggtgccgttag

SEQ ID NO: 109866 - DNA, 1227 bp, synthetic construct
  misc_feature 1..1227: note = Description of Artificial Sequence: Synthetic coding sequence
  source 1..1227: mol_type = other DNA
atgatccctgggaaccggatgctcatggtggtgctgctctgccaggtcctcctgggcggcgcctctcatgcatctctgatccccgaaaccggaaaaaaaaaggtcgccgaaatccaaggacatgccggcggccgccggagcgggcaaagtcatgaactgttacgggattttgaggctacactgctgcagatgtttgggctcagaaggagaccacagccatctaagtcagccgtgattcccgactacatgagagacctgtaccgattgcagagcggagaagaggaagaggagcagatccattctaccggcttggaatacccggaaaggcccgcgagcagggccaatacagtgaggtctttccatcacgaggaacacctcgagaatatcccagggacgtcggagaacagcgcttttcgttttctgttcaacctctccagcatacccgagaacgaggtgatcagctcagccgagctacggctgtttcgagagcaagtggaccagggacctgactgggaaagagggtttcaccgcattaatatctatgaggtgatgaaacctcccgctgaggtggtgcctggccacctgattacccggcttttggatacgcgcctggtccaccacaatgtcactcggtgggaaacctttgacgtttctccagctgtcttaagatggacacgggaaaaacagcccaattatggtctggccatagaggtcactcatcttcaccaaactcggacacaccagggccaacatgttcgcatctcgcggtctttgcctcaaggcagcggtaattgggcccagctccgtccactgctggtcacatttggacacgacggaaggggccatgccttgacccggaggaggcgcgccaagcgtagccccaaacaccatagtcaaagagccagaaagaagaataagaactgccgccgacatagcctctacgtcgacttctcagacgtcggctggaatgattggatagtcgccccgccagggtatcaagccttctactgccatggcgactgcccctttcctttggccgaccacctgaacagtacaaatcacgccattgttcagacattggtgaacagcgttaactccagcattccaaaggcctgttgcgtgcctacagagctgtcggccatttccatgctgtacctggatgagtacgacaaagtcgtcctgaaaaactaccaggagatggtggtggaaggatgtggctgtagatag

SEQ ID NO: 109867 - DNA, 333 bp, synthetic construct
  misc_feature 1..333: note = Description of Artificial Sequence: Synthetic coding sequence
  source 1..333: mol_type = other DNA
atgattccaggtaatcgaatgctgatggtggtgctgctgtgccaggtcttactgggaggagccagccacgcctctctgattccagagacggggaagaaaaaagtagctgagatacagggacatgctggggggaggcgtagcggacagagtcacgagctgctccgggactttgaagccacactgttacagatgtttggattacggcgcaggccgcagccatctaaaagtgccgtaatcccagactatatgagggatctgtataggttgcagagtggcgaggaggaggaagaacaaatccattcgacaggtctcgagtatcccgagaggccctag

SEQ ID NO: 109868 - DNA, 1365 bp, synthetic construct
  misc_feature 1..1365: note = Description of Artificial Sequence: Synthetic coding sequence
  source 1..1365: mol_type = other DNA
atgcacctgaccgtatttctgctcaaaggaattgtaggattcttatggagctgctgggtcctcgtcggctacgccaagggggggctgggcgataatcacgtgcattcttcatttatctaccggagactccgcaaccatgagcggcgcgagatccagcgtgaaatcctgagcatcctaggcttaccacatcggccccggcccttctctccgggaaaacaggcctcatccgcgcctctgtttatgttggatctatataatgccatgacaaatgaagaaaaccccgaggaaagcgagtatagcgtaagagctagtcttgccgaggaaacaagaggcgcccgcaaaggctacccagcatctcctaacggctacccgcgaagaattcaattatcccggacaactcccctgacgacacagagtccccccctggccagtctgcatgataccaactttctcaacgacgcagatatggttatgagttttgttaatctcgtggagcgtgataaagacttctcccatcaacggcgacactacaaggagttccgcttcgatctgacgcagattccgcacggcgaggccgtgacggcagctgagttccgtatctataaagaccgatccaataaccgatttgagaacgagactataaagattagtatttatcagataatcaaggaatacacgaatcgcgacgctgatcttttcttgttggacacacgcaaggcccaggccctggatgttggttggctggttttcgacatcaccgttacgtccaaccattgggtgattaacccacagaacaacctgggccttcagctatgcgccgagaccggcgacgggcgcagcataaacgtcaagagtgccggcctggtcggacgacaggggccccagagcaagcagcctttcatggtcgcctttttcaaagctagtgaggtccttttacgttcagttcgagctgctaataaaaggaagaatcagaaccgcaacaagagctcttcccaccaggacagcagcagaatgtcctctgtcggcgactacaacacatctgagcagaagcaggcatgcaaaaagcatgaactttacgtctccttccgcgacctggggtggcaggattggataatcgcccccgaaggatatgcagctttttactgcgacggtgaatgctcattccccctgaacgctcacatgaatgccaccaatcacgccatcgtgcagactctggttcatctgatgttccccgatcacgtcccaaagccctgttgcgctccaacaaagttgaacgctatcagtgtattgtacttcgacgactcttcaaatgtgattctgaagaaatacagaaatatggtagttaggtcctgtggctgccattag

SEQ ID NO: 109869 - DNA, 1254 bp, synthetic construct
  misc_feature 1..1254: note = Description of Artificial Sequence: Synthetic coding sequence
  source 1..1254: mol_type = other DNA
atgcacctgacggtgtttctccttaagggtattgtgggcttcctctggtcctgctgggtccttgtcggctacgccaaaggcggcctgggagacaaccacgtgcatagttcctttatttaccgacgattgcggaaccacgagcggcgagagatccagcgagaaatcttgtctatcctgggattgccacatcgcccaaggcccttctctcctggtaaacaggcgtcaagcgccccactgttcatgctggacctatataacgccatgacaaacgaagaaaacccggaggagtcagagtactctgtgcgcgccagcttagccgaagaaactcgcggagcgaggaaaggatacccagcatccccaaatggctacccaaggcgaattcagttgtcccggacaacgccacttactacccagtcccccccattggctagcttgcatgacaccaacttcctcaacgatgccgatatggtgatgtccttcgtcaacctggtcgaacgggacaaagacttttcccatcagagacggcattacaaggagttcaggtttgatctgactcagattccacacggggaagcagtgacagccgctgaattcagaatctacaaagacaggtccaacaacagatttgaaaatgaaaccataaagatttccatataccagatcatcaaggagtacactaatagggatgccgatctgtttctgctagacaccagaaaagcgcaagcccttgatgtggggtggctggtttttgatattactgtcacctctaaccactgggtaatcaacccccagaacaacctggggctgcagttgtgcgcagaaactggagatggccggtccattaatgttaagtcagctggactggttggacggcagggacctcaatcaaaacagccattcatggtcgcattctttaaagcttccgaggtactcctaaggagcgtgagagccgctaacaagcgcaaaaaccagaataggaacaagtcctcctcccaccaggactcctctcgtatgagttcagtgggcgactacaacacgtctgagcaaaagcaagcatgcaaaaaacacgagttatatgtcagttttcgtgacctgggctggcaggtgcacctgatgtttccagaccacgtacctaaaccctgttgcgctccaaccaagttgaatgccatcagcgttctctattttgatgactcatctaatgttatattgaaaaagtatcgtaatatggtcgttagatcctgtggttgccactag

SEQ ID NO: 109870 - DNA, 1542 bp, synthetic construct
  misc_feature 1..1542: note = Description of Artificial Sequence: Synthetic coding sequence
  source 1..1542: mol_type = other DNA
atgccagggctgggacggcgcgcccagtggctgtgctggtggtgggggctcctctgctcctgctgcggaccacccccccttcgtccacctttacctgccgccgccgccgccgccgctggagggcagttacttggtgacggcggcagccccggcaggaccgagcagccccccccatctccacagtcttctagcggtttcctctatcgccgactgaaaacccaggagaagcgcgaaatgcagaaagaaatcctctccgtgcttgggttgccccaccgaccacgccccctccacgggctgcagcaaccccagcctccagcactccggcagcaagaggagcagcaacagcagcagcagctgccgaggggcgagcccccaccagggaggctgaagagtgcaccactgttcatgctggatctatacaatgctctgagcgctgataacgacgaggacggggcctcagagggggagcgccagcagagctggccacatgaagctgcctctagctcgcagcgtaggcagccccctcctggcgccgcccatcccctcaacagaaagtccttgctcgctccaggatcaggttccggcggagcttctccactgacaagcgcccaggattccgccttcctgaacgacgcagacatggtgatgtcatttgtgaatttggtggaatatgacaaggaattcagtccgcggcagaggcatcataaggagtttaaattcaaccttagccagatcccagagggtgaggtggttactgctgcggagtttagaatttacaaggattgcgtgatgggttccttcaaaaaccagactttcttaatctctatctatcaagtcctgcaggagcatcaacatagagactcggatctattcttgcttgacaccagggttgtctgggccagcgaagaaggatggctggagttcgacatcaccgctacctctaacctgtgggtggtcactccccagcataacatgggcttgcagctgtctgtagtcactagagacggggtccacgttcacccaagagcagccggccttgtgggccgagatgggccgtacgataaacagcccttcatggtggccttcttcaaggtctcagaggtgcacgtcaggactacaagatcggcatcatctcggaggcgccaacagagtcggaatcgtagcacccagtcacaggatgttgcaagggtgagtagtgcaagcgactacaacagctccgaactcaaaacagcatgcaggaaacacgagttatatgttagttttcaggacctaggctggcaggattggatcattgcccccaagggttatgccgcaaactactgtgatggggaatgttccttccctctgaatgctcacatgaatgctacaaatcatgccatagtgcagacattggtccacctcatgaatccagagtacgttccaaaaccctgctgcgcacccacaaagttaaacgccatctcagtgctctactttgacgacaattcaaacgtgattctcaagaagtacaggaatatggtggtgcgtgcttgcgggtgccactag

SEQ ID NO: 109871 - DNA, 1308 bp, synthetic construct
  misc_feature 1..1308: note = Description of Artificial Sequence: Synthetic coding sequence
  source 1..1308: mol_type = other DNA
atgcaaaaagagatcctcagcgtgttaggcctcccgcataggccacgaccgctgcatggtctgcagcaaccacagcccccggccctacgccagcaggaggagcagcagcagcagcagcaactcccgagaggcgaaccccccccaggcaggctcaagtccgctccactcttcatgttggatctgtacaatgccctatctgctgacaatgacgaggatggcgccagcgagggcgagaggcagcaatcgtggccccacgaggctgcctcatcttcccagcgaaggcagcccccacccggagccgctcaccctctgaacaggaaatctttgctggcgcccgggtctggatctgggggggcctccccattaaccagcgcgcaggacagcgcgttcttgaatgacgctgatatggtcatgagtttcgtcaacctagtggagtacgacaaagagttttctcctaggcagcgccaccacaaagagttcaaatttaatctctctcagatcccagaaggggaagtggtgaccgcagctgagtttcggatctataaagattgtgtcatgggctccttcaaaaatcaaacgttcttgataagcatctatcaagtcctgcaagagcatcagcatcgtgattctgatctctttctgttagacacccgggtcgtctgggcctcagaggagggctggttggaattcgacatcacagcgacatccaacctctgggtggtcaccccccagcacaatatgggacttcagctttctgtggttacaagagatggggtgcatgtccacccacgggctgccggcctggtaggtagggacggcccctacgataaacaaccctttatggttgctttcttcaaggtatctgaggtacatgtgcgaacgacgcgttctgcttccagcagacgaagacagcagagcagaaatcgaagtactcagtcacaagacgtagcacgggtgagctcggcctcggattataacagttcagagctgaaaaccgcctgtcggaagcacgagctttacgtttcattccaggatctgggctggcaggactggatcattgctccgaaggggtatgctgccaactattgcgatggagagtgttcatttccactcaatgcacacatgaacgcaaccaaccacgccatcgtacagaccctcgttcacctgatgaatccagaatacgtgcccaaaccatgttgcgcccccaccaaactgaacgccattagtgtcctgtatttcgacgataacagtaacgtgattctgaagaagtaccggaatatggtggttagagcctgtggttgccactag

SEQ ID NO: 109872 - DNA, 1431 bp, synthetic construct
  misc_feature 1..1431: note = Description of Artificial Sequence: Synthetic coding sequence
  source 1..1431: mol_type = other DNA
gccgccgggggccagctgctgggtgatggtgggtctcccggaaggacagagcagcctcccccgtccccccagtcaagtagtggttttctgtatagacggcttaaaacacaagagaagagagagatgcagaaagaaattttgtcagtgctgggattgccacaccgcccacgccccctccacggattgcagcagccccagccaccggcactgcgccagcaagaagagcaacagcaacagcagcagctcccacgaggcgagccaccccctgggagactgaagtccgccccgctattcatgctcgacctgtacaatgcactgtctgccgataacgacgaagatggtgcctcagagggggagagacaacagtcgtggccccatgaagctgccagctcaagccagcgccggcaacctcctccaggcgcagctcatcccctgaatcgcaagtctctgctggcaccagggtccgggtcgggcggggctagcccgctgacttccgcccaagacagcgccttccttaatgatgccgacatggtcatgtcattcgtgaacctggtcgaatatgacaaggaattcagtcctaggcagaggcaccacaaagagttcaaatttaatctatcacaaatccctgaaggggaggtggtgacagccgccgagttccgtatttataaggattgcgtgatgggtagcttcaagaaccagacatttttgattagtatataccaggtcctgcaagagcatcagcatagggactccgacctctttcttctcgataccagggtggtgtgggcctcagaggaaggatggctagagttcgacataaccgccacaagtaatttgtgggtcgtcacaccacagcataacatgggccttcaactgtctgtagttactcgagacggcgtgcatgtccatccccgtgccgctggtctcgtgggccgcgacggcccttatgataagcagcccttcatggttgctttttttaaggtctcagaggtgcacgtccggactactcgctctgcttccagtcggcgcaggcaacaatctaggaatcgctctacacagtcgcaggacgtggcacgagttagctctgcctccgactataatagttcagagctcaaaacagcatgcagaaagcacgagctgtatgtgagtttccaggacttgggatggcaggactggatcattgcccccaagggctatgccgccaattattgtgatggcgaatgttcctttccgttaaatgctcacatgaatgcaacaaaccacgcgatcgttcagaccctggtacatcttatgaaccccgagtacgtgcctaagccatgctgcgcacctacaaaactgaatgcgatttcagtactttatttcgatgataattctaatgtgatattgaagaagtaccggaacatggttgttagggcttgtgggtgtcattag

SEQ ID NO: 109873 - DNA, 2505 bp, synthetic construct
  misc_feature 1..2505: note = Description of Artificial Sequence: Synthetic coding sequence
  source 1..2505: mol_type = other DNA
atggaggagaaaacccaaatcaagacgtttctgggctccaaactgcccaagtacggcacaaagtcagttcgctccactttgcagccgatgccaaatggtacgccggtgaatctactcggtacctctaagaatagcaatgtgaagagctacatcaagaacaacggctctgattgtccaagcagccactccttcaactggcgtaaagctaacaagtaccaactgtgtgctcagggtgtggaggagccaaataatactcagaatagccacgataaaataatcgatcctgaaaagcgggtacccacccagggaatgttcgacaaaaacgggattaaggggggccttaagtccgtgtctttatttacttccaagctcgcgaaaccatcaacaatgttcgtatcgtcgaccgaagagcttaaccagaagtctttttcaggcccaagcaacctgggcaagttcacgaagggtactctgctgggtcgtacatcttactcctcaatcaacacacctaagagccagctgaatggcttttacggcaatagatcggccgggtcaatgcaaagacctcgggccaatagctgcgctacacgcagctccagtggagagagccttgcccaaagtccggactcctctaagtctatcaattgtgaaaaaatggtccggagccaaagtttttctcattccattcagaattcattcctccctcctagtagcatcactagatcacacagctttaacagggccgtcgatctaactaagccttatcagaaccagcagctgagcatccgggtgcctttacgcagctctatgcttactcgaaatagccggcaacctgaggtgctaaatggcaatgaacaccttggttatggcttcaataggccatacgcggcagggggcaagaaacttgcacttcctaatgggcccggggtaacaagtactctcggttaccggatggtccacccctccctgctgaaatctagcagatcccccttctccggaacaatgacagtggatggcaataagaacagccctgctgacacttgcgtggaggaggacgctactgtgttggcaaaggaccgcgctgccaacaaggaccaggaacttatcgaaaatgagtcctaccggacgaaaaacaaccaaactatgaagcatgacgcgaagatgcgttacctttccgacgatgtggatgatatttctttatcatcattgagctcatcagacaagaatgacttatcagaggatttctcagatgactttatcgatatcgaggattcgaataggacacggatcacacctgaagaaatgagcctcaaggaagagaagcacgaaaacgggcccccccaggatatgtttgattcaccaaaagagaatgagaaggccttctcaaaaaccgatgaatggattgacatcagcgtttcggacagaagcgagtgcactaagcatacctctggaaacaatcttgtttcccctgacaccgattaccgtgctggttcttccttcgaattgagcccttcagattcttcagatgggacatacatgtgggatgaggaaggcctggagcctatcgggaatgttcacccagtgggcagttacgaatccagtgagatgaattccatagacatactaaataatctcgaaagttgtgacctcgaagatgatgacctcatgctagacgtggacctgccggaggatgcaccattagagaatgtggagtgtgataacatgaaccgatttgaccgcccggacaggaacgttcgccagccccaagagggcttttggaagaggccacctcaacggtggtcgggtcaggagcactaccacctgtctcatcctgatcactatcaccaccatggcaagtcagacctctcccgcggaagtccttatcgagaatcacccctcggtcactttgagagctatggcggaatgccattctttcaggctcagaagatgttcgtcgatgtgcccgagaatactgtcattctggacgagatgactttgcgacacatggtgcaggactgtaccgccgtcaagacccagctgctgaaactgaagagactgctccaccagcatgacggctccggctccctgcacgatattcagcttagcctgccgagctcccccgagcccgaagatggcgataaagtctataagaatgaggacctgctgaacgagattaagcagctgaaggacgagatcaaaaagaaggatgaaaaaattcagctcctagaactccaactggccacacagcacatctgtcaccagaaatgtaaagaggaaaagtgtacatatgccgacaaatatacacagacaccctggcgcagaatccctggcgggtactctgcccccagcttctctccctggcaaggtagttttcaggggatcccccgcaccgtgccgccccatcgaaggcagacttcctctacaaccgcatttcagcagccttcccagacacaccgctcacacccaggaaaaacaaataaagcaacgacgtatcggggtcctcaatag

SEQ ID NO: 109874 - DNA, 1599 bp, synthetic construct
  misc_feature 1..1599: note = Description of Artificial Sequence: Synthetic coding sequence
  source 1..1599: mol_type = other DNA
atgcctcagctgtatatttacatccgcctactgggtgcataccttttcatcatttcaagggtgcagggtcagaatctggatagtatgcttcacggtacagggatgaagagcgattccgaccagaagaagtccgagaatggcgtgaccctcgccccggaagataccttgccatttctaaagtgctattgttctggccattgcccggatgacgccatcaataacacatgcattaccaacggccactgcttcgccattattgaggaggatgaccagggtgagaccaccctggcatcggggtgtatgaaatatgaaggaagtgattttcaatgcaaagactcccccaaagcccagctgcgtcggacgattgagtgctgcagaacaaacctctgtaaccaatatctgcaaccaactctgccccctgtggtaatcggccccttcttcgatggttctataagatggttagttttgctcatttccatggcagtgtgtattatagctatgattatttttagttcctgcttctgctacaagcactattgtaagtctatctcttcgcgacgacggtacaatagagatctggagcaggatgaagcgtttatcccggtgggagaatctctgaaggatcttatcgaccagagtcagagcagtgggagcggttccggcctgcccctgctggtgcagcggactattgcaaaacaaattcagatggtaagacaagtgggcaaaggccgctatggggaagtgtggatgggcaagtggaggggggagaaggttgccgtgaaagttttttttacaactgaggaagcctcctggtttagggagactgagatctaccagaccgtgctgatgcgtcacgaaaacattttagggttcattgctgccgatatcaaaggaaccggaagttggacccagctgtacctcatcacagactaccatgagaatggatcactgtatgacttcttgaagtgcgccaccctcgacactagagccttattgaaactggcgtacagcgctgcctgcggattgtgccacctgcatactgaaatatatggcacacagggaaaacctgcgattgcccatcgcgacctgaagtccaaaaatattctgattaaaaaaaacggcagctgctgtattgctgatctagggctagccgtcaaattcaattctgataccaatgaggttgacgtgcctctgaacacaagagttgggaccaagcggtatatggccccagaagtcttggacgagagtctgaacaagaaccattttcagccgtacattatggctgatatttactccttcggactgattatttgggagatggctcgacggtgtattactgggggcatcgtcgaagagtaccagctcccctactacaacatggttccatcggacccctcttacgaggatatgcgcgaggtggtgtgcgtcaagaggctgagacccatcgtgtcgaatcggtggaactccgatgaatgcctccgcgctgttctgaagcttatgagtgagtgctgggcacacaatccagcatcacggctgactgccctgcggattaagaagaccctcgccaaaatggttgagagccaggacgtgaagatctag

SEQ ID NO: 109875 - DNA, 3117 bp, synthetic construct
  misc_feature 1..3117: note = Description of Artificial Sequence: Synthetic coding sequence
  source 1..3117: mol_type = other DNA
atgaccagtagcttgcagcgaccctggagagtcccctggctgccatggacgattcttctcgtcagtacagccgctgcctcccagaatcaagaaagactgtgcgcattcaaggacccgtaccagcaagatcttgggataggggagtcaagaatcagccacgagaatggaactattctctgttcaaaaggttccacctgttatggtttgtgggaaaaaagcaaaggcgatattaatttggtgaagcaaggatgctggtcccacatcggagatccacaggaatgccactacgaagagtgtgtggtgaccacaacaccgccctcaattcagaatgggacttacagattctgttgctgttccaccgatttgtgtaacgtaaatttcaccgagaacttcccccccccagatacgacacccttgagccctcctcacagtttcaacagagatgagactatcatcattgctctggcttcagtcagtgtccttgcagtgttaattgtcgcactgtgcttcgggtataggatgctgactggggaccggaaacaggggttacattccatgaatatgatggaagcagcggccagcgaaccttctctcgacctcgacaatttaaagcttcttgagcttattggccgcggtaggtacggagccgtctacaagggctccctcgacgagaggcctgtcgccgtcaaagtgttcagtttcgcaaacaggcagaacttcatcaatgagaagaacatatatcgagtgcctctaatggagcatgataatattgcacggttcatcgtgggtgatgaacgggtcaccgcagacggcagaatggaatatctcctggtcatggagtactatccgaacggatccctgtgtaaatacctgtctctacacacatccgactgggtaagtagttgtcgcctggctcactctgtgactcgaggcctggcctacttgcatacggagctccctcggggcgaccattacaagcctgctatttcacacagagacctgaactcccgcaacgtcctggtgaaaaatgatggcacttgcgtcatatcggacttcggattgagcatgcgcctaaccgggaaccgtctggtgcgcccgggagaagaggacaatgcagcgatctcagaggttggaactatacggtatatggccccagaagtgctcgagggagctgtcaacctgcgcgattgcgaatccgccctgaagcaggtggacatgtacgccctgggtcttatctactgggaaattttcatgaggtgcacagacctcttccccggggagtccgtgcccgagtatcaaatggcttttcaaacagaggtcgggaaccaccctacatttgaggacatgcaggttctagtctcccgagagaagcagagacccaaatttcccgaggcatggaaggagaacagcctcgcagtcaggtctcttaaagaaaccatcgaggactgctgggatcaagatgctgaagcccgcctgacagcccagtgtgccgaggagcggatggccgagctaatgatgatatgggagcggaacaagtcagtttctccgaccgttaaccctatgagcacggctatgcagaacgagcggaacctgagccacaatagaagggtgccaaaaatcggaccgtatcctgattactcctccagctcatacatcgaagacagtattcaccacactgactccattgtgaagaatatcagcagtgaacactccatgtcatctacccctttgaccataggcgaaaagaaccggaactctatcaactacgagcgccagcaggcacaggcccgcattccatcccccgagacatccgtgacgagcttgagtacaaatacgacaacaactaacacaactggcctgactcccagcacaggaatgacaactatctcagagatgccctaccccgacgagaccaacctgcatactacaaacgtcgctcagagcattgggcccactcctgtgtgtctccaactgaccgaagaggatctggagaccaataaactggacccaaaggaggtggataagaatctgaaggagtcctccgacgaaaacctgatggagcattcactcaaacagttttctggccccgaccccctgtctagtacctcctctagcctgttataccccctgatcaagttagctgtggaagcaacagggcagcaggacttcactcagacggctaatggccaggcttgtctgatccctgatgtgcttcccacccagatttatcctcttccaaagcagcagaacctacccaaacgcccaacctcattgccgctcaatacaaagaacagcacgaaggagccgagacttaaatttggatccaaacataagagtaacctaaagcaggtggagacaggagtggccaagatgaacaccataaatgcagcagagccccacgtcgtcacagtgaccatgaatggggtggccggcaggaaccacagcgttaactcacacgcggccacgacccaatacgctaacggcacagtcctgtctggacagaccactaatatagtgacacatagggcccaagaaatgctccagaatcagttcatcggagaagacacacgcctaaacattaacagctcgcctgacgagcacgagccccttctccgtagggaacaacaagcaggccacgacgaaggggtgctggaccgcttggtggatcggagagaacgtccactggaaggagggcggactaattcaaataataataactccaatccatgcagcgagcaggatgtactcgcccagggagtgccatccaccgctgctgacccaggcccatcgaaacctcgaagggctcagagacctaattcgcttgatctgtccgccaccaacgtcttggatggttcaagcattcaaattggcgaatctacgcaagacggaaaaagcggaagtggtgagaagattaagaagcgagttaagactccatactcccttaaacgatggcgacccagtacctgggtgatctccactgagtctttagactgtgaggtgaataacaacggctctaatagagctgttcatagtaaatctagtactgcggtctacctcgctgaaggcgggacagcgaccactatggtttctaaagatattgggatgaactgcctgtag

SEQ ID NO: 109876 - DNA, 2337 bp, synthetic construct
  misc_feature 1..2337: note = Description of Artificial Sequence: Synthetic coding sequence
  source 1..2337: mol_type = other DNA
atgtcctccggagcaaaagagggaggaggaggctcaccagcgtatcatctgccccacccccacccacatcctccacagcatgcccagtatgtgggcccatatcgcctggagaaaactctcggaaaaggccagactgggctcgtaaagctcggcgtacactgcattactggccagaaggtcgcaatcaaaattgtaaatcgagagaagctttctgagtctgtgttgatgaaggtcgagagagagatagcaatcttaaagctgatcgaacacccacacgttttaaaactccatgacgtgtatgagaacaagaagtatctctaccttgtgctagagcatgtatcaggaggtgagttatttgattacctggtgaagaaagggagactgacaccgaaggaggccaggaaatttttccggcagattgtgtccgcactcgatttctgccactcatatagcatctgccaccgcgacctgaagcctgagaacctgctgctagacgagaaaaacaatatcagaatcgctgatttcggaatggcctcactgcaggtgggcgacagcctcttggagactagctgtggatctcctcactatgcctgtcccgaagtcattaagggcgaaaaatacgatggtaggagagcagacatgtggtcctgtggcgtgatcctcttcgcactgctggtgggggcattacctttcgacgacgacaatttacgccagctgcttgagaaagtgaagagaggagtgtttcacatgccacatttcatcccgcccgactgccagagcctgttacgcggaatgattgaggtggaaccagagaagcggctgtctcttgaacagattcagaaacatccctggtacctagggggaaagcatgagcctgatccctgtctcgagccagcccctggacggagagtggcgatgcgttcgttaccatccaacggtgagctcgaccccgacgtgctagagtctatggctagtctcggatgcttccgagacagggagaggctccaccgtgaattgcgctctgaagaagagaaccaggaaaaaatgatatattatctgctgttagataggaaagagagatatccatcatgtgaagaccaggatctgccccccagaaacgatgtcgacccgccgaggaaacgggttgacagccccatgctaagcaggcacggcaaaagacgtcccgagcggaagtccatggaggtcctatcaataactgacgccggcgggggagggagccccgtccccactcggcgtgccttggagatggcccagcactcgcagcggagcaggagcgttagtggcgcgtcaaccgggctctcctcaagccccctttccagtcctcgctcacctgtcttctctttcagccccgaaccaggtgctggcgatgaagcaaggggcgggggctctccgactagcaagactcagaccttgccttccagagggccaagaggcggaggtgctggagagcagcctcctcctccttctgcccggagcacccccctgccaggacccccaggaagcccacggtcatctggtggaaccccccttcatagtccgcttcacaccccccgtgcgtctcccacgggcacgcctggaacaacacctcctccctcaccggggggaggggtggggggggccgcttggaggagtcggctcaactctatacgaaattcttttctagggagccctcggtttcatcgtcggaagatgcaggtccccacagcggaagagatgagtagtctgacgcccgagtccagcccagaactcgcaaagaggagctggttcggtaattttatatcgctggataaagaagagcagatcttcctcgtattaaaggataagccactttcctccatcaaggccgacatcgtgcatgcatttttgtccatcccctcactgagccactcagtcctgagtcagacatcgtttagagcggaatacaaggcctccggtggccccagcgtgtttcagaaacctgttagattccaggtagacatatcatcttctgaaggtcctgagccgtcaccccggagagacggctccggtggtggggggatttacagtgttacattcactttgatatctggcccaagccggcggttcaaacgggtcgttgagaccatccaggcacagttactgtctacgcacgatcagccctccgtccaggccctggctgatgaaaagaacggagctcagactaggcccgccggggcaccccccagatcgctgcaaccaccgcccggtaggccagatccagaactctcctcctcgcctcgccgcggtcctcctaaggataaaaaactgctcgcaacaaacggcacccccctcccctag

SEQ ID NO: 109877 - DNA, 1422 bp, synthetic construct
  misc_feature 1..1422: note = Description of Artificial Sequence: Synthetic coding sequence
  source 1..1422: mol_type = other DNA
atgcgctccctgccctcaaatggtgaactggatcccgatgtgctagagagcatggcttcccttgggtgttttagggacagagagagactgcaccgcgaattacggtcggaggaagaaaatcaagagaagatgatctactaccttttgctcgatcgcaaggagaggtacccatcttgcgaagaccaagacctccccccaagaaatgacgttgaccctcctagaaagagggtagattcgcccatgctcagtaggcacggaaagcgacgccctgagaggaaaagtatggaagtactgtcaatcaccgatgccggcgggggcggcagtcccgtgcctacgaggagagcactggagatggcacaacactcacagagatcgcgcagtgtcagtggcgcctccacagggctaagctcctctcctttgtcttcccccaggtcccctgttttctcattcagcccagagcctggtgctggggatgaggcgcgcggtggtgggtctcccacatcgaaaacacagaccctgcctagtcggggaccgagggggggaggggccggtgagcagccgcctcctccttcagcgcggagcactcccttacccggacctccagggagccctagaagcagcggtggaacccccctgcactcgccgctgcacactccacgtgcctcccctacagggactccaggaacaaccccacccccgagccccggggggggggtcggcggcgctgcatggcgaagccggctgaactcgatcagaaattcgttcctcgggtcccccaggttccacagacgaaaaatgcaggtaccgacagcagaagagatgagctctttgacccctgaaagcagcccagaactggccaagcgaagttggttcgggaacttcatatctctggataaagaagagcagatctttctggtgctgaaggataagcccctgtcttctattaaagccgacattgtccacgccttcttgtccatcccgtctctgtcgcacagtgtgctctctcaaacgtcttttagggctgagtataaagccagcgggggccccagcgtttttcaaaaacccgtgcgattccaagtagatattagcagctccgaagggcccgagccgtcgccaaggcgggatggaagcgggggcggcggcatctactctgtgacctttactctgatatccggcccctcaagacggttcaagcgagttgtggagaccatccaggctcaactcctcagtacccacgatcaaccttccgtgcaggcgctcgctgacgagaagaacggcgcccagacccgcccagcaggggctccccccagatctcttcaacctcctcccggaagacccgatcccgaactcagcagcagccctcgcagagggccccccaaagataagaaactgttggccaccaatggaaccccccttccttag

SEQ ID NO: 109878 - DNA, 1422 bp, synthetic construct
  misc_feature 1..1422: note = Description of Artificial Sequence: Synthetic coding sequence
  source 1..1422: mol_type = other DNA
atgaggtcattaccaagtaacggcgagctggatcccgacgttctggagagcatggcctcactggggtgcttcagagacagagagcggttacaccgggagttgcgtagcgaagaggaaaatcaggaaaaaatgatttattacctcctactggacagaaaggagcgctacccttcgtgtgaggatcaggatcttcctccccgtaatgacgtggacccccccaggaaacgcgtggactctccgatgttgagtaggcacggaaagagacgtcctgaacgaaaatccatggaggtcctgagtatcacagatgccgggggcgggggttcaccagtgccaacaagacgcgccttggaaatggcacagcactctcagcgctccaggtctgtatccggagcttcaaccggcttatctagctccccgctgtcgtccccaagaagtcccgtgtttagtttttcaccggaacccggggccggcgacgaagccaggggcggcgggagtcccacttccaagacgcagactcttccaagccgcggccccaggggtgggggagcaggggagcagccacctccgcctagtgccaggagcacgcctctacccgggccgccagggagtccacggtctagcggagggaccccactgcacagtccattgcatactcctagagcctctcccactggtactccagggactacaccccctccctcacccggaggcggagttggaggcgcagcttggcgttcccgcttgaacagtattaggaatagcttccttgggtcccctcgctttcacagacgaaagatgcaggtgccaacggctgaagaaatgtcgtcccttaccccagaaagttctcctgagttggcaaagaggtcctggttcgggaactttatcagccttgataaggaggaacagatattcctcgtcctgaaggataagccgttatcctccatcaaagccgacatcgttcatgcctttctgtctatcccttctctttcgcactccgtgctgagccagactagctttagagcagagtacaaagcctctggaggaccatcagtatttcaaaaaccagttcgtttccaggttgatatcagtagctctgaagggcccgagccttcaccacggagagacggctctgggggcggaggaatctactccgttacgttcactctgattagcggaccttcgcggcggttcaaaagggttgtcgagaccattcaagcacagctgttgtcaacgcacgaccagccttcagtgcaggctcttgctgacgaaaaaaatggggcacaaactagacccgcaggtgccccaccgcgaagcttgcaacctccccccggaagaccagatccagagctgagctcttcccctcgtcgagggccccctaaggacaagaaactgctggccaccaacggcactccccttccctag

SEQ ID NO: 109879 - DNA, 2976 bp, synthetic construct
  misc_feature 1..2976: note = Description of Artificial Sequence: Synthetic coding sequence
  source 1..2976: mol_type = other DNA
atgcgtcatagagtgtgcagaggtcggtccggtcaaggacggaggagaagctccgtgattccatggcccgtgcctaagcacgtggggtgggtcgtactcctcggctgtggagggagcggtacttccatactggtggtttcaattgttggctctggactgatcaaagctatggctcccgccgagatcctgaatggtaaggaaatctcagctcagatcagagcccggctgaaaaaccaagtgacccaactgaaggagcaggttcccgggtttacgccccgactcgcaatcttgcaggtcggaaatagggacgattccaatctctacatcaatgtgaaactgaaagcggcggaggagataggcatcaaggctactcacattaaacttccacgaacaacaactgagagtgaggtcatgaagtatatcaccagtctcaatgaagactccaccgtgcatggcttcctggttcagctacccctggactcagagaactcaattaatacagaagaggtgatcaatgctatcgccccggaaaaggacgttgacggattgaccagcatcaatgctggcaaattagctcgcggagaccttaacgactgctttatcccctgtacaccaaaaggctgtttggagttgatcaaggaaacaggcgtgcctatcgctgggagacatgctgtagtggtgggtagatccaaaattgtcggggcaccaatgcatgacctgttactgtggaacaatgcaacagtcactacctgccatagcaaaacagcacatctcgacgaggaagtaaataaaggagacattctcgttgtggcgactggacagcctgaaatggtcaaaggagagtggataaaacctggggccatcgttatcgattgtgggatcaactatgtgcctgacgataaaaaacccaatggccggaaggtcgtcggagacgtagcctatgatgaagccaaggaaagggcgtcttttattacccctgttcccggaggcgtgggacctatgactgtggccatgctgatgcagtccacagtggaaagtgcaaaacgctttctggaaaagtttaagcccggcaagtggatgatacagtacaataacctcaacctgaaaacccctgttccgtccgacatcgacatatccaggagctgcaaacccaagcccatcggcaagctggccagggagattggcctgttaagcgaggaagtcgagctgtacggcgagacaaaagcgaaagtgctcctgtccgcccttgagcgcttgaaacatagacctgacggcaaatacgtcgtcgtgacgggaataacccccactccattaggagaggggaagagcacaaccacaatcggcctagtacaagcacttggcgcgcacctatatcagaacgtgtttgcctgcgtgagacagccttctcaaggacccacctttggaatcaaggggggcgccgccggcggaggatatagccaggtgattccaatggaggagttcaatctccatctcacaggtgacatccacgcaataaccgcggccaataacctggttgccgccgccatcgacgccaggatattccacgagctcacccagaccgacaaggcactattcaacagactggtcccaagcgtgaatggggttaggaggttctcagacatccagatcagacggctgaagaggttgggcatcgaaaagacagatcccaccacccttaccgatgaagagatcaatcggttcgcaagactggacatcgatcctgagactattacctggcaaagggtccttgacacaaatgataggtttctgcgtaagattactattggccaagcaccaaccgagaagggccacactagaacagctcaatttgatatcagtgttgccagcgaaatcatggcagtcttagcattgaccacatcacttgaggacatgcgggagaggctgggtaagatggttgtggccagctccaaaaagggggagcctgtgagtgcagaggacttaggcgtctccggcgccctgacagtgctcatgaaggatgcaatcaagccgaacctgatgcagactctggaggggacgcctgtgtttgtgcatgccggaccatttgccaatatagcacacggaaattcctctataatcgccgacaggattgctctgaaactcgtgggaccggagggctttgtagtgactgaggctggttttggagcggacatcggcatggaaaaattttttaacattaagtgccgatattccggcctttgtccccacgttgttgtgctggttgctaccgtcagggccttgaagatgcacggtggcggaccaacagtgactgcgggattgccgctcccaaaggcctacattcaggagaacctggagttagtagagaaaggtttctctaatctgaaaaagcaaatcgagaacgctagaatgttcgggattccggtcgtcgttgcagttaacgccttcaaaactgacaccgaatcggaactggatcttatctcccgactaagtcgggaacatggcgctttcgacgccgtgaagtgcacacattgggctgaaggcgggaaaggtgccctcgcattggcccaggccgtccagagggctgctcaggctccttctagtttccagctgctgtacgatttgaaattaccagtggaggataagatcagaatcattgcccaaaagatttacggcgctgacgatatagagcttctgccagaggctcagcacaaggccgaagtatatacgaagcaaggttttggaaacctgcctatctgcatggccaagacgcacctcagtttatcgcacaatcccgagcagaaaggggtgcccactggcttcatactccccattagagacataagggcctcggttggcgctggttttctgtatcccctcgtcgggacaatgagcacaatgccaggactacccactcgaccttgcttctatgacatcgatctggaccccgagactgaacaagtgaacgggttgttctag

SEQ ID NO: 109880 - DNA, 1176 bp, synthetic construct
  misc_feature 1..1176: note = Description of Artificial Sequence: Synthetic coding sequence
  source 1..1176: mol_type = other DNA
atgttttcaccctggaagatttccatgtttctgtctgttcgggaagactccgtcccaacaaccgcctcgttttccgcggacatgttgaacgtcactttgcaggggccaacacttaatgggacgtttgcccagagcaagtgccctcaggtggagtggctgggctggttaaacaccatacagccaccctttctgtgggtgttatttgtcctcgctaccctggagaacatcttcgtcctctctgtgttctgtcttcataagagcagttgcactgtagccgagatttatcttggtaatctggcggccgccgacttgatcctggcgtgcggtcttcctttttgggccattaccatcagtaacaatttcgattggctgttcggagagaccctgtgtagagtcgtcaatgccattatctcaatgaacttgtactcaagtatctgttttctgatgctggtaagcatcgacaggtatctggccctggtaaaaactatgtccatgggtcggatgcggggggtccgatgggctaagctgtactcactggtgatttgggggtgtaccctcctgctgtcttccccgatgttagtcttccggaccatgaaggagtacagcgacgagggccataatgtgacggcttgcgtgatttcctaccctagtctaatctgggaggtctttacaaacatgcttctgaatgttgtcggcttcctgttaccgctgtctgtcatcactttttgtaccatgcagattatgcaggtgctccgtaataacgagatgcaaaagtttaaggaaatccaaaccgagcggcgggccacagttctggtgctggtcgttttactgctctttataatatgctggctcccatttcaaatttcaactttcctggatactctccaccggctgggcatactgtcatcttgtcaggatgagagaattattgacgtgattacacagattgcaagcttcatggcctactcgaattcatgcttgaaccctcttgtctatgtgatcgtgggaaagcgatttagaaaaaaatcctgggaagtgtaccaaggcgtatgtcagaaaggaggatgccggtccgaaccgatccagatggaaaacagcatgggcaccctgcgaacaagcatctctgtggagcggcagatacacaagctgcaagactgggcaggaagtcggcaatag

SEQ ID NO: 109881 - DNA, 1095 bp, synthetic construct
  misc_feature 1..1095: note = Description of Artificial Sequence: Synthetic coding sequence
  source 1..1095: mol_type = other DNA
atgctcaacgtcacactgcaggggccaacgttgaatggaactttcgcccagagcaaatgccctcaagtggaatggctgggctggcttaacacaatccagccaccctttctttgggttctgttcgtgctggctaccttggagaacatctttgtgctcagcgtgttttgtctccacaaaagctcttgcacagtggctgaaatctacctgggcaatctggcagctgccgatctcatcctcgcttgtgggctgcccttttgggccattactatctcaaataattttgattggctgtttggcgagaccctttgccgtgtggtcaatgctattatctcgatgaacctttattccagcatatgctttttaatgttagtatccatcgatcgctatctagccctcgtaaaaaccatgagtatggggcggatgcgaggagttcggtgggcaaagttatattctttagtgatttggggctgcactctcctgctgagctcgcctatgctggtctttaggacaatgaaggagtactctgatgagggccataatgtgaccgcttgtgtgatcagctacccgagcctgatctgggaagtgtttacaaacatgcttcttaatgtcgttggttttttgctgccattgtctgttatcaccttctgcaccatgcagatcatgcaggtgctgaggaacaatgaaatgcagaaatttaaggaaatccaaacagagcgacgcgcaacagtgcttgtgttagtggttcttctccttttcattatttgttggctgcccttccagatttcgacctttctggatactctgcatagactcggcatcctctcctcttgccaggacgaacgaatcattgacgtcatcacacagatcgccagtttcatggcctattctaacagctgtctgaatcccttggtgtatgttattgtgggcaaaagattcaggaaaaaaagttgggaggtgtatcagggcgtctgtcaaaaaggtggctgcaggtccgagccaattcaaatggagaactcaatgggcaccctgaggacctccattagtgtcgaacgccagatccacaaactgcaggactgggctggttcgcgtcaatag

SEQ ID NO: 109882 - DNA, 1095 bp, synthetic construct
  misc_feature 1..1095: note = Description of Artificial Sequence: Synthetic coding sequence
  source 1..1095: mol_type = other DNA
atgttgaatgttactctccagggcccaaccctgaatggcacgttcgcccagtccaagtgtcctcaagtggaatggctcggatggttaaatactatccagcctccgttcttgtgggttctattcgtgctcgctactttagagaatattttcgtactatccgtattttgccttcacaagagttcctgtaccgtcgcagaaatttatctagggaatctggccgccgctgacctcatcctggcttgcgggctacctttctgggctatcactatctcaaataattttgactggctgttcggcgagaccctgtgtagagtggtcaatgccataatctctatgaatctttattctagcatctgcttcttaatgctggtgtctattgacaggtatctggcactggtgaaaacaatgtccatggggcgaatgcggggagttagatgggccaaactgtattctcttgtaatttggggctgtacactgttgttgagcagccccatgctagtctttcgtactatgaaggaatactccgacgagggtcataacgtgactgcctgcgtgatctcatatccttccctgatatgggaggtgttcacaaacatgctgctcaacgtcgtgggtttccttttaccactgtccgtcatcactttttgcacaatgcagattatgcaggttcttcgcaataatgagatgcagaagtttaaggagatccaaacagagcggagagcaacggtgctggtgctggtggttttgctcctttttatcatttgttggctgccctttcagataagtaccttcctggacaccctccaccggctcggcatcctgtcaagttgtcaggacgagcgcattatagatgtgataacacagattgcatcattcatggcctactctaatagttgcctgaaccctctggtgtacgtgatagtcggtaagcgatttaggaagaaaagctgggaggtgtaccagggggtttgccagaaaggcggttgtaggtctgaacccattcagatggaaaactccatgggaacacttcgcacaagtattagcgtggagagacagatccataagcttcaggactgggccgggtctaggcagtag

SEQ ID NO: 109883 - DNA, 1176 bp, synthetic construct
  misc_feature 1..1176: note = Description of Artificial Sequence: Synthetic coding sequence
  source 1..1176: mol_type = other DNA
atgttctccccatggaaaatctctatgttcctgtccgtcagggaggacagcgtgcccacaactgcaagtttcagcgctgacatgctgaacgtcaccctgcagggcccaacactcaatggcacttttgctcagtctaaatgtccccaggtggaatggttgggctggctgaacacgatccagcctcccttcttgtgggtgctgttcgtcctggctactctggagaacattttcgtcttgtcagtattctgtcttcacaagtcatcttgtaccgtggcagagatatacctcggtaacctagccgcagctgatttgatcctcgcttgtggcctaccattctgggccataacaatcagcaataattttgattggctgttcggcgagacactgtgccgcgtcgttaacgcgattatttccatgaatctgtatagcagcatctgtttcctgatgttagtgtcaatagatagatacttggcactggtcaagaccatgtccatgggacgcatgcggggggtgcgctgggcgaaactgtactctctagtaatctgggggtgcacactcttactgtcaagtcctatgttggttttccgcacaatgaaagaatatagtgacgaaggccacaatgtcaccgcttgtgttataagttacccgtccttaatttgggaagtgttcacgaatatgctgcttaatgtcgtagggtttctgcttccactgagtgtcatcacattctgcacaatgcagattatgcaggttctacggaacaacgagatgcagaaattcaaagaaatccagaccgagcgccgcgccaccgtcctcgtcctcgtcgttctattgctgttcatcatatgttggctgccatttcagatctctacattccttgataccctccatcgccttgggatactgtcttcatgtcaagacgaacgcattatcgacgtcatcactcaaatcgcaagttttatggcttactccaacagttgtctgaatcccctagtttatgtgattgtggggaagcgctttcgaaagaagagctgggaagtctaccagggcgtatgccagaagggaggatgtcggtccgagccaatccagatggaaaattcgatgggcactctgagaactagtatctcggtggaacggcaaatacacaagctccaagactgggccgggtcgcgtcagtag

SEQ ID NO: 109884 - DNA, 684 bp, synthetic construct
  misc_feature 1..684: note = Description of Artificial Sequence: Synthetic coding sequence
  source 1..684: mol_type = other DNA
atgggaggaaagctttctaaaaagaagaagggatacaacgtgaatgacgagaaagccaaagaaaaggacaagaaggcagaaggtgcagccacagaagaagagggcactccaaaggagagcgagccccaagcggctgctgagccggcggaagcaaaggaagggaaagaaaagcctgaccaggacgcagagggcaaagcagaggaaaaagaaggggagaaagacgctgctgccgctaaagaggaagctccgaaagcagaaccagaaaaaactgagggagccgcagaggccaaggctgagcctccaaaagccccagagcaggagcaagctgctcctggccccgcagctgggggagaagcccccaaggcagcggaagctgccgcagcgcctgcggaatccgccgctccggcagctggtgaagagccctctaaggaagaaggcgagccaaaaaaaacagaggcccccgctgcacctgcggcgcaggagacaaaaagcgacggagcccctgcgtcagatagtaaaccagggagctcggaagccgctccaagtagtaaggaaactccagctgccactgaagcacccagttctacgcccaaggctcagggccctgcagcctccgcagaagaacccaaaccagtggaagcacccgcagccaactcggaccagacagtgaccgtgaaggaatag

SEQ ID NO: 109885 - DNA, 522 bp, synthetic construct
  misc_feature 1..522: note = Description of Artificial Sequence: Synthetic coding sequence
  source 1..522: mol_type = other DNA
atggggggaaagctttccaagaaaaagaaagggtataacgtgaacgatgaaaaggctaaggaaaaagacaaaaaagcagagggggccgccacagaagaagaaggaacccccaaagagagcgagcctcaggccgccgcagagccagcagaagccaaggaaggcaaagaaaaacccgaccaagacgctgaaggcaaggccgaggaaaaagaaggagaaaaagacgccgctgccgcgaaggaggaagctcctaaggccgaacccgacaaggaggagggggaacccaaaaagacagaagcccccgcagcgcctgccgcacaggagaccaaatctgatggggcaccggcatccgacagcaaacccggaagctcagaagccgccccttcgtcgaaagagactccggctgccacagaagcccccagctcaacccccaaggcgcaaggcccagctgcatccgctgaggagccaaagccggtcgaggctccggcagctaattcggaccagacagtgacagtgaaagaatag

SEQ ID NO: 109886 - DNA, 543 bp, synthetic construct
  misc_feature 1..543: note = Description of Artificial Sequence: Synthetic coding sequence
  source 1..543: mol_type = other DNA
atgggctgtggcggatcccgggccgatgccatcgagcccaggtactacgaatcttggactcgggaaaccgaaagcacctggctgacctatactgacagtgatgcacctccttcggccgccgcgcctgattctggcccagaggcaggcggcctccactccgtacttgaggcagagaaatccaaaatcaaagcgcctacagacagcgttagtgatgaggggctgtttagtgcatccaagatggctcccctggccgttttctcgcacggtatgttggaggacggcctgcccagcaatggcgtaccaaggagtaccgcaccaggaggaatacctaatcccgagaagaaaaccaattgtgagacccagtgccctaacccccagagcctgtcatctggcccactaacgcagaagcaaaacggtctgcagaccacagaagctaagagagatgccaagagaatgccagctaaagaggtcaccattaatgtgacagactccatccagcaaatggatcgttcccgaaggattacaaaaaattgcgtcaattag

SEQ ID NO: 109887 - DNA, 438 bp, synthetic construct
  misc_feature 1..438: note = Description of Artificial Sequence: Synthetic coding sequence
  source 1..438: mol_type = other DNA
atgggctgtggcggctctagagcagacgctattgaacctagatattatgaatcttggaccagagagacagagtctacctggttgacttatacagacagcgacgcccccccttccgccgctgcaccggacagcggccccgaggctggaggccttcacagtggaatgcttgaggatggactcccctctaacggcgtcccccgatcaaccgccccaggaggcattccaaaccccgaaaaaaagaccaactgtgagacgcagtgtccaaacccacagagcctatcgagcggcccactgactcagaaacagaacggacttcagacaacagaggccaaacgggacgcaaaacgcatgcctgccaaagaggtgaccattaacgtgaccgacagcatccagcagatggatagatcccggaggatcactaagaactgcgtgaactag

SEQ ID NO: 109888 - DNA, 165 bp, synthetic construct
  misc_feature 1..165: note = Description of Artificial Sequence: Synthetic coding sequence
  source 1..165: mol_type = other DNA
atgggctgtgggggctcccgagcggacgctatcgagcctagatattacgagtcatggacccgcgagaccgaatcaacctggctcacttacaccgattcagatgctcccccttcagctgctgcccctgatagtggtcccgaggccggggggttgcactccggatag

SEQ ID NO: 109889 - DNA, 387 bp, synthetic construct
  misc_feature 1..387: note = Description of Artificial Sequence: Synthetic coding sequence
  source 1..387: mol_type = other DNA
atggaatctaaggaggagagggccctcaacaacctaatcgtggagaatgtgaaccaggagaatgacgagaaagacgaaaaggagcaggtcgccaataagggagagcctctggccctgccactcaacgtgagcgagtattgtgtcccccgagggaaccgaaggcgctttagggtgcgacagccgatcctccagtataggtgggacattatgcataggcttggagaaccccaggcacgtatgcgagaagaaaacatggagagaattggcgaggaggtgcggcagcttatggaaaagttacgggagaagcagttgtctcatagcctccgcgcggtctcgacggacccaccacaccatgatcaccacgacgagttctgtctgatgccctag

SEQ ID NO: 109890 - DNA, 387 bp, synthetic construct
  misc_feature 1..387: note = Description of Artificial Sequence: Synthetic coding sequence
  source 1..387: mol_type = other DNA
atggaatcaaaggaggagagagctctgaacaatctgattgttgaaaacgtcaatcaggaaaatgatgaaaaagacgagaaagagcaagtcgctaacaaaggcgagccgctagctttgcccctgaatgtgtcagagtactgcgtcccccgcggaaaccgacgacgctttcgggtgagacagcctattttgcagtaccgctgggatattatgcataggctaggagaaccgcaggctcgcatgcgtgaggaaaacatggagcgcataggagaggaggtccgccagcttatggaaaagctccgtgaaaaacagctgtcacattctctgagagccgtgtcaactgacccaccacaccacgaccaccacgatgagttctgtctaatgccttag

SEQ ID NO: 109891 - DNA, 306 bp, synthetic construct
  misc_feature 1..306: note = Description of Artificial Sequence: Synthetic coding sequence
  source 1..306: mol_type = other DNA
atggagtccaaggaggaaagagctctgaacaacctgattgttgagaacgtgaatcaagaaaatgatgaaaaggacgaaaaggagcaggtagccaacaaaggggagcctcttgctctgcctctgaatgtcagcgaatattgcgtaccacggggcaaccggcgcaggttccgggttaggcagccgattctacaatacagatgggacattatgcaccgcctcggagagccccaggctcggatgcgggaggagaacatggagaggatcggggaggaggtgcgccaattaatggaaaaattaagagagtag

SEQ ID NO: 109892 - DNA, 483 bp, synthetic construct
  misc_feature 1..483: note = Description of Artificial Sequence: Synthetic coding sequence
  source 1..483: mol_type = other DNA
atgcagaagatggtcgtctgtggggctaagtgctgtggcgatgctccccacgtggaaaatagggaggaggagaccgctaggatagggccaggagtaatggagagtaaggaggaaagagccttaaacaacctgatagttgagaatgtgaatcaggaaaacgatgagaaagatgaaaaagaacaggtggcaaacaaaggggaaccccttgctctgcctctgaatgtgagtgaatattgcgtaccccggggcaacaggaggcgctttagagtcaggcagccgatcctacagtataggtgggacattatgcaccgccttggtgagccacaggccagaatgcgagaagagaatatggaacggatcggggaagaagtgagacagcttatggaaaaattacgcgagaagcagctatctcacagcctgcgggcagtcagtaccgaccctcctcaccatgaccaccacgatgagttctgcttaatgccctag

SEQ ID NO: 109893 - DNA, 378 bp, synthetic construct
  misc_feature 1..378: note = Description of Artificial Sequence: Synthetic coding sequence
  source 1..378: mol_type = other DNA
atggagtctaaagagaaacgcgcagttaattccttgtcaatggagaatgcaaatcaggaaaatgaggaaaaggaacaggtagctaataagggggaacctctcgccctgcctctcgatgcgggcgagtactgtgtgcctcggggtaacaggaggcgttttagggtcagacagccgatccttcagtatagatgggatatgatgcataggctgggggaaccccaggccaggatgcgagaggagaatatggagcgaattggcgaggaggtaaggcagctcatggagaagctgagagagaagcagctgtcgcacagtctacgggctgtatccacagatcctcctcatcacgatcatcacgatgaattttgcctgatgccttag

SEQ ID NO: 109894 - DNA, 363 bp, synthetic construct
  misc_feature 1..363: note = Description of Artificial Sequence: Synthetic coding sequence
  source 1..363: mol_type = other DNA
atggagagcaaggaggagctagccgcaaacaacctgaacggggaaaatgcccagcaggaaaacgaggggggagaacaagcacctactcagaacgaggaagagtctcggcatctgggggggggggaaggtcagaagccgggcgggaacatcaggagggggcgggtccgcagattagtccctaactttaggtgggcaatcccgaatcgccacatcgaacataatgaagccagagacgacgtcgaacgattcgttggacagatgatggagatcaagcgtaagaccagggaacaacagatgaggcactatatgaggttccagacgccagagccagacaatcactacgacttctgcctcatcccatag

SEQ ID NO: 109895 - DNA, 363 bp, synthetic construct
  misc_feature 1..363: note = Description of Artificial Sequence: Synthetic coding sequence
  source 1..363: mol_type = other DNA
atggagagtaaggaagagctagcagctaacaatcttaacggcgagaatgcacagcaggagaacgaaggaggagaacaggcacctacacagaacgaggaggagtctaggcacttaggcggcggcgaaggccagaaacccggaggaaatatcagaagggggcgagtcagaagactcgtgcctaactttcgctgggctattcccaaccgccacatcgagcataacgaggcacgggacgatgttgagagatttgtagggcaaatgatggagattaagcgcaagactagggaacagcagatgcgtcactatatgcgcttccagacaccagaacccgacaatcattatgatttctgcctcataccgtag

SEQ ID NO: 109896 - DNA, 336 bp, synthetic construct
  misc_feature 1..336: note = Description of Artificial Sequence: Synthetic coding sequence
  source 1..336: mol_type = other DNA
atggaaaacgtgccaaaggagaataaagtcgtcgagaaagcgcctgtgcagaacgaagcacctgcccttgggggtggggagtatcaggaaccagggggcaacgtgaaaggcgtgtgggcccccccagcccccggattcggagaggatgttcctaaccgacttgtggacaatatcgatatgattgatggtgatggtgacgacatggagaggttcatggaagaaatgagggagctgcggagaaagatcagagaactgcagctgcgctatagcctgcgcatacttatcggcgaccctcctcaccacgaccaccacgacgaattttgtcttatgccatag

SEQ ID NO: 109897 - DNA, 336 bp, synthetic construct
  misc_feature 1..336: note = Description of Artificial Sequence: Synthetic coding sequence
  source 1..336: mol_type = other DNA
atggaaaacgttcccaaagagaacaaggtggtggagaaggctcccgttcaaaatgaggctccagcactcgggggaggtgagtaccaggaaccaggaggcaacgtgaaaggagtgtgggcgccacccgctccaggcttcggagaggatgtgcccaaccggctggtcgataacatcgatatgatcgacggggatggggatgatatggagcggttcatggaggagatgagagaactgagaaggaaaatccgggagctgcagctgcggtactcccttagaatcctgattggggatcctccacaccacgatcaccacgacgagttttgcctgatgccctag

SEQ ID NO: 109898 - DNA, 378 bp, synthetic construct
  misc_feature 1..378: note = Description of Artificial Sequence: Synthetic coding sequence
  source 1..378: mol_type = other DNA
atggatcacaaacccctcctgcaggagagacctcccgcctacaacctcgaagcaggacagggggactatgcatgcggaccccacggctatggagcaatccccgccgctcctcctccacccccctacccatacctggtgactggcatacccactcaccacccacgcgtatataacattcacagcaggactgtgactagatatcccgcaaacagcatagtcgtggttggaggctgtcccgtttgcagagtgggcgtcttggaggattgctttacctttctgggcatttttcttgccattatcctcttcccctttggttttatctgctgtttcgcgctacgcaagcgcaggtgtcctaattgtggagccactttcgcgtag

SEQ ID NO: 109899 - DNA, 297 bp, synthetic construct
  misc_feature 1..297: note = Description of Artificial Sequence: Synthetic coding sequence
  source 1..297: mol_type = other DNA
atggatcataaacccctcttacaggagcgacctccagcatataatcttgaggctggccagggtgactacgcttgtggtccccatggatacggtgcgatacctgccgcaccacctcccccaccgtacccctacttagtcaccggtattcccactcaccaccctagggtgtacaatattcacagcagaacggtgacccggtatcccgcaaattccatcgtggtggttggaggctgtcctgtgtgccgccaccagagaagcagttggctatacacatacccactgagagtctgtacctag

SEQ ID NO: 109900 - DNA, 1536 bp, synthetic construct
  misc_feature 1..1536: note = Description of Artificial Sequence: Synthetic coding sequence
  source 1..1536: mol_type = other DNA
atgagccgtgggccagaggaggtcaacaggcttacagaaagcacatacagaaacgtcatggagcaattcaaccctggattacgcaacctgattaatctgggcaagaattatgaaaaggccgtcaacgccatgatcttagccggcaaagcctactacgacggagtggccaaaataggtgagatagctacaggctcgccagtctccaccgagctggggcatgtccttattgaaatcagcagtactcacaaaaagctgaacgagtccctggatgaaaatttcaagaagtttcataaggaaatcatccacgaactcgaaaaaaaaatcgaactggacgttaagtatatgaacgccacacttaaacgctatcagacggagcataagaacaagctggaatcccttgaaaagagtcaggccgaacttaaaaagatccgacgtaagtctcaaggtagccgaaacgctctaaaatacgaacacaaagagatcgaatacgttgagacagtgacatcacgccagtctgagatccagaaatttatagccgacgggtgcaaggaagcgcttctggaagaaaaacggcggttctgttttttagttgacaagcactgcggctttgctaaccacatccactattatcacctgcaaagcgcagaactgctgaactctaagctaccgcgctggcaggaaacctgtgttgatgcaattaaagttccggaaaaaattatgaatatgattgaggagattaagactcccgcctcaacccccgtcagtgggacaccgcaagccagccctatgattgagcggagtaacgtggttcggaaggactacgacaccctctctaaatgcagtcctaagatgcctcccgccccctctggccgggcttacacctcccccctgatcgatatgttcaacaaccccgccaccgcggcccctaattctcaacgcgtcaacaactccactggaacgtcagaggacccctctttgcagcggtcagtaagtgtcgctacagggctcaatatgatgaagaagcagaaagtgaagacaattttcccccacactgcaggtagcaataaaactctcctatccttcgcccagggtgacgtgatcactttgctgatcccagaagaaaaggacggctggctctatggtgaacacgatgtgtctaaggcccgggggtggttcccttccagttacaccaaactgcttgaggaaaacgagactgaagccgttaccgtgcccacaccatcccccactccagtcaggagcatttccacagtaaacctttcagaaaactcaagcgttgtaatccccccacccgactacctggagtgcctgtccatgggagcagccgctgacagacgcgccgactccgcaagaaccacatctacttttaaggcaccagcgagcaaacctgagactgcagccccaaacgacgcgaacggaacagccaaaccgcctttcttaagtggtgagaacccattcgcaactgtgaaactccggccgactgtgacaaatgatcgctcagcccctataatccggtag

SEQ ID NO: 109901 - DNA, 4656 bp, synthetic construct
  misc_feature 1..4656: note = Description of Artificial Sequence: Synthetic coding sequence
  source 1..4656: mol_type = other DNA
atggagaatactggttggatgggcaagggccatagaatgaccccagcgtgccctctgctcctcagtgtgatcctgtccctgcggctggcaactgcattcgatccagctccatcagcatgctccgctctggctagtggagttctgtacggagcatttagcttgcaagatctgttcccgactatcgcaagcggctgttcctggactttggagaaccctgatccaacaaagtactccctctatttgcggttcaatagacaggaacaagtttgtgcccactttgccccccgactccttcctctggatcactacctggtgaacttcacatgcttgagaccttcccccgaggaagccgtggcacaggctgagagtgaggtgggccggccggaggaagaggaagccgaggccgcagccggattggagctgtgtagtgggagcggacctttcacctttctgcatttcgataagaacttcgttcagctgtgtctgtccgcagagcccagtgaagcccctagactcctcgcgcccgcagccctggcgttcaggttcgttgaggttctgctgataaataacaacaattctagccaatttacctgcggcgtcctctgccgatggtcggaagaatgcggtcgcgctgctggccgagcatgtggctttgctcagccaggatgttcttgccccggggaggctggtgctggatcaacaaccaccactagtccagggcctcccgcagcccataccctcagtaacgcgctggtgcccggcggccctgcaccaccagccgaagctgaccttcattctggaagttcaaatgatctgttcacaactgagatgcgctatggcgaggaacccgaggaggaacccaaggtcaagactcaatggcccagatcagccgatgagcccgggttgtacatggcccagactggtgatccagcggcagaggagtggtcaccctggtcagtgtgcagtctgacttgtggacaaggcctccaggttagaacacgaagttgtgtgtcttctccgtatgggacactctgctctggtcctctgcgggagacgcggccatgcaataacagtgcaacgtgtcccgtacacggggtttgggaagagtggggctcttggtccctgtgctccaggagctgcggccggggatcacggagtcggatgcgcacatgtgtacccccccagcatggaggcaaagcttgtgaaggcccggagctccagactaaactgtgctccatggccgcttgtcccgttgagggacaatggctcgaatggggaccatggggaccctgcagtaccagctgcgccaacgggacgcagcagagatcacgaaagtgtagcgtggccggcccagcatgggcgacttgcactggagctctgacagatactcgggaatgtagtaatctggagtgtccagccacagactccaagtggggcccctggaacgcctggtcattatgtagcaagacctgcgatacaggctggcagaggcgctttcgaatgtgtcaagctacagggacccagggttatccttgtgaagggaccggggaggaagtgaagccgtgcagtgagaagaggtgccctgcattccatgagatgtgccgagatgaatacgtaatgctaatgacctggaagaaagctgcggcaggcgagatcatctacaacaagtgtcctcccaatgctagtgggtcagcctctaggcggtgtctgctaagtgcccagggtgtcgcctattggggcctaccatcgttcgcccgctgcatttctcatgagtatagatacctctatctgtcactgcgggaacatcttgcaaaaggtcagcgcatgctggctggagagggtatgtcacaggtggtgcgctccctacaagagctcctggctagacggacatactacagtggcgatctactgttctccgtggacatcctcagaaacgtgaccgataccttcaagcgcgctacctacgtccccagtgccgatgacgttcagaggttcttccaagtggtgtcattcatggtggatgccgaaaacaaggaaaagtgggacgacgcccagcaagtaagcccaggaagcgtccatctgcttagggtggtggaggattttatccatctggtgggggatgctctcaaggcctttcagtcaagcctcatagtgactgataatttagtgattagtatccagagggagccagtctctgcggtttcatccgacatcacattccctatgaggggaaggcgcggaatgaaggactgggtccgtcattctgaggaccgcctgttcttgcctaaggaagtgcttagcctttcctcccctggtaagccggctacttctggggccgccggctcacctggaaggggaagaggccccggtacagtgcctcctggaccaggtcactcacatcagaggctcctgcccgccgatccagacgaatccagctacttcgtcatcggcgccgttctgtaccggactctagggttgattctgccccctccgcggccccctctggctgttacctcacgcgtaatgaccgttaccgttaggccacccacacagccgccagccgagcctctgatcacagttgagctgagctacatcatcaatggtactacagatccacattgtgcttcatgggattactccagagccgacgcgagttctggtgattgggacaccgaaaattgtcagaccctagaaacacaagctgctcacactcgctgccagtgccagcatcttagtacatttgccgtgctggctcagcccccaaaggatttgactctcgaattagccggctctcccagtgtaccacttgtgataggatgtgcagtgtcctgtatggctctcctcactctgcttgccatctacgccgctttctggcgattcatcaagagcgagcgctccattatcttgttgaacttttgcttatcaatcctggcttctaatatcttgatcctggtgggtcagtctcgtgtcctcagcaaaggcgtttgtacaatgacggccgcctttctgcactttttctttttgagctctttctgttgggtgctcaccgaggcttggcagtcttatctggccgtgattgggaggatgcgtacccgtctcgttagaaagcgcttcctatgtttgggctggggtctcccggctctggtggtagcagtgagcgtcgggtttacacgcaccaaagggtacggcacctccagttattgttggttatctctcgaaggcggattgctctacgcatttgtgggtcctgccgctgtgatcgttctcgtcaacatgcttattggcatcatcgtgttcaataaactcatggctcgggatggaatatcggacaagagcaagaagcagcgtgcaggcgccagcctttggtcgtcctgcgttgtcctcccattactcgccctgacctggatgagcgcagtcctggccatgaccgaccgtcgatctgtactctttcaggctctctttgcagtctttaactctgcccaaggctttgtgattaccgcagttcactgctttctccgcagagaggtacaggatgtagtaaaatgccagatgggtgtttgtcgggccgacgagtctgaggacagccccgactcatgtaagaacggtcagctacaaatcctctcagattttgaaaaggatgtcgatctggcctgtcagaccgtgctctttaaggaagtgaacacgtgtaacccgtctaccatcacaggaactctatcacgattaagcctggacgaggacgaggagcccaaatcatgcctggtggggcccgagggctcactgagtttctcgccactgcctggaaacatactggttcctatggccgccagtcccgggctgggggagcccccacctccccaggaggcaaatcctgtgtacatgtgtggagagggcggactgcgccagctggatttgacatggctccggcccactgagcctggcagcgagggagattacatggtcctgccacgccgaaccctgtctcttcagccgggtgggggcggcggtgggggcgaggacgcacctcgggccaggcccgagggcaccccaagacgtgctgccaagaccgtggcgcatactgaaggataccccagttttctgagcgtggatcatagcggccttggactcgggcccgcctacggttctttacagaacccttatgggatgacctttcaaccgccgcctccgacccccagcgcgcgtcaggttcccgagcccggcgaaagatcccgtaccatgccccggaccgtccccggaagcactatgaaaatgggaagtctggaaaggaagaaactcaggtatagcgaccttgatttcgaggttatgcatacaagaaaacgacacagcgaactgtatcatgagttgaatcagaagtttcacacctttgaccgataccgctcacaaagtacagccaagagggaaaagaggtggtctgtgagttcaggcggggcggccgagcgctcggtatgcaccgataagccttccccaggagaaaggcctagcttgtcccagcaccgccgacatcagtcctggagcactttcaagagcatgaccttaggctcattgcctcccaagcccagggaaagacttaccttgcaccgggccgccgcatgggagccgactgagccaccggatggggactttcagacagaggtatag

SEQ ID NO: 109902 - DNA, 4755 bp, synthetic construct
  misc_feature 1..4755: note = Description of Artificial Sequence: Synthetic coding sequence
  source 1..4755: mol_type = other DNA
atggaaaacacaggttggatgggaaagggacatcgaatgactccagcctgccctctgctactgtctgtgatcctaagcctgcgattggctaccgcattcgacccagccccaagcgcctgctctgctctggcctcaggagtcctgtacggcgctttttccctacaggaccttttcccaaccattgcgtctggatgtagttggactcttgagaatcccgaccctactaaatactccctgtacctccgtttcaaccgtcaggagcaggtgtgtgctcactttgctcctcgactgctgccacttgaccactacttagtaaattttacttgcctgagaccctcaccagaagaggccgtcgctcaagctgaatcggaggtaggccgcccagaggaggaggaagccgaagctgccgcgggtctggagttgtgcagcggcagcgggccgtttaccttcttgcattttgataaaaatttcgttcaactgtgtctgagcgccgaaccatctgaggctccccgtttgttggcccccgccgccctggctttccgatttgtggaagtgctgctcattaataataataactcaagccagtttacctgtggagtcctttgccggtggtcggaggagtgcggaagagctgccggacgagcatgtgggtttgctcagccagggtgtagttgcccaggggaggctggggcaggtagcacaaccactacgagcccaggtcctccagccgcacataccctgtcaaacgctcttgtgccaggaggcccagcgcccccagctgaagccgacttgcacagcggaagctccaatgatctgttcacgactgaaatgcggtacggtgaagaaccagaggaggaaccaaaggtcaaaacccaatggccacgcagcgccgatgagcccggcctgtacatggcccagacgggggacccagcagcagaggagtggtccccttggtccgtgtgttcactgacctgtggtcagggcctgcaagtgcggacccggtcatgcgtcagttctccatacggtaccttgtgttccggacctctgagagagacacggccctgtaataacagcgccacatgtcccgtgcatggggtctgggaagagtggggctcatggtcactgtgtagccgctcatgtggacgaggcagtcggtcccggatgcgaacctgcgtcccaccccagcacgggggaaaggcatgtgagggacccgagttacagaccaagctgtgtagtatggcagcttgccccgtggagggtcagtggttggaatgggggccctggggaccttgctcaacatcatgtgcgaatggaactcagcaacggagcaggaagtgctccgtggccgggccagcatgggctacttgtaccggcgcccttactgacacccgcgaatgctctaatcttgaatgcccagctacagatagcaaatgggggccctggaacgcctggagtctttgctcgaagacttgcgataccgggtggcagaggcgatttcggatgtgccaggctactgggacacagggctacccttgcgagggcacgggcgaagaggtgaagccttgtagcgagaagagatgcccagcttttcacgagatgtgtagggacgaatacgtgatgctcatgacgtggaagaaagcagccgctggggagatcatttataacaagtgtcctcccaatgcaagcgggagcgcatcccggaggtgcctcctgagcgcacaaggcgttgcctattggggactaccaagcttcgcaaggtgcattagtcacgagtatcgatatctgtacttgagtctccgagagcatctggcaaagggccagcgtatgctcgcaggggagggtatgtcccaggtggtaagaagcctgcaggagctgctcgcccgtcgaacttactattccggagatctcctgtttagcgtcgatatcctgcgcaacgtcacagacacattcaagagagccacctacgtgccaagtgcagatgacgtgcagaggttttttcaggtggttagcttcatggtagacgccgaaaataaggagaagtgggacgacgcccagcaggtgagtcctggcagtgtgcaccttttgcgcgtagtggaggacttcatccacctggttggagatgccctgaaagccttccagagctctcttatagtcaccgataacctggtaatctccatacagcgcgaaccagtgagtgcagttagcagcgacatcacatttcctatgcgcggtaggagagggatgaaggactgggtcaggcattccgaggaccgactcttcctgccaaaagaagttctcagcttgagcagccctggaaaacctgcaacttctggggcagcgggatcacccggacgaggtcgcggcccagggacggtccctcccgggcccggccatagccaccaaagactgttgcctgccgacccagatgaatcttcctatttcgtgattggggccgtcctctaccggaccctgggtcttattctccccccccctcgtccaccccttgctgttacgagcagagtgatgaccgtaactgtccgcccccctacacagcccccagcagagccactcattaccgtggaactatcgtacatcataaatggtacaaccgacccccactgtgcctcatgggactatagcagagcagatgctagcagtggagattgggacaccgagaactgtcagacactggaaactcaggcagctcacacccgctgtcagtgtcagcacctgtctacctttgctgtgttggcacagccacccaaagacttaacactcgaacttgcgggctcaccatctgtccctctggtgataggctgcgctgtgtcctgcatggccctcttgactctgctggccatttatgctgccttttggcgctttattaaaagtgagcggtctataatcctgctgaacttctgcctgtccattttagcgtcaaatattcttattctcgtgggccaatctagggtcctgtctaaaggcgtctgcactatgaccgctgcctttctgcacttcttctttcttagttccttttgttgggtcctgacagaagcctggcagagctacctggccgtaatcggccgtatgagaacgaggctggtgcgtaaacggtttttgtgtctgggctggggcttgcctgcactggtagttgccgtgtctgtcggatttactcgtactaagggatacgggactagctcatactgttggctcagtctcgagggcggactcttgtacgcattcgttgggccggctgctgtgattgttctggtgaatatgttgattggtatcattgtatttaacaagcttatggccagggatgggatctctgataaatcgaaaaagcagagagcaggctccgagcggtgtccttgggcaagtctcctccttccttgcagtgcgtgtggtgctgttccatcccccctgctttccagcgcctcagctaggaatgcaatggcgagcctctggtcgtcgtgtgtagtcctgccactgctggccctaacctggatgagcgctgtcctggccatgaccgaccggcgttcggtgctgttccaggcactcttcgctgtgtttaattccgcccagggattcgtgattaccgccgtccactgtttcctacgtcgggaagtgcaggatgtagtcaaatgtcagatgggtgtctgtcgcgccgacgagtcagaagattcaccagactcctgtaagaatggacagttgcagatattgtcagattttgagaaggatgtggacctcgcatgccagactgtgctctttaaagaagtcaacacttgcaacccgtctaccattaccggaaccctctcacggctgtccctcgacgaggatgaggagcccaagagctgtctcgtgggcccggaaggatcactgtcatttagtccattgcctggcaatatcctagtgcctatggctgcctctccggggctgggcgagccccctcctccccaagaggctaatcctgtctatatgtgtggtgaagggggactgcgccaactagacctgacctggctgcggcccactgagcccgggtccgagggggactacatggtactgccaaggagaactttatccctgcaacctgggggaggaggcggaggaggagaagacgctccgagagctcggccggaaggaacccctcgaagggccgccaaaacagttgcgcataccgagggctacccctcattcctgagtgtagatcattctggactggggctcggaccggcctacggttcattgcaaaacccatacgggatgacttttcaaccgcccccccccacaccatcggcccgacaggtgcctgaacccggtgagcggtccaggaccatgccccgtactgttcccgggtccaccatgaagatgggttctctggagaggaagaaactcaggtactccgatctggactttgaggtcatgcatacacgtaagcgacattctgagctgtatcacgagctcaatcagaaattccatacatttgacagatataggagccagagcacggctaaacgggagaaaagatggagtgtgtcctctggaggtgcggctgagaggtcggtgtgcactgacaagccctcaccaggagagcggccctccctctcccagcatcgacggcaccagtcttggtcgaccttcaaatccatgacacttggcagcctcccaccgaaacctcgcgagagactgactctgcaccgtgcagctgcttgggagccgactgaaccccccgacggcgattttcaaacagaagtgtag

SEQ ID NO: 109903 - DNA, 4758 bp, synthetic construct
  misc_feature 1..4758: note = Description of Artificial Sequence: Synthetic coding sequence
  source 1..4758: mol_type = other DNA
atggagaacaccgggtggatgggcaaagggcaccggatgacaccagcatgtcctctgttgctctctgtgattctgagtctgcggctggctaccgccttcgatccagctccatccgcttgtagcgcactggcttctggtgtactgtacggcgctttctcgcttcaggatctctttcctactattgcctcaggctgcagttggaccctggaaaatcccgaccccactaagtattcgctctaccttcgatttaacaggcaggagcaggtctgtgcccactttgcaccgcggctgctgcccctggaccattaccttgtaaacttcacttgtttgcggcccagtccggaagaagcagtcgcacaagcggaatcagaagtaggaaggccagaggaagaagaggcggaagcggcggcgggtctggagctctgctcaggttccggacctttcacatttcttcatttcgataaaaatttcgtccaattgtgcctaagcgcagaaccatctgaagcacctaggctgttagcccccgctgctctggcatttagattcgtggaggtcctcctgatcaacaacaacaactccagccaattcacctgtggtgtcctgtgtcggtggtccgaggagtgcggccgggccgccgggcgggcctgtggcttcgctcagccagggtgttcatgtcccggcgaggcaggtgccggttccactacaactacaagccccggccctcctgccgcacataccctgagcaacgccctggtgcccggcggtcccgcacctcccgctgaggccgatctgcactcggggagctccaatgacttgttcacaactgaaatgagatatggtgaagagcccgaggaggagcccaaagtaaaaactcagtggcctaggagcgccgatgagccaggcctgtacatggctcaaacaggagatccagctgccgaagagtggtcaccttggtcggtctgttccctgacatgcggacaaggcctgcaggtacggacaagatcctgtgtgtcatcaccgtatggaacgctgtgttctggtcccctgcgggagacacgaccctgcaacaacagcgccacctgtcctgttcacggagtgtgggaggaatggggcagctggtccctgtgctcccgctcatgtggtcggggcagtagatccagaatgagaacttgtgtgccaccccagcatggcgggaaagcctgtgaaggaccggagttgcagaccaagctatgctctatggccgcctgccccgtggagggtcagtggctcgaatggggcccttgggggccctgtagcacctcctgcgccaacggcacacagcagaggagtagaaaatgcagcgtggcgggtccggcctgggcaacttgcaccggagctcttacggacacacgcgaatgtagtaatctcgagtgtcctgcaactgactccaagtgggggccatggaatgcttggtccctgtgcagcaagacgtgtgataccggatggcaaaggcgcttccggatgtgccaggccaccggaacacagggatacccatgtgaggggaccggagaagaagtaaagccttgctctgaaaagcgctgtcccgcctttcatgaaatgtgtagggatgaatacgtcatgctgatgacctggaaaaaagcggccgccggcgagataatttataataagtgtccccctaacgcatcgggctctgcaagtaggcggtgcctcctaagcgctcagggcgtcgcctactgggggctgcccagctttgcaaggtgtatatctcacgaataccgctatctctatctttccctgcgcgagcacttggcgaaaggacagcgcatgcttgccggggagggtatgagccaggtggtccgctccctgcaggaactgctcgcccggagaacttactattctggcgatctgctctttagcgttgatattctgcgcaacgtgaccgacaccttcaagagggccacgtacgttccctccgccgacgatgtacagcgtttttttcaagtggtcagttttatggtcgatgccgaaaataaagaaaagtgggatgatgcccagcaggtatctccgggatctgttcatctcctgcgcgtagtggaagattttatccatctcgttggtgacgcgctgaaggctttccaatcctctctgattgtgactgacaacctcgttatatccatccagagagagcctgttagcgccgtctcttccgacataactttccccatgcgcgggagacggggtatgaaagattgggtgagacacagcgaagaccgattgtttttgccaaaggaggtgctttccctgtcctcacctggcaagcccgcgacatctggtgccgccggttcacccggacggggccggggcccggggacagtgccacctggacctggccactctcaccagcgcctgctcccagctgaccccgacgaatcatcatatttcgtgataggagctgtgctatacaggaccctgggacttatactcccaccccctagaccccctttggcggtcacctcccgggtgatgactgtgaccgtgaggccgcctactcagccgccagctgagcccctgattactgtagagctttcctacatcattaatggtaccacggaccctcactgcgcatcttgggactactcccgggctgacgctagtagcggggattgggacacagagaactgtcaaaccctggagacacaggccgcgcacacccgatgtcagtgtcagcatttgtcaaccttcgctgtgctggcccagccccccaaagatttgacactcgagttagctggatccccttcagtgcctctggttatcggctgtgctgttagttgcatggcattgctgactctgctggccatctacgctgccttctggagatttatcaagtctgaaagatccattatcctactgaacttttgtttgtcgattctggccagtaacatcttaatactggtcggtcaatccagggtcctgtccaagggcgtgtgcacaatgactgctgccttcctgcacttttttttcctctcaagtttctgttgggtgctcaccgaagcctggcagtcctacttggccgtaattggaagaatgcgcacgaggctcgtacggaagcggttcctgtgtcttgggtgggggttgcccgccctggtggtcgcagtgagtgtcgggtttacccggactaaagggtacgggaccagctcttactgttggctgagcctggaagggggcctgctgtacgcctttgtaggtcccgccgccgtgattgtgctggtgaatatgctaatcggaataatagtattcaacaaattaatggctcgtgacggaatctctgacaagtcgaagaaacaacgtgcagggtctgaacgttgcccctgggcatctctccttctgccctgctccgcctgcggcgcggtgccaagccccctgctttcatccgcgtccgcaagaaatgccatggccagtctgtggagtagttgcgtagtcttaccgcttttagcccttacatggatgtccgccgtgctggcaatgacagaccggcggtctgtcctatttcaggcgctcttcgccgtgtttaactctgcccaggggtttgtgatcaccgctgtccattgttttctgaggcgcgaagttcaagatgtcgtgaaatgtcagatgggggtttgtcgggcagacgagagcgaggacagccctgacagctgcaagaatggccagcttcagattctcagcgacttcgagaaggatgtagacctggcctgtcaaaccgtgttattcaaggaggtgaatacatgtaatccttcaactattacaggaacgttgtcccggctatccttggacgaagacgaggagcccaaatcttgtctggtgggcccagaaggctctctgagtttttcaccactgccaggcaacatactcgtgcctatggccgcctccccagggctgggagaacccccgccaccccaagaagccaatcctgtctacatgtgcggggagggcggtctgaggcaactggatctgacgtggcttcgacctaccgaacccgggagtgagggcgattacatggttctgcctcggcgaacactgtctcttcaaccagggggcgggggcggaggaggagaagacgctccccgcgctaggcccgaaggcactccccgccgcgcagctaagacagttgcccatactgaaggctacccgtcttttttgtccgttgatcatagcggcctcgggctgggacctgcttacgggtctctacagaacccctacgggatgacatttcagcctccgcctcccaccccaagcgcaaggcaggtcccagaacccggggagagatcccggaccatgcccaggacagtcccgggctcaactatgaaaatggggtccctggaaaggaagaaactaagatactccgacttggatttcgagaaagtgatgcacactcgaaagaggcatagcgaactttatcatgaactgaaccagaagtttcacacctttgatcggtacagaagccagtccacagctaagcgtgagaaaaggtggagtgtaagctcgggcggggcagctgagcgcagcgtgtgtaccgacaagccgtcacccggcgaaagaccttcactgagccagcacagaagacaccagtcatggtctacatttaaaagcatgactctggggtcactgccacctaaacctagggagagactgactctgcatcgcgccgcggcttgggaacccaccgaacccccagacggggattttcagactgaagtatag

SEQ ID NO: 109904 - DNA, 4665 bp, synthetic construct
  misc_feature 1..4665: note = Description of Artificial Sequence: Synthetic coding sequence
  source 1..4665: mol_type = other DNA
atgacgccagcatgtccactgcttctgagcgttatcttgagcctacgtcttgctactgctttcgatccagccccaagtgcctgttccgctctggcgagcggcgtgctttacggtgccttcagcctgcaggacctgtttccaaccatcgccagtggatgtagctggactctggaaaatcctgatccgacaaagtacagtctatatctccgctttaacagacaggaacaggtgtgcgcccacttcgcccccagactgcttcccctcgaccactacctggtgaactttacttgccttagaccgagtcccgaggaggccgtggctcaggctgaaagtgaggtgggaagaccagaggaggaggaggcagaggcggcggcagggctcgagctgtgcagcgggtcaggcccttttacattcctgcactttgacaagaatttcgtgcagttatgcctgagcgccgaaccttctgaagctccccgcctcctcgcaccggccgccctggcttttcgatttgttgaagtgttgctgattaataataacaatagctctcagttcacatgtggcgtgctctgtcggtggagtgaagagtgcgggcgcgccgccggccgtgcttgtggctttgcacagccaggctgctcctgtcctggcgaggccggtgccggttccacaacgactacatctccaggcccccccgctgcccacacactctccaatgctcttgttccaggcggacctgcccctcccgccgaggcagatctccatagcggaagttcaaacgacctctttactaccgaaatgcggtacggtgaggagccagaggaagaaccaaaggttaagactcaatggccccgtagcgcagatgaacctgggctgtacatggcacagactggggatcccgctgccgaagaatggagcccctggagcgtgtgctcactcacctgtggccagggcctccaagttaggactcgtagctgcgtaagctccccttacggcacactgtgcagcggtccactgcgcgaaacaaggccgtgcaacaactcagctacctgccccgttcatggggtgtgggaagagtgggggtcatggagtctgtgttctcggagctgtggaaggggttcccgctcacgaatgcgcacctgcgtgccacctcaacatggcggcaaggcttgtgagggtccagagcttcagacaaagctttgttccatggccgcctgccctgtagaggggcagtggctggagtggggcccatggggcccttgcagtaccagttgcgcgaatggaactcagcagcgctcacgtaagtgctccgtggccggacctgcgtgggcaacctgtacaggagccctgaccgacacccgggagtgctccaacctcgaatgcccagctactgattccaaatgggggccctggaatgcgtggtcgctctgcagcaagacctgcgacacaggctggcagaggcgctttcggatgtgccaggccaccggcacccagggctatccctgcgaaggaactggtgaggaagtgaaaccatgctcagagaaaaggtgcccagcctttcacgagatgtgtagagacgagtatgtgatgctaatgacctggaagaaggcggcagccggcgagattatctacaacaaatgtccaccgaatgcttcaggctccgcatcgcgcaggtgtctgctgtccgcccagggcgtcgcctactggggattgccatccttcgcccgttgcattagtcatgaatacagatatttgtatctcagtctaagagaacacttggcaaagggtcagcgcatgcttgctggggagggtatgagtcaggtcgtgagatccctgcaagagctgctcgcacgtcgcacctactacagtggtgatctcctattcagtgtagatatattgagaaatgtcactgacactttcaaaagagcaacttacgtgccttccgccgatgacgttcagcggttctttcaggtcgtcagctttatggtcgacgccgagaacaaagagaagtgggatgatgctcagcaggtgagccctggaagcgtgcacttgctgcgggttgtggaagacttcattcatctggtcggcgatgcactcaaggcctttcagtcttccctgatcgtcaccgataaccttgtgatcagcatccagcgcgagcctgtgtccgctgtgtcatctgacatcacatttcccatgcggggcagacgtgggatgaaagactgggtaagacactctgaagatcgtctcttcctgcctaaagaggtgctcagcttgagctcacccggaaagcctgctacttccggggccgcgggctcccccgggcgcgggcggggacccggcacagtaccaccaggtccgggtcatagccaccaaagactgcttccagctgaccctgacgaaagtagttacttcgtaattggcgcagtcctgtatcggactctcgggcttattctccctcctcctcgtccacccttggccgtcacttccagggtcatgaccgtgacggtgagacccccaacccagccaccagctgagccacttatcaccgtggagttgtcttatattataaatggaacaaccgatccgcattgcgcctcatgggattactccagagctgatgctagttcgggtgattgggacaccgaaaactgtcagacacttgagactcaggctgcacacacaagatgtcaatgccagcatttaagcactttcgccgtgcttgctcagcctcccaaggacctgactttagagctggcagggtcccccagtgtccctctagtgatcggatgcgcagtgagttgtatggctctgttgaccctgttagctatctacgccgccttctggcggttcatcaaatccgaacgcagcattatcttgctgaacttctgcctctcaattctggccagcaacattctgatcctggtgggacagagtagggtactctcaaaaggcgtgtgcacaatgactgccgcgttcctgcattttttctttctttcctccttctgttgggtgctgaccgaggcctggcagagttatttggcagtcatcggccgtatgcgtaccaggcttgtccggaagcggttcctatgcctcggctggggccttcccgctcttgtggtagccgtgtctgtaggttttaccaggacaaaaggctatggaacctcttcctactgctggctgagcttagaagggggattactctatgcgttcgtgggccccgctgccgtcatagtgctggttaatatgctgatcggcataatagtctttaacaaactcatggcgagagatggcatctctgataagtccaaaaaacaaagagctggaagcgaacgctgtccctgggcaagcttgcttctgccttgcagtgcttgtggggcagtgcctagcccccttttatccagcgcatcagctaggaacgccatggccagcttatggagttcctgcgttgtcctgccacttttggccctgacgtggatgtcagccgtgttagccatgacagatcgacgcagcgtcctgttccaggcactgttcgcagtgtttaactccgctcagggctttgtgatcaccgctgtgcattgcttcctgcggcgcgaggtgcaagatgtggtgaaatgccagatgggcgtttgtagagcagatgagtctgaggatagtccagacagttgtaagaatggtcaattgcagatcctgtccgactttgagaaggatgttgatttggcgtgtcaaactgtgctctttaaggaagtgaatacctgcaacccaagcactatcacaggaaccctgtctcgactgagtctcgacgaggacgaggagcctaagagctgtcttgtaggaccagaaggttcactttctttttctccactgccgggtaacatcctggtccccatggccgccagccccgggcttggtgagcccccaccgccgcaagaggccaatccggtatatatgtgcggcgaaggtgggcttcgccagctggacttgacatggctcagaccaacggagcccggctcggaaggggattatatggtgttacctagacggacactgtccctgcagcccggcggaggcggcgggggcggggaggacgcccctcgggcacgaccggagggtaccccccgtagggcagcgaaaaccgtagctcacacggagggctaccccagttttttaagcgtagatcactcagggcttgggctgggtcctgcttacggctccctccagaatccatatgggatgacttttcagcctccccctccgacaccatctgcacggcaagtccccgaaccaggtgagagaagcaggactatgccccgtacagttccagggagcactatgaagatgggaagcctcgaaagaaaaaagttgaggtattctgatctcgatttcgaaaaagtcatgcatactcgcaaacggcactctgaactgtaccacgagcttaaccagaagttccatacatttgacaggtaccgctcgcagtctaccgctaaggacaagccctctccgggcgaacgcccaagcctcagtcagcataggcgccaccagagttggagcacctttaaaagcatgacactgggctcgctgccaccaaaaccacgggagcggctgactctccacagggcggcagcctgggagccgactgaaccaccagacggcgacttccagaccgaggtgtag

SEQ ID NO: 109905 - DNA, 4401 bp, synthetic construct
  misc_feature 1..4401: note = Description of Artificial Sequence: Synthetic coding sequence
  source 1..4401: mol_type = other DNA
atgacgcccgcctgccctcttttgctatctgttatcctctctctcaggttggcgacagccttcgaccccgcacccagcgcttgctccgcactcgcctcaggggtgctttatggagccttctccctccaagacctgtttccgacaatagcctccggttgcagctggaccctggagaatcctgacccgactaagtacagtttgtacctgaggttcaatagacaggagcaggtgtgcgcacacttcgccccccggttattgccacttgaccactatcttgtgaacttcacttgtttgagaccttctcccgaagaggctgtggcacaggctgagtccgaggttggcagaccagaggaagaagaagccgaggcagccgccggcctcgagctctgttctgggagtggaccttttaccttcctgcactttgacaagaacttcgtgcagctgtgtctgagcgctgagccatccgaggcgcctcggctgctagcacctgctgccctggcattccgctttgtggaggtcttactcattaacaataacaacagttctcagtttacatgcggcgtgctttgccggtggagcgaagaatgcgggagagctgcaggcagagcatgtggctttgcccaaccaggatgttcttgccccggggaggcaggagccggctcgacgactactacaagtcctggcccccctgccgcccatacgctgtcaaatgccctggtgccgggcggccccgcccctccggctgaagctgacctgcactccgggagctcgaacgatctgttcactactgagatgaggtacggcgaagagcccgaggaggagccaaaggttaagactcaatggcctaggtctgcagatgagccagggctgtacatggcccaaacgggggacccagccgcggaggaatggagtccttggtcggtctgctccttgacatgcggccagggtctgcaggtgcggacacgcagctgcgtatctagtccttacggaaccctgtgctccgggcccctgagggaaacccgaccctgtaataactccgccacctgtccagtggaggggcagtggctggaatggggcccatgggggccatgcagcacttcttgtgctaatggcacacagcagagatccagaaaatgcagcgtggccggacctgcctgggcaacatgcacaggcgccctaaccgacactcgagaatgcagtaacctcgagtgccctgccacagacagcaaatggggcccttggaacgcatggagtctatgttcaaaaacttgtgacacaggatggcaaaggcggttccgtatgtgccaggccaccggaacccaggggtacccatgcgaaggtaccggggaggaagtgaagccatgcagcgaaaagaggtgccccgcttttcatgagatgtgtagggacgagtacgttatgctgatgacatggaagaaggccgccgctggggaaataatctataataagtgccctccgaatgcctcaggcagtgcaagcagacgatgtttgcttagtgcccagggcgtcgcttattgggggcttcctagtttcgcgagatgcatatcccatgagtacagatacctctatctgtctctgagggagcacttggctaaaggacaaaggatgctcgccggggagggtatgtcacaggtagttcgctcactacaggagttgttggcgcgcaggacgtactattcaggggatctcttgttctccgttgacatccttcggaacgtgaccgacacctttaagcgagccacatacgttccctccgcagacgatgtacagcgctttttccaggttgtaagttttatggttgacgcggaaaacaaagagaagtgggatgatgcgcagcaggtgagtccaggctcagtccatcttctgagggtcgtcgaggacttcatccacctcgtgggggacgccctgaaagctttccagtcaagtttgatcgtgacagacaacctggtgatttcaattcaacgggagcccgtgagcgccgtgtcctcagatatcacatttcctatgcgaggcaggcgtggcatgaaggactgggtccgccacagcgaggacaggctgttccttcctaaggaagtgctgtccctcagcagtccaggaaaaccagcaacatccggggctgccggaagtccgggccgaggtcgaggcccaggcacagtgcccccaggccccggccatagccaccagaggctgctccccgcagacccagacgagtcttcatacttcgtgatcggggcagtgctgtaccgcacgctcgggcttatcctcccgcctccccggccacccctagccgttacctctagggttatgacagttactgtgcgcccccccactcaacctcctgcagagccccttattaccgtggaactgagctacatcataaatgggacgacggacccccactgtgcttcgtgggattactctcgcgcagatgcttccagtggtgactgggacactgagaactgtcagacactggagacacaggcagcacacacaaggtgtcaatgccagcacctgagcactttcgccgtgctggctcagccacctaaagatctcactctggagcttgctggaagcccttctgttcccttagtgatcggttgtgccgtgagttgtatggcgctcctgactctgctcgccatttacgcagcattttggcggttcataaaatccgagcgcagtattattctactgaacttctgtttgtcgattctggcttcgaatattttgatactggtggggcagtcaagagttctctcaaaaggagtgtgcaccatgaccgctgcattcctgcatttcttctttctgtctagtttctgttgggttttgacagaggcttggcagagctacctggcagtgattgggagaatgcgcacacgcctggtccggaaaagatttttgtgcttgggctggggcctgccagctctagtggttgcagtctctgtgggattcaccagaactaaagggtatggcactagctcctattgctggctctccctcgaaggcggactgttatacgcctttgtgggacccgccgctgtcatcgtgctggtgaatatgctcatcggaattattgtgtttaacaagctaatggcccgggacggcatctcagacaagtctaagaaacagcgtgcaggcgcctcactgtggtcaagctgcgtggttctgcccctcttggccctgacctggatgtcagcagtactcgcgatgaccgacaggcggtcggtgctctttcaggccttgttcgccgtgtttaactcagcgcaggggtttgtgatcaccgccgtgcactgctttttacgcagggaggtgcaggatgtcgtcaagtgtcagatgggggtctgcagggctgatgagagtgaggactcccctgattcctgcaaaaatggacagctgcagatcctgtccgatttcgagaaggacgttgatttagcctgtcaaacagtgctgttcaaggaagtgaatacctgtaacccatctaccattactggcacactgagccgtttaagcctggacgaagatgaggaacctaaaagttgtttagtgggacccgagggaagcctatcgttctccccccttcctggaaacatcctggtcccaatggccgcctctcctggcttgggcgaaccacctccaccccaggaggcaaaccctgtctatatgtgtggagagggaggattgaggcagctggaccttacctggcttcgtcctacggagcctggctctgagggggactatatggtactgccacgccggaccctctccttgcagcccggtggcgggggtggcggaggtgaggatgccccacgcgctagacccgaagggacaccccgcagggcagcaaagacagtcgcccacacagaagggtaccccagcttcctgtccgtcgatcactctggcttggggctgggacccgcctacgggtccctgcagaatccatatggaatgactttccaaccaccgccacctacgccctctgccaggcaagttcccgaacctggtgaaaggagccgtactatgcctcgaacagttccagggtctacaatgaagatgggatctttggaaagaaaaaaactgagatacagcgaccttgactttgagaaggtgatgcacacccgcaaaagacatagcgaactgtatcacgaattgaaccagaagttccacactttcgacagatatcggagtcagagcaccgccaaggataaaccatccccgggtgagaggccgtcactgagtcagcataggcgtcaccagagctggtcaacctttaaaagtatgactttgggatctcttccaccaaagccacgagagcgtctaacccttcatagggctgctgcctgggagcccacggagcccccagacggggacttccagacagaagtctag

SEQ ID NO: 109906 - DNA, 4500 bp, synthetic construct
  misc_feature 1..4500: note = Description of Artificial Sequence: Synthetic coding sequence
  source 1..4500: mol_type = other DNA
atgacgcccgcctgccctctactgcttagtgttatactttcgctgcgcctggcaacagcattcgacccagccccttcagcctgtagtgccttggccagcggtgtcctgtatggcgccttctctctgcaagacttgtttcctaccattgcctccggctgcagttggacattggagaaccccgaccccaccaaatactctctgtatttgcgatttaaccgacaggagcaagtgtgcgcgcacttcgcaccccgactcctgcccctcgatcactaccttgtgaatttcacatgcctgaggccctcaccagaggaggccgtggcacaagccgagagtgaagttgggcgccctgaagaggaagaggccgaggcagcagccggtctggaactgtgctccggttccggcccattcaccttcctgcacttcgacaagaactttgtgcaactctgcctctctgcagagccctctgaggcacccagactcttggccccagccgcactcgcgttccggtttgtggaagtgctcttaataaataacaacaatagcagccagttcacctgtggagtgctgtgcaggtggtctgaagaatgtgggcgagctgcggggagggcctgtggtttcgcccagccaggatgctcttgtcccggtgaggccggcgctgggtcaactacgacgaccagtcccggcccacctgccgcccatactctctcaaacgctcttgtaccaggcggccccgcacctcctgccgaagcagaccttcattccggaagtagtaatgatttgtttactacagaaatgaggtacggagaggagcccgaagaggaacccaaggtgaagacacagtggccaagatctgccgacgaaccgggattgtatatggcacaaacagtgcatggcgtctgggaggaatggggcagctggtccttgtgcagccgatcctgcggtagagggtcaaggagcagaatgcgaacctgcgtcccaccacaacacggcgggaaggcgtgcgaagggcctgagctgcagaccaaactatgcagtatggccgcatgcccagtggagggacaatggctcgagtggggaccctgggggccttgctctacttcttgtgctaatggtactcagcagcggtccaggaagtgctcagttgcaggcccagcttgggcaacgtgcaccggggcgctgactgataccagggagtgtagtaacttagagtgccccgcaacagacagcaaatggggaccttggaatgcctggagtttatgctccaaaacttgtgacactggatggcaaaggagatttcgaatgtgccaggcaacgggcacccagggatatccttgcgaagggactggggaagaggttaaaccttgtagcgaaaagcgatgtcctgctttccacgagatgtgcagggacgagtatgttatgctgatgacctggaagaaagcggctgcaggggaaattatttacaataaatgtccccctaacgccagcgggtcggcctctcggaggtgcctgctcagcgcccaaggggtggcctattggggcctgccatcctttgcgcggtgtatttcccacgaatacaggtacctgtacctctctcttcgggagcaccttgccaaaggtcagcggatgttggccggagaggggatgtcacaggtggtgaggtccctgcaggagctcttggctcgccggacatactatagtggagatttgttattttccgtggatatccttcgaaacgtcactgatacgttcaaaagggcaacctacgtgccaagcgccgatgacgtacagagattcttccaggttgtgagcttcatggtggacgcagagaataaagagaagtgggacgatgcccagcaggttagcccgggctccgtgcacctgttacgggtggtggaagattttatccacttggtgggagacgcactcaaggcattccagtcgagtctgattgtaacagacaacctcgttatttctatacaaagggaacccgtgtccgccgtttcaagcgacataactttcccaatgcgtgggaggagagggatgaaagactgggttagacattccgaagatcgactgtttctccccaaggaggtgctgtcgttgagcagccctggcaaaccggccacctcgggtgccgcagggtctccgggacgcgggcgcgggccaggcaccgtgccacccggcccggggcactcccatcagaggcttctcccggccgatcctgacgaaagttcctatttcgtgataggggctgttctatatcgcacacttgggcttattctccctcctccccgaccaccactggcagtgacttcgcgggtgatgactgtgaccgtgcgcccacctacccagccacctgccgaacctttgatcacagtggaattatcctatatcatcaatggaactactgacccgcactgtgcatcttgggactacagcagagctgacgcaagttcaggcgactgggacaccgagaattgccagaccttggagacccaggcagcgcacacacgctgtcagtgccaacacctcagtacctttgcagttctcgctcaaccaccaaaagatttaaccttagagctggccggatctccgtcagtcccattggtgatcgggtgcgctgtgagctgcatggcccttcttaccctgttagcgatctacgccgccttttggcgtttcattaaaagcgaaaggagcatcattctcctgaacttctgtctgagtattcttgcatccaacatactgattctagtcggtcagagccgggtgctgtccaagggcgtgtgtacaatgacagcagcgtttctgcacttcttcttcctgagttccttttgttgggtgctgaccgaagcctggcagagctatttggccgtcatcgggagaatgcggacgagattagttcgcaagaggttcctgtgtctggggtggggactgcccgccttggtggtggccgtttcagtgggattcactcggaccaaaggttacggcacgagctcatactgctggctctcacttgaaggcggtttactgtatgcatttgtgggcccagctgctgtcattgtgctggtgaacatgttgatcgggataatcgtattcaataaactgatggctcgggatgggatatcagataagagtaagaaacagcgcgctgggagcgaaaggtgtccatgggcaagcttgctgctgccatgcagtgcttgtggagccgttccatcccccttgttgagctccgcctcagctcgcaatgccatggcttccctatggtctagttgtgtggtgctacctctgctggcactgacctggatgagcgccgtgctcgcaatgaccgatagacggtctgtcctcttccaagcacttttcgccgtgttcaactcagctcaggggtttgttatcaccgctgtacattgttttctgcgcagggaagtgcaggatgtggtcaaatgtcagatgggcgtgtgtagagccgatgaatctgaggattcgcctgattcgtgtaaaaacggccagctgcaaatcctgagtgactttgaaaaagatgtcgatttggcttgtcagactgtgctcttcaaggaggtcaacacatgcaacccctcgacaattaccggaactctgtcacgattgtcacttgacgaggacgaggaaccgaaatcttgcctggtcgggccagagggctccctgtcattctcacccttgcccggtaatatcttggtcccaatggcagcctcgcctggtctcggtgagcctccccctccacaggaagccaatcccgtctacatgtgcggagaagggggtcttaggcagttggatttaacatggttacgcccaacagagcccggttctgagggcgattatatggtgctgccgagaaggacactttcattgcagcctgggggcgggggcggcggcggggaagatgcacctagggcccgcccagaaggcaccccacggagagcagccaagaccgtcgctcacacagaagggtacccttcatttctgtccgtggatcacagcggattaggccttggccctgcttacgggtctctgcaaaacccttacgggatgaccttccagcctcccccacctacacccagcgcgagacaggtcccagaacctggagagcgctctcgcaccatgcctcgcacagtcccagggtcgaccatgaaaatggggagcctggaacgcaagaaattgcgatacagcgacttggattttgaaaaagttatgcacacccgcaagcggcacagtgagctttaccatgaactgaaccaaaagtttcacaccttcgacagatatagatcccagtccacagccaaggacaaacccagccctggagagcgcccaagtctcagccaacacaggcggcaccagtcttggtccacttttaagagtatgacccttggcagtctcccacctaagcccagggaacgcttgacacttcacagagcggcagcatgggaacctactgaaccgcccgatggcgacttccagaccgaagtctag

SEQ ID NO: 109907 - DNA, 4503 bp, synthetic construct
  misc_feature 1..4503: note = Description of Artificial Sequence: Synthetic coding sequence
  source 1..4503: mol_type = other DNA
atgctgtcactgcgggggccggatactcatggaaagggtcaccgcatgactcctgcctgccctctgctgttgtccgtgatcctgagcctgcggctggcaactgcattcgacccagccccgagtgcctgttcggcgcttgcaagcggcgtgctttatggcgcctttagccttcaggatctcttccccacaatcgcatccgggtgctcctggaccctcgagaatccagatcccacaaaatactccctctatctgaggtttaatcgccaggaacaggtgtgcgcacactttgctcccagactgttgccgcttgatcattatctggttaattttacgtgtctaagaccatcccctgaagaagcggttgctcaagctgaatccgaggtcggccgtccagaagaggaggaagccgaggcagcggctgggctggagctgtgctctggttcaggaccttttactttcctgcacttcgataaaaactttgtacagctctgtttaagcgccgagcctagtgaggcgcctcgtctccttgcccccgctgccctcgcctttaggttcgtagaagtgctgctgatcaacaataataactcaagtcaatttacctgtggggtgctgtgtcgatggagtgaagagtgcggacgggccgcaggacgggcctgcgggtttgctcagccaggctgctcttgtcctggggaggctggggctggcagcactacaaccacctcaccaggccctcctgccgcacacacgttgagtaacgctctagttccaggcgggcccgctccccccgccgaagcagacctccacagtggcagtagcaatgacctgttcactactgaaatgcggtatggggaggagccagaggaagaaccaaaagtcaagacccagtggccacggagcgcagatgaaccgggcctgtacatggctcagacagttcatggtgtgtgggaagagtggggctcctggagcctgtgtagtaggtcatgtggcagaggatcacgctcacgaatgcggacatgtgtgcccccccagcatggcggaaaggcgtgcgaggggcccgaacttcagacaaaactctgctctatggcagcatgccctgtggagggtcagtggttggaatggggaccgtggggaccttgttctacctcttgcgcgaatggcacccagcagcgctcgagaaaatgttctgtcgctggcccagcttgggcaacctgtacgggtgccttaaccgacacaagggaatgtagcaatctggagtgtcctgccaccgattccaaatgggggccttggaacgcgtggtcactgtgtagtaaaacttgcgataccggttggcagagacggtttagaatgtgccaggcaactggcactcaaggatatccctgtgaaggtactggcgaagaggttaaaccctgtagcgaaaaacggtgccccgctttccatgagatgtgtagggacgaatacgttatgcttatgacttggaagaaggcagccgcaggagaaataatctacaataaatgcccaccaaatgctagtgggtcagcttcgcggaggtgtctcctgagtgctcagggggtagcttattggggcctaccaagctttgctagatgtatctcgcacgagtatcgttatctctatctatcactgagagagcatcttgcaaaaggacagcggatgctagctggcgaaggtatgtctcaggtcgttagatccttgcaggagttactggccaggaggacttattattcaggagacctgctgttttctgttgatattctaaggaacgtcacggatacattcaagcgcgctacctatgtcccgtcagctgatgatgtccagcgattttttcaagttgtgtccttcatggtagacgccgagaataaggagaaatgggatgacgcccaacaggtatcccccgggtctgtgcatttacttcgagtggtggaagacttcatccatctcgttggggatgcactgaaagctttccagagttccctgattgtcacagacaatctggtcatttccatccaacgcgagcctgtcagcgctgtttcttccgatattacgttcccaatgaggggacgaaggggaatgaaagactgggtgcggcatagcgaagatcggttgttcctgccaaaggaggttctcagtctgagctcccccggaaagcccgccacatcaggggctgcagggagcccagggcggggacgagggccgggcacggtgccaccagggcccggccactctcaccaacggctcctccccgcagatcccgatgagtcctcgtacttcgtgattggagcggtgctgtacagaactctgggtctgatcctccctcctccgcgtccccctcttgcagtgacctcgcgtgtgatgactgtcacagtgagacctcccacccagccccccgcagagccccttattacagtggagctgtcatatataattaatggcacgaccgatccacattgcgcttcctgggattatagcagagctgacgcctcgagcggggattgggatacagagaactgtcagacacttgaaacacaggccgctcacacaaggtgccagtgtcagcacttatctacatttgcagtgctagcccagcctcccaaggacctaacattagaactagccggctcgcctagtgttcctctggtgattggatgcgcagtgagctgcatggccctgctgacattgctggctatttatgcagccttctggcgcttcataaagtccgaaaggagcatcatcctcctcaacttttgtctaagcatcctggcatccaacattcttatcctggtggggcagtctagggtcctgagcaaaggagtgtgcacaatgacggcagccttcttacatttcttcttcctttcttcgttctgttgggtgctcaccgaggcgtggcagtcatacttggccgtcatcggtagaatgagaacaagactcgttagaaaaagattcctgtgcttaggatggggcctacccgctcttgtcgtggcggtaagtgtgggattcacaagaacaaaggggtacggcacctcttcatattgctggttgagccttgaaggcgggctgctctacgccttcgttggcccagcagctgtgatcgtgctggtgaatatgctgattggtataatcgtgttcaacaagctaatggctagggacggaattagcgataagagtaagaaacagagagcgggcgccagcctgtggtccagctgtgtagtgctgcctctactcgccctgacgtggatgagtgccgtcctggccatgaccgatcgtagatccgtgctgtttcaagcgctctttgctgtgttcaattccgcccagggtttcgtcattaccgcggtgcactgtttcctgcggagggaggttcaggatgtggtcaagtgccaaatgggcgtgtgcagggcggatgaaagcgaggattcccctgatagctgcaagaatggtcagctgcaaattctcagcgatttcgagaaggatgtagacttggcctgccagaccgttctatttaaggaagttaacacctgtaacccttctaccattactgggaccctgagccgcctcagcctcgatgaagacgaagagcctaagtcctgtctggtcggccctgagggatcactaagttttagccctcttccaggcaacatactggtgcctatggcagcatctcctgggcttggggaaccgccaccgccccaggaggcaaacccggtttacatgtgtggagaaggcggcttgcggcaactagatttgacatggcttcggccaaccgagcccggaagcgagggagattatatggtgttgccacgtaggactctctctttacaaccgggaggcgggggtgggggaggcgaggacgcccccagggcacgtcctgaagggacacctcgcagggccgccaaaaccgtagcccatactgaggggtacccatcttttctcagcgtggaccacagtggcctgggactggggcctgcttatggctccttgcagaatccttacggcatgacatttcaacccccgccaccaactcctagcgcacggcaggtccccgagcccggagagcgctcacgcaccatgccccggaccgtcccgggttcaacaatgaaaatgggctccctcgagagaaagaagctgcgctactccgatctcgatttcgaaaaggtgatgcacactcgcaagaggcattccgaattatatcatgagcttaaccagaaattccataccttcgaccggtatcgctctcaatcaacagctaaacgtgagaagagatggtccgtgtcaagtgggggagctgccgaacgatctgtgtgcacagacaagcccagccccggcgagagaccaagtctctctcaacatcggagacaccaatcctggagtacatttaagtcaatgaccctaggcagccttcccccgaagccgcgtgaaagactcaccctgcacagggcagctgcatgggaaccaactgagccaccagatggagactttcagaccgaggtgtag

SEQ ID NO: 109908 - DNA, 2544 bp, synthetic construct
  misc_feature 1..2544: note = Description of Artificial Sequence: Synthetic coding sequence
  source 1..2544: mol_type = other DNA
gggaagggtcacaggatgacccctgcttgtccactgctcctttccgtgatcctttccctgagattggccactgcatttgacccagctccttcagcgtgcagtgccctggcatctggggtgttgtacggggcttttagcctgcaggatctcttcccaaccatagcttccgggtgttcttggacactggaaaatcctgacccaactaagtattcactttatctacgatttaaccgccaggagcaagtgtgcgcccatttcgccccgagactgttgccactggaccactaccttgtgaattttacatgtttgaggccttcaccagaggaagcggttgctcaggcagagtctgaggtgggccgaccagaggaagaggaggctgaagcagctgcgggactagaactttgctctgggagcgggccgttcacatttctgcattttgataagaactttgtgcaactgtgtctcagcgctgaaccctccgaagccccacgcctccttgcccccgctgcgctggcctttagattcgtggaggttctgttgattaataataataatagcagtcagttcacatgtggcgttctatgcaggtggtcagaggaatgcggacgggccgccgggcgagcatgtgggttcgctcaacccggatgctcttgtcccggagaggcgggagccggtagcaccacgactaccagtcctggaccacccgccgcgcacacccttagtaatgctttggtgcccgggggaccagcacctcccgccgaggcagatttacactccggtagcagtaacgatctatttaccaccgagatgcgctacggcgaagagccagaggaggagccaaaggttaagacccagtggcccagatcagcagacgagccaggcctttatatggcacagacgggggaccctgccgccgaggagtggtccccttggagcgtttgtagcctcacttgcggtcagggcctccaggtgagaacgagatcatgtgtcagctcaccatacggaaccctgtgctctgggccgctcagagagacacgaccatgtaataatagcgctacctgtcccgtggaaggtcagtggttggaatggggaccatgggggccgtgcagcacatcttgtgccaatggtacacagcagcgctcaaggaaatgttctgttgccggaccagcctgggcaacatgcactggggctctgactgatacacgggagtgcagcaatctagaatgtcctgctacagattctaagtgggggccatggaacgcctggtctttgtgctccaaaacctgtgacaccgggtggcagaggaggttccgcatgtgccaggcgaccggaacgcaaggctatccatgtgagggaacgggggaggaggtgaagccctgctcagagaaacgctgtccggccttccacgagatgtgcagagatgaatacgtgatgttaatgacctggaaaaaggcagctgccggggaaattatctataacaaatgtccgccaaatgcctcaggctctgcttcgaggcggtgtctcctgtccgcacagggagtggcctattgggggctgccctcatttgctagatgtatttcccacgaatataggtatctctacctgagtctccgtgagcacctagccaaaggccaacgtatgctcgcgggcgaaggtatgtcacaggttgtacgaagccttcaggagctgctggccagacgaacatactactcgggagatctcttgttttccgtcgatatactgcggaacgtgactgataccttcaaacgagccacatacgttccaagtgctgatgacgtacagcgattcttccaggtggtctcattcatggtggatgccgaaaacaaagagaaatgggacgacgcacaacaggtgagccctggctctgtgcacctgctgagggtggtagaagattttattcacctcgtaggggatgcgctcaaggccttccagtcctcactcatagtgaccgacaacctcgtgatctcaatccagcgggaaccggtgagcgcagtgtcctccgatatcacattcccaatgcgggggagaaggggaatgaaagactgggttagacacagtgaggatcgactcttccttccaaaggaagtcctgtctttgtcctcacccggtaagccagcaacctctggagctgcaggcagcccgggaagaggaaggggtcctgggacagtgccgcctggtcccggacacagtcatcagagactgctcccagccgatcctgacgagtcttcgtatttcgtcataggagctgtcctgtatagaacactagggcttatcttaccaccgcctagacctcccctcgcagtaacctcccgagtcatgacagtgacagtgaggccccccacccagccacccgcagagcccctgattacagttgaactgtcctacatcatcaacggaacaactgatcctcactgcgcttcatgggattattccagagccgatgcatcatccggggattgggatacagaaaactgtcagacactggagacccaggcggcgcacacacgctgtcagtgtcagtag

SEQ ID NO: 109909 - skipped

SEQ ID NO: 109910 - DNA, 3528 bp, synthetic construct
  misc_feature 1..3528: note = Description of Artificial Sequence: Synthetic coding sequence
  source 1..3528: mol_type = other DNA
atggcccaaacggtgcacggggtctgggaagaatgggggtcttggagcctatgttctcgttcttgtggtcgcggttcgcgctcaaggatgaggacatgtgtcccaccgcaacacggcggtaaggcctgcgaggggcccgaacttcagacaaagttgtgtagtatggctgcctgcccagtcgagggacagtggcttgagtggggcccttggggtccctgcagtaccagctgcgctaacggcactcagcagcgctctaggaagtgtagtgttgcaggtcctgcatgggccacatgtaccggagccctcaccgatactagggagtgctccaatctagaatgtccagctacagacagtaagtgggggccatggaacgcgtggagcctttgtagcaagacctgcgataccggctggcagcgaaggtttcggatgtgccaagctacaggaactcagggctacccatgtgaggggaccggcgaggaggttaaaccgtgctcagaaaaacggtgcccagcctttcatgagatgtgtcgcgatgaatacgtcatgctgatgacttggaagaaggccgctgctggggagatcatttacaacaagtgcccacctaatgcaagcggaagcgcgtcccggcgctgtttgttgagcgctcagggcgtggcttactggggcctcccttctttcgcacggtgcatttctcatgagtaccggtatctgtatctctccctgagggagcacttagccaaaggacagcggatgctcgccggggagggaatgagccaagtggtgcgaagcttgcaggagttactagcaagacggacatactatagcggagacttgctgttcagcgtggatatacttagaaatgtgaccgacaccttcaagagggccacgtacgtcccttccgccgatgacgttcagcgtttttttcaggtggtgagcttcatggtggatgccgaaaacaaggagaagtgggacgatgctcaacaagtgtcacccggctcagtgcatctgctgagagtggtcgaagacttcattcacctagtaggtgatgcactcaaggccttccaaagttctcttatcgtcactgacaacttggtgatctccatccagcgcgagcccgtctctgctgtctcgtccgatattacctttcctatgcggggccggcgtggaatgaaggactgggttagacacagcgaggaccggctcttcctgcctaaagaggtcctgtctctgtctagtcccggaaaaccagccacgtctggcgcagcaggatcccccggacggggtcgtgggccaggaaccgtgccccctgggcccggacattctcaccaaagattgctgcctgccgaccccgacgagtcttcctacttcgtgatcggcgctgtgctttacaggacactgggcttgattctcccgcctccacgaccacccctcgctgtcacatccagagtgatgacagttacggttcgaccacctacccagccaccggctgagcccctcatcaccgtcgaactgtcctacattatcaatggcactacagaccctcactgcgcctcgtgggattattctagagcagatgcttcctcaggagactgggatacagagaattgccagaccctggaaactcaggccgctcatacccggtgtcaatgtcagcatttgagtacatttgcagtgctggcccagcctcctaaggacctgactctcgaattggctggtagtcccagcgtgcccctggtcatcggatgtgccgtgtcctgcatggcactgctgactctgttggccatctatgccgctttttggaggttcattaagagtgagagatcaataatcctacttaatttctgtctgagcattctggcctctaacatcttgatattggtcggtcaatctcgcgtgctgtccaagggggtgtgcacaatgacggccgccttcctccattttttcttcctgtcttccttctgctgggtactcactgaggcttggcaatcatatttagccgtgatcggtaggatgcgtacacgcctcgttagaaaacggtttttgtgcttgggttggggcttgccagcgcttgtggtagccgtttcagtgggcttcacccgcaccaaggggtacggaacatcatcgtactgctggctgtccttggagggcggccttctttacgccttcgttggccctgcagctgttattgttttggtcaatatgctgattgggataatcgtctttaacaaactgatggccagggacggaatttctgacaagtcaaagaagcagagagcaggggcatccctgtggtcaagttgcgtcgttctgccccttctcgctctgacttggatgagcgctgttctggcgatgacggatcgacggtcggtcctgtttcaagctttgtttgctgtgtttaactccgcccagggcttcgtaattaccgctgtgcactgctttctacgcagggaggtccaggatgtcgtcaaatgccagatgggcgtgtgtcgggcagatgaaagcgaagatagtcctgattcttgcaagaacggccagctccagatccttagcgattttgagaaggatgtcgaccttgcatgtcagactgtcctgtttaaagaagtcaacacttgcaacccttcaacgattaccggaacactaagtcgtctgagtttagatgaggacgaagaaccaaaatcctgcctggtcggacccgaaggctctctgagcttctctcctttgccaggcaatatactggtccctatggccgcatcacctggtctaggtgagccgcctccaccacaggaggctaacccggtctatatgtgtggggagggcgggttacgccaactcgacttgacctggcttcggccgaccgaacctggcagcgaaggcgattatatggtgctaccccgcagaactctcagcctccagcccggaggcgggggcgggggaggcgaggacgccccgcgcgcacggccagagggcactcccaggcgagccgccaaaaccgtggctcatacagaaggatatcctagtttcctgagtgttgaccatagcggcctgggccttggcccagcttacgggagtcttcagaatccatacggcatgacatttcagcccccacctcccaccccttctgccagacaggtacccgagcccggggagcggagtagaactatgccacggactgtccccggtagtacgatgaaaatgggttccctggagcggaaaaaacttcggtacagcgacctggattttgagaaagttatgcatactcgcaagaggcacagtgaattgtatcacgaacttaaccagaagtttcacaccttcgatcgctacaggtcccaatctactgctaaggataagccaagtcccggtgaaagacccagcctgagtcaacatcggaggcatcagtcttggtccacatttaagagcatgaccctgggatctctacccccgaaaccacgtgagcggctgaccctgcatcgggccgccgcgtgggagcctacagagccgccagatggtgattttcagaccgaggtgtag

SEQ ID NO: 109911 - DNA, 4656 bp, synthetic construct
  misc_feature 1..4656: note = Description of Artificial Sequence: Synthetic coding sequence
  source 1..4656: mol_type = other DNA
atggagaacaccggatggatgggaaaaggccaccggatgactcccgcgtgccctttgctgttgtccgtcatcctatccctgcggcttgcaacagcgtttgaccctgcacccagtgcctgcagtgcccttgcctccggggtgttgtacggtgcgtttagtctccaggatttgtttccaacaatcgctagcggctgcagttggacgctagagaaccccgacccgaccaaatactccttatacctcaggtttaaccggcaagagcaggtctgtgcacacttcgcacctcgcctcctgcccttagaccactacctggtgaacttcacctgcctgaggccatcaccagaggaagccgttgcccaggcggagagcgaggtcggccgtcccgaggaagaggaggccgaggccgcggcgggtttggaattatgttccggtagcggccccttcacgtttctacattttgataagaactttgttcagctttgcctgtctgctgagccgtccgaagctccgcggttgcttgcccccgcagcactggctttcaggttcgtggaagtgttgctgatcaataacaacaatagctcacagtttacctgtggggtgctgtgcaggtggagtgaggagtgtgggcgcgccgccggcagggcttgcggctttgctcagcccggttgcagctgtccgggcgaagcgggcgcaggttctactactactacttcgccggggcctcctgccgcacacactctgtccaacgccctggtccccggcggcccggcacctcccgcggaggctgatctgcattctgggagttccaatgatctatttactaccgaaatgcgatatggtgaggaacctgaagaggaacctaaggtgaagactcagtggcccaggagcgctgacgagccagggctgtatatggcccagacaggggaccctgcagctgaagaatggagcccctggtctgtctgttcattgacttgcggccagggcctccaggtcaggaccaggtcatgtgtgagttctccctacggaactctgtgcagtggccctctgcgagaaacacgcccatgcaacaacagcgccacgtgtccagttcatggcgtgtgggaagaatggggctcgtggtcactgtgcagccgtagctgcggacgaggcagccggagcagaatgagaacttgcgtgcctcctcagcacgggggtaaagcctgcgagggacccgaactgcagaccaaactttgtagtatggccgcctgtccagttgagggacaatggctggaatggggcccttgggggccctgtagcacttcctgcgcgaatggcactcagcaaagatccagaaagtgctccgtagccggccctgcctgggccacgtgtaccggggccttaacggacactcgggagtgcagcaacctggagtgcccagcaaccgattccaagtggggcccctggaatgcttggagcctttgttcaaagacctgtgacaccggttggcagaggaggtttcggatgtgtcaggcaaccggaacccaggggtatccctgtgagggcaccggcgaagaggttaagccatgttccgagaaaaggtgtcctgcgtttcacgaaatgtgccgggatgagtacgtcatgcttatgacctggaagaaggctgctgctggggaaatcatctataacaagtgcccgcctaatgcaagcggcagcgcctcgcgccgctgcctgctgtcagcccaaggagtcgcatactggggcctaccctctttcgccaggtgcatctctcatgagtataggtatctctacctgagcctccgggaacacttggccaaaggtcagcgtatgctcgctggggaaggcatgtcgcaggttgttcggtcattacaggaactactggccagaaggacgtattatagtggcgaccttctttttagtgtggacattctgcggaatgttacagacactttcaagcgagcaacgtacgttccttcagcagacgacgttcagcggttctttcaagtcgtgagctttatggtggacgccgagaataaggagaaatgggacgatgcccagcaggtgtctcctggctccgtgcatctgctgagagtggtggaggattttatccacctagttggggatgcccttaaggcatttcagagttctctaatagtcactgataacctggtaattagcatccagagagagcctgttagcgccgtaagtagcgacatcacattcccaatgagaggtcgccgagggatgaaagattgggtacggcactctgaagataggttgttccttcccaaggaagtgctgagtctgtcgtcaccagggaaacccgcgacctcgggcgccgccgggagcccaggtagaggtcggggaccaggtactgttccacccggacccgggcacagccaccaaagactgttgccggccgaccctgatgagtcatcatattttgtgataggggcagtgctgtacaggacgctgggactgattttaccaccgcccagaccacctctagcagtgaccagccgggtcatgacagtaaccgtgcgtcccccaactcagccccctgccgagcctctcataactgtagagctatcctatataatcaacggcactacggatccacattgtgcctcatgggactattcccgggccgacgccagcagcggcgactgggatactgagaattgccagacgctagaaacccaggcagcccacacgagatgccaatgtcagcatctgtctacattcgcagtgctagctcagcccccaaaggacctgacactggagttggccggtagcccatcggtgcccctcgtgatagggtgtgcagtttcatgcatggccttgcttaccctactcgccatctacgctgccttctggcgattcatcaagagcgagcgaagcataatactcttaaacttctgcctgagtattttggcaagtaatattctgattctcgtagggcagtcacgtgtgctgagcaagggagtgtgcacgatgactgctgctttcctgcacttcttctttttaagcagtttttgctgggttttaaccgaggcatggcaaagttatctcgctgtaattggcaggatgcggaccagacttgtgagaaaacgatttctctgcttagggtggggcttacccgctttagtggttgccgtgtctgtgggcttcacaaggacaaagggctatggtacctcaagttactgctggctgtcccttgagggtggcttactatatgcgttcgttggccctgccgcagtgattgtccttgtgaatatgctgattggtatcatcgtgttcaataaacttatggccagagatggcatcagtgacaagtccaagaaacagcgtgcgggagcctcattatggtctagctgcgtagtgttgcctctcctcgccctcacatggatgtctgccgttctggctatgaccgacaggcgctccgttttgtttcaggccttgtttgccgtgttcaatagcgcacagggcttcgtcatcacagccgtccattgctttttgcgtcgcgaggtgcaagatgtggtgaaatgtcaaatgggtgtctgcagggcagatgagagcgaggattcccctgatagctgcaaaaatgggcaactccaaatcctgtccgacttcgagaaggacgtggatctggcttgtcagaccgtgctcttcaaagaagtgaacacatgcaacccaagcacaattacaggtaccctgtcaaggttgagccttgatgaggacgaagagcctaaaagctgtctcgtcggaccagagggcagcctctcatttagtccattgccaggaaacatcttagtgcccatggccgcatcccccgggttaggggaacctccaccaccacaggaagcgaatccagtgtacatgtgcggtgaagggggcctccgccagttggacctgacgtggttgcgacccaccgagcccggatcggagggtgactacatggtcctgccccgcaggactctctctttacagcccggaggcggtggcggcggtggggaggatgcaccccgggctcgacccgaagggacgcctagacgggccgcgaaaaccgtggcccacacagagggctacccgagcttcttgtccgttgatcatagcgggctgggccttggccccgcatacgggtctttgcagaacccttatgggatgactttccagcctcctccgcctactccaagcgccagacaggttcctgagcctggggagaggtctaggactatgcccagaaccgttccgggctccaccatgaaaatgggcagtctcgaacgcaaaaagcttagatacagcgatctggacttcgaagtcatgcatacaagaaaacggcattctgagctttaccacgaacttaatcagaagttccacactttcgaccggtaccgatcacagtctactgcaaagagagaaaagaggtggtccgtgagttcaggcggtgctgcggaacgatctgtgtgcactgacaaacctagccccggagagcgccccagcttatcccagcacaggaggcaccagtcctggtcgacttttaagtctatgaccttaggctcgctccctcctaagccacgagagcggctgaccctgcaccgtgccgctgcgtgggaacctacagaacctcctgatggtgactttcagaccgaagtttag

SEQ ID NO: 109912 - DNA, 2187 bp, synthetic construct
  misc_feature 1..2187: note = Description of Artificial Sequence: Synthetic coding sequence
  source 1..2187: mol_type = other DNA
atgctattgccgcaaggtaaagaggccgtagaaggaaagaaatgccaggggaggcagagacgtgcaggcttatcagaggtctggtcgaggaagctcaggaacgagagcctgggtacctggtctacgcagggctgcaagaccgtgctaacagacgcgagtcatacaaagtgtttgtgtgaccgcttaagcacttttgccatattggcccagcagccaagagagataatcatggagagtagtggaaccccctctgtgactctcatcgtagggtctggtctgagctgcctggctctgattactctggcagtggtgtatgccgctctgtggcggtacattcgctccgagagaagcataattctgataaatttttgcctaagcattatttcgtccaatatcttaatcctggttggacaaacgcagacccataataagtcaatttgtacaacaacaaccgcgttcctgcacttttttttcctggcctctttctgctgggtcctgacagaggcctggcagtcttacatggccgtcacgggcaagatccgcactagactgatacgcaaacgtttcctctgcctcggctggggattaccagcactggtggtcgcgacgagtgttgggttcacccgcacaaaggggtatggtaccgaccattactgctggctgtccctggagggaggtttgctatatgctttcgtgggccctgcagcagccgtggtgttagttaacatggtcataggtattctagtgtttaacaagctggtgtccagggatggaatacttgacaaaaagttaaagcatagagccggtcagatgtccgagccacattccgggctgacgctgaaatgtgcgaaatgtggcgtggtgagtaccaccgccctttctgccacaaccgcctcaaatgccatggcaagtctctggtccagctgtgttgtgctcccactgttagccctaacgtggatgagcgcagtgttggcaatgactgacaagaggagtatcttattccagattttgttcgcagtctttgattctttacaggggtttgtcattgtgatggtccactgtattttacgacgtgaggtccaggatgctttccgctgtaggctgcggaattgccaggacccgattaatgccgactcatcaagctccttcccaaatggacatgcacaaatcatgacggatttcgagaaggacgtagacattgcctgccggtctgtattgcacaaagacataggcccgtgtagagctgcaacaataaccggcaccctctcgagaatttccttgaatgatgacgaggaggagaaagggactaaccctgagggcctttcctattcgacactgcccggcaacgtgatttctaaggtcattatccagcagccaacggggctgcacatgcccatgagcatgaatgagctctcaaacccatgcttgaagaaggaaaactcggagctgagacggaccgtgtacctgtgcacagatgataatctgcgcggggctgatatggatattgttcacccacaagagagaatgatggagagtgattatatcgttatgcccagatcatctgtgaataaccagccgagcatgaaggaggagagcaagatgaacatcggaatggagaccctgccacatgagcggctgctgcactataaggtgaaccctgagtttaacatgaacccccccgttatggaccagttcaacatgaacctcgaacagcatctggctccacaggaacacatgcaaaatttaccctttgagccacggacagctgtgaaaaatttcatggcctctgagcttgatgacaatgcagggctaagtcgtagcgaaaccggttcgaccatctccatgtcttctctagaacggagaaagtctagatatagtgatctcgattttgaaaaggtaatgcatacaaggaagcggcatatggaactgttccaggagcttaaccaaaagttccaaactctggatagatttcgggatatacctaacaccagcagcatggaaaatcccgcgcctaacaagaatccctgggatacttttaaaaacccgtcagagtacccacactatactaccatcaacgtactggataccgaagcaaaggatgcactggaacttcggcccgctgaatgggaaaagtgcttgaatttacccctggacgtccaggagggcgattttcaaactgaggtctag

SEQ ID NO: 109913 - DNA, 4569 bp, synthetic construct
  misc_feature 1..4569: note = Description of Artificial Sequence: Synthetic coding sequence
  source 1..4569: mol_type = other DNA
atgaaagcagtgagaaacctgctgatctatatatttagcacatacttgcttgtcatgtttggatttaacgctgcacaggacttctggtgctccaccttggtcaagggtgtcatttacgggtcttattcagtaagcgagatgtttccaaagaactttactaactgtacctggaccctagaaaatcctgacccaaccaagtacagtatttatctcaagttctccaagaaagacctgagctgttccaatttttcccttctggcttaccagtttgatcacttttcccacgaaaagatcaaggaccttttgaggaaaaaccacagcattatgcagctgtgtaactcaaaaaatgccttcgtgtttcttcagtacgataaaaatttcatccagatcaggcgcgtgttccccaccaattttcctggccttcagaagaagggtgaggaagaccagaagtctttcttcgagttcttggtcctcaacaaggtttccccatctcagttcggttgtcatgtactgtgtacctggttggaaagctgtctgaaaagcgaaaatgggagaactgagtcatgtggaataatgtataccaaatgtacttgcccacagcacctgggtgaatggggtattgacgaccagtccttaattttgctgaacaacgtcgtgcttcctttgaacgagcagactgagggctgcctgactcaagaacttcagaccactcaagtttgtaatcttactagagaagccaaacgtccccccaaggaggaattcggaatgatgggcgatcatacgatcaaatctcagcgcccacgatctgtgcacgaaaaaagagttcctcaggagcaggccgacgccgccaaatttatggcacagacaggcgagagtggcgttgaggaatggagtcaatggagcacatgctctgtgacttgtggccagggctcgcaagtgcgtacacgtacttgtgtgagtccctatgggacccactgtagtggccctttgcgcgagagtagagtgtgtaacaacaccgccttatgtccagtgcacggcgtgtgggaggaatggagcccatggagcctctgcagcttcacatgcggccgtggacagcgcacccgtactcggagctgcacgccaccgcaatatggcggaagaccctgcgagggaccggaaacacaccacaaaccatgtaacatcgccttgtgccctgtcgacgggcaatggcaggagtggagcagctggagtcagtgtagcgtgacttgttctaatggaacccagcagcggagtagacagtgtaccgcggccgcacacggaggctcagagtgcagaggcccatgggctgaaagcagagaatgctacaatcctgaatgtaccgccaatggccagtggaatcagtggggacactggtccgggtgcagtaagtcatgcgacggggggtgggagcggcgcattagaacctgccagggcgctgtcatcaccggacaacagtgcgaagggacaggtgaggaagtgagaaggtgtaatgagcagagatgcccagccccttacgagatttgcccagaagattacttgatgagtatggtgtggaagcggacgcctgctggcgacctggcttttaatcagtgccccttgaatgctactggaacgacatcacggcggtgtagcctgtcgctgcacggcgtggctttttgggagcagccaagttttgcgaggtgtatcagcaacgagtaccggcaccttcagcacagcatcaaagaacaccttgcaaaaggtcaaagaatgttggctggggacgggatgtcacaggtaacaaaaacactcctggatctaacccagcggaagaatttttacgcgggagacttgcttatgtctgtggagatactcaggaatgtcacagataccttcaagcgagctagttatatccctgcctcagacggtgtccagaacttctttcagatcgtatccaaccttttagacgaagagaataaggaaaagtgggaagatgcacaacagatctatcctggctcgattgagctgatgcaggtgatcgaagatttcattcatatcgtcggcatgggcatgatggattttcaaaacagctacctgatgacgggaaatgtcgtggcctccatccagaagctgcctgccgccagcgtacttacggacatcaactttcccatgaaaggcaggaagggaatggttgactgggcccgcaactctgaggacagagtggtgatccccaagagcattttcactcccgtcagctctaaggagttggatgaatcttctgtgttcgtgcttggtgcagttctctataaaaacttggacctgatactgcctacgctgaggaattacacggtgattaactctaaaattatcgttgttactatccggcccgagcccaagaccaccgattccttcttggagatcgaactggcgcaccttgcaaatggcactttaaacccatattgtgtgttatgggatgattccaagacaaacgagtccctgggaacctggtctacacagggctgcaaaaccgtgctgacggatgccagtcataccaaatgcctatgtgacaggctctcaacttttgcaatcttggcccaacagccacgggagatcatcatggaatcctcaggtaccccgagcgttacgctcatagtgggatctgggttgagttgtctcgccctcatcacacttgctgtggtctacgccgctttgtggagatatatcaggtctgagcggtcaatcatactcatcaacttttgcctgagcataatatcttctaacattctcatcctagtcggacagactcagactcacaataagtccatctgcacaacaacaactgccttcttacattttttcttcctggcgtctttctgctgggtgttgacagaagcctggcagtcctacatggcagtaactggaaagatacgaacccgactcataagaaaacgcttcctttgtttgggctggggcctgcctgctctggtggtggctactagtgttgggttcaccagaacgaaagggtacggcaccgatcattattgctggctgagcctcgagggcggactcctctacgcttttgtgggtccggcggctgcagtggttctggtcaacatggtcattggaattctcgtgttcaataaactggtctccagagacggaattttagacaagaagttaaaacatcgagccggacaaatgtcggaaccacatagcggactgacactgaaatgtgcaaagtgcggggtcgtgtccactaccgcgctttctgccaccaccgccagtaacgccatggcctccctgtggtcctcatgtgtggtgcttccgctgctggcactcacttggatgtctgcagttctcgccatgactgataagcggtcaattttattccagatactatttgcagtgtttgattccttgcaggggttcgtgatcgtgatggtgcattgcattctgaggcgagaagtacaagacgcatttcgttgtcgactcaggaactgccaggatcccataaacgccgacagttccagcagctttccaaacgggcatgctcaaatcatgactgactttgaaaaagatgtggacattgcctgccggagtgtcctccacaaagatattggaccctgcagggcagccactattacgggcacattatcgcgaatttctttgaacgacgacgaagaagagaaagggacaaaccccgagggcttaagctacagtaccttgcctgggaacgtgatttcgaaggtgatcattcagcagcccaccggcctccacatgccgatgtcgatgaatgagctcagcaatccttgcctaaaaaaggagaactccgagctccggcgcacagtctatttgtgtaccgacgataacttaaggggggctgacatggatattgtgcatccacaggagaggatgatggagtcggactacattgttatgccccggtcctccgttaacaatcagccctccatgaaggaggagagcaaaatgaacatcggcatggaaacactaccccacgaacgcttattgcactataaggtaaatcctgagtttaatatgaaccccccagtgatggatcaattcaacatgaacctagagcagcacttggcccctcaagagcacatgcagaatcttcccttcgagccccgaacggccgtcaaaaacttcatggcctcggagctcgacgacaacgcggggttgagcagatctgagacaggcagtactatctccatgtcatcacttgaacgaagaaaatctcggtattccgacttggattttgagaaggtgatgcacactcgcaagaggcacatggagttgtttcaggagttgaaccagaagttccagacacttgaccgctttcgtgacattccaaacacctctagcatggaaaaccctgcccccaacaaaaacccatgggatacttttaagaatccatcagaatacccccactatacgactatcaatgtgctagataccgaggccaaggacgcgctcgagctcaggcctgcggaatgggaaaagtgccttaatttgccccttgatgtgcaggaaggtgatttccagactgaagtgtag

SEQ ID NO: 109914 - DNA, 1461 bp, synthetic construct
  misc_feature 1..1461: note = Description of Artificial Sequence: Synthetic coding sequence
  source 1..1461: mol_type = other DNA
atggttatcggaattctggtctttaacaagcttgtgagtagagacggaattctggataagaagctgaaacaccgagccggtcagatgtctgagccacattccggcctgacactgaaatgcgctaaatgtggagtcgtaagcacaaccgccctgtccgcaactacggcctctaatgctatggcctccctctggagtagctgtgtggttcttcccctcctcgccctgacttggatgtctgctgttctcgccatgaccgataagagatccattctgtttcagatcctctttgccgtgttcgatagcctacagggcttcgtcatcgtgatggtgcattgtattctccggagggaggtgcaggatgcctttaggtgcaggctcaggaactgccaagatccgatcaacgctgatagttcatctagcttccccaatggacacgcccaaattatgacagacttcgagaaagacgtcgacattgcctgtaggtctgtgctccacaaagacattgggccatgcagggcagctacaataactggtaccctttcgcgaatttctctgaacgacgatgaggaagagaaaggtacaaaccccgagggactctcctactcaaccctgccggggaacgttatctccaaggtgatcatccaacagcctactgggctccacatgcccatgtccatgaatgagctctccaatccatgcctcaaaaaagaaaactccgaactccgccgcacagtctacttatgcacagatgataacctaaggggggcggacatggacatcgtgcacccccaggagcgtatgatggagagcgattacatcgtgatgccgcggagcagcgtgaacaatcagcccagcatgaaagaggagtctaaaatgaacattggaatggagacactgcctcacgagcggctacttcactacaaagtcaatcccgagtttaatatgaatccaccggtcatggaccagttcaacatgaatctggagcaacatttggccccccaagaacatatgcagaacctgccttttgaaccccgcacagctgtgaagaactttatggctagcgaacttgacgataacgccggcctctcccgcagtgaaaccggctccaccatcagtatgagctctttagagcgaagaaagagccggtacagcgacctggactttgagaaggtcatgcacacccggaagagacacatggaactgtttcaggaattgaatcagaaattccagactctggatcgattccgagacatccccaatacttcctccatggagaacccagctccaaacaaaaacccatgggacacattcaagaacccttccgaataccctcattacacgacaatcaacgtgttggataccgaggcaaaggacgccctggagctcagaccagccgagtgggaaaagtgccttaatctccccctggacgtacaagagggcgattttcagactgaggtctag

SEQ ID NO: 109915 - DNA, 978 bp, synthetic construct
  misc_feature 1..978: note = Description of Artificial Sequence: Synthetic coding sequence
  source 1..978: mol_type = other DNA
atgaaggccaaagacttgatcgtgacccctgctaccattttaaaggagaagcctgaccctaacaacctggtgttcggcaccgtcttcaccgaccacatgcttacagtggagtggtctagcgaattcggctgggagaaacctcatattaaaccattgcagaatttgtcacttcatccagggtcctccgccctgcattatgcagtcgaggtgttcgacaaggaggagctgctcgaatgtattcaacaactagtgaagttagaccaagagtgggttccatattccactagcgcctccctgtatattcggccaacttttattgggacagaaccgtcattaggtgtcaaaaaacccacaaaagctcttctgtttgtgttactgtctccagtagggccgtatttttctagcggaacattcaacccagtcagcttatgggctaaccctaagtacgtgagagcttggaaggggggaaccggtgattgcaagatgggcggtaactacgggtctagcctcttcgcccaatgtgaagccgtcgacaacggttgccagcaagtgctctggctgtacggtgaggaccaccagataaccgaggtgggaacaatgaacctcttcttatactggatcaacgaggatggtgaagaggaacttgcgacacctccactggacgggattatccttccaggtgtgacacgcaggtgtattctggatctggctcaccagtggggggagtttaaagtttctgagcggtacctgaccatggacgacctcaccacagccctcgaggggaacagagtgcgcgagatgtttggctcaggcaccgcctgtgttgtttgtcccgtcagcgacatcttgtataagggggagaccatccatattccaaccatggaaaacgggccaaaactggcctcacgcatactgtcaaagctgacggacatacagtatggcagagaggagagcgattggacaattgtgctctcatag

SEQ ID NO: 109916 - DNA, 1158 bp, synthetic construct
  misc_feature 1..1158: note = Description of Artificial Sequence: Synthetic coding sequence
  source 1..1158: mol_type = other DNA
atggactgctccaacggatgcagcgccgaatgcaccggcgaggggggaagtaaagaggttgtgggcaccttcaaggcgaaagatctcatagtgacccctgccactattctcaaagaaaagccagacccaaacaacttggtgttcggcaccgtgtttacagatcatatgctgaccgtggaatggtcctcagagtttgggtgggaaaagcctcacattaagcccttacagaatttatcgttgcaccccggctcttcagctctgcactacgccgtggagctgttcgagggccttaaggcattcagaggcgtcgacaacaagattcgactatttcagcctaatctcaacatggaccgaatgtataggagtgccgtcagagcaaccctccctgtatttgataaggaggaacttctcgagtgtatccagcagctcgtaaagctagaccaggagtgggtaccctatagcacctccgcttctctgtacattaggcctacatttatcggaaccgaaccaagccttggtgtcaagaaaccaactaaggcactgctgtttgtactgttgtcaccagttggcccctacttctcttccggtaccttcaaccctgtgagcctctgggcaaaccctaagtacgtacgcgcttggaaagggggcactggagattgcaaaatgggggggaactatggtagttcactctttgctcagtgcgaggccgtagataatggatgccaacaggtgttgtggctgtatggcgaagaccatcagatcactgaagtgggcaccatgaatctgttcctgtactggattaatgaagatggagaggaagagctggctaccccgcctctagatggcatcatactccctggcgtgacacggaggtgcatactggacctcgcacaccagtggggcgaatttaaagtgtccgagcggtacctgaccatggacgacctgacaacggcactggaaggaaatagggtgagagaaatgtttggcagcggtacggcctgcgttgtgtgtcccgttagcgacattctgtacaagggagagaccatacacattccgaccatggagaatggtcctaagttggcctcccggatcctatccaaactgactgacatacagtacggccgggaggaatcagattggaccatcgtgctgtcctag

SEQ ID NO: 109917 - DNA, 1197 bp, synthetic construct
  misc_feature 1..1197: note = Description of Artificial Sequence: Synthetic coding sequence
  source 1..1197: mol_type = other DNA
atggccagccccctaagaagtgccgcagcacttgcgcgccaggactgtagtaatggctgcagcgctgaatgtacgggcgaagggggctcaaaggaagttgtcggcactttcaaagccaaggacctgattgttaccccagccactatcctgaaagaaaaacccgaccctaataatctcgttttcggtaccgtcttcacagaccatatgctgaccgttgagtggtcttccgagtttggatgggagaagcctcatatcaaacctcttcagaatctctctctgcacccgggaagcagcgccttgcactacgcggtggaactcttcgaggggctgaaagcattccggggggttgacaacaaaatacgcctgttccagccaaatttaaacatggaccggatgtatagatcagccgtgagagcgaccctccccgtgttcgataaggaggagctgctcgagtgtatccaacaactggtgaagcttgatcaagagtgggtgccttactccacatcagcatccttatatatcaggccaacttttatagggacagaaccttccctcggcgtcaagaagccgacaaaggccctgttatttgtgttgctgtcacccgtcggtccctacttttcgtctggaaccttcaatcccgtgtctctgtgggcgaatccgaaatacgtgcgggcgtggaagggcgggactggggattgcaaaatgggcggaaactacgggtctagcctgtttgctcagtgcgaagcggttgataacggctgccagcaggtcttgtggctatatggcgaagaccatcagatcacggaagtggggacgatgaatttatttttgtactggatcaatgaagatggcgaagaggagctagcaacaccccccctagatggaatcattctccccggagtcacaaggcggtgcattctcgatctggctcaccagtggggcgaattcaaggtcagtgagaggtatctgacaatggatgacctgacaacagcgctggaaggaaatcgggttcgggaaatgttcggcagtgggactgcctgcgtagtgtgtcctgtctcagatatcctgtacaaaggagagactatacatattccgacaatggagaacggtcctaagctggcaagtagaatcctatcaaaactgacagatatacagtatgggcgtgaggagagcgactggaccattgtcctctcttag

SEQ ID NO: 109918 - DNA, 1050 bp, synthetic construct
  misc_feature 1..1050: note = Description of Artificial Sequence: Synthetic coding sequence
  source 1..1050: mol_type = other DNA
atgaaggattgctcaaacggctgctccgctgaatgcaccggagagggcggaagtaaggaagtggtaggcacttttaaggccaaggacctaatcgtgacccccgcgacgattctaaaagagaagcccgaccccaataatctggtgttcgggacagtgtttacagaccacatgctcaccgtggaatggtcttcagaatttggatgggagaaaccacatataaaacccctgcagaatctttctctgcatcccggcagtagtgccttacactatgccgtggaagtgtttgacaaagaggaactcctcgaatgtatccagcagctggtgaagctggaccaggagtgggtgccctattccacctccgctagcctgtacatccggcctaccttcattggcaccgaaccatctttaggcgtcaagaagcctacaaaggctctgctcttcgtattactcagtcccgtgggaccctacttctcctcaggcacctttaatcctgtcagtttatgggctaaccccaagtacgtgcgcgcttggaagggcgggacaggcgactgtaagatgggcggcaactacggcagcagtctttttgcccaatgtgaagctgtcgacaatggatgccagcaggtgctgtggctgtatggagaggaccatcaaattaccgaagtgggaaccatgaatctatttctctactggatcaatgaagatggcgaagaggagcttgcgacccctccattggacggtatcattttacctggcgttactagacgctgtatcttagacttggcccaccagtggggcgaatttaaagtcagcgaaaggtacttaacaatggacgatctgaccactgcactggagggcaaccgcgtgcgggagatgtttggatcgggcacagcctgtgtcgtgtgtccagtgtccgatatcctgtataaaggcgagaccattcacattccaacgatggaaaacggcccaaaactcgcttccagaatcttgtcaaagctgacggacatccagtatggaagagaggaatcagattggaccatcgtgctctcctag

SEQ ID NO: 109919 - DNA, 1161 bp, synthetic construct
  misc_feature 1..1161: note = Description of Artificial Sequence: Synthetic coding sequence
  source 1..1161: mol_type = other DNA
atgaaagactgcagcaacgggtgttcagccgaatgtacgggcgaaggtggaagcaaggaagtcgtaggtactttcaaggcaaaggacctgatcgtgacccccgctaccatcttgaaagaaaaacccgacccaaacaacttagtgttcgggacggtcttcaccgaccacatgctgacggtggaatggtcctccgagttcggttgggagaagcctcatattaagccacttcagaacttgtctctacatccaggctcatcagccctgcattacgccgtcgagttgttcgagggcctcaaagcctttcggggtgtggataacaagatcaggcttttccagccaaatctgaatatggatagaatgtatcgttcagccgtcagagcaacgttaccggtgttcgataaggaagagctgctggagtgtattcagcagctcgtaaagctggaccaggagtgggtcccctactcaacgtccgctagcctgtatattaggcccacgtttataggcactgaaccctctctgggggttaagaaacctactaaggcactgttgttcgtgctgttgtctccagttggcccctatttttcttccggtacatttaatcctgtttcactgtgggcaaaccccaaatatgtgagggcttggaagggggggactggtgactgtaaaatgggtggcaattatggaagctctctctttgcacagtgtgaggctgtcgataatggatgccaacaagtcctttggctgtacggcgaggaccaccaaattaccgaggtcggcacaatgaatctgttcctgtactggatcaatgaagacggagaggaggaactggccactcccccccttgatgggattatattgcccggcgtgacccggcgttgcatcctggacctggcacaccagtggggggaatttaaggtttccgaacgctaccttaccatggacgacttaactactgcacttgagggtaatagggtgcgggaaatgtttgggtctggaaccgcctgtgtggtgtgcccagtgtccgatattctgtataagggggaaactatccatatccctactatggagaatgggcccaaactggctagcaggattctctccaaactcactgatatacaatacgggagggaggagagcgattggactattgtgctgagttag

SEQ ID NO: 109920 - DNA, 1179 bp, synthetic construct
  misc_feature 1..1179: note = Description of Artificial Sequence: Synthetic coding sequence
  source 1..1179: mol_type = other DNA
atggccgctgcagcactgggccagatatgggcgagaaagttgctgagcgtgccatggctcctctgtgggcctaggaggtatgcgtcctcatcttttaaggccgcagatcttcaactcgagatgacccaaaaaccacacaaaaaacctggccctggcgaaccgcttgtgtttgggaaaactttcactgaccatatgctgatggtggagtggaatgacaagggctggggtcagcctcggatacagcctttccagaacctgacacttcatccagcatccagctccctccattatagtctgcagctgttcgaaggcatgaaggcctttaaaggcaaggaccagcaggtgcgcctttttcgcccttggctcaacatggacagaatgttgcggtccgcgatgcggttgtgtctgcctagtttcgacaagctggaattgctggagtgcattcggcgcctcatcgaggtcgataaagattgggtccccgatgctgctggtaccagcctgtacgtcaggcccgtgctgattgggaacgaaccatccctcggcgtgtcccagcctacgcgggccctgctctttgttattctctgcccggtgggagcctattttccgggcggtagcgtcacccccgtgagcctcctggctgatccagcctttatccgggcatgggtgggaggtgtcgggaactacaagctaggtggcaactacggacccaccgtgctggtccagcaggaggctctgaagcggggatgcgaacaggtgttgtggctctacggtccggatcatcagctgacagaggtgggaaccatgaatattttcgtttattggacacacgaggatggagtgctggagctcgtgacgccacctttgaatggggtgattctacccggcgtagtccgtcagagtttactggacatggcccagacatggggggagttcagagttgtggagaggacaatcacaatgaagcagctgttgcgggccctggaagaaggccgcgtcagggaggtgttcggaagtggtaccgcgtgtcaggtatgcccagtgcacagaatcttatataaggataggaacctccatatcccaacaatggaaaacggacctgagttgattctcagattccagaaggaacttaaggaaatccaatatggcatcagggcccatgagtggatgttccccgtctag

SEQ ID NO: 109921 - DNA, 1059 bp, synthetic construct
  misc_feature 1..1059: note = Description of Artificial Sequence: Synthetic coding sequence
  source 1..1059: mol_type = other DNA
atgacccaaaagcctcacaagaagcccggccccggcgagccattagtgttcgggaaaacttttacggatcacatgttgatggtagaatggaacgacaagggctggggccagccccgtatacagccgtttcagaatttaacgctccaccccgccagctcaagcctccattacagcctgcagctctttgaaggcatgaaagcctttaagggcaaggaccagcaggtgcgtctgtttcggccttggctaaacatggaccgcatgctacgctcggcgatgcgtctctgtttgccctccttcgacaaactagaactgctcgaatgcattaggcgcctcattgaagtggataaagattgggtccccgacgccgcgggcacatcactctacgtgcggccagtccttatcggcaacgaaccctcgcttggcgtgtcccagcctacgcgggcccttctgttcgtaatattatgccccgtgggagcctatttccctgggggttctgtcacaccagtttcgcttctagccgacccagctttcattagagcctgggttggcggagtcgggaactacaagctgggaggcaactacggaccaacagtgctggttcaacaagaggccttaaaacgcggttgcgaacaggttctgtggctttatggtcctgatcaccagctgactgaggtgggcaccatgaacatattcgtatactggacacatgaagacggggtattggagctggtgactcccccgctgaatggcgtaattctccctggagttgtgcgacagtctctgctggatatggcccaaacttggggagagtttagagtagtggagcgtaccattaccatgaaacaactccttagagcactggaagaaggccgggtgagggaggtcttcggttcgggcaccgcttgtcaggtctgccccgttcacaggatcctctataaagacaggaacttgcatattcctacaatggagaatggccctgagctgatcctgagattccagaaggaacttaaggaaatccagtacggaatcagagcccacgaatggatgtttccagtgtag

SEQ ID NO: 109922 - DNA, 903 bp, synthetic construct
  misc_feature 1..903: note = Description of Artificial Sequence: Synthetic coding sequence
  source 1..903: mol_type = other DNA
atggcagccgctgcactcggacagctattcgagggaatgaaggcttttaaaggcaaggatcagcaggtgaggctttttcgaccctggctaaatatggaccggatgctgagatctgccatgagactgtgtttaccatcttttgacaagctggagttattggagtgtatccgcagactcatcgaagtcgataaagactgggttccagacgccgccggcacatctttgtacgtgcgcccagtcttgatcggaaacgaaccctctctaggtgtatcacagcccacaagagcactcctcttcgtgatcctctgcccagtgggagcctatttcccagggggctccgtgacccccgtcagcctactagctgaccctgcttttattcgtgcgtgggtcgggggggtgggtaattataagctggggggaaactatggacctaccgtgctggtgcagcaagaggccttgaagcggggttgcgaacaggtactgtggctctacgggccagaccaccagctgaccgaagtgggaaccatgaacatctttgtgtactggacacatgaggatggcgtccttgagctggtcacccctcctttaaacggtgtgattctgccaggcgtggtacgccaatctctgctggacatggcacagacctggggtgagtttagagtcgtggagaggacaataacaatgaaacagctgctcagggcacttgaggagggtcgcgtgagggaggtttttggatcgggaaccgcgtgccaggtctgtcccgtgcaccgtattttgtacaaggaccggaatcttcacattcccacaatggagaacggacctgaactgattcttagatttcagaaggaacttaaggagatccagtacggcatccgagcacacgagtggatgttccctgtgtag

SEQ ID NO: 109923 - DNA, 1338 bp, synthetic construct
  misc_feature 1..1338: note = Description of Artificial Sequence: Synthetic coding sequence
  source 1..1338: mol_type = other DNA
atggctgtagctattgccgcagccagagtgtggagactgaacaggggcctatcacaggctgctctcttgctcctccgacaacccggggcccgcgggctggcccgatcacatccacctcgacagcagcagcagttctcatctctcgatgacaaacctcagtttcctggggcaagtgctgaattcattgataagttggagtttatccagccaaatgtgattagcggcattcctatctatcgggtgatggatcggcaaggacagattattaaccccagtgaagacccgcatctccctaaggagaaagtcttgaagctctacaagagtatgacgctgctcaacacaatggaccggatactttatgagagccagagacaagggcggatcagtttctatatgactaattacggcgaagaaggcactcacgtgggatcagctgctgccctggataacacagatctggtcttcggacagtatcgagaggccggtgtactgatgtaccgcgattatccactggagctgtttatggctcagtgttacggtaatatctcagaccttggaaagggccgccagatgcctgtgcactatggatgcaaggagcgacacttcgtgacgataagctctccgctggcaacccagattccacaggccgtgggtgcagcctatgctgcaaagcgcgcgaatgctaatcgggtggtgatctgctattttggcgagggagctgcctctgagggggatgcccatgctgggtttaattttgcagccacccttgagtgtcccattatctttttttgtagaaataacggttatgcaataagtaccccgacctccgagcagtaccggggcgacggaatcgcagctcggggcccgggctacggcatcatgagtattcgagtcgacggtaacgacgtgttcgccgtctataacgccacaaaggaagctaggagaagggccgtggccgaaaatcagccatttctcatcgaagccatgacatacaggatcggacaccactcaacttccgacgacagcagcgcataccgtagcgtagatgaagttaattattgggacaagcaggaccatccaatcagcaggctgcgacactacctgctctctcagggatggtgggacgaggagcaggagaaagcttggcgcaagcagtctcgacggaaagtcatggaggcctttgaacaggcagaacggaaacccaaaccaaatcctaacttacttttctctgacgtgtaccaggagatgcccgcacaactgagaaagcagcaagaatctcttgctaggcatcttcagacttatggcgagcattacccactggaccactttgacaagtag

SEQ ID NO: 109924 - DNA, 1212 bp, synthetic construct
  misc_feature 1..1212: note = Description of Artificial Sequence: Synthetic coding sequence
  source 1..1212: mol_type = other DNA
atggctgttgccattgccgcagcccgggtgtggaggctcaaccggggcctgtctcaagcggccctgctcctgttgaggcaacctggcgcccgaggtctcgcgaggtcccaccctccccgccagcaacagcagttttcaagcttggacgataaaccccagttccctggcgcctcggcagaattcattgataagctggaatttatacagcccaacgtaatctccggcattcctatttatagagtgatggatagacagggccagattatcaatccatccgaagatccccacctgcctaaagagaaagtgttaaagctttataaatccatgacactcctgaacaccatggatagaatcctgtacgaaagtcagcggcaggggcggatttctttttatatgactaactatggcgaagagggaacccacgtcggaagtgcggccgctctggataatacagacctcgtgtttgggcagtacagggaggccggagttctgatgtacagagactatcccttggagctgtttatggcccagtgctatggcaacatatcagacctaggcaagggacgccagatgcctgtgcactacggatgcaaagaaagacacttcgtgacaatttcctctccgctcgctacccagataccccaggctgttggcgcggcctatgcagcaaagcgggcaaatgccaatagagtggtcatttgctattttggggagggcgctgcatcggagggagatgcccatgctgggttcaatttcgctgccactctggaatgcccgataattttcttttgcaggaataatggatacgccatttctacccccacctccgaacagtataggggagacggcattgcagcccgtggccccgggtacggcattatgtctattcgggtggacgggaacgacgtgttcgcggtttacacagccaccggaggccccaaggccagggcctctgtcgggcctagcagtccaagcaccactggcacatgtggaatcatgatgcccttgcacgctatgggcctttggcacccagtaagtcatcagcaggagctgtccgcggcccctaagcctaagggaaccactaaacctatcctagaatcttatctcaagtctcacctgctaggacactcacgttaccagctgtatattcatcaggatgcagtgcgtagagaaaagcctcaatccaacctgaatcgcgagagccttatatag

SEQ ID NO: 109925 - DNA, 1179 bp, synthetic construct
  misc_feature 1..1179: note = Description of Artificial Sequence: Synthetic coding sequence
  source 1..1179: mol_type = other DNA
atggctgtggttgctgccgccgctggatggcttctgaggctccgtgctgcaggagcggaaggccactggcgtagactacctggagcagggctggcgcgtggattcctacacccagctgccacggtcgaggatgccgctcagaggaggcaggtggcccactttactttccagccagaccctgaaccccgagagtacggccaaactcaaaagatgaacctgttccagagtgtgacctccgcccttgacaattcattggctaaggacccaactgcagttatcttcggcgaagatgtagctttcggcggggtgttcaggtgtacggtgggcttgcgtgacaaatacggcaaggatagggtctttaatacacccctgtgcgagcagggaatagtggggtttggcattgggattgcggtcactggtgctactgcgatcgcagaaatccagtttgcggactatatattccctgcgttcgaccagattgttaacgaagccgcgaaatatcgctatcgctccggcgatctatttaactgtgggagcctcactatccgttctccttgggggtgcgttgggcacggggcactataccactcccaaagccccgaagcgttttttgcacattgccccgggatcaaggtcgtcatcccaaggagcccattccaagcgaagggcttgctcctgtcttgtatcgaggacaaaaacccgtgcatcttcttcgaacctaagatcctctatcgtgctgccgcagaggaagtgcctattgagccctataatattcctctgtctcaggctgaagtgatccaagagggaagtgacgtcactctggttgcctggggcacgcaggtgcacgttataagagaagtggcctctatggcaaaggaaaagcttggagtgagttgcgaggtgatagatctccgcacgatcatcccctgggatgtagacactatctgcaagagcgtgatcaaaacgggtcgcctcctcattagtcacgaggcgcctctgacgggcgggttcgctagcgagattagctccaccgtccaggaagagtgctttctgaatttagaggccccgatatcaagggtatgtggctacgacactccattcccccatatatttgaacctttctacatccctgacaaatggaaatgttacgacgcactgagaaaaatgatcaattattag

SEQ ID NO: 109926 - DNA, 1179 bp, synthetic construct
  misc_feature 1..1179: note = Description of Artificial Sequence: Synthetic coding sequence
  source 1..1179: mol_type = other DNA
atggcagtcgtggccgccgcagccggctggcttctgcggctgcgtgctgccggtgccgaaggccattggcggcgcctaccaggcgcgggcctcgcacgcggctttctgcatcccgctgctacagtcgaagatgcagcccagaggcgccaagtggctcacttcaccttccagcctgatccagaaccccgtgaatatggccagacccagaaaatgaacctgtttcagtccgtcacctctgccctcgacaattcgctggcaaaggatcctacagccgttatctttggggaagacgttgcttttggcggcgtgtttaggtgcacagtgggattaagagataagtatggcaaggatcgcgttttcaacactcccttgtgtgagcagggaatagtaggttttggaattgggattgcggttaccggggctacggccatagctgagatccagtttgccgactatatctttcccgccttcgatcagatcgtgaatgaagcggcaaagtaccgttacaggtccggcgatttattcaattgtggctctctgacaatcaggtctccctggggctgtgtgggccacggtgctctgtatcattcacagtccccagaggcattctttgcgcattgccccggtatcaaggtcgtgattccaagatctccctttcaggctaaaggcttgctcctgagttgtatcgaagacaagaatccctgtattttctttgaacccaagatactctatagggcagcagcagaagaggttccaatcgaaccctacaacattccactgagccaggccgaggttatccaggagggtagcgacgtcacattagtggcatggggcacacaagtacatgtgatcagagaggtcgcaagcatggcaaaagagaaattgggcgtgtcttgtgaagtcattgacctgaggacaataatcccctgggatgtggatacaatatgtaagagcgtaataaagactggtaggttgctaatctctcatgaggccccactgaccggagggtttgcctctgagatttcaagcacggtgcaggaggaatgcttcctgaatctcgaagctccaatcagccgggtgtgtggctatgatacgccattcccgcacattttcgagcccttctatatccctgacaagtggaagtgttatgacgcactccgcaaaatgattaattattag

SEQ ID NO: 109927 - DNA, 657 bp, synthetic construct
  misc_feature 1..657: note = Description of Artificial Sequence: Synthetic coding sequence
  source 1..657: mol_type = other DNA
atggccgtggtggcggccgccgcaggttggttactgaggcttcgcgcagctggcgccgaggggcactggaggagattacccggggccggactggcccggggatttctacatccggctgccactgttgaagatgcagctcagaggagacaggtcgcccacttcacctttcagccggatcccgaacctcgcgaatacggacagactcaaaagatgaatttgtttcagtcggtaacttcagcactagataacagtctcgcaaaagaccccacagcagtaatctttggcgaggatgtcgcattcggaggcgtctttcgctgcactgtgggtctgagagacaaatatggcaaagaccgcgtctttaatactccgctctgcgagcaggggattgtgggctttgggatagggatagccgtgaccggggcaactgccatcgccgaaattcagttcgcagactatatcttcccagcctttgaccaaatcgtcaatgaggccgccaaatatcggtaccgcagtggagatctttttaactgcgggagtctgactatccgtagcccttggggctgtgtgggccatggcgccctgtatcattctcagtcaccagaggccttcttcgctcactgccctgggataaaaataaaagtgatttccctttcttag

SEQ ID NO: 109928 - DNA, 969 bp, synthetic construct
  misc_feature 1..969: note = Description of Artificial Sequence: Synthetic coding sequence
  source 1..969: mol_type = other DNA
atgaatctgttccagtcagtaaccagcgcccttgataactccttggccaaggacccaaccgcagtgatttttggggaagatgttgctttcggtggagttttccgttgcaccgtgggcctgagagacaagtacggtaaggatcgcgtcttcaatactccactgtgcgaacagggtatagtaggatttggaatcggaattgctgtcacaggagcaacagccatagccgaaatccaattcgccgactacatcttccccgctttcgaccaaattgttaacgaggccgctaagtacagatatcggtccggcgacctttttaactgtggatccctgaccatccgatcgccctggggctgcgttggtcatggcgccctctaccattctcagtcaccagaagccttttttgcacattgccccggcattaaagtggtcattccgagaagtccttttcaggccaagggtttactgctgagctgcatagaagacaaaaatccctgtatctttttcgagcccaagatcctatatcgcgctgcagcagaagaggtcccaattgagccttataatatccctttaagccaagccgaggtgatccaggagggctcagacgtcaccttggtcgcatggggcactcaggttcatgtgatcagggaggttgcatcgatggccaaagaaaagttgggggtgtcatgcgaggttatcgacctgcgaactatcatcccttgggatgtagacaccatctgtaaaagcgtaattaagaccggacgtctcctcatcagtcacgaggcccccctgacggggggattcgcttctgaaatcagtagcactgtgcaagaggagtgttttctgaatctggaggcccccattagcagggtgtgtggatacgacaccccttttccgcatatcttcgaacctttctatattcccgataagtggaagtgctatgacgcactcaggaaaatgataaattactag

SEQ ID NO: 109929 - DNA, 657 bp, synthetic construct
  misc_feature 1..657: note = Description of Artificial Sequence: Synthetic coding sequence
  source 1..657: mol_type = other DNA
atggccgtagtcgctgccgcagcaggctggttattgaggctacgtgccgccggggccgaagggcactggcgcagactcccgggagcaggccttgctcgagggtttctgcaccccgccgcaacagtggaggatgccgctcaacgtcggcaagtggcccatttcacctttcagcccgacccggagccgagagagtatgggcagactcagaaaatgaacttgttccaatccgtgaccagcgccctcgataattctttggcaaaagaccctacagcagtgatctttggagaggacgttgcttttggaggcgtgtttaggtgcacagtggggctgcgtgataagtacggaaaggaccgagtgtttaacacccctctgtgtgaacagggaattgttggattcggaatcggcattgcagtgacaggcgccaccgcgattgccgagattcagtttgctgactatattttccccgcctttgaccagatcgtgaacgaggccgccaagtatcgctatcggtctggcgacctctttaattgcgggtccctgaccataaggagcccttggggttgtgtcgggcacggagctctctatcattcacaaagtcccgaagcttttttcgcccactgtccgggcatcaagatcaaggtcatctctttgtcctag

SEQ ID NO: 109930 - DNA, 1779 bp, synthetic construct
  misc_feature 1..1779: note = Description of Artificial Sequence: Synthetic coding sequence
  source 1..1779: mol_type = other DNA
atgagcgtgtccctagttgtgatacgactggagctggcagagcatagcccggtcccagccggcttcggcttttctgcagcggccggagaaatgtccgatgaggagattaagaagacaactctggctagtgccgtggcttgtctggagggcaagagccctggggagaaggtggccataatccaccagcacttgggccggcgagagatgacagacgttatcattgagactatgaagagcaatccagatgaactcaagacgacagtagaagagcgcaaatcttcagaggcaagcccaactgcccagaggtccaaggatcacagcaaggaatgcatcaatgctgcaccagactctccatcaaagcagctcccagatcagatcagcttcttcagcggaaatccaagtgtggagatcgtgcatggtatcatgcacctgtacaagactaataaaatgacttcactgaaggaggatgttcgccggtctgcaatgttgtgtatcttaaccgttcctgccgccatgacatcacacgatctcatgaagttcgtggcaccctttaacgaggtgatcgagcaaatgaagatcatcagggacagcactccaaatcaatacatggtgttgattaagttccgcgcccaggccgatgccgatagcttctatatgacttgcaatggtaggcaattcaatagtattgaggatgacgtttgtcagttggtgtacgttgagcgcgccgaggtcttgaagtcagaggacggggccagcttacctgttatggatttaaccgagctacccaaatgtacagtgtgcctggagcgcatggatgaatccgtaaacggcatactgaccactctatgtaatcacagcttccactcccagtgtctgcagcgctgggacgatacaacgtgcccggtgtgtcggtattgccagacccccgagcccgttgaggaaaacaaatgttttgaatgcggggtgcaggaaaatctgtggatatgtctgatatgcggccacataggctgcggccgctacgtgagccgccatgcctacaagcatttcgaagagactcagcatacatatgcaatgcagcttacaaatcatagggtgtgggattatgccggagacaactacgtgcacagactggtggcttcaaaaactgatggtaaaatcgtccaatatgagtgcgaaggagacacatgccaggaggaaaaaattgatgctcttcagctggaatattcttatctgctgacctctcaactagagtcacaacggatatactgggagaataaaattgtgcggattgagaaagacaccgctgaagaaatcaacaacatgaagaccaagtttaaggaaaccatcgaaaaatgcgataacttggagcataagctcaatgacctgctcaaggagaagcagtctgtggaacgtaaatgtactcagcttaatactaaggtcgccaagctcacgaacgagctaaaagaagagcaggagatgaataaatgtctgagggccaatcaggtgttgctgcaaaacaagctgaaagaggaggagcgggtgttgaaggaaacttgcgatcagaaagacctacagataaccgaaattcaggaacagctacgggacgtcatgttctatctcgaaactcagcagaaaatcaaccatttgcccgccgaaacaagacaagaaattcaagagggacagatcaacatagctatggctagcgcctcatcacctgcctcttccggaggctccgggaaactgccatcccgcaagggtcgaagcaagcgcggcaagtag

SEQ ID NO: 109931 - DNA, 1242 bp, synthetic construct
  misc_feature 1..1242: note = Description of Artificial Sequence: Synthetic coding sequence
  source 1..1242: mol_type = other DNA
atgcacctgtataagaccaataagatgacttccctaaaggaggatgtacgccgatccgccatgctgtgcatcttgactgtccccgcggcgatgacctctcatgatctgatgaaattcgtggccccctttaacgaggttattgagcagatgaaaataatcagagattctactccaaatcaatatatggtactaataaagttccgggctcagggtgcgagcctccccgtcatggacctcactgagctcccgaaatgcacagtgtgtctggaacggatggacgagtccgtgaatggtatccttaccacactctgtaatcatagcttccactcacagtgcctacagagatgggacgacaccacgtgtccggtgtgccgctattgccaaacacccgagcctgtggaggagaacaagtgcttcgagtgcggggtgcaggaaaatctctggatttgtcttatctgcgggcacattggctgcgggcgttatgtttcaaggcacgcttataaacatttcgaggaaacacagcatacttacgccatgcagctaaccaaccatagggtatgggactacgctggagacaattatgtacaccgtctggtggcaagtaagacagacgggaagatagtccagtacgagtgtgagggtgatacctgccaggaagagaagatagatgccctacagcttgagtactcttatctcctgacatctcagctggagtcccagagaatttattgggaaaacaagatcgtgcgcatcgaaaaggacacagcggaggagattaataacatgaaaactaagttcaaggaaaccatcgaaaagtgtgataatttagaacacaaactgaacgacctactcaaagagaaacaatcagttgagcgtaagtgtacccagctcaacacaaaagtggcaaagctgaccaatgagttaaaggaagagcaggagatgaacaaatgcttacgcgcaaaccaggtgcttctccagaataaactgaaggaagaagagagagtcttgaaggagacctgtgatcaaaaggacctgcaaatcacagagattcaggagcaactcagagacgtgatgttctatttagaaacacagcagaagataaatcacttgcccgctgagaccaggcaggaaattcaagaaggccagatcaacattgcaatggctagcgcctcctctccagccagtagcggagggtccggcaagctgccttcccggaaagggagatccaagcgcggcaaatag

SEQ ID NO: 109932 - DNA, 2136 bp, synthetic construct
  misc_feature 1..2136: note = Description of Artificial Sequence: Synthetic coding sequence
  source 1..2136: mol_type = other DNA
atgaataagggttggcttgaactggaatcggatccaggcttattcactctcctggtggaagactttggagttaagggcgtgcaggttgaagagatctacgatttacagtctaagtgtcagggacctgtgtacggctttatctttctcttcaagtggatagaggaaagacgtagtcggcgtaaggtgtctacactagtggatgacactagtgtgatcgacgacgacatagtgaataacatgttcttcgcacaccagctgatcccgaattcctgcgcaactcacgcgctactctctgtgctattaaattgcagttcagtggacctcgggcccacattgagccgaatgaaagatttcaccaagggattttcacccgaatctaaaggctatgccatcggcaatgcacctgaattagccaaggcgcacaattctcatgcacgtcccgaaccccgccacctgcctgagaagcagaatggtctatctgctgtccgcacaatggaggctttccatttcgtttcctacgtgcccattacagggcggttattcgagctggacgggctgaaagtctatcctatcgaccacggcccttggggcgaagacgaggaatggacggacaaggcccgtcgagtgattatggagaggatcgggctggcaaccgccggcatcaaatacgaggcaaggcttcacgtcttaaaagtgaaccggcagaccgtgctggaagccctgcaacagctaatccgggtcacgcaacccgaattaatccagacccataaatctcaagagtcccagcttccagaggagtccaagtcagcttctaacaagtcacccttggttttagaggccaatagggctcctgcagccagcgaggggaaccacacggatggggccgaggaagctgccggctcatgtgcacaggcacctagccactcacctcctaacaaacctaagctcgttgttaagcctcctggttcatcactaaacggggttcatcccaatccaactccgattgtccaacgcctccctgcctttcttgacaatcataactacgctaaaagcccgatgcaggaggaggaagacttggctgcaggcgtaggacggtcaagagttcctgtgcggcccccacagcaatatagtgacgacgaggacgactatgaagatgatgaagaggacgacgtgcagaataccaactctgcattgcgatataaagggaaaggcaccggtaaaccaggagctttatcgggatctgcagacggccagctcagtgtgctgcagccgaatactataaacgttctcgccgagaagctgaaagagtcccaaaaggatttgagtatcccattgagcattaaaacaagttctggtgctggttcacccgcagttgccgtgcccacccactctcagccttctccaactccctctaatgaatccactgacacggcttcagagattggctcagcttttaactctcccctccggagccctatccgaagtgccaatccgactcgaccctcaagtccagttacgagtcacatttccaaggtgctgtttggtgaggatgactctctgctgagggtcgactgcattagatacaacagggctgtgcgcgacctgggccctgtcatctcaaccggcctgctgcacctcgcagaggatggagtgctgtctccccttgcacttaccgaaggaggaaaaggatcaagcccatcgatccgcccaatccaagggtctcaaggctcgtccagtcctgtcgagaaagaggtggtcgaagcgactgattcacgcgagaagacaggaatggtgcgccccggggaaccgctctcaggcgagaagtacagccctaaggaacttttagcgcttttaaagtgcgtggaggccgagatcgccaattatgaagcctgccttaaggaggaggtcgagaagcggaagaaattcaaaatcgatgatcagaggagaacacataattatgacgaatttatctgcacatttatctccatgctagcgcaggagggaatgctcgctaatctggtggagcagaatatttcggtgagaagacgccagggggtctccatcggacgtctccacaaacagagaaaaccggataggcgtaagcgctcgcgtccttacaaggccaagagacagtag

SEQ ID NO: 109933 - DNA, 2190 bp, synthetic construct
  misc_feature 1..2190: note = Description of Artificial Sequence: Synthetic coding sequence
  source 1..2190: mol_type = other DNA
atgaataagggctggttggagcttgaatcagaccctggactgttcactctgctggtggaagacttcggggtaaagggcgtccaggtcgaggagatatatgacctgcaatctaagtgtcagggtccagtatacgggtttatttttctgttcaaatggattgaggaacgaaggtcacggaggaaagtctctacgctcgtggatgacactagtgtcatagatgacgatattgtgaacaatatgtttttcgcgcaccagctcatccctaactcttgtgccacacatgcactactttctgtgttactgaactgttctagcgttgatctgggcccaaccctgagccgaatgaaggatttcacaaagggctttagtccggagtctaagggctacgcaataggtaatgctcctgagttggccaaagctcataattcccacgcccggcccgagcctcggcatctgcctgagaagcagaacggcctgtctgcagtaagaacaatggaggcttttcacttcgtcagctacgttccgattacaggtagactgtttgagctcgatggtctgaaagtgtaccctatcgatcatggcccgtggggagaggacgaggaatggaccgataaagccagacgcgtgattatggagcgaatcggtctggccacagcgggcgagccgtatcacgatattcgatttaacctgatggcagtagtgcctgacaggcggattaaatacgaggctagactgcacgtgctgaaagtaaaccggcaaactgtgttagaggcccttcagcaactgattagagtgacacaacctgaactcatccagacgcacaagagccaggagagccagttgccagaggaatctaagagcgccagcaataagtctcctctagtcctggaggctaacagggcaccagctgctagtgaaggaaatcacacagacggcgcagaggaagccgcaggctcctgtgcacaggcaccttctcactctccacctaacaagccaaagctggtggtcaaaccacctgggtcatccctgaacggcgtgcatcccaaccctacccctatcgtgcagcggctgcccgcctttctggataatcacaattatgctaagtcacctatgcaggaggaggaggatctagcggccggcgtaggacgaagtagggtgccagtgcgcccccctcagcaatactccgacgatgaggacgactatgaagacgacgaagaggatgacgtgcagaacaccaacagcgccctccgctataaagggaagggtacagggaagcccggggcgttgtcaggctctgccgacgggcagctgtctgtcctgcagcctaataccattaatgttcttgcggagaagctcaaggaatcccaaaaggaccttagcatcccccttagtattaagacatcctcaggggcaggcagcccggcggtggctgtcccgactcattcacagccctctcccacaccatctaacgaatctaccgacaccgcctccgagattggttccgccttcaacagccccttgagaagccccataagaagcgcaaaccctaccagaccaagttcacctgtgacatcacatattagtaaggttcttttcggggaggatgactctctgctacgcgtggattgcatacgttataatcgggccgtgagggatctggggccagtcattagcacagggttgctgcatctagctgaagatggcgtgctgagcccccttgccctgacggaaggtggtaaaggttcttccccgtccattaggccaattcagggctcccagggatctagtagtccagtcgaaaaggaagtggtggaggcaacggactctcgagaaaagaccggaatggtccgccccggagaacctctctcgggggaaaagtattcacccaaagagctccttgccctcctaaaatgcgtagaggccgagattgcgaattacgaagcatgtctgaaagaggaggtggagaaacggaaaaaatttaagatcgacgaccagagaaggactcataactacgatgagtttatttgcactttcatctccatgctcgcccaggagggcatgctcgctaatctggtcgaacagaacatcagcgtgagaagaaggcagggcgtcagtatcggccgcttgcataagcagcgtaaacctgacaggaggaagcgctcccggccctacaaggctaagcgccagtag

SEQ ID NO: 109934 - DNA, 879 bp, synthetic construct
  misc_feature 1..879: note = Description of Artificial Sequence: Synthetic coding sequence
  source 1..879: mol_type = other DNA
atggctgtacaggtggtgcaagcagtgcaggcagtccatttggagagtgatgccttcctggtgtgtttaaaccacgcattgagcacagagaaggaagaggtgatgggattgtgcattggcgagctcaatgacgacacctccaggagtgattctaagttcgcgtacaccggcacagagatgcgaacagtggcggagaaggtcgacgcagttagaattgtacatattcactccgtgattatccttcgcagatcagataagaggaaagatcgcgtggagataagccccgaacaactgtctgcagcttctactgaggctgagcggctcgcagagctaaccggcagaccgatgagggttgtgggttggtaccactcccatcctcacattaccgtatggcccagccatgtcgacgtgagaacacaggctatgtaccagatgatggaccaggggtttgtcgggctaatattcagctgctttatcgaggataaaaataccaaaaccggacgggtactgtacacctgttttcagtcaattcaggcccaaaaatcgagcgagtatgaacgtatcgagatccctattcatatcgtgccacacgtgacaattggaaaggtttgcctcgagtcagctgtcgagcttccaaagatcctctgccaggaggagcaggatgcctaccgccgaatccattccctaactcatctcgattcggtaacaaaaatccataatggctccgtgttcactaaaaatttgtgtagccagatgagcgcagtgtctggccctttactgcaatggctcgaggatcgactggagcaaaaccagcagcacctgcaggagctgcagcaggaaaaagaagaattgatgcaggagctgtcctcattggagtag

SEQ ID NO: 109935 - DNA, 876 bp, synthetic construct
  misc_feature 1..876: note = Description of Artificial Sequence: Synthetic coding sequence
  source 1..876: mol_type = other DNA
atggcggtgcaggtcgtgcaggccgtgcaagcagtccatctcgagtcagacgctttcctggtgtgcctgaatcacgcattaagtaccgaaaaggaagaggtcatggggctctgtatcggcgagctaaatgacgatacgcggtctgacagcaagtttgcatacacagggaccgaaatgcggacagtcgcagaaaaggtcgacgcagtcagaatagtccatatccactccgtaatcattctgcgtcggagcgacaaaaggaaggacagagtggaaatcagccccgaacaactgtcagctgcctcaacggaggcggagagactcgcagaactcactgggagaccaatgcgtgtggtggggtggtatcacagccacccccacataacagtatggcccagccacgttgatgtgagaacccaggccatgtaccagatgatggatcaaggattcgtagggctgatcttttcctgctttattgaagacaagaacaccaagacaggccgcgtgctgtatacctgtttccagtctatacaggcccaaaaatcgtccgaatatgagaggatcgaaataccgatccacatagtcccccacgtcacaattggcaaagtgtgcctggaatctgcggtcgagttacccaagatactctgtcaggaagaacaagacgcttacaggaggatccatagcctcactcatctcgattcggtcaccaagattcacaacggtagcgtgtttaccaagaatttgtgctcgcagatgtcagccgtgagcggacctctacttcagtggcttgaggaccgtctcgagcagaaccagcagcatttgcaggagctgcaacaggaaaaggaggagctcatgcaggaactcagctctcttgaatag

SEQ ID NO: 109936 - DNA, 951 bp, synthetic construct
  misc_feature 1..951: note = Description of Artificial Sequence: Synthetic coding sequence
  source 1..951: mol_type = other DNA
atggcagtacaggtggtccaggccgtgcaggctgtccacctggaaagcgatgccttcctggtgtgcctcaatcacgcgctcagtacggaaaaggaagaggtcatgggcttatgtattggtgagcttaacgatgatacacgtagcgactcgaaatttgcatatacgggaaccgaaatgcgaactgttgccgagaaggtcgacgcagttcggattgtccatatacactcagtgattattctgcgcagaagtgacaagagaaaggaccgggtggaaattagcccagagcagctgtcagccgcatccaccgaagcggagcgcctagcggaactgaccggtcgaccgatgcgcgttgttgggtggtaccatagtcacccacacatcaccgtgtggccaagccatgtggatgttcggacacaggcgatgtatcagatgatggatcagggatttgtaggactgatttttagctgttttatcgaagacaagaacacaaagaccggccgcgtgctttatacctgtttccagtctattcaggctcagaagtccagcgaaagccttcatggccccagagacttttggagcagtagtcaacacatctccatcgaagggcaaaaggaagaggaacgatatgaaagaatcgagatcccgatccacatcgttcctcacgtcactattggcaaggtatgtctcgagagcgccgtcgagctcccaaagattctctgtcaggaggagcaggacgcctaccgcaggatccacagcctgacccatctggattcagtaacaaagatccacaacggctctgtgtttacaaagaatttgtgtagccagatgagtgccgttagtggccccttgctacagtggctagaagaccgcctcgaacagaaccagcagcacctgcaagagctccaacaagaaaaggaagagctcatgcaggagttaagctctctggaatag

SEQ ID NO: 109937 - DNA, 954 bp, synthetic construct
  misc_feature 1..954: note = Description of Artificial Sequence: Synthetic coding sequence
  source 1..954: mol_type = other DNA
atggcagtgcaggtggtacaggccgtacaggccgtccatttggagtccgatgccttccttgtgtgtttgaatcatgccctgagtaccgaaaaggaagaagtgatgggcctgtgcattggggaggtgtcgtctccttctaggtccgactccaagtttgcgtacaccggaaccgagatgcgcactgtggctgaaaaggtggacgctgtgagaatagtgcacatccactccgtcatcatcttgaggcgcagcgacaaacgtaaggatcgggtggaaatttcccccgagcagctcagcgctgcgtcaacggagacccatagactggcggagctgacaggccgaccaatgagggttgtcggatggtatcactcccacccacacataacagtgtggccctctcacgtggacgtacggacccaggcaatgtaccagatgatggaccagggatttgtggggctcattttttcttgcttcatcgaagataagaatactaagactggcagggtcctgtacacttgcttccagtcaattcaggcgcagaaaagttctgaatccctgcacggcccaagggatttctggagcagctcccagcatatctccatagaaggtcaaaaggaggaagagaggtatgagaggatagaaataccaatacatattgtgccccatgtgactattggaaaggtgtgtctggagtccgccgtggaattgccgaaaatcctgtgccaggaagagcaggacgcctataggcggatccactctctgacccacctcgactccgtaaccaagatccacaatggtagcgaggtgttcaccaagaatttgtgcagccagatgtccgccgtttcgggaccccttctgcagtggttggaagacaggctcgaacagaatcagcaacacctgcaggaactgcagcaggaaaaagaggagctcatgcaggagctcagcagccttgagtag

SEQ ID NO: 109938 - DNA, 747 bp, synthetic construct
  misc_feature 1..747: note = Description of Artificial Sequence: Synthetic coding sequence
  source 1..747: mol_type = other DNA
atggctgtccaagtcgtgcaggcagtgcaagctgtgcatctagagtctgatgccttccttgtgtgccttaatcatgctttaagcactgagaaggaggaggtcatggggctttgtatcggcgaggtgagctccccatctagatccgattctaagttcgcttacaccggaactgagatgcgaactgtagccgagaaggtcgatgctgtgcggatcgtccacatccatagtgtgatcatcttacgtcgaagcgataagaggaaggacagagttgagattagtccagagcaactctctgccgccagtacagagacacacaggttggccgagctcacgggtcgacctatgagggtggttggctggtaccatagccaccctcacatcacggtctggccctcacatgtggatgtaagaacgcaggccatgtaccaaatgatggatcagggcttcgtaggcctcatatttagctgttttatcgaagacaagaacaccaagactggacgggtattgtacacctgtttccaatcgattcaagcccagaagagctctgacctgacacatctagactcagtgaccaagatccacaacgggtccgaagtgttcacaaagaacctgtgctcccagatgagcgctgtgtctggcccactgcttcagtggctggaggatcggttggagcagaaccagcaacatttgcaagagctgcagcaggaaaaagaggagctgatgcaggagctcagttccctagagtag

SEQ ID NO: 109939 - DNA, 1845 bp, synthetic construct
  misc_feature 1..1845: note = Description of Artificial Sequence: Synthetic coding sequence
  source 1..1845: mol_type = other DNA
atgggcaaccagatgtcagttccgcagcgtgttgaggatcaagagaacgaaccagaggctgagacataccaagataacgctagcgctctcaacggtgtgccagtcgtggtctccacccatacggtgcagcacttagaagaagtggatcttgggatctctgtgaagacagacaacgtcgccacctcctctccagaaaccacagagataagcgccgtggcagatgccaacggcaagaatcttggaaaggaggccaaacccgaggcccccgctgccaagtcccgctttttcctgatgctgtcccgccctgtgccgggaagaacaggagaccaagccgcggattccagccttggcagcgtgaagttggatgtcagtagcaacaaagcccctgccaacaaagaccccagcgaatcttggactttgcctgtggcagcgggtccaggacaggacacagacaaaactcctggacacgcccccgcccaggacaaagtcctgtctgccgcccgggatccgaccctcctcccaccagagactggaggcgcaggcggcgaagccccaagcaaacccaaggatagctccttctttgacaagttttttaagttggacaagggtcaggaaaaagtccccggagacagtcaacaagaggcaaaacgggccgagcaccaggacaaagtggacgaggtgccagggttgagcggccagtccgatgacgtaccagccggtaaggatatagttgatggcaaagaaaaagaggggcaggaactgggtaccgcagactgttcagtaccgggagaccccgagggattggagactgctaaggacgattcccaggctgcagccatcgccgagaataataactcgataatgagttttttcaagacattggtcagccctaacaaagctgagacgaaaaaggatcctgaggacacggcatccaaggccgaaagtgtttgtgatggccaggccgggcaaaaaacatcagaaattcaagcaaggggcactaaaaaaaagcatcttgattcaccaagactggggctagctttccgcaaattttttagacataaaggcgccgagaagtcaccaacaaccagcgcggacttgaagtccgacaaggctaatttcaccagccaggagacccagggagctggtaagaactccaagggctgcaatccttccgggcatacgcaaagcgtcacgacacctgagccagctaaagagggcaccaaagagaaaagcggtcctacaagcctgcctctcggcaaactattttggaaaaaagtggtttgcgagagtcctgtggaaattattaaatctaaggaggttgaatcagccctccagacagtggatctcaacgagggtgatgcggccccggagcccaccgaagccaaactgaagcgtgaggagagcaagcccagaacctctcttatggcctttctcaggcaaatgactagcgattccactgagaagacgattacaccccccgagccagagcccactggggcgccacagaaaggtaaggaggggagctcgaaagataagaaaagcgccgcagagatgaacaagcaaaaaagtaataaacaggaagctaaggagccagctcagtgcaccgaacaggcaactgtggatactaactcactccagaacggagacaagctccagaaaaggccggaaaagcgtcagcagagtcttggtgggttctttaagggacttggccctaagcggatgctggacgctcaagtacaaaccgatcctgtatccatcgggcctgtaggaaaaagcaaatacaccggaaagtgcgtgttttctcatgtcaaaaagaaatggcctttccaagaatggtcctactag

SEQ ID NO: 109940 - DNA, 1755 bp, synthetic construct
  misc_feature 1..1755: note = Description of Artificial Sequence: Synthetic coding sequence
  source 1..1755: mol_type = other DNA
atgggtaatcagatgtcggttccacaacgggtggaagaccaggagaacgagcccgaagccgagacctaccaggacaacgcatctgccttgaacggtgttccagtggttgtgtctacgcacacggtccagcacctggaggaagttgatcttggaatctcagttaaaactgataatgtggccacgtcctcgcctgaaaccacggagatctcagcagttgcggacgccaacggcaaaaatttgggaaaggaagccaagccagaagctcccgccgcaaagtcacgattttttcttatgctgagccgtcccgttcccggtcggacgggtgatcaggcggctgatagctcgttaggaagcgttaagctggatgtatcatcgaacaaagccccagccaataaagatcccagtgagtcttggaccttaccagtagcggcaggaccgggccaggatactgacaagacaccaggccacgctcccgcccaagacaaagtgctctctgcagcgcgtgaccccacactgttgcctccagaaactggcggagccgggggggaagctccttccaaacccaaagacagttctttctttgataaattcttcaagcttgataagggccaagagaaggttccaggagactcgcagcaggaggccaagagagccgaacatcaggataaggtggatgaagtgcctgggctaagtggtcagagcgatgacgtgcccgctggaaaagatattgtggatggcaaggagaaggaaggccaagaactgggaacggcagactgctcagttccaggcgaccctgagggcctggagactgctaaagacgacagtcaggcggcggctattgccgagaataataactctattatgtctttctttaaaactctcgtgagccctaataaggctgaaacaaagaaggatccggaggacaccggagccgaaaagtcaccaaccacttcagccgatctgaagtctgacaaagctaatttcacatctcaggagacacagggggctggaaagaatagcaagggatgcaaccccagcggccacacccaaagtgtaaccacacccgagcccgcaaaagaaggcactaaggagaaatcagggccaacttcactcccactcggcaagctgttttggaaaaaatcggtcaaagaagacagtgtgcctacgggcgctgaggaaaatgtcgtgtgtgagtcacctgtagagatcattaaatcaaaagaggtagaatcagccctgcagaccgtagatctgaacgagggcgatgccgctccggaacccacagaagccaaacttaaacgggaggagtccaagccaaggaccagtcttatggctttcctgcgtcaaatgagcgttaagggcgatgggggtatcactcactcagaggagattaatggcaaggactcaagttgtcagacgtctgacagcaccgagaaaaccatcaccccaccagagccggaaccaactggggcaccacagaagggcaaagagggatcctcaaaggataaaaagagcgcagccgaaatgaataagcagaagtctaataagcaagaagccaaagagccggctcagtgtaccgaacaggcaacggtggacaccaactcccttcaaaacggtgacaagctgcagaagagacccgagaagcgccagcagagcttggggggatttttcaagggactgggccctaaacgcatgttggatgcgcaggtgcagacagaccccgtcagtatcggacctgtgggaaagagcaagtag

SEQ ID NO: 109941 - DNA, 495 bp, synthetic construct
  misc_feature 1..495: note = Description of Artificial Sequence: Synthetic coding sequence
  source 1..495: mol_type = other DNA
atgctgtcccgccctgtgcctggtcgaactggcgatcaggcggctgattcctctcttggctccgttaagctggacgtgtcatccaacaaggcgcccgccaacaaggacccatcagagtcctggactctgcctgtggctgccgggcccggacaagataccgataaaactcctggtcatgctccagctcaggacaaggtcctgtcagccgcaagggacccaactctgctcccccccgagactgggggagccggtggggaagccccctctaaacccaaagattcatctttctttgataagttttttaagctagacaaagggcaggagaaggtgccgggagactcccagcaggaggccaagagggcagagcaccaggacaaggtggatgaggtcccggggctgtctggacagtcagacgacgtgccggccggcaaggttagcgtgcctcgatgcattcatctggtgctcaatgcctgttcaggcgcattaatgggctag

SEQ ID NO: 109942 - DNA, 753 bp, synthetic construct
  misc_feature 1..753: note = Description of Artificial Sequence: Synthetic coding sequence
  source 1..753: mol_type = other DNA
atgtcatttttcaagactctggtcagtcctaataaggcggagaccaagaaggacccagaagatactgcctcaaaagccgagagtgtatgcgacggccaggccggacagaagaccagtgagattcaggcacggggaacaaaaaagaaacaccttgattccccgcggctgggattggcctttagaaagttttttcgccacaagggagccgagaagagtcccaccacttcagccgatctcaaaagtgataaagccaacttcacatcccaggagactcagggggccggcaagaatagcaaaggctgtaatccaagcggacacactcaatctgtgaccacgcctgagcccgcaaaagagggtactaaagaaaaatcaggtcctacatcattaccacttggtaagctgttttggaaaaaaacctctgatagcacagaaaaaaccatcaccccccccgagcctgaaccgaccggcgccccgcaaaaagggaaagagggtagttccaaagacaaaaagagcgccgcagaaatgaataaacagaagtctaacaagcaggaggccaaggaacccgcacagtgtacggagcaagctacagtcgatactaattccctgcagaacggcgataaattgcagaagcgcccagagaaacggcagcagtccttgggcgggtttttcaaaggcttaggtcccaaacggatgcttgacgcacaagtgcagactgacccagtgagtatcggcccggtgggcaagtcgaagtag

SEQ ID NO: 109943 - DNA, 1155 bp, synthetic construct
  misc_feature 1..1155: note = Description of Artificial Sequence: Synthetic coding sequence
  source 1..1155: mol_type = other DNA
atgtctgctcctattaaacttcagcggaccaagacccaggtacgggccgggcatttcaggtggcagttggaccgcggtcgcacccagataaagccacagggtaccccaagacccaagacaagaagctccctcccgcccggaatacccaggttttcccacttacgccagggggaacaagaagagaagctgccaccctcaccacgaacacccttcttcgacaaattttttaagcttgacaagggccaggagaaggtccctggagacagccagcaggaagcgaagcgcgctgaacaccaagataaagtggatgaggtacctggcttgtccgggcagagtgacgacgttcccgcggggaaggatattgtagatggcaaggaaaaggagggccaagaacttggcacagcggattgtagtgtgcctggcgacccagagggtttggaaacagctaaggacgactcccaggcagcagcaattgctgagaacaataacagtatcatgtctttcttcaagacactggtgtctcccaataaggccgagaccaaaaaggatcccgaggacacaggtgcagagaagtcccccactacttcagccgacctcaaaagtgacaaggctaactttactagccaggagacccagggcgcggggaaaaattccaagggatgcaatcctagtgggcatactcaatctgtgacaactcctgagcctgctaaggaggggaccaaggagaaatcagggccgacctcactccccctgggcaaactgttttggaagaagagtgtgaaagaagactctgttcccactggcgctgaggagaatacctcagacagtactgagaaaaccattacaccacccgagcccgaaccaacgggcgctcctcaaaagggcaaggagggatcttccaaagataaaaagagcgcagccgaaatgaataagcagaagagcaataaacaagaggcaaaggagccagctcagtgtacagagcaggccacggtggataccaacagcctgcagaatggtgacaagctccaaaagcgacctgaaaagcgccaacagtcactaggaggcttttttaaggggttaggcccaaaacgtatgctggacgctcaggtgcagactgaccccgtatccatcggaccggttggcaaaagcaaatag

SEQ ID NO: 109944 - DNA, 678 bp, synthetic construct
  misc_feature 1..678: note = Description of Artificial Sequence: Synthetic coding sequence
  source 1..678: mol_type = other DNA
atggccgggactgggctggtggccggagaggtcgtggttgacgctctaccttacttcgatcagggctacgaagccccgggcgttcgagaggcggctgcagccttggttgaagaagaaaccagacggtaccgtccgaccaagaactacctttcctacctaacagctccggattacagcgcttttgaaaccgacatcatgcgcaatgagttcgagcggctggccgcccgacagcctatcgagcttctgtcaatgaagcggtacgaactgcctgcgccctctagcgggcagaaaaacgatatcactgcctggcaagaatgcgtcaataattccatggctcagctcgagcatcaagctgtccggattgaaaatttagagctgatgagccagcatgggtgcaacgcctggaaggtttataatgagaacttggtccacatgattgagcacgcccaaaaagagctgcagaagctacgtaaacatatccaagacctaaactggcagagaaagaatatgcaactgacggctggaagtaaattaagggaaatggaaagcaactgggtctccctcgtgtccaagaactacgagatagaaaggactattgtgcagttggaaaacgaaatctatcagataaaacagcagcacggcgaggccaacaaagagaatattcggcaggacttctag

SEQ ID NO: 109945 - DNA, 477 bp, synthetic construct
  misc_feature 1..477: note = Description of Artificial Sequence: Synthetic coding sequence
  source 1..477: mol_type = other DNA
atgcaaaggacaggcggtggagctccgcgacccggccggaaccatggacttcctggaagcttaagacagcccgaccctgtcgccctcctgatgctgctggtggacgccgaccaacctgaacccatgcgcagtggggccagagagttggctctgttcctcacccctgaaccgggcgcagaggctaaagaagttgaggagacgatcgagggcatgctccttagattagaggaattctgttccctggccgatctgattaggagtgatacatcacagatcctggaagagaacatcccggtgctcaaggccaaactgaccgagatgagagggatttatgccaaggtggatagacttgaaaaaagtcccgccccagttccggtgacctacgagctaccaacactgtaccggactgaagattacttccctgttgacgcgggcgaggcccagcatcacccccgcacctgccctcgcccgctatag

SEQ ID NO: 109946 - DNA, 570 bp, synthetic construct
  misc_feature 1..570: note = Description of Artificial Sequence: Synthetic coding sequence
  source 1..570: mol_type = other DNA
atgcagcgtactggaggaggagcgccgaggcctggacggaatcatggcttaccagggtcattacgtcagcccgatcccgttgcgctactcatgctgctggtcgatgccgaccagcccgagccaatgcggagtggtgcccgggaactcgccctgtttcttacccctgagccaggtgcagaagcgaaggaggtcgaagagacgatcgagggtatgctcctccgcttggaagaattctgttctctagcagatcttatcagatccgacacctcccaaatactggaggagaatataccagtgcttaaagctaaactcaccgaaatgaggggaatttatgccaaggttgaccgactggaggccttcgtcaaaatggttggccaccacgtggctttcttggaagcagacgtgctacaagccgaacgggatcatggggctttcccacaggctctgagaagatggctgggatccgctggcttaccctcgttccgcaatttggagtgctctggagccatacttgcccactgcaaccttagattgtccggctcctcagatagccccgcaagcgcctcttag

SEQ ID NO: 109947 - DNA, 636 bp, synthetic construct
  misc_feature 1..636: note = Description of Artificial Sequence: Synthetic coding sequence
  source 1..636: mol_type = other DNA
atgcaaaggacaggcgggggagctcccagacccgggagaaatcacgggctgcccggatccttaaggcagccagatccagtggccttactcatgcttctggtggatgccgaccaacccgagccgatgcgcagcggagccagagagttagctctgttcttgacccctgagccaggcgcagaagctaaggaagttgaagagacaatcgaaggcatgctgctgaggttagaagagttctgtagccttgccgacctcattcggtctgatactagtcagattttagaagagaacatccccgtccttaaggcgaaactaacggagatgcgagggatctacgccaaagtggataggcttgaggcttttgtaaagatggtggggcaccacgtggcattcctggaggccgatgttcttcaggcagaacgagaccacggagccttcccccaagcgctccgaagatggctcggctctgcaggcttgccgtcctttcgaaacgtcgagtgctcaggcacgatacccgctcggtgcaacctgagacttcctggcagctcagactcacccgcaagcgctagccaggtcgccggcattaccgaggtcacatgtaccggagctagagacgttagggcggcccacactgtctag

SEQ ID NO: 109948 - DNA, 612 bp, synthetic construct
  misc_feature 1..612: note = Description of Artificial Sequence: Synthetic coding sequence
  source 1..612: mol_type = other DNA
atgcagaggacaggcggaggtgcccctcgacccggcagaaatcatgggctgcccggatccctcagacagccggatcccgtggccctgctaatgctgcttgtggacgccgaccagcctgagcccatgcgcagtggggctagagagctcgccctgttcctgacccctgagcccggggctgaagctaaagaagtggaggagactatcgagggcatgcttttacggcttgaagagttctgcagtctggctgatctgatcagaagcgatacctcacaaatcttggaggaaaatatccctgttctcaaagcaaaactgaccgagatgaggggaatatatgcgaaagtggacagactcgaggcttttgtgaaaatggttggacatcatgtggcctttctagaagctgacgtcctgcaggccgagagagatcacggcgccttcccacaggcattgcgacggtggctcggctctgctggtctgcctagttttcgtaataagtcccctgcccctgtgcctgtgacctatgaattgccaactctataccggacagaggattatttccctgtcgatgccggcgaggcccaacaccacccgcgaacctgccctagacctctctag

SEQ ID NO: 109949 - DNA, 627 bp, synthetic construct
  misc_feature 1..627: note = Description of Artificial Sequence: Synthetic coding sequence
  source 1..627: mol_type = other DNA
atgacaggccgagtatgtcgcgggtgcggtggtacagacatagaactggatgccgccagaggtgatgctgtttgcacagcatgcggcagtgtcttggaggataacataatcgtcagtgaagttcagtttgtcgagtcctcgggaggtggatcaagcgccgtggggcagttcgtgtctctggacggggctggcaaaacgcctacattgggaggggggtttcatgtgaaccttggtaaggagagccgagctcaaactctccagaatggccgacggcacattcatcacctgggaaatcagctccagctgaaccaacactgcctggacacggcgtttaacttcttcaagatggccgtttcccggcacctaactcgaggtaggaagatggctcatgtgattgccgcatgtctgtatctagtgtgcaggaccgaaggaacacctcacatgttgctggatctctcagatttgctgcaggtcgactccctgagacctgcgtcattccccacatggggctgtgacttgggcgttgtaacccgcgttgtgactggggtatacccccgctgcttgcacgcatctcagtggccagtctgtgcagcgtgtcccgtaagaaagttctggagcgttggttag

SEQ ID NO: 109950 - DNA, 1689 bp, synthetic construct
  misc_feature 1..1689: note = Description of Artificial Sequence: Synthetic coding sequence
  source 1..1689: mol_type = other DNA
atggcagtaagccggcatcttacaaggggccgcaagatggctcacgttatcgctgcctgtctatacttggtgtgtagaaccgaggggactccacacatgctgctagacctttctgacctgcttcaggtgaatgtctacgtcctcggcaagaccttcctgcttctcgcaagggagttgtgcattaacgcccctgccatagatccctgcctgtatatccctcgcttcgcccacttgttagagttcggggagaagaatcacgaagtgagcatgaccgccctgagactgctgcagcggatgaagcgagattggatgcacaccggacgaagaccttcaggcctgtgcggcgccgcactcctggtggcagcccgcatgcatgactttagaaggaccgtgaaagaggtcatctctgtggtcaaggtgtgtgaatcaacactgagaaagagactgaccgagttcgaggatacacccactagtcagctgacgatcgacgagtttatgaaaattgacctggaggaagaatgtgaccccccatcctacactgcgggtcagcgcaagttacgaatgaagcaattggaacaagtgctctcaaaaaagttggaagaagttgagggcgagatctcttcatatcaagatgcaatcgagattgaattggaaaattcgcggccaaaggccaaaggcgggctggcatctctagctaaggacggctcaactgaggatactgcatcttctctttgcggagaagaggatacagaggatgaggaactcgaggccgcagcttcacacctgaacaaggacctgtacagagagctgttagggggcgccccgggaagcagcgaggccgcgggctcaccggagtggggaggtcgtccccctgccctcggctctctgctggacccactgcccaccgctgcatccctggggatctctgactcaattcgtgagtgtatctcatcccagagctcagaccctaaagatgctagtggcgacggtgaactggatctgagtggcattgatgatctggagatagaccgatacattctgaacgaaagcgaagcccgcgtcaaggccgagctttggatgcgagaaaacgccgaatatttgcgggaacagagggagaaagaggccaggatagcaaaagagaaggagttgggaatctacaaagaacacaaacccaagaagtcctgcaaacgccgcgagccaatacaggcaagcacagccagggaggcaattgaaaagatgctggagcagaaaaaaatttctagcaaaattaactattctgtgctgcgggggctgtcctctgcaggcggcggatccccacaccgggaagatgctcagcctgagcattccgcaagtgccaggaaactctcccggagaaggacacccgcatctcggtccggagccgatccagttaccagtgtggggaagcgcctcaggccattagtttccacacagcctgccaagaaggtcgctactggggaggccctgctgccatcatctcccacacttggcgccgaacccgcacgccctcaggccgtcctggtagaaagtgggcctgtctcttatcatgctgacgaagaggccgatgaagaggaaccagatgaggaagacggagagccctgcgtctctgccctacagatgatgggctccaatgattacgggtgtgatggagacgaggacgacggctactag

SEQ ID NO: 109951 - DNA, 408 bp, synthetic construct
  misc_feature 1..408: note = Description of Artificial Sequence: Synthetic coding sequence
  source 1..408: mol_type = other DNA
atgacagctctgcgcctgttacagaggatgaaacgagactggatgcatactggacgacgaccatctggcctctgtggagctgcactactcgtggctgcccgcatgcacgacttcaggagaaccgttaaggaggttatctctgtggtaaaagtatgtgagagcaccctgaggaaacggttgactgagttcgaagataccccgacgagccagttgacaattgatgagtttatgaaaattgacctcgaagaggaatgtgacccaccacccatcgaggagggggggcagacggaagctagggaacccccccaagccagctcctgggaaggcccatctactactcgacggagatctcagctctggcatggatgtcctgggtgcggccgcggagggtttacattatgcccatag

SEQ ID NO: 109952 - DNA, 723 bp, synthetic construct
  misc_feature 1..723: note = Description of Artificial Sequence: Synthetic coding sequence
  source 1..723: mol_type = other DNA
atgacagggcgtgtgtgtcgcgggtgcggcgggacagacatcgagctggatgcagctcggggtgacgctgtttgtactgcctgcggctccgtcctggaggataacatcattgtctccgaagtccagttcgtagagtcgagcggcgggggttcatcagcagtcgggcagtttgtcagcttggacggcgcaggtaagactcccaccttggggggaggcttccatgtgaacctgggaaaagaaagccgtgctcaaaccctgcagaatggacgtaggcacatccaccacttgggaaaccagctccagctaaatcagcattgtctcgacactgctttcaacttttttaagatggcagtgagccggcacttgacaaggggtcgcaaaatggcccatgtcatcgccgcatgcctttatttagtatgcagaacagagggcacgccacatatgctgctggatctttccgacctcctgcaggtggactccctgcggcccgcttctttccccacatggggctgcgatttgggcgtcgtgaccagagtggtcaccggcgtgtatcctagatgccctagaatcagtgttgcaggcctgtgttgtctcccttcacaggaggtcctggtgtgtagaatgcgaggactgcatgacatgggcgtgaccgtgagagatttatgggagtgcggaagcccatggcaggaacatctgccaatgttaggcacagtcggatgctag

SEQ ID NO: 109953 - DNA, 555 bp, synthetic construct
  misc_feature 1..555: note = Description of Artificial Sequence: Synthetic coding sequence
  source 1..555: mol_type = other DNA
atgactgccctgaggttgcttcagcggatgaaacgcgattggatgcacaccggcagacggccttccgggctgtgcggtgccgccctactggttgccgcaagaatgcacgacttccgaaggacagttaaagaagtcatctcagtagtcaaagtctgtgagtccacattgcggaagcggcttactgagtttgaagacactccgaccagccaacttaccattgacgaatttatgaagatcgatctcgaagaggagtgtgaccctcctagctacacagccggtcaacggaagctccggatgaaacaattggaacaggttctctcgaaaaagctggaggaggtggagggagagatcagctcatatcaggatgccatcgaaattgagctggaaaacagtccacccagtcgacgggagggaaggagacgcccagagtcactgccaaggccactgcgcggtaaggcaccggtgccactggtcggaggactgtcctctggtatggccgccccggatgtcgctgagggcgcctccccttgcgtgctcagaagagggtggccctag

SEQ ID NO: 109954 - DNA, 1953 bp, synthetic construct
  misc_feature 1..1953: note = Description of Artificial Sequence: Synthetic coding sequence
  source 1..1953: mol_type = other DNA
atgaccggacgtgtgtgtaggggctgcggggggaccgacatcgagctggatgcagctcgcggtgatgcggtgtgcactgcctgcggatccgtgttggaagataacatcatcgtatccgaggtccagttcgtggaaagcagcggtggcggtagttctgccgtcggacaatttgttagcttggatggcaggaggcacatccaccatcttggaaatcaactgcagttgaaccagcactgcctcgacactgctttcaatttcttcaagatggccgttagtcggcacctgaccagaggacggaagatggctcacgtgatagccgcttgtctctacctcgtttgtagaacagagggcacacctcatatgctcctggatctgtctgacctcctgcaggtgaatgtgtatgtgttagggaaaactttccttttactcgctagagaactgtgcataaacgcacctgcaatcgacccctgcctctacattcctcgttttgctcacctgctcgaatttggcgaaaaaaaccatgaggtcagtatgactgctttgcgcctgttgcaaagaatgaagcgggattggatgcacaccggtcgcaggccttccgggctttgtggggcagccttgcttgtcgccgcacgcatgcacgacttccggcggaccgttaaagaagtcatcagtgtagtgaaggtgtgcgagtctactctgagaaagcggttaactgaattcgaggacacgccaacttcccagctcaccatcgatgaattcatgaagatcgatctggaagaagagtgcgaccctccttcctacacagctggccagaggaaactgcggatgaagcagctggaacaggtcttgagtaagaaacttgaagaagtggaaggagagattagtagctatcaagacgccatcgagatcgagctggagaactccagacccaaggccaaggggggcctcgcctcactcgcaaaggatggctccaccgaggataccgccagttctctttgcggagaggaggacacagaggacgaggaacttgaagcagcagcgtctcatctcaacaaggatctgtatcgcgaattactgggcggagccccaggatcatccgaagcggccggctcccctgagtggggcggacgcccacccgcacttggatctctgctggaccctctgcctacagccgcaagtctggggatctctgactcgattagagagtgtatctcctcacagtccagtgatcctaaagatgcatccggcgatggagagctcgaccttagcggcattgacgatctagaaatagatcgctatatccttaacgaatcggaggctcgcgtcaaggcggaactgtggatgcgcgaaaacgcagagtatctgagggagcagagggaaaaggaagctagaatcgctaaggaaaaggagcttggaatctacaaggagcataagcccaagaaaagctgtaaacggcgtgaaccgatccaagccagcactgcacgggaagcaattgaaaagatgctcgagcagaagaagatttcttccaagattaattattctgtgctgcgtggattgagttccgctggaggaggctccccacaccgagaagatgcgcagccagaacactctgctagcgctcggaagctttccagaagacgcaccccggcatcccggagcggcgcagacccggtgacatctgtgggcaaacgtctaagaccactcgtgagtacccagccggcgaaaaaggtggctacaggagaagctctattgccatcaagcccaaccctgggggcggagccggcgcgtccccaagccgtgttggtggaatccggccctgtgtcttatcacgcagacgaggaggccgacgaagaggaacctgacgaggaagacggagagccctgcgtgagcgcgctgcagatgatgggttctaatgactatggttgcgatggagatgaagacgacgggtattag

SEQ ID NO: 109955 - DNA, 1422 bp, synthetic construct
  misc_feature 1..1422: note = Description of Artificial Sequence: Synthetic coding sequence
  source 1..1422: mol_type = other DNA
atgacagccctgcggctcttacagcgcatgaagcgggattggatgcacacagggagacggcccagtggcctgtgcggcgccgcattgcttgtggctgcccgaatgcatgattttagacgcaccgttaaagaggttatctcagtcgttaaggtgtgcgagagtaccctgagaaaaagactcacagaattcgaggacacacctacctcccagttaacaatagacgagttcatgaaaattgacctggaagaggagtgcgacccccccagttacaccgcgggccaacgaaagctgcggatgaagcagctggagcaggtgttatcaaagaaattggaagaggttgaaggagagatcagcagctatcaggacgcaatcgaaattgaattagagaactctcggccaaaagccaagggcgggttggcatctctagctaaggatgggagtaccgaggacaccgctagttctctgtgcggcgaggaggacaccgaggatgaggagctggaagcagctgcctctcacttgaacaaggacctgtaccgagagctcctgggcggcgcacccggttcttctgaggctgccggcagccccgaatggggtggtaggccgcctgccctcgggtctttactggaccccctccccactgcagcgtctctagggatatctgattcaatcagagagtgtatctcctcacagagctccgacccaaaggacgcatctggcgacggtgaactggacctgtctgggatagatgacctggaaattgatagatatatcctcaacgagagcgaggcccgcgtgaaggctgagctttggatgcgagagaatgccgagtatcttagagagcagcgagaaaaagaggcccgaattgccaaggagaaggagctaggaatctacaaggagcacaagcccaaaaagagctgcaaaaggcgagagcccattcaggcaagcaccgccagagaggcaattgagaaaatgcttgaacagaagaagatctcatcaaagattaactactctgtgctccgcggactgtcaagtgctggaggcggaagcccacaccgagaggacgcccagccagagcactccgcaagcgcgcgcaagctgtcacggagacggacccccgcttcgcgttcaggtgcagacccggtgacttcagtgggaaagcgcctcaggcccctggtgtctacccagcctgcgaagaaagttgccacaggcgaagcccttttgcccagcagcccgacactgggagctgaacccgctaggccacaggccgtgcttgttgagagtggccccgtgagttaccacgctgacgaagaagccgatgaggaggaaccagacgaagaagatggcgaaccatgcgtgtcggcattacagatgatgggtagcaatgattatgggtgcgacggcgatgaggatgacggatactag

SEQ ID NO: 109956 - DNA, 1755 bp, synthetic construct
  misc_feature 1..1755: note = Description of Artificial Sequence: Synthetic coding sequence
  source 1..1755: mol_type = other DNA
atggccgtcagccgccacttgacccgagggcgtaaaatggcccacgtgatcgctgcatgcttatacctggtgtgtcggaccgaggggaccccccacatgcttctagacctctctgaccttttgcaggtcaacgtctacgtgcttggcaaaacatttctgcttcttgcgagggagctgtgcataaacgctccggccatcgacccctgtctttacatcccccggtttgcacacctactcgagttcggagagaagaaccatgaagttagtatgacagctctgcgcctcctgcaaagaatgaagcgcgactggatgcatacgggacgaaggccgtccggactgtgtggcgctgctctcttggtagcggccaggatgcacgacttcaggaggactgtgaaagaagtgatctccgtggtgaaagtgtgcgagagcacactgcgcaaacgattgaccgaatttgaggatactccaactagtcagctgaccatcgacgaatttatgaaaatcgatctggaggaagaatgcgaccccccttcttacactgctggtcagaggaagctacggatgaagcagttagagcaggtcttatccaagaaactggaggaagttgaaggcgagatctcctcttaccaggacgcaattgaaattgaactcgaaaactcgcggcccaaggctaaagggggcttagcaagccttgccaaagacggtagcacggaggacacagctagctcactctgcggcgaggaggacacagaggatgaggaactcgaggctgccgcgagtcatttaaacaaagatctctaccgagagctgctgggcggggcacctggcagcagcgaggctgctggaagccctgagtggggcgggagaccacctgccttaggatcgctacttgaccccctaccgacagccgcctccctcgggatctcagacagcatccgagagtgtatttccagccaaagttcagatcccaaggatgcgtcaggggatggagagctcgatctctctggcattgatgacctggaaattgaccgcagagacctgtctatgccgcgttgcgcaaaagcaaaaagtcaaccacacttccctgttttggcccagtatattctgaacgagagtgaggcgagagtgaaggccgagctgtggatgagagaaaacgcagaataccttcgggagcagagagagaaagaggcaaggatcgctaaagagaaggagctgggaatctataaggaacacaaacctaagaaatcatgtaagagaagggagcctattcaggcctccacagcgcgagaagcgatagaaaaaatgctcgagcagaagaaaatcagcagtaagattaattactcagtgctgcgtgggctgagttcggctggggggggctcccctcatcgcgaggatgcccaacccgaacactcagccagtgctcgaaaactctcaagaaggcggacgcccgcttcacgtagtggggcagatcctgtcacatcagtcggcaagcgactgaggcccctggtgtccactcagcccgccaaaaaggtcgccactggtgaggcgctcttgccgtccagcccaacacttggcgccgagccagcccgtccccaggcagttcttgtcgagtccggccccgtatcatatcatgcggatgaggaggctgacgaggaggagcctgatgaagaggatggggaaccctgtgtgagcgccctgcagatgatggggagcaatgattacggatgtgacggcgacgaagacgacgggtattag

SEQ ID NO: 109957 - DNA, 1320 bp, synthetic construct
  misc_feature 1..1320: note = Description of Artificial Sequence: Synthetic coding sequence
  source 1..1320: mol_type = other DNA
atgcacgattttagaaggaccgtgaaggaggtgatctccgtggtaaaagtttgcgaatcgacactccgcaagagactgacggaatttgaagatactccgacaagtcaactgacaatcgacgagtttatgaagattgatctggaggaggagtgtgatccacccagctatacagcaggacagagaaagttgcgcatgaaacagcttgaacaagtgctgagtaagaagctcgaggaggttgagggagaaatatcttcctaccaagatgccatcgagatcgaactcgagaattctagacccaaagccaagggcgggctggctagcctggccaaggacggttctacggaagacactgcgagttctctgtgcggggaagaggacactgaggatgaagaattggaagctgcagcctctcacttaaacaaagatctgtacagagagttactgggcggggctccaggatctagtgaagcggcagggagccccgagtgggggggacgccccccagctctgggctccttgttggaccctctacccacggcagctagccttgggattagtgactccatcagagaatgtatatcgtcccaaagctcagaccccaaagacgcatccggggatggagaactcgacttatcaggcattgacgacctcgaaatcgacaggtacatacttaacgagagcgaagcgcgagtaaaagcagaattgtggatgcgcgaaaacgccgaatacctgcgggagcagcgggagaaggaagcccgcatcgcaaaagagaaagagctgggcatctacaaagaacataaacctaagaagagctgcaaacggagagaacctatccaagcctccacggcccgcgaagcaattgaaaagatgctggaacagaagaagatcagcagcaaaatcaattacagtgtgctgagggggctgtcctccgctggcggggggagcccccaccgcgaggatgctcagcccgagcactccgcaagcgcaagaaagctctctagacggcgaaccccagcgtcccggtccggcgctgatccagtcacgagcgttgggaagagacttcgtcctctggtaagcacacagcccgccaagaaagttgccacaggggaagctctgctgccttcatctcccaccttaggggccgaacccgctagacctcaggcggtgctggtggaatctggacctgtgtcatatcacgcagatgaagaagcagatgaggaggagcctgacgaagaagacggggagccttgtgtgagcgctctgcagatgatgggctctaatgattacggatgtgatggtgatgaagacgacgggtattag

SEQ ID NO: 109958 - DNA, 2034 bp, synthetic construct
  misc_feature 1..2034: note = Description of Artificial Sequence: Synthetic coding sequence
  source 1..2034: mol_type = other DNA
atgaccggacgggtctgccgaggctgcggaggcacagatatagaactggatgctgcacggggtgatgctgtgtgcaccgcttgcgggtctgtgcttgaggacaacatcattgttagcgaagtccagtttgtggaatcttcggggggtggatcgtctgccgtagggcagttcgttagcctcgacggcgcggggaaaacccctaccttagggggcgggtttcatgtgaacctggggaaagagagtcgcgctcaaacactccagaacggccgcagacacatccaccatctggggaaccagctgcagttgaaccagcactgcctggacacggcattcaattttttcaaaatggctgtgagtcggcacctgacccgcgggaggaagatggcccacgtgattgctgcatgtctgtatctcgtgtgcaggaccgagggcaccccccatatgctgctcgacttatcagacctgcttcaagtcaatgtgtatgttctgggcaaaacgttcctcctccttgcccgcgagctgtgtatcaacgcccccgcgatcgatccctgcctgtacattccccggttcgcacacctactggagttcggcgaaaagaaccatgaagtttctatgaccgccctgagactgctgcaacggatgaagagggattggatgcatacagggcgccggccgtccggactgtgtggcgccgcccttctggtggcagctcgtatgcacgactttagacgcaccgttaaagaggtcatcagtgtggtgaaggtgtgcgaatctaccctccgcaagcgtctgactgaattcgaagacactccaaccagtcagctaaccatcgacgagtttatgaagatcgacctggaggaagagtgcgatcccccgagttatacggccggacagcgcaagctgaggatgaagcagcttgagcaggttctgagtaagaagctggaggaagtggagggggagatttcatcctatcaggatgcaattgaaattgagcttgagaatagcagacccaaagctaagggtggactggcaagccttgcaaaggatgggtcaactgaggataccgccagcagcctgtgcggagaagaggataccgaggacgaggaactggaagcagctgcatcccacctgaacaaggatttgtaccgggagttattgggaggcgcccccggtagttcagaggccgctggctcccccgagtggggcgggcggccacccgccctgggctccctgctggacccattgcccacagcagcctccctcggtatctcagacagcatccgggagtgtatatcctcgcagagctcagatcccaaagacgcctcaggggacggagaactggacctgtcaggcattgacgacctggagatcgatcggtatatcttgaacgaatccgaagcgcgagtgaaagcagagctgtggatgcgagagaacgccgagtatcttcgagaacagagggagaaggaagcacggatagctaaagagaaagaactgggaatatataaggagcataaacctaagaaatcctgcaaaagaagagagccgattcaagctagcaccgctcgggaagcaatagagaagatgctggaacagaagaagattagcagtaagataaattattcagtgctcagaggactttccagcgcaggagggggctctccccaccgtgaggatgctcagccagaacatagtgctagtgcacggaagctcagtagaagacgaacccccgccagcaggtctggtgctgatcctgtgactagcgtggggaagagacttcgcccactggtgtctacacaacctgccaaaaaggtggctactggcgaagcgctgctgcccagcagtcctacattgggagccgagccagctcgcccccaggctgtactcgtagaatccggaccagtgagctatcatgctgatgaggaagccgatgaggaagagcccgatgaggaagatggcgagccctgtgtgtccgcccttcaaatgatggggtctaacgactatgggtgcgacggtgacgaagatgacggttactag

SEQ ID NO: 109959 - DNA, 612 bp, synthetic construct
  misc_feature 1..612: note = Description of Artificial Sequence: Synthetic coding sequence
  source 1..612: mol_type = other DNA
atgagggaaaatgccgaatacctccgagaacagcgcgagaaggaggctcgcatcgctaaggagaaagagctgggaatttataaggaacacaaaccaaagaagagctgcaagcggcgcgagcccatccaagccagcacagcacgggaggccatcgaaaagatgctggaacaaaagaagatctcgtccaagatcaactactctgtcctgcgcggtctctcctccgccggtggggggagtccccatcgggaggatgcgcagccagaacattccgccagcgcgcgcaagctgtcacggcgacgcaccccagcgtccaggagcggtgccgatcccgtgacttcagtgggaaagcgattgcggcctctcgtctcaacacaacctgctaagaaggtagccacaggggaggcactgctcccaagcagccctacgttgggcgccgaacccgccaggccacaggctgtgcttgtggaatccggaccagtgagttatcacgctgatgaagaagcggacgaggaagagcccgacgaggaggacggcgaaccatgcgtgagcgccctccagatgatgggcagcaacgactacgggtgtgatggggacgaagacgatggatactag

SEQ ID NO: 109960 - DNA, 714 bp, synthetic construct
  misc_feature 1..714: note = Description of Artificial Sequence: Synthetic coding sequence
  source 1..714: mol_type = other DNA
atgacggccctgcgtcttctccagagaatgaaacgggattggatgcacaccggtagacgcccctccggactctgcggagctgccttgttagtggccgcaaggatgcacgacttccggaggacagtaaaagaagtcatctccgtcgttaaggtgtgcgagtctactcttagaaagcggctgaccgaattcgaagatactccaacctcgcagctcactatcgacgagtttatgaagatagacttggaggaggagtgcgaccctccctcttacacggctggacaacgcaagttgcgcatgaagcagctggaacaggtgctgtccaagaagcttgaagaggtggaaggagagatctcgagctaccaggatgccatcgagatcgagttggagaatagccggccgaaagccaaggggggcctggcctctctggctaaggacgggtcaaccgaggataccgccagctcgctctgcggggaggaagacacagaagacgaggaacttgaggctgcagcgagccacctaaataaggatctgtacagggagttgctgggcggagcaccggggagtagcgaagcggccgggtctcccgagtggggtggcaggcctccggcactgggctctctgttggatcccctcccaacggccgcctcgctgggaatttccgactcaatccgagaatgtatctcatcccagtccagtgacccaagcgagttctag

SEQ ID NO: 109961 - DNA, 138 bp, synthetic construct
  misc_feature 1..138: note = Description of Artificial Sequence: Synthetic coding sequence
  source 1..138: mol_type = other DNA
atgacggcgctgagacttctgcagagaatgaagagggactggatgcatacgggacgcaggccgtctggactatgcggggcagccctgttagttgctgcaaggatgcacgactttcgccggactgtcaaggaagtgtag

SEQ ID NO: 109962 - DNA, 45 bp, synthetic construct
  misc_feature 1..45: note = Description of Artificial Sequence: Synthetic coding sequence
  source 1..45: mol_type = other DNA
atgaccgccctgaggctgctgcagcgcatgaagagggattggtag

SEQ ID NO: 109963 - DNA, 468 bp, synthetic construct
  misc_feature 1..468: note = Description of Artificial Sequence: Synthetic coding sequence
  source 1..468: mol_type = other DNA
atgactgccctgcgcttgcttcagcggatgaagcgggattggatgcatacaggaaggcggccgtcaggcctgtgcggagccgccctcctcgtggcagcccggatgcatgacttcagacggaccgtcaaagaagtgatttctgtcgtgaaagtgtgtgagtccaccctgagaaagcgcctgacagaatttgaagacacccctactagtcagttgacaattgatgagttcatgaagatcgacctcgaagaagagtgcgatccaccttcttacacagctgggcagagaaaactccggatgaagcagctggagcaagtgttgtccaagaaacttgaagaggtggagggcgagatcagcagctaccaagatgctattgagatagagctcgaaaactccagaccgaaagccaagggcggtctggccagcctggcaaaggatggctctacagaagatacagcatctagtctatag

SEQ ID NO: 109964 - DNA, 8307 bp, synthetic construct
  misc_feature 1..8307: note = Description of Artificial Sequence: Synthetic coding sequence
  source 1..8307: mol_type = other DNA
atggcactggttcttgaaatttttacacttctggccagcatttgctgggtatctgcgaacatttttgaataccaggtagatgcccaacctctgcgaccctgcgagttacagagggagaccgcattcttgaaacaagctgactatgtccctcagtgtgcagaggacggaagtttccagactgtgcagtgccaaaatgacggtcggtcttgctggtgtgtaggcgccaatggttccgaggtgctggggtcacgtcagcctggccggcctgtggcctgtctttccttttgccagctacagaaacagcagattctgctgagtggctatatcaactccaccgacacatcctacctgccgcaatgccaggactctggagattacgccccagtgcagtgcgatgtccaacaggttcagtgctggtgcgtcgacgctgaagggatggaggtctatgggacacggcagttagggagacctaaacggtgccccaggtcgtgtgagattcgcaaccgccggcttctacatggagtcggagacaagagtcctccccagtgctcggccgagggggaattcatgcctgtccagtgtaagtttgttaacactacagatatgatgatattcgatctggtgcactcctacaatagattcccagatgcttttgttaccttttccagttttcaacgccggttccctgaagtcagcgggtactgccattgcgctgattcacagggaagggagcttgcagagactggcttagagcttttactggacgaaatttatgacacaatctttgcgggactggatttgccgagcacgtttactgagacaactttatatcgtattcttcaaagaaggtttttggccgtccagagcgttatctccggaaggttccgatgccccaccaaatgtgaagtggaaagatttacagctacctcatttggtcatccttatgttccatcgtgcaggagaaacggggactatcaggccgtgcaatgccaaacagagggcccttgctggtgcgtggacgcccagggtaaggagatgcatggaacccgacagcagggggaacctcctagctgcgctgagggccagtcgtgtgcctcggaacgtcaacaggctctctctcgtctgtatttcggtacttcaggatacttttcacagcatgatctgttctcatcacccgagaagagatgggcgtcaccccgtgtcgcacggttcgcgacttcatgtccccctaccataaaagagctattcgtagactccggactgttgcgtcctatggttgaagggcagagccaacagtttagcgtctctgagaatttactgaaagaggccatccgggcgatctttccctcgcggggcctcgcacggctggcattgcagttcaccaccaatcctaaacgattgcaacagaacctgtttggagggaaatttcttgtgaatgtgggccagtttaacctgtctggggcactgggaacccgtgggacattcaactttagtcagttttttcagcagctgggactggctagcttcctgaatggcgggcggcaggaggacctggcgaagcccctatccgtagggctcgatagtaattcaagcacagggacacctgaggccgcgaagaaggacggcacaatgaataagcctacagtgggctcttttggcttcgaaattaacttacaggaaaatcagaatgcactcaagttcttggcctcactgttggaattacccgagttcttgttgtttcttcagcatgccatttccgtaccggaggacgtggctcgtgaccttggagatgtcatggaaaccgtgttgtcaagccagacatgcgagcaaaccccggagcgactgttcgtcccttcatgcaccaccgagggatcatatgaagacgtgcaatgcttcagtggtgaatgctggtgtgtgaactcttggggaaaggagctgcccggaagtcgagtccggggaggacaaccaaggtgcccaacagattgtgaaaaacagcgcgccaggatgcagagtcttatgggatcgcaaccagcaggcagtaccttattcgtccctgcttgtacaagcgagggccactttctgccagtacagtgttttaacagcgagtgctactgtgtggatgcagagggacaggctattcctggaactaggagtgccataggcaagcctaagaagtgcccaaccccatgccaactgcaatctgagcaggcttttctgcggaccgtccaggccctgctgtctaactcctccatgctccccaccctctcagatacgtacattccacagtgtagtaccgacggccagtggcgtcaggtgcagtgtaatggccctcctgagcaggtattcgagctttatcaacggtgggaagcgcagaacaaggggcaggacctgacccctgccaagctactggtaaagatcatgagttatagagaggcggcttcaggaaatttcagcctgtttatccagtctctgtacgaagctgggcagcaggacgtgttcccagttcttagccaatatccttcccttcaagatgtgccactggcagctctcgaaggcaagagacctcagccccgcgaaaatatcctcctagaaccctatctcttttggcagattctgaacggtcaactgtctcagtatcccgggtcttacagcgatttttccacaccactcgctcacttcgacctaaggaactgctggtgcgtcgacgaagcgggtcaggagctggagggaatgcgcagcgagccgagcaaactgccaacttgccccggttcatgtgaagaagctaaactcagagtgctccaattcatcagggagacggaggaaattgtatcggctagtaattcttccaggtttcctcttggcgaatcattcctagttgctaaagggatacgccttcggaacgaagatctcggtctgcctcccctctttccaccacgcgaagctttcgctgagcagttccttagaggatcggattacgctatccggctggccgcgcagtccacgctgagtttttaccagcgcagacgtttcagtccagacgatagtgctggtgcaagcgcactgctaaggagcggcccttacatgccgcagtgtgacgcttttgggagctgggagccggttcagtgccatgctggcacgggccattgttggtgtgtggacgagaagggcggtttcatacctggaagtctaacggctcgatcgcttcagatccctcagtgccctacaacctgtgaaaaatcaagaaccagcggcctccttagctcttggaaacaggcacggtctcaagaaaacccatcccctaaggacctgtttgtccctgcatgcctggagaccggcgaatacgcgagactccaagcatcaggcgctgggacgtggtgcgtagatcccgcgtctggggaagagctccgacctggaagttcttcaagcgctcaatgcccctccctgtgcaacgttctcaaaagcggagtgctttctagacgcgttagtcctgggtacgtgcctgcttgccgtgcagaagacggcggctttagcccggttcagtgtgatcaggcccagggaagctgctggtgcgtcatggattctggtgaagaggtgcctggaacccgcgtgacgggcgggcagcccgcctgcgaatcgccaaggtgtcctttgcccttcaacgccagcgaagttgtcggggggacaattctctgcgagacaatctcagggcctaccggtagcgcgatgcagcagtgccagcttctctgcaggcagggttcttggagcgtattccctcccggccccctgatctgcagtttggagtctggccgttgggagtcccaactgcctcagccccgagcatgtcaacgtccccagttgtggcaaactatccaaactcaaggccacttccagctacaactgcccccaggaaagatgtgttcagccgactatgccgacctccttcagacgttccaggtattcattctggatgagctgaccgctaggggtttttgccagatccaagtgaaaacctttggcaccctggtttctatcccggtctgcaataacagtagtgtgcaagtcggttgcctgacccgtgaacggctgggcgtgaacgtgacatggaaaagtagactggaagatatcccagtggcgagtcttcccgatttgcacgacatagagcgggcattggtggggaaagatttgctaggtcgatttactgatttaatacaatccggcagcttccagctgcacctggactccaaaacctttccagccgaaaccatcaggtttctgcaaggcgatcatttcgggacaagccctagaacgtggttcggttgcagcgaggggttctaccaggtgctgacaagcgaagctagccaggatggattgggctgtgtcaaatgtcccgaggggtcctattcacaggatgaagaatgtataccatgtcctgtaggattctatcaggaacaggctggaagtctggcctgcgtgccctgtcctgtaggcagaacaaccatttctgcaggagcctttagtcagacacactgtgtgaccgattgccagcgcaatgaggccgggctacagtgtgatcagaacggacaatatcgagctagccaaaaagaccgcggtagcggtaaagccttctgtgttgacggcgaaggacggagattgccttggtgggagacagaagcgcccctggaggacagccagtgcctgatgatgcagaagtttgaaaaagttcccgaatctaaagtgatctttgacgccaatgcccccgtggcagttcgctcaaaggtacctgatagcgagttcccagttatgcagtgcctcactgattgcacggaggacgaggcatgttcctttttcaccgtgtctaccaccgagcctgagattagctgcgatttctacgcctggacttccgacaatgtggcatgcatgacttcggatcagaaaagagatgctctcgggaattccaaagctacttcgtttggctctctgcggtgccaagttaaggtccgaagccacgggcaggacagtcctgcagtctacctgaaaaaggggcagggttccacaaccacacttcagaagagattcgagcctaccggcttccagaatatgctctcagggctctataaccccatcgtgttcagcgcatccggcgctaacctaacagacgctcacctcttttgcttgctggcgtgcgatcgggacctgtgctgtgatgggtttgtgttaactcaggtgcagggaggggcgatcatctgtggcctcctcagctcaccttctgtgctcctgtgcaacgtcaaggactggatggatccatctgaagcctgggcgaatgcaacctgcccgggtgtaacttacgaccaggagtcgcaccaggtgattcttcgcctaggcgaccaggagttcatcaaaagcctgactccattggaaggcacccaggacacatttacaaacttccaacaggtctatctatggaaggacagcgacatgggctcccggcccgaatcaatggggtgcagaaaggatactgtgccaaggcccgcaagtccaacagaggcaggactcacgacggaactgtttagtcccgtggacctgaaccaggtgattgtgaatgggaatcaaagcctgtctagtcagaagcactggctgttcaaacacctcttttcagctcaacaggctaacttatggtgcctgagtcgctgtgtccaggaacactctttctgccagttggcagagatcactgagtcagccagcttatacttcacttgcacactgtatcctgaagctcaggtgtgtgacgatattatggagtccaacgcccagggttgccgacttatcttgccacagatgccaaaggccctgttcaggaaaaaagtgattttagaagacaaagttaaaaatttctacacgagattgcccttccagaagctaatgggtatcagcattcgaaataaggtaccaatgagcgaaaaatccatttcaaatggcttttttgaatgcgaaagacgatgtgatgcagacccctgttgtaccggattcggcttcttaaacgtgtctcagctgaaggggggggaggtaacgtgtttgaccttgaactctcttggcattcagatgtgcagcgaagaaaacggcggagcatggcggattttggattgtgggtccccagacattgaggttcacacataccctttcggctggtatcaaaaaccgatcgctcagaacaacgcgccaagtttctgtccgctcgtggtgctgccctctctgaccgagaaagtgtctctcgattcatggcagtctcttgcactcagcagtgtcgtcgtggacccatcgatcaggcatttcgatgtcgcacacgtgagcacggcagctacaagcaatttctccgcggttagagatctctgcttgtccgagtgtagccagcacgaagcatgcctcatcacgaccttgcaaactcagcccggtgcagtgcggtgtatgttctatgcagacacccagtcctgtacccactctctgcagggccagaactgtcgcctgctcctgagggaagaggccactcacatctatcgaaagccagggatttcactccttagttacgaggcttcagtcccgtctgttcccatctcaactcatggacgcctgctggggcgtagccaagccatccaggttggcacctcatggaaacaggtggatcagtttttgggcgtgccatatgcagctccacccctcgcagagcggagatttcaggcacccgaacccttaaattggaccgggagttgggatgccagcaaaccaagagcatcatgttggcaacccggcactcggacctctacctctcccggggtttcagaagattgcctgtatctcaacgtgtttatccctcagaatgttgcccctaatgcttcagtacttgtgttttttcataatacaatggatcgcgaagaatcagaaggctggcccgcaatcgacggtagctttttagctgcagtgggaaaccttatcgtagttaccgcaagctaccgcgttggtgtctttggtttcctatccagcggctcgggcgaggtcagcggcaattggggcctgttagaccaggtggccgcactcacctgggtacagacccacatcagagggtttgggggagacccaaggcgcgtgagtcttgcagcagatcgtggcggagcagatgtagcttctatacatctactgactgcgcgagcgactaactcgcagctgtttaggcgcgctgttcttatgggcggctcagccctgagcccagcggctgtaatcagtcatgaacgggcccagcagcaggcgatagcccttgccaaagaggtttcatgcccgatgagctcaagccaggaggtggtctcctgcttgagacagaaacccgcaaacgtcctgaacgacgcgcagactaagctgctggcggtgtccggcccattccattattggggcccagtgatagatgggcacttcttacgggaaccccccgctcgagccctaaagcggtccttgtgggtggaagtggatttgctcataggcagctcccaggacgacgggctgatcaaccgcgctaaggctgtgaaacaatttgaggagtcgagggggaggacctcttcgaagacagcgttttatcaggctctacaaaatagtcttgggggcgaagactccgacgcccgcgtggaggccgccgccacctggtactactctctagagcatagcaccgatgattatgcttcttttagccgagccctagagaatgcaactcgcgattacttcatcatttgccccatcatagatatggcatccgcatgggcgaagagagccagaggaaatgtcttcatgtatcatgctccagaaaactacggccatggctcacttgaactgttggcagacgtgcaattcgcactgggactgcctttctatccggcatacgagggacaatttagtctggaggagaagagcctgtcccttaaaattatgcagtatttctctcacttcattcgcagcggcaaccccaattacccgtacgagttcagtcggaaggtcccgacgtttgctactccttggcccgacttcgtgcctcgcgccggcggcgagaattataaagaatttagtgagttgttaccaaatcgacaaggcctcaagaaggccgattgctcattctggagtaagtatatttcgagtctcaagacatcagctgacggggccaaaggcggacagtctgccgagagcgaggaagaagagcttaccgccgggtccgggctgcgagaggacctgctgtctttacaggagccaggcagcaaaacgtattccaaatag

SEQ ID NO: 109965 - DNA, 1191 bp, synthetic construct
  misc_feature 1..1191: note = Description of Artificial Sequence: Synthetic coding sequence
  source 1..1191: mol_type = other DNA
atgccgggtcggggacgctgtcccgactgcgtcgtgacagagggtgtcttaacaacaacctttagtgatgagggaaatctgagagaagtcacctactcgaggagcaccggcgagaatgagcaggtgtctcgatcccagcagcgaggcctgcgcagggtgagagatctgtgccgcgtgctgcagctgcctcctaccttcgaggacaccgccgtggcgtattatcagcaagcctatagacactctggaatccgggcagcgagactccagaagaaggaggtgttagtgggatgttgtgtcttgattacctgtagacaacacaattggcccctgacaatgggagccatctgcacattgttgtatgccgacctggatgtgttcagcagcacatacatgcagatcgtaaaactgctggggctggacgtaccgtccctttgcttggccgagctggtcaaaacatattgcagtagtttcaagctgttccaggccagcccaagtgttcctgcaaaatatgtggaggacaaggagaagatgctatcgcgcaccatgcagctggtggagctcgccaacgagacctggctcgtcacaggacgccatccactgcccgtgatcaccgctgccacgtttcttgcttggcagtcgctgcagcctgcggatcggctgtcctgtagtctcgctaggttttgtaaattggcaaatgttgatctcccctaccccgctagcagcagactgcaggagctcctcgccgtgctcctccgaatggcggagcaattagcttggctccgggtgctgaggctggacaaacgctctgtggtgaagcatataggagatttgcttcagcatcgtcagtctctcgtcaggtccgcctttcgggatgggaccgcagaagtggagacgagggagaaggaaccccccggctggggacagggccagggcgaaggggaggtggggaataactcccttggactgcctcaaggtaaacgccccgctagtcctgccttgcttcttccaccctgcatgctgaaatcacccaaaaggatctgtccagtgccacccgtctccactgtgacaggcgacgaaaacatctcagattccgagattgagcagtacctgcgcacgcctcaggaggtgagagatttccagcgcgcacaagccgcaaggcaggcagcgacgagcgtgcctaaccccccttag

SEQ ID NO: 109966 - DNA, 1698 bp, synthetic construct
  misc_feature 1..1698: note = Description of Artificial Sequence: Synthetic coding sequence
  source 1..1698: mol_type = other DNA
atggctgaaggcaaggctggcggagccgctggtctgtttgctaagcaggtgcagaagaaattcagccgcgctcaggaaaaagtcctacagaagcttggcaaagccgttgagacgaaagatgaaagattcgaacagagcgccagcaacttctatcagcagcaagcagagggccataagctgtataaagatctgaaaaacttcctgtctgccgtcaaggttatgcatgaatcttctaaaagggtttccgagacactccaggagatctactcgagcgaatgggatgggcacgaggagctgaaagctatagtgtggaataatgatcttttgtgggaggactacgaagaaaagctggccgaccaggccgtccgcacgatggaaatctacgttgctcagttctctgagatcaaagagcggatcgcgaagcggggtcgcaaactggtggattacgattccgcccggcaccatctcgaagctgtgcagaacgctaagaaaaaagatgaggcaaaaaccgcaaaggcagaggaagagttcaataaggcccagactgtgttcgaggacctgaaccaagagttgctggaggaattgccgatcctgtacaacagtcgcataggctgttatgtcaccatctttcagaacattagcaacttacgcgatgtgttctatagggaaatgtctaagctgaaccacaatctttatgaagttatgagcaaactagagaaacagcacagtaacaaggtgtttgtcgtaaaggggctgtcctcttcttcccgtagatctctggtaatctcccccccagtgaggacagccactgtttcaagtcccctaaccagcccgacttcccccagtaccctgtcactaaagtcagaatctgagtctgtgagtgccacagaggacctcgcacctgacgccgcacagggcgaggataacagcgagattaaggaactgctggaagaggaggaaattgagaaggagggctcagaagccagttcaagtgaagaggatgaaccactccccgcctgtaacgggccagcccaggctcagccttcacctacgacagagagagcaaagagtcaagaagaggtcttgccatctagtactacaccttcccctggaggagcactgagcccctctgggcagccctcgtccagtgcaactgaagtggtgctccggacccggacagcgtctgaaggaagtgaacagccaaaaaaaagagcaagtatccagaggacttcagcaccccctagccgtccacccccaccacgggcaaccgcatcaccccggccatcctccggaaatatccccagcagccctactgcaagcggaggggggagccctaccagtccccgcgcgagcctgggcacagggaccgcgtccccgcggacctcgctggaggtttcaccaaatccagagccccctgagaaacccgtgcgcacccctgaggccaaggaaaatgagaacatccacaatcagaaccccgaggaactgtgtaccagcccaaccctcatgacctcccaggtggcaagtgaacctggggaggctaaaaagatggaagacaaagaaaaggacaacaaactgatctccgccaatagcagtgaggggcaggaccagctgcaggtgtccatggtgcccgaaaataacaatctgactgcgccagagcctcaggaggaggtgtcaaccagtgagaatcctcaattgtag

SEQ ID NO: 109967 - DNA, 1602 bp, synthetic construct
  misc_feature 1..1602: note = Description of Artificial Sequence: Synthetic coding sequence
  source 1..1602: mol_type = other DNA
atggccgagggtaaagcaggcggagccgcgggtctgttcgctaagcaagtccagaagaagttttcgagagcccaggaaaaggtgcttcagaaactcggaaaagccgtggaaacaaaagacgagagattcgagcaatccgcaagcaacttctaccaacagcaagcagaggggcataagctatacaaggacttaaagaatttcctttcggccgtgaaggtaatgcacgagtcctccaaacgcgtgagcgaaacactacaggaaatatacagttccgagtgggatggtcacgaagaactgaaggcaatcgtgtgggaacgtatcgccaaaagggggaggaaacttgttgattatgactcagcccggcatcatctcgaggctgtgcagaacgccaagaaaaaggatgaggccaaaactgcaaaggcagaagaagagtttaacaaggctcagaccgtcttcgaggaccttaatcaggagttgctggaggaactgcctatactctacaactcccggatcgggtgttacgttactatctttcagaacatttctaacctgcgggacgtgttttatcgagagatgagcaagctcaatcacaatctttacgaggtgatgtccaagctggaaaaacagcattcaaacaaagtgtttgttgttaaggggctgagtagtagcagccgccgaagcctcgtgatcagccctcccgtgagaaccgccaccgtctcttcccccttgaccagcccaacaagtccatcaacactctctctgaaatccgagagcgagtccgtgtcagctacggaggatcttgccccagatgctgcacaaggcgaggataacagtgagattaaggaactccttgaggaggaagagatcgaaaaggagggctctgaggcctcatcctcagaagaggacgagcctttgcccgcctgtaatggcccagcacaggcacaaccaagtcccacgactgagcgggctaaaagccaagaagaggtgctgcccagcagcactactccatctccaggcggcgccctgagtccaagcgggcaaccttcgtcttctgccacagaggtggttctgaggactcgcacagcttcggagggcagcgaacagcccaaaaaacgggctagcattcaacgcacctccgctcccccctcacgaccgcctcctcccagagctaccgctagccctagaccttctagtgggaacataccatcttcccctaccgcttccggaggcggctcaccaacctctccacgcgcatcactggggaccggaaccgcgagcccacggactagcctggaagtgagtcctaatccagagccaccggaaaagccagtacgtaccccagaagctaaggagaatgaaaacatccacaaccaaaatcccgaggagttgtgtacgtcgcctacactcatgaccagccaagtggcatcagaaccaggcgaagccaagaagatggaagataaggagaaggataacaagctgatatccgcaaattccagcgaggggcaggaccaactgcaagtgagcatggtccctgaaaacaataacctcacagctcctgaaccacaagaggaagttagcaccagcgagaaccctcaactttag

SEQ ID NO: 109968 - DNA, 1620 bp, synthetic construct
  misc_feature 1..1620: note = Description of Artificial Sequence: Synthetic coding sequence
  source 1..1620: mol_type = other DNA
atggtgctgcagaagctgggcaaagccgtggagacgaaagacgaaaggtttgagcagtccgcatcgaacttttaccagcaacaggcagagggccacaaactttacaaggaccttaaaaatttcctgagcgctgtcaaagtgatgcacgagagctcgaaacgggtgtctgagactttgcaggagatttactcgtctgaatgggatgggcatgaggaacttaaggctatcgtatggaacaatgaccttctctgggaagattacgaggagaaactcgccgaccaggcggtgagaactatggaaatttatgtagcccaattctccgaaatcaaagagaggatcgctaaaagaggacgcaagctggttgattacgactctgcccgccaccacctcgaagccgtgcaaaacgcaaagaaaaaagacgaagcaaaaactgctaaagcagaagaggaatttaataaggcccagacagtgttcgaagacctgaatcaggaacttctggaggaattgccgattctctacaacagccggatcggctgctatgtgaccatctttcagaacataagcaacctcagagacgtattttaccgggagatgagcaagctcaaccacaacctgtacgaggtaatgagcaagctggaaaaacagcatagtaataaagtgttcgtcgtgaagggcctgagttcaagctctagaagatccctggtgatttcacctccagtgcgcactgctaccgtgagcagccccttaacttccccaacctccccttccacactatctcttaaaagtgagagtgaatcggtatcagcaacagaggatttggcccctgatgcagcccagggcgaggacaactcagagataaaggaactcctggaggaagaggagatcgagaaggaaggttctgaggcatctagttctgaagaggatgagccacttccggcctgcaatggacctgcccaagcccagccctctcccaccactgagagggccaagtcccaagaagaggttctcccgagttcgaccacgccttctcctggcggcgccctatcacctagtggtcagccatcctcttctgctactgaggtggtgttgaggacccggaccgcctccgaaggtagtgaacagccgaagaagcgtgcatctatccagaggacatctgcacctccttctcgtcctcctcccccacgcgccacggcctcacctcggccctcctccggaaatattccatctagcccaacagcctcgggtggaggctcgccaactagcccccgggctagtctgggcacagggactgcatcccctcggacttccctagaagtcagtcccaacccggagcctcccgagaaaccggtgcgcacccctgaggccaaagaaaatgaaaatattcacaaccaaaatccggaagagctgtgtaccagtccaaccctcatgaccagccaggtggcatctgagcctggcgaagcaaaaaagatggaagataaggagaaagataataaactcattagtgctaattcaagcgagggacaggaccagctgcaggtttccatggtccctgaaaataacaatctgaccgcccccgaaccccaggaggaagttagtactagcgaaaatcctcagctgtag

SEQ ID NO: 109969 - DNA, 762 bp, synthetic construct
  misc_feature 1..762: note = Description of Artificial Sequence: Synthetic coding sequence
  source 1..762: mol_type = other DNA
atgtcatggattcctttcaagatcgggcagccaaaaaagcagatcgtgcctaagacagtggagagggatttcgagcgggaatacggcaaattgcagcagttggaagaacagactcgacgactgcagaaagatatgaagaagagtaccgatgccgacttggccatgtctaagtccgccgtgaagattagtcttgacctcctctcaaacccactctgtgagcaagatcaagacctactgaatatggtcactgccctcgacacggcaatgaagcgaatggatgcattcaaccaggaaaaggtcaaccaaatccaaaagacagtgattgagccactcaagaagttcgggtcagtgttcccatccttgaatatggccgtgaaacggagagagcaggcactccaagactacagaagacttcaggcaaaggtcgagaagtacgaggaaaaagaaaaaaccggccctgtgctggcaaagctgcaccaagcaagagaggaactgaggccggtcagggaggacttcgaagctaagaaccgacaactactggaagagatgcctcggttttatggaagcaggctcgattacttccaaccttcatttgagtcactgatccgcgcccaggtcgtatactattcagaaatgcacaagatattcggggacttgtcacaccagctggaccagccaggacattcagacgagcagcgagagcgtgagaatgaagccaaactctcagagctgcgggccctatctattgtagctgatgactag

SEQ ID NO: 109970 - DNA, 600 bp, synthetic construct
  misc_feature 1..600: note = Description of Artificial Sequence: Synthetic coding sequence
  source 1..600: mol_type = other DNA
atgagcaagagcgcggtgaagatttcactggatctgctgagtaatccactgtgtgagcaggaccaagacctgcttaacatggttactgcactagacaccgcgatgaaaaggatggatgcttttaaccaggaaaaagtgaatcaaattcagaaaacagttatcgagcccttgaaaaagttcgggtcggtctttccctccttaaacatggccgtcaagagacgagaacaagcattacaagactaccggcgcctccaggccaaggttgagaaatacgaggagaaggagaagaccgggcctgttctggccaagctccatcaggccagggaggagctcaggcccgtcagagaagacttcgaggctaagaacagacagcttctcgaagagatgcctcgcttttacgggtcaagactggactactttcagccatctttcgagtcccttatacgagcccaagtggtgtactatagcgaaatgcataaaatcttcggcgatctgagccaccagctggatcagcctgggcattcagatgagcagagagagcgggagaatgaagccaaattgtccgagttgagggctctgagcatcgtcgcggacgactag

SEQ ID NO: 109971 - DNA, 2343 bp, synthetic construct
  misc_feature 1..2343: note = Description of Artificial Sequence: Synthetic coding sequence
  source 1..2343: mol_type = other DNA
atgacccacacaagacgtaaatcgctccccatgctttcaagcggacttacggggaggcgagaacctctacaaatggaggacagcaacatggagcagggggtggagggggtagaacctggcatgcccgagagcccaggccaccttactgggcgaagaaaaaactatcccctcagaaagagacctttggtgcccgagaagcccaaggcatgcaaggtgcttctgacgcgactagagaacgttgcaggtcccaggagcgcagacgaggctgacgaactcccccccgatctgccaaaacctccttctcctgcccctagctctgaggaccctgggctggcacagccacgcaagagacggttagcaagcctgaatgcggaggctctgaataacctccttcttgaaagggaggacacctccagtcttgcaggtactagacgaagccgggctggtgacccgcatcggagtcgggatagggatagagcaaccggcggatggtcttcaagcaagaagcggccgcggctgggagacctcggaggaggttccagggatttgtcccccgaaccagcgcccgacgaagggcctcgcagagacggcgatcccgcaccaaaacgattggcttcactaaacgctgcagcattcctgaagctctcacaggagcgtgagttgccattgaggctccctagggcccatgccgaagtagacggccggtccactgaacctccagctcccaaagctcctaggcccaaatggcctaaggtaaatggaaagaactaccctaaagcctggcagggcgcgagcagcggcgaagccgccgggccgcctggatggcaggggtgtcccgacgaaccctggccttccgccactccatgtgggccgtccgtgcagccgtcccatcagccgctttcaaaagcgctcgagagccctctcggccttcggcctcatttgccactgctcatgggtgggcaggccgctctaaagcctgaacctggtcgacccggggaagagtcccctgcgcctaagcaagagttgcaccagccaagcttccctaccccccagctgagcccattaccgatgcccggtaatccagctgactacaatgggctgtgtgtgggacccgagctcaccgctctaggctcattttacctgtactgcggccaggaggggctgcagtgtggggggtacagcccatgccctatgctgccagaaggtaaactgagcccagttgctgcacctcatgaggagggactgttactggcacccagctctgtgcctagcgggacgccctttcagcatcctccttggggctctagccgttactgctcaagcgaagatactggcgtgaacggttacagcatctgcggcgttctgccgctgtctgttacgcacgccggcacgacatgcggcggctgcccctacaaaatgccgtttgcagccgagggctgcagaagtctgggacaactcgaattccctctccctgaagcagggcatccagcctctcctgctcacccactccttggatgcccagtgcctagtgtgccacccgcagcagaacctgttccgcacctccagacgcccacatctgaaccacagacagtggcccgggcatgtcctcaatcagcaaagcctccaagcggaagtaagagcgggttgcgcacaggctccagctgtagacatactgccagatctaaggcagccagaaggccatcacacccaaagcagcccagggtccagcgcccgaggcccaggcgtagaagacggcgacgaacaaatggctgggtgccggtgggggccgcttgcgaaaaggccgtgtatgtgttggatgagccagagcccgccatcagaaagagttaccaggcagtagagagacatggggagacaatcagagtaagagatacagtactcctcaaatccggcccccggaagacctctaccccttacgtggcgaaaatctctgctctgtgggagaatcccgaatctggtgagctcatgatgagccttctgtggtactaccgtcccgagcatcttcagggaggacgttcgcccagcatgcacgagcccctgcagaacgaagttttcgccagtcgacatcaggaccagaatagtgtcgcgtgtattgaggaaaagtgctacgtgctgacttttgccgagtactgtcggttttgtgctatggcaaaaagaagaggggaagggttacccagtagaaagacagctctcgtccccccctccgcagattattccaccccccctcacaggactgtcccagaggataccgatcctgagcttgtcttcttgtgtagacacgtgtatgactttaggcatggcagaatcctgaagaacccgcagtag

SEQ ID NO: 109972 - DNA, 2340 bp, synthetic construct
  misc_feature 1..2340: note = Description of Artificial Sequence: Synthetic coding sequence
  source 1..2340: mol_type = other DNA
atgacccacactagaagaaaatctttgccaatgctgagctccggactcacgggccgaagagagcctctgcaaatggaggactccaacatggaacagggtgtggaaggtgtagagccaggtatgcccgagtcccccgggcatctgactggccgcagaaaaaattatcccctacgtaagcggcccctggtcccagagaagccaaaagcgtgtaaagtactgctgacaaggcttgagaatgtcgccgggcctcgcagtgccgatgaggctgacgagttgcctcccgatcttcccaaaccaccctcccctgccccctcttccgaggatcctggcttggcccagccccgcaagaggcgcttggccagtttgaacgcagaggcgctgaacaacctgctactggagagggaagacactagttctttggctggcacacgccgaagtcgagccggggacccacatagaagcagggaccgggatcgcgctacaggcgggtggagctcgtccaaaaagcgtcctcgcctgggcgacttagggggaggtagccgggatctgtccccagagccagcccctgacgaggggcctagacgcgacggcgacccagcaccgaaacgactggcctcgctcaacgccgctgcctttctgaagctgtcacaggaacgtgaactcccactgcggctgccacgggctcacgcagaagtggatgggcgcagcaccgagccacctgccccgaaggctccccgtcccaagtggcccaaggtgaacggtaagaactaccccaaggcctggcagggcgcctcttctggagaggccgcaggccctcccggttggcagggttgccccgatgaaccctggccctcagccacgccttgcggcccatctgtacagccttcccatcaaccgctatccaaagccctcgagtcccctctgggactccgaccgcaccttccattgttaatgggagggcaggcagcactcaagcctgagcctgggcgaccaggagaggagagtccagcccccaaacaagaacttcaccagcctagctttccaaccccacagctttccccactgccaatgcctgggaatcccgcggactataacggactttgtgtaggacctgagctgaccgctctggggagtttctatctctactgcggtcaagagggcctgcaatgtggcggttactctccttgtcccatgttaccagaaggcaaactgtcccctgtcgccgcgccacacgaggagggcctgctgcttgctccaagttccgtgccctccgggactccattccaacacccgccgtggggctcctccagatattgttccagtgaagacactggcgtaaatggttatagcatctgtggcgtcttgccactctctgtgacacatgcgggcacaacttgtggtggatgcccatacaagatgcccttcgcagccggttgcagaagccttggacagcttgagtttccactgcccgaagccggtcacccggctagccctgcgcatccattattgggttgccctgttccaagcgtgcctccagcagcagagcccgtcccccatttgcagacgccaacctctgaaccgcagactgtggctcgagcctgtccccagtccgccaaacctccatcaggtagcaagagcggattgaggacgggatcttcttgtcgccataccgcacggagtaaggctgcccggaggcctagtcacccaaaacaaccccgagtccagagaccccgccctcgccgcagaagaaggaggcgcacaaacggctgggtgccagtcggagccgcttgcgagaaagctgtgtacgtcctggatgagcccgaacctgctattcgcaaaagttaccaggcggtggaaaggcatggagagaccattagggtgagggataccgttctgttaaagtccggtccaaggaagacctcaaccccctacgtagctaaaatcagtgccctgtgggagaatcccgaatctggcgaactgatgatgagcctgctgtggtactaccggccagagcatttgcaggggggacgatctccatccatgcacgagcctttacagaacgaagtgtttgcgagccgccaccaggaccagaactctgtggcttgtattgaagagaaatgctacgtgctgacctttgcggagtattgtagattttgcgccatggccaaacggcggggggaggggctgcctagccgaaagacggcgctggtacccccctccgcggactacagcactccaccacaccggactgtgcccgaagatacagatccggaacttgtgtttctgtgcagacatgtttatgatttccgccacggaaggatcctaaagaaccctcagtag

SEQ ID NO: 109973 - DNA, 4575 bp, synthetic construct
  misc_feature 1..4575: note = Description of Artificial Sequence: Synthetic coding sequence
  source 1..4575: mol_type = other DNA
atgccactccttcacagaaaaccttttgtgcgtcagaaaccacccgctgacttgcggcctgacgaggaggtgttctattgtaaggtgactaatgaaatctttcgccactacgatgacttctttgagcgcacaattctatgcaattcgctggtttggtcatgcgctgtgacaggcagacccggacttacataccaggaggccctggaaagtgagaagaaagcgcggcagaatcttcagtcgttcccagagcctctaattatccccgttttgtatttgaccagcctcacgcaccgctcaagactacatgagatttgcgatgatatttttgcatacgtgaaggatagatactttgtggaagagaccgttgaggtcatccgtaacaatggtgctcgcctccagtgccgtatcctggaggtgctgcccccttcacaccagaacggttttgccaacggtcacgtaaactccgtagacggagagaccattatcatcagcgacagcgacgacagcgaaacacagtcctgcagcttccagaacggcaagaagaaggacgccattgaccctcttttatttaaatacaaggtccaaccaacaaagaaagaactgcacgaatctgctatcgtgaaggctacccagatcagtaggcgcaaacacctgttcagtcgcgataaactcaaactgtttctgaaacagcattgtgaaccacaggacggtgtgataaagattaaagcaagcagcctgagtacctataaaatagctgagcaggattttagctactttttccctgatgatcccccgacattcattttctcccccgcaaacaggcggagggggagaccccctaagaggattcatatcagccaggaggacaatgtcgcaaacaagcagacattggcaagttatcggtctaaggctaccaaagagcgagacaagctgttgaagcaggaggaaatgaagagtttggcttttgagaaggcgaagctgaagcgcgagaaagccgatgccttggaagccaagaagaaagagaaagaagacaaggaaaagaagagggaagagctcaagaaaattgtagaggaagaaagactgaagaaaaaggaggagaaggagcggttaaaagtggagcgggaaaaagaaagggagaagctgcgtgaggagaaaaggaaatacgttgaatatcttaaacaatggtccaagcctcgggaggatatggagtgcgacgacctaaaagagctgcctgaaccaaccccagttaaaacccgccttccaccagagatctttggcgatgccctgatggtcctcgaattcctgaatgcttttggggagttgttcgaccttcaagatgagttcccagacggcgtgaccctggaggtcttggaggaggcactggttggtaatgatagtgagggacccttatgcgagctcttgttcttctttctgacagcaatatttcaggctatagcagaggaagaagaggaagtcgcaaaggaacagctgacggacgcagacacaaagggctgttctctcaaaagcctggatctcgactcatgtacgttgagtgagatcctgaggctgcatatccttgcatcgggggcagatgtgacaagcgccaatgcgaaatatcgctaccaaaagcggggtggatttgatgcaaccgatgacgcctgtatggagcttcgcttgtctaacccgtctttggtgaaaaagttgagctctactagcgtctacgacctgaccccaggagagaagatgaaaatcctccacgcactctgtgggaagcttctgactctcgtctcaacacgtgactttattgaagactatgttgatattctgcggcaggccaagcaagaatttagagagcttaaggcagaacagcataggaaggaaagagaggaggcagctgctcgcatcaggaagcgaaaagaggaaaagctgaaggaacaagaacagaagatgaaagagaaacaagagaagctaaaagaagatgagcagcgaaacagtactgccgacattagcattggggaggaggagcgggaggatttcgacaccagcatagaatcaaaagatactgagcagaaagagcttgatcaagacatggtcactgaggatgaagatgatccaggtagtcacaagcggggtcggaggggcaagcgaggtcagaacggctttaaggagttcactcggcaggagcagatcaattgcgttacaagagagcccctgaccgcagatgaagaagaggccctaaagcaggagcatcaacgaaaggagaaagagctgttagaaaaaatccagagtgctatagcttgtaccaacatctttcctctgggacgcgatcggatgtacaggagatattggatatttccctcgatcccaggcctgtttattgaggaggactatagcgggctgaccgaagacatgctgttaccgcggccttccagcttccagaacaacgtgcagtcgcaggatccccaagtgtcaacaaaaaccggcgagccattgatgtccgaatcgacatccaatatcgatcaggggccgcgggatcacagcgtccagttgccgaaacccgttcacaaaccgaaccgatggtgcttctacagctcctgcgagcagctcgatcagctgattgaggcgttaaacagtcggggccatcgtgagagtgcactcaaggaaacgttgctgcaagaaaaatcgcggatctgcgcccagctggccaggtttagtgaggagaaattccacttctccgacaagcctcaacctgattccaagcctacctattcccgaggcagatctagtaacgcctacgatccatcacagatgtgcgccgagaaacaacttgagttacggctcagagacttcctgctagacatcgaggaccgcatttaccagggaacgttaggcgccataaaagtgactgatcggcatatttggcggtcagccttggagtcaggccgttacgagttacttagtgaagaaaataaggagaacgggattatcaaaaccgtgaatgaggatgtggaggagatggagatcgatgaacagaccaaagttattgttaaagatcgactgttggggataaagactgaaacacctagcacagtatctactaatgcatccacccctcagagcgtgtcttccgttgttcattacctggccatggccctgttccagatcgagcagggcatcgagcgtagatttctcaaggccccactcgacgccagcgacagcggacgctcttacaaaacggttctcgaccgttggagggagtctctgctgagcagtgccagtctctcccaggtgtttctgcacctatctaccttagacaggtctgtcatttggagcaagagcatcttaaatgcgagatgtaaaatttgtcgcaaaaaaggggacgcagaaaacatggtgctttgcgatggatgcgatcggggacatcatacctattgtgtccgccctaaactgaaaacagtgccagagggggattggttttgtccagaatgtcgtcccaaacagcgaagtcgtagactctcctctcgccagcgcccatctctcgaatccgacgaggatgtggaggattcgatgggtggggaggatgacgaggtggatggggatgaagaagagggccaaagcgaagaggaagaatatgaagtggagcaggacgaggacgattctcaagaagaggaggaggtgtccctgcccaaaaggggacgaccccaggtgcgacttcctgtgaaaacccgagggaagttatccagctccttcagttcacgaggacagcagcaggaacctggccgttacccaagtagaagccagcaatctactccaaagaccactgtcagtagcaaaacaggccgtagtctgaggaaaataaactctgccccaccaacagagaccaagagccttcgcatcgcctcccgatccacaagacacagccacggtccactgcaggctgacgtctttgtagagttgttgtcaccacgaagaaagcggcgcggaagaaagagcgcaaacaatactcccgagaactcaccaaatttccccaacttccgcgtgatcgctaccaagagtagtgaacaatccagatctgttaacatcgcgtccaaactgtctctccaggaaagcgagagtaaaagaaggtgtcgaaaaagacagtcccctgagccctctcctgtgacccttggtcgtcgcagttcaggacgccaggggggggtgcacgagctgtcagctttcgagcagctggtagtcgaattagtaaggcatgatgacagttggcctttcctgaagcttgtgagcaagatccaggtacctgactattatgatatcatcaaaaaacccatagccttaaacattatccgagaaaaggttaataagtgtgagtacaaactcgcctctgagtttatagacgacatagagctgatgtttagcaactgctttgaatacaatccgagaaatacaagcgaggcgaaggctggaacccggttgcaggcattttttcacattcaagctcagaaattggggttgcacgtcactccatctaatgtcgaccaagtttcaacgccccccgcagccaaaaagagccgcatttag

SEQ ID NO: 109974 - DNA, 4671 bp, synthetic construct
  misc_feature 1..4671: note = Description of Artificial Sequence: Synthetic coding sequence
  source 1..4671: mol_type = other DNA
atgccactgttgcaccgaaagccatttgtccggcagaaaccccccgcagatctgcgacccgatgaagaagttttttattgcaaggtcacaaacgagatattcaggcactatgacgactttttcgagcggactatcctgtgtaactcactagtctggtcctgcgcagtcacaggccgacccgggctgacttaccaagaggcactagagagcgagaaaaaagcccgccagaacctgcagtcattccccgaacccttgattatccccgtcctatacctgacttcgcttacacaccggtcccggctccatgagatttgtgacgatatttttgcatatgtgaaggatagatacttcgtcgaagagaccgtggaagtcatccgaaacaacggagcccgcctccagtgtcgcatcctggaagtcctgccaccctcacaccaaaatggcttcgccaacggacacgtgaatagcgtcgatggagagactatcatcatttcagattccgacgactccgaaactcagtcttgtagttttcagaacggcaaaaagaaagatgccattgatcctctgctttttaagtataaggtacagccgaccaagaaggagctccacgagtctgccatcgtgaaggcaacccagattagcagaaggaagcacctgttctcccgggataagctgaaactgtttctgaagcagcattgtgagcctcaggacggcgtaatcaagataaaagcgagctcattgagcacctacaaaattgccgagcaagatttctcgtatttttttcccgacgatccccccacattcattttttccccggcgaatcgcaggcgcggcagaccacctaaacgaatacacatttcacaggaagacaacgttgctaacaagcagaccctcgcttcttacagatcaaaggcaaccaaggagagggataaactcctcaaacaagaggagatgaaatccctggcattcgagaaggcaaagctgaaacgcgagaaggcagatgccttagaggcaaaaaagaaagagaaggaagataaagagaaaaaacgtgaggaattaaagaagatcgtcgaagaggaaagactgaaaaagaaggaggaaaaggaacgactaaaggtggaaagagagaaagaacgcgaaaaactgagagaggagaagaggaagtatgtggaatacctcaagcagtggagtaaaccacgagaggatatggagtgtgacgatttaaaagagttgcccgaacccaccccggtgaagacgaggcttcccccggagatctttggcgacgccctcatggtgctggaatttctgaatgccttcggagagctgttcgatctgcaggacgagttccctgatggggtgacccttgaagtgctcgaagaggcccttgtgggcaatgacagcgagggacctttgtgtgagctcctgttcttctttctgactgccatttttcaggcaatcgctgaggaggaggaagaagttgcaaaagagcagctgacagatgccgacacgaaagacttgactgaagctctggacgaggatgccgacccaacgaagtccgctctcagtgcggtagcatcactggccgctgcatggccccaactccatcaaggatgctctttgaagtcactcgacctggactcatgcaccctcagcgagatactgcggctgcatatccttgcctctggtgcggacgtgacctcggcaaatgcaaagtatagatatcaaaaaagaggggggtttgacgccacagacgatgcttgtatggagctgcggctgtcgaacccatccctcgtgaaaaagttgtccagtacctcggtttatgacttgacaccaggcgaaaagatgaagatcttgcacgcactgtgtggaaagttgctcaccctggtgagtacacgcgattttattgaggactacgtagatatcctgcgacaggccaaacaggaatttcgggagctgaaagcggaacaacacaggaaggaaagggaagaggccgcagctaggatcaggaaacgcaaggaggagaagctgaaagagcaagagcagaagatgaaggagaagcaggaaaagctgaaagaagatgaacagaggaactctactgccgatattagcatcggcgaggaggagagagaggatttcgataccagcatagagtctaaggacactgagcagaaagaattggatcaagacatggtgaccgaggacgaggacgatccgggatcccacaaaagggggcggaggggcaagcggggccagaacggttttaaggaattcactaggcaggagcagatcaactgcgtcactagagagccacttaccgctgacgaagaagaagcactcaagcaagaacaccagaggaaagagaaagagctcttagaaaaaatccagagcgccatcgcttgcacaaacatttttcctttgggtagggatagaatgtatagacgttactggatctttccttccatccctggcctgtttatcgaagaagactattccggcttgaccgaagatatgttgctgccacgcccaagcagttttcagaacaatgtgcaatctcaggatccacaggtttcaacaaaaactggtgaaccacttatgtcggaaagcaccagtaatatagatcaggggccaagggatcatagcgtgcagctgccgaagccagtgcacaagcccaatagatggtgcttttatagcagctgtgaacagcttgaccaactcatcgaggctttgaattcccgaggccaccgagaatctgcgttgaaagaaaccctcctccaggaaaaaagccggatctgcgcacagctcgctcgattttcagaggaaaagtttcatttttcagataaaccacagcctgatagcaagccaacctactcacgcgggcggtcgagcaatgcttacgatcccagtcagatgtgtgccgaaaagcagctcgagttgcggctccgtgatttcctgctggacatcgaggacaggatctaccaaggcacccttggtgccatcaaagtgaccgatcggcacatatggcgcagtgctttagaatcaggtaggtacgagctactgagcgaggagaacaaggaaaacgggatcatcaagaccgtgaacgaagacgtggaagagatggaaatagacgaacagaccaaggtcattgtgaaagatcggctgctgggaatcaaaacggagactccaagcacagtgagcaccaacgcctcaacccctcaatccgtgagctcagtggtgcattatctggccatggccctcttccaaattgagcaggggatagaacgcagatttctgaaagcacccttggatgcttctgatagcggacggtcctacaagacagtcttggaccggtggcgagagtcactgttgtcatcagccagcctcagccaagtgttcctgcacctttccaccctggatcggagcgttatctggtctaagagcatcctgaacgcccgttgcaagatttgccgcaaaaagggcgatgcggagaacatggtgttatgcgatggctgtgacaggggccaccacacatactgcgtgcgaccaaagctgaagaccgttccagaaggggactggttttgtcctgagtgtcgacccaagcagaggagccgcagactcagctccagacagaggccttctctggagagcgatgaagatgttgaagattctatgggcggagaggatgacgaagttgacggcgatgaggaggagggacaaagcgaagaagaagagtacgaggtagagcaggatgaagatgattctcaggaggaggaggaggtttcactgccaaagcgggggcgacctcaagtgaggcttcctgtgaagacccggggaaagctttcttccagcttcagtagcaggggacagcagcaggaaccaggacgttatccatctcgcagtcagcaaagtaccccaaaaaccaccgtgtccagcaaaacaggtagatctctgcgcaaaatcaacagtgccccgccaacggaaactaagagcctgcggatagcatctaggagcacacgccactcacacggccctttgcaggcagatgtgtttgttgaactgctctctccgaggcgcaagcgccgcggaaggaaaagtgcaaataatacccccgagaatagccctaacttccccaatttcagagtcatagcgaccaaatcatctgagcaatccagaagtgtgaacatcgcctccaagctgagtctgcaggagagcgaaagcaagagacgttgtcgcaagcgacagagcccagagccctctcccgtgacactgggacgacgcagttctggccgtcagggcggcgttcacgagttgtcagcattcgagcaactggttgtggagctggtgagacatgacgactcttggccatttctcaaactcgtgtcgaagattcaggtgcccgactactatgatattatcaagaaaccgatagcattgaatatcattcgggagaaggtgaacaaatgcgaatacaaattggcgtccgaatttatcgatgatattgagctgatgttttccaattgcttcgagtacaatccaaggaacacttccgaagcgaaggccggaactaggcttcaagccttcttccacattcaggcccagaagctaggcctgcatgtcactccatccaatgtggaccaagtgagcacaccccccgccgccaagaaaagtagaatatag

SEQ ID NO: 109975 - DNA, 4671 bp, synthetic construct
  misc_feature 1..4671: note = Description of Artificial Sequence: Synthetic coding sequence
  source 1..4671: mol_type = other DNA
atgcctctattgcataggaaaccctttgtgcggcagaaaccccctgcagatttgcgtcctgacgaggaggtattctactgtaaagtgacaaacgagattttccgtcattacgatgattttttcgagaggaccatcctgtgcaatagcctcgtctggtcctgcgccgtgaccggtaggccaggcctcacgtaccaggaggcattggagagcgagaaaaaggcaagacagaacttgcagtctttccctgaacccctcatcatccccgtgctatatctgacgtctctgacccatcgctcgcgcctccacgagatctgcgacgatatcttcgcctacgtgaaagaccggtatttcgtggaggagacagttgaggtcattcggaataacggcgctcgcctccagtgcaggatcctcgaagtgctgccaccctctcaccagaatggcttcgcgaacggtcacgttaactctgtcgacggggaaactattatcatctcagacagcgacgatagtgagacccaaagctgctccttccagaatgggaagaaaaaggacgccattgaccctcttctcttcaaatacaaggtgcagccaacaaaaaaagagctgcacgaatccgcgatcgtcaaagccacccaaatcagtagaagaaagcacctgttctcccgggataaattgaaactgttcctcaagcagcattgcgagcctcaggatggagtaataaagattaaggcatcgtcactctctacctacaaaattgccgaacaggacttcagttactttttccccgacgacccaccaacttttatcttttccccagcgaacagacgtcggggcagaccccccaaacgcattcatattagtcaggaggacaatgtggccaataagcaaaccctagcgtcctataggagtaaggccacaaaggaaagagacaagcttcttaaacaagaagagatgaagtccctagcttttgagaaggcaaagctgaagagagagaaagccgatgcattggaggctaagaagaaagagaaagaggacaaagagaagaagagggaagagctaaaaaagattgtagaggaagaaagactgaaaaaaaaagaggaaaaggagcgcctcaaggtggaacgagaaaaagagcgtgagaagcttagggaggagaagaggaaatacgtggaatatctaaagcagtggagcaagccacgtgaggacatggaatgcgatgatcttaaggagttgcctgagcccaccccggttaagaccaggttgcccccggagatttttggtgacgcgcttatggtccttgaattcttgaatgcctttggcgagctgtttgatctgcaggacgaatttcctgatggggtgacactcgaggtccttgaggaagccctagtggggaacgactctgaaggccccttgtgtgagctcctgttcttcttcctgactgccatcttccaggctatcgccgaggaggaggaggaagtggctaaagagcagctgaccgatgcggataccaaggacttaacggaggctctggacgaggacgcagaccctaccaagtcggccctgtctgcagtggctagcctagccgccgcttggcctcaactgcatcagggatgttcacttaagagtctggacctcgatagctgcacactgtctgagattctccggctgcatatcctcgcatcaggcgccgacgtgacaagtgccaacgcaaaatacaggtaccaaaaaagaggagggttcgacgcaaccgacgatgcttgtatggaactccgcctttctaacccctcactggtgaaaaaactttcctcaaccagcgtttatgatttgaccccgggcgaaaagatgaaaatcctgcatgccctttgcggcaagcttcttacactcgttagcacaagggactttatcgaagattatgtagacattctgcgccaagcgaagcaggagtttcgcgagctgaaggccgagcaacaccgcaaagaaagggaggaggctgctgctcgcattcggaagcggaaggaagaaaaactgaaagagcaggagcaaaaaatgaaggagaagcaggagaaactgaaagaagacgagcagaggaacagcactgctgacatctctataggagaggaagagagggaggatttcgacacttccatcgagagtaaggatactgaacagaaggagctggaccaggatatggtaaccgaggatgaagatgatcctggatcccacaaaaggggcaggaggggaaagagggggcaaaatgggttcaaagagttcacccggcaggaacagatcaactgtgtcaccagggagcctctgaccgccgatgaagaagaggcactaaaacaggagcaccaacgcaaagaaaaggagttactggaaaagatccagagtgccatcgcttgcaccaatatttttcctttaggccgagacaggatgtatcgacgttattggatattccctagcatccccgggctttttattgaagaggactattcaggtctcactgaagacatgctgcttccccggccatcttcgtttcagaataacgtgcaaagccaggacccccaggtgtcaaccaaaactggagaaccgctgatgagcgaaagtacttccaatatcgaccaaggccctcgcgaccactcagtgcagcttccaaagcccgtccacaagcccaaccgttggtgcttctacagcagttgcgagcagttagatcagttgatcgaggccctgaattcccgtggacaccgggagtctgccctcaaagagacattgctgcaggagaaatcgaggatttgtgcccagctggctagatttagcgaggagaagttccactttagtgacaaacctcaaccggattccaagcctacctacagcagaggcaggtcaagcaacgcatatgatccaagccagatgtgtgctgaaaagcagttggagctgcggttgcgggatttcctgctcgacattgaagatagaatttaccagggaacacttggagctatcaaagtcactgatcgccacatctggcgttcagctctagagagcgggagatacgagttgcttagcgaggagaataaagaaaatggcatcataaagactgttaacgaggacgtggaggaaatggaaatagacgaacagactaaagtcatcgtgaaggatcgcctgctgggtataaagaccgagacaccctcaacagtgagcaccaacgccagcactcctcagtcggtctcctcagtcgtgcattatctggctatggccctatttcaaatcgagcagggcatcgagagacggttcttaaaagcacccctagatgcttccgactcggggcgatcctacaagaccgtgctggatcggtggcgagaatcactgctgtccagtgccagtctgtcacaggtattcctgcacctgagtactctcgaccggtctgtaatttggagcaaaagcattctcaatgccagatgtaagatctgtagaaagaagggtgacgctgaaaacatggtcctctgtgacggttgtgatcgggggcatcatacttattgcgtgcgtcccaagctcaagacagttcccgagggcgactggttctgccccgaatgcagaccaaaacagaggagccgcagactgagctctcgacaaaggccgtccctggagagtgacgaggatgtcgaggattctatgggaggcgaggacgatgaagtggatggggatgaagaggagggccaatccgaggaggaggagtacgaagtggagcaggacgaagacgacagccaggaagaggaggaagtctctcttcctaaaagaggaaggcctcaagtccgactgccggttaaaacccggggcaaactgtctagctccttttcctcaaggggccagcaacaagagccaggccgatatcctagcagatcccagcagtcgacccccaaaaccacagtcagctctaaaactggtcgcagcctgcgcaaaatcaacagcgcacctccaaccgaaaccaagtcactgcgaatcgctagtcgaagtacccgccatagtcacggtccgctgcaggcggatgtgttcgtagagctgctgagcccaagacggaagcgcagggggagaaaatccgccaataatacccccgaaaattctcccaatttccccaacttcagggttattgccacgaaatcttccgaacagtcccggtcggttaacatcgcctcaaagctttcccttcaggagagcgagagcaagcggcggtgtcggaagcgccagagccccgagccttcacccgttacattgggtcgccgttcctctggaagacaaggaggcgtgcatgaactctccgcttttgagcaactcgtggtggagctggtccgtcacgacgactcatggcctttcctgaagctggtgtccaagatccaggtgcccgattattatgatattattaagaaaccaatagccctgaacatcattagggagaaagtgaataaatgtgagtacaaactggctagtgagtttattgatgacatcgagctcatgttctctaactgtttcgaatataacccccgaaacacaagcgaagccaaagctggtacacggcttcaggccttttttcatatacaagcccagaagctcggccttcacgtaacccctagtaacgttgatcaggtttcaacgccccccgctgcaaaaaagtccagaatctag

SEQ ID NO: 109976 - DNA, 3702 bp, synthetic construct
  misc_feature 1..3702: note = Description of Artificial Sequence: Synthetic coding sequence
  source 1..3702: mol_type = other DNA
atgaaaagcttggcatttgaaaaagcaaagcttaagcgcgagaaagctgacgctctcgaggcaaaaaagaaagagaaagaggacaaagaaaagaaaagagaagagctgaagaagatagttgaagaagaaagactcaaaaagaaagaagagaaagaaaggcttaaggttgagagggaaaaagaacgtgagaagctgcgagaagagaaacgtaagtacgttgagtacctcaaacagtggagcaagcccagagaggatatggaatgtgacgatctaaaggagctgcccgaacccacaccagtgaagaccaggctgccacctgagattttcggcgatgctctaatggtgctggaatttctgaacgcctttggtgagctctttgatctgcaggacgagtttcctgatggagtgacccttgaggttctggaggaggccctggtgggcaacgattctgaaggccccctgtgcgagctcctgtttttctttctgaccgcgatattccaagccatagcagaagaggaagaggaggtggctaaggagcaactcactgatgcagataccaaaggatgttccctgaagagcctggatctcgattcgtgtacgttatcagagatacttagactccacatcctggcgtccggtgctgatgtcacgagtgctaacgctaaatatagataccagaaacgcggcggcttcgacgcaaccgatgacgcctgtatggagctaaggctgagtaacccaagtttggtgaaaaagctgagttctacatctgtttacgacctgacccccggagaaaaaatgaagattctccacgctctatgtgggaaactgctcaccctggtgtcaactcgtgactttatcgaagattacgtcgacattcttaggcaggcgaaacaggagttcagggagctgaaagcggagcagcatcgtaaggaacgggaggaggccgccgccaggatccggaaacgcaaggaggaaaagctgaaggagcaagaacaaaagatgaaagagaagcaggagaaattgaaggaggacgagcagaggaatagtaccgctgatatcagtatcggtgaggaagaacgtgaagatttcgacaccagtattgagtccaaggacactgaacaaaaagagcttgaccaggatatggtaaccgaagatgaagacgatcccggtagccataaacgcggccgtagaggcaaacgcggtcaaaatgggtttaaagagttcaccagacaagaacaaataaattgtgttacaagagagccacttaccgctgacgaggaggaggccctgaagcaggaacaccagagaaaggaaaaggagcttctagagaagattcagtctgctatcgcctgtacgaatatatttcccctcggtagggacaggatgtaccgacgttactggatcttcccttcaatcccggggctgttcatcgaagaggattactcaggactgaccgaggatatgcttctaccgcgccccagcagctttcagaataacgttcaatcccaggatcctcaggtgagcacaaagaccggggagcctctgatgtctgaatccaccagcaacattgatcagggcccgagagaccacagtgtccagctgccaaagcctgttcacaagccaaatcggtggtgcttttatagctcctgcgagcagctggaccagctgattgaggctcttaactccaggggccaccgggagtcagccctaaaagagactctgctccaggagaaatctcgcatttgcgctcaactagctaggttctcagaggaaaagttccacttctccgataagcctcagcctgatagtaaacctacctatagccgaggaaggtcgagtaacgcctacgatccttctcagatgtgcgctgagaagcaactcgaactgcggctgagggacttcctgctcgacattgaagataggatctaccagggcacactgggcgccatcaaagttaccgacaggcatatctggcggagcgccctcgaatccggcaggtacgaactactaagtgaagaaaacaaggaaaatggtatcatcaagacagtgaacgaagatgtcgaggaaatggaaatagacgaacaaacaaaggtgatcgtcaaagacaggttgctgggcattaagactgaaacaccatccacagttagcaccaatgcctccaccccccagtcagtgagctcagtcgttcattatcttgctatggccttgtttcagattgagcagggaatagagaggagattcctcaaagcccccctagacgccagtgatagcgggagaagctataagaccgtgttggataggtggcgtgaaagccttttaagctctgctagcttgagccaggtttttctacacctgtccacactcgaccgttcagttatatggagtaagtcaattcttaacgctcgctgtaaaatctgcaggaagaagggagatgctgaaaacatggtcctgtgcgacgggtgtgacagaggccatcatacttactgcgtgaggcctaaattgaagacagtgcctgaaggtgattggttttgcccggagtgccgtcctaaacagcggagccggcggctgagttcccgacagaggccttctcttgagtccgacgaggatgtggaggattctatggggggtgaagacgacgaagtagacggcgacgaggaagagggtcaatcagaggaggaggagtatgaggtggagcaggacgaagatgactcccaggaggaagaagaagtgagcctgcctaaacgcggccgtccacaggtgaggttgcctgtgaagaccagaggcaagttaagttcctccttttcatccagaggccagcagcaggagcccggccgctatccttcccgctctcagcagtctactccaaagacaacagtatcttcgaaaacaggacgctcactgcgtaagatcaatagcgctcctccaactgagaccaagtcgttgagaatcgcgagccgaagcacacgccattcccacggacccttgcaggctgatgttttcgtggaactgctgagccctcggcgtaaaaggcggggccgcaagagcgcgaataacacaccagaaaacagcccaaacttcccaaactttcgggttatcgccactaaatcttcagagcaaagtaggtctgtgaatatcgcttcaaagctcagcctccaggaatccgagagcaagcggcggtgcagaaagcgacagagccctgaaccgtcacccgtcacgttgggaaggaggtcctctggcaggcaagggggtgtccatgaactctccgcgtttgagcagctcgtcgtggaactagttaggcacgacgatagctggcctttcctgaagctggtcagcaagattcaagttcccgattactatgatatcataaagaaaccaatcgctcttaacatcatccgggagaaggttaataagtgcgaatataaacttgcgtcagagttcatagatgacatcgagctcatgttctccaactgcttcgagtataacccgcgaaacacgtcagaggctaaggccggcacccggctgcaggccttttttattttccggttaaagtctctggactccacatcacaccctgttatgtggactaaattagctcatcatagattgcgcaaatcgcacgaatccgattttgtgctgttgaaggacatctttgaggagaagcagatcgtccacgagaatgggacgttgaaccacgctgtctag

SEQ ID NO: 109977 - DNA, 4452 bp, synthetic construct
  misc_feature 1..4452: note = Description of Artificial Sequence: Synthetic coding sequence
  source 1..4452: mol_type = other DNA
atggctccactgcttgggagaaaaccgttcccccttgtgaaacccctcccaggcgaggaaccactctttaccatccctcacacccaggaagcatttagaaccagagaggaatacgaagcacggctcgaacgttacagtgagagaatctggacctgtaaatcaaccgggtcatcccagcttacgcataaagaagcatgggaggaagaacaggaggtggctgagctcctgaaggaggaatttccagcttggtatgagaagctcgttctcgagatggtgcatcataacacagctagccttgagaaacttgtggataccgcgtggctggaaatcatgacgaagtatgctgtgggagaggaatgcgactttgaagtgggcaaagaaaaaatgttgaaggtaaagattgtgaagatccatcccctggagaaggtggatgaagaggccaccgaaaaaaaatccgatggggcttgtgattccccaagcagtgacaaggagaattcatctcagatagctcaggaccaccaaaagaaagaaaccgtcgttaaggaggacgagggacggcgtgaaagtatcaacgatcgggctaggaggagcccacgaaagctgccgacctccctgaagaagggtgagcgcaagtgggctcctccaaaatttctccctcataagtacgacgtgaaactgcagaatgaggataaaattatttctaatgtgcccgccgattctcttattcggaccgagcgcccccctaacaaagagatcgtacggtattttataagacacaacgccctcagggcaggcactggcgaaaacgccccttgggtggtcgaagacgagctagtaaagaaatattccctgccttccaaattttccgatttcctcctcgatccttataaatatatgaccctgaatccctccactaagagaaaaaatactggttccccggatagaaaaccatccaagaagagtaagacagataattcttccctttcatctcccctgaatcccaaactgtggtgccacgtccacctaaagaagtccctctctggctcgccacttaaggtgaagaactcaaaaaactccaagagtccagaggagcacctagaggaaatgatgaaaatgatgtcgcctaataaactgcacacgaacttccatatccctaagaagggacctccagcgaaaaagccaggtaaacactcagacaagcctttaaaagccaaagggaggtccaagggaatcctcaacgggcagaaatccaccggaaactccaagagtcctaaaaaaggcctaaagacacctaaaaccaagatgaaacaaatgacactgttagatatggcgaaggggacacagaagatgaccagagctcctaggaactcaggcggaacccctaggactagcagcaagccccataaacacctgcctccagcagccctccatctgatcgcgtattataaggagaacaaagaccgcgaagacaaacgttctgctttgtcttgcgtgatcagcaagaccgcgagactcctgtcaagtgaggatagggctcgattgcctgaagaactcaggtcccttgtgcaaaaacgctatgaactgctcgaacataagaagcggtgggccagcatgtccgaggaacagagaaaagagtacctgaagaagaaacgcgaggagctcaagaagaaattaaaagagaaagcaaaagaacggcgtgaaaaagagatgctagaacgactcgaaaagcagaaaaggtacgaggaccaagagctgacgggcaagaatctgcctgcattcagactcgttgatacccctgagggccttccaaacaccctgtttggggatgtggctatggtggtggagttcttgagttgctactctgggctactgctaccagatgcccaatacccaatcaccgctgtgagtctgatggaggccctgtcggccgacaagggagggttcctgtacctgaacagagtactcgttatcctactccagaccctactgcaagacgagatcgccgaggattatggcgaattaggaatgaagctcagcgaaatccccttgacgttgcactccgtgtctgaattggtaagactctgcctccgccgtagcgatgtccaggaggagtcagagggaagtgacacagatgacaacaaggatagtgcggccttcgaggataatgaggttcaggatgaatttcttgagaaactggaaacttcggaattcttcgaactaacctctgaggaaaaactccagatcctcaccgccttgtgtcacagaattctcatgacttattctgttcaggatcatatggaaaccaggcagcaaatgtctgccgagttatggaaagaacgcttggcagtattgaaagaagaaaatgacaagaaaagggctgagaaacagaagagaaaggaaatggaagcaaaaaataaggaaaacggtaaggtagagaatggcctcggcaaaacagatcgcaaaaaagaaatagttaagttcgaacctcaggtggatactgaggccgaagacatgatcagcgcagtgaaatctcgtaggctgcttgctattcaggctaaaaaagagcgggaaatccaggagcgagagatgaaagtaaaactagaacgccaggccgaggaagaacggatcagaaaacacaaagccgcagccgagaaagcatttcaggagggaatcgccaaagcaaaactcgtcatgcgaaggacacccattggtacagaccggaaccacaaccgttactggctgttcagtgatgaagtgcctggacttttcattgaaaagggttgggtccacgatagtatcgactacagattcaaccaccattgtaaggatcatacagttagcggcgatgaagactactgtccacggtccaaaaaagccaacctgggcaagaacgcttcaatgaatacacagcacggaaccgctacagaggtcgctgtggagaccaccacccccaaacagggacagaacctgtggtttctctgcgactctcagaaggagttagacgagctccttaactgtttgcatccacagggaatcagggaatcccagcttaaggagagactggagaaacggtaccaggacatcatccactccattcatctggcccgcaaacctaacctcggtttgaaatcatgcgacggcaaccaggagctcctgaatttcctgcgcagtgatctgatcgaagtcgctacacgcctgcagaaagggggtctcggttacgtggaagagacaagcgaattcgaggctagagtgatttcccttgagaaattgaaggacttcggagagtgcgtcattgctctgcaggcctctgtgattaagaaattcctgcagggatttatggcgcctaagcaaaaacgaagaaagctccaaagtgaggattccgccaaaactgaggaggtggacgaagagaagaaaatggtcgaggaggccaaggtcgcctctgcccttgagaaatggaaaactgcgatcagagaggcacagacatttagccgcatgcatgtcttattgggaatgctggatgcttgcatcaaatgggatatgtctgctgagaacgccagatgtaaggtatgtcgtaaaaaaggtgaagacgacaagctaattttatgtgatgagtgcaacaaggccttccacctgttctgtcttcgccctgccttatatgaagtgcctgacggcgaatggcagtgccctgcatgccagccagctaccgcccggcgcaattcccgcgggcgaaattacaccgaggaaagcgcatccgaagatagtgaggatgacgaaagcgacgaagaggaagaggaagaggaggaggaagaggaggaagaggactatgaggtggcaggcttgcgtcttcgacctcggaaaaccattcgggggaaacacagcgtgattccgccagcggcccgctctgggcgccggcccggaaaaaagcctcactcgacccgcagatcgcaacctaaggccccccccgtggatgacgccgaggtggatgaactggtgttacaaactaaacgctcgtcccggcgacagtcgttggaacttcagaaatgtgaggaaatcctacataagatcgtgaaatatagatttagctggccattcagagagccagtgacacgggacgaggctgaagactactatgacgttatcacacacccaatggacttccagacagtccagaacaaatgtagttgcggtagttaccgcagtgtccaagaattcctcacagacatgaagcaggttttcacgaatgcggaggtctacaactgccgaggttcccacgttcttagttgtatggtgaagacagaacaatgcctcgttgccttgctgcacaagcatcttccaggccatccctacgtacgccgcaagcgaaaaaaatttccagaccggctggcagaggatgaaggcgactcagagccagaggccgtcggacagagccgcggccgcagacagaagaagtag

SEQ ID NO: 109978 - DNA, 4452 bp, synthetic construct
  misc_feature 1..4452: note = Description of Artificial Sequence: Synthetic coding sequence
  source 1..4452: mol_type = other DNA
atggccccgctcttaggtcgcaagcccttccctttggtgaagcccctcccgggtgaagagccactcttcaccatcccgcacacacaggaagctttcaggaccagggaggagtacgaagctcggctggagcgttattcagagcgcatttggacctgcaaatcaactggtagctcacagctgacccacaaggaggcctgggaagaagagcaggaagtggccgagctgctcaaagaggaatttcccgcctggtacgaaaagctcgttctggagatggtgcaccacaataccgcctctctcgaaaaactggtcgacactgcttggctggagataatgaccaagtacgcagtgggggaggaatgcgacttcgaggtgggcaaggaaaagatgctcaaggtgaagattgtgaagatccacccactggagaaggtggatgaagaggctaccgaaaagaaaagtgacggggcctgcgactcaccgtcttctgacaaggaaaattcctctcaaatcgcccaggatcaccaaaagaaagagacagtggttaaggaagacgaaggtcggcgagaaagcatcaacgatagggctaggcgcagccctcggaagcttccaacatcactgaaaaagggcgaaagaaaatgggccccccctaaatttctgcctcacaaatatgacgttaaactgcaaaatgaagacaaaatcatcagtaacgtgccggctgattccttgatacgcacggagcgaccgccgaataaggagatcgtgcggtactttatacgccacaacgccctgagggcaggcactggagagaacgcaccgtgggttgtggaggatgaactggtcaagaaatactctttgcccagcaagtttagtgatttcttgctggatccttacaagtatatgacattgaacccctcgactaagaggaagaatacaggcagccccgatcgaaaacctagcaagaagtctaagaccgataattcctccctttcttctcccttgaaccccaagttgtggtgtcatgtgcacctcaagaaatctctatccgggagccctttgaaagtgaaaaatagcaagaatagcaagtcaccagaagagcacctggaggagatgatgaagatgatgtccccaaacaaactgcacacaaactttcacatccctaaaaaagggccgcccgctaaaaagccagggaaacattctgacaaaccgttaaaagccaaaggacgcagcaagggcatccttaacggacaaaagtctaccggcaactctaaaagtcctaaaaaagggttgaaaacccctaagaccaagatgaaacagatgaccctgctggacatggcgaaaggcacacagaagatgactagagcccctagaaattctggagggacccctcgcacttcatcaaagccgcacaagcacttacctcccgcagctcttcacttgatcgcctactacaaagagaacaaggatagggaagacaaacggtccgccctatcttgcgtgatcagcaagacagcaagactcctttcttccgaggatcgggcccggctacccgaagaactgcgcagtctggtgcagaaacgctatgaactgctagagcacaaaaagcggtgggctagtatgtcagaggaacagagaaaggagtatcttaagaaaaaacgggaagagcttaagaaaaagctaaaggagaaagccaaggaacgaagagaaaaagaaatgctggaaagacttgaaaagcagaagagatatgaagatcaagagctcaccggcaagaatctgcccgctttcagactagtggacacccctgagggactccccaataccctcttcggcgacgtcgctatggtcgttgagttcttgtcatgttattctggcctgctcctgccggacgcccagtacccgataacagctgtgtccctgatggaggccttatcagccgataagggaggttttttgtatctgaacagggtgctagttatactgcttcagaccctgctgcaagatgaaattgcagaagattacggggaacttggcatgaaattgtcggaaatccctctgactctgcattctgtttctgaactggtgcgattgtgcctgcgcagaagtgatgtacaagaagaatccgagggaagcgacaccgatgacaacaaggacagcgccgcgtttgaggacaatgaggtacaagatgagtttttagagaagctggaaacttctgagttctttgagttaacgtcagaagagaaactacagattctgaccgcgctttgccatcgaatcctgatgacctactcagttcaagaccatatggagacaaggcaacagatgtctgctgagctgtggaaggaacggctggccgtcctgaaggaggaaaatgacaaaaagagggccgagaagcagaagcggaaggagatggaagctaagaataaagagaacggtaaggtggagaacgggttggggaagacagatcggaaaaaggagatcgtgaagtttgaaccacaggtggacactgaagccgaagacatgatcagcgccgtgaaatccaggcgcctgctcgcgattcaggccaagaaggagcgggaaatccaagaacgggaaatgaaagtaaagttggaacgtcaagccgaagaggagcggatccgcaagcataaggccgccgccgagaaagccttccaggaaggtattgccaaggctaagctcgttatgcgtaggacccccatcggcacagaccgtaaccacaaccgatattggctcttttcagacgaagtaccaggtctgtttatcgagaagggctgggtccatgacagcatcgactatcgcttcaaccaccattgtaaggatcacacagtttctggcgacgaagactattgcccgcgttcaaagaaagccaacctcgggaagaacgccagtatgaatacacagcatggaaccgccaccgaagtcgctgtggagactacaacccccaaacagggccaaaacctctggttcctgtgtgatagtcaaaaggagttagatgagctcctgaactgccttcaccctcaggggatccgtgagagccagcttaaggagcggcttgagaagcgttaccaagatatcattcactccatacatctggcgagaaagcccaacctcggcctaaagtcatgcgacggaaatcaggagctcttaaactttctcaggtcagacttaatcgaggtggcgaccaggctgcagaaaggcgggcttggatatgtagaggagacgagcgagtttgaagcgcgggttatttcgttagagaagctcaaagacttcggagagtgtgtgatcgctctccaggcctcagtaataaagaagttcttgcaggggtttatggcccctaaacagaaacgcaggaagctacaaagcgaggatagcgcaaagacggaagaagtcgacgaggaaaagaagatggtggaggaagccaaggtcgcgtctgccctggagaagtggaagaccgcaattcgggaggcacagaccttttcccgaatgcacgtactgctgggaatgctcgacgcgtgcatcaagtgggacatgtccgctgagaatgcaagatgtaaagtatgtagaaaaaagggagaagacgacaaacttatcctgtgtgatgagtgtaataaggcgtttcatctcttctgcctgcgccccgcgctatatgaggtgccagatggagaatggcaatgccccgcgtgccagccagccaccgccaggcgcaattctcgcggccgcaactatacagaagagtctgccagcgaagacagtgaggacgacgagtccgatgaagaggaggaggaagaggaggaagaagaggaggaggaagattatgaggttgcggggctgaggctgaggcccaggaagacaattcgcggtaaacactccgtgattcctcccgctgcccggagcggcagaaggccagggaaaaagcctcattcaaccaggcgatcccagccaaaggccccccccgtggatgacgccgaagtggatgagcttgtgcttcagaccaaaaggagctctcgccggcagagtttggagctccagaagtgcgaggaaatcttgcacaaaatcgtgaaatataggttttcttggccttttagggaaccagtcacgagggacgaggctgaagattactacgacgtcataacgcaccccatggattttcaaactgtgcaaaataagtgttcttgcggaagttacaggtcagtccaggagtttcttactgacatgaagcaggtttttaccaatgctgaggtgtacaactgcagggggagtcacgtcctctcttgcatggttaaaaccgagcagtgcctcgttgctctcctccacaaacaccttccaggtcacccatacgtgagaaggaagaggaagaagtttccagatagactggccgaggacgaaggggactccgagcctgaggctgtggggcagtccagggggaggagacaaaagaagtag

SEQ ID NO: 109979 - DNA, 5622 bp, synthetic construct
  misc_feature 1..5622: note = Description of Artificial Sequence: Synthetic coding sequence
  source 1..5622: mol_type = other DNA
atggaagccaatgaccactttaactttacgggactgcctcccgctcccgcagcctctggtctcaaaccatcgccttccagtggtgagggcttgtacacaaacggcagccctatgaactttccccagcagggaaagagtctgaacggtgacgtcaacgtaaacgggctgagcacagtgtcgcatacaactacttccggcattctgaacagtgcccctcattcctcctctaccagtcacttacatcatccctccgttgcctacgactgtctctggaactactctcagtatcccagcgcaaatcccgggagcaatctcaaagaccctcccctgctgtctcaattttccggcgggcagtatcccctcaacggaatccttggaggtagccgccagccatcatcaccctctcacaacacgaatttgagagcaggaagccaggagttttgggcaaacggcacccagagtcctatgggcttaaacttcgattcacaggaactatacgattctttcccagaccaaaactttgaggaggtcggctctggtattcaccctgatgaagccgcggaaaaggagatgacatctgtcgtggccgagaatggcaccggtctcgttggatccctggaactggaggaagagcagcctgagctgaagatgtgcggctataacgggtctgtacctagcgtggagtcacttcaccaagaagtgagcgttctcgtgccagatcctactgtgtcctgcctggatgatccctctcacctgccagaccagcttgaagacaccccaatcttgagtgaagattctctcgagccttttaattcactcgcacctgaacctgttagcggcggactctacgggattgatgatacagagcttatgggcgctgaggacaagctgcccttggaagatagccctgtgatcagtgccttagactgccccagcctgaacaacgctactgccttcagccttcttgccgatgactctcagacgtccacctcaatctttgcctcccctacgagtccaccggtgctgggagaatctgtactccaggataacagcttcgacctcaataacgggagcgacgctgaacaggaagagatggagactcaatccagtgattttccaccttcgctgacacagcccgcccctgatcagtccagtacaattcaactgcatcccgccacctctcccgcagtcagccccactacttcgccagccgtatcgctggtggtaagccctgctgccagccccgaaatcagtccagaagtttgtcctgctgcctctaccgttgtatctcctgctgtattttccgtagtgagccccgcatcgtccgctgtgctgcccgccgtgagtctagaggtcccccttacggcaagcgtcaccagcccgaaggcctcaccagtgacatccccagcagccgcattccctaccgcgtcccccgcgaataaggacgtgagctctttcctggaaactaccgccgatgtagaggagataacaggggaaggcctgactgcttctggctcgggagatgtgatgaggagacggatagctacccccgaggaggtcaggctcccactgcagcacggatggagaagagaggtgcgaatcaaaaaggggtctcaccgctggcagggagagacctggtactatggaccatgcggcaagaggatgaagcaattcccggaagttataaaatacctgtctcgcaatgtcgtgcacagtgtgcgccgcgagcattttagcttcagccctcggatgcctgtcggagatttctttgaggagcgcgacacgccagagggtttacagtgggtacagctgagtgctgaagagatcccctcccggatccaggccataaccggcaaaaggggcagacctcgaaacacagagaaagctaagacaaaggaagtccctaaggttaaacgagggaggggtagaccgccaaaggtcaagatcaccgaactgctaaataaaaccgataacaggccactcaagaaactggaagcgcaggagactctgaatgaagaggacaaagccaaaatcgcaaagtctaaaaaaaaaatgaggcaaaaagtccagagaggagaatgccagaccactattcagggacaggcccgcaacaagagaaagcaggaaacaaagtctttgaagcaaaaagaggccaaaaagaagtcaaaggcagaaaaggagaaaggaaaaacaaaacaagagaagctgaaagagaaggtgaaacgtgagaagaaggaaaaggttaagatgaaggagaaggaggaggtgaccaaggcaaagcccgcttgtaaggcagataagacccttgcaacccagcgccggctggaagagcgccagagacagcagatgattctcgaagagatgaaaaagcccacagaggacatgtgcctcaccgaccaccagcctttaccggatttctccagggttcccggtctgacattgccatccggggcctttagtgactgtctgaccattgtcgagtttctgcacagctttggaaaagttctcgggtttgacccagccaaggatgtgcctagcttaggcgtgctgcaggaagggctactttgtcagggggatagtctgggcgaagtacaagaccttcttgtgcgcttgctgaaggccgcacttcacgaccctggattccccagttactgtcagtcccttaaaatcttgggagagaaggtgtccgagatccctctgacacgggataacgtgagtgagatactccgttgtttcctaatggcttatggagtcgaaccagctctgtgcgaccggttgcgcactcagccttttcaggcccaaccacctcagcagaaagccgctgtgctggcgtttctcgttcatgagttgaacggttcaaccctgatcatcaacgagattgacaagaccctcgaaagtatgagcagttaccggaaaaacaagtggatcgtggagggccgactcagacggctgaagacagtcttggccaaacgaactgggaggagcgaagtcgagatggaagggcctgaagaatgcctggggcggcgcaggtcttctcgaatcatggaggaaaccagcggcatggaagaagaggaggaggaggaatccatcgcagctgttcccggaagaaggggacgacgtgacggagaagtggatgctaccgcatcaagcatccctgaacttgaacgtcagatagagaagctgagtaaaaggcagctcttttttcgaaaaaaactgctgcacagctctcaaatgttacgggccgtttcactgggacaggaccgttatagaagacgctattgggtgcttccttatctggcaggaatatttgtagaaggaacagaaggcaacttagtcccagaagaggtgatcaaaaaggaaacagacagtctgaaagtggccgcccacgcttccttaaaccccgccctctttagcatgaagatggaactggccggctctaataccaccgcctcatctcccgcccgtgcaagaggcaggcctcgaaagacgaaaccaggctccatgcagccccgtcacttaaaatctccagtgcggggccaggacagtgagcagcctcaggctcaactacaaccagaagctcagttgcacgctccggcgcagcctcagccccaacttcagctccagttacagagtcacaagggcttcctggagcaagagggaagcccgctaagtctgggacagtctcaacacgacctgtcacaaagcgcctttttgtcatggctgtcgcagacacaatcccattcctccctcctctcctcaagtgttctgactcccgatagctcgccaggaaagctggatccagctccctctcaaccccccgaggaacccgaacccgacgaggctgagtcatccccagacccacaagccctgtggtttaatatctctgctcaaatgccctgtaacgcggcgcccacccctcctcccgcagtctccgaagaccagcccaccccatcgccccaacaactggcttcttctaagccaatgaaccgaccaagtgcagccaacccctgctccccagtgcagtttagctctacgccgttagccgggctcgcgccgaaacgaagagccggagacccaggtgagatgccacagagcccgacaggtctaggacaaccaaagcgtcggggtaggccaccaagtaagtttttcaaacagatggaacagagatacctgactcagcttacggcccagccagttcctcccgaaatgtgttcaggatggtggtggatcagagaccccgaaatgctcgacgcaatgctgaaggctctccaccctcgaggcatccgagaaaaagccctccacaagcatctgaataagcaccgagacttccttcaggaggtttgtctgcgccccagcgcagacccaatcttcgaacctagacaattgcctgccttccaggaggggatcatgagctggtcccccaaggagaagacctacgaaacagatctggcagtgctgcaatgggtggaagaactggaacagagagtgataatgtctgatttacagattcgggggtggacttgtcccagtcccgattcgacaagagaggaccttgcatattgtgaacacctatctgatagtcaggaggacattacgtggcgaggtcggggcagggaaggactcgcgccacagagaaagacgaccaaccctcttgacctcgccgttatgagacttgctgcactggaacaaaatgttgagaggcgatacctgcgggagcccttgtggcccacgcacgaagtcgtgctcgagaaagcgctgttgagcacccctaatggagcccccgaaggcaccactaccgaaattagttatgagatcaccccacgtatccgcgtttggcgacaaactttggaaagatgtaggtcggcagcccaggtatgcttatgtctggggcagctggagcgatccattgcgtgggagaagagcgtgaataaagttacctgccttgtgtgcagaaaaggggataatgacgagttcctgcttttgtgtgatggctgtgatcgcgggtgtcacatttactgccaccgcccaaaaatggaagctgttcccgagggggactggttctgtacagtgtgcttggcccagcaagttgagggtgaattcacccagaaacccgggtttcctaagagagggcaaaaaaggaaatctggctactcattgaactttagcgagggcgacgggagacggaggcgtgtgttattgaggggccgtgaaagccccgcagccggtcccaggtattcagaggaaggactgtccccgagcaagagacggcgcttgtcaatgaggaaccatcatagcgacttgaccttttgtgaaatcatactcatggagatggagtcccacgacgctgcatggcccttcctagagcccgtgaaccctaggctggtgtcgggctatcgcagaattataaagaatcccatggatttctcaacgatgagagagcgacttctaaggggcggctacacatcatccgaagaattcgcagctgatgcactgctcgtcttcgacaactgtcaaacattcaacgaagacgactctgaggtggggaaagccgggcatattatgcggagattctttgagtctcgatgggaggaattctatcagggaaagcaggccaacttatag

SEQ ID NO: 109980 - DNA, 2514 bp, synthetic construct
  misc_feature 1..2514: note = Description of Artificial Sequence: Synthetic coding sequence
  source 1..2514: mol_type = other DNA
gtgcctggtagacggggcagacgagacggcgaagtggacgccacggcatctagtatccccgagctggagcgacagattgagaaattgagcaagagacagctgttcttcaggaaaaagcttttgcatagtagccaaatgctgcgtgccgtgtcgttggggcaggacaggtatcggcggaggtattgggtactgccttacttagccggtattttcgtcgaaggaactgagggtaacctggtgcccgaagaagtgattaaaaaggaaacggatagccttaaggtggccgcacacgcttcgctgaatccagcgctgtttagtatgaaaatggagctggcaggttctaacaccaccgcaagcagccccgctagggctaggggccgtccacgaaagactaaacccggcagcatgcagccaagacatttaaaatcgcctgtgagggggcaggacagcgagcagccccaagcacagctgcagcctgaagcacagctccatgcacctgcgcagcctcagccgcaactgcagctgcagctgcagtcccacaaaggcttcctggagcaagaggggtccccacttagcctgggtcagtcacagcacgatctgtcacaaagcgccttccttagttggctgagccaaacacagagccactcgtccttactgagtagctctgtgttgactcctgattcctcccccggcaaactggaccccgcgccaagtcagcctccggaggaaccagaacctgatgaagcagagtcctctcccgaccctcaagccctgtggttcaacatttctgcccagatgccttgcaatgcagcccccacccctcccccggctgtgtccgaagatcagcccaccccatcccctcagcagctcgcatctagtaaacctatgaatcggccttctgcagctaacccatgctcccccgttcagttcagctcgaccccccttgcgggactcgcacctaaaaggagagcaggagacccaggtgaaatgcctcagagtcccacaggactgggccagcccaagagaagaggcaggccaccatccaagttttttaagcagatggagcaaagatacttaactcagctaacagcccagcccgtcccccctggctggtggtggatccgcgatccggaaatgctcgacgccatgctgaaggcactacacccaagggggattcgtgagaaggcactgcacaaacacctcaataagcatcgagactttctacaggaggtctgtctgcggcctagcgccgatcctattttcgagcctcgacagcttcctgccttccaggaaggaattatgagttggagccccaaagagaagacctatgaaactgacctggcagtgttacagtgggtggaggagctggagcagagagttatcatgtccgacctgcagattagagggtggacctgcccaagcccggactcgacgcgggaggatctcgcctattgtgagcatctgtctgactcccaagaagacattacttggcgggggcggggacgcgaggggctcgcacctcagcggaaaactaccaacccactggatcttgccgtgatgcggcttgcagccttggaacaaaatgtcgagaggcgatatttgcgggaaccgctctggccaacccacgaggtggtcctggagaaggccctgctctccacaccgaacggtgcacctgaaggaaccactacagagatctcttatgagattaccccgaggattcgagtgtggcggcagacgctggaacgctgtcgctctgccgcacaggtgtgtctgtgcctggggcagctggagcggtctatagcgtgggagaagtccgtgaataaagtcacttgtctggtttgtagaaagggggataacgatgaattcctccttctgtgcgacggatgcgaccggggctgtcacatctattgccacaggcctaagatggaagccgtgcccgagggagactggttttgtaccgtttgtctagcacagcaggtcgaaggcgagtttacacagaagccaggattcccgaagcgcggacagaaaagaaagagcgggtattctctgaatttttccgagggggatggtaggaggcgccgcgtactactgcgcggccgagagtcccccgcagccgggccccgctacagcgaggagggcctgtcaccgagtaaacgtagacgactttcaatgcgcaaccatcattccgacctaacattctgtgagataattctgatggagatggagtcccacgacgccgcctggccgttccttgagccagtgaaccccaggttggtatccggatacaggcggattataaagaacccaatggatttttctacaatgcgcgagcggctgctgcgcggtggatacaccagctctgaggagttcgctgccgacgcattgctggtgtttgataactgccaaacgtttaatgaagatgattctgaggtgggtaaggctggtcacattatgagaaggttctttgagagtcggtgggaggagttttatcagggaaaacaggccaatctgtag

SEQ ID NO: 109981 - DNA, 5718 bp, synthetic construct
  misc_feature 1..5718: note = Description of Artificial Sequence: Synthetic coding sequence
  source 1..5718: mol_type = other DNA
atggagatggaggctaacgatcactttaattttactggactcccgccagctccagccgcgagtggcctgaaaccttctcccagcagtggagaaggactgtacacaaacggatcaccgatgaattttccacagcagggaaaaagcctaaatggggatgtgaacgtgaacggcttatctactgtaagccatacgacaacctctggaatcctcaatagtgcaccacactcctccagcacaagccacctccatcacccctctgtagcctatgactgcctttggaactacagccagtacccttctgctaatcctggttctaatctgaaagaccctccattactgagtcagtttagtgggggacagtaccctctgaacggcattctcgggggaagtcggcagccctccagtccctcccacaataccaacttgcgagccggctctcaggagttctgggcaaacggcacacagtctcccatgggcttaaacttcgactctcaagagctatatgactctttcccagatcagaatttcgaggtcatgcctaatggaccccccagcttttttacaagtccacagacatccccgatgctgggttcttccatccaaacatttgcaccctctcaagaggtcgggtccggtatccatccagacgaggctgctgagaaggaaatgacaagcgtcgtggccgagaacgggactggcctcgtagggagcctcgaactggaggaggagcagcccgagctcaagatgtgcggatataacggttctgtgcccagcgtggagagcctgcatcaggaggtcagcgtgctggtgcctgacccgactgtgagttgtctggatgacccgtcccacctgcccgatcaactcgaggacactccaatcctctccgaggacagcctggagccatttaattctctcgctccagagccagtgtccggaggtttatatggtattgatgatacagagcttatgggtgccgaagataagcttccactggaggacagccctgtgatctccgcactggattgtccgtccctgaataacgccaccgcttttagtctgcttgccgacgactctcagacctctacttcaatttttgcctcccccacttctccccccgtactaggtgaaagcgtgctgcaagataactcattcgatctcaacaatggctccgacgcggaacaagaagagatggaaactcagagttcagactttcccccatctctgacacaaccagcacccgaccagagctccacaatccagttgcatcccgccacaagtccagccgtatctccaaccacctcgcccgccgtgtcattggtcgtaagtccagcagcctctccagaaatctctccagaagtgtgcccagctgcctcaacagtggtctcaccagcagtctttagtgtggtgagcccagcttcttccgccgtcctgccagctgtgtctctggaggttcccctgacagcttccgtcaccagccccaaagcctctcctgttactagccccgcagccgcattccctactgctagtccagcaaacaaagacgtcagctctttcctcgaaactaccgccgatgtagaagaaatcacaggtgaggggttgactgccagcggaagtggcgacgtcatgagacggagaatcgccacacccgaagaggtgcgactcccccttcagcatgggtggcgccgtgaagtccgcatcaagaaaggaagccaccgctggcagggagaaacatggtattacggaccctgtgggaaaagaatgaagcagttccccgaggttatcaaatacctcagccggaacgtggtccactccgtcaggcgtgagcatttctctttcagccctcggatgccagtcggggacttttttgaagagagggatacaccggaggggctccagtgggtgcaactgagcgccgaagaaatcccatccagaattcaagccattaccggcaagagaggccggcccagaaacacggagaaagcaaagaccaaggaggtgcccaaggtcaaaagaggccgggggcggcctccgaaggttaagatcacggagctcctaaacaagacggataatcgccctctgaagaaattggaggcgcaggaaacattaaatgaagaggacaaggccaaaatcgcaaagagtaaaaagaagatgcggcaaaaagttcagcgaggagagtgccaaacgacaattcagggtcaggctcgaaataagcggaaacaggagaccaagtccctgaagcagaaagaagcaaaaaagaaatcaaaggccgaaaaagaaaagggtaagaccaaacaggagaaactcaaggagaaagttaagagagagaagaaggagaaggtaaaaatgaaggagaaagaagaggtcaccaaagccaagccagcctgtaaggccgacaagacactagcaactcagcgaagactcgaggagaggcagcgtcaacagatgatcctcgaggagatgaaaaagcctaccgaagatatgtgccttacagaccatcagccactgccggacttcagtcgggtgcccgggctcacccttcccagcggagcattcagcgattgtctgaccattgtggagtttctacactcctttggcaaggtgctgggcttcgaccctgcgaaagacgtcccgtctctcggcgtgttgcaggaaggcctgctctgccaaggcgattcgctgggggaagttcaggacttactggtccgtctgctgaaagccgctcttcatgatcccggcttcccaagctattgccaatcattaaaaatccttggagaaaaggtttcggagatacctctgacacgcgataacgtgagcgagatcctgcggtgtttcctaatggcctatggcgtcgaacccgccctgtgcgacagattgcgtacccaaccctttcaagcccagccacctcaacaaaaagctgctgtgcttgcattcttagtacacgagctgaacggaagcacactcatcatcaatgagattgacaagacgctggaaagcatgagctcctaccgcaaaaataaatggatcgtggaagggcggttgcggcggctcaaaaccgtgcttgctaaacgaaccggacggagcgaagtggagatggagggacccgaggagtgcctgggtagaaggcgcagttcgaggatcatggaggagacctctgggatggaggaagaggaagaggaggagagtattgccgcggttccagggcgaagaggccgaagggatggagaagttgacgctacagcttcctcaattcctgaactagaacggcagatcgaaaagctgtcaaagcgtcaactcttttttaggaagaagcttttgcactcatcccagatgctaagagccgtttcactcggtcaggatcggtacagacgccggtactgggtgttaccatatctcgcgggtattttcgtcgaaggcacagaggggaatctcgtgcctgaagaggttataaaaaaagaaactgatagtctgaaggtggccgcacatgcatcactaaacccagccctgttttcaatgaagatggagttagctggtagcaatactacagccagctccccagctcgggctcgcggcagaccgcggaagaccaagcctggttctatgcaacccagacacctcaaaagcccagtgcgggggcaagatagtgaacagcctcaggctcagctgcagccggaagcccagttacatgcccctgcccagccacagccacaactgcagctccagttgcagtcacacaaaggatttctggagcaagagggctctccactgtctctgggacagtcccagcatgacctgagtcagtctgctttcctgagctggctgagtcagactcagtctcattcgtcactcctctcatcaagcgttctcacacccgatagtagtcccggcaaactcgatccggcccccagccaacccccagaagagcccgagcccgatgaggctgagtcctctccagatccgcaggctctttggttcaatatcagcgctcagatgccatgcaacgctgccccaactcctccacctgccgtcagcgaggaccagccgacgcccagcccacagcagcttgcttcctccaagccaatgaacaggcctagtgccgctaacccatgctctccagtacagttttcatccacacctttggccgggctcgctcctaagaggagagctggcgacccgggagagatgccccaatctcctacgggattgggccagccaaaacgcaggggacggcccccttctaagtttttcaaacagatggagcagcgatacctcacacagctcacggcgcagcctgttccaccggaaatgtgtagtggctggtggtggatacgagatcctgagatgttggacgccatgctgaaagcccttcacccacggggaatacgagaaaaggccctgcataagcatctcaacaagcatcgagacttcttacaggaggtgtgtctacgtccctctgcggatcccatttttgagccaagacagctccccgcatttcaagagggtattatgagttggtcacccaaggaaaagacttatgagacagacttagctgttctgcagtgggtagaagaactggaacagcgcgttattatgagcgatctacagatacgcggttggacatgcccatcccccgacagcacaagggaggacctcgcatactgcgaacatctttcggactcacaggaggatattacgtggagggggcggggacgcgagggccttgctccgcagaggaaaaccacaaaccccctggatctcgccgtgatgcggctcgctgcattagaacagaacgtggaaaggcggtatttaagggaaccattgtggccgacccacgaagtagtgctagaaaaggcactgctgtcgactccaaatggggctcccgaaggaacgaccaccgaaatcagctacgaaattacaccccggataagagtttggcgccagaccctggagcggtgtcgatctgcggcccaggtatgcctctgtctgggacaactggagcgcagcattgcctgggagaaatcagttaataaagtcacttgcctcgtctgcaggaagggagataatgacgaattcctcctgctgtgcgatggctgtgataggggttgccatatctactgccatcgccctaaaatggaagccgttcctgagggtgattggttctgcacagtgtgcctggcacaacaggtcgaaggtgagttcacccagaaaccagggtttccaaagcgcggccagaagcgcaaatccggctacagtttgaattttagcgaaggcgacggaagacgtaggcgcgttcttctgcgcggcagggaaagtcccgctgccggtcctcggtactcagaggaaggactctcacccagtaaaaggagacgcttaagcatgcgcaatcaccatagcgatctaaccttctgcgagatcatcctgatggaaatggagtcacacgatgcagcctggcccttcctggagcccgtaaatcctcggttggttagcggatatcgtagaattatcaaaaacccaatggactttagcacaatgcgggagcggctcctgcgtggaggctatacgtctagcgaagaatttgccgctgacgcacttctggtttttgacaactgccagaccttcaatgaagacgatagcgaagtaggaaaagcggggcacattatgcgccgctttttcgaaagtcgctgggaggaattttaccagggtaagcaagccaacctttag

SEQ ID NO: 109982 - DNA, 6207 bp, synthetic construct
  misc_feature 1..6207: note = Description of Artificial Sequence: Synthetic coding sequence
  source 1..6207: mol_type = other DNA
atggagtctggagagcggctgccttcttcagcagcttctagtaccacgcctactagcagctctactccctccgttgcatctgtagtgtcaaaggggggactgagcactggagtagcttccctgtcttccacgattaatccatgcgggcacctcttcagaactgccggcgaccagccattcaatttgtccacggttagcagcgcattccctatggtgtcccatcctgtgtttggactgcatagcgctagcagcggccactcagagtttggtggtttgggcacactgggtacacccaccgctttggcagctcatcctcaattggcctcatttccggagtggtggcggacgacggatgctcatacccgcacaggtgcaacattctttcccccactcttggggatcccacccctcttcgcgccccccgcccagaatcacgattccagctcttttcactcaaggaccagcgggaaatcaaaccgaaacggacccgagaaaggcgtgaatgggtctatcaatgggtccaacacttcaagcgtcattggcattaatacctccgtgctgagcacaacagcatcaagctctatgggccaaacaaagtccactagctcaggtggcgggaatagaaagtgtaatcaggaacagagtaaaaatcaacctctggacgctcgggttgataaaattaaggacaaaaagccccggaagaaagctatggaatcgagctctaatagcgatagtgacagcgggactagcagcgatacctcctccgagggaattagctcaagtgattccgacgacctggaggaggatgaagaggaagaggatcagagtatagaggagtccgaagatgatgactcagactcagaaagtgaggcccagcacaaaagcaacaatcaggtgctgctgcacggtatcagcgaccccaaagccgacggtcagaaagcgacagagaaagctcaggagaagagaattcatcagcctctgcctttggcctcagaaagccaaactcacagctttcagtcccagcagaaacaaccacaagtccttagtcagcagcttcccttcatattccagtcttctcaagcaaaagaggagtccgtaaataaacacacttctgttatacagtcaacaggtctggtctctaatgtcaaacccctgtccctcgtgaaccaggctaagaaggagacttacatgaagttaattgtccccagcccagacgttctgaaagccgggaataagaatacctccgaagagagttctttactcacgtcagagttaagatccaagcgcgaacagtacaagcaagcctttcctagtcaactgaaaaaacaggagtcatcaaaatccctcaagaaagtcatcgcagctctaagcaaccccaaagcaacaagctcctctcccgctcaccccaagcagaccttggaaaataatcacccaaacccattcctgacaaatgctctgctcggcaaccaccagcccaatggagttatccagtcagtgatccaggaggcacctctcgcgctaacaacaaaaaccaagatgcagtcaaagataaacgagaacatagccgcagcctctagcacacctttttccagtccagtaaatctgtccacctctggacgacggacacccggtaatcagacaccggtgatgccctcggcgtctcccatcctgcactcccaaggaaaagagaaggcagtctctaacaacgtgaaccctgtaaaaacccaacatcacagccacccggcaaagtctctggtcgagcagtttagaggcaccgactccgacatcccaagcagcaaagactccgaagattccaatgaggatgaggaagaagatgatgaggaggaggacgaggaggacgacgaagacgatgaaagcgacgatagccaatcaggaactagcaagagacgccgggtgacggacgagcgcgaactgcgtataccactggagtacgggtggcagcgggaaacacgaattcggaacttcggcggcaggctccagggagaagtagcgtactacgctccgtgcggcaaaaagttaagacagtaccccgaggtcatcaagtacctgtcccggaatggcattatggacatcagcagggacaacttctctttctccgccaaaatacgggtgggggatttctacgaagcgagagacgggccgcaaggcatgcagtggtgtcttctgaaagaggaggacgtgatccctcgcatcagggctatggaaggaagaaggggaagaccccccaaccccgatcgacagcgcgcacgggaagaatctagaatgagacgtaggaaaggacggcctcctaacgtcggaaatgccgaattccttgataatgcggatgctaagctcctgcgtaaattgcaggcacaggagatcgctagacaggcggctcagataaagctcttaagaaaactgcagaagcaggagcaagcacgcgtcgcaaaagaggcgaagaagcagcaggctatcatggctgctgaagagaagagaaaacagaaggagcagattaagattatgaaacagcaggagaagattaagcgcatccagcagatcaggatggagaaagagctccgggcccagcaaatactcgaagcaaagaagaaaaagaaggaggaggctgcaaatgccaaactcttggaggctgaaaaacggattaaggagaaagagatgcgtaggcagcaggctgtgttactcaagcatcaggaaagagaacgtcggcggcagcacatgatgctgatgaaggctatggaggctcggaaaaaggcggaagagaaagagaggctcaaacaggagaagagggatgagaaacggctgaataaagagcgcaaactggaacagcgtcggttggaactggagatggcaaaggaactgaagaagcccaatgaggatatgtgcctggccgatcagaagccactgccggagcttcctagaatccccggacttgtcctgagcggttccaccttcagcgattgtctcatggttgtgcaatttctcaggaattttgggaaagtgctggggtttgacgtaaatatcgacgtgcccaatctgtccgtgctgcaagaaggactgctgaacatcggcgattcaatgggcgaggtgcaggatctcttagtgaggctactcagtgccgccgtgtgcgaccccggcctgattactgggtacaaggctaaaacagcactcggcgagcatttgctgaacgtgggcgttaaccgggacaatgtgagcgagatcttgcagatttttatggaagcccattgtgggcagacagaacttaccgaaagccttaaaacaaaagccttccaggctcatacccctgctcagaaagcctctgtcctggcctttctaatcaacgaacttgcttgcagcaaatccgtcgtgagcgagatagacaaaaacattgattatatgtccaatttgaggagggataaatgggttgtcgaaggaaagctccgcaagctccgaatcattcatgcgaaaaaaaccggcaaacgcgacacctccgggggcatagatctgggcgaagagcagcatccgctggggacgccaacgccaggccgaaagcggcgaagaaaagggggggacagcgactacgatgatgatgatgacgatgattccgacgatcagggtgacgaagacgatgaagacgaggaagataaggaagataagaaagggaagaagacagatatctgtgaagacgaggatgaaggggatcaggctgcatcggtcgaggaacttgagaagcagattgagaagctatcaaagcagcaatctcaatacaggaggaagctgtttgacgcaagccatagccttaggtcagtgatgttcgggcaggaccgatacaggcgtagatactggattcttcctcagtgcggtggcatttttgtggaagggatggagagtggagagggtttggaagaaatagccaaggaacgcgagaaattgaagaaggctgagtccgttcagataaaggaagagatgtttgagacttcgggggactctctgaattgtagcaacacagaccattgtgagcaaaaggaggatctcaaagagaaggacaacaccaacctgtttctccagaagcctgggtcatttagcaaattatccaaactgctagaagtggccaagatgccacccgagtcagaggttatgactcccaagcctaatgccggtgctaatggctgcaccctttcctaccagaattccggaaagcacagcctgggatcagtccagtctacggccactcagagcaacgtcgagaaggccgactctaataatctattcaacacaggaagctccggtcctgggaaattctacagtccactgcctaatgaccagttgctgaagactctgactgagaagaacagacaatggttctccttacttccacgtaccccatgtgatgacacctccttgacccacgctgatatgtcaacagctagtcttgtgaccccccaatcgcagcctccctctaagtcaccatctcctactccggcccctcttgggagcagtgcccagaatccggtgggcctgaatccttttgccctctctcccctgcaggtgaagggtggagtttccatgatgggcctccagttctgcggttggccaacaggcgtggtgacctctaatatccctttcacatcgtctgtgccttcactgggttcgggcctgggcctgagcgaggggaacgggaattcgttcctcacatctaacgttgcaagctcaaagagtgaatctccagtgccccagaatgaaaaagccacctccgcacagcccgcagcagtagaagtggccaagcccgttgattttccttcgcccaaacctatccctgaagagatgcagtttggctggtggcgcatcatcgatcctgaggacctgaaagccctattgaaagttctgcatctgagagggatcagggagaaggcactgcagaaacagatccagaagcatctcgactatatcacccaggcctgcctgaaaaacaaggacgtcgctattatcgagctgaacgagaacgaagaaaaccaagtcactcgtgatattgtggagaattggtccgtggaggagcaagccatggaaatggacttatccgtccttcaacaagtagaggatcttgaaaggagggtggcttccgcctccttacaagtcaaaggatggatgtgccccgagccagcctcggaaagggaagacctggtttactttgagcacaagagtttcaccaaactttgtaaggaacacgacggagaatttacaggtgaagatgaatcctccgctcatgctctggagcgtaagagtgacaatccattagacattgcggtgacgagattagcagatctggagcggaacattgagcggcgcatcgaggaggatatcgccccgggtcttcgggtttggagaagagcactgtccgaagcgagatccgccgcgcaggtggcactttgcatccagcagctgcagaaatcaattgcttgggagaagagtataatgaaggtgtattgtcagatctgccggaagggggacaacgaggagctgctgttgctgtgcgatgggtgcgacaaaggatgtcacacatactgccatcggcccaagatcacaacgattccagatggggactggttttgccccgcctgcattgccaaagcttccgggcagactctgaaaattaagaagctgcacgttaagggtaagaagactaacgaatcaaagaaaggtaaaaaggtaacactgaccggagataccgaagacgaagattcagcgagcacatcgagcagtctcaagcgtggcaataaggatcttaaaaagagaaaaatggaggagaatacttcaatcaatttatccaaacaggagtcattcacctctgttaagaagcccaagagagatgactctaaagatttggctttatgcagtatgatactcacagagatggaaacccatgaagacgcgtggccttttctgttgccagttaaccttaagctggttcccggttacaagaaagtcatcaaaaagcccatggatttctcaactatacgtgagaagctcagtagtggacaataccccaacctggagacattcgccctggatgttagactcgtgttcgataattgtgaaacatttaatgaggatgacagcgacattggcagagccggacataatatgagaaagtattttgaaaagaaatggacagatacatttaaggtctcttag

SEQ ID NO: 109983 - DNA, 6405 bp, synthetic construct
  misc_feature 1..6405: note = Description of Artificial Sequence: Synthetic coding sequence
  source 1..6405: mol_type = other DNA
atggagtctggtgagcggctgccgtcctctgctgcaagttcaacaactccaacgtcttcaagcaccccttccgtcgcttctgtggttagcaaaggagggctgagtacaggggtggctagcttgagctctacaatcaatccttgtggccacctgtttagaaccgccggcgatcagccttttaatctgagcaccgtgtctagcgctttcccaatggtgagccaccccgtgtttggtctgcattcagcaagctccgggcactccgagttcggcgggttagggaccctcggtactcctactgcccttgccgcacatcctcaactggcctcatttcctggcgccgaatggtggcggactactgatgcacatactcgcacaggggcgacatttttcccccctctgctggggatccccccgctgtttgccccacctgcgcaaaatcatgatagttcaagctttcactctaggacatctggcaagtccaacaggaatgggcctgaaaagggcgtgaacggaagcataaacggttctaatactagtagtgtcattggaattaatactagcgtgctgagtaccacagccagcagcagtatgggacagactaagagcacaagttccggaggagggaacagaaagtgtaaccaggagcagagcaagaaccaacccttggacgcaagagttgataaaataaaagataaaaagccacgtaagaaggctatggaatcaagttccaatagcgactctgatagcggaacctcttcggacacatccagtgaagggatctctagtagtgatagcgacgatttggaggaggacgaagaggaggaagatcagtctatcgaggagagcgaggatgacgacagtgacagtgagtctgaagcacagcataagagtaataatcaggtgctgctacatggaattagcgatcccaaggccgacggacagaaggccacagagaaggcgcaggagaaacgaattcatcagcccctacctttggcaagcgagtcccagacccatagcttccagagtcaacagaaacagccccaagtcctgagccagcagttgccgttcatattccagtcaagtcaagcaaaagaggaatccgttaacaagcacacttcagtaattcagtctacaggtttagtgagtaatgttaaacccctgagcctggtgaatcaggcaaaaaaagagacctatatgaagctaatcgtacccagccccgacgtgctgaaggccggaaacaaaaacacctctgaagagtcatccctgcttacaagcgagctgaggagtaaacgggagcagtacaagcaggcctttcccagccaactgaagaaacaggagagttccaagtccctgaagaaggtcatagccgcactgtccaatcccaaagccacatcatctagtccggcccaccctaagcagaccttagagaacaatcaccctaaccctttccttacaaatgcactgctgggaaatcatcagcccaacggcgtcatccagtctgtgattcaggaagctcccctggcgctaaccactaaaacaaagatgcagagcaagataaacgagaatattgccgctgctagcagcacacccttttctagtcccgtgaatctgagcacgagcgggagaagaacaccgggaaatcaaacaccagtgatgcctagcgcgtctcccatcctgcactcccaaggaaaagagaaggccgtttccaacaacgtcaatcccgtgaaaacccagcatcatagtcatcccgcaaagtccctggttgagcagtttaggggaacagactctgacattccttcttccaaggacagtgaagacagcaacgaggacgaggaggaggacgacgaggaagaagatgaggaggacgacgaagacgacgaaagtgacgactcccagtccgagtctgattccaatagcgagtccgacaccgaggggagtgaagaagaagacgacgacgataaggaccaggacgaatctgactccgacaccgagggtgaaaagacgtcaatgaagctcaacaagaccaccagttctgtcaaatcgccttccatgagtctcactgggcattctacaccaaggaatttgcacatcgccaaggcacccggctccgcccccgccgccctctgttccgagagccagtcccctgcttttctgggcacaagttcaagtacccttacctcaagcccccactctggcacttccaaacgccgtagggtgaccgatgaaagggaactacgcataccacttgagtacggatggcagagggaaactaggatccgaaatttcggcgggaggctgcagggcgaagttgcctattacgccccctgcggcaagaaacttcgccaatatccagaggtgattaaaggaatgcaatggtgcttactgaaagaagaggatgtcatcccccgcataagggctatggagggccgaagggggaggccacctaaccctgaccggcagcgcgcacgcgaggagagcaggatgaggcgacgcaaaggcagaccccctaacgtggggaatgcagagttcctggataatgcggatgcaaagctgttaagaaagctgcaggcacaggagattgccaggcaggctgctcaaataaagctactgcggaagctgcagaaacaggaacaggcccgagtcgcaaaagaagcgaaaaaacagcaagctataatggctgcggaagagaagcgaaagcagaaggaacaaatcaagattatgaagcagcaggagaagatcaaacggattcaacagatcagaatggaaaaggagttgcgcgctcagcaaatcctggaggcaaagaagaagaaaaaagaggaggccgctaatgccaagcttctcgaggccgagaagcgtataaaggaaaaggagatgaggagacagcaggcagtcctgctcaaacaccaggagcgggaacgtaggaggcagcacatgatgttgatgaaggccatggaggccagaaagaaagccgaggagaaggagaggctcaagcaggagaagagagacgagaaacgcctaaacaaggagcggaagctcgaacaaaggcggcttgagctcgagatggctaaggagctgaagaaaccaaacgaggatatgtgcctggccgaccaaaagcccctccccgaacttccaaggatcccggggcttgttttgtctgggagcacattcagtgattgtctcatggttgtacaatttttgcgcaactttggcaaggtacttggcttcgatgtcaatattgacgtgcccaacctgagcgtcctacaggagggactactgaacatcggcgattccatgggtgaggtccaggacctcctggttagactgttaagcgcagccgtgtgcgatccaggcctgattacaggctataaagctaaaactgcactcggagagcacctgctgaacgttggagttaatcgtgataacgtgagcgaaattttgcaaatcttcatggaggcacactgcgggcagactgagctaaccgaaagtctgaagacaaaagcttttcaggcccatacccctgcccagaaggctagcgtgcttgcttttttaatcaatgagttagcctgtagtaaatccgtggtgagcgaaatagacaaaaacattgattatatgtctaatttgcgacgggacaagtgggtcgtcgaaggaaaattacggaaactgcgaataatacatgctaagaaaaccgggaaaagagacaccagcggtggaattgatctgggagaggagcagcaccccctgggcactccgactccaggacggaagagacgacggaaaggtggtgacagtgattacgacgatgacgatgacgatgactcagatgaccaaggagacgaagatgacgaggacgaggaagataaggaggacaagaagggcaagaagaccgatatttgcgaagatgaggatgaaggcgatcaagctgcatccgtagaggaactagaaaaacagatcgagaaactgtccaagcaacaaagtcaatacaggcggaaactgttcgacgcctctcacagcttgaggtcggtgatgttcggccaagatcgctaccgccgtaggtattggatcctaccccagtgtggaggcatcttcgtagagggcatggaatccggcgaaggactcgaggaaattgccaaggaaagagagaagctgaaaaaagctgagtccgtccaaatcaaggaggaaatgtttgaaacatccggagattctctgaactgctctaatactgaccactgcgagcaaaaagaggatcttaaagagaaagataacactaacctgtttcttcagaaacccggcagcttcagtaagttgtctaagctcttagaggtggccaaaatgccacctgagagtgaagtgatgactcccaagcctaatgctggagccaacggttgcaccctctcgtatcagaacagcggcaagcattcattggggagcgtacaaagcacggccacccaatccaacgtggaaaaggctgacagcaacaacttgttcaataccggatcaagcggcccaggaaagttttacagcccgctgcctaatgatcagctcttaaaaactttgactgaaaaaaaccgccagtggttctctctgctgccgcggaccccgtgcgatgatacaagcttaacacatgccgacatgagcactgcttccctggtgactccacagagccaaccaccatccaaatcccctagtcccacgcccgccccgctcggatcttccgcccagaacccagtcggcctgaacccgttcgctctgtcacccctgcaagtcaaggggggagtgtcgatgatgggcttacagttctgtggctggcccacaggagtcgtgaccagcaacatcccttttaccagtagtgtacctagtctgggatccgggctggggctcagcgagggcaacggcaactccttcctgacctcaaatgtcgccagtagcaaatctgaatcaccggtgcctcagaacgaaaaggctacatccgcgcagcctgccgcggttgaagtggccaagcctgtcgatttcccttcaccaaagcccatccccgaagagatgcagttcggatggtggcggattatcgatccggaagacctcaaggcattgttgaaagttcttcacctgcgagggatcagagagaaagccctgcaaaaacaaattcagaagcatctcgactacatcacccaagcctgcctgaaaaacaaagatgtcgccataatcgagctcaatgagaatgaggagaaccaggtcactagagatattgtggaaaactggtccgtcgaggagcaggcaatggaaatggatctaagcgtgctccagcaggtggaggatcttgaaagacgggtggcctctgcatctctgcaggtgaaaggatggatgtgccctgagccagcgtccgagcgcgaagacctagtttacttcgaacacaaatccttcaccaagttatgcaaggagcatgacggcgaattcaccggcgaggatgagagctcagctcacgcactggaacggaagagcgacaatccactcgacatcgccgtgacaagactggccgatctcgaaaggaatatagaacgtcggatcgaggaggacatcgcccctggtctgcgtgtttggaggagggccctgagcgaggcccggtctgccgctcaggtcgctctgtgtattcagcagctgcaaaaatccattgcatgggaaaaaagtataatgaaagtgtattgccagatttgtagaaagggtgataatgaagaactgctccttctgtgtgacgggtgcgataaaggctgccatacctactgtcatagaccaaaaattacgacgataccggacggagattggttctgccctgcttgtatagccaaagcctccggacaaacattgaagatcaagaagttgcacgtgaaaggtaagaagacaaacgaaagtaaaaagggaaaaaaagtcactctaactggagacacagaagacgaggattcagcgtccacttcctcctccctcaaacgcggcaataaggatttaaaaaagcgaaagatggaagagaatacctcaattaacctttcaaagcaagagtcatttacttctgttaagaagcctaagagagatgacagcaaagatttggcgctttgttcgatgattcttacagaaatggagacccacgaagatgcttggccctttctgttgccagttaatctgaaactcgtcccaggatataagaaagttatcaaaaagcccatggactttagcaccattagagaaaagctgtcaagcgggcagtacccaaacctggaaactttcgcgctcgacgttagattggtgttcgacaactgtgaaacttttaacgaggatgatagcgacataggccgggccggccacaatatgaggaaatatttcgagaagaagtggaccgatacatttaaggtctcgtag

SEQ ID NO: 109984 - DNA, 6399 bp, synthetic construct
  misc_feature 1..6399: note = Description of Artificial Sequence: Synthetic coding sequence
  source 1..6399: mol_type = other DNA
atggaatcaggcgaacgtttgccttcctccgccgcgtccagtaccactcccactagcagttctactccatctgtcgctagcgtggtttcgaagggtggtctctccacaggggtggcgagtctgtctagcaccatcaacccatgcggtcatctttttcgaacagcgggggaccagccgttcaatcttagcacagtcagtagtgcatttcccatggtgtctcacccagtgttcgggctgcacagcgcctcctcaggtcactctgaattcggcggcttgggcacactcggaacccccacagccctagccgctcatcctcagttggctagctttccagaatggtggcggacgacggacgctcatacgcgcactggagctacgtttttcccacctctactcggcatcccccccctttttgccccacccgcacagaaccatgactcctcttccttccacagccgcacaagcggtaagagtaaccgcaacggtcccgagaaaggtgtgaacggctccatcaacggctccaacacctcctcagtcatcggcatcaacacctccgtgctctcaaccactgcaagtagtagtatgggtcagacaaagtctacctcttctggcggaggcaaccgtaagtgtaatcaggaacagagtaaaaaccaaccactggacgcacgggtcgacaagattaaagacaagaaacccagaaagaaagctatggagtcaagttccaacagtgattcagactcaggcacctctagcgatactagtagcgaggggatcagctcctctgattcggatgatcttgaagaggatgaggaggaggaggaccaaagtattgaagagtctgaggacgacgacagtgactctgaaagtgaagcacaacataaatctaacaaccaggtgctgctgcatggtataagtgatccaaaggccgacggacaaaaggcgacagaaaaggcccaagaaaagagaatccaccagccattacccctcgctagcgagagccaaacacatagtttccagagccagcaaaaacagccgcaggtgctcagccagcaattgccatttattttccagtcttcccaggctaaggaggagtccgtcaacaagcacaccagcgtgatccagtctacagggctggtgagcaacgtaaaacccctttccttggtaaaccaggctaagaaagagacatatatgaagctgatcgtcccctcaccagacgtcttaaaggctgggaacaagaacactagcgaggagtcgtcacttttgacctctgagctcaggagtaaaagagagcagtacaagcaggcgtttccatctcagctaaagaagcaggagagctcaaagtccctgaaaaaggtgattgcagcccttagcaatcccaaagctaccagcagctcgcccgcacatccaaagcagaccctagagaacaaccatccaaacccttttctcactaatgcccttttaggcaaccaccagcctaatggcgtgattcagtccgtaatccaggaggcacctctggcccttacaaccaaaaccaaaatgcagtccaagatcaacgagaatatcgccgctgcctcgtctacgcccttcagctcaccagtaaatttgagcacctcaggacgccgaacccccggcaatcagacacccgttatgccttctgcaagtccgatcctgcacagccaaggcaaggagaaggccgtgtccaataacgtcaatcccgtaaagacccagcatcacagtcatccagctaagagtcttgtggaacagttccgaggcaccgacagcgacatcccatcaagtaaggactccgaggacagtaacgaagacgaggaagaggacgatgaggaggaggatgaagaggatgacgaggatgacgagagcgatgatagtcagagcgaatccgactctaattccgagagcgacactgaggggtccgaagaagaggatgacgatgacaaggatcaggatgagagtgattccgacactgagggagagaagacaagcatgaaactgaataagaccacatccagtgttaagtccccgtcaatgtcgttaactggccattctacccccaggaacctgcatattgcaaaagcccccggcagtgcccccgccgccttatgcagcgagagccagtctcctgccttccttggcacctccagttctacactgacctcgtcgccccactcagggactagcaaacgacggagagtcactgatgagagggagttgagaatacctctcgagtatggttggcagcgtgagacccgcatacgaaactttggtggccgcttgcagggggaggtagcctattacgcaccttgcggcaagaagctgcgccagtatcccgaagtcatcaagggaatgcagtggtgcctgttaaaagaggaagatgtcataccaaggattcgggccatggagggacgccgcgggcgcccacccaatccggatcgccaaagggcacgtgaagagtcccgcatgaggcgtcggaaggggcgtccaccaaatgtgggaaatgcagagtttctcgacaatgccgatgctaaactgctgcggaagctccaagcccaggagattgccaggcaggccgcgcaaatcaagctgctccgcaaactacaaaaacaggaacaggcacgcgttgcaaaagaggcgaaaaagcaacaagccataatggcagccgaggagaagcggaagcagaaagaacagattaaaatcatgaagcaacaagagaaaattaaacgtatacagcagatcagaatggaaaaggagctaagagcccagcaaattctagaagccaagaaaaaaaaaaaggaggaggccgctaacgccaagctgcttgaagctgaaaaaagaattaaagaaaaggagatgcgaagacagcaggccgtgttgcttaaacatcaggagcgtgagcggcgtcgccagcacatgatgctgatgaaggcaatggaggcgaggaagaaggcagaagaaaaagagcgactgaagcaggaaaaaagagacgagaagagactgaacaaggagcggaaattagagcagaggcgtctggaactggaaatggcaaaggagctgaagaagcctaacgaggacatgtgtctcgcggatcaaaaacctctccctgaattgcctagaatccctggcctcgtcttgagtgggtcaacattttccgactgtcttatggtggtacaattcctgcgtaatttcgggaaagtacttggcttcgacgtgaacattgacgttccaaacctttcagtcttacaggagggcttgttgaacatcggggatagtatgggagaggttcaggacctgctggtgcggttgctgagcgctgctgtatgtgatccaggactaattacaggctataaagccaagacagccctgggcgagcaccttcttaatgtgggggtgaatcgggacaatgtgagcgaaatcctgcagatatttatggaagcccattgcgggcaaactgaactgactgagtctcttaagaccaaggcgttccaggcccacacaccggcccaaaaggcatccgttctggctttcctgatcaacgaactggcttgttccaaatcggtggtgtcagagatcgacaagaacatcgattacatgtcaaatctgcgaagggataaatgggtggtggagggcaagctcaggaaactgcggattattcacgcaaagaaaaccgggaagagagacacatcgggcggcatcgacctgggcgaagagcagcacccactgggcacgccgactcctggccggaaaaggagaaggaagggtggtgattccgattatgatgacgatgatgacgatgattccgatgatcagggtgatgaagatgatgaagacgaggaggacaaggaggacaaaaaaggaaagaaaaccgatatctgtgaggacgaggatgagggcgaccaggcggctagcgtagaggaactggagaaacaaatcgagaagctgagcaagcagcagtcccagtaccgcagaaagctattcgatgctagccacagtctgcggtctgtgatgttcggacaggaccgctatcgtcgtcggtactggatcttgccgcaatgtggagggatcttcgtagaaggcatggagagcggggagggcttggaggagatcgctaaagagagggagaaattaaaaaaggccgagagcgtgcaaataaaggaagaaatgttcgagactagcggcgattcactcaattgtagcaataccgatcactgcgagcagaaagaagacttgaaagagaaggacaatactaacctctttcttcagaagcctggcagttttagcaaactgtcaaagcttctcgaggtggcaaagatgccacccgagagtgaggtcatgacccctaaaccgaacgctggcgccaacggatgtacactatcttaccagaacagcggcaaacattccctggggtcggtccagagcacagccacacaatctaatgtggaaaaagctgactctaataatctgttcaacaccggcagctccggccccggcaagttttactctcctctgcccaatgaccagctgcttaagacattgaccgagaagaaccgacagtggttctccctgttgccaagaaccccatgcgatgatacgtcactcacgcatgccgatatgtctaccgcgagtctagttaccccccagtcacagcccccatccaagagcccttcacctacaccggctcccctgggatcatctgctcagaacccagtcgggctgaatccgttcgccctgtctcccctccaggtgaagggcggcgttagcatgatggggctacagttctgcggctggcctacgggtgtggttacatcaaacatacctttcaccagctctgtgccatcactgggctctggactgggactgagcgaaggaaacggcaacagctttctgacttcaaatgtggcctcttcaaagtcggaatctcccgtgccacaaaatgagaaggccacttccgcacagccagctgcagtcgaggttgctaaacctgtcgactttccctctcctaagcccattccagaagagatgcagttcgggtggtggaggattattgatcctgaagatctgaaggcgctcctgaaagttttacacctgaggggcattcgagagaaagcgctgcagaagcaaattcagaagcacctggactacattactcaggcatgcctgaagaataaagacgtcgcgatcatagagcttaatgaaaacgaggaaaatcaggtgacccgcgacatcgtcgagaactggagtgtggaggagcaggccatggagatggatctgtctgtcctccagcaagtggaggacctggagaggcgcgttgcctctgccagtcttcaggttaaaggttggatgtgccctgagccagctagtgagcgtgaagacctagtgtatttcgagcataaatccttcaccaaattgtgcaaagagcatgatggcgagttcacgggagaggatgagtcctcagctcacgctctggagcgcaagagcgacaaccccttggacatcgccgtaacccgcctggcggatctagaacggaatatcgagagaaggattgaggaagatatcgctcccggcttgagggtttggcgaagggccctgtctgaggcaagatccgccgcccaagtggccctgtgcatacagcagctccaaaagagtatcgcatgggagaagtccatcatgaaggtgtactgtcagatctgccgaaaaggggataatgaggagctccttctgttgtgcgacgggtgcgacaagggttgccacacttactgtcatagacctaaaatcaccaccatcccagatggggattggttctgtcccgcttgcatcgccaaggctagtggccagaccttgaaaatcaaaaaactgcacgttaagggtaagaaaaccaacgagtcaaagaagggcaagaaggtgacgctgaccggagataccgaagatgaggattctgcttcaacctcatcctcactgaaacgggggaacaaggatctgaaaaagaggaagatggaagagaatactagtatcaatctctccaagcaggagtcctttacgagtgtgaagaaacccaagcgagacgactcaaaagatctggccctctgcagcatgattcttacagagatggagacccatgaggatgcctggcctttcctcctgccagtgaacctgaagctcgtgcccggttacaaaaaggtcatcaagaagccaatggacttctctaccatcagggagaaactgtcttccggacaataccctaatcttgagacattcgcgttggatgttaggctggtctttgacaattgcgagacctttaacgaagatgacagcgacatcggccgggcgggacataacatgagaaaatactttgagaaaaaatggaccgacacttttaaggtcagttag

SEQ ID NO: 109985 - DNA, 6507 bp, synthetic construct
  misc_feature 1..6507: note = Description of Artificial Sequence: Synthetic coding sequence
  source 1..6507: mol_type = other DNA
atggagagtggtgagagactgccatcttccgcggcaagctcgactactccaacgtccagcagcaccccatccgtcgctagcgtcgttagcaaggggggcctgtctactggggtagcctctttatcgtcaacaattaacccctgcggccatctcttcaggacagctggagaccagccctttaatctgagcaccgtgagctccgccttccccatggtaagccacccagtctttggcttacatagcgccagttcaggacattctgaattcggtggattgggcactttaggaacgccgaccgcactggctgcacacccccagctagcttcctttcctggggccgagtggtggcggactaccgacgcgcatacaaggacaggagctacatttttcccgcccttactaggtataccgcccctttttgcaccaccagcccagaaccacgattcatcctcctttcactcacggacaagcggaaaaagtaatagaaacggccctgagaagggtgttaatggatccatcaatggcagcaacacgagttcagtgatcggaataaatacatccgtgctttcgactacggcctcttcaagtatgggacagacgaagtctacctctagcggcggtgggaatcgaaagtgtaatcaggagcagtccaagaaccagcccctggatgcccgagtagataagatcaaggacaagaagcccaggaagaaagcaatggaatcctcatctaactccgactccgattcaggaacttcttcagacaccagtagcgaaggtatttcatcttcagactcggatgacctcgaagaggacgaagaggaggaggatcagtccattgaagagagcgaggacgacgacagcgatagcgaatcggaagctcagcataagtccaataatcaggttctgctccacgggatcagcgatcctaaagcagatgggcagaaggctacagagaaggcgcaagaaaagcggatccaccagccgttgccattggcttcagagtcacaaacccacagctttcagtcccagcagaagcagccccaagtgctgtcgcagcaactgcctttcatcttccaaagctcgcaggcaaaagaagaatctgtgaacaagcacacgagcgtaattcagtcgaccggacttgtgtcaaacgttaagccattaagcctggtgaaccaggctaaaaaggaaacatacatgaaactgatcgtgccttccccggatgtgcttaaagcagggaataaaaacacgtctgaggagtcctccctcctgaccagcgagctccgatccaagagagagcagtacaaacaggcctttccatcacagctgaagaagcaggagtcttccaagtctcttaagaaggttatagccgcgctctctaacccaaaagccactagcagctcacctgcccatcccaagcagaccctagaaaacaatcatccaaacccatttctgactaatgcattactgggcaaccaccagcccaatggcgtgatccagtctgtgatccaagaggccccattggccctaacgacaaaaaccaagatgcagtcaaagatcaatgagaatattgctgctgcctctagcactcccttctccagtccggtgaatctgtcaacgtccgggagacgcacacccggcaaccaaacccccgttatgccatccgcaagccccatcctgcatagccagggcaaagagaaagccgttagcaataacgttaatccagtcaaaacacagcaccactcccatcctgccaagtcactggtggaacagtttagggggactgattcagatatcccctccagcaaggactccgaggattccaatgaggacgaagaggaagacgacgaagaggaggacgaagaggacgacgaggacgacgaatctgacgactcccaatctgaatcagattccaatagcgaaagcgacacagaggggagcgaggaagaggacgatgatgacaaagaccaggacgagagtgacagtgatactgaaggagagaagacatcaatgaagctgaacaagacaaccagctcagttaagtcaccctctatgagcttgaccgggcattccacgccaaggaacctccacattgcaaaggcaccaggatcggctcctgccgcgttgtgctccgagagccaatcaccggcttttctcggcacctccagttccacgctgacctcatctccgcacagtggtacatcgaaaagaaggagagtgactgacgagagggagttgcggatacccctggagtatggatggcagagagaaacgcgtattagaaacttcggcggtcgattgcaaggggaagtggcctactacgcaccctgcggcaagaaacttaggcagtacccggaagtaatcaagtatctgtcccggaatggcatcatggatattagccgggataattttagtttttccgcaaagatccgagtcggcgacttttacgaggcacgggatggcccacagggcatgcaatggtgcctgctgaaggaagaggatgttatcccgagaatcagggcgatggaggggcgtcgtggtaggccacccaatcccgatcgccagcgggctagggaagaatcaaggatgagaaggcgaaaggggagaccacctaatgtgggaaacgccgagtttttggacaatgccgacgcgaagctgctacgcaaattgcaggcccaagaaatcgccagacaggcggcgcaaatcaagttactgaggaaacttcaaaaacaagaacaggccagggtggctaaagaggccaaaaagcagcaggcaatcatggccgcagaggaaaaacgtaaacagaaagagcagatcaaaattatgaagcagcaggagaagattaaacggatccagcagattcggatggagaaggagctccgcgctcagcaaatcctggaagcaaagaaaaaaaaaaaagaagaagcagcaaacgccaaactgctggaagccgaaaaacggattaaggaaaaagaaatgagaagacagcaggcagtcctccttaagcatcaagagagggaacggaggcggcagcatatgatgcttatgaaggccatggaagctcgcaaaaaagctgaggagaaagaacggcttaagcaagagaaaagggacgaaaagaggctgaataaggaaagaaagctggaacaaaggagactggagctagaaatggcaaaagagctcaagaaacccaacgaagatatgtgtctggctgatcagaagcccctccccgagttaccccgaatacctggccttgtcttgtctggcagtacgttcagcgactgtctgatggtcgtgcaattcctgcgcaatttcggaaaagtcctggggttcgacgtgaacatcgatgtccccaatctgagcgtgctgcaggagggtcttctcaacatcggggacagtatgggcgaagtccaggatctgctcgttcgcctgctctctgcagccgtgtgtgatcccgggctgatcactggatacaaggccaagaccgctctcggcgagcatctcctgaatgtcggagtcaatcgtgacaacgttagcgaaatcttacagatcttcatggaagcccattgtgggcagaccgaattgaccgagtctctgaaaacaaaagcattccaagcccataccccggcgcagaaggcaagtgtgcttgctttccttatcaatgagctcgcatgttctaagagtgtggttagtgaaattgacaagaacattgactacatgtctaatctgagaagagataagtgggtagtggaaggaaaattacgcaagctcaggataattcatgcaaaaaaaacaggcaagcgcgacacgagcgggggaatcgacctgggcgaggaacaacaccctctgggcacaccaactccaggcagaaagaggagacggaaaggtggtgactccgactatgatgacgacgatgacgacgacagcgacgatcagggagacgaagatgatgaagatgaagaagataaagaggacaagaagggcaaaaaaacagatatctgtgaggacgaggacgagggagatcaggccgcttctgtcgaggaacttgagaaacagatcgagaagcttagtaaacagcagtcgcagtatcggcggaaattgttcgatgcatcacacagtcttaggtcagtgatgtttgggcaggaccgctatcgtcgccgatactggattctgccacagtgtggggggattttcgtggaggggatggagtctggcgagggtctcgaagagatcgccaaagagcgagagaagctcaagaaggccgagtctgtgcagatcaaggaagaaatgtttgagaccagcggagattctcttaactgttccaacactgatcactgcgaacaaaaggaggatctgaaggaaaaggataatactaacttgttcctgcagaagccaggatccttttccaagctttccaagctcctggaggtggccaagatgcccccagagtcagaggtgatgacaccgaaaccgaacgctggagccaacggatgcacactctcttatcagaacagtggcaagcacagtctgggatcagtgcagtccaccgccacacagagtaacgttgaaaaggcagattctaacaacctgttcaatacagggtcaagcggacccggcaaattttatagccccctgcccaatgaccagctgctgaagacattaacagaaaagaatcgacagtggttttccctgttacctcggacaccttgcgacgacaccagcctaacccatgctgatatgtcaacagcttcgcttgtaacaccccagagtcagcctcccagtaagagtcctagcccaaccccagctcctctcgggtcttctgcgcagaatccagtcgggctcaacccatttgccctgtcaccactgcaggtcaaagggggcgtctcaatgatgggtttacagttctgcgggtggccaactggggtggtgaccagcaacataccatttacttcctctgtcccttcactcgggtcaggcctcgggctgagtgagggcaatggcaatagtttcctaacaagcaatgttgcctcttccaagagcgagtctcccgttcctcagaacgaaaaggctacttcggcccagccggcagccgtggaggtggctaagcctgtagattttcccagtcctaaaccaattccagaagagatgcagtttgggtggtggcggatcatcgaccccgaagaccttaaggccttgttaaaagtgctgcacttacgcggcattagagaaaaggctctgcagaaacagattcagaagcatctggattacattacccaggcttgtttgaaaaacaaggacgtggccattattgagttgaatgaaaatgaagaaaaccaggtcactagggatattgtggaaaattggagtgttgaagagcaagctatggaaatggacctctccgtcctgcagcaggtggaagacctggagagaagggttgctagcgctagcctgcaagtgaagggatggatgtgccccgagcccgcctctgagagggaggacctggtgtattttgagcataagtccttcaccaaactgtgcaaggagcatgatggagagttcaccggagaagatgaaagcagtgctcacgccctcgaacgcaaaagcgacaaccccttagatatcgcagtaactcggttagcagacctggagagaaatatagaaagacgcattgaggaagatattgcccccggcctccgggtgtggcggcgtgccctgagcgaagcccgctctgcagcccaagtcgcgctgtgtatacaacagctgcagaaatctatcgcatgggaaaagtcgattatgaaggtgtactgtcagatctgcaggaagggcgataatgaagaactgttactcctctgtgacggatgtgataaagggtgtcacacatattgccatcggccaaagatcacaaccattcctgacggagattggttctgccccgcttgcattgctaaagcttcgggccagacgctgaagatcaagaagctccacgtaaaaggcaagaaaaccaacgaaagtaaaaaagggaaaaaggtaacgctgactggcgataccgaagacgaggattccgccagcacatcttcatcgttgaaaaggggaaacaaagaccttaagaaaaggaagatggaagaaaatactagcattaatctttctaagcaggagtcctttacctcggttaagaagccgaaacgcgacgatagcaaagaccttgcactctgctcaatgatcctgacagagatggagacgcacgaagacgcctggcccttcctcctccctgtgaacctgaagctggtgccaggctacaagaaagttatcaagaaaccaatggatttctctactatcagggagaagctgtcaagcgggcagtatcctaacttggaaacattcgcccttgacgtccgcctggtttttgacaactgcgagactttcaatgaagacgattcagacatcggcagagcaggccacaacatgcgcaaatactttgagaaaaagtggaccgacacatttaaagtgagctag

SEQ ID NO: 109986 - DNA, 432 bp, synthetic construct
  misc_feature 1..432: note = Description of Artificial Sequence: Synthetic coding sequence
  source 1..432: mol_type = other DNA
atggagtccggggagagacttccttcctccgcagccagctccaccacccccacaagctcctcgactccctccgttgcaagtgtggtttctaaaggtggactatccactggggtcgctagcctgtcttcaacaatcaacccgtgcggacacctctttcgcactgctggcgatcagccatttaatctgagcactgtgtccagcgccttcccaatggtttctcacccggtgttcggattgcactccgcttctagcggccatagtgaatttggcggtctgggaacactcggcaccccaacagcactggcagctcaccctcagctggccagctttcctggagctgagtggtggagaacaaccgatgcacacacccggacaggtgctacatttttcccaccactcctgggaatacctccactgtttgccccaccatag

SEQ ID NO: 109987 - DNA, 1563 bp, synthetic construct
  misc_feature 1..1563: note = Description of Artificial Sequence: Synthetic coding sequence
  source 1..1563: mol_type = other DNA
atggaatctggagaacgcctgccatctagcgccgctagctccacaactccaaccagttctagtaccccttcggtcgcttctgttgtcagcaagggcggcctcagcactggggtggcaagcctttcatctacaatcaatccctgcggggcagagtggtggaggacgactgacgcgcacacacggacaggcgccactttttttcccccattgctgggtatcccacctctgtttgccccaccagcacaaaaccacgactcaagctctttccacagccgaacctcagggaagtcaaaccgaaatgggcctgaaaaaggggttaatgggtctattaatgggtctaatacttcttcagtgatcggaatcaacacttccgttctgtccacaactgcgtcgagtagcatggggcaaaccaaatccacaagctccggcgggggaaaccgcaaatgtaaccaggaacaaagtaaaaatcagccattggacgctcgagtagataagattaaggacaaaaaaccacgaaaaaaggccatggaatcatcatccaattccgatagcgacagcggtacgtcttctgatacttctagcgaaggaattagctctagtgatagcgacgacttagaagaggacgaggaggaggaggaccagtcgatagaagaatcggaagatgacgactcagacagcgaaagcgaagcacagcacaaatctaacaatcaagtgctgctgcatggaatcagcgaccccaaggcagatggtcaaaaggctaccgagaaggcgcaggagaaaagaattcatcagccacttcctttggcatctgagtctcagacccattcctttcaatctcaacagaagcagccccaggtgttgagccaacagctgccattcattttccagtccagccaggccaaagaggagtcagtgaataagcacacctccgttatccagtccactggattggtatcaaacgtgaaacctctaagcctcgtgaatcaggctaaaaaggaaacctatatgaagttaatagtgccctcacccgatgttctcaaagcaggtaataaaaataccagtgaagaaagcagcctcctgacctcagagctgcggtcaaaaagagagcagtataaacaagcgtttccatcacagctaaagaagcaagagtcatccaaaagcttgaagaaggtgatagctgccctttccaacccaaaagctacttcctccagcccagcacacccaaaacaaaccctggagaacaaccatcccaaccccttcttgacaaatgcactgctgggtaatcaccagccaaacggtgtcatccagagtgtgattcaggaggcacctctagcgttgactactaaaacaaaaatgcaatcaaagatcaatgaaaatatagcagcggccagtagcaccccattttcctctccagtgaatctgagtaccagcggcaggcgcacccctgggaatcagaccccagtgatgccatcagcgtcaccaattctgcatagccaggggaaggaaaaggctgtatctaacaacgtaaacccccgtaaaatgatgaagaagaaaatgcggtag

SEQ ID NO: 109988 - DNA, 3645 bp, synthetic construct
  misc_feature 1..3645: note = Description of Artificial Sequence: Synthetic coding sequence
  source 1..3645: mol_type = other DNA
atgggggtggattttgatgtgaagacattctgtcacaacctccgggcgacaaagccaccatatgaatgcccagtggagacatgtaggaaggtctataaaagctacagtgggatcgagtatcacctgtaccactacgatcacgataatcccccgccccctcagcagacccccctgcgaaaacacaaaaagaaaggacgacagagtcgacctgcaaacaagcagagtccatcaccttctgaagtgtcccaaagtcccggacgtgaagtgatgtcctacgctcaggcacagcgcatggtcgaggtggatctccatggacgcgtacatagaatctccatcttcgataacttggacgtagtcagcgaagacgaagaggcccctgaggaggcacctgaaaacggctccaataaagaaaataccgagactcccgccgctacacccaaatctggtaagcacaagaataaagaaaaaagaaaggactctaaccatcatcatcaccataacgtctccgcgagcacaacacctaagcttcccgaagtggtgtatcgggagttagaacaggacacgcctgatgctccccctaggccaactagttattatagatatattgagaaatcagccgaagaactggacgaagaagtggaatatgatatggacgaagaagattatatctggcttgacatcatgaacgaacggaggaagacagaaggtgtgtcaccaattcctcaagagatctttgagtatctcatggatagattagagaaggagagctactttgaatcccacaataagggcgatccaaatgctctggtggatgaggacgcagtgtgctgtatttgtaatgatggagagtgccagaactccaacgttatcctgttctgtgatatgtgtaatctcgctgttcatcaggaatgctacggggtgccatacattcccgagggccaatggctttgcaggaggtgcctccaatccccatctcgcgccgtcgactgtgccctttgtcctaacaaaggcggggccttcaaacagacagatgacggtcgctgggctcacgtggtgtgcgctctgtggattcccgaagtttgctttgctaatacagtattcctggagcccatagactctatagagcatattcctcctgcgcggtggaagctgacctgctatatttgtaaacagcggggcagcggagcttgcatccagtgtcataaagctaactgctatacagcttttcacgtgacatgcgctcaacaggcagggctatacatgaagatggaacccgtgcgtgaaaccggagcgaacggtacctcgttttccgtgcggaaaactgcatattgcgatattcacacacctcctggaagtgctcgaagattaccagccctgtcccattccgagggtgaagaagacgaggacgaggaagaagacgagggcaaaggatggtcaagtgaaaaagttaagaaggccaaagcaaaatcacgtataaagatgaagaaggcacgtaagatcctggccgagaaaagggccgcagcaccggtggtctccgtgccttgcattcctccccatagattgagcaagatcacaaacaggctgacaatacagcgtaaatcacagttcatgcagaggctccacagctactggacactcaagcgacagtcaaggaacggggtccctctgttaagacggttgcagactcatctgcaatcgcagagaaactgtgatcaggttggccgagacagcgaagataaaaattgggccctgaaggagcagctgaaatcttggcaaagactgagacacgatctggagagagccaggttgcttgtagaactgatacggaagcgtgagaaactcaagcgtgagaccatcaaagtgcagcagatcgccatggaaatgcagctgacaccgtttctgattttacttcgcaaaacactcgagcaactgcaggagaaggacacaggcaacatcttttcagagccagtaccactgagcgaggtacccgattacctcgatcacattaagaaacctatggattttttcactatgaagcagaacttggaggcttatagatatttgaactttgatgactttgaggaggactttaacctgattgtgtctaactgcctgaagtacaacgcgaaagacactatcttctacagggctgcagtgagacttagagagcaaggcggtgctgttctgcgccaggcacgccgtcaggccgagaaaatgggaattgactttgaaacgggaatgcacataccgcattcgctcgcaggcgatgaggcaacccatcacacagaagatgcagccgaagaggagagactggtgttactcgagaatcagaaacatctcccagtggaagagcagctcaaactccttctggagagattggacgaggtcaacgctagcaaacagagcgtgggccggagccgcagggcaaagatgattaaaaaggaaatgaccgccctgagaaggaagctggctcatcagcgggaaaccggtcgcgacggcccagagcgtcacggcccctccagtagaggttctctaaccccccaccctgcggcctgcgacaaagacgggcaaactgacagcgctgctgaagagagttcctctcaagaaacatccaaggggctaggcccgaatatgtctagcaccccagctcacgaggtcgggcggaggactagtgtcctgtttagtaaaaaaaaccctaagaccgctgggccacccaagcggccgggtcgcccaccaaagaaccgcgaaagccaaatgacaccatctcatgggggatcccccgtgggaccaccccaactgccgatcatgtcgtctttgagacagcggaaaagaggacgcagtcccaggccctcctctagctctgactccgacagcgataaaagcacagaggacccgcccatggacttacctgccaacggattctcgggaggcaaccagcctgtgaagaaatccttcctcgtgtatcgcaacgactgcagtctcccccggtcgagcagcgacagtgaatcctcttctagcagctctagctcagctgcttcggaccgcaccagtacaaccccgtctaaacagggccggggcaagcctagcttttcacgcgggacctttccagaggatagctccgaagatacctcaggcaccgaaaatgaggcttactccgtagggaccggacgcggggtagggcactcaatggtgcggaagtctctcggcagaggcgccggttggctctctgaggacgaggacagtcccctcgatgcactcgacctagtttgggcaaaatgcagaggatacccttcctacccggctcttatcatcgatccgaagatgccccgggagggaatgtttcaccacggggtcccaatccctgtgccacccctagaggtcctcaagctcggcgagcagatgacacaggaagcgcgagaacacttgtacctggtgctgttcttcgacaataaacggacatggcagtggctcccccggacgaagttagtgccactgggtgtgaaccaagatctggataaggagaaaatgttagagggtcgcaagtcgaacatccgcaaaagtgtgcagattgcctaccaccgggcgcttcagcacaggtctaaagtgcagggcgaacaatcgtcagaaacctcggacagcgactag

SEQ ID NO: 109989 - DNA, 3663 bp, synthetic construct
  misc_feature 1..3663: note = Description of Artificial Sequence: Synthetic coding sequence
  source 1..3663: mol_type = other DNA
atgggcgttgacttcgatgtgaaaactttttgccataacctgagggctaccaaacccccctacgagtgtcctgtggaaacatgtcgaaaggtgtataaaagctatagcggcattgagtatcacctgtatcactatgatcatgataatccgccgcccccacaacaaacccctctgagaaaacacaaaaaaaagggtcgtcaaagtaggccagcaaacaagcaatctccaagcccgagcgaagtaagccaaagccccgggagagaggtgatgagctatgcccaggctcagcggatggtggaggtggacctgcacggtagggtgcatcggatctctatttttgacaacttggacgttgtttctgaagacgaggaagctcccgaggaggcccccgaaaacggttccaacaaagagaataccgaaactcccgcagcaacccccaagtccggtaaacacaaaaataaggagaagagaaaggactctaatcaccatcaccatcacaacgttagtgcttccactacacccaagctgcctgaggtggtatacagagagctagaacaggacacccctgacgctcccccccgccctacttcatattataggtacatagagaagtcggccgaagagctagatgaggaagttgagtacgacatggatgaagaagattatatttggctggatatcatgaatgagcgccgaaaaactgagggggtttcacctatccctcaggaaatcttcgagtacctgatggaccgactggagaaagaaagttacttcgagtcacacaataagggtgaccccaatgcattggtcgacgaagatgccgtatgctgcatctgcaatgacggcgagtgccaaaatagtaacgtgatactgttttgtgacatgtgtaacctggcagttcaccaagaatgttacggagttccgtacataccggaaggccagtggctgtgtagacgctgtctgcaaagtccctccagggccgtggactgcgccctgtgtcctaacaagggcggagcattcaaacagacagatgacggccgctgggctcatgtggtgtgcgccctctggataccggaagtctgctttgcgaacaccgtctttctggagcctatcgatagcatcgaacacataccacccgccagatggaagctgacatgctacatctgcaagcagcggggctccggggcctgcattcagtgccataaagctaactgctacaccgctttccatgtgacttgtgcacaacaagccgggctgtatatgaaaatggaaccggtgcgggagaccggcgccaatgggacaagtttttccgtgagaaagactgcctactgcgatattcataccccaccaggaagtgctagacgcctacccgcactgtcccactctgaaggcgaggaggacgaagacgaagaggaggacgaggggaaagggtggtcctccgaaaaggtcaagaaagctaaagcaaaatcaaggattaaaatgaaaaaggctagaaaaattctggccgagaagagggccgcggctccagtggtctcggttccttgcattccaccccaccgcctgagtaagatcacaaatcgcttaacaatacagagaaaaagccaattcatgcagagactccacagttactggacgctgaagcgtcaatccagaaacggcgtgcctctgcttcggagactccagacgcatctgcaaagccagcgtaattgcgaccaggtaggacgcgacagcgaggacaaaaattgggcgctaaaggagcagctcaaaagttggcaaaggcttagacacgacctggaaagagctcggctgctagtggaattaattagaaagcgcgagaaacttaaacgagagaccattaaggtgcagcagatcgcgatggagatgcagttgacaccctttctgattctcctgagaaaaaccctcgagcagctgcaagagaaagacaccgggaacattttttccgaacccgttccactgtccgaggttacagaactggacgaggtgcctgattacttggaccatattaagaaacccatggatttcttcacaatgaaacagaacctcgaggcctaccgatacttgaattttgatgattttgaagaagatttcaacctcattgtgtcaaactgtctgaagtataatgccaaggatacaattttctatcgcgccgcggtccgcttacgtgagcaggggggtgcggtgttgcgccaagcacgaagacaggcagaaaaaatgggaatcgacttcgagaccggcatgcacataccacacagtctcgccggtgatgaggcgacacaccatacagaagacgcggcggaagaggagaggctggtgctgctggagaatcagaaacatctgccggtagaggaacagctcaaactgttactcgagcgacttgacgaggttaatgcctcgaaacagagtgtcggacggtccagaagagcaaaaatgatcaaaaaagagatgacagccttacgtcggaaactggcgcaccagcgggagaccgggcgcgatggaccagagagacatggaccgtcaagtaggggctcccttacaccccacccagcggcttgcgataaagatgggcaaaccgactcagccgcagaggagagttcttcccaggagaccagcaaaggattgggcccaaacatgagctccactccggcgcacgaagtcggtcgccgcaccagcgtgttgttctccaaaaagaaccccaagacggcagggccgcccaaacgccctggccggccgccaaagaatcgcgaatcacagatgacgcccagccacggaggcagtcctgtgggtcccccccagctgccaataatgagctcactgcgtcagcgcaaacgcgggaggagtccacgaccttcatcatcctcggacagcgattctgataagtctacagaggaccctcctatggatctgcccgccaatggcttttcaggaggaaatcagcctgttaaaaagagcttcctggtgtatagaaatgattgctcacttccacggtcctcctcagactccgaatcatccagctcctcttccagcagtgcagccagcgaccgcactagcactaccccaagcaagcagggtagaggcaaaccctctttcagcagggggaccttccccgaagactctagtgaagatacatccgggacagaaaatgaagcttactccgtggggaccggacgaggcgtgggtcatagcatggtgagaaaatctcttgggaggggagccgggtggttaagcgaagacgaagactctcctctggacgcacttgatctggtgtgggccaaatgccgtggatatccatcttaccctgccttgataattgatccaaagatgccacgagaaggcatgttccatcacggagtgcccattccggtgccacccctggaggttctgaagctcggagagcagatgacccaagaggccagggagcatctgtatctggtgctgttttttgataacaaaagaacctggcagtggttacctaggaccaaactagtgcctctaggggtcaatcaggatctggacaaagagaagatgctggaaggacggaagagcaatatcaggaaatctgtgcagatagcataccacagagccctacagcacaggagcaaggtgcaaggggaacagtcctctgagactagtgatagtgactag

SEQ ID NO: 109990 - DNA, 303 bp, synthetic construct
  misc_feature 1..303: note = Description of Artificial Sequence: Synthetic coding sequence
  source 1..303: mol_type = other DNA
atgggcgtcgactttgatgtcaagaccttctgccataacctacgtgcaacgaaacccccgtatgaatgcccagtggaaacctgccgaaaagtctataagagctactccggcatagagtaccacctgtatcactacgatcatgataatccgccaccccctcaacagacccctttgagaaagcataagaaaaaaggcaggcagtcccgccccgccaacaaacagtcaccgtccccttccgaggtgtcgcagtctcccggcagggaggtcatgagctatgcccaggcacagcgaatggttgaatag

SEQ ID NO: 109991 - DNA, 318 bp, synthetic construct
  misc_feature 1..318: note = Description of Artificial Sequence: Synthetic coding sequence
  source 1..318: mol_type = other DNA
atgggcgtggatttcgatgtgaaaacattttgccacaatctgcgggctactaaacccccttatgaatgtcccgtggagacttgccgaaaggtgtataaaagttacagcggcatcgaatatcatctataccactatgaccacgacaaccctcccccaccccaacagacacctctaagaaagcataagaaaaaaggcagacagtcccgccccgcgaacaaacagagccccagccccagtgaagtatcccaaagtcctggcagagaggtcatgtcctatgcacaagctcagagaatggttgaggtggacctgcatggttag

SEQ ID NO: 109992 - DNA, 3645 bp, synthetic construct
  misc_feature 1..3645: note = Description of Artificial Sequence: Synthetic coding sequence
  source 1..3645: mol_type = other DNA
atgggcgtggactttgatgttaagacgttttgtcacaatctccgcgctaccaagcctccttacgaatgtccagttgagacctgtcggaaagtttacaaatcatattctgggatcgaataccacctctatcattacgatcacgataaccctccacccccacagcaaacgccgttgcgcaaacataagaagaaaggccgacaatctagacccgccaataagcagtcaccttctccaagcgaagtctcccaatcgccgggccgggaagtaatgagttatgcacaggcccagagaatggtagaggtcgatctccacgggcgtgtgcaccgcataagtatttttgacaacctggatgtggtcagcgaggacgaggaggctcccgaggaggcacctgagaacgggtctaacaaagagaacacagagaccccagcagcaacaccaaaaagcgggaagcataaaaataaggaaaaacgcaaagattcaaaccatcaccatcaccacaacgtctctgctagtactacacccaagttaccggaggtcgtataccgcgagctggaacaggatacacccgatgcacccccaaggcctacctcctactatagatatatcgaaaaatccgcagaggagctcgacgaagaggtggagtacgacatggatgaagaagactacatctggttggacattatgaacgagagaagaaaaacggaaggggtgagcccgatcccccaggaaatcttcgaatacttaatggacagactagaaaaagaatcctacttcgagagccataataaaggtgaccctaacgcactggtagacgaagacgccgtgtgttgtatctgtaatgacggcgagtgtcaaaacagtaatgtgatcctgttctgtgacatgtgcaaccttgcagtccatcaggaatgttacggggttccttacatccccgaaggtcaatggctttgccgaagatgcctgcagtctccttccagagcagtggactgtgccctgtgccccaataaaggcggggcttttaaacagaccgatgatggccggtgggctcatgtcgtgtgcgcactgtggattcccgaggtctgcttcgccaacaccgtcttcctagagcccatcgattcaatcgagcatattccccccgcaaggtggaagttgacctgttacatctgcaagcagcgcggtagcggcgcatgtattcagtgccacaaggcaaattgctacacagccttccacgtaacatgcgctcagcaagctggcctgtacatgaagatggagcccgttcgggagactggagctaacggcacctctttctccgtaagaaagacggcttactgtgacatacatactcctccagggagcgcaaggcggctccccgctctgtcacacagcgagggtgaggaggatgaggatgaggaggaggatgagggcaagggctggagttcagaaaaggtgaaaaaagccaaggctaagagcagaataaagatgaagaaggcccgcaagatcctggctgaaaaaagagccgccgcccccgtggtgtcggtgccctgcatacctccgcacagactgtcgaaaatcactaatcgcctgactattcagcgcaagagtcagttcatgcaacgtcttcactcctattggactttgaaacggcaaagtaggaacggggtgcccctactgcgtcgcctgcagactcatctacagagtcagaggaattgcgatcaggttggccgggatagtgaggataagaattgggccctaaaggaacagctgaagagctggcaacgactcagacatgacttggaaagagcaaggctgctcgtggagttgattcgcaaaagagaaaaattaaagcgggagacaataaaagttcagcaaattgctatggaaatgcagctgacaccatttttgattctcctcagaaagacgctagaacagctacaggaaaaggacacgggaaatattttctccgaacctgtccctttgtctgaagtcccagactacctggatcatattaaaaaaccaatggatttctttacaatgaaacagaaccttgaggcctataggtacttgaactttgatgacttcgaggaggacttcaacttaatagtgagcaactgtttgaaatacaacgctaaggataccatattttatagggcggcagtgaggctgcgcgagcagggcggggctgtcctgcggcaggctcgccggcaggccgagaaaatgggcatcgacttcgagactggtatgcatattccacactctttagctggcgacgaagcaactcatcatacagaggacgctgcagaggaagagagactggttctcctggagaatcaaaaacatctgcccgtcgaagaacagctgaagctgctccttgagcgactggacgaggtgaatgcatcaaagcaatctgtgggcagaagtaggcgggccaaaatgatcaagaaagagatgactgccctgcggaggaagttggcacaccagcgggagacgggacgagatggacccgaacggcatggaccctcttcccggggatctctcacacctcacccggccgcatgtgacaaggatggtcagaccgactccgcagccgaagagtccagtagtcaggaaaccagcaaggggttgggtccgaacatgtcttcaaccccagcccacgaggtgggtcggcggacatcagtgcttttttctaaaaaaaaccccaaaactgcaggaccacctaaaaggcctggtaggccacccaaaaaccgcgaatcacaaatgaccccgagccacggaggttcgccggtggggccaccacaactaccgattatgagttctctgagacagcgcaaaagggggcggtctccacgcccctcctccagttcagatagtgacagcgataaaagtaccgaggatccaccaatggatttgccggctaatggcttcagcggggggaaccagcccgtgaagaagtctttcttggtgtataggaatgattgttccttgcctcgttcttcctctgatagcgaatctagctcaagctcgagcagtagcgctgctagcgataggactagcacaacgccgtccaagcaggggagaggaaaaccgagctttagcagaggcacatttccagaggatagctccgaggacacttcaggaaccgagaatgaggcctattccgttggcacgggtagaggcgtgggccactctatggtgcgcaagtccttagggaggggcgccgggtggctgtccgaggacgaagactcacctttggacgccctggatctagtgtgggccaaatgtagaggttatccttcctatcccgcactgatcattgatccaaagatgcctcgggagggcatgttccatcacggggtccccatccccgttcctcccctcgaggttctgaaactgggtgagcaaatgacccaagaagcccgggagcacttatacttggtcctctttttcgacaataaaagaacgtggcaatggttgccccgtaccaagttagtacccctcggcgtcaaccaggatctcgacaaggagaagatgctggagggtcggaaaagcaacatccgaaaatccgtccagattgcataccacagagcgctccagcatcggagcaaggtacagggagagcaatcaagcgagaccagcgatagcgattag

SEQ ID NO: 109993 - DNA, 5409 bp, synthetic construct
  misc_feature 1..5409: note = Description of Artificial Sequence: Synthetic coding sequence
  source 1..5409: mol_type = other DNA
atggccgccgctccaacacagatcgaggcagagttatattacctgattgctcgatttctccagtccggaccctgtaacaagtccgcccaagtccttgtccaggagctggaggagcaccagctcattccacgccgcctcgactgggaaggaaaggagcatcgtagaagtttcgaggatctggtcgccgccaacgcgcacatcccaccagattatctgctgaaaatttgtgagcgcatcggaccgctgctggataaggagatcccgcagagtgtgccaggtgtgcaaaccctcctgggggtagggcgtcagtcccttctgagagatgccaaggactgcaaatccaccctgtggaatggtagtgcatttgcagcgctgcatcgaggccggccacccgaactcccagtaaactatgtcaaaccgcctaacgttgtgaatatcacctcagctcgacaactcacgggatgttcacgttttgggcatatcttcccaagcagtgcctaccagcacattaaaatgcacaagaggatcctgggtcatctgagctccgtttattgcgtggcttttgatcgtagtggccggcgcatatttacaggcagcgacgactgtctggttaagatctgggctactgacgatgggaggcttctcgctacgttgcggggtcattccgctgagatctccgatatggcagtcaactacgaaaatactttgatcgccgctgggtcttgtgacaaggtggtccgagtatggtgcctgaggacctgcgcccctgttgctgttctccaggggcacagtgcttccattacaagtatacagttttgtcctagtaccaaaggaacaaacaggtacctgacatccactggggctgacggcacaatttgcttctggcagtggcacgttaaaactatgaaattccgcgaccgtcccgtgaaattcacagaacgctcccgacctggcgtgcagatcagttgcagttctttctccagcggtggtatgtttatcaccactggcagcactgatcacgtgatcaggatttactatctgggaagtgaggtccctgaaaaaatcgcagagctcgaaagccatactgataaagtagttgccgtccagttctgcaataatggtgactcccttcgcttcgtaagcgggtcccgggacgggaccgcgcgaatatggcagtatcaacaacaggagtggaaaagtatagtcctggacatggccaccaaaatgactgggaataacctgccctctggcgaagataaaataaccaagctgaaagttacgatggtggcatgggataggtatgacactaccgtcatcacagctgtgaataatttcctgttaaaagtatggaattctatcactgggcagctcctccatactctatccggccatgacgacgaagttttcgtgctcgaggcgcatccatttgaccagaggatcatcctgtcagcaggccacgacggtaacatttttatttgggatcttgaccggggcactaaaattaggaactacttcaatatgatcgagggccagggccacggcgcagtgtttgactgcaagtttagtccagacgggaatcacttcgcttgcaccgacagccacggccacttgctgctcttcggcttcggctgtagcaaatactatgaaaaaatcccagaccagatgttcttccatactgattatagacctctaatcagagacgcaaataactacgtgctggacgagcagactcagcaagccccccatttgatgccacctccatttctcgtagacgtggatggaaacccccatcctactaagtttcaacgtctggttcccggacgcgagaattgcaaagatgagcagctgattcctcagcttgggtacgtggcaaatggtgacggagaagtggtagaacaggtgatcggacagcagacaaacgatcaggatgagtctatcctcgacgggataatccgcgagctgcagagggaacaagacctgcgtttgataaacgagggagacgtgccccatctgccagtaaatagggcgtactctgtgaatggcgcgctgaggtcccctaatatggacatcagcagcagtcccaatataagactacgcaggcatagtagccaaatagagggggttaggcaaatgcacaacaacgctccacggagccagatggctactgagcgcgatctcatggcatggagccgtcgggtggtagtcaatgagcttaacaacggagtatcacgcgttcaggaggagtgtcgaacggcaaagggggacatagagattagtctgtacaccgtagagaagaagaaaaagccctcatacactacccagcgcaacgactacgagcccagttgtggccggtccctcaggagaacgcagcggaagcgacagcatacataccagaccaggtccaatatcgagcataactcacaagccagttgccagaattcaggtgtccaagaggatagtgattcttccagcgaggaagatgagacagtgggtacaagtgatgcatcagtggaagatcccgtcgttgagtggcagagtgagagctcttcaagcgattcatcatctgagtattccgactggactgccgacgcgggcattaatctgcagcccccgaaacggcagacacggcagacaacgcgcaagatttgctcttcctctgatgaggagaatcttaaaagcctcgaggagaggcagaagaaaccaaagcagaccagaaagaagaaaggtggcttagtgagcatagctggcgaacccaatgaagagtggttcgcgccccagtggatcttagacaccattcctcgcagaagcccctttgttcctcaaatgggggatgagctgatctatttcaggcaaggacacgaagcttatgtccgtgccgtgcgcaagtctaaaatctattccgtcaacctccagaagcagccctggaacaagatggacctgagggaacaagagttcgtgaagatagtgggtattaaatacgaagtcggaccacccaccctgtgttgtctcaagctcgcttttctcgatccaatctccgggaaaatgaccggagaatctttcagcattaaatatcatgatatgccagacgtgattgacttcttagttcttcaccaattctataatgaggcaaaggagagaaattggcagatcggtgaccggttcaggagcatcattgatgatgcgtggtggttcggcacagtggagagtcaacagccttttcagccagagtatcccgactctagcttccaatgttactctgtccattgggacaataacgagcgtgagaagatgtcaccttgggacatggaaccgatcccagagggtactgccttccccgacgaggttggcgcgggggtccctgtctcccaggaggaacttaccgcgcttctgtacaaaccccaggaaggtgagtggggtgcacattcacgagacgaagagtgtgagcgagtgatacagggcattaaccacttgctcagccttgacttcgctagtccctttgcagtgcctgtggatctgagcgcttatcccttgtactgcaccgtcgtggcataccctactgacctcaacaccatcaggcggaggctggaaaatcgcttttacagaaggatctctgcgttgatgtgggaagtgcggtatatcgagcacaatgcaaggaccttcaacgaacccgatagtcccatcgtaaaggccgccaaaatcgtgaccgacgttctgctgagatttatcggggaccaatcttgtacagacatactcgatacctacaacaagattaaggccgaagaacggaatagcactgatgctgaggaggacaccgagatcgtcgacctggacagtgacgggccaggcaccagtagcgggaggaaagtgaaatgtcgcggccgacgtcagagtctgaagtgcaatcccgatgcctggaagaagcagtgcaaagaactgctgagtctgatttacgaacgagaggatagtgagccctttcgacagcctgccgacctgctgagctacccggggcaccaagagcaggaaggcgagtcttcagagagcgttgtcccagagcggcagcaggatagcagcctctctgaggactaccaggacgtgattgacacccccgtcgatttctccacggtgaaagagaccctagaagccggcaattacgggtcaccgttggagttttataaggacgtacgccagatcttcaataattctaaggcttatacttcaaacaagaagagtcgtatctattctatgatgctcagattgtccgccctgtttgagtcccacattaagaatatcataagcgaatataagtccgctattcagtcacagaagaggcgacgcccgcgttaccgaaagcggctacgaagtagttcctcctctctttcctcatctggagccccgagccccaaaggtaaacagaaacaaatgaaactccaaccaaagaacgatcagaatacctcagtttcacacgcacgtacaagttcccccttcagctctcccgtatccgacgccgccgaaggtctgtcgctttacctcctcgatgacgagcccgacggtccgttttctagctccagctttggtggctacagccgaagtggaaactcacacgaccccggcaaagctaagagctttcgaaacagggtgcttcccgtgaaacaggaccattccctggatggccctctcactaatggcgatggcagggaacctaggacgggcatcaaacgcaagcttctgagcgcctccgaggaggacgaaaatatgggcggagaggataaggagaagaaagaaaccaaagagaagtcacatttgagcaccagtgagtctggggaactgggatcttctctaagcagcgagagcacctgtggttctgattccgacagcgaaagtacgtcacgtaccgatcaagattacgtggatggggaccatgattacagcaagtttatccagaccagaccgaagagaaagctgcggaagcagcacggcaacggcaaaaggaactggaagacacgaggaactggcgggaggggtaggtggggccggtggggaagatggagtcgcggcggccggggtcggggcggcagggggagaggttcccgtgggcgcggcgggggtggaaccagaggtcggggcaggggccggggtggacggggggcatcgagaggcgctacacgtgccaagagggctcgcatcgccgacgacgagttcgacacaatgttttcaggaagattctcacgccttccgcgtattaaaacgcgcaatcaaggccgccgcacagtcctgtacaatgatgatagcgacaacgacaacttcgtgagcacagaggatccgttaaatctgggcacaagtaggtccggaagagtgaggaaaatgaccgagaaagcccgcgtgagccacctgatgggctggaattactag

SEQ ID NO: 109994 - DNA, 2406 bp, synthetic construct
  misc_feature 1..2406: note = Description of Artificial Sequence: Synthetic coding sequence
  source 1..2406: mol_type = other DNA
atgctacagaacgtgacccctcacaataaattgcccggcgaaggaaatgccgggctgcttggcctcggtccggaggctgccgcaccagggaaacgaatacgcaagccgtctctgttgtacgaggggttcgagagtccgaccatggcaagtgtgcctgccctgcagctgacacccgcgaacccgccgccgcctgaggtctcgaatccaaagaaacccgggagagttacgaatcagctgcagtatctccacaaggtcgttatgaaggccctgtggaagcaccagttcgcatggcctttcaggcaaccagttgacgcagtgaagttaggtctgcccgattaccacaagatcattaaacagcctatggacatggggaccatcaagcgcagactggagaacaattactactgggcggcctcagaatgcatgcaggattttaacacgatgttcactaactgctacatctacaataagcccaccgatgacatagtgctcatggcacagaccctcgagaaaattttcttgcagaaggtcgcttcaatgccccaggaggagcaggaactcgtagtgacaatcccaaaaaatagccacaagaagggagcgaagctggcagcactgcagggatctgtgacatcggcacatcaggtgcctgcagtgtcaagtgtcagtcacaccgcactgtatacccccccaccagaaatccctacaactgtgttgaacatcccccaccccagcgtcattagcagcccactgcttaagagtttgcatagcgcaggaccccctcttctcgccgtgactgccgctcctccagctcagcctctcgcgaaaaagaagggtgtgaagcggaaggcagacactacaacaccaactccgactgccatcctcgctccagggtctcctgcttcgccccctggaagcctggaacccaaagccgcccgcctgcctccaatgcgccgggaaagtggaagaccgatcaagcctccccgtaaggatctgcccgactcccagcaacaacaccagagctcaaagaagggcaagctaagtgaacagctcaagcactgtaacggtatcctgaaagagttgctgagcaagaagcacgccgcctacgcctggcccttttacaaacctgttgacgcctcagccctcggcctgcacgactatcatgacataatcaaacatcccatggatttatctaccgtaaaacgtaagatggaaaacagagattatcgcgatgctcaggaatttgctgccgacgttaggcttatgttcagcaactgctataagtacaaccctccagaccatgacgtagttgctatggctagaaagctccaggacgtgtttgagttcaggtacgcgaaaatgccggacgagccccttgagcctggacccctgcccgttagcacggcaatgccaccaggcctggctaagagctcttcggagtctagcagtgaggagtcaagctcagagtcatcaagcgaggaggaagaggaagaggatgaggaggatgaggaggaagaagagagcgagtcgagcgattctgaggaggaacgtgcccaccgattagctgaactgcaggagcagcttagggccgtacacgagcagctggccgccttatcccaagggcccatttccaagcccaagcgtaagcgagagaaaaaggagaaaaagaagaaacgtaaggctgagaagcacaggggcagagccggggctgacgaggatgacaaaggcccacgagcacccagaccaccccagccgaagaagtctaaaaaggctagtggtagcgggggggggtccgctgcattgggaccttctggctttgggccatctggaggctctggaaccaagctccctaagaaggccacaaagacggccccacccgccttgcctaccggctacgattccgaggaggaagaggagagcagacccatgtcttatgatgagaagagacaacttagcttagacatcaacaagctgcccggagagaaactcggccgcgtcgtgcacatcatccaggcacgggagccaagtctccgcgattccaatccggaggagatcgagattgattttgaaaccctgaaacccagcactctgcgcgagctcgagcggtacgtgctgtcttgcttaaggaagaaacccagaaaaccatatactatcaaaaagcctgttggcaagacaaaggaagagctagcgttagaaaagaaaagagagttagaaaaaagactgcaagatgttagcggtcagttgaatagtaccaagaagcctccgaaaaaggccaacgaaaagacagagtcctcctccgcacagcaggtcgctgtgtcaagattaagcgcttcctcgtcaagttcagacagcagctcatcatcaagttcaagttctagttctgacacctcagatagcgactcaggatag

SEQ ID NO: 109995 - DNA, 2406 bp, synthetic construct
  misc_feature 1..2406: note = Description of Artificial Sequence: Synthetic coding sequence
  source 1..2406: mol_type = other DNA
atgctgcagaatgtgacgccccacaataaattacccggggaagggaatgctggactgctaggattgggccctgaggcggccgctcctggcaagcggattcgaaagccttctcttttgtacgagggctttgagtcccctactatggcctctgtccccgcgctgcaactgaccccagccaatcctccccctccagaagtgtcaaatccaaagaaacctggtcgggttacgaaccaacttcagtatctgcacaaggtggttatgaaagccttgtggaaacaccagttcgcctggccatttcggcagccagtcgatgcagtgaaactggggcttcccgattaccacaaaattatcaagcagcccatggacatggggacaattaaaaggcgacttgaaaataattactactgggctgcttcggagtgtatgcaggacttcaataccatgttcactaattgctacatttacaataagccaacagacgacatcgttctgatggcccaaaccctggagaagatattccttcaaaaggtggctagtatgcctcaggaggaacaagagctggtagtaaccatccctaagaactcccacaaaaagggggctaaactggccgctctccagggctcagtgaccagcgcccaccaagtgcctgccgtcagctctgtcagccataccgcgctgtataccccaccgcctgagattccgacgactgttttgaacatcccacatccatccgtcatttcaagcccactcctaaaatccctgcactccgccggacccccactgcttgccgtgactgctgccccaccagctcagccattagctaagaaaaagggcgtgaaacgcaaagctgacaccaccacacctacaccaacagcaatcctggcacccggatcccccgccagtcccccggggtctctcgagccgaaagccgcccgactcccacctatgaggagagagtcaggtcggcccataaaaccccctcgtaaggacctaccggactcacagcaacagcatcagtcaagtaagaaggggaagctctctgagcaattaaagcactgcaacgggatattaaaggaattattatccaaaaagcatgccgcatatgcatggcctttctataagcccgtggatgcctccgccctcggattacatgactaccatgacatcataaagcatcccatggatctgtctaccgtcaaaaggaaaatggagaatcgggactatcgagacgctcaggagttcgccgccgatgtacgtctgatgtttagcaactgctacaaatataatccccctgaccatgacgtcgtggccatggctaggaagctgcaggatgtgtttgagttcaggtacgccaaaatgcctgacgagcctctcgagcccggtcccttacctgtctcaacggccatgcctcccggtctggccaagagctcttcggagtctagtagcgaggaatcctctagcgaatcttcctctgaggaagaggaggaagaggacgaagaagatgaggaggaagaggaatcggaaagctctgatagtgaagaggaacgagctcatcgattggcagagctgcaggaacagttaagggctgtgcacgaacaattggctgccctttcacagggccctattagcaaacctaaaagaaagagagaaaagaaggagaaaaagaagaagagaaaggcagaaaagcacagggggcgcgccggcgctgacgaagatgataagggtccaagggctccccgacccccccagcctaagaagtcaaagaaagcctctggttccggcggcggatcagcagctctggggccttcgggcttcggcccttccggcgggtccggaaccaaactgccgaagaaggctacaaaaacagctccgcccgctctgccaacgggatatgacagcgaggaagaggaggaatctcgcccgatgagttatgacgagaagaggcaactgtcgctggatataaacaagctcccaggcgaaaagcttgggcgggtcgtgcacatcatccaggcacgcgagcccagccttagagacagcaatcctgaggagatagaaattgatttcgagactcttaagccatccacactgcgggagctcgagcggtacgtgctatcatgtctcagaaagaaacccaggaagccctacactataaagaagccagtgggcaaaactaaggaggaattggcactggagaagaaacgcgaactggagaagcgtctgcaggacgtaagcggtcagctgaattctaccaaaaagcccccgaaaaaggcaaatgaaaagactgaaagttcatcggcgcagcaagtcgcagtgagccgcttgtcagcgtcatccagttcctcagattcaagcagcagcagctcctccagtagcagcagcgatacatcagacagtgattctggctag

SEQ ID NO: 109996 - DNA, 2406 bp, synthetic construct
  misc_feature 1..2406: note = Description of Artificial Sequence: Synthetic coding sequence
  source 1..2406: mol_type = other DNA
atgctgcagaacgtcacccctcacaacaagcttcccggcgaaggcaacgcagggcttctgggcctgggaccagaggccgctgcacccggcaagcgtattcgcaaaccctctctcctatacgagggcttcgaaagccctaccatggccagtgtgcccgcacttcagctgacgcctgccaacccaccacctccagaggtgagtaaccccaagaaaccagggagggttacaaatcagctccagtaccttcacaaagtcgtcatgaaggcgttgtggaagcaccaattcgcttggccattccgacaacctgttgacgcggtgaagttaggcctgccagactatcacaaaatcatcaaacagccaatggacatggggaccataaagcgacgcctggagaacaattattactgggctgcctcagagtgtatgcaggacttcaatacgatgttcaccaactgctatatatacaacaaaccaactgatgacattgtgctgatggcgcaaaccctggaaaaaatattcctacaaaaagtggcctcgatgcctcaggaggaacaggagctggtggtgactatccccaaaaactcccacaagaaaggcgccaagctggccgcgctgcagggctcagtcactagcgcacaccaagtgcccgccgtttcctccgtgtcccacactgcgctgtacactccacctccagagattccaactactgtacttaacatcccgcatccctccgtcattagctcaccactgctcaagtctctgcactccgcggggcctcccctcctagctgtcaccgcagcacctccggcccagcctctcgccaagaagaagggggttaaaaggaaagctgatacaactactcctacccccaccgccatcctcgcgcctggaagtcccgcaagccctcccggctcgctcgaacctaaagcagcaagactgcccccgatgagacgggaaagcgggcgacccatcaagcccccacggaaggaccttcctgattcccagcagcaacaccagagcagcaaaaagggcaagctcagtgaacagctgaagcattgtaacggaatcctcaaagagctattaagtaagaaacacgctgcctatgcctggccattctataaaccagtcgatgcatctgcattgggcctgcacgattatcacgatatcattaagcaccccatggacctctcaaccgtgaagagaaaaatggagaacagagactaccgggacgcacaagagttcgctgctgatgttcgactgatgttttccaattgctataaatataacccccctgaccatgacgttgtggcaatggccaggaagctgcaggatgtttttgaattccggtatgctaaaatgcctgatgagccacttgagcctggacctctgcctgtgagcacagctatgccaccaggactcgcgaagagctctagcgagagtagcagcgaagagagtagctcagagtccagctccgaggaggaagaggaggaagacgaagaggatgaggaagaggaggagtcagaaagctccgattccgaggaggagcgcgcgcaccgtctcgctgagctccaggagcaactccgcgccgtgcacgagcagttggccgccctctcccaaggcccaatctctaaacctaagcggaaacgcgagaagaaggagaaaaagaagaagcgtaaggccgagaaacaccgtggcagggccggcgccgacgaagatgataaagggcctagggcaccccggcctccgcagcccaagaaatcgaaaaaggcctccggatccggcggaggatccgcggctctaggaccctccggattcgggccaagtggaggctctggaacaaagttgccaaaaaaagccactaaaactgctccgcctgccctccccaccggctacgacagtgaggaggaggaggagtctagaccaatgagctatgatgagaaacgccagctttctctggacattaataagctgccgggtgagaagcttggacgggtcgtgcacatcatacaggctcgtgagcccagtttgcgggattccaatccggaggagattgaaattgatttcgaaacgctcaagccgtccacgcttagggaactggaaagatatgtgctctcttgcctacgaaaaaagcccaggaagccttatacaatcaagaaaccagtgggaaaaacaaaggaggaattggcgctggaaaagaaacgtgaactcgagaagcgcttacaggatgtgtcggggcagcttaactctacaaaaaagccacctaaaaaggcgaatgaaaagaccgagtctagtagcgcccagcaagtcgcagtcagcagactctctgcgtcttcctcgagcagcgatagcagctcatcctcgtcctcatccagcagctcagatacatccgattctgacagtgggtag

SEQ ID NO: 109997 - DNA, 2511 bp, synthetic construct
  misc_feature 1..2511: note = Description of Artificial Sequence: Synthetic coding sequence
  source 1..2511: mol_type = other DNA
atgctgcagaacgtgacacctcacaataagttacccggggaaggcaacgcaggtctgctgggactgggccccgaggcagcagcccctggcaaacgcatccgcaaacctagcctcctctatgaaggcttcgaatcgccaaccatggccagtgtgcctgctctccagcttacaccggccaacccaccacctcctgaagtgagtaacccgaaaaagcctggacgcgtcacaaatcaattacaatatttgcacaaggtcgtcatgaaagccttgtggaagcatcagttcgcttggcccttccggcagccggtggacgccgtaaagctcggattaccggattatcacaaaatcattaagcagcctatggacatgggaacaatcaagagacgcttggagaataactattactgggccgccagcgagtgcatgcaggacttcaataccatgttcaccaactgctatatctataacaaacccactgatgacattgtgctgatggcccagacactcgagaagattttcctgcaaaaggtcgcttccatgcctcaggaagagcaggagctcgttgtcacaatcccgaagaactcccacaagaagggagccaagctcgctgcactgcaaggaagcgtgacctcggcacaccaggttcctgccgtgtcttctgtgagtcatacagccctgtataccccaccacctgagatacctaccactgtactcaatatccctcaccccagcgtgatttcatcccccctcctaaaatcactgcactctgccggccccccactcctggccgtcaccgccgccccacccgctcagcctctggctaagaagaagggagttaaacggaaggccgatacgaccacaccaactcccaccgcgatcctggcccccggatcaccagccagtccccccggaagcctcgagcccaaggcggcgcggctgccacccatgagacgtgaatccggacggcctataaagccgcccaggaaagacctgccagattcacagcagcagcaccagtcctcgaaaaagggaaaactcagcgaacagttaaaacattgcaatggcattctgaaagaactcctctctaagaagcatgccgcttacgcctggcctttctataaacctgtggacgccagtgctctgggtttgcacgattatcatgacattatcaagcatcccatggatctttcaaccgtgaaacggaagatggaaaaccgggactaccgggatgcccaggaatttgccgcagacgtcaggttaatgttttcaaactgctataaatacaacccacccgatcacgatgttgttgctatggcgcgcaagttacaggatgttttcgagtttagatacgctaaaatgcctgatgagcccctcgagcctggtcctctgcccgtgtctaccgccatgccccccggcttggccaagagctccagtgagtcttccagcgaagagtcatcctccgagtcatcttcggaggaggaggaggaggaggacgaagaagatgaagaagaagaggaatccgagagctccgactcggaggaggagagggcgcatcgcctcgccgagctacaggaacagctgagggccgtacacgagcagcttgcagctctgtcccagggcccaatctcgaagccaaaacggaaaagagagaagaaggagaagaagaaaaagcgaaaagcagagaaacatagggggcgcgcaggtgccgatgaagacgacaaaggtcctcgggccccgcggccaccacagcccaaaaagagcaaaaaagcttccgggtctggggggggatctgcagcactgggaccttctggttttggcccatccggaggctcgggtacaaagcttcaggccggggtgcagtggagagacctcggtctcctgcagccgcctctgctgggattcaaacgatttagctgtctctcccttccctcctctcaagattaccggcttcctaagaaggcaaccaagactgcacccccagccctccccacaggctacgactcggaagaagaagaggagagcaggcccatgagctacgacgaaaagcgccagctgagcctggatatcaataagctaccaggagagaaactgggtcgggtagttcacataatccaggctcgcgagccatctctgagagactcaaaccctgaggaaatcgagatcgatttcgaaaccttaaagccctcaacactgcgagaattggaacgatatgttctgtcttgcttgcgcaagaaacctagaaaaccctatacaatcaaaaaaccagtgggcaagaccaaggaagagcttgccctggaaaagaaaagggagctggagaagcgtctgcaagacgtatccggacagctgaactccaccaaaaaacctcctaaaaaggcaaatgagaagaccgaatcaagcagcgcccagcaagtggctgttagccgcttgtctgctagcagctctagctctgattccagcagttctagtagcagttcttcatcatccgacacatcggacagcgattcaggatag

SEQ ID NO: 109998 - DNA, 2511 bp, synthetic construct
  misc_feature 1..2511: note = Description of Artificial Sequence: Synthetic coding sequence
  source 1..2511: mol_type = other DNA
atgctgcaaaatgtaacgccacataataagttgccaggtgaaggcaatgcaggactcctgggacttggcccagaggccgccgccccaggcaagcgaattagaaagccatcattactttacgaagggttcgagagcccgaccatggctagtgtgcccgcacttcagctgacccctgccaaccctcctcctcccgaagtgagcaaccctaaaaagcccggccgagtgacaaaccagttgcaatatttgcacaaggtcgtgatgaaagcattgtggaaacaccaatttgcatggccattcagacagccggtcgacgccgttaagctggggctccctgattatcataaaataataaagcagcccatggacatgggaacgatcaaaaggaggctcgaaaacaattattactgggcagccagtgagtgtatgcaggattttaatacaatgtttaccaactgctatatttataacaagcctacagatgacatcgtgctcatggcacaaactctcgagaaaatattcttgcagaaagtcgctagtatgcctcaggaggagcaagaattggttgtcacgatcccaaaaaattcacataagaagggagcaaagttggcagctttgcaagggtccgtgaccagtgctcatcaggtgcccgccgtgtcttccgtgtctcacacagcgctgtataccccgcctcctgagatcccaaccactgtactcaacatccctcacccatcggtcattagtagccctctcctgaagtcactccattccgccggccctcctttgctcgctgtgacagccgcaccacctgctcaacctttggctaaaaaaaagggggtaaagagaaaggcggatacaacaacgccgacgccgacagcaatccttgcgcccgggtctcctgccagtccgccaggttccctggagcctaaagcagctagactcccacctatgcgacgcgagtcaggccgcccaatcaagcctccacgcaaggatttacctgattcgcagcagcagcaccagtctagcaagaagggaaagcttagcgagcagctgaaacattgcaatggcatcctcaaggaactcctgtccaaaaaacacgctgcttatgcatggcctttctacaagcctgtcgacgcctccgctcttgggttacatgactaccacgacatcattaagcatccaatggacctgtctactgtgaaacgaaagatggagaatcgggactaccgtgacgcccaggagttcgctgccgacgtgagactgatgttttctaactgttacaagtacaatccacccgatcacgatgttgtggcaatggcccgcaagctgcaagatgtcttcgaatttaggtatgctaagatgccggacgagcctctcgagcccggacctttgcccgtgtctacagcaatgccacccggcctggccaagtcttccagcgagagttcctccgaggagagttcaagcgaaagtagtagcgaggaggaggaggaggaggacgaagaggacgaggaggaggaggagagcgagtcgtctgacagtgaagaagagagagctcaccgtttggccgaacttcaagaacagttacgcgccgttcacgagcaattagccgctctctcacagggcccaattagcaaaccaaagcggaagcgagagaaaaaggagaaaaaaaagaaaaggaaggcggaaaaacaccgggggcgggcgggcgctgacgaagatgacaagggtccccgtgccccaaggcccccccagccaaaaaagtctaaaaaagcgtccgggtccgggggggggtctgccgcccttggcccatccggctttggcccgagcggagggtccggaacaaagctccaggcaggcgtgcagtggcgggatctcggcctgctccagccaccactgttaggcttcaagaggttttcttgccttagtctgccgagtagccaagactaccgcctccccaagaaggcaactaaaacggctcctccggcgcttccaaccggatacgattcagaagaggaggaggaaagtcgccccatgtcctatgatgaaaaacgccagctctctctcgatattaataagctgcccggagaaaagctgggcagggtggttcatatcattcaggcccgtgaacccagcctccgggatagtaaccctgaggagattgagatcgatttcgagaccctgaaaccatctaccttgcgcgagctcgagagatatgtcctgtcttgtctgaggaagaaaccccggaaaccctatacaatcaagaagcccgttggtaaaactaaggaggagctagctttggagaagaaaagggaattggagaaaaggttacaggacgtgtctggccagctgaactctaccaagaagcctcctaagaaggccaatgagaaaacagagtcatcgtcagctcaacaggttgctgtatctcgcctgtctgccagctcaagttcatcggactctagttccagcagctcttcctcttcctcgagcgatacatccgactctgatagcggctag

SEQ ID NO: 109999 - DNA, 2511 bp, synthetic construct
  misc_feature 1..2511: note = Description of Artificial Sequence: Synthetic coding sequence
  source 1..2511: mol_type = other DNA
atgcttcagaatgtaaccccgcataacaaactacctggtgaaggcaatgcgggccttttgggattgggacctgaggcagccgctccggggaaaaggatccgcaagccgtctctgttatatgagggtttcgaatccccaacaatggcaagcgtgccagccttgcagttaactcctgctaatccaccgcctcccgaagtgagcaatccaaagaaacctggcagagttactaatcagctgcagtacctccacaaggtagtcatgaaggcgctttggaagcaccagtttgcttggcctttccggcagccagtcgacgctgtcaaattggggttgcccgactaccacaagattatcaaacagccaatggatatggggactattaaacgaaggctggagaacaattattattgggcagccagcgaatgcatgcaggactttaatactatgtttactaactgctacatatataacaaacccacagatgatatcgtccttatggcacagaccctggaaaagatatttctgcagaaggtcgcctccatgccacaggaggaacaggaattggtggtaacaattcctaagaactctcataagaagggcgcgaagctcgcagctcttcaaggcagtgtgacatctgcacaccaggtgcctgcagtgagcagtgtgtctcacacagcactttacacacccccccctgagatcccgacaacagtgctcaatatcccacatcctagcgtgataagcagccccctgctcaagtcactgcattccgcagggcctccactcctggctgttactgcagcacctccagcccagcctcttgctaaaaaaaaaggtgtcaaaaggaaggccgacaccacaacgcccactcctaccgccatcttagcaccagggtcacctgcatcgcctccggggtcactggagcctaaggcagcgcgcctccccccgatgaggagagagagtgggcgccctatcaaacccccacggaaagatctgccagattcacaacagcaacaccagtcctccaaaaagggaaagttgtccgagcagttaaaacactgtaacggcatcttaaaagaattactgtctaaaaagcatgccgcttacgcctggcctttttacaaaccagtggatgcgtccgccttggggcttcacgattatcacgacatcattaaacatcccatggatttatctacggtgaaacgaaagatggaaaaccgcgactatcgggacgcccaggagtttgccgcagacgtgcgcctaatgttctctaactgctacaagtacaaccctccggatcacgatgtggttgcgatggcacgcaagctgcaggatgtttttgagttcagatacgctaagatgcccgacgaaccactcgaacctgggccccttccggtgagcactgctatgccgcctggcctggcgaaaagctccagtgaatcctccagcgaagagtcgtcctctgagagcagcagtgaggaggaggaggaggaggacgaggaggatgaggaggaagaggagtctgaatcatccgattcagaggaagagcgagcacatcggctggcagaactgcaggaacagctcagagctgtgcacgaacagctcgctgctttgtcccagggacccataagcaaacctaaaaggaagcgggagaagaaggaaaaaaaaaaaaagcggaaagccgagaagcatcgcggcagggccggcgctgacgaagacgacaagggtccgcgcgcgcccaggccaccccagcccaagaagtctaaaaaggcctcgggttccgggggcggatccgcagccctcggccctagcgggtttggcccaagcggggggtctggtaccaagctgcaggccggggtacaatggagagatctcggcctgctgcagccccctctcctggggtttaaaagattctcctgcctgtctcttccatcctcccaggactacagactgccaaagaaggccaccaagacggctcctcctgctcttccaaccggatatgacagcgaagaagaagaggagagtcggccaatgtcctacgatgaaaagcgccagctgtctctggacatcaacaaacttcccggggaaaaactcggacgcgtggtccacattatccaggcgagagaaccgagtctgcgcgattccaatccagaggaaattgagatcgatttcgagaccctcaagccttccacattgagagagctcgaacgctacgtcttgagctgtctacgcaagaagcccagaaaaccctacaccataaagaaaccggtcgggaagacgaaagaggaactggcactcgagaagaaacgtgagctggaaaagcgcctacaggatgtctctgggcagctcaatagtactaagaaacctccgaagaaagctaatgagaagaccgagtcctccagcgcgcagcaagttgccgtctccaggctctccgcttcctcaagctcatccgatagctccagttcaagttcgtcttcatcatcctccgacacgtctgatagtgactctggttag

SEQ ID NO: 110000 - DNA, 2406 bp, synthetic construct
  misc_feature 1..2406: note = Description of Artificial Sequence: Synthetic coding sequence
  source 1..2406: mol_type = other DNA
atgctgcagaacgtcactccgcataataaactccccggggagggaaacgctggtctgttggggctgggtccagaggcagctgcacccggaaagcgcataagaaagcccagcctgctgtacgagggcttcgaatcgccaaccatggcttccgtgcccgccctccagcttactccggctaaccctcctcctcctgaggtgtctaacccgaaaaagcccggtagggtaactaatcaacttcagtaccttcataaagtcgtgatgaaagccctatggaaacaccaatttgcttggccattcagacagcctgtggatgctgtgaagcttggcctacccgattaccataagattattaaacaacccatggatatgggaacaattaagaggcggttggagaacaattactactgggccgcgagcgagtgtatgcaggacttcaacactatgtttacgaactgctacatttacaacaaacccacagatgacatcgtgctgatggcacaaacgctggagaagattttcctccagaaggtcgcgagcatgccacaggaggaacaagagctcgtcgtaaccattccaaagaatagtcataagaaaggggcaaagctcgcagcccttcaaggtagtgtgacctccgctcaccaagtgcctgctgtgtcttcggtgagccacacggccctttatactccacctcccgagattcctaccactgtgctcaacattccccacccttccgttattagttcaccacttctgaaaagtttgcattcagcagggccccccctgcttgcagtaacagccgctccccctgctcagccactcgcaaagaaaaagggcgtaaagcgtaaagcagatactacaaccccgaccccgaccgccatcctggcacccggaagcccagcctcaccacctggaagcttggagcctaaggctgctaggctaccgccaatgcgaagggagagcggtcgccctattaagcctcctagaaaagacctgccagactctcagcagcagcaccagagtagcaaaaaagggaagctctccgaacaactgaaacactgtaacggaatcctaaaagaactcctgtccaaaaagcatgcagcctacgcctggccattttacaagcccgtggacgcttctgccctgggcctgcatgactatcacgacattataaagcaccctatggacctttctaccgtgaagaggaaaatggagaatagggactatagggacgcacaggagttcgccgcagatgtgaggttgatgttttctaattgttacaagtataaccctcccgaccatgatgttgtcgcaatggcaaggaagctgcaggatgtttttgaattccgatatgccaagatgcctgatgaacccctcgaaccaggtccactaccagtatcaacagcaatgccgccagggctagccaaatctagcagtgagagttccagtgaagagagttcttcagaatccagttccgaagaagaagaagaggaagacgaggaggatgaggaggaggaggagagcgaatcatcggattccgaggaagagagggcccacaggctggcagagctccaggaacagctgagggcagtccacgagcaactagctgccctgagccagggcccaatctctaagccgaaacggaagcgggagaagaaggaaaagaagaagaagcgtaaagccgaaaaacaccgcggaagggccggagctgatgaagacgacaagggcccacgggcaccgagacctccacagccgaagaaaagcaagaaggcttctggctctggcgggggcagcgccgccctgggcccttcgggatttggtccttccggagggagcggaacaaaactgcccaagaaggcgaccaagaccgccccccccgccctaccaaccggttacgatagcgaagaggaggaggaatcccgtcccatgagttatgacgaaaagcgccagctgtccttggatatcaataagttgccaggcgaaaagttgggacgggtcgtccacattatccaggcaagggagccatcactgcgcgacagcaatcctgaagagattgagattgacttcgaaacccttaagcccagcacactgcgggagctggagagatacgtattatcttgcctacgcaagaaacctaggaagccttataccatcaaaaaacccgttggtaagacaaaggaagagctcgcactagaaaagaagcgggaactcgagaagcgcctccaggacgtgtcaggtcagctgaacagcactaaaaagccaccaaagaaagccaatgagaaaacggagtcctcgtccgctcagcaagttgccgtgagccggctgagcgctagcagctcaagcagcgacagttcctctagttcttcttctagctccagcagtgatacttcggatagcgactctggttag

SEQ ID NO: 110001 - DNA, 2406 bp, synthetic construct
  misc_feature 1..2406: note = Description of Artificial Sequence: Synthetic coding sequence
  source 1..2406: mol_type = other DNA
atgcttcagaacgtgacccctcacaacaagctccctggagaagggaacgcaggactgctgggattgggacctgaggcagctgctcctgggaagcgaatcagaaaaccaagcctcctgtacgagggttttgaatctcctacaatggccagtgtaccagccctccaactgacaccggccaacccacctccgcccgaagtctccaatcccaaaaaaccggggagggtgacgaatcagttgcagtacctgcataaggtggtaatgaaggccctgtggaaacatcagttcgcatggcctttcagacagccagttgacgccgtgaagttaggcctcccagactaccacaagatcattaagcagcctatggacatgggcaccatcaaaaggagactcgaaaacaattattattgggcagcctcagaatgcatgcaggattttaacaccatgttcacaaactgctatatctacaacaaaccaacagacgacattgtcctgatggcccagactcttgaaaagatctttctgcagaaagtggctagcatgccacaggaggagcaagagctcgttgtgactattccgaagaactctcacaaaaaaggggcgaagctcgccgctttacaggggagcgtcacctctgctcaccaggtgcctgccgttagttcagtgtcgcataccgctttatatactcccccccctgagatccctacgaccgtcctgaacatcccccaccccagcgtgatctcgagccccctgctcaagtctctacatagtgccgggccacctctgctcgccgtgacagccgcacctccggctcagcccctggcaaagaagaagggggtgaaaaggaaggcagataccacaacaccgacgccaaccgcaatacttgccccgggatctccggctagtcccccgggcagtctggagccaaaggctgctcggctgcctccgatgcgacgcgagtctggacggcctataaagccacctcggaaagacttgcctgatagccagcaacagcaccagagctctaagaaaggcaaattgtctgagcagctcaagcattgtaatgggatcttaaaggagctgctgagtaaaaaacacgccgcctatgcatggcccttctataagccagttgacgctagcgccttaggattacacgattaccatgatattatcaagcaccctatggacctcagtacagtcaagcggaagatggagaacagagattaccgggacgctcaagagttcgccgcagacgttaggttgatgttttctaactgttataagtacaatccgccagaccacgacgtggtggcaatggcacgaaagctccaggacgtgtttgagttccggtatgcgaagatgccggatgaacccctcgagcccgggcctttgccagtctctacagctatgcccccgggactggctaagagttcaagtgagtcgtcttctgaagaatcttctagcgagagcagcagcgaagaggaagaggaggaggacgaggaagatgaggaggaggaagagtccgaatcctctgatagtgaagaagaaagggctcacaggttggccgagcttcaggaacaacttagggctgtacatgagcagctggctgccctgtcccaaggccccatttcaaaacccaagaggaagagagagaagaaagagaaaaagaaaaaaagaaaggctgagaagcatcgtgggagagccggcgccgacgaagacgacaaggggccacgcgctcctcgaccgccacagcccaaaaagtcaaaaaaggcctccggtagtggaggaggcagtgcggccctcggcccttccggcttcggaccatcaggtggaagcgggactaagcttccaaaaaaggctaccaagactgcaccaccagctctaccaacaggctatgactcggaggaggaggaggaaagtcgaccaatgtcttacgacgaaaagagacagctttccctggacatcaacaaactccccggcgagaaactgggccgggtggtccatatcattcaggctcgggaacccagtctccgggactctaacccagaggaaatcgagatcgattttgagaccttaaaaccctccacacttcgggagctggagcgctatgtgttgtcctgtcttcggaagaagcctaggaagccctatacaattaagaagcctgtgggtaagacaaaggaagaattggcgctcgagaagaaacgcgaactggaaaagagacttcaagatgtttcaggccagcttaacagcactaagaagccacctaaaaaagccaacgaaaagactgagtcttcgagcgcgcagcaggtcgccgtttcccggctgtccgcctctagttcaagttctgacagctccagttcttctagcagttctagttctagcgacacctccgacagtgattcaggatag

SEQ ID NO: 110002 - DNA, 891 bp, synthetic construct
  misc_feature 1..891: note = Description of Artificial Sequence: Synthetic coding sequence
  source 1..891: mol_type = other DNA
taacgaccccttggagttcagcaacctggcgctcgcctccccggcgagggcaacgccggccttttgggcctaggtcccgaagctgcggcaccgggcaagcgaatccgtaaaccttctttgctgtatgagggctttgaatcacccacaatggcctcagtcccagctttgcagctcactccagcaaatcccccaccacctgaagtctctaaccctaagaaaccaggtcgagtcaccaaccagcttcagtacctgcacaaggtggtcatgaaagccctttggaagcatcaatttgcctggccctttagacagcccgtggacgcagttaagctcggtttgcctgactatcacaagatcatcaagcagcctatggacatggggacaattaaaagaagactggaaaacaactattactgggccgccagcgagtgcatgcaagacttcaacaccatgtttacaaattgctatatttacaacaaaccaaccgatgatatcgtgctaatggcacagaccctggaaaagatttttcttcaaaaggtggcatctatgcctcaggaagagcaggaactcgtcgtgacaatcccgaagaattcccacaagaaaggcgctaagctggcagcacttcagggttcagtgacatcagcgcatcaggtgccggccgtgagttctgttagccacactgctctgtatacacctccaccagagatcccaaccacagtcctgaatatcccacatccttccgtgattagcagtcccctgctcaaaagcctgcatagcgctggaccacccctattggccgtaaccgccgcccctcccgctcagccactggcgaagaaaaaaggcgtgaaacgcaaggcggacaccactaccccaacacctaccgccatcctttag

SEQ ID NO: 110003 - DNA, 2406 bp, synthetic construct
  misc_feature 1..2406: note = Description of Artificial Sequence: Synthetic coding sequence
  source 1..2406: mol_type = other DNA
atgttgcaaaacgtgacgcctcacaacaagctgcctggcgaaggaaatgccggcctgcttggattaggcccggaggccgctgctcctgggaaaagaatccgcaagccaagtctgttatatgaggggtttgaatctcccacgatggcctccgtgccggcgctgcaattgactcctgccaatcccccaccacctgaggttagcaaccctaaaaagcctggacgcgtgactaaccagctgcagtacctccataaggtcgttatgaaggcactgtggaagcatcagtttgcttggcccttccggcagccggtcgatgccgtcaagcttggcctcccggactatcataagattattaaacaaccaatggacatgggaactattaaaaggcgacttgaaaacaactattactgggccgcaagtgagtgcatgcaggactttaacacaatgtttacaaactgttacatatataataaaccaacagatgacatagttcttatggctcagacattggaaaaaatatttcttcaaaaggtcgcctctatgccccaggaagagcaagaactcgtcgtcactatccccaaaaacagccacaaaaaaggggccaaactggctgcattgcaggggtccgtgacgagcgcccatcaggtccccgccgtgtcaagtgtgtcacatacagcactgtacactccacctcctgaaatccctacaacagttttcaacattcctcatccaagtgttatctcgtcgcccttactgaaaagtttgcatagcgccggaccacctctgcttgcagtgacagcggccccccctgcacagccgttagcaaaaaaaaagggcgttaagcgcaaagctgacacaaccaccccaaccccaactgctatccttgccccgggaagccccgccagtccacccggttctctcgagcccaaagccgcccggcttcccccaatgagaagagagagtggtaggcctattaagccacctaggaaagacctccctgactctcaacagcagcatcagtcttctaagaaggggaaactctctgagcaactcaaacactgtaatgggatcttgaaggaactactcagcaagaaacacgcagcctatgcatggccattttacaaacctgtcgacgccagtgccctcgggcttcatgattaccacgacattattaaacatcctatggatctctcgaccgtgaaaaggaaaatggaaaacagagattatagagacgcgcaagagttcgcagccgacgtgcgccttatgttctccaattgttacaagtataatccacccgaccacgacgtggtggcaatggcccgcaaactgcaggacgtgttcgagtttagatacgctaagatgcccgacgaaccgcttgagccaggccccctccccgtgtccacagccatgccccccggcttggcaaagtctagttctgagagcagcagcgaggagagcagctcggaatcaagcagtgaagaggaggaggaagaggacgaggaggacgaagaggaggaagaatcagagtcctctgattctgaagaagagcgagcccaccgattggctgagctgcaggaacaactacgcgccgttcacgaacagctagcagcgctgagtcaggggccgatatccaagcccaagagaaaaagagaaaagaaggaaaaaaagaagaagcgaaaggctgagaaacaccgcggccgggccggcgctgatgaagacgataaggggccccgtgccccccgaccaccacagcccaagaagtccaagaaggcttctggatccgggggaggaagcgctgctctcggcccgtccggattcggaccttctggtggcagcggaacaaagttacctaagaaagcaacaaaaaccgcgcccccagccctaccaacaggctacgactccgaggaagaggaagagagtcggcccatgtcttacgatgaaaagcgccagctcagtttggatatcaacaagctgcccggggagaaactggggcgagtggtgcatatcatacaagccagggagccatcactgagggactcaaaccctgaggaaattgaaatcgattttgaaacattaaagccatcaaccctgcgagagctcgaaaggtatgtgctctcttgtctgcgaaaaaaaccccgcaagccgtatactatcaagaagcctgttggcaaaacaaaggaggagctcgctctggagaagaaacgcgaactggagaagcgtctccaggatgtgtctggccaactcaactctacaaagaagcctcctaagaaagctaacgagaagaccgagagctctagcgcccaacaggttgcagtctctcggctgtctgcatctagcagttcgtccgacagcagtagttcatcctcgagcagtagtagtagcgacacgagcgactcagatagcgggtag

SEQ ID NO: 110004 - DNA, 1842 bp, synthetic construct
  misc_feature 1..1842: note = Description of Artificial Sequence: Synthetic coding sequence
  source 1..1842: mol_type = other DNA
atgctccaaaatgtgactccccataataaactccccggagagggcaacgccgggctgctgggattgggcccggaagccgctgcacccggcaaacgaattcgaaagccctccctactttatgagggtttcgagagtcctactatggccagcgtccctgctctgcagctcacaccggcaaatccgccccccccggaagtgagcaaccccaagaagcctggaagagttaccaaccaactgcagtacctgcacaaggtggtgatgaaggcgttgtggaagcaccagttcgcgtggccatttaggcagcctgtcgatgctgtgaaattgggtctccctgactatcacaaaatcattaagcagccgatggatatgggaaccatcaaacgccggctggagaataattactattgggccgcatccgagtgtatgcaggatttcaacacaatgttcacgaattgctatatctataataagcctacagatgatattgtgttgatggcccagactctcgagaagatcttcttacaaaaagtggcctccatgcctcaggaggaacaagagctcgttgtgaccatccccaaaaacagccataagaagggcgctaagttggctgctctgcagggcagtgtcacgtccgcacaccaggtcccggcagtgagttcagtgtctcacaccgcgttgtatacaccgcctcccgaaattccaacaacagtcctcaatattccacatccctccgtcattagctcaccactgctaaagtcactgcattctgccggccctcccctgctagcagtgacagccgcaccccccgcccagcccctcgccaaaaaaaagggcgtcaaacgcaaggcagacactacgacacctacacctaccgcaattttggctccggggagtcctgcatcccccccagggtccctcgagcccaaagccgccagactgccaccaatgaggagagagagcggaaggccaatcaaaccccccaggaaagatctgcccgatagtcagcagcagcaccagtcaagcaaaaaaggcaaattgagcgagcaactgaaacactgcaacggtatccttaaggagctcctttctaaaaagcacgccgcttacgcctggcccttctacaagcccgtggatgcctccgcacttggtctgcacgattatcacgacattatcaagcatccaatggacctctccaccgtgaagaggaaaatggagaatagggattatagagacgcccaggaatttgcagctgatgtgaggctgatgttctcaaactgttacaaatataaccccccagatcacgatgtggtggctatggcaaggaagcttcaggatgtcttcgaatttaggtacgccaagatgcccgatgagcctctggagcccggacctcttcccgttagtaccgcgatgcctcccgggctggctaagagttccagcgagtctagttccgaagaatcttcttcagaaagctcctccgaggaggaggaggaggaggacgaggaggatgaagaggaggaggaaagcgagtcaagtgacagcgaggaggagcgcgcccatcggctcgctgagttacaggagcaattacgcgcagtacacgaacaactagcggccctcagccaagggcccataagcaaaccgaagaggaaaagagaaaagaaggagaagaagaagaagagaaaagcagaaaaacaccgtgggcgcgccggagccgacgaggacgacaagggtccccgagcgcccagacccccccaacctaaaaaatctaagaaggctagcgggtcagggggtggctctgccgcacttggcccctcaggtttcggtcccagcggtggcagtgggacctag

SEQ ID NO: 110005 - DNA, 1842 bp, synthetic construct
  misc_feature 1..1842: note = Description of Artificial Sequence: Synthetic coding sequence
  source 1..1842: mol_type = other DNA
atgctccagaatgtgactccccataataaactgccaggcgaaggcaacgcgggcctgcttggtcttgggccagaagccgccgctcccggaaaaaggatccgcaagccgtctctcctgtatgagggcttcgaatctcccacaatggctagcgtgcccgctttgcagctgacccctgcaaatccacctccaccagaggtgagcaaccctaaaaaaccgggaagagttaccaatcagctgcagtatctccacaaagtggtgatgaaggcactctggaagcaccagtttgcctggccctttagacagcctgtggatgctgtaaagttggggcttcccgactaccacaagattatcaagcaacctatggacatgggcacaatcaaaaggcgactggaaaataattactactgggcagcctctgaatgcatgcaagactttaataccatgtttaccaactgttatatttataacaagcctactgacgacattgtgctgatggctcaaaccctcgagaaaatttttcttcaaaaagtggcatctatgccgcaggaagagcaggaattggtggtgacaatcccaaagaactcgcataagaagggcgcgaagttggctgcactgcagggatcagtgacatctgcgcaccaggtgcccgctgtgtcatctgtgagccatactgcactgtacacaccacccccagagataccaaccacagtgctgaacattcctcacccatccgtgatttccagtccccttctcaagtctctccattcagcaggacccccgctgcttgcggtaacagcagccccccccgcccagcccctcgcgaaaaagaagggggtgaaacgcaaagccgacacgactactcctactccaaccgctatcttggcccctgggagccctgcctctcctccaggaagtctcgaaccaaaagcagcacggctgcctcctatgaggcgcgagtctggaaggcccattaaacctccgcgcaaagacctgccggactcccagcaacagcatcagtcttctaagaaaggaaagctcagcgagcagctgaagcactgtaatggaatcttgaaagaacttctaagtaagaaacatgctgcgtacgcttggccattctacaagcctgtggatgcgtcagcactcggactccacgactaccatgacataattaaacaccctatggacctgagcaccgtgaaaagaaaaatggagaatcgggattatcgcgacgctcaagaatttgctgccgatgtccgcctgatgttctccaattgctataagtacaatcctccggaccatgatgttgtggcaatggcccggaagctgcaagacgtgttcgagttccgctatgcaaaaatgcctgacgaacccctcgaacctgggccacttcctgtatccactgccatgccacccggcctggctaagagttcgagcgagtccagcagtgaggagtctagtagtgaatcttcatcagaggaagaagaagaggaggatgaagaggacgaagaggaggaggagtcagagtcgtcagactcagaagaagagcgagcacaccgactcgcggagctgcaagaacagctgcgggcagtacacgaacagctggctgctctctcccagggcccaattagcaagcccaaaagaaagagggaaaaaaaggagaagaaaaagaagcggaaggccgagaagcatcgcggacgggccggtgccgatgaagatgacaaggggccccgcgcccctaggcctccacagccaaaaaaaagcaaaaaggccagcgggtcaggcggaggctccgcagcactggggccctctgggttcggaccttccggaggatctggtacttag

SEQ ID NO: 110006 - DNA, 987 bp, synthetic construct
  misc_feature 1..987: note = Description of Artificial Sequence: Synthetic coding sequence
  source 1..987: mol_type = other DNA
taagctaaaagctcttcagaatcatcaagcgaggagtccagtagtgagtcatcctctgaggaggaagaggaagaggatgaagatgaagaggaggaagaatctgagtcatcagactctgaagaagaaagagctcacagactggccgagctacaggagcagcttcgagctgttcacgagcagttggctgcactcagccaaggccccatctctaagcccaagagaaagcgcgagaagaaggaaaaaaaaaagaaacgcaaagcagagaaacatcgagggcgagccggggctgatgaagacgataagggaccaagagcccctcggccgccccagcccaaaaagagcaagaaggcctccggctccggcggcggctccgccgcgcttggaccctccggcttcgggcccagcggaggatctggcacaaagctgcccaaaaaagcaacaaagactgcacccccggctctgcctacgggctacgactcggaagaagaagaagagtccaggcccatgagctatgatgagaaacggcagctgtctttggatattaataagttgcccggcgagaaactagggcgcgttgttcatatcatacaggcaagggagcctagcttgagggatagcaatccagaggagattgagatcgatttcgagactctgaaaccatcgaccttgagagagctggagaggtacgtcttgtcctgcctacggaagaaaccgaggaagccatatactatcaagaagcccgtcggcaaaacaaaagaagagctggcactagagaaaaaacgagaacttgagaagagattgcaagatgtcagtggacaactgaactcgaccaaaaagccccccaagaaagctaatgaaaaaacagagagctcatcagcacagcaggtcgcagtgtcaagattaagcgcgagcagctcttccagcgactcttctagtagcagcagctcttccagttcatctgatacctcagattccgactctggatag

SEQ ID NO: 110007 - DNA, 1947 bp, synthetic construct
  misc_feature 1..1947: note = Description of Artificial Sequence: Synthetic coding sequence
  source 1..1947: mol_type = other DNA
atgttgcagaatgtgactccgcacaacaaactgccaggtgaggggaacgctggcctgctggggcttggcccagaggcagcagcgcctgggaaaagaattcgaaagccgtcattgctgtatgaggggttcgagagccccacgatggcctcagttccagcactgcagctgacacccgcaaatccccctccacctgaagtatccaaccccaaaaaacctggacgcgtgaccaaccaactccagtacctgcataaggtagtgatgaaggctctctggaaacaccagttcgcatggccctttaggcagccagtggacgcagtcaagcttggcctccctgattaccacaaaatcatcaaacagcctatggatatggggacaatcaaacgccgcctcgagaacaactactactgggccgcctccgaatgcatgcaggatttcaacaccatgttcactaactgttatatctacaacaagcctaccgacgatatagtattaatggcccagactctcgagaagatctttttacagaaagtagcctctatgccacaagaagaacaggagcttgtggttaccatcccaaaaaacagtcacaaaaagggggcgaagctcgctgcacttcagggatctgttactagtgcccatcaggtgccggctgtgtcaagcgtatctcacactgcgctttacactccccctcccgaaatcccaacgactgtactgaatattccgcatcccagcgtgatctcgtcaccgctcctgaagagtcttcacagcgccggacccccattactcgcagtgacagcagccccccctgcccaacctctcgccaaaaagaagggagtaaaacggaaagccgacaccactactcccactccaacagccatcctcgcccctgggtccccagccagtccacctggttctctcgagccaaaagcggcgagactgccccccatgagacgtgaatctggccgcccaattaaacctccacgaaaggacctgcctgattcacagcagcagcatcaatctagcaagaagggaaagctgtcagagcagcttaagcactgtaacggaatcctaaaggagttattgagcaagaaacacgcggcatatgcctggcccttctataagcccgtagatgcaagtgcactcgggctccacgactaccacgacattatcaagcatcccatggacctgagcaccgtgaagaggaagatggaaaaccgggactatcgggacgctcaggagttcgccgcggatgtgcggctgatgttttcaaattgctacaagtacaatcctcccgatcacgacgtagtcgcaatggcacgcaaacttcaagacgtcttcgagttccgatatgcgaagatgcctgatgaacccctggagcccggcccattgcccgtgtccaccgcgatgccgcccggtttggcaaagtcatcgtctgaatcctcaagcgaggagtcatccagtgaatcatcctcggaggaggaggaagaggaggatgaggaggatgaggaagaagaggaaagcgaatcaagcgacagcgaggaggaacgggcccacaggcttgctgagcttcaggagcagttaagagccgttcatgagcagctggcggctctgtcgcaggggcctattagtaagccaaaacggaaacgcgagaaaaaggaaaaaaagaaaaagagaaaagcagaaaaacacaggggccgtgccggagcggatgaggatgataagggtcctagggcacctaggccaccccagccaaaaaagtccaagaaagctagcggtagtggaggcggatcagcagctctcggaccaagtggcttcgggccatccggagggtctggtaccaaactccaggcgggagtgcagtggagagacctaggtctcttgcagcctcccctgctggggttcaagcggttctcctgcctgagccttccaagttcccaggactactag

SEQ ID NO: 110008 - DNA, 2424 bp, synthetic construct
  misc_feature 1..2424: note = Description of Artificial Sequence: Synthetic coding sequence
  source 1..2424: mol_type = other DNA
taaaacggcggcggtggctccgccacagcccgcggtggagagtatcgtctccctggagaaggcaatgcagggcttctggggttaggaccggaggccgccgccccaggcaagcgaatccgcaagccatccctgctgtacgaaggcttcgagtcccctaccatggcatctgtgccggctctccaactcaccccggcaaacccccctcctccagaggtcagtaacccaaaaaagccgggtcgtgtaaccaaccaactccaatacttacataaggttgtcatgaaagctctctggaagcatcaatttgcctggccatttcggcagcccgtggacgccgtaaagctgggcttacccgattatcacaagatcatcaagcagccaatggacatggggacaattaagcgcaggctcgagaataattattactgggcagcgtccgagtgtatgcaggactttaacacaatgttcacaaactgctatatctacaacaagcccaccgacgatattgtcctgatggctcagactctggaaaagatttttctgcagaaggttgccagcatgccccaggaagaacaggaattggttgtgacgattccaaaaaactcccacaaaaagggcgccaaattggctgcactacagggaagcgtgacctccgcccaccaggtgcccgcagttagcagcgtatcacatactgccctgtatactccgcctccggaaattcctactaccgtatttaacatccctcacccttctgtgatttcttcccccctcttgaagtctttgcactctgctggcccccctctactggccgtaactgcagccccgccggctcaaccgttggctaaaaaaaaaggtgtgaaacgcaaagcagatacaaccaccccaacccccacggccatcctggctcccgggtcccctgcatcccctcccggttcactagagccaaaagctgcacgtctcccccccatgcgccgggagtctggtcgcccaatcaaacccccgaggaaagatctccccgattctcagcaacagcaccaatcctctaaaaaaggcaaactgagcgagcagttaaaacattgtaacgggatcttgaaggagttgttatctaagaagcacgccgcctatgcatggcctttctacaagcccgtggatgctagcgcactgggcctgcacgactaccacgacattatcaagcatccaatggacctctccacggttaagaggaaaatggaaaaccgtgattatcgcgacgcccaggagtttgccgctgatgtccgcctgatgttctctaattgttacaagtacaacccaccggatcacgacgtggttgccatggcccgtaagcttcaggacgtcttcgagtttcgctacgcaaagatgcctgacgagcccttggaacctggcccattgccagttagcactgcgatgcccccaggtcttgcgaagagctcatctgagtcctcctcagaggaatccagtagcgagagcagcagcgaggaggaagaagaagaggatgaggaggacgaggaagaagaagaaagcgaatcctcggattctgaggaagagcgggcccatcgtcttgccgagcttcaggagcagctgagggcagttcacgagcagcttgcagcactgtcacagggacccatctcgaaacctaagcgcaagcgagaaaagaaggagaagaaaaaaaaacgaaaagctgaaaagcatagaggacgcgccggcgccgacgaggacgacaaaggaccacgcgccccgagacccccccagccaaagaaatccaagaaagcctccgggagcgggggaggctcagctgcccttggtccatccggctttggaccatctggggggagtggaactaaattgccaaagaaagccaccaagactgcacctcccgcgctccctaccgggtatgatagtgaggaggaggaggagtcacgcccaatgagttacgacgagaagaggcagttgagtttggacatcaataagctccctggcgagaaactgggaagggtcgtgcatattattcaggccagagaaccttccctgcgcgattctaacccagaagagatagaaatcgatttcgaaacactcaaaccgagtaccctccgagagctcgaacggtatgttctctcctgcctgagaaaaaagcccaggaagccctataccatcaaaaagccggttgggaaaacaaaggaagaactggcactagagaaaaagcgggaactggaaaagagactgcaggatgtttctggacagctcaattcaacgaagaaaccaccgaagaaagctaatgaaaaaactgagtcctcatccgcgcagcaggtggctgtgtcccgcctgagcgcgtcttcatcaagctcggacagtagctctagcagcagctcatcatcttcatctgatacctcggatagtgattccggatag

SEQ ID NO: 110009 - DNA, 891 bp, synthetic construct
  misc_feature 1..891: note = Description of Artificial Sequence: Synthetic coding sequence
  source 1..891: mol_type = other DNA
tgacggccccttggagtccagcagcctggcgcacgtttgccgggggaaggtaatgccggcctcctgggacttggtcccgaagcagccgcacctggaaagcgcattaggaagccttcactactgtacgaagggttcgagtccccaacaatggcctccgttccagcgctgcagctgacccccgctaaccccccacctccagaagtgtcaaacccaaagaaacccggtcgcgtaactaatcagctccaatatttgcacaaggtcgtcatgaaagccttgtggaagcaccagttcgcatggcccttccggcaacccgtggacgccgtgaagttgggcttgccggattatcacaaaattattaaacagccgatggacatggggactatcaagcgccgcctggaaaacaattattactgggcggcctccgaatgcatgcaggattttaataccatgttcaccaactgctacatctacaacaaaccgacagacgatatagttctcatggcacaaaccctggaaaagatcttccttcaaaaggttgcaagcatgccccaggaagaacaagaactggtggtgactatccccaagaatagccacaagaagggagcaaaattggccgctctgcagggatcggtgacttccgctcaccaagtacccgccgtctctagcgtctcgcataccgctttgtacaccccccctccagagataccaactactgttttcaatattccccatccgtcagtgatcagttccccactgctcaagtcattacacagcgccggaccacccctgctggcggttacagccgctccacctgctcagcccttagcgaagaaaaagggggtgaagcggaaagctgatactactacacccactcccactgctattttgtag

SEQ ID NO: 110010 - DNA, 2265 bp, synthetic construct
  misc_feature 1..2265: note = Description of Artificial Sequence: Synthetic coding sequence
  source 1..2265: mol_type = other DNA
atggcgtctgtgcccgctctgcagctgacacccgccaatcctcctccacccgaagtgagcaatcccaagaaaccaggacgtgttaccaatcagctccaatatcttcacaaggtggtcatgaaagctctctggaaacatcagttcgcctggccattcaggcagccggttgatgccgttaagctggggcttcctgactaccataaaattatcaaacagcccatggacatggggactataaaaagacgtcttgaaaacaattactattgggcagcctccgagtgtatgcaggatttcaatactatgtttaccaattgctatatatataataagcccacagatgacattgtcctgatggctcagaccctggagaaaatatttttgcagaaggtcgcttccatgcctcaggaggagcaggaactggtggtgactattccaaaaaacagtcacaagaaaggtgcgaagctggcggcactgcaagggtccgtgaccagcgcacaccaggtccccgccgtcagctctgtatcccacacagccctgtataccccacctcccgaaatccctactaccgtcttgaatatcccccacccctctgttatctctagcccactgctaaagtccttgcactccgctggccctcctctgcttgccgttaccgccgctcccccagcccagcccctggcaaagaagaaaggagtgaagaggaaggccgatactaccaccccaacccctacggccattctggccccgggttctccagccagccccccaggttccctggaacctaaggccgcgcggcttccccccatgcgccgagagagcggacgcccaattaaacccccacgcaaagacctccccgactcccagcagcagcaccagtcaagtaagaaggggaagctgtctgagcagctcaaacattgcaatggcattctgaaagaactgctgtcaaagaaacacgccgcttacgcatggccattctacaaaccagtggacgcatctgccttaggactgcatgattaccacgacatcataaagcatcctatggacttgagtaccgtgaagcgtaagatggagaaccgagactaccgcgacgcacaggaattcgccgccgacgtcagactgatgttttcaaattgttacaaatataacccaccggatcatgatgtggtcgcaatggctcggaagctccaggatgtctttgaattccgatatgctaaaatgcccgatgagcccctggagcccgggcctctccctgtgtcaactgctatgcccccaggcctggctaaatcttcctccgaatcgtcatccgaagagtctagctccgagtcttcctcagaggaagaggaagaggaggatgaagaggacgaggaggaagaggagagcgaatcgtcggacagcgaagaagagcgtgcacatagattagcggagttgcaagaacagctgcgcgctgtgcacgagcaactggccgctctcagtcaggggcccatctcaaagccaaaaaggaaacgtgaaaagaaagaaaaaaaaaaaaagcgcaaagccgagaagcacagaggcagagccggtgctgacgaagacgacaaaggcccaagagcccctcgaccaccccagcccaagaagtctaagaaagcgtcaggctctggagggggaagtgctgccctgggaccatctggtttcggtccatcgggggggagcggcaccaagctgccaaagaaggcaacaaagaccgcacctcccgctcttcccactggctatgattccgaagaagaagaagagtctaggcccatgtcctacgacgaaaagaggcaactgagcctggacattaacaaacttcccggggagaaactaggaagggtggtgcatatcatccaagcacgcgaacccagcctgcgagacagcaacccagaagagatcgagatcgattttgaaactctgaaacccagcactttgagggaacttgaaagatacgttctcagctgcctgaggaagaaacccaggaaaccctacaccatcaagaagcctgtcggcaagaccaaagaggaattagcactggaaaaaaaaagggaacttgaaaagaggcttcaagacgtgagtggccagctgaactccacaaaaaaacctcctaaaaaagccaacgaaaaaactgagtcctcctccgctcaacaggtggctgtgagcaggctcagtgcatcctcctcatcctccgattcatcgagctcatcctcctcaagctctagtagcgatacgagcgactctgactctggatag

SEQ ID NO: 110011 - DNA, 2406 bp, synthetic construct
  misc_feature 1..2406: note = Description of Artificial Sequence: Synthetic coding sequence
  source 1..2406: mol_type = other DNA
atgctgcaaaatgtcacacctcacaacaagctcccaggcgagggcaacgccgggctgctgggccttggtccagaagcggctgcacctggaaagcggatccgtaaaccctctctgctgtacgaaggctttgaatctccaacaatggcatcggtgcctgcactacagcttactcctgcaaacccccctcctcccgaggtctcgaatccaaagaagcccggccgcgtgaccaaccaactgcaatatctacacaaagttgttatgaaagctttatggaagcatcagtttgcgtggcctttccgccagccagtggatgcagtcaagctggggcttcctgactaccacaagatcatcaaacagcctatggatatgggaaccattaagcgacggctggaaaataactattattgggccgctagtgagtgcatgcaagactttaatactatgttcactaactgttacatttataacaagcccaccgatgatatagtgttgatggcccaaacgttagagaagatattcctccaaaaggttgctagtatgcctcaagaagaacaggagctggtagtcacaatcccaaagaactctcataagaaaggggccaaacttgcagccctgcagggatctgtgacgtccgcccaccaggttccggctgtgtcttccgtgagccatacagctctttataccccaccccccgagatccctaccaccgtactaaacattccccacccatccgtcattagctctcctctgctgaaaagccttcattctgccggtccccccctgctagccgtgactgcagcaccaccagctcagccattagccaaaaagaaaggggttaagaggaaggcagatactactacaccaactccaactgcgatcttggccccagggtcacctgcctccccaccaggttccctagaacccaaagccgcaagactgcctcccatgaggcgagaaagcgggaggcccatcaagccacccagaaaggatctgcctgacagtcagcagcagcatcagagctccaagaaaggcaaattgagtgagcagctcaagcactgtaatggtatcctcaaggagctgctatctaagaaacacgctgcgtacgcgtggcctttttataaaccagttgatgctagcgcgcttggacttcatgattaccatgacattataaagcaccctatggacctgtctacggtgaagcgcaagatggaaaatagggattaccgggacgctcaggagttcgccgcggatgtgcgcctgatgttctccaattgttataagtataacccgccagatcatgacgtggtggcgatggctagaaagcttcaagatgtgtttgaatttcggtacgccaagatgcccgatgaaccccttgaacccggaccactgccagtgtcaaccgcgatgcccccaggccttgcgaaatcaagcagcgagagcagtagcgaagaaagcagttcggaatcttcttcagaagaggaagaggaagaggacgaagaagacgaggaggaagaggagtctgagagttcggattccgaagaggaacgagcacaccgcctcgccgagcttcaggagcagttaagagctgtgcatgagcagctcgccgcgctttctcaaggacctattagcaagcccaaacgaaagcgggaaaaaaaggagaagaagaaaaaaaggaaggctgaaaagcatcgggggcgggcaggggcagacgaggacgacaagggtcctcgggctcctcggccgcctcagccaaaaaaatctaaaaaggcaagcggtagcggaggcggcagcgctgccctcggaccgtctgggtttggcccttccggtggcagcggcacaaaattaccaaagaaagctaccaagacagcgccacccgctttacccaccgggtatgactcagaggaggaggaagagagcaggcccatgtcctacgatgagaaaagacagctgagcctggacattaacaaattaccaggggagaagctagggcgggttgttcatataatccaggcacgtgaaccatctctgagagatagcaatcccgaggagatcgaaatcgactttgagaccctgaaaccaagtacactcagggaactggaacggtatgtgctctcatgtctgaggaagaagcccagaaagccttataccattaaaaaaccggtaggcaaaacaaaagaggaattagctctcgaaaagaagcgcgagctggagaagcgattgcaggatgtcagcggccaactgaactccactaaaaagcctcccaagaaggctaatgagaaaacagagagtagttccgcccagcaagtggccgtgtcacgattgtctgccagcagctctagctccgacagctccagctcatcaagctccagcagtagctcagacactagtgactctgactcgggctag

SEQ ID NO: 110012 - DNA, 2424 bp, synthetic construct
  misc_feature 1..2424: note = Description of Artificial Sequence: Synthetic coding sequence
  source 1..2424: mol_type = other DNA
tgaaatggcgggggtggttcggctacagcgagaggcggagaatacaggctccccggagaaggaaacgccggcttacttggcctggggccggaagcggcggccccagggaagagaattcgaaaacccagcttgctctacgaaggctttgaatcaccaacgatggcctcggttcctgctctgcagcttaccccagcaaatcccccaccccccgaagtgtccaaccccaagaaacccggccgagttaccaaccagcttcaatatttacacaaggtggtgatgaaagcattatggaagcaccagttcgcatggccgttccgacaaccggtcgatgcagtgaagttggggttgcccgattaccacaagattatcaagcagcccatggatatggggaccattaagcggcggctcgagaataactattattgggctgcttctgaatgcatgcaagatttcaataccatgttcacaaactgctatatatataacaagcctaccgacgatattgtgcttatggcccagacactcgaaaaaatatttctgcagaaagtcgcgagcatgcctcaagaggaacaggaactggtggtgacgatccccaaaaatagtcacaagaaaggagccaaactggcagcacttcaggggtccgtgacgtctgctcatcaggtgcctgcggtctcctcagtgtctcacaccgccctctataccccgcctcccgagatccctacaacagtgcttaacattcctcatccaagtgtcatctcaagccctctgcttaaatctttgcattctgccggccctccactgctcgctgtgacggctgcccccccggcacagcctctggctaagaagaaaggcgttaagaggaaggccgataccacaacgccaactcccacagcaattctggcacctgggagtcccgctagcccgccagggtctttggagccgaaagcagcacgcctcccacccatgcgtcgggaatccggaagaccgataaagcctcccagaaaagaccttccagattcccagcagcaacatcaatcaagcaaaaagggcaaactgtctgagcagctgaaacactgcaacgggatcctgaaggagctgcttagtaaaaaacatgctgcttatgcgtggccgttctataagccagttgatgcatccgccttaggtttacatgactaccatgatattataaaacacccaatggacctgagcacagtaaagagaaagatggaaaatcgcgattatcgggatgctcaggagtttgccgcggacgtgaggctcatgttcagcaattgctacaagtataaccctcctgatcatgatgtagtcgccatggccagaaaactgcaggatgtgttcgagttccggtacgcgaagatgccggacgagcctctagaacctggacctttgccagtgtctacagcaatgccccccggcctggctaagtcttcatctgaatcatcaagtgaagagtctagctccgaatcgagcagtgaggaagaagaggaagaggacgaagaggacgaagaagaggaggaatccgaatcttcagattccgaagaggaaagggctcacagacttgccgaacttcaagagcaactaagggccgttcacgagcagctagcagccctgtctcagggacccattagtaaacccaagcgcaaacgggagaagaaggaaaagaaaaaaaagcggaaagccgagaagcacagggggagggccggagccgatgaggacgacaaagggcctcgcgcccctaggccacctcaaccgaagaagagcaaaaaggcctcaggttccggcggcggtagtgccgccttggggccctctggatttgggccatccgggggctctggaaccaaactccccaaaaaagctaccaaaactgctccacctgctctacctacgggttatgactccgaagaggaggaagagtcccgcccgatgagctatgatgagaagagacagctatctctcgatattaataaactccctggggagaagttaggccgcgtggtgcacattatccaggcaagggagcccagcttgcgcgattccaatcctgaggaaattgagatcgactttgaaacactaaaaccatcgacactcagggagctggagagatatgtcctgtcctgcctgcgtaagaagcctagaaagccctatactatcaaaaagccagttggaaagaccaaagaggagctggccctcgaaaagaaaagagaactcgagaaacgactgcaggatgtgtccggccaactcaacagcactaaaaagccgcctaagaaagccaacgagaaaactgagagcagttccgcccagcaggttgctgtgtccagactgtctgcttcctcctcgtcatccgattccagctcatcttcaagttcctctagctcctctgatacaagcgatagcgattccggctag

SEQ ID NO: 110013 - DNA, 1092 bp, synthetic construct
  misc_feature 1..1092: note = Description of Artificial Sequence: Synthetic coding sequence
  source 1..1092: mol_type = other DNA
tgagcgaagagtagtagcgagtctagcagtgaggagtcttcctctgaaagcagtagtgaggaggaggaggaagaagacgaggacgaagaagaagaagaatccgagtcctccgatagtgaggaagagcgtgcacacaggctcgccgagcttcaagagcagttaagagcagtgcacgaacaacttgctgctctgtcccaggggcccatctccaagcccaaacgtaaacgagaaaaaaaagaaaagaaaaaaaaacggaaggctgaaaagcatagaggaagagccggggccgatgaagacgacaagggccctcgggccccccgtccccctcagccaaagaaatccaaaaaggcttcaggatccgggggaggtagcgcagcacttggtccatcggggttcggtccatccggaggatctgggaccaagttgcaggcgggcgtgcagtggagagacttaggcctgctccaaccaccactcttagggttcaagcggttttcgtgtctgtcgctgccctcctcgcaggactaccggttgccaaaaaaggccactaagacagctccccctgcacttcctaccggctacgactctgaggaggaagaggaatcaaggcccatgtcctatgatgagaaacgacagctgtccctcgacatcaataagctaccaggagagaaactcgggagggtggtgcatattatacaggcccgcgagccatccctgagggattccaaccctgaggagattgagattgacttcgagaccctgaaaccatccactctccgggagctcgagcgatacgttctcagctgcctaaggaagaagccgcgcaaaccatacacaataaagaagccagtaggcaaaaccaaagaagaactggcactggagaagaagcgtgagcttgaaaagcggttgcaggacgtatcgggtcaactgaatagtaccaagaagccgcccaagaaggccaatgaaaaaaccgaaagcagttctgctcagcaggtcgcagtcagtcgcctgtccgctagctccagctcatccgacagcagtagcagctcttcatcgtccagtagcagcgacacttctgactccgacagtggttag

SEQ ID NO: 110014 - DNA, 2511 bp, synthetic construct
  misc_feature 1..2511: note = Description of Artificial Sequence: Synthetic coding sequence
  source 1..2511: mol_type = other DNA
atgctgcagaacgtgactcctcacaataaactgcccggtgaaggaaacgcaggcctgcttgggctaggacccgaggcagctgctccaggcaagcggatcagaaagccatcactgctgtacgagggcttcgaatccccaacgatggcatctgtgcctgctttacaactcacgcctgctaaccctccaccaccagaagtatccaatccaaaaaagcctggacgagttacaaatcagctacagtatcttcacaaggtagtgatgaaggctctgtggaagcaccagtttgcctggcctttcaggcaaccagttgatgcagttaagcttggactgcccgactaccacaagatcataaagcagcctatggatatggggaccattaaacgccgcctcgagaataactactactgggcagcctcggagtgtatgcaagactttaacacgatgtttaccaactgctacatttataacaaacccaccgatgacatagtgctaatggctcagaccctggaaaagatttttttgcaaaaggtcgccagtatgccacaggaggaacaggagcttgttgtaactattcccaaaaactcccacaagaagggagctaagctggcagcgttgcagggttctgtaacctcggctcaccaggtgccggcagttagcagtgtctcacatactgcactgtacacaccgccacctgaaataccgactacggtgctgaatatcccccacccctcagtgatcagcagcccacttttaaagagcctccactctgccggaccacctctgctggcggtcactgctgccccacccgcgcaacccctggctaagaagaaaggagtaaagagaaaggccgacaccaccaccccaacacctaccgcgattctggcacccgggagtcccgcttcccctccgggatccctcgagcccaaagccgctaggctaccgccaatgcggcgggaaagcggtcggccgatcaaacccccacgaaaggatttgcccgattcgcaacaacagcaccaaagttcgaaaaagggtaagctgtcagagcagctgaaacattgcaacggcattttgaaggaacttctgagtaagaagcatgcggcctacgcgtggcctttctacaagcccgtggacgctagtgccttagggctccacgattaccatgatattatcaaacacccgatggacttgagcaccgtaaagaggaagatggagaatagagattacagggacgctcaagaattcgcggcagatgtgaggctcatgtttagcaattgttataagtacaatccaccggatcatgatgttgtcgcaatggcaaggaagctgcaggatgtatttgagtttcgttacgccaaaatgcccgacgaaccactggagcccggtcctctgcccgtctctaccgcgatgccacctgggctggccaaaagctcgagcgagtcgtcttcggaggaatcttccagcgagagcagttcggaagaggaggaagaggaggatgaggaggatgaagaagaggaagagtccgagtctagcgattctgaggaggagcgggcgcatcgcctggccgagcttcaggagcaactgagagccgtgcacgagcagctggccgccctgtcacagggccccattagtaagcccaagcggaagcgagaaaaaaaagagaagaaaaagaaaaggaaggccgagaagcatcgtggtcgggccggggccgatgaagatgataagggcccacgtgctccaaggccgcctcagccgaagaagagtaaaaaagcatctgggtctggtgggggatcagcggcgttaggtccctccggcttcgggcccagtgggggaagcggtacgaaattgcaagcaggggtgcaatggcgggatctcggcttactgcagcccccactgctaggctttaaaaggttctcgtgtttatccctgccctcgtcccaagattatagactccctaaaaaggccacgaagaccgcccctccggctctgcctaccggatacgacagcgaggaagaggaagaatctagaccaatgtcatatgatgaaaagagacagctgtctctggacattaataagctgccaggggagaagctaggtagagtcgttcatatcattcaagctagagagcctagtctgagggacagcaacccagaggagattgaaatcgacttcgaaacgctcaaaccaagtacactgagagagctggaacggtacgttctgtcctgtcttcgaaaaaaacctcgaaagccttacaccatcaagaagccagtcggtaaaacgaaagaggagctggccctcgaaaaaaaacgggaactcgagaagagactgcaggatgtctctggtcagctgaacagcacaaaaaaaccacccaaaaaggccaacgaaaagaccgaatcttcatctgcccagcaggtagccgtttcgcgactgagcgcttcatcttcttctagtgattcaagttcttcctccagctcctcttcctcaagcgacaccagcgatagcgattctggttag

SEQ ID NO: 110015 - DNA, 2046 bp, synthetic construct
  misc_feature 1..2046: note = Description of Artificial Sequence: Synthetic coding sequence
  source 1..2046: mol_type = other DNA
atggatatggggaccattaagcgccgtctggagaacaattattactgggctgcctcagaatgtatgcaagatttcaacactatgtttaccaactgctacatatacaacaagccgaccgacgatatcgtcctgatggcacagactttggagaagattttcttacagaaggtggcatctatgccccaggaagagcaagagctggtcgtcactatcccgaaaaactcgcataaaaagggggctaagctggctgccctccagggctctgtgacaagtgctcatcaggttcccgccgtcagctctgtaagtcataccgccctgtatacacctccacctgagatcccaaccaccgtgctgaacattccccatccaagcgtgatctcaagtcccctcttgaaaagcctccactctgccggtcccccactgttagccgtaacagctgctccacctgcgcaacctctggccaagaaaaaaggcgttaagagaaaggctgacaccaccacccccacacccactgccatactagcgccagggtcaccagcatcaccaccagggtccctggaacctaaggctgcacgcctgccacctatgcggcgagagtccgggcgcccaattaaacccccgagaaaggatttacctgactctcagcaacagcatcagtcatcaaaaaaagggaaattgtccgagcaactgaaacactgcaatggcatcctcaaggagctcctgtctaaaaagcacgcagcctatgcctggccattttacaaacctgttgacgcctccgctctcggtctgcatgattatcacgacataatcaaacatccaatggacctgagcactgtgaaaagaaagatggaaaacagagactaccgggatgcccaagagttcgcagcagatgttcgtctcatgttcagtaattgttacaagtacaacccacccgaccacgatgtcgtggcaatggctcgtaaactccaagatgtttttgagttccggtacgcgaagatgcccgacgaaccgctggagcctggccctttgcccgtgagcacagcgatgcctcccggactggccaaatcgtcatccgagagcagctccgaagagtcctccagcgagtctagctccgaggaggaggaggaagaggatgaggaggatgaagaggaggaagagtctgaaagttccgactcggaagaagagcgtgcacaccgactcgccgagctgcaggaacaactgcgagctgtgcatgaacagctagctgcgctatcccagggccccatttcgaaacctaagcgcaagcgtgagaaaaaagaaaagaaaaagaagcgcaaggctgaaaagcatagaggacgggccggggccgacgaggacgacaagggtccgcgagccccccgtccacctcagccgaaaaaatccaaaaaggcaagcggttcaggaggcggctcggcggcattgggcccctcaggctttggtcctagtggagggtccgggaccaagctaccaaaaaaggctactaagaccgcccctcccgcgctgcccaccggctatgattccgaggaggaggaagaaagcaggcctatgtcttacgatgaaaaacgccaactctcattggatatcaacaagctgcccggcgagaaacttggaagggtggtacatatcattcaggctagagagccctccttgcgggattctaatccagaggaaattgagatcgattttgaaacactcaagccaagtacacttagagagctggagaggtatgtgttaagctgcctgcggaagaaacccaggaagccctatacaatcaaaaagccggtgggaaagacaaaagaggaacttgccttggagaaaaagcgcgaacttgaaaagcggttacaggacgtgtctgggcagttgaacagcaccaaaaaacctcctaagaaggctaacgagaaaactgaatctagctctgcgcagcaggtagcagttagccggctcagcgcgagcagttcgtccagcgacagctcctcctcttcaagttcatcctcctcctccgatacttcagacagcgatagcggctag

SEQ ID NO: 110016 - DNA, 2424 bp, synthetic construct
  misc_feature 1..2424: note = Description of Artificial Sequence: Synthetic coding sequence
  source 1..2424: mol_type = other DNA
taaaacggaggagggggcagtgcgaccgcacgaggcggagaatatcggttgcctggtgaagggaacgctgggctcctgggcttgggtcccgaggccgccgcccctggcaagaggatacggaagcctagcctgctgtatgaggggtttgaaagccccactatggctagcgtccccgccctgcagctaactcctgctaaccctccccctccggaagtgagtaacccaaagaagcctggtcgggtgacaaaccaattgcaatatttgcacaaggtcgttatgaaggccctgtggaagcatcagtttgcttggcccttccggcaacctgtagacgccgtcaaactggggttgcccgactatcataaaattattaagcagccaatggacatggggaccataaagcgacgactggagaacaactattactgggcggcttcagaatgcatgcaagatttcaacaccatgttcacgaattgttatatctacaataagccaaccgatgatatcgttttgatggcacaaactttggagaagatttttctacagaaagtagcatccatgccgcaggaagaacaggagctggtggtaacaatccctaaaaactcacacaagaaaggagccaaactcgcagccctgcaggggtcagtgactagcgcccaccaggtgcccgctgtttcctcagtgtctcataccgcattgtatacaccaccccccgagatcccaaccacagtgctcaatattcctcatccttctgtgatctcaagccctctcctgaagagcctacattccgcgggccccccccttttagcagtgaccgccgccccgccggcacagccactggccaagaagaaaggagtgaaacgcaaggctgataccaccacgccaacacctactgcaatcctcgcacctggtagtcccgcctcaccaccagggagtctggagccgaaagctgccagacttcccccgatgaggcgggagtccggacgcccaatcaagcccccaagaaaggacctccccgactcacagcagcagcaccagagcagtaagaaaggtaagctctccgagcaactgaagcactgcaacggtattctgaaggagctcctgagcaaaaagcatgcagcatatgcctggcctttttataagcccgtagacgcctccgccttgggactccatgattaccatgacattattaaacaccccatggatctgagtactgtgaagcgcaagatggaaaatagagactaccgggatgcgcaagagtttgccgctgacgttaggttgatgttcagcaattgttataaatacaacccaccagaccacgacgtggtcgccatggcccgaaaactgcaggatgtattcgagttccgctatgccaagatgccggacgaacctctggaacctggacctctgcccgtatccactgctatgccacccggcctcgcaaagagttcaagtgagtcttccagcgaggagagctcgtctgagtcaagcagtgaggaagaggaggaggaagatgaggaggacgaggaggaggaggagtcagagtccagcgacagcgaagaggagcgcgcacatcgtctcgccgaactgcaggagcagttgcgagctgttcacgagcagctggctgcactgtcacaggggccaatctcaaagccgaaacggaaacgtgaaaaaaaagaaaaaaagaagaagcgtaaggctgaaaaacatagagggcgcgccggcgctgacgaagacgataaaggtcctcgggccccccgcccgcctcagcccaagaagtccaagaaggcttctggtagcggcgggggatcagccgctctggggcctagcggattcggcccctccggtggctctggaactaagctgcctaagaaggccacgaaaaccgctccccccgccctgccaacgggctacgatagcgaagaggaggaggagagtcgacctatgagctatgacgagaagcgccagttgagcctggatatcaataagctgcctggggagaaacttggacgagtcgttcacattatccaggctcgtgagccaagcctcagagacagtaacccagaagagattgaaattgactttgagactctgaaaccgagtactctgcgtgagctggagcggtatgttctctcatgtctgcgaaaaaaaccacgaaagccgtacacgattaaaaagcccgtgggaaagactaaagaagagctcgcactggaaaagaagcgtgaactggagaaacgactacaggatgtcagcgggcaactgaacagcacaaaaaaaccacccaaaaaagccaatgagaaaaccgaaagcagttcagcacagcaggtggccgtgagccgtctttctgcgagcagctcgagttcagactcatcatcctcttcctcttcctcctcttctagtgatacatctgattccgattctggatag

SEQ ID NO: 110017 - DNA, 987 bp, synthetic construct
  misc_feature 1..987: note = Description of Artificial Sequence: Synthetic coding sequence
  source 1..987: mol_type = other DNA
taggcgaagagttcctctgaatcttcatccgaggaaagtagtagcgaaagctctagtgaagaggaagaagaggaggatgaggatgaagaggaggaagagtctgaatcgagcgactcggaggaagagagggcccaccgcctcgcagagctgcaggaacaattaagggctgtccacgagcagctcgcagctctgagtcagggacctatctcgaaacccaagaggaagagggagaaaaaagagaaaaagaaaaaaagaaaggcagaaaagcaccgaggtcgggcgggtgcggatgaagatgacaagggacctcgagccccacggccgcctcagccgaagaagagtaagaaagcttcaggctctggcggcggcagcgccgccctcggcccctctggcttcgggccttcaggagggtccggcactaaattaccaaagaaggctactaaaacagcccctccagcgcttccgacagggtacgattccgaggaggaagaggagtccaggcctatgagctacgatgagaagcgacagctgtctctcgacattaacaagctgcctggtgaaaaattaggaagggtggtgcacattatccaggccagggagccctccttgcgcgattcgaacccagaggagatagaaattgattttgagacgcttaagccttcaacactaagagaactggagcgctacgtcctgtcatgcctccggaagaagcctaggaaaccctatacaataaaaaagccagttgggaagaccaaggaggaactggccctcgagaagaagcgtgagttggaaaagcgtctgcaggatgtgagcggccagttaaactctaccaagaagccacccaaaaaggcgaatgagaaaactgaatccagctctgctcaacaggtagcagttagtcgtctgagtgcttcctcttcttctagtgacagctccagcagctcgagttcttccagtagcagcgacacctctgattctgactctggctag

SEQ ID NO: 110018 - DNA, 2511 bp, synthetic construct
  misc_feature 1..2511: note = Description of Artificial Sequence: Synthetic coding sequence
  source 1..2511: mol_type = other DNA
atgctccagaacgtgactcctcacaacaaattgcctggcgaggggaatgcaggactactgggtctaggacctgaggcggccgctcctggaaaaagaatcagaaagccttccttgctctatgagggcttcgagtcaccaaccatggctagcgtccctgctctccagttaactcctgctaacccaccaccacccgaggtctcgaaccccaagaaacctggccgcgtcacaaatcaattgcagtacttgcacaaggtggtcatgaaagctctctggaaacaccagtttgcttggccctttagacagccggtggatgctgtcaagctagggctgcctgactaccacaaaatcattaagcaacctatggatatgggcaccattaaacggcggctggagaacaattattattgggctgcttctgaatgcatgcaggacttcaacacgatgtttaccaactgttatatttataataaaccgacagatgatatcgtgctgatggctcaaacccttgaaaaaatattcctccagaaggtcgcctccatgccacaggaggagcaagagctagttgtaacaatcccaaagaattcacacaaaaagggggccaaactagctgccctgcaagggtccgtcacaagtgcccaccaggtgcctgcagtgtcctcagtttctcatactgctctgtatactccaccgcctgagatccctaccaccgtcctaaatattccccaccctagcgttatatcctctcctttgctgaaaagcctgcattcagcgggccctccactgctcgctgtgacggcagctccccccgcacagcccctggccaaaaagaagggtgtaaagcgcaaagccgacaccactactcccacacctaccgcaatcctggccccaggctcaccagcaagcccgcctgggtccctcgagcctaaagccgctcgacttcctccaatgcggcgcgaaagcggtcgtcccatcaagccccccagaaaagacctgcctgacagtcagcagcagcatcagtcttccaagaagggtaaactttctgagcagctgaaacattgcaacggtatccttaaagagctgcttagcaagaaacatgcagcctacgcctggcctttctacaaacccgtcgatgccagtgcactcggcctgcacgactaccatgatattattaagcacccaatggatcttagcacagtcaagcggaaaatggagaacagagattatcgggacgctcaggagtttgctgcagatgtgaggctcatgttttccaattgctacaagtataaccctcctgaccatgatgttgtggccatggcccgtaagcttcaagacgtgttcgagtttaggtacgctaagatgcctgacgagccattggagcctggaccgctacctgtttcgacagcaatgccgcccgggctggctaagtccagctccgaatcaagcagcgaagaaagctcaagcgaatctagtagtgaagaggaagaggaggaggatgaagaagacgaggaagaggaggaaagcgagagctccgattccgaagaggagcgggcccaccgtttggctgagctgcaggagcaactacgcgctgttcatgagcagctcgctgccctgtctcagggacctatctccaagcctaagcgcaagcgcgaaaagaaggaaaaaaagaagaaacgcaaggctgaaaagcacaggggccgggcaggagccgatgaagacgacaagggccccagagcccctcggccaccgcagcccaagaagagcaagaaagcttccggtagtggcggcggcagcgccgctctcggaccatctggctttgggccaagtggaggcagtgggactaagctgcaagccggagtgcagtggcgggatcttgggcttttgcagccaccactgcttggcttcaagcgattctcctgtctcagcctacctagcagccaggattacaggcttccaaagaaggctacaaagacggcacccccagcactgcctactggctatgattcagaagaggaggaggaaagccggcccatgtcctacgacgaaaaaaggcaactgtccctcgacatcaataagttaccgggagaaaagctgggacgagtggtccacatcattcaggcaagggagccatcgctccgcgactcaaatccggaggaaatcgagatcgattttgagaccctgaagccatctactctgcgcgaactggaacgctacgtgctaagttgcctgcgtaagaagccccggaagccatacactatcaagaagcccgtggggaagactaaagaggaacttgccctagagaaaaaacgcgagcttgaaaagcgactgcaagacgtgtctggccagctcaacagcaccaaaaaacccccaaagaaagcaaatgagaagaccgaatctagtagcgcccagcaagtagcagtgtcacggctgagcgcctcctcaagcagcagcgactcctcttcaagttcatcatctagctcctcctcagataccagcgactccgactctggatag

SEQ ID NO: 110019 - DNA, 2424 bp, synthetic construct
  misc_feature 1..2424: note = Description of Artificial Sequence: Synthetic coding sequence
  source 1..2424: mol_type = other DNA
taaaacggagggggtggcagtgcgacggcccggggcggcgaatatcggctccccggcgaaggcaacgcaggtctgctcggtctcggaccagaggccgcagcaccaggaaaacggattaggaagccatcactgctctatgagggtttcgaaagcccaacgatggccagcgtccccgccctgcagctcactccggcgaacccacctcctcctgaagtatccaatcctaaaaaacctggaagggttaccaatcagttacagtatttgcacaaggtggtaatgaaagctctgtggaagcaccagtttgcctggcccttccggcagccagtggatgccgtgaaattgggacttcctgattatcacaaaattattaaacagcccatggacatggggaccattaaaaggcgactggaaaacaattattattgggcagctagcgagtgtatgcaagattttaacaccatgttcaccaactgctacatctacaacaaaccgacggacgacatagtgttgatggcacagactttggaaaagatttttttacagaaggtggcgtccatgccccaagaagaacaagagctggtggtgactatccctaagaattctcacaaaaagggagccaagttagccgccctgcaaggtagcgtaacgtccgcacaccaggtgcccgccgtgtcttccgtgagtcacaccgcgttgtacacaccaccaccagaaatccccactacggtcctgaatattccacatcccagcgtgatcagtagcccacttctgaaatctctgcacagcgctggcccccccctcttagcagtgactgctgcacctcctgcccaacctctagcgaagaaaaagggagtgaaacgtaaagccgataccaccacgccaactcccaccgccatcctggcccctggcagcccagctagccctcctgggagcctggagcctaaagctgctaggttaccacctatgaggcgtgagagcgggagacctatcaagcccccgcggaaggatcttcccgactcccagcaacagcatcagagtagcaaaaaaggtaaactgagtgaacagcttaagcactgcaacggcatcctgaaagaactgctgtctaagaagcatgccgcctacgcatggccattttataaaccagtcgacgccagtgcgctcggcctgcatgattatcatgatatcattaaacacccaatggacctgtcaactgtgaagaggaaaatggagaaccgcgattaccgcgacgcacaagaatttgccgcagacgtccgattgatgttctccaactgttataagtacaaccctcctgaccacgacgtggtcgctatggctcggaagctgcaggacgtgttcgaattccggtatgctaagatgcccgacgaaccactggaaccaggtccactacctgttagcacagcaatgccgcctgggctggccaagtcgtcttcggagagctcctcagaagagagtagctctgaatcatcatctgaggaggaggaagaagaggatgaggaagatgaggaagaggaggaaagcgagagctcggactctgaggaagaaagagctcatcgactcgcggagttgcaggaacagttacgtgctgtccatgaacaattggcagccctgagccaggggcccatttccaagcccaaacggaaaagggagaaaaaggagaagaaaaaaaagcggaaagcagagaagcaccgaggtcgcgccggagctgatgaggatgacaaggggccacgggcgcccagaccacctcagccaaaaaagagcaagaaggcctcaggcagcggtggtggttctgcggcactagggccaagcggatttggacctagcggcggtagcggcaccaaattgccaaaaaaggctaccaagactgctcccccagcgttacctacaggttatgactctgaggaggaagaagagtctaggcctatgagttatgacgagaaaagacagctgtccctggatatcaacaaacttcccggggaaaagctgggccgagtggttcatatcattcaagcacgggaaccaagtctgcgcgactccaaccccgaggagattgaaattgattttgagaccctgaaaccatctactctcagagaactcgaaaggtatgtgttaagctgtctccggaaaaaacctcggaagccttataccattaaaaagcctgtgggtaagactaaggaagagctggctctggagaaaaagcgcgaacttgagaaaaggctccaggacgtgagtggacaactcaactccacaaaaaagccacccaagaaggcaaacgagaaaacagaaagttccagtgcacaacaggtcgcagtgtcccgattaagtgcatccagtagttcctcagacagttcgagtagctccagctcttcttcatccagcgacacatctgactccgatagcgggtag

SEQ ID NO: 110020 - DNA, 2265 bp, synthetic construct
  misc_feature 1..2265: note = Description of Artificial Sequence: Synthetic coding sequence
  source 1..2265: mol_type = other DNA
atggcaagcgtgcctgcgcttcaactcacccccgcaaacccacccccgcctgaggtgagcaatcccaagaagcctggccgggtaacaaatcaattgcagtacctgcacaaggttgtgatgaaggctctgtggaaacaccaatttgcgtggccattcaggcagcctgttgatgctgtgaaactgggccttcctgattatcataaaatcatcaaacaaccaatggatatgggcaccatcaaacgccgactggaaaacaattactactgggccgccagcgagtgcatgcaggactttaacactatgttcacaaactgttatatctataataagcccactgatgacatcgtgcttatggctcagaccctggagaagatttttctacagaaggtggcgagcatgccccaggaggagcaggaattagttgtaacaatccccaagaacagtcacaaaaaaggagctaagttggccgccctgcaggggagcgtgacctccgcacaccaggtgcccgctgtgtctagcgtcagccacactgcgctctatacaccccccccagagattccaactacagtacttaacattcctcacccctccgtgatctcatctcctcttctaaagtccttacatagcgctggccctcccctgctggcagtgaccgcagctccaccagcacagccactggcgaagaagaaaggcgtgaaaaggaaggctgacactacaacccccaccccgactgctatccttgccccgggctctcctgccagtcctcctggttctctggagcccaaggccgctcgccttccccccatgcggagagaatccgggcggcccattaagccacctcggaaggatctccctgactcccaacaacagcaccagagtagcaaaaaggggaagctatccgaacagttaaagcattgtaacgggattctgaaagagcttctgtctaaaaagcacgccgcatatgcctggcccttctataagccagtggatgcatccgcgctagggctgcatgactatcatgatatcataaagcacccaatggatcttagcacagtgaagcgaaaaatggaaaatagggattaccgcgacgcgcaggaattcgctgcagacgtgcgactgatgtttagtaattgctataaatataatcctccagaccacgatgtcgtagccatggcacgaaaactgcaggatgtgttcgaattcaggtacgcaaagatgcccgacgaacctctggagccaggtccgttgcccgtttctaccgcaatgccccccggtcttgcaaagagctctagcgagagtagcagtgaagaatcttcctcagagtcctctagtgaagaggaggaggaagaggatgaggaagacgaagaagaagaagagtctgagtccagcgattctgaagaagaaagagcacatcgcctcgccgaactacaagagcagcttcgcgccgtacacgagcagctagcggccctcagccagggtcccatctccaaacctaagcggaagcgcgaaaagaaagagaagaagaagaagcgtaaggctgaaaagcataggggccgagctggagccgacgaggatgacaaagggccccgtgcaccacgccctcctcagcccaagaaaagtaagaaggcctctggctccggcggcggttcggccgccctcggacctagcggctttggcccctccgggggctctggaacgaagttgccaaagaaggcaaccaaaacagcgcctcccgcacttccaaccggctatgatagcgaagaagaggaggagtcacggccaatgtcctatgatgaaaagaggcagctcagcctagacataaacaaactcccgggcgagaaactgggccgggttgtgcacataattcaggccagagaaccgtccctgcgtgatagtaaccccgaagaaattgagatcgacttcgagacattgaagccatccaccctgagggagctcgagaggtatgtcttgtcttgcctccgaaagaagcctaggaaaccgtacaccattaagaaacccgtggggaaaacgaaggaggagctggcgctggaaaagaagcgcgagctggaaaaaaggctgcaggacgtatccgggcagctgaacagtacaaagaagcctccaaaaaaagctaatgagaaaaccgaaagttcatcagcacagcaggtcgcggtaagccgcctgagtgcatcttccagcagctccgactcgagttctagttcctcatcaagctcctcgtctgatacctctgacagcgacagcggatag

SEQ ID NO: 110021 - DNA, 2406 bp, synthetic construct
  misc_feature 1..2406: note = Description of Artificial Sequence: Synthetic coding sequence
  source 1..2406: mol_type = other DNA
atgcttcaaaatgttacaccacataataagttaccaggggaggggaacgccggcctgctaggactgggacccgaggctgcggccccaggaaagcgaatccgcaaacctagtctgctgtatgagggttttgaatctccaaccatggcaagtgtgccagcactacaactgacaccagccaacccaccacctcctgaagtgtccaatccaaagaagccaggtcgtgtgactaaccagctccagtacctccacaaagtggtgatgaaggcactgtggaaacatcagttcgcctggccatttcggcaacccgtggacgctgtaaagctgggactccccgattatcacaagattattaaacagccgatggatatgggaacaatcaagcgcaggctcgaaaataactactattgggcagccagcgaatgcatgcaggatttcaacaccatgtttacaaattgctatatatataacaagcccaccgatgatatagtcttgatggcgcagaccctcgagaaaatctttctgcagaaggttgcatctatgccccaggaggaacaagaattagtcgtgacaatcccgaaaaattcccataaaaagggcgccaaactggccgcactccaggggtccgtgacctccgcacatcaggtgcctgctgtatcatcagtatcacacactgctttatacaccccacctcctgagatccccacaacggtatttaatatcccccatccaagtgtgatttcctctccccttctgaaaagcttgcacagtgccgggccgcccttactcgcagtaactgctgcccccccggctcagccactggccaaaaagaagggggtgaagagaaaggccgacactacgaccccaacaccaacagccatattggcccctggtagccctgcttcccctcccgggtctcttgaaccaaaggcagcccggctgccccccatgagaagagaaagtggtcggcctatcaagcctcccaggaaagacctccccgatagccaacagcaacatcagtcttctaaaaagggaaagctcagcgagcagttaaagcattgcaacggaatactcaaagagctattaagtaagaaacacgccgcctatgcctggccgttctacaaaccggttgatgcatcagccctaggcctgcatgactaccatgatatcataaagcacccaatggacctgagcaccgtgaagaggaagatggaaaatagggattaccgggacgcccaggaattcgcagccgacgtccggcttatgtttagtaattgttataagtacaacccacctgatcacgacgtggtggctatggctagaaagctgcaggacgtgtttgaatttagatacgccaagatgccagacgaaccacttgaacccggcccattacccgtgagcacggcaatgccccctggcttggcaaagagttcttctgaaagctcctcagaagaatcatcttccgagagtagctcagaagaggaggaagaggaggacgaagaagacgaggaggaggaggaaagcgagagttctgactcggaagaggagagggcccaccggctcgccgaactgcaagagcagttgcgtgctgtccatgagcagctggccgcgctgagtcaagggcctatatcaaaacctaaacggaagagagagaaaaaggagaaaaagaaaaagagaaaggccgagaaacatcggggtcgcgcaggcgctgatgaggacgataagggcccccgcgcaccgaggcctccacagcccaagaagtcaaagaaggcctctgggtccggagggggctctgccgcactgggcccatctgggttcggtccttctggaggcagcgggaccaaattgccaaagaaggccacgaaaactgcgcccccggcactgcccacgggttacgacagcgaagaggaggaggagagtcggcctatgtcttacgacgagaaaagacagctgtccttggatattaacaagctgccgggcgaaaaacttggacgagtggtgcatatcattcaggcccgagaaccatctttacgcgattctaaccccgaagagatcgagattgacttcgaaacactgaagccatcaaccctcagagagctggagaggtatgtgctgtcatgccttcgcaaaaaacctcgcaagccttatactatcaagaaacccgtgggaaaaaccaaagaagaactggccctagagaagaaaagagagctggagaaaaggctgcaggacgtcagcggacagctgaacagtactaaaaaacctccgaagaaagccaatgagaaaacggagtcctcatccgcccagcaggtcgccgttagccggctttctgcttcttcatctagctccgactcaagtagcagtagctcaagttcatcctcatcagacacctctgattctgactccggttag

SEQ ID NO: 110022 - DNA, 891 bp, synthetic construct
  misc_feature 1..891: note = Description of Artificial Sequence: Synthetic coding sequence
  source 1..891: mol_type = other DNA
taaagacctttgggagtgcagcagcccggggctagactgccaggcgagggaaacgcggggttgttaggactgggtccagaggcagctgcccccggcaagcgaattcggaaaccttcattgttgtatgaggggttcgaaagccctacgatggcctccgtcccggctcttcagctcacccccgcaaatcccccacccccagaggtgtcaaaccctaagaaacctggccgcgtcaccaaccagttgcagtacctccacaaagtggtcatgaaggcactgtggaagcatcagttcgcgtggccgtttagacagcccgtcgacgctgtgaaattaggtctccctgactatcacaagattataaagcaacccatggatatggggacaataaaaagaagactcgagaacaactattattgggcggcctctgaatgtatgcaagatttcaatactatgttcactaactgctacatatacaacaaacctaccgacgacatcgtgctgatggcacagactctggaaaaaatttttttacagaaggttgcctccatgccccaggaggagcaggaactagtggtcactatccccaagaattctcacaaaaaaggcgctaaactggccgctcttcaaggcagcgttaccagcgctcatcaggtccccgccgtgagttcagtttctcacactgccctgtatacccctcccccagagatcccgacaactgtgctcaacatcccacatccaagcgtcatttccagccccctgctcaagtctctgcacagcgccggaccaccccttttggccgtgacggccgctccaccagctcaaccactcgcaaaaaaaaaaggggttaagcggaaggctgacactactactccaacccctacagccatcctgtag

SEQ ID NO: 110023 - DNA, 2511 bp, synthetic construct
  misc_feature 1..2511: note = Description of Artificial Sequence: Synthetic coding sequence
  source 1..2511: mol_type = other DNA
atgctccaaaatgtgacaccgcacaacaagctcccaggcgaaggcaatgctgggcttctgggtttgggacccgaggcagctgcacctggaaaaaggatccggaagccatcactcttgtatgaagggtttgagagtcctactatggcatctgtgcctgctctacagctgactcccgccaatcctccaccgcccgaagtctcaaacccaaagaaacctgggagggtaaccaatcagttgcagtatcttcacaaggtggttatgaaggctctctggaagcaccagttcgcatggccatttcgccagcctgtggatgccgtgaagctcgggctccccgactaccataagataatcaaacaaccgatggacatgggcacgatcaagcgacggctcgaaaacaactactattgggctgcttcagaatgtatgcaagacttcaatacaatgttcacaaattgttatatctacaataagcccaccgacgacatcgttctgatggctcagactctggaaaaaatctttctccagaaggtggcttcaatgcctcaagaggaacaagagctcgtggttacaatccctaagaattcccacaagaaaggggctaagttggccgctctgcagggaagcgtaacgtctgctcatcaggtccctgccgtttcaagcgtgagtcacactgccctctacaccccacccccagagattccaacaacagtctttaatataccccacccctcggtgatctcctcacctctcctcaagtcgctgcatagcgccgggccaccgctgttagccgtaaccgccgccccccccgcgcaaccccttgctaaaaagaaaggcgtcaagagaaaagccgacactacaacccctactcccacggccatacttgcccctggctcacctgcaagcccgccaggctcgctcgaacctaaagcagcccggttgccccctatgcgcagggaatccggtcggcccattaagccccctcggaaggatttacccgacagccagcagcagcatcagtcgtcaaagaaagggaagttgtcagagcaactgaaacattgcaacggaattctcaaggaactgctgagcaagaagcacgctgcgtacgcatggcctttctacaagccggtcgacgcgtctgcgctgggcctgcacgactatcacgatatcatcaaacatccaatggacctcagtactgtcaaaagaaaaatggagaaccgggattatcgggacgctcaggaatttgctgccgacgttagactgatgttctctaactgctataagtacaatccacctgaccatgacgtggttgctatggctaggaagctccaggatgtctttgagtttaggtatgcaaagatgcctgatgagcctcttgaaccaggccccctgccagttagcaccgccatgcctccaggccttgccaaaagttcttctgaaagtagttctgaggaaagctcatccgaatctagcagtgaagaggaggaagaagaggatgaggaggacgaggaggaagaagaatctgagagctccgattcggaggaggaacgcgcacacagactggccgagctccaggagcagctccgggcagtgcacgagcagctggctgctttgtcacagggccctatctcgaaacctaaaaggaagagggagaagaaagagaagaagaagaagcgtaaagccgagaagcataggggtcgagctggcgctgatgaagacgataaggggccacgcgcccctcgccccccgcagcccaagaagagcaaaaaggcttcgggcagcggtggggggagcgctgcactgggccctagcggcttcggaccctctggcggctccgggactaagctgcaagctggagtgcagtggcgggacctggggctgctgcagcctccactgctcggttttaagcgattctcatgcctgtcgctgccttcctctcaaaactataggctcccaaagaaagctaccaagaccgcacctccggccctgccaacaggctatgatagcgaggaggaggaggaatcgaggccaatgagttatgatgagaaacgtcagctgtccttggacatcaacaaacttccaggcgagaaacttggacgggtggtgcacattatccaggctagggaacccagcctgcgggattctaacccggaagagatcgagatcgacttcgagacactgaagcctagcacactgagagaattggaaaggtacgttctgtcttgcttacgcaaaaagcccagaaagccctacacaattaagaagcccgtcggcaaaacgaaagaggagctggccttggagaagaaacgggagttagagaaacgcctgcaggatgtctccggccaactgaacagcaccaagaagccccctaaaaaggccaatgaaaaaacagagagctcgtccgcccagcaagtcgccgtcagtcggttatccgcttcatcatccagcagtgatagctctagttcgtcctcctctagttcaagttctgacacaagtgactcagactcaggctag

SEQ ID NO: 110024 - DNA, 987 bp, synthetic construct
  misc_feature 1..987: note = Description of Artificial Sequence: Synthetic coding sequence
  source 1..987: mol_type = other DNA
tgagcgaaatcgtcttcagagtcttctagcgaagaaagctcatcagaatcctcatctgaagaagaagaggaggaggacgaagacgaagaagaagaggagtccgaatcatcagacagtgaggaagagcgcgcacatcgcctagccgaactgcaggagcagctgagggcagtccatgagcaactggccgccctcagccaggggcccatctccaaacctaaacgcaagcgggaaaaaaaggaaaagaaaaagaagagaaaggctgagaagcaccgcgggcgggccggcgccgacgaggacgataaggggccacgggcccccagacctcctcaaccgaagaagtcaaaaaaagcctcaggttctggcggtggctctgccgccttgggacctagcggttttgggccctccggagggtctggaacgaagttacccaagaaggccacgaaaacagctcctcctgctcttcctacgggttatgactctgaggaggaggaggaatcacgtcccatgagctacgacgagaagaggcagttgtccctagacattaacaagctcccaggggaaaaactgggaagagtggtgcacatcatacaagctcgggagccatctctgagggatagtaaccctgaggagattgagatcgactttgagacactgaagccctcaacgctccgggaactcgaacggtacgtcctgtcctgtctcagaaaaaaaccccggaagccctacaccattaaaaaacccgtgggaaaaaccaaggaggaactggcgctggagaaaaaacgtgagctcgagaaaagactgcaagacgtgagcggacagctgaatagcaccaaaaagccaccaaagaaagcgaacgaaaaaactgagtccagctccgctcaacaagtggccgtttcccgcttatcggccagctcctcatcttctgacagtagttcctctagctcgagctcctcctcctctgacacctctgactctgacagcggctag

SEQ ID NO: 110025 - DNA, 891 bp, synthetic construct
  misc_feature 1..891: note = Description of Artificial Sequence: Synthetic coding sequence
  source 1..891: mol_type = other DNA
tgaagaccgctgggtgttcagcagcctggggccagactgcctggtgaaggcaatgccggcttgctgggcctggggcccgaagccgcagcacccggcaagagaattaggaaacccagtctgttgtatgaagggttcgagagccccactatggcctccgttcctgccttgcagctgactcccgccaaccctcctccccctgaagtgtctaatcccaagaagcccggacgggtgacaaaccagctccagtatctgcacaaagtcgtgatgaaggccctgtggaagcaccagttcgcatggccatttcgacaaccagtcgatgcagtgaagctgggacttcctgactatcacaagatcattaagcaacccatggacatgggcactataaaacgaagactggaaaataattattactgggcagcctcagagtgcatgcaggacttcaacaccatgttcaccaactgttacatatataacaagcctactgatgacattgtgttaatggctcaaacattggagaaaattttccttcaaaaggtggcttccatgccgcaggaagaacaggaacttgttgtgaccatacccaaaaattcgcataagaaaggggccaaactggcagcactgcaaggatctgtaaccagcgcgcaccaggtgcccgcagtgagctccgtgtctcacaccgcattgtacacaccacctcctgagataccaaccactgtgctgaacatcccacatcctagcgtcattagtagtcccttgttgaaaagtttacattccgcgggcccaccattgctggcagtgactgcagcccccccggcacagccattagcaaaaaagaaaggtgtaaagagaaaggcagacaccacaaccccaacccccacagccattctctag

SEQ ID NO: 110026 - DNA, 891 bp, synthetic construct
  misc_feature 1..891: note = Description of Artificial Sequence: Synthetic coding sequence
  source 1..891: mol_type = other DNA
tgacgccctttaggcgtccagcagccgggagctcgcttgccgggagagggtaacgccggcctcctcggcctaggccctgaggccgccgctccaggcaaaaggattcgcaagccaagcctcctttatgaggggttcgagagccccaccatggcaagtgtgccagcactgcagctgacacctgcgaatccacccccgccagaggtatcaaacccaaaaaaacccgggagggtcacgaaccagctccagtatcttcacaaggttgtgatgaaagctctgtggaaacaccagtttgcatggcccttccggcaaccggttgatgctgttaagcttggcctacccgattatcacaagatcatcaaacagcctatggatatgggaactattaaacggcgcctggagaacaattattattgggctgcaagcgagtgtatgcaggactttaacactatgttcacaaactgttacatttataataagcccactgatgatatcgtgctgatggcccagacactagaaaagatcttcctgcagaaggtggcatctatgccccaggaggaacaggagttagtggttacaataccaaaaaattcccacaagaagggcgccaagctggctgccctccagggatcagtcacaagcgcgcaccaagtccccgcagtcagctccgtgtcccacactgctctgtacaccccacctcccgagatccccaccactgtgctgaatatcccccacccatctgtgatcagttcacccctattaaagtctttgcactcggcaggcccgcctctgctggctgtaaccgccgcgccgccagcccagccactggctaagaaaaaaggggtgaagaggaaggccgataccacgacccctaccccaactgccatactatag

SEQ ID NO: 110027 - DNA, 1860 bp, synthetic construct
  misc_feature 1..1860: note = Description of Artificial Sequence: Synthetic coding sequence
  source 1..1860: mol_type = other DNA
tgaaatgggggtggaggtagtgctaccgcccgcggaggggagtaccgcctgcccggcgaagggaatgctgggctgcttggtttgggccccgaggctgcagcacccggcaagcggatcaggaagccatccctcctgtacgaaggtttcgaaagtccaactatggcttccgtgccagcgctgcagctgacccccgcgaaccccccaccccccgaggttagcaaccccaagaagccgggtagagttaccaaccaactccagtacctccacaaggtagtcatgaaggctctatggaaacatcagttcgcatggccgttcaggcagcccgttgatgctgtgaagttgggtttaccagactaccacaagatcatcaaacaaccaatggatatgggtacaatcaaaaggagactcgagaacaactattattgggccgcgtcggagtgtatgcaggacttcaacactatgttcactaactgctacatctataacaagccaaccgatgacatcgtccttatggcccaaacgctggaaaagatcttcctgcagaaggttgcctcaatgcctcaggaggaacaggaactggtggtaaccatcccaaaaaactctcacaaaaagggggcaaaacttgctgcattgcaaggctctgtgacatcagcacaccaggtccctgccgtgtcctccgtctctcacaccgcgctgtatacacctcccccagaaatcccgaccaccgtcttaaatatccctcatccatccgtcatcagtagtccgctcctgaaatctctacatagcgccggcccacccttgctggctgtgaccgcggcaccgccagcccaaccactggccaagaaaaagggggtgaagagaaaggcggatactacaacccctacgcccaccgctatcctcgcgcccggctcccctgcgtcaccgcctggctctctggagccaaaggcggcacgactccccccaatgaggagggaatctgggagacccatcaagccaccccggaaagatctgcccgattcccagcagcagcaccagagttccaagaagggcaagttgtctgagcagttgaaacactgtaatggaatcctgaaagagctccttagcaaaaagcacgcggcctacgcttggccattctacaagccagtggacgcgagcgccctaggtcttcacgattatcatgacattattaaacatcccatggatctcagcaccgtcaaacggaaaatggagaacagggactatcgagacgcacaggaattcgctgctgatgtgaggctgatgttttccaactgctataaatacaacccccccgatcacgacgttgtcgcaatggctagaaagctgcaggatgtgttcgaatttcggtacgcgaaaatgcctgacgagccactcgaacccggacctcttcccgtatcaaccgccatgcctcccgggctggctaagtcatcatcagagagcagtagtgaggagagcagctcagagtcaagctctgaggaggaggaggaggaggatgaggaagatgaggaggaagaagagtctgagtcaagcgactctgaggaagagagggcacataggctcgccgagttacaggagcagctccgggcagtccatgaacagctcgctgcacttagccagggacctatcagcaaaccaaagagaaagcgggagaagaaagagaagaagaagaagcgtaaggcagaaaagcatagagggcgggctggcgcggatgaagatgacaaggggcctagagctccgagaccccctcagccgaaaaagagcaaaaaggcctccgggagcggcggaggatcggctgctctggggccctccggattcgggccaagcggcggaagcggcacctag

SEQ ID NO: 110028 - DNA, 987 bp, synthetic construct
  misc_feature 1..987: note = Description of Artificial Sequence: Synthetic coding sequence
  source 1..987: mol_type = other DNA
tgagccaaatcttctagtgagagcagctctgaggagagctcttccgaatctagcagtgaagaagaagaggaagaagacgaggacgaagaggaagaagaaagtgaatcctccgactcggaagaggaaagggcacacaggctagctgaactccaggagcagttacgggctgtccacgagcagctggctgcattaagccaaggccccatctctaagcccaagagaaaaagggaaaaaaaggagaagaaaaaaaagcgtaaggcagagaagcatagaggtagggcgggtgcagatgaagacgataaaggtcctcgggccccccgcccgcctcagcccaaaaaatccaagaaggcatctgggtctggcggcgggtcagccgccttgggcccttctgggttcggaccatccggtggctctggaactaaactgccaaaaaaagctacaaaaaccgctcctccagccttgcccacaggttacgacagtgaggaagaggaggagtcacggccaatgtcctacgacgagaaaaggcagctctccctggacataaacaagctcccgggcgaaaagcttggccgcgttgtgcacataatccaagccagagaaccctcgctccgtgactctaaccctgaagagatagagatcgactttgagaccctgaaaccatctaccctgagggaattagaacgttatgtcctcagctgcctccggaagaaacccagaaaaccatacactattaaaaagcctgtcggaaaaaccaaggaggagctggcgctggagaagaagagagaactggaaaagcgtttgcaggacgtgtcaggacaactgaattcaacaaagaaaccccccaagaaggccaacgagaagaccgagagtagtagcgctcaacaggtggccgtttcaaggctttccgccagtagctcaagctctgactcttcttcaagcagcagcagcagcagttcctctgacacatcagattcagattcagggtag

SEQ ID NO: 110029 - DNA, 2046 bp, synthetic construct
  misc_feature 1..2046: note = Description of Artificial Sequence: Synthetic coding sequence
  source 1..2046: mol_type = other DNA
atggatatggggactattaaacgcaggctagaaaataactactattgggcggcctccgaatgcatgcaggattttaataccatgtttacaaattgttatatttacaacaagcccacagacgacattgtgttaatggcacagaccttggagaagatcttcttgcagaaagtggcctctatgcctcaggaagagcaggagttagttgttacaatcccaaagaactcgcataagaaaggcgctaagctggctgcactacaggggagtgtaacgagcgcacatcaagtgcccgctgtgagttcagtcagccacactgctctgtatacaccgcctccagagattcctaccactgtgtttaacattccacaccctagtgtcatctcatcccccttgcttaagtctctccacagcgccggtccaccactattggctgtcaccgccgcaccccccgcacagcctctcgctaagaaaaagggagttaaacgcaaggctgacactacaacacccacaccaactgccatacttgcccccgggtcccctgccagtccccccggcagcctcgagcctaaggcagcaaggctccctccgatgcgccgcgagtcaggtaggccgataaaacccccgcggaaagatcttcccgacagtcagcaacaacaccaaagcagcaaaaaaggcaaactttccgaacaacttaaacactgtaatggcattctaaaagaactgctgagtaagaagcatgcagcttacgcatggcccttctataagcctgttgatgccagcgcactgggcctccacgattatcatgacatcatcaaacaccccatggatctttctactgtgaagcggaaaatggagaacagggactacagagacgcccaggagttcgcggccgatgtgcgtctgatgttcagcaattgttataaatataatcctcctgaccatgacgttgtggccatggcccgcaagcttcaggacgtcttcgaattcaggtatgcaaagatgccagatgaacccctggagcccgggccactgcctgtcagtacagctatgcctccaggcctggcaaaatctagttcggagagcagctcagaagagagctcaagtgagagctcaagcgaagaggaggaggaagaagatgaagaagatgaggaggaagaagagagcgagtccagcgacagcgaggaagagagggcccacagactcgccgaactgcaggagcagcttcgcgccgtgcacgaacagctggctgccctgtcccaggggcctatttctaaaccaaagagaaaaagggagaagaaagagaagaaaaagaaaaggaaagcagagaaacataggggccgggctggcgctgacgaagacgataaaggacccagagcacccagacctccccagcccaaaaaaagcaagaaagcctctggatcaggtggcggctcagccgctctggggccctcaggttttgggccaagcggcgggtcaggaacgaaacttccgaaaaaagctacaaaaaccgccccaccggcactaccaaccggatatgactctgaggaggaggaggaaagtcggccaatgagttatgacgagaagagacagctgtccctcgacatcaataaactgccaggcgagaagttgggacgcgtggtccatatcatccaggcccgggaaccaagcttacgggactccaaccccgaagaaatagagattgactttgagaccttgaagcctagtaccctcagggagcttgaaaggtatgtgctcagttgtcttagaaaaaagccccggaagccatatacaatcaagaagcccgttggtaaaacaaaggaagagcttgcgctcgaaaaaaagcgagagctggaaaaaagattgcaagatgtctcggggcagttgaatagcactaagaaacctccgaagaaggccaatgaaaaaactgagtcatcctctgcccagcaggtggcggtcagcaggctaagcgcctcttcatcctcctccgacagcagtagctcttccagttcctcttcctctagtgacaccagcgacagtgacagcggttag

SEQ ID NO: 110030 - DNA, 2265 bp, synthetic construct
  misc_feature 1..2265: note = Description of Artificial Sequence: Synthetic coding sequence
  source 1..2265: mol_type = other DNA
atggcgagcgttcctgccttacaattgactccggccaacccccctcctcccgaggtgtctaaccctaaaaagcccggtagagtcactaaccagttgcagtatctgcataaagtggtcatgaaagcgctctggaaacaccagtttgcatggccatttagacagcccgtagacgccgtcaagctgggcctcccagattaccataagatcattaaacagcctatggacatggggaccattaaacgccggctggagaacaactactactgggccgcgagcgaatgcatgcaggacttcaacacaatgtttactaactgttacatttataacaagccaacagatgacattgtcctgatggctcaaactctggagaagatattcttgcagaaggtagcctccatgccacaggaagaacaggagctggttgtgaccatacccaagaactctcataagaagggcgcaaagctggctgctctgcagggatctgtgacttccgctcatcaggtgcctgccgtgtcttcagtgtcacataccgcactatacactccaccccccgaaatccccaccacagtatttaatatccctcacccgtccgtgattagcagtccgctgctgaaatctctgcacagcgccggtcctcccctgctggccgtgaccgcggccccgcccgcccagccgctggccaagaagaagggagttaagaggaaagctgacactactactccaactcctaccgcaattctcgctccaggctctcccgcatcacctccagggagcctcgaacccaaagccgcccgcctgccccccatgaggagagaatccggacggcccattaaaccacctaggaaagatttgcctgattcccagcagcaacaccagtctagcaaaaagggaaaactgagcgaacagttaaaacactgcaatggaatcctgaaggagttactgtcaaagaaacacgcagcatatgcgtggcccttctataaaccggtagacgcttcagcactcggcctgcatgattatcatgatataattaaacaccctatggatctgagcaccgtgaagcgcaagatggaaaaccgggactatcgtgatgcccaggagtttgctgccgacgtacggcttatgttcagtaactgttataaatacaacccaccagatcacgatgtagtggctatggcgcgaaaactgcaggacgtgtttgagttccggtatgccaaaatgcccgacgaaccgttagaacctggtcctttacctgtgagcactgctatgccgcccggcctggccaagagcagctccgagagtagttcagaagaaagttccagtgaatcctcctcagaggaggaagaagaggaggatgaggaagatgaggaggaagaggaatcagagagctcggactcagaggaagagagggcgcacaggctcgctgagctgcaggagcagctgcgcgcagtgcacgagcagctagccgccctgagtcagggcccgatctctaagcccaaacggaaacgagagaaaaaggaaaagaagaagaaaaggaaagctgaaaagcatagggggcgggcaggcgccgacgaggacgataaaggtccacgggctccccgtccacctcaaccgaaaaagagcaaaaaggcatctggctcaggaggcggttccgctgccctggggcccagtggattcgggccttcaggaggaagtggaaccaagctgcccaaaaaagccaccaaaacagcccctccagcgctgcccacgggatatgattctgaggaggaggaggagagtcgtccgatgtcatacgacgaaaaacgtcagttgtctttagacatcaataaactccctggcgagaagctgggcagggttgtgcatattattcaagccagagaaccatctctgagagacagcaatcctgaggaaatcgaaatcgacttcgaaacgctaaaaccttctacactgcgggaattggagcgctacgtcctgagctgcctgagaaagaagcctcgcaaaccatacacaattaaaaagccggtggggaagaccaaagaggagcttgccctcgaaaagaaaagagagctggagaagaggctgcaggacgtcagcggccagctcaattctactaagaaacctcccaagaaggccaatgagaaaacagaatcctcttctgcccagcaggtggccgtgtcccgtctgagcgccagcagtagttcctcagattcctcttcatcatcatcctccagttcctcgtccgatacatccgactctgactcagggtag

SEQ ID NO: 110031 - DNA, 2511 bp, synthetic construct
  misc_feature 1..2511: note = Description of Artificial Sequence: Synthetic coding sequence
  source 1..2511: mol_type = other DNA
atgcttcagaacgtcacccctcataataagctgcctggcgagggaaacgcaggcctacttgggctgggcccagaagctgcagctcccggtaagcgcatcagaaagcccagcctgctctacgaaggtttcgagtccccaacaatggcgtccgtgcctgctttgcagctcacccctgccaacccaccccccccagaagtgagtaaccccaaaaaaccaggacgcgtgaccaaccagttacagtatctccacaaggtcgtcatgaaagccctgtggaagcatcaattcgcctggcccttccgccagccggtggacgccgtgaagttagggttacccgattatcacaaaataatcaaacaacccatggatatgggcaccattaaacggcgcttagaaaacaattattattgggcagcatctgagtgtatgcaggatttcaataccatgttcaccaactgttacatatataataagccaaccgacgacatcgtgcttatggcccagacactagagaagatcttcctgcagaaagtagctagcatgcctcaggaagagcaagagcttgttgtgacaattccgaagaacagccataagaaaggtgctaaactggcagccctccaaggctcagtgaccagcgctcaccaagtgccagcagtcagcagcgtttctcacacagcactctatacaccaccgcctgagatccctacaaccgtgcttaacattccccaccctagcgtgattagtagcccactgctgaaatctttgcacagcgccggtcctcccctcttggccgttaccgccgccccccctgcccagcctctcgccaaaaagaagggagtcaaacggaaagctgacactactacaccaactccaaccgccatccttgcacctggatcacccgcctctcctccagggtcactggagcccaaggctgccagactaccccccatgcggagagagtccggacgcccaatcaaaccccccagaaaagatcttcctgactcacagcagcaacaccagagctcaaagaagggaaagttgtcagagcagctgaaacactgcaatggcattctgaaggagttgctgagtaagaagcatgctgcatacgcctggccgttttataaaccggtcgacgcaagcgccttgggcctccacgactatcacgacattatcaaacatcctatggacctgtcaaccgtgaaaagaaagatggagaatcgggactatcgtgacgcccaggaatttgcagccgacgtgcgccttatgttctcgaactgttacaagtacaatcctcctgatcacgacgtggttgccatggctcggaaactgcaggacgtgtttgagtttaggtatgcaaagatgcctgatgagccgctggagcccgggccacttcctgtgagcaccgccatgcccccagggctggccaaatcctcaagtgagagctcctccgaagaaagtagcagtgaaagcagcagcgaagaggaggaggaagaggacgaagaagacgaggaggaagaggagtccgagtcttccgattcagaggaagagagagcccacaggctggcggagctccaggagcagctcagggcagtacacgagcagctggcagctctcagccaggggccaatttcaaagcctaagcgtaaaagggaaaagaaagaaaagaaaaaaaagagaaaggccgaaaaacacagagggagagccggagccgacgaagacgataaagggcctagggccccgcggcctccccagcccaagaagagtaagaaggcgagtggctcaggggggggctcagccgctttaggtcctagtggattcggacccagcggcgggtccggaaccaagttgcaggccggtgtgcagtggcgggatttgggcttactacaaccacccttattgggtttcaaacggttctcttgcctcagcctcccctctagccaagattacagattacccaagaaagcgacaaaaacagctcccccggccctccctactggctatgattctgaagaagaggaggaatctaggcctatgtcctacgatgagaaacgccagctgtcattggatattaacaaactgccgggagaaaagctgggacgcgttgtgcatatcatacaggcaagggaaccatcactcagggatagcaaccccgaggaaatcgagatcgacttcgaaaccctcaagccgagcaccctgcgagaactcgaacgatatgttctctcatgtctccgaaagaagcccaggaagccttacactatcaagaagccagttggcaaaaccaaggaagaactggcgctcgaaaagaagcgcgagctcgagaaaaggctccaggacgtgagtggccagttaaacagcaccaagaagcctccaaagaaagcgaacgagaaaacggaatcgtcctctgcacagcaggttgcagttagtcgactttcggcttcctcatctagttccgactcctccagctcctcaagtagtagcagttcctcagacacctctgactcggacagtgggtag

SEQ ID NO: 110032 - DNA, 2046 bp, synthetic construct
  misc_feature 1..2046: note = Description of Artificial Sequence: Synthetic coding sequence
  source 1..2046: mol_type = other DNA
atggacatggggactatcaaacggcgcctcgagaataactactattgggctgcgagcgaatgcatgcaggattttaacacaatgtttactaactgttacatctacaacaaacctaccgacgatattgtgctcatggcccagaccctcgaaaaaatatttctacagaaagttgccagcatgcctcaagaagagcaggaattggtagttacaattcccaagaactcccataagaagggagctaagttagctgctctacaaggatccgtgaccagcgcccaccaagtaccggctgtctcgagcgtgtcccacaccgccctgtatactccacctccggagatccctactacagtgctgaatatccctcaccccagcgtcatctctagccctctgttaaaaagcctacattccgccgggcctcctctgttggccgtcacagcagccccaccggctcagcctttagctaagaagaaaggagtgaagcgcaaggcagataccacaacgcccaccccgaccgccatccttgctccaggcagtccagcctcacccccgggctcccttgagcctaaggcggcccgactgccacctatgcggagggaaagcggacgtcccatcaagcctccaaggaaagacctccccgactctcagcagcagcatcagtccagtaagaagggcaagttgagtgaacagctgaagcattgcaacggaatcctgaaggagctcctgtccaaaaagcacgcagcatacgcctggccgttctataagcctgtagatgcttcagctcttggactgcacgactaccacgacattatcaaacatccgatggatttaagtacagtgaagcggaagatggagaatagagattatcgtgatgcccaagagtttgccgcggatgtgcggttaatgttttccaattgttataaatataaccccccagaccatgacgtagtggccatggcacggaaattacaagatgtgtttgaatttagatacgccaagatgcctgacgaacctcttgagccaggtcccctccctgtctccaccgccatgccccctgggttagccaaaagcagcagcgagtcatcatcggaagagtccagttcagagtcctcaagcgaagaagaggaagaggaagacgaggaagatgaagaagaagaagagagtgagtcaagtgactcagaagaagagcgagcacacaggttggctgaactccaggaacagctccgtgctgttcacgagcagctggccgcactttcccagggtccaatctccaagcccaaaaggaaacgcgagaaaaaagaaaaaaaaaagaaaaggaaagcggagaagcaccgtggtagggctggggctgacgaagacgataaaggtccacgtgccccccggcctcctcaacccaaaaagtcaaaaaaggccagtggctccggtggcggttccgccgctctgggcccaagtgggtttggtccctcggggggctcagggaccaagctaccaaagaaggccacaaaaaccgcacctcccgcccttccaaccggctatgactccgaagaggaggaggaatcccgtcccatgtcatacgacgagaagcgccagttatccttggatatcaataaacttcccggcgagaagctcggaagggtggtacatatcatccaggcccgtgagccatcgctgagggattccaaccccgaggaaattgagatcgactttgaaactctgaaaccttcaaccctcagagagcttgaaagatacgtgctaagttgcttacgaaagaagccacggaaaccctacactattaagaagcctgttgggaagaccaaggaggaactggcccttgagaagaaaagggaacttgagaaacgcttgcaagacgtgagtggccagctcaactcgacaaagaaaccaccgaagaaagcaaacgaaaaaactgaatcatcatctgcccagcaggtagccgtgtcacggctgtcagcgagcagctcctcctcagactcctcgtccagctcatccagctccagttccagcgatacttccgatagcgactctggctag

SEQ ID NO: 110033 - DNA, 2511 bp, synthetic construct
  misc_feature 1..2511: note = Description of Artificial Sequence: Synthetic coding sequence
  source 1..2511: mol_type = other DNA
atgctccagaatgtgacgccacataacaagcttcccggagaaggtaacgccgggttattggggctcggtcccgaagccgcggcacctgggaagaggatccggaaacccagcttgctttatgaagggtttgaaagtcccacgatggctagtgtgcccgcattgcaactaacgcctgctaaccctcctccgccagaggtttccaatcccaaaaaacctggcagggtgaccaatcaactgcagtatctccataaagttgtgatgaaggcactgtggaaacaccagttcgcctggccattcaggcaacccgtggacgccgtgaagttgggtctgcccgattaccacaagattattaaacagcctatggacatgggcacaatcaagaggcgcctagagaataattattactgggccgctagcgaatgcatgcaagatttcaacacaatgtttaccaactgctatatttataacaagccaaccgacgacatagtcctgatggcccagactttggaaaagatcttcctgcagaaagtcgcttcgatgccacaggaggagcaggagttggtggttaccattcccaaaaacagccataagaagggagccaaattggccgctttacagggatccgtaaccagcgcgcaccaggttcccgccgtgtcgagcgtctctcacaccgccctgtacacacccccacctgaaatccctacaaccgtgttgaacattcctcacccttcagtcataagctccccactgcttaagagtcttcattccgcgggaccccctttgctcgccgttaccgcggctcctcctgcccaacctctggctaaaaaaaaaggagtgaaacgtaaggctgataccaccacgccgacccccactgctattctggcacccggatcaccagcttcaccccctgggagcttggaacctaaagccgcccggctgccaccaatgagaagggagagcgggcgtcctattaaacctcctagaaaagaccttccagattcgcagcagcagcaccagagctccaagaagggtaaactgtctgaacagttgaaacactgtaacggaattctgaaagagctgctgtctaaaaagcacgccgcatacgcctggcctttctacaagcctgtggacgcttccgccctcggcctccacgactaccatgacattattaagcatcccatggatctgtccactgtcaagcggaaaatggagaaccgagactaccgggatgcacaggaatttgccgctgatgtacgacttatgttttcgaactgctacaagtataacccgccagaccatgacgtcgtcgcaatggcccggaaactgcaggacgtctttgagttcagatacgccaagatgccggacgaacctcttgaacccgggccactacctgtgagtacggccatgcccccagggctcgcaaagagcagcagtgaatctagttcagaggagagcagcagcgaaagctcttcggaggaggaggaagaagaagatgaagaggatgaagaagaagaagaaagcgagtcatccgacagcgaggaagagcgcgctcacagattagcagaactacaggaacaactcagggctgtgcacgagcagttagcagctctcagccaaggtcccatcagcaagcccaaacgaaaaagggaaaagaaggagaaaaaaaagaagagaaaggccgagaagcaccgtggaagagccggggcagatgaagacgacaagggtcctcgcgccccacgaccccctcaaccgaagaagagcaaaaaggccagtgggtcaggtggggggagcgccgccttggggccgagcggattcggaccaagcgggggctctggcacaaagttacaagctggcgtgcaatggcgggacttgggcctgttgcagcctcctctcttaggtttcaagaggttctcgtgcctgtccctgccttcatcccaggattatcgcctgcctaagaaggcgactaaaacagcccctccagccctacctaccggttacgattcggaggaggaggaggagtcccgcccgatgtcctacgacgagaaaagacaactgtcactggacataaacaaattaccgggagagaaactggggcgcgttgtacacattattcaagctcgggagccctcgcttcgggattccaaccctgaggagatcgaaatagacttcgagaccttaaaaccctcgacactccgggagctcgagaggtacgtcctgagttgtctgcggaaaaaaccgcgtaaaccatataccatcaaaaagccagttggtaagacaaaggaggaacttgccctggaaaaaaagcgggaacttgagaagcgcttgcaggatgtaagcgggcagctcaattcaaccaaaaagccccccaaaaaagccaacgagaagacagaatccagctctgcccagcaggtggccgttagtagactgagcgcctctagttcttctagtgactcctcttcttcttcttcatcatctagcagttccgacacgagcgatagcgactctgggtag

SEQ ID NO: 110034 - DNA, 2265 bp, synthetic construct
  misc_feature 1..2265: note = Description of Artificial Sequence: Synthetic coding sequence
  source 1..2265: mol_type = other DNA
atggcctcagtgccagccctgcaattaaccccggcaaaccctcctcccccagaggtgagtaaccccaagaaaccgggccgagtaactaatcagctccagtatctgcacaaggttgtgatgaaagctctatggaagcaccagtttgcctggccattcaggcagccagtagatgcagttaaacttgggttgcctgattaccataagataatcaagcagcccatggacatgggcacaataaaaagaaggctcgagaataactactactgggctgcctctgaatgtatgcaagactttaacaccatgttcacgaactgttatatctataataaacccacggacgacatagttctcatggcacagacacttgaaaaaatcttcctccaaaaagttgcatcaatgcctcaagaggagcaggagctggtggtaacaatccccaaaaattcccataagaagggagctaaactagctgctctccagggatctgtcacatctgcccaccaggtccctgctgttagctcggtaagtcacactgccctgtacacccctccaccagagatcccaaccacggtgctgaatatcccccatcctagcgtaatctcttccccactcctcaaatcactccattctgccggcccccccctgctggccgtgacagctgctcctcccgcacagcccttggctaaaaagaaaggagtgaagcgcaaggcagataccactactccaaccccaactgccatactggcacccgggtcccctgcatcacccccggggtccctggaaccaaaagcagcacgactgcccccaatgcgcagagaatccggacgacctataaaacccccacgcaaagatttacccgactcccagcagcaacaccagagctccaaaaaaggcaaacttagcgagcagttgaaacactgcaacggtattctcaaggagctgttgtccaaaaagcatgctgcctatgcgtggccattctataagcccgtcgatgcaagcgccctcggcttacacgactaccacgacatcatcaagcaccctatggatctaagcaccgttaagcggaaaatggagaacagggactatcgtgatgcccaagaattcgccgcggacgtaagactgatgttctccaactgttataaatacaatccccctgatcatgatgtggtggccatggctcggaagctgcaggacgtgttcgaatttcggtacgccaaaatgcccgatgagcccctggagcctggcccgcttcccgtgagcactgctatgccacctggacttgcaaagtcctccagcgaaagcagttcggaggagagttcaagtgaaagcagttctgaagaggaagaggaggaggacgaagaagacgaggaggaagaagagtcagagagcagtgactcggaagaagagagggcccacagactggccgagctgcaagagcagctgcgagcggttcacgaacagctcgccgccctaagccagggacccatctccaaacctaaacggaaacgggaaaagaaggagaaaaagaagaagcgcaaagcagaaaagcacagagggcgcgccggtgccgacgaggacgacaagggtcccagggcacccagacctccacagcctaagaagtctaagaaagccagcggatctggcggcggatctgcggcactgggaccaagtggattcgggccttccgggggatccggcaccaagctacctaaaaaggcgaccaaaactgccccaccggcactgcctacaggctacgacagtgaggaggaagaggaatcacgcccaatgagctacgacgagaaaagacaactgagcctggacatcaacaaactgccaggggaaaagttgggacgggtcgtgcatattatccaggctagggaacccagtctccgcgacagtaaccccgaggaaatcgagatagattttgaaaccctaaaaccatcgaccttacgcgagttggagagatatgtattgtcgtgtctccgtaagaaaccacgaaagccatacacaattaaaaaacccgtgggaaagacaaaagaagagctggctctcgagaaaaagcgcgagcttgaaaagcgcctacaggacgtgagcggacagctgaattcaaccaagaagcctcctaagaaggccaatgaaaagaccgaatcgtccagtgcgcagcaggtagcggtgagtcgactttctgcaagcagttcctcaagcgactccagctcctccagtagctccagttcttcttcagacacaagcgactcggacagtggctag

SEQ ID NO: 110035 - DNA, 2046 bp, synthetic construct
  misc_feature 1..2046: note = Description of Artificial Sequence: Synthetic coding sequence
  source 1..2046: mol_type = other DNA
atggacatggggaccatcaagaggcggctggagaacaattactactgggctgcttcagagtgcatgcaggacttcaataccatgtttactaattgttacatctacaacaagccaacagacgacattgtgctgatggctcagacacttgaaaaaattttcctgcaaaaggttgccagtatgccccaggaagagcaggagctggtggtgacgatccctaagaattctcataagaagggggccaaactcgccgccctgcagggaagcgttactagtgcccatcaggtgcccgctgtgtcatctgtgtctcataccgcgctctatacacctcctccggagattcccactacagtgctgaacatccctcatccttcagtaatctcttccccgctgcttaagtctctccatagtgccggcccacccctgctggccgtgacggctgccccgccggcgcagccactggctaagaaaaagggcgttaagaggaaagctgatacaactacccctactcccactgcaatattggcaccaggttcaccggctagcccacctgggtcactggaacctaaggcagcccgcttgccaccaatgagacgcgaatccggtaggccaattaaacctcccagaaaggacttgcctgactcacaacaacagcaccaatctagcaaaaaggggaagttgtccgagcagctaaaacactgcaacggaatcctcaaggagctgctgagtaaaaaacacgctgcatatgcttggcccttttataagcctgtggatgcatcggccctgggtctacacgactaccatgacattatcaagcatcccatggatctttcgactgtgaagaggaagatggagaacagggactatagggacgcgcaggaatttgctgcggacgtccggctgatgttctctaactgttacaaatataaccctcctgaccacgacgtcgttgcgatggcccgcaaattacaggacgtttttgagtttagatatgccaaaatgcccgacgagccgctcgagcctggccccctgccggtgtctacagccatgcccccaggactggccaaatcaagttcggaatcctcatcagaagagtcttcctccgaatcctcctcagaggaagaagaggaggaggatgaggaagatgaagaggaggaggaaagcgagagcagcgatagcgaggaggaacgggctcacaggctcgctgagctccaggagcagttaagagccgtgcatgagcagctggctgccctgtcccagggacccatttctaaaccaaaacgtaagagagaaaagaaagagaagaagaagaagaggaaagcggaaaagcacagggggagggccggggcagacgaggacgacaaaggtcccagggcccccagacccccccagccgaagaagtccaaaaaagctagcggaagcgggggcggtagtgccgctttgggtcctagtggttttgggccgtcgggagggtctggtaccaagctgcccaagaaagcgaccaaaacagccccacctgcattacctacaggatatgactccgaagaggaggaagagagcaggcctatgtcctatgatgaaaaacggcagctttcactggacataaataagctgccaggcgagaagctgggaagggtcgtgcacatcattcaggcccgcgagccctcgcttcgggatagcaatcccgaggagattgaaatcgactttgagactctgaagccatccacccttagggaactcgaaagatatgtactgtcatgccttcggaaaaagcctaggaaaccatataccataaaaaaaccagtagggaagaccaaggaggaactcgcccttgagaagaagcgggagctcgaaaaacgccttcaggacgtgtccggccagctgaatagcaccaagaaacccccaaaaaaggctaacgaaaaaaccgagtcttcgagcgcccagcaggtggccgtatctcgcttgtcggccagtagtagcagttccgacagctctagctcttcctctagttcctcctcatcagatacgagcgacagtgattcaggatag

SEQ ID NO: 110036 - DNA, 2511 bp, synthetic construct
  misc_feature 1..2511: note = Description of Artificial Sequence: Synthetic coding sequence
  source 1..2511: mol_type = other DNA
atgctccaaaacgtaacgcctcacaacaagcttcctggagagggcaatgccggactgcttggtctgggacccgaggctgcggctccaggaaaaagaattcgcaaaccaagtctactgtatgaaggattcgagtctcctacaatggcctctgtgcccgctttgcaactgacgcccgccaaccctccacctccggaagtcagcaacccaaaaaaaccagggcgagtcacgaaccaactacaatatctccacaaggtggtgatgaaggcactatggaaacaccagttcgcctggcctttcaggcaacccgtagacgccgttaagctggggctccctgactaccacaaaataatcaaacaacccatggatatgggaactatcaagaggcggttggagaacaactattactgggccgcctctgagtgtatgcaggatttcaacactatgttcacaaactgctatatatataacaaacccacagacgacattgtcctgatggcacaaactctggaaaagatatttctccaaaaggttgcgtctatgcctcaggaggagcaggagctcgtggtcacaatcccgaaaaactcccacaaaaagggtgctaaattggcggctctacaggggtctgtgaccagcgcccaccaggtccccgcagtttcaagcgtttcacacaccgcactttatacaccacctccagagatccccacaacagtgctgaatatccctcaccccagcgttatcagctccccacttctgaaaagcctccatagtgcaggacctccactcctcgctgtaactgccgctccacctgcccagccactcgcaaagaaaaaaggcgtgaagcgcaaagccgacacaacgactccgacaccaactgccattcttgcacctggaagccctgcgtctccccctggctctctggagccaaaagcagccagactgcctccaatgagacgtgagagtgggaggcccatcaaacctccgcgtaaggacctgcccgatagtcagcagcagcaccagagcagcaaaaaaggaaagttgagtgaacagttgaagcactgtaacggaatcctcaaagaactgctgagcaaaaagcacgccgcgtacgcctggccattttacaagccagtcgacgcatcagcactgggtctccacgactatcatgacatcataaagcacccaatggatctctctacagtgaagcggaagatggaaaatcgcgattaccgcgacgctcaggagttcgccgctgatgtgcgcctgatgttttctaactgctataagtataacccccctgatcatgacgtggtagccatggcccgaaagctgcaagacgtttttgagtttcgttatgctaaaatgccagatgaacctcttgagccggggcctctgccagtttccaccgcaatgccgcctggactggccaaatcaagttccgagtcctcttctgaggagtcttcttccgagtcaagtagtgaagaggaggaggaagaggatgaagaggatgaggaagaggaggaatccgaaagctcggactctgaggaagagagagcccacaggctggcagagctccaggagcagttgcgggctgttcacgaacagttggccgctctctctcagggccccataagtaaaccgaagcggaagcgtgaaaagaaggaaaagaaaaagaagagaaaagcggagaagcatagaggccgggcaggtgcagacgaggatgacaagggacctcgggccccgcggccgccccagcccaagaaatccaagaaggccagcggcagcggaggtgggtctgcagctctaggcccatctggctttgggccatccggcggatccgggactaagttacaggctggtgtgcagtggagggacttgggactgctgcagcccccactgcttgggttcaagagattctcatgcctctctcttccttcaagccaggactaccgattacctaaaaaggctactaagacagcccccccagcactgcctaccggatatgactctgaggaggaagaagaaagtaggcctatgtcatacgatgagaagcgccagctcagcctggatattaacaaactgccaggagagaaactcggtagagtcgttcacataattcaggccagggaaccctccctgcgggattccaaccccgaagaaatcgagatagactttgagactttgaaaccttcaacgctgagagaattggagagatatgtactctcttgtctccgcaagaaacctagaaaaccatatacaataaaaaaaccagttggaaaaacaaaggaagaactggcactcgaaaaaaagcgcgagctggagaaaagacttcaagatgtgtcaggtcagcttaactcaactaagaaacctccaaagaaagctaacgagaagactgagtcctcgtccgctcaacaggtggccgtttcacgcctgtccgcgtcttccagttcttcggattccagttcttcttcctcctcttcttcgtcgagcgacacttcagactccgactccggttag

SEQ ID NO: 110037 - DNA, 2511 bp, synthetic construct
  misc_feature 1..2511: note = Description of Artificial Sequence: Synthetic coding sequence
  source 1..2511: mol_type = other DNA
atgctgcaaaacgtgacacctcacaataaactgccaggagaggggaacgccggactgctcggactgggaccagaggctgcggcccctggcaaaagaatacgaaaaccttctctgctctacgaagggttcgaaagccccactatggcaagtgtgcctgccctccagctcactccagccaaccctccaccccctgaagtctccaatccaaagaagcctggccgcgtaaccaatcagctccaatacctccataaggtggtgatgaaggccctctggaagcaccagtttgcatggccctttcgccagcctgtcgacgccgtcaaattaggtttgccggattatcataaaatcatcaaacagccaatggacatgggaaccatcaagcgacggcttgagaacaattattactgggctgcttcagagtgtatgcaggacttcaatacaatgtttaccaactgctacatctacaacaaaccaaccgacgacatcgtgttaatggcccagacactcgagaagatcttcttgcagaaagtcgcctcgatgccccaggaggagcaggagctcgtggtaaccatccctaagaactcccataagaaaggggcaaaactcgctgccttgcagggctccgttacaagcgcccatcaagtcccagctgtttcttccgtgtctcatacagccttatacacaccaccgccagagatccccaccactgtgttcaatatcccgcacccaagcgtcatttccagcccgctgctcaagagtctgcacagtgccggcccaccactgcttgccgttacagctgcccctccggcacaaccactcgcgaagaaaaagggagtgaagcgcaaagccgatacgaccaccccaacgcccaccgcgattctcgcacctggctcccctgctagcccacccggctctctcgagccgaaagccgcccgattgccccctatgagacgtgaaagtggaaggccaatcaagccaccccgcaaggatctcccagatagccagcaacagcaccagtcaagcaagaagggcaaactctctgaacagttaaagcactgtaatggcattctaaaagagctgctgtctaagaagcacgctgcctacgcttggccattttacaaacccgtggacgcctcagctctgggcctccatgattaccacgacatcattaagcacccgatggacctgtcaaccgtgaaaagaaagatggagaacagagactacagggacgcccaggagttcgctgccgacgtcagactgatgttttccaactgttacaaatataaccctcccgaccacgacgtggtggcaatggcccgaaaactgcaagacgtgtttgagttccgatatgccaaaatgccggacgagcctctggaaccgggacctctaccagtctcaactgccatgccacccggcctggctaaatctagctctgaatcttcttctgaagagagctcatctgagtcatccagcgaagaggaggaggaggaagacgaggaagatgaagaggaggaggaaagtgaatccagcgattctgaagaagaaagagcgcaccgcctggcagaactccaagagcagttgcgcgctgtgcacgaacaactcgccgctctgagccagggaccaatcagtaagcccaagagaaagagggagaagaaggagaaaaagaagaagcggaaggcagaaaaacacagaggacgcgccggcgcagacgaagacgacaaagggcctcgggcccctagacctccccagcccaagaagagcaagaaagcatcaggctccggaggtggctctgcagcactcggaccgtccggcttcggaccttccgggggaagcggaactaaattgcaggccggtgttcagtggagggacctggggctgctgcagccacccctgctagggttcaaaaggttcagttgcctctccctcccctcctctcagaactaccggctcccaaagaaggcaacaaaaacagcgccccccgctctccctacgggctacgactctgaggaggaggaggaatccaggcccatgtcttatgacgagaaaaggcagctttccctggatatcaacaagctccccggggaaaaattggggcgggtcgtgcacataattcaggccagagaacccagcctgagggactccaatcctgaggaaattgagatcgactttgagactctgaaacccagtacgctgcgggaacttgaacggtacgttctgtcctgccttaggaagaagccgaggaaaccatacaccattaagaaaccggttggaaagactaaagaggaactggcccttgaaaagaagagagagctggagaagcgcctgcaagacgtgagcgggcagctcaactctaccaagaagccacccaaaaaagccaacgagaaaacggaaagcagttccgcacagcaggtggccgtgtccaggctcagcgccagttcatcctcttcggatagttctagcagctcctctagttcgtcaagcagtgacacatccgactccgacagtggatag

SEQ ID NO: 110038 - DNA, 2265 bp, synthetic construct
  misc_feature 1..2265: note = Description of Artificial Sequence: Synthetic coding sequence
  source 1..2265: mol_type = other DNA
atggccagcgtgccagctctgcagttgacccctgcaaaccccccaccaccagaagtgagcaacccgaaaaagcctggacgcgtcacaaatcagcttcagtacctgcacaaggttgtcatgaaagccctgtggaaacaccagttcgcgtggccattccgacaacccgtggacgctgtgaaactaggtttgcccgattaccacaagatcattaaacaacccatggatatggggaccataaagcgcaggctggagaataactactactgggcagcatcagaatgtatgcaggacttcaacacaatgttcacaaattgttacatttataataagcctactgatgacatagtgctgatggcccagaccctggagaaaattttcctgcaaaaggtcgcttctatgccccaggaagaacaggagctggtcgtaactattcccaagaactctcacaagaagggcgcgaagctggctgctctgcaggggagtgtgactagcgcccatcaagtgccagccgtgtccagcgtttcccataccgccctttatacacctccccccgagataccaaccacggttctgaacatcccccacccttcagtcataagtagccctcttctgaaatctctgcatagtgctgggcctccattgctggctgtgacagccgcgcccccggctcagccactggctaaaaaaaagggcgtgaagcggaaggccgataccactacccccactcctaccgccatcctggccccaggctcacctgcctcgccacccgggagtttggagccaaaggcagctagactgccaccaatgcgccgagagtcaggcagacccatcaaaccacctcgcaaggatctccctgactcgcagcagcagcatcagtcatcaaaaaagggaaagctttctgagcaactgaaacattgcaacggcatcctaaaagagctccttagtaaaaaacacgccgcctacgcatggcctttctacaaacccgtcgacgcttctgccctcggactccatgactatcacgacatcattaaacatccaatggacctgagcacagtcaaacgcaaaatggagaatagggattaccgcgacgcccaggaatttgcagcagatgtccggttgatgttttcaaactgctacaagtacaaccctccagaccacgacgtggtcgcgatggcccggaagctccaggacgtatttgagtttcggtacgccaagatgcccgacgaaccactggagccaggccccctgcctgtctcaacggccatgcctccaggcctagccaaaagctctagcgagtcctcctcagaggagtcatcctcagagtcatcgtctgaggaagaagaggaggaagatgaggaggatgaggaagaagaggagtcagagagcagcgactccgaggaagagcgggcgcaccggttggccgagctgcaggagcaactgagggccgtccacgagcagctggccgctctgtcccagggaccaatttctaagcctaagaggaagagagagaagaaagaaaaaaagaagaaaaggaaggctgagaagcatcgtggaagagctggagctgacgaagatgataagggtccgcgagccccacgacccccccagccaaaaaagtccaaaaaggcgtcgggaagcggaggcgggtcagctgctctgggcccctccggttttggacctagtggcgggtcagggaccaaactgcctaagaaagctactaaaacagcacctcctgcactacctacgggttacgacagcgaagaggaggaagaaagtcgcccaatgtcttatgacgagaagcggcaactgtcacttgatattaacaaactccccggagaaaagctcggacgggtggtccacatcatccaggcacgcgaacccagcctaagggatagcaaccctgaggaaatcgagatcgatttcgaaacactgaaaccttcaacactccgggagctcgagagatacgtccttagctgcctgagaaaaaagccaagaaaaccctacaccatcaaaaaacccgtaggaaaaactaaagaggagctagccctggagaagaaaagagagctcgagaagcgtctacaggatgtgagcggtcagctcaacagtacaaaaaagcctcctaagaaggctaatgagaaaaccgaatcctcctccgcccagcaggtcgcggtgagccgcctcagtgcctccagcagttcctctgatagttcaagcagctcctcttccagcagctccagtgatacgtctgactccgacagcggctag

SEQ ID NO: 110039 - DNA, 2406 bp, synthetic construct
  misc_feature 1..2406: note = Description of Artificial Sequence: Synthetic coding sequence
  source 1..2406: mol_type = other DNA
atgttacagaatgtgactccccataataaactaccgggtgagggtaacgccgggttgttgggactcggccccgaagccgccgctcccgggaaaagaatcaggaagccttctttactttacgaaggatttgaaagtccaacaatggcctccgttcccgccctccagctcacccccgcgaaccctcctccccctgaagttagcaatcccaagaaaccaggccgagtcaccaaccaactacagtatctgcataaagtggtaatgaaggcactgtggaagcaccaattcgcgtggccttttcgccaacccgttgatgcagtcaagctgggactgcccgattaccacaaaataattaaacagcccatggacatgggtacgatcaagcggcggctcgagaacaactactattgggccgcatcagagtgtatgcaagattttaacacaatgtttacaaattgctacatttacaacaagcctactgacgacatcgtgctcatggcccagacactcgagaaaattttcctgcaaaaagtggccagcatgccccaagaggagcaagagcttgtggtgacaatcccaaaaaatagccataagaagggcgcaaaactggctgcactgcaagggagtgtcacaagtgctcaccaggtacctgcagtgtcttcagtgagccataccgccctgtatactcccccacctgagattcccacaacagttctgaacattcctcatcccagcgtgatcagctcccccctcctgaagtctctgcactccgcaggcccgcccctgttggcagttacagctgcgccgcccgcccagcccctggccaagaagaaaggcgtgaagaggaaggccgacaccaccactcccacgcctacggccatattagctcctggctctccggcttccccccctggctcgctggagcctaaagccgctcggttgccaccaatgcgaagggagagtggacggccaattaagccgcccaggaaagaccttccagatagccaacagcagcaccagtccagtaagaagggtaaactgagcgaacaattaaaacactgcaatggtatcctcaaggagctactgtctaaaaagcacgccgcatacgcctggcctttctacaaacccgtcgatgcatctgctctaggtctgcatgactatcacgatattattaaacacccaatggacttgtccacagtcaagcggaaaatggagaatcgggactatcgagacgcacaggagttcgctgcagacgtgagactgatgttttcgaactgttataagtacaacccgccagatcatgatgtggtcgctatggcaaggaagttacaagacgtgttcgagttccgttacgccaagatgccggacgagcctctggaacccggccctctccctgtttctaccgctatgccacctggacttgcaaagagtagcagcgagtctagttcggaagaaagctcctccgagtcatctagtgaggaggaagaagaagaggatgaggaggacgaagaagaagaggagtctgagtctagcgactcagaggaggagcgggcgcaccgccttgccgaactacaagagcagctgagggcagtacacgaacagctcgctgccttgtcccaaggaccgatcagcaaacccaaaaggaaaagagaaaaaaaagaaaagaagaaaaagcgaaaggctgagaagcaccgaggaagagctggggccgacgaggatgataagggcccacgcgcccccagacccccccagcctaaaaagagcaaaaaggcctctggttcaggcggggggagcgccgcgctgggccctagcggcttcggtccatcagggggctcagggaccaagctccctaagaaggcaaccaagactgcccctcctgctctgcccacagggtacgactcagaagaggaagaagaatccaggcctatgtcttacgatgaaaaacggcaactctccctggacatcaacaaactcccaggggagaagctggggcgggtggtgcatattatccaggcacgagagccctcgctgagggactctaacccagaggagatcgaaatcgactttgaaacattgaagccttcgactttgcgggagctcgaacggtacgtgttaagttgtctcagaaagaagccaagaaagccatacactatcaagaagcccgtgggtaaaaccaaggaggagctggccttagagaagaagcgagagctcgaaaaacggctgcaggacgtgagcggccagctcaattctaccaaaaagcctcctaaaaaagccaatgaaaaaacagagtctagcagtgcccaacaggtggcagtgtctcgattatcggcctccagcagtagctcggattcatcatcgagctcatcctcttcgtcctcttctgacaccagcgattctgactctgggtag

SEQ ID NO: 110040 - DNA, 2046 bp, synthetic construct
  misc_feature 1..2046: note = Description of Artificial Sequence: Synthetic coding sequence
  source 1..2046: mol_type = other DNA
atggacatgggcacaattaagcgacgactggaaaataattactattgggctgctagcgagtgcatgcaggatttcaacactatgtttactaattgctacatctacaacaagcccaccgacgatattgtgcttatggctcagacactcgaaaagatttttctgcaaaaggttgcgagcatgccacaggaggaacaggaactggtggttactatccctaaaaattctcataaaaagggagctaaattagcagccctgcagggcagtgtgacgtcagcccaccaggtaccagcagtatcctccgtgtcccacaccgcactttacacaccccctccggagattcctaccactgtcctgaatatcccacatccctccgttatttcgtcaccactacttaaatctctgcactccgcaggtcctcctttacttgccgtgacggcagcccccccagctcagccccttgcaaagaaaaaaggagtgaagagaaaggccgacactaccacgcccacacccaccgcaattctcgccccagggagcccagctagtcccccgggttccctggaaccgaaggccgccaggttaccgcccatgcgccgggaatcaggacggcccatcaagccaccaaggaaagatctgccggactcgcagcagcaacatcagtccagcaaaaaagggaagctgagtgagcagctgaagcactgcaatggcattttgaaggaactgctgtccaagaagcatgccgcctatgcatggccattttacaaacctgtcgatgcctcggccctgggactgcatgactaccatgatataatcaagcaccctatggacctttcgaccgtaaagcggaaaatggagaacagggattacagagatgcgcaggaattcgcggccgatgtacgattgatgttcagcaactgttacaagtataaccctcccgatcacgacgtggtggcaatggctagaaagttacaggatgttttcgaatttaggtatgccaagatgcctgacgagcctttggaacccggaccccttccagtgtccacagcaatgcctccaggtctagccaaatccagtagtgagagtagcagtgaggaaagcagctctgaatcttccagcgaggaggaggaggaggaggacgaagaggacgaggaagaagaggagtctgagtcaagcgactcggaagaggaacgcgcccaccgccttgctgagctgcaggagcaactgagggccgtccacgagcagctggctgctctgagccagggaccaatctccaagccgaagcgaaagcgggagaagaaggagaagaaaaagaagagaaaagctgaaaaacaccggggtcgggctggcgccgacgaagatgacaagggtcctcgcgctccaaggcccccacagcccaaaaagagcaagaaggccagtggcagcgggggcggatcagctgccctgggtccttccgggttcgggccctctggcggatccggcacaaaattgccgaagaaggcgacaaaaactgccccccccgccttacctacaggctacgactccgaagaggaagaagaatctaggcccatgtcttacgatgagaagcgacaactgtcgctggatataaataagctacctggggagaagctcggcagagtggtgcacatcattcaggccagggagccctccttgagagactcaaatcccgaagagattgaaatagattttgaaaccctcaaaccatcaacgttgcgtgagttggagaggtatgtgctgagttgcctccgcaagaaaccaagaaaaccctacactattaagaagcctgtgggaaaaacaaaggaggaattggccctggaaaagaagcgcgagctcgaaaagaggcttcaagacgtaagtggccagctaaattccacaaaaaaaccccctaaaaaagccaacgagaaaaccgagtctagcagtgcccaacaggtggctgtaagccggctgagcgcgagttctagctcgtccgatagttcctcgagttcatcctctagttcttcttcagatacttctgattcggattccggatag

SEQ ID NO: 110041 - DNA, 4089 bp, synthetic construct
  misc_feature 1..4089: note = Description of Artificial Sequence: Synthetic coding sequence
  source 1..4089: mol_type = other DNA
atgtctgctgaaagcggacctgggaccagactacggaacctgcctgtgatgggggacggtcttgagacttcccaaatgagcaccacgcaggcgcaagcacagccacagcctgccaacgcagccagcaccaacccccctccgcccgaaacctctaacccaaataaacctaaaagacagacgaaccaactacaatacctccttcgtgttgtgctgaaaactctgtggaaacaccagttcgcctggccattccagcagcccgtggatgctgttaagctcaacctgcctgactactataagattatcaagaccccaatggacatggggaccatcaagaagaggctggagaataactactattggaatgcacaggagtgtatccaggatttcaatacgatgttcacgaattgctacatttataacaaacctggagatgatattgtactaatggccgaagccctagagaagttattcctccagaagatcaacgagctcccaaccgaggagaccgagattatgattgtacaggcaaagggacgaggaagaggcaggaaagagacaggtaccgcgaagcccggagtctcaacagtcccaaacacaacccaagcatcgacaccgcctcagacacaaactccccagcccaatcccccccccgtccaggctacaccacatccgtttcctgctgtgacacctgacctcattgtccagacccccgtcatgactgtcgtgccgccccaaccacttcagactccgcctcccgtacctccccagccccagcccccacccgctccggctcctcagccagttcaatcccatccccccattattgctgctacacctcagcctgttaaaaccaaaaaaggagtaaagcggaaagctgacaccaccacgccgaccacaatcgatcctatccatgagcctccttccttacctccagagcctaagaccaccaaacttgggcaacgtcgagaatcgtcccggcctgtcaagccgccgaagaaagacgtgcccgatagccagcagcatccggccccagaaaaatcttccaaggtgtccgagcagctgaagtgttgttcggggatcctgaaagaaatgttcgcaaaaaaacacgctgcctatgcatggcccttctacaagcctgttgatgttgaagctctgggcctgcatgactattgtgatatcatcaagcacccgatggatatgtctactattaagtcaaaactcgaagcgcgggagtatcgggacgcccaggagtttggggccgatgtgcgcttgatgttcagcaactgctacaaatacaacccccccgaccatgaagttgtggccatggcgaggaaactgcaagatgtgtttgagatgcgctttgccaagatgcccgacgaaccagaggagccagtagtcgcagttagctcacccgccgttccaccaccaaccaaggttgtggctcccccaagcagcagtgattcatcgtcagattccagttcggacagcgacagtagcactgacgactccgaggaggaaagagcacagaggctggcagagctccaggaacaacttaaggctgtccacgagcaattggccgctctgagccagccacaacagaacaagcctaagaagaaggaaaaggacaaaaaggagaaaaaaaaggagaagcataagagaaaggaagaagtggaggaaaacaagaagtcaaaagccaaggaaccgcctccaaagaagaccaagaaaaataattctagcaattcaaacgtgtcgaagaaggagccagcaccgatgaaaagcaaacctccacctacgtatgagagcgaagaagaggataaatgcaagcctatgtcctacgaagaaaagagacagctctcgctggatatcaataaactgccaggtgagaagcttggccgtgtggtgcacatcatccagagcagggaaccctccctgaaaaactccaaccctgacgagatcgaaatcgactttgaaactctgaagccctctactttgcgcgagctggaacgttatgtgaccagctgcctgagaaagaagagaaaacctcaggccgagaaggtggatgttattgctggaagctctaagatgaagggcttttcatccagtgagtctgagtcctccagcgaatcttccagctcggactcagaagacagcgagactgagatggcgcccaaatctaagaaaaagggacaccccggacgggagcaaaaaaaacaccaccaccaccaccatcagcaaatgcagcaggcccctgccccggttccacagcaacctccccctccaccacagcaacccccgcccccgccccctccacagcaacagcaacagcccccgcctccacctccgccaccttcaatgccacagcaggccgcccctgctatgaaatcctcccccccgcccttcattgccacgcaggtccctgtgttggagccccagctgcccgggtccgtgttcgatcccatcggccacttcacccagcccatactgcatctccctcaacccgaactccccccccatcttccccagccccccgagcacagcacccctccccacctgaatcagcacgcagtggtgtccccccctgcgctgcataatgcgctcccacaacagcccagccggcctagcaacagagctgcagctctccctcccaaacctgctcgtccccccgcagtgagcccagccctaacccaaacacctctgttaccccagcctcccatggcacagccgccacaagtactgctggaggacgaggagcctcccgcccctccgctcacatcgatgcagatgcagctgtacctacaacaactgcagaaggtgcaacccccaacgcccctcttgccttccgttaaggtgcagagtcaaccccctcctccacttccaccacccccacatcccagtgttcaacagcagctgcagcaacagccgcctccgcctccacctcctcagccacagccacccccccagcagcagcatcagccccctcctcgccctgtgcacctccaacctatgcagttttccacccatatccagcagccccctccaccccaaggtcagcaaccaccccacccgccacccggacagcagccaccccctccacaacccgcaaaaccccagcaggtcattcagcaccaccactcacctcgtcaccacaaaagcgacccttattccactggacacctcagagaagcacccagccccctgatgattcacagtccccagatgtctcaattccaaagtttaacccatcagtccccaccccagcagaatgtccagcccaaaaaacaggaacttcgcgccgctagtgttgtgcagccccagccgcttgtggtagtaaaggaagagaaaatccacagtcccatcattagaagcgagccattctccccctctctccgcccggaacctcctaagcaccctgaatcaatcaaggctcctgttcatctcccccagcggcctgaaatgaagccggtcgatgtggggcggccagtcattaggcctcctgagcaaaatgcgccacctcccggcgcgcctgataaggacaaacaaaaacaggagcccaagacacccgtcgctccgaagaaggatctcaagatcaagaatatgggctcgtgggcttctctggtgcagaagcaccctacaacaccctcgagcacagccaaaagcagttcggactcttttgagcagtttagaagagctgcccgcgagaaggaagagcgcgagaaggcgctgaaggcccaagctgagcacgccgagaaagagaaagagcgtctgagacaggagcgcatgagaagccgagaagatgaggacgccctggaacaggctagacgcgcacatgaggaggcaaggcggcggcaggaacagcaacagcaacaacgtcaggagcaacagcagcagcagcagcagcaggctgctgccgtcgcagctgccgcgacaccccaggcccagtcttcgcaaccacagagcatgctggatcagcaaagggaactcgctagaaaaagagagcaagagcgacgtagaagggaggccatggccgctaccatagacatgaatttccagagtgaccttctcagcattttcgaagaaaatctgttctag

SEQ ID NO: 110042 - DNA, 2385 bp, synthetic construct
  misc_feature 1..2385: note = Description of Artificial Sequence: Synthetic coding sequence
  source 1..2385: mol_type = other DNA
atgtctgccgaatctgggcccggaacccgactcaggaacctccctgtaatgggtgacggcttggagacctctcaaatgtccacgactcaagctcaggctcagccccaaccagcgaatgcggcctctactaatccacccccccccgagactagcaatccaaataagcccaagcgtcagacaaaccagcttcagtacctcctaagagtggtgctgaaaaccttgtggaagcaccagttcgcttggcccttccagcaaccggtggacgcagtcaaacttaaccttcctgactactacaagatcatcaagacccccatggacatggggaccatcaagaaacgcctggagaacaattattactggaatgcccaggagtgtatccaggatttcaatactatgtttacgaattgctacatctataataagccgggagacgacatcgtcctgatggcagaggctctggagaagctgtttctgcagaaaataaatgagctcccaactgaagagaccgagataatgatcgtgcaggcaaaggggcgcggccgggggcggaaagaaactggcacagccaagcctggagtgtccaccgtccccaatactactcaggcctctacccctcctcagacccagacaccccagcctaatcctccacccgtgcaggccacaccccaccccttccccgcagtcacacccgacctgatagtccaaacaccagtgatgaccgttgtgccgcctcagcccttacaaacaccaccccctgtgcccccgcagccgcaaccaccaccggcccccgcgccccagcctgtacagagccatccccctataattgctgcaacgccccagccagtgaagaccaagaaaggagttaagcggaaggccgataccaccactccgaccacgatcgaccctattcatgagccaccgtctctccctcctgaaccaaaaactaccaaactgggccaacgacgggagtcctcacggcctgtgaaaccacctaaaaaggacgttcctgactctcagcagcatccagcacccgaaaagtcaagcaaggtgtccgaacagttgaagtgctgctcaggaattctgaaagaaatgttcgcaaaaaagcacgctgcctacgcttggcccttttacaaaccagtagatgtggaggccctcggtcttcacgattattgtgacatcatcaaacaccccatggatatgtctaccatcaagtctaagctggaggccagagaataccgtgacgctcaggagttcggcgccgatgtgcgactgatgttctcaaattgctacaaatataatccccctgaccatgaagtagtcgcaatggctcgcaaattgcaggatgtattcgaaatgcgattcgctaaaatgccggatgagcctgaggagccagtggttgcagtgtcatctcccgccgtgcctccacccaccaaggtggtggcccccccatcgagcagcgactcctcctctgactcaagtagcgatagtgattccagtaccgacgactccgaagaggaacgagctcagaggctggccgagcttcaggagcagctgaaagcagttcatgagcaactcgcagcccttagccagccccagcagaataagccaaaaaagaaggagaaggataagaaagaaaaaaaaaaggagaaacataagagaaaggaagaagtagaggaaaacaagaagagtaaagcaaaggagcccccgcccaagaagactaaaaagaataactcatcaaactccaacgtgagcaagaaggaacctgcacctatgaaaagtaaaccaccgcccacatacgagtctgaggaagaggacaagtgcaaacccatgtcttacgaggagaagagacagctgagtttggatatcaacaagctcccgggagagaaactaggccgagtggtgcatatcatccaaagcagagaaccatctctcaagaactctaatcccgatgaaatagaaatcgattttgaaacactcaagccaagcacccttcgggaactggagcggtatgtgactagttgccttagaaagaagcggaaaccgcaggcagagaaagtggacgtgatcgccggaagcagcaagatgaaagggttctcttcgagtgaatccgagtcgtcatcggaaagctcatcttctgacagcgaggatagtgagacggctttttgtacttctggcgattttgttagtcccggtccaagcccgtatcattctcatgtacaatgtggtcgcttcagggaaatgctgcgatggttcctcgtagacgtggagcaaacggccgcgggacagccccatcggcaatctgccgctggcccggccatcacttgggcccccgccatcgcctaccccagccctgaatgtgcaaggtgctgcgtgggatgttcctag

SEQ ID NO: 110043 - DNA, 2169 bp, synthetic construct
  misc_feature 1..2169: note = Description of Artificial Sequence: Synthetic coding sequence
  source 1..2169: mol_type = other DNA
atgagcgccgaatcgggcccaggcacccggctgcggaatttacccgtcatgggcgacgggttagagacaagtcagatgtctacaactcaggcgcaggcccagcctcagcccgccaacgctgcatctacgaatccccctcctcctgagactagcaatcccaataagcccaaacgacagactaatcagctgcaatacctcctacgggtagtattgaaaaccctttggaaacaccagtttgcctggccctttcaacaaccagtagatgccgtgaaattgaacttgcccgactactataaaatcataaagactccaatggatatgggcactattaagaagagactcgagaataactactactggaatgcgcaagagtgcatccaagatttcaacacgatgttcaccaactgttatatctataataaacctggggatgatattgttctaatggctgaagcactggagaaactgtttctgcagaagatcaacgaactgcctactgaagaaactgagattatgatcgtgcaggctaagggtagaggccggggccggaaagaaaccggaaccgcaaagcccggcgtaagtaccgtcccaaacacaacacaggcgagcactccgccccaaacccaaactcctcagccaaatcccccaccagtgcaggccactcctcacccttttcccgctgttaccccagatctgatcgttcagacgcctgtaatgactgtcgtgccaccccagcctctgcagacacctccaccagttcccccccaaccccagcctccaccagctccggccccccagcctgtgcagtcacatccgccaataatcgcggcaacaccccagcctgtgaagactaagaaaggagtcaagcgcaaagctgataccacgaccccgaccaccattgacccaatacatgaaccgccgtcactgccccccgagcctaagactaccaagctcggacagaggagggagagctcaaggcctgtaaaaccaccaaagaaagatgtcccagattcccaacaacaccccgccccagagaagagctctaaagtgtccgagcagttgaaatgttgttccggcattctgaaggagatgtttgccaagaagcatgcagcctatgcttggcctttttacaagcctgttgacgtggaggccctcggactgcacgactattgcgacataatcaaacatccaatggacatgtccaccatcaaatccaaactggaggcccgagaatatagagatgcccaggaattcggggcagacgtcagattaatgtttagcaattgctacaaatacaacccgcctgaccacgaagtggtggcgatggcgcggaagctacaggatgtgtttgagatgaggttcgccaagatgcccgacgagcctgaggaacctgtcgtcgccgttagctcgcccgctgtgccaccacctactaaagtcgtggcccctccatcaagcagtgacagctcttcggactcgtcatcagactctgactcgagtaccgatgatagcgaagaggaacgtgcacaaagattggctgagcttcaggaacagttaaaggcggtgcatgaacagctcgcggcccttagccaacctcagcagaacaagccgaaaaagaaggagaaggacaagaaagaaaaaaagaaagaaaagcacaaacgaaaggaagaggtggaggaaaacaaaaagagcaaagcaaaggagcccccaccaaagaagaccaagaaaaataattcgtcaaactccaatgtgtccaagaaggagcccgcaccaatgaaatccaagcctcccccaacctacgaatcagaagaagaagacaaatgtaagccgatgagctacgaggagaaacggcaactgagcttagacattaacaagctgcccggcgaaaagctgggaagggtagtacatataattcagagccgggagcctagtttaaagaactccaacccagatgaaatagagattgacttcgagacactcaaacctagcactttaagggagctcgagcgttatgtgacgagttgcctgagaaagaagaggaagcctcaagccgagaaggtggatgtcatagccggcagctccaaaatgaagggcttttcctcaagtgaatccgaatcatcctccgagagcagctcctctgattccgaggatagtgagactggcccggcttag

SEQ ID NO: 110044 - DNA, 2625 bp, synthetic construct
  misc_feature 1..2625: note = Description of Artificial Sequence: Synthetic coding sequence
  source 1..2625: mol_type = other DNA
atggacctgaatactataaaaaagcgcctggaaaacaaatattacgctaaagcttccgaatgcatcgaggattttaatactatgttcagcaattgctatctctataacaaacccggcgacgacatagtacttatggcgcaagccctagagaagctgtttatgcaaaaacttagccagatgccccaggaggaacaagtggtgggtgtgaaggaacgaattaagaaaggcacccagcagaacatcgctgtttcctcagctaaggagaagagtagcccaagcgccactgaaaaggtgtttaaacaacaggaaatcccgagcgttttccccaaaacctctatttcacccctgaacgtagtgcagggcgcctctgtcaacagtagttcgcagaccgctgcccaggtcacgaaaggcgtcaagcgcaaagccgacactactacccccgccacaagtgcagtgaaagcgtccagcgagttcagtccaacctttaccgaaaaaagtgttgctcttccgcctatcaaagagaatatgccaaaaaatgttctgcccgatagccaacagcagtacaacgttgtaaagacagttaaggtaacagagcagttgagacactgcagcgagatcctgaaagaaatgcttgcgaaaaagcactttagctacgcttggcctttttacaatcctgtcgacgtaaacgcactgggtctgcacaactactatgacgttgtcaagaacccaatggatctgggcactattaaggagaagatggataaccaagagtacaaagacgcctacaaattcgctgctgatgttcgtctcatgtttatgaattgctacaaatataatccccctgatcatgaggtagtgaccatggccaggatgctgcaagatgtattcgaaacccacttctcaaaaatacctattgagccagtcgaatctatgcctctgtgctacatcaagacggatatcacagaaacaacaggtagggaaaacacaaatgaggcctcttctgaggggaattctagtgatgatagcgaagacgagcgtgtaaagcgcttagcaaaattgcaggagcagttgaaggccgtacatcagcagctgcaggtactcagccaggttccctttcgcaagctgaacaaaaaaaaagaaaaatctaagaaggagaagaaaaaggagaaggttaataattccaacgaaaacccgagaaagatgtgcgagcagatgagactgaaggagaagtcaaagcggaaccagccaaagaaacgcaaacagcagtttataggcctgaaaagcgaggatgaagacaacgccaaaccgatgaattatgacgagaaaagacagctctccttaaacatcaacaaacttcctggtgacaagctcggcagagttgtgcacatcattcaatcccgagagccttcgctatctaactccaatcccgatgaaattgagatagattttgagaccctgaaggcaagcacccttcgagaactcgaaaaatatgtgtcggcgtgtttaagaaagagaccgttgaagcccccagccaagaaaatcatgatgagcaaagaggaactccattcgcagaagaagcaggagctggaaaaaagattgttggacgtgaacaatcaattaaattcgcggaagaggcagactaagagtgacaagacgcagccaagtaaggccgtcgagaatgtttccaggctgagtgaatcatcatcatctagcagcagtagttctgagtctgaatcctcctcatctgacctgagctccagtgatagtagtgattcagaaagtgagatgttccctaagttcaccgaggtaaagcccaacgattctccgtctaaggaaaacgtcaaaaaaatgaagaatgaatgtattcccccagaaggtcggacaggtgtgacacaaattggatattgtgtgcaggacactacttcagcaaatacgacacttgtacaccagacaacgccgagtcatgtgatgccccccaatcatcaccagctggcctttaattaccaagagctcgagcacctgcagaccgtgaaaaatatctcccctctgcagatcctcccaccttccggtgacagtgagcagctgagcaacggcatcactgtcatgcatcccagtggggacagtgacacgaccatgctggagtcagaatgccaggcccccgtgcagaaggatatcaagatcaagaatgcggatagctggaaaagcctgggaaagcccgtgaagcctagtggagtgatgaagtcatctgatgagttgtttaaccagttccgtaaggctgctatcgagaaggaggtgaaggcgagaacacaggagctcatacgcaaacatcttgaacagaacacaaaagagcttaaggcatcgcaggagaatcagcgagacctcggtaacggccttacggtcgagtccttcagtaataagatccaaaataaatgttcgggcgaggagcagaaggagcatcagcagtctagtgaggcacaagataagagcaagctgtggcttctcaaggaccgagatttggccaggcaaaaagaacaagagcgcagaagacgggaggccatggtgggcacaatcgacatgacgctgcagagtgatatcatgaccatgttcgaaaacaattttgattag

SEQ ID NO: 110045 - DNA, 45 bp, synthetic construct
  misc_feature 1..45: note = Description of Artificial Sequence: Synthetic coding sequence
  source 1..45: mol_type = other DNA
atgagtctgccctcgcggcagactgccattattgttaatccatag

SEQ ID NO: 110046 - DNA, 2844 bp, synthetic construct
  misc_feature 1..2844: note = Description of Artificial Sequence: Synthetic coding sequence
  source 1..2844: mol_type = other DNA
atgtcactcccctcccgccagaccgctataatagtaaatcctccccctccagagtacatcaatacaaaaaaaaatggccgcctcactaatcagctgcagtacctccagaaggtggtgcttaaggatctatggaaacactctttttcttggccatttcaaagaccagtcgatgctgttaaactgcagttgcccgactactatacaattattaagaaccccatggacctgaacactattaaaaaacggctggagaataaatactacgcaaaagcaagtgagtgcatagaggactttaacactatgttcagcaattgttatctttataataagccaggcgacgacattgtgctaatggcccaagccttggagaagctcttcatgcagaaactctcacagatgccacaggaggaacaggtcgttggagtgaaagaaaggatcaagaaagggacacagcagaacattgccgtttcctcagccaaagagaagagttccccttcagccacggaaaaggttttcaaacagcaagaaatcccctctgttttccccaagacttccattagccctctcaatgtcgttcaaggagcctcagtgaactccagttcccaaacagccgctcaggttaccaagggagtcaaacgcaaggctgacactaccacccctgctacctcagcagtcaaggcctccagcgagtttagtcccactttcacggagaagagtgtggcattaccacctatcaaagaaaacatgcctaagaatgtcctccccgactctcagcaacagtacaatgtcgtgaagaccgtgaaagtcacggagcagctgagacattgtagtgaaatcttgaaggagatgctggccaagaaacacttctcttacgcctggcccttttacaatcccgtggacgtcaacgccctaggtcttcacaactattacgacgtagtaaaaaacccgatggacctgggcactatcaaagaaaaaatggataaccaggagtacaaggatgcttataagttcgcagctgacgttagactgatgtttatgaattgttataagtacaatcccccggaccatgaggtggtgaccatggcacgcatgctgcaggatgtatttgaaacccacttcagcaagatacccattgaacctgtcgagtcaatgccactgtgctatatcaagactgacatcacggaaacaaccgggagggaaaacacaaacgaagcctcatccgaagggaattcatctgatgactccgaggacgagcgggtcaaacgattagctaagttacaggaacaactgaaagctgtacatcaacagctgcaggttctatcacaagttccctttcggaagttgaacaagaagaaggagaagagcaaaaaagagaagaaaaaagagaaggtcaacaattccaatgaaaaccctaggaagatgtgtgaacagatgcgtctaaaagaaaaatcaaagcgcaaccagccgaaaaaaagaaaacaacagtttatcggtctgaaatctgaagatgaagataatgccaagccaatgaattacgatgaaaaacggcagcttagtcttaatataaataaactgcccggagataaactggggagggtagtacacattattcaaagtcgtgagccatcactgtcgaacagtaaccccgacgaaatcgaaatagattttgagaccctgaaagcctcaactttgcgcgaactggagaagtacgttagtgcctgcctgagaaagcggccccttaaacctcccgccaagaagattatgatgagcaaggaagaactccactctcaaaaaaagcaagagctggagaaacgacttctggacgtgaacaatcaattgaactctcgcaaacgacagaccaagtcggacaaaacacaaccaagcaaggccgtggagaacgtctcccgcctgtccgaatcgagctcaagtagtagcagcagctctgagtcagaaagtagctcttctgacctcagtagtagcgattcttcagattccgagagcgagatgttcccaaaatttaccgaggtgaaaccaaacgactctccgtcaaaggagaatgtaaagaagatgaaaaatgagtgcatcccacccgagggaaggaccggcgttacgcagattggctattgtgtccaggacaccacgtccgctaatacaacgctcgtgcatcaaaccacgcctagccacgtaatgccgcccaatcatcatcagctcgcattcaactaccaggagctcgagcacctgcagactgttaaaaatataagtcctctgcagatactcccgccttcaggtgactccgagcagctgtcaaatggcatcactgtgatgcatccttctggagattctgataccacaatgctcgaaagcgagtgtcaggctccggtgcagaaggacatcaagatcaaaaacgctgattcttggaagagcctcggcaagcctgtgaaacctagcggcgtcatgaagtcctctgatgaactattcaatcagtttcgaaaggccgccattgagaaggaagtgaaagctcgcacccaggaacttataagaaagcacctggaacagaatacaaaggagttgaaggcgtcgcaagaaaaccagcgggatcttggaaatggcttgacggtcgagtcgtttagtaataagatccagaacaagtgcagcggggaagagcagaaggagcaccagcagagcagcgaggcacaggataagagcaagctttggctcctgaaggacagagacctagcacgccaaaaggagcaagaacggcgcagacgcgaggcgatggtcggcaccatcgacatgaccctccagagcgacatcatgactatgtttgagaataactttgattag

SEQ ID NO: 110047 - DNA, 2706 bp, synthetic construct
  misc_feature 1..2706: note = Description of Artificial Sequence: Synthetic coding sequence
  source 1..2706: mol_type = other DNA
atgagcttgccgagtcgacagacggcaattatcgtcaatccacctccccccgagtacattaacacaaagaaaaacgggagactcaccaaccagttgcaatatctgcaaaaagttgttcttaaagacctatggaagcactccttctcctggccatttcagagaccagtggatgccgtcaaactccagcttccacctggcgatgatatagtgttaatggcgcaagccctcgagaagctcttcatgcagaagctgagccagatgccccaggaggaacaggtggtgggtgttaaagaaaggattaaaaaagggacacagcagaacattgccgtgtcctccgcgaaggagaaatcgtcaccttccgcaaccgagaaagtcttcaaacagcaggagatcccaagtgtctttccaaagacaagcatctcaccactaaatgttgttcagggtgcttcagtgaattcaagttcccagacagcggcgcaggtcaccaagggggtaaagcggaaggctgacactacgaccccggccacatccgccgtcaaagccagttctgaattctcgcccaccttcactgaaaaaagtgtggccttacctccaatcaaggaaaatatgcccaagaatgtgcttcctgacagccagcagcaatacaacgtggttaagactgtaaaagtcacagaacagctgcggcactgctccgagatcctgaaagagatgctagccaagaagcattttagctacgcatggccattctataatcctgtcgacgtgaatgctctgggacttcacaattattacgatgtagtcaagaatcccatggatctggggaccatcaaggaaaaaatggacaatcaggaatacaaggatgcttataaattcgctgcagacgttagactgatgtttatgaactgctataagtataaccctccggatcatgaggttgtgacaatggctcggatgcttcaggatgtctttgaaacccacttctctaaaattcctatagaaccagtggagtcaatgcccctctgctacattaaaacagacatcaccgagaccactggtagggagaatacaaacgaggctagctccgaaggcaatagcagtgacgattctgaggatgagagagtgaaacgcttggctaagctgcaggaacagctgaaggctgtccatcagcagttgcaggtcctgagccaggtccctttcagaaagctgaataaaaagaaagagaagagcaagaaagaaaagaaaaaggaaaaggtcaacaactcaaacgagaaccctcgaaaaatgtgtgagcagatgcgattgaaggaaaaatccaagaggaaccagccaaaaaaacgaaaacagcagttcatcggcttaaaatccgaagatgaagacaacgcaaaaccgatgaactacgatgagaaaaggcaacttagtcttaacataaataaactgcccggagataaactggggcgagtggtccatatcatccaatctcgggagccgtctttgagtaattctaacccggatgaaattgagattgactttgagactctgaaagcatctacactaagggagttggaaaagtacgttagcgcttgcctgcgcaagaggccattaaagccccctgctaagaagatcatgatgagcaaggaggaactgcatagccagaaaaagcaagagctggagaaaaggttgctggacgtgaataaccaattgaactcccgaaaacgtcagaccaaatcggataagacacagccttcaaaagcagtggaaaacgttagcagattatccgagagtagctcgtcctcctccagtagctcggagtccgaaagctcgtcatccgatttgagttcttccgacagcagtgattccgaatccgagatgttccccaagttcaccgaagtcaaacctaatgacagcccaagtaaggagaacgtcaaaaaaatgaaaaatgagtgcatcccacccgagggcaggaccggtgtcactcaaattggttattgcgtccaggatacaacttcagcaaacactacactggtccatcaaacaactccatcgcacgtgatgccaccaaaccaccatcagctagcgtttaattatcaggagctagagcatctgcagactgtgaagaatatcagccctctgcaaatcctccccccttctggagatagcgagcagcttagtaacggcatcaccgtcatgcatccttcaggtgattctgacacgaccatgctggaatccgagtgccaggctcctgttcagaaggatataaagatcaagaacgccgacagctggaaaagcctggggaaacctgtgaagccttcaggcgtgatgaagtcttccgatgaactttttaaccagtttcgtaaggcggccatcgagaaggaggtaaaggcgagaactcaggaactaattaggaagcatcttgaacagaataccaaggagctgaaagcttctcaggaaaaccagcgcgatctgggcaacggactgactgtcgagagttttagtaacaaaattcagaataaatgctccggcgaagagcagaaagagcaccaacagtcctcggaggctcaggacaagtccaaactctggctgctcaaggaccgagaccttgctagacagaaggagcaggaaaggaggaggcgcgaggccatggtgggaacgattgatatgacgctacagagcgatattatgaccatgttcgagaataattttgattag

SEQ ID NO: 110048 - DNA, 2844 bp, synthetic construct
  misc_feature 1..2844: note = Description of Artificial Sequence: Synthetic coding sequence
  source 1..2844: mol_type = other DNA
atgagtctgccatctcgacagacagccatcatagtgaacccaccccctcccgagtacataaataccaagaaaaatgggcgactaacgaatcagctgcagtacttgcagaaagttgtattgaaggatctttggaagcactccttctcttggccattccagcggccagttgacgcagtgaaactccagctgcccgactattatacaatcattaaaaaccctatggacttaaacacaattaagaagagactggagaataagtattacgcaaaagcatcagagtgcatcgaggattttaacactatgttctcaaattgctacctgtacaacaaacctggagacgatatcgtgctgatggcccaggccctggagaagttgttcatgcagaaactgagtcagatgccgcaggaagagcaggtcgtgggagtgaaggagagaattaagaagggtactcaacagaacattgcggtcagctctgccaaagagaaatcatcaccctcggctacagaaaaagtgttcaaacagcaggagatcccgtctgtttttcccaagacttctatctcgcccttaaacgtggtgcagggagcatcagtcaattcaagctcacaaactgccgcccaggtgacgaagggcgtgaaaagaaaggccgatacgaccaccccggcaacttccgccgtaaaggcaagctctgagtttagtccaacctttacggaaaaaagcgtggcacttccacctattaaggagaacatgccaaaaaatgtcctcccggactcccagcagcagtacaacgtcgtgaaaaccgttaaagtgaccgaacaactcaggcattgttcagaaatcctaaaagagatgctggcgaagaagcatttctcttacgcttggcctttttataatccggtggatgttaacgccttgggcctgcacaattactatgacgtggtcaaaaacccaatggacctcgggactataaaggagaaaatggataatcaggagtacaaggacgcttataaatttgcagctgacgttaggttaatgttcatgaattgttacaagtataaccctcctgatcatgaggttgtgaccatggctcgcatgctgcaagatgtcttcgaaactcactttagcaaaatcccgattgagcctgtggagtcgatgcctctgtgctatattaagacagacatcacagagacaaccggccgtgaaaacactaatgaagcttcctcagaagggaacagcagcgacgactcggaagatgagcgcgttaaacgcctggctaagctgcaggaacagctgaaggccgtgcaccagcagttacaggtgctaagccaggtaccattccgaaagctcaataagaagaaggaaaagtccaaaaaagagaagaagaaggagaaagttaacaattctaatgagaaccctaggaagatgtgcgagcaaatgcgcctcaaagagaagtccaagaggaaccagcccaagaagagaaagcagcagtttattgggctcaaatctgaagacgaagacaatgcgaagcctatgaattatgacgaaaagcgtcagcttagcctcaacatcaacaaattgcctggagataaactgggccgcgttgtacatattatccagtctcgcgagccatctctgtctaattctaatccggacgagatcgagattgacttcgagacgctgaaggcttcgacccttcgagaactcgagaagtacgtgagcgcatgtcttaggaagaggcccttgaagccacccgccaaaaagattatgatgagcaaagaggagctgcattcgcaaaagaagcaggagctggagaaacggttactcgacgtgaacaatcagttgaatagcaggaagcgccagactaagtcagacaagacccagccctccaaggcggttgagaatgtgtccagattaagcgaaagcagttcgtcctctagttctagttctgaaagcgagtcatcatcttcagacctgtcttcgagcgactcctccgactccgaatcggagatgttcccgaagtttacagaagtcaaaccgaacgatagccccagtaaggagaacgtgaagaaaatgaagaatgagtgcattccccccgaagggaggacaggagtgacgcagattggatactgcgttcaggacaccactagtgccaacacgaccctcgtgcatcagacaactccaagccacgttatgccacctaaccaccatcagctggctttcaattaccaagagctggaacacctacagaccgtgaagaatatttcgcctctccaaattttgccaccatccggggattcagaacagcttagcaatgggattacagtcatgcacccttctggggactccgatactactatgctcgagtcagaatgccaggcccccgtccagaaggatatcaagattaaaaacgctgacagttggaaatctcttggcaaacctgtgaagccctccggtgtgatgaagtctagtgatgagttgtttaaccagttcagaaaagctgccattgaaaaggaagtgaaggctcggacacaggagttaatcaggaagcatctggagcagaatacgaaagaacttaaagctagtcaggagaaccaacgcgatctcggcaatggtctgactgtagagtctttcagcaacaaaatccagaacaagtgctcaggggaggagcagaaagaacaccaacagagctctgaagctcaggataagagtaagttatggctgttgaaggatcgggatctggcccggcagaaagagcaggagaggcggcgcagagaagcaatggtggggactatcgacatgactcttcaatcggatatcatgaccatgttcgaaaataattttgactag

SEQ ID NO: 110049 - DNA, 2844 bp, synthetic construct
  misc_feature 1..2844: note = Description of Artificial Sequence: Synthetic coding sequence
  source 1..2844: mol_type = other DNA
atgtccctccccagtcgccagacagccattatcgttaacccaccccctccagagtatatcaacactaagaagaatgggagactcacgaaccaactacaatatctccagaaagtcgtcctgaaagacctttggaagcattccttcagctggccatttcagaggcccgtcgacgcggtcaaactgcaactgccagattattatacaattattaaaaatcccatggacttgaataccattaaaaaacgacttgagaataaatactacgcaaaggcttccgaatgcatcgaggacttcaacactatgttcagcaattgctacttatacaataagccaggggatgatatagtgcttatggctcaggctctagagaaactttttatgcaaaagttatctcagatgccccaggaagagcaagtggtgggcgtcaaagaacgcatcaaaaaggggacacagcagaatattgcagtgagcagtgctaaggagaagagcagtccgagcgcaaccgagaaagttttcaaacagcaggagattcccagcgtatttcccaaaacctccattagcccactgaatgtggtgcaaggggcatccgttaattcctcttcccagacagcagctcaggtgactaagggagtaaagcgcaaagcagacaccactacccccgccacctccgctgtgaaagcttcctctgaattttcccccacattcactgaaaaaagtgtggcactgcctcccatcaaggaaaatatgccaaagaatgttctcccagacagccagcaacagtataacgtggtgaagacagttaaagtcacagagcaactgaggcactgcagcgagatcctgaaagagatgcttgccaaaaagcacttcagctacgcctggccattttacaaccccgttgatgtgaacgctctcggacttcataactactatgatgtcgtcaagaatcctatggacctgggaacaattaaagagaagatggataatcaggagtacaaggacgcctacaagtttgccgccgatgttcgtctcatgttcatgaattgctataaatataacccgccagatcatgaggtggtgacgatggcccgcatgctgcaggatgtcttcgagacgcattttagcaaaatccccatagagcccgtcgaaagcatgcccctgtgttacattaagactgatatcactgaaacgacagggcgcgagaacacgaacgaggctagcagcgagggaaatagcagtgatgacagcgaggacgaaagagttaaacgcctggccaagttacaggaacagctgaaagctgtgcaccagcagctgcaggtattgagtcaagttccctttcgcaagttaaataaaaaaaaagagaagagcaagaaggagaagaagaaagagaaggttaacaacagcaacgaaaatccgcggaagatgtgcgagcagatgcgcttaaaggagaagagtaagcgtaatcaaccgaagaagaggaaacagcaatttattggcctgaaaagcgaagatgaagacaatgcaaagccaatgaattacgatgaaaaaagacagctgagcttgaatatcaacaaactaccaggcgataaactgggccgggttgtgcatatcatacagagccgcgagccgtcactctccaacagcaatccagacgaaattgagatcgatttcgaaacattaaaggctagtacactccgcgagttggagaaatacgtgtccgcatgtctgaggaaacgtccactcaaaccacctgccaagaaaattatgatgtcaaaagaagagctacatagtcagaagaagcaggagctagagaagcggctgctggacgttaataaccagctcaattccaggaaaaggcagactaagagcgacaagacacagcccagcaaagctgtcgagaacgtcagcagactgtctgaaagcagctccagctcctcttcctcatcagaatcggaaagttctagttcagatctgtctagtagcgattctagtgacagcgagtccgagatgtttccgaaattcaccgaggtgaagccaaatgattctcccagtaaggagaacgttaaaaaaatgaagaatgaatgtattccgcccgaaggacgcacgggcgttacgcagatcggttactgtgtacaggacacgacgtcggccaacaccactctcgttcatcagaccacacccagccacgttatgcctcctaatcaccatcagctggcattcaactatcaggaactggaacacctgcaaaccgtcaaaaacatcagccctctccagatcctgccaccatccggggactcggagcagctgagtaacgggattaccgtcatgcatccgagcggggattctgataccaccatgttggaatcagaatgccaggcaccagtccaaaaagacatcaagattaagaatgcggatagctggaagagtctggggaagccggtgaagccctctggggtgatgaaatcctctgatgagctattcaaccagtttaggaaggctgccattgagaaggaggtaaaggcaagaacccaggaactgatcagaaaacacctggaacagaacacaaaggaactgaaggctagtcaggagaatcagcgcgacctcggtaacgggcttaccgtcgagtcttttagcaataaaatccagaacaaatgctctggcgaggagcagaaggaacaccaacaaagctctgaggctcaggacaagtcaaaactatggcttctgaaggatagggacctcgcaaggcagaaagaacaggagaggcggagacgagaggccatggtaggaactattgatatgacattgcagagcgacatcatgacaatgtttgaaaacaacttcgactag

SEQ ID NO: 110050 - DNA, 531 bp, synthetic construct
  misc_feature 1..531: note = Description of Artificial Sequence: Synthetic coding sequence
  source 1..531: mol_type = other DNA
atgagcctgccctcaaggcagacggctatcatcgtcaaccccccaccccccgaatatatcaacactaaaaagaatggaagactgacgaaccagctacaatatctgcagaaggttgtcctgaaggatctgtggaaacatagctttagctggccctttcagcgcccagtcgatgctgtgaaacttcagctgcccgattattatacaatcatcaagaaccccatggacctgaataccataaaaaagcgcctcgagaataagtactatgcaaaagcatctgaatgtattgaggacttcaatacaatgttttctaactgttatttatataataagcccggtgacgacattgtcctgatggcacaggcgttggaaaaactgtttatgcagaaactttcacagatgccacaggaagagcaggtggtgggcgtgaaggaaagaataaagaagggaacccagcagaacatcgccgtctctagtgctaaagaaaagagctctccctctgctacagaaaaggtctttaaacagcaggagtag

SEQ ID NO: 110051 - DNA, 1389 bp, synthetic construct
  misc_feature 1..1389: note = Description of Artificial Sequence: Synthetic coding sequence
  source 1..1389: mol_type = other DNA
atgtctctccccagtcggcagacagctattatcgttaatccgccacctccagaatacatcaacacaaaaaagaacggcaggctgaccaaccaactgcagtacctgcagaaagtggtactgaaggatctttggaagcatagcttttcttggcccttccagcggcccgtggacgcagtgaaactacagcttccagactactacacaatcataaaaaacccaatggatctaaatacgatcaagaagagattggaaaataaatactatgccaaggcatcggagtgtattgaggattttaatactatgttcagcaactgctacctgtataataagcccggcgacgatattgtcctgatggcgcaagctttggagaagttgtttatgcaaaagctctcacagatgcctcaggaggagcaggtcgtcggagtgaaggaaagaattaaaaaggggacccagcaaaatatcgccgtgtcgagcgccaaagaaaaaagctcgccttccgccaccgaaaaagtgtttaagcagcaggagatcccctcggtatttcccaaaaccagtatcagtcccctaaacgtggtgcaaggagcctccgtgaattcttcttctcaaactgccgcacaagttacaaaaggcgtcaaacgaaaagccgatacgactacaccggcgacgtcagcagtcaaggcctccagtgagttctccccaacttttactgagaagtcagtcgctctgccccccatcaaagaaaatatgcccaaaaacgtattacccgactcccagcagcagtataatgtggtcaaaacagtgaaagtgactgagcagctccggcattgctctgaaatactgaaagagatgctggccaagaaacatttttcctatgcctggcccttctacaatcctgtggatgtaaatgcgctcggactccacaattactacgacgttgttaaaaaccctatggatctgggaaccatcaaagagaagatggacaaccaggagtacaaggatgcgtacaaatttgccgcagacgtccgcctgatgtttatgaactgctacaagtataatccccccgaccacgaagtggtgaccatggccagaatgttacaagacgtattcgaaacccacttctcaaagattccaatagaaccagttgaaagcatgccactgtgttatataaaaactgatataacagaaacaaccgggagagagaatactaacgaagcctcatcagagggaaactcttctgatgacagtgaagatgagcgtgttaagagactcgctaagttgcaagagcagttaaaagccgtgcaccagcagctgcaggtcttgtcccaggtgccattccgcaaactcaacaagaaaaaggagaagagtaaaaaagagaaaaaaaaggaatag

SEQ ID NO: 110052 - DNA, 468 bp, synthetic construct
  misc_feature 1..468: note = Description of Artificial Sequence: Synthetic coding sequence
  source 1..468: mol_type = other DNA
atgtctttgccatcgcgccaaacagcaatcatcgtgaacccacctccgccagagtacatcaatactaagaagaacggccggctgacaaatcagcttcagtaccttcagaaagtggtcctcaaagacctgtggaaacactccttctcctggcccttccagcggccagtggatgccgtaaaactacagttaccggactactacacaatcattaaaaaccctatggatttgaataccatcaaaaaaagacttgagaataagtactacgctaaggcctctgagtgcatcgaagacttcaataccatgttcagtaattgctatctatacaacaaaccaggggatgacattgttttaatggctcaggccctggagaaactgtttatgcagaagttatctcagatgccgcaggaggaacaggttgttggagttaaggagagaatcaaaaagggtacacagcagaacatagcctag

SEQ ID NO: 110053 - DNA, 603 bp, synthetic construct
  misc_feature 1..603: note = Description of Artificial Sequence: Synthetic coding sequence
  source 1..603: mol_type = other DNA
atgtctttgccttcgcggcagacggcaatcattgttaatccccccccccccgaatatatcaatactaaaaagaatgggagactgactaaccagttacagtacctacagaaagtggttctgaaagacctgtggaaacattccttttcttggccattccaaaggcctgtcgacgctgtgaagcttcagctacccgactattatacgattattaaaaaccccatggaccttaacactattaaaaagagattggaaaataagtactacgcgaaagcctccgaatgcatcgaggattttaacaccatgttttctaattgctacctttataacaagcccggtgacgacattgtgctgatggcacaggcactggagaaactgtttatgcagaagctttcccaaatgcctcaggaagagcaagtggtaggagtcaaggaaagaataaagaaaggaactcagcagaacatagccgtgtcctctgctaaggagaaatcctcccctagcgccaccgaaaaagtattcaagcagcaggaaatcccttcagtgttccccaagacctcaattagccccctcaatgtggtccagggagcatcagtaaacagcagttag

SEQ ID NO: 110054 - DNA, 468 bp, synthetic construct
  misc_feature 1..468: note = Description of Artificial Sequence: Synthetic coding sequence
  source 1..468: mol_type = other DNA
atgagtctgccatcccgccagactgccatcattgtgaatcctccacccccagagtatatcaacaccaaaaagaacggccggctgacgaaccagttgcagtatcttcagaaggtcgtactgaaagacctgtggaaacacagcttcagttggcctttccagagacctgtcgacgccgtaaagctacaactaccagattactacaccattattaagaatcctatggacctgaacacaattaaaaaacgcctagaaaacaaatattatgctaaggccagcgagtgtatcgaagatttcaataccatgttttcgaactgctacctgtacaacaaaccgggggacgacattgtgctgatggcacaggcactggagaaactgttcatgcagaaactgagccagatgccacaggaagagcaggtggtgggcgtgaaggaacggattaaaaaagggactcagcagaatattgcgtag

SEQ ID NO: 110055 - DNA, 159 bp, synthetic construct
  misc_feature 1..159: note = Description of Artificial Sequence: Synthetic coding sequence
  source 1..159: mol_type = other DNA
atgtccctcccttcccgacaaactgctatcatagtcaacccgccccctcccgagtacatcaataccaaaaagaatgggcgcctcactaaccagctgcagtatctccagaaagtcgtcttgaaggacctctggaaacacagcttcagttggccattttag

SEQ ID NO: 110056 - DNA, 291 bp, synthetic construct
  misc_feature 1..291: note = Description of Artificial Sequence: Synthetic coding sequence
  source 1..291: mol_type = other DNA
atgagtttgccctcgaggcagactgccataattgtcaacccgcctcctccggagtacatcaatacaaagaaaaatggacgacttaccaaccaactgcagtacctccaaaaagtggtactgaaagatttgtggaagcattcttttagctggcccttccagaggcccgtggatgctgtgaagctccaactgcccgactattacacaatcatcaaaaatcctatggacctcaacacaatcaaaaaaagactggaaaataagtactatgccaaagcctccgaatgcatcgagtag

SEQ ID NO: 110057 - DNA, 99 bp, synthetic construct
  misc_feature 1..99: note = Description of Artificial Sequence: Synthetic coding sequence
  source 1..99: mol_type = other DNA
atgtctttaccgtcacgccagacagctattattgtcaacccaccaccccctgaatacattaacaccaagaaaaatggacggctgaccaaccaactttag

SEQ ID NO: 110058 - DNA, 1398 bp, synthetic construct
  misc_feature 1..1398: note = Description of Artificial Sequence: Synthetic coding sequence
  source 1..1398: mol_type = other DNA
atgtccctcccatcaaggcagactgccatcatcgtaaaccctcctcccccagaatatatcaacactaaaaagaacggaaggctgacaaaccagcttcaatacctgcagaaggttgtgctgaaggatttatggaaacactcttttagctggccctttcagaggccagtggatgctgtgaaactccagctcccggactattataccattattaaaaatcccatggatctcaacacaattaagaagcgtctggagaataagtactatgctaaagcctccgagtgcatcgaggacttcaacactatgttcagcaattgctatctatataataaacccggcgacgatattgtgctgatggctcaggccttggaaaaactgtttatgcagaaactcagtcagatgcctcaggaagaacaggttgtcggagtgaaagaacggataaagaaagggacacaacaaaatatcgctgtttcttctgccaaagagaaatcttcaccttctgccacggagaaagtattcaaacagcaggaaataccttccgtttttcccaagacttcaatatcaccccttaacgttgtgcaaggagctagtgtaaacagcagctcacagaccgcagcgcaggtaaccaaaggagtgaagagaaaagccgatacaactactcctgcaactagcgccgttaaagcgtcatctgaattcagtccgaccttcacagaaaagagcgtcgccctccctcctattaaagagaacatgcctaagaacgttttgccagattcccagcagcagtataacgttgttaaaactgtgaaggtgactgagcaactccgccattgctccgagattcttaaggaaatgttggccaagaaacacttcagttacgcttggccgttctacaatcctgtcgatgtcaacgctcttgggttgcataactactacgacgtggtgaaaaaccccatggatttgggaacgattaaagagaagatggacaaccaggaatacaaagacgcctacaaatttgctgctgacgtgagactcatgtttatgaactgctacaagtacaaccctcccgaccacgaagtggtgacaatggcgaggatgcttcaggacgttttcgagacacacttctccaagatccctattgagcctgtggaatccatgcctctgtgttatataaaaacagacatcaccgaaaccacgggccgggagaacaccaacgaggcctcgagtgaaggaaatagttcagacgacagtgaggacgagcgcgtcaagcggttagcgaaacttcaggaacaacttaaggccgtccaccagcagctgcaggtgttatcacaggttccattccgtaagctaaacaaaaaaaaggagaagtcaaaaaaagagaagaagaaagaaaagaaaaaatag

SEQ ID NO: 110059 - DNA, 303 bp, synthetic construct
  misc_feature 1..303: note = Description of Artificial Sequence: Synthetic coding sequence
  source 1..303: mol_type = other DNA
atgtcactgcctagccgccaaactgcaataatcgttaacccccctccaccagagtacattaacacgaagaaaaacggccgacttacaaatcaacttcaatatctccagaaagtagtcctcaaggacctgtggaagcactccttctcatggccttttcagaggccagtagacgccgtcaagctgcaacttcctgattactacacaattattaaaaatccaatggatttgaacacaattaaaaagcggctagaaaacaaatactatgcaaaagcgtcagaatgcattgaagacttcaacacctag

SEQ ID NO: 110060 - DNA, 5550 bp, synthetic construct
  misc_feature 1..5550: note = Description of Artificial Sequence: Synthetic coding sequence
  source 1..5550: mol_type = other DNA
atggcggtgtctcgactggatcgtctgttcatcttactcgacacaggcaccacgcctgttaccagaaaggcggccgctcagcagttgggcgaggtggttaaactccacccccacgaattaaacaatctgctcagtaaagttctcatatacctacggtcagcaaactgggatacaagaattgccgccggtcaggctgtggaggccatcgtaaaaaatgttccagaatggaaccccgtccccagaaccaggcaagaaccgacatccgaaagttcaatggaggacagccctaccacggaaagactaaacttcgaccgcttcgacatctgccggttgctgcagcacggagctagcctgctgggctcagcaggcgccgaatttgaggtccaggacgagaagtcaggagaggttgaccccaaggagcgaatcgcgaggcagagaaagctgctccagaagaagctgggtttaaacatgggagaagcgattgggatgagcaccgaggagctgtttaatgacgaagatttggattatacacccactagcgcaagctttgtgaataaacagccaactctccaagcagcagaattgatcgactctgaattcagagcaggaatgtcaaaccgccagaaaaataaagccaaacgcatggcaaagttatttgccaagcagcggtcgcgcgacgccgtggaaaccaacgagaaaagtaatgactccacagatggtgagccagaggagaaaaggcgaaagatcgctaacgtggttataaaccaatcagccaatgactccaaggtactgattgataatattcccgatagctcctcgcttattgaggaaacaaacgaatggccacttgagagcttttgcgaagagctttgtaatgacctctttaaccctagctgggaggtcagacacggtgccggcaccggcctgcgtgaaatcctaaaggctcacggaaaatccgggggtaaaatgggagattcaaccctcgaagaaatgatccaacagcatcaagaatggctcgaggacctcgtgatccgtctcctctgcgtgtttgcattagaccggtttggcgactttgtgagtgatgaagttgtggcccccgtgagagagacatgtgctcaaacccttggcgtagtgttgaaacacatgaacgaaacaggcgtgcacaagactgtagacgtgctcttaaaactccttactcaagaacaatgggaagtgagacacgggggactccttgggattaagtatgctcttgcggtccgtcaggatgtgattaacaccttgctgccgaaggtactgactagaattattgaaggactgcaggatctagatgacgatgtgcgggcagtggccgcagcctcacttgtgcccgtagtcgagtcacttgtatatctgcagacacagaaagttccattcattatcaacactctgtgggatgcgctgctagagttagatgatctgacagcgtcaacaaacagtatcatgacgctccttagctcattgctaacgtatccacaggtccagcagtgctccatccagcagagccttactgtgctcgtgccccgcgtatggcccttcctgcaccacacaatcagtagcgtgagaagggcagccttagagaccttgttcaccctgctgagcactcaggatcaaaacagttctagctggttgatccctatccttccagatatgctgaggcacattttccagttctgcgtactggagtcctcacaggaaatcctggacctcattcacaaggtttggatggagctccttagtaaagccagcgtccagtacgtcgtagccgctgcgtgtccttggatgggcgcctggttgtgcctgatgatgcagccttctcatctgccaattgatctaaatatgctgcttgaagtgaaggctcgggccaaggaaaagactggcgggaaagttagacagggccagtctcagaacaaagaagtcctgcaggaatatattgccggcgccgacacaattatggaagacccagccaccagggattttgtcgttatgcgggccaggatgatggcagccaaactgctgggagccctctgttgttgtatttgtgatccaggcgtaaacgtcgtgacccaggagattaaaccagctgagtcacttgggcagctacttctgtttcacctcaattccaagagcgctctacagaggatctctgtggctttggtcatttgtgagtgggctgctctgcagaaagagtgtaaagcagttacactggccgttcagccccgcctgctggacatcttatccgaacacttgtattatgatgaaatcgccgtgccattcacaaggatgcaaaacgagtgcaagcaactgattagctccctcgccgacgtccatattgaggtgggtaacagggtaaacaacaatgttctcacaattgaccaagcatccgacttggttactactgtgtttaacgaggctaccagcagctttgatcttaacccccaggtcctgcaacaactggactctaaacggcagcaggtgcagatgacagtgactgaaaccaaccaggagtggcaggtcctgcagctgcgggtacataccttcgcagcatgtgctgtggtctccctccagcagctgcctgagaagctgaaccccataatcaagcctctcatggagacgataaaaaaggaggaaaacactctggtacagaattacgctgctcagtgtatagctaagcttctgcagcagtgtactaccagaacgccgtgcccaaacagtaaaattatcaaaaacctgtgtagctccctgtgcgtggacccatatctcacaccctgcgtgacctgcccggtgccgactcagagcgggcaggagaatagcaaggggtctacatcggagaaggacggaatgcaccacaccgtcactaaacataggggtattatcaccctctacaggcaccaaaaagcagcattcgcaattacatccagacgcgggcccacacccaaagcagtgaaagcgcagatagccgacttgcctgcaggctcaagcggcaatatcctggtcgagcttgacgaggctcagaaaccctatctggtgcagcgccgcggcgctgagtttgctttgaccaccattgtgaagcacttcggcggggaaatggcggtgaaactccctcacctgtgggatgccatggtggggcctctgcgaaacacaatcgacatcaataattttgacggaaagtctctgctagacaagggcgatagtcccgcccaggaactcgttaacagcctgcaggtcttcgaaactgcagccgcctctatggatagtgagctgcacccacttctagtgcagcacctgccccacttgtacatgtgtctgcagtatccttccaccgcggtgagacacatggccgcacgttgtgtgggcgtcatgagcaaaatcgccacaatggaaactatgaacattttcttggagaaggtactaccatggctaggagccatcgatgactccgttaagcaggagggggccatcgaagcgctcgcctgcgtgatggagcaactggacgttggcatcgtgccttatatcgtgctgctagtggtaccggtgcttgggaggatgtccgaccagacagactctgtccgatttatggccacgcagtgcttcgcgactctgattcggctcatgcctttggaagcaggtattcctgaccctccaaacatgtccgctgagctcattcaactaaaagccaaagaacgacattttcttgagcagctgctggatggcaagaagttggagaattataagattccggtcccgatcaacgcggaactgcggaagtaccagcaggatggggtcaattggctggcatttttgaacaagtataaacttcacggcattctgtgtgatgacatgggcctcggaaaaactctgcagtcaatttgtattctggctggcgaccactgtcatcgtgcacaggaatatgcccgctcaaagctagccgagtgtatgcctctcccaagtctcgtggtgtgtccacctaccctgactggccattgggttgacgaagtgggcaagttctgcagtcgggagtacctgaatccattacactacactggtccgccaacagagcgaattcggctccagcatcaggtgaaaagacacaacctgatcgtcgcctcctatgacgtggtcaggaacgatattgattttttcagaaacataaagttcaattactgcatactcgacgagggccatgtcatcaagaacggcaagacgaaattgtccaaagctgtgaagcagctgacggctaattataggataatcttaagcggaactcccattcagaataacgtgctggagctctggtctctctttgatttccttatgccaggtttcctggggactgagagacagttcgccgcacggtacggtaagcccatactggcctcgagagatgctcggtcttcgagtcgagaacaagaggcgggagttttggcgatggatgcgttgcataggcaggtccttccttttttgctcaggcgaatgaaagaggacgtcttacaggatctaccccccaaaatcatccaagactactactgcaccctttcacctctgcaggtgcagctttacgaagacttcgccaagtcacgcgccaagtgtgacgtcgatgaaactgtctcttctgcaaccctctctgaggaaaccgagaaacctaagctgaaggccacgggccacgtgtttcaggctctgcagtacttgaggaagttgtgcaaccaccctgctttggtgctgactccccaacacccagagttcaaaactacagccgagaagctggccgtacaaaactcgagtctgcatgacattcagcacgctcccaaactgtcagcgctgaagcaattgctcctcgattgtggcttgggcaacggatcaaccagcgaaagcgggacggaatccgtcgtcgcgcagcatcgaatcctaatattttgccagctgaaaagtatgctcgatattgtcgagcacgacctgctgaagcctcacttacctagcgtgacctatctgcgcctcgacgggtctattcccccgggacagaggcattccattgtaagtaggttcaacaacgatccttccatagatgtgttgctgctgactacacacgtaggcgggcttgggctgaacttaactggggccgataccgtggtgttcgttgaacatgattggaatccgatgcgcgatctccaggccatggaccgtgctcatcggatcggccagaaaagggtggtcaacgtctataggctgattaccaggggcacccttgaagagaagattatggggctacagaagttcaagatgaacatagcaaataccgtaatctcccaggaaaactcgtccctgcagagcatgggcacagatcagcttctggacctgtttactctggataaggatggtaaggcagaaaaggcagatactagtacaagcggcaaggcgtccatgaaaagcatccttgaaaatctgagcgatctgtgggaccaggagcaatacgactcagaatactccttggagaacttcatgcatagcctgaagtag

SEQ ID NO: 110061 - DNA, 2100 bp, synthetic construct
  misc_feature 1..2100: note = Description of Artificial Sequence: Synthetic coding sequence
  source 1..2100: mol_type = other DNA
aaactatggttcaagaacacagaagactaccggagaacagccctgacgcgcttaactagcggggtgatggagcagctggatgttgggattgtaccatatattgtactcttggtggtccccgtactgggtcgcatgtccgatcagaccgatagcgtcagattcatggctacacagtgttttgccacactaattcggttgatgccgctggaagctggcattcccgaccctcccaacatgagtgccgaactaattcagctgaaagcaaaggaaagacacttcttagagcaactgctcgacggcaaaaaactggaaaactataaaattcccgtgccgatcaatgcagagctacgcaagtatcagcaggatggagtcaattggctcgccttcctgaataagtataagctccacggcatcctgtgcgatgatatgggcctgggtaaaactcttcagagcatctgcatcttggctggagaccattgccatcgagcacaggagtacgcacggtcaaaattggccgaatgtatgccactgccttcgctggtggtgtgccccccaacgctcacaggccactgggtggatgaggtcgggaagttctgtagcagagagtatctcaatccccttcactacaccggaccccccacggaacgaattcggttgcagcaccaagtaaaacgccacaatctgatcgtcgcttcctacgatgtggtgcgaaacgacattgatttttttagaaatattaaattcaattactgtatcctcgatgaagggcacgtgattaaaaatggcaaaacgaaactaagtaaagccgtgaaacagttaacagccaactatcgcataatcctcagcggcacaccaatccagaacaacgtcttggaactgtggtccctcttcgattttctgatgcccggattcttagggacagaacgccaatttgctgctagatacgggaagcccatcctggctagcagagatgcacggtcaagtagtagagaacaggaggcgggagtcctggctatggatgccttgcacagacaggtccttccttttttactccggcggatgaaagaagatgttttgcaagacttgccaccaaagatcatccaggattactactgcaccctgagtcctcttcaggtgcaactctatgaggactttgctaagtcccgcgctaagtgtgacgttgacgaaaccgtaagttcagccacattatcagaagagaccgagaagcctaagctcaaagcaacaggtcacgtgtttcaagcactacagtacctgagaaaactgtgcaaccatccagcactcgttctgacacctcagcaccctgagttcaaaactaccgctgaaaagctcgcagtgcagaattcctctctgcatgacatccagcacgcccccaagttgtcggctttgaaacagctgctgctggattgcggtctagggaatggatctacatctgagtccggaaccgaatctgtggtggcccagcatcgcatcttgattttctgtcaactgaaaagcatgttagacattgttgagcacgatctgctcaaacctcacctaccaagtgtgacctacctgaggctggatggatccatcccaccgggccaacggcactcaatcgtctcccgttttaacaacgacccatctatcgacgtactgctgctcacgactcacgtgggcggtttgggcttgaatttgacaggcgcagatacagtcgtctttgtcgagcatgattggaatcctatgagagaccttcaagccatggatagggcccatcgcatcggacagaagcgggtggttaacgtgtacagactaatcacaaggggaaccctggaagagaagatcatgggactccagaagtttaagatgaacattgctaacacagtgataagtcaggagaactcttccctacaatccatgggcactgaccagttgctggatctattcaccctggacaaagatggcaaagctgagaaagccgatacttcaacatcagggaaggcatccatgaaatccatcctcgagaatttgagtgatttgtgggaccaggagcagtatgactccgagtattcccttgagaattttatgcactcgttgaaatag

SEQ ID NO: 110062 - DNA, 2034 bp, synthetic construct
  misc_feature 1..2034: note = Description of Artificial Sequence: Synthetic coding sequence
  source 1..2034: mol_type = other DNA
atggaacagctggacgtagggattgttccatatatagtacttcttgtagtccctgtgctggggagaatgtctgaccagaccgactccgtgcgatttatggcaacccagtgttttgccacccttattaggctgatgcctctggaagctggtatcccagacccacccaacatgagtgccgaactaatacagctaaaggcaaaggagcgccacttccttgagcagctgctggatggtaaaaagctagagaactacaagataccagtgccaatcaacgccgagctgcgaaagtatcaacaggacggggtgaattggctggccttcctgaacaaatacaagctgcacggtattctttgtgacgacatgggcctgggaaaaacactacagtctatctgcatcctcgcgggagaccattgccatagggctcaagagtacgcccggtcgaagcttgccgagtgtatgcctctgccctctcttgtagtctgtccgcccactctgaccggacactgggtagatgaagtgggcaagttctgcagccgggaatatcttaaccccctccattatacgggaccgcctactgagcgaatccggctgcaacaccaggtaaagagacataatctgattgtggctagttacgatgtggtacgcaatgacattgactttttccggaatatcaagttcaattactgtattctggacgagggccatgtgattaaaaatggcaaaacaaagctgagcaaggccgtgaagcagcttactgctaattatagaattatcctgtccggtactccaatacagaacaacgttctggagctgtggtccctttttgacttcttgatgccgggcttccttggtaccgagagacagttcgccgctaggtacggtaaaccgattctcgcaagccgcgatgcccggagtagctctagagagcaggaagctggcgttctggcgatggatgccctccataggcaggtgctgccattcctattgcgccgaatgaaggaggatgtactacaggatctgccacccaaaattatccaggactattactgcacattgtcccctcttcaggttcagctctacgaggacttcgcaaagtctcgtgcgaaatgtgacgtggacgagactgtgagttccgcaactctatcagaagaaaccgagaagccaaagttaaaagcaacaggccatgtctttcaagccttacagtacctcagaaagttgtgcaatcacccagccttggtactcactccacagcaccccgagttcaagacaaccgcggagaagttggcagtgcagaacagttccttacacgacattcagcatgctcccaaactgtctgccctgaagcagcttctccttgattgcggcctgggcaatggctcaacgtcagagtccggaacagagtcagtggtggcacaacacagaatcctgatcttctgccaactgaaaagcatgctggatatcgtggagcacgatctactgaagccccacttaccttcggttacgtatctgcgtctcgatggatctattccacccggtcaacggcactcgatcgtgtcccgattcaacaacgatcccagtatcgatgttctgctcttgaccacccacgttggaggtctgggcttaaatcttactggggccgacactgtcgtattcgtggaacacgattggaacccgatgcgggatcttcaggcgatggatcgagcccaccgcattggtcaaaagagagttgtcaacgtctataggttaattacgcgaggaaccctcgaggagaagatcatgggtctgcagaagtttaagatgaacattgcgaacaccgtgatttctcaggagaactcatcactgcagtctatgggcacagatcaattgctcgatctgtttactttagataaggatggtaaagccgaaaaagcggacacctcaaccagcggaaaggcaagtatgaagtcaattctggagaatttatccgacctgtgggaccaagagcagtatgacagcgagtattcccttgaaaatttcatgcacagcctgaaatag

SEQ ID NO: 110063 - DNA, 1233 bp, synthetic construct
  misc_feature 1..1233: note = Description of Artificial Sequence: Synthetic coding sequence
  source 1..1233: mol_type = other DNA
atgggggctaatgccagcaattacccacattcctgcagccctcgagtgggcggaaactcacaggcccagcagacttttattggaacctcatcttactctcagcaaggatacggctgcgaaagcaagttgtactccctggatcacggacacgagaaaccccaagataagaagaagcgcactagtgggttggcaacacttaaaaagaaattcatcaagcgccgcaaatctaatcgaagcgcagatcatgctaaacagatgagagagctcctctcagggtgggatgtgagggacgtcaatgcactggtcgaagagtatgaaggaaccagtgctctcaaagaactcagtctccaggcatctttagcacggccagaggcgaggacactccagaaggatatggcagatctctacgaatacaaatactgcaccgacgtcgacctgatctttcaggaaacttgcttccccgttcaccgcgccattcttgccgcccgctgtccctttttcaagactctcctgtcaagctcgcctgagtacggcgcagaaattattatggacataaatactgcgggcatcgacatgcctatgttttcagcattgctccattacctgtatactggggagtttggaatggaggatagccgttttcagaacgtggatatattggtgcaactgtccgaggaattcggaactccgaactccctcgacgtggatatgcgtggattgttcgactacatgtgttactatgacgtggtgctttcctttagctcagatagtgagctggtcgaagcatttgggggtaaccagaattgcttggacgaagaactgaaggctcacaaagccgtgattagtgctaggtcacctttctttcggaatctactgcagcggcgaattcgcacaggcgaagagatcaccgaccgaactctgagaacaccaacccgtattatcctggacgagtccattatccctaagaaatacgccacagttatcctgcattgtatgtatactgatgtggtggacctgtctgtgcttcactgttccccctctgtgggcagcctgagcgaggtccaggctcttgtcgctgggaagcccaacatgacaagagcagaggaggcaatggaactttaccacattgccctctttttggaattcaacatgctggcacaggaagaaacaaccgtgattaggcctgcctgtgccgcggaactgtctaattcttgtctgctgccccagtcttag

SEQ ID NO: 110064 - DNA, 3399 bp, synthetic construct
  misc_feature 1..3399: note = Description of Artificial Sequence: Synthetic coding sequence
  source 1..3399: mol_type = other DNA
atgggtgcaaatgcctctaattaccctcattcttgctcgccacgggtgggcggtaacagtcaggcccagcagacctttatcggaaccagctcttattcacagcagggttatgggtgtgagtccaaactatatagccttgaccatgggcacgagaaaccacaggacaagaagaagaggacgtcgggtttggctacgctcaagaaaaagtttatcaaacgaagaaaatcaaataggtccgccgatcacgcaaagcagatgagggagctgttgagtgggtgggacgtacgcgatgtcaatgccctggtagaggaatatgaagggacttccgccctgaaggagttgtctctgcaggccagcctggcccggcctgaggcacggactcttcagaaggacatggccgatctgtatgagtacaaatattgcaccgatgtagatttaatttttcaggagacctgctttcctgttcacagagcaatcttagctgcgagatgcccatttttcaaaacattactgagctccagcccagagtatggggcagagatcatcatggatattaatacagctggtattgacatgcccatgttcagtgccctccttcactacctctacacgggcgaatttggcatggaggatagccggttccagaacgtggacatcttagtgcagctctcagaggaattcggtacacctaattccctggatgtggacatgagggggctgttcgattacatgtgctattacgacgtagtactgagtttttccagcgacagcgaattagtagaagccttcggcggaaaccagaactgcctggatgaagagttgaaggcccataaagctgtcattagcgcccgctcacccttttttcgcaatctccttcagcgccgtatccggactggagaggaaataacagatcggaccctgcgaacccctacgaggatcattttagatgagtccattattccaaaaaagtatgcaaccgtgattttacactgtatgtacacggatgtcgtagacttaagcgttcttcactgtagcccctccgtggggtctctctcagaggtccaagcactggtagccggcaaacctaatatgacaagagctgaagaagcaatggaactgtaccatattgccctgtttctggaattcaacatgctggcccagggatgcgaagacatcattgccgaatccatatcactggatactctcattgctattctgaagtggtcctcccatccgtatggctcaaagtgggtccatcgtcaagcactgcatttcctgtgcgaggagttttctcaggtgatgacttctgacgtattctacgagctgtctaaggaccatctcctcacggccatccagtccgattatctgcaagccagcgagcaggatatactgaagtatctgattaaatggggggagcaccagctcatgaagcggatcgcagacagagagccaaacttgctgagcggcaccgcccacagcgttaataagagaggagtgaagagacgcgatctggatatggaggagctgagggagattctttcatctctgctgccatttgtccgcattgaacacatccttcctataaattcggaagtgctgtcagacgcaatgaagaggggcctgataagtacccctccgtctgatatgttgcctactaccgagggtggtaaatccaacgcgtggttgcgtcagaaaaacgcagggatctacgtgcgtcccagactattctctccttacgtcgaagaggcaaaaagtgtccttgacgagatgatggtggagcaaacggacctcgtacggctgcgtatggtgagaatgagtaacgtcccggacaccctatacatggtgaacaacgccgttccccagtgctgccacatgatttcacatcagcagataagctccaaccagagctcacctccaagtgttgtggccaacgagataccggtgcccagactgttaattatgaaagacatggtaaggcggctgcaggagctcagacacaccgagcaggtgcagcgggcatacgctctcaactgcggggagggtgctacagtaagctatgagatccagatcagggtgttgagagaattcgggttagcagatgccgcagctgaactccttcagaatcctcacaaattcttccccgatgagaggtttggtgatgagtcacctctgctaaccatgcggcagccagggaggtgccgcgttaactcgacaccccccgccgagacaatgttcacagatctggattccttcgtggcctttcatccccccctgccaccgccaccgcctccatatcatcctcctgctaccccgattcacaatcagctgaaggctggatggaagcagaggcccccctcccagcacccttccaggtcctttagctacccttgcaatcactctctctttcatagtcgtaccgctccaaaagcgggtcccccacccgtttacctacctagtgtgaaggccgcgccgccagattgtacttcaactgctggactcggccgccagaccgtagctgccgcggccgcaaccacaacctcaaccgctaccgccgcggcggccgcggcaagcgaaaaacaggtgcgcacacaacccgtcctgaatgacctgatgccggatatcgctgtcggcgtctcaaccctttccttgaaggaccgccggctccccgaactggctgtcgacacagagctgtctcagtctgtttcagaggccggccctggaccaccgcaacacctcagttgtatccctcagaggcatactcatacgagccgtaaaaagcacacactggagcagaagactgacacacgcgagaacccgcaggaatatccagacttctatgatttcagcaacgccgcctgtaggccaagcaccccggctctcagtaggcgcaccccttccccctcccaaggtgggtactttggcccggacctctacagccacaataaggcctctccaagtggcctcaaaagcgcttacctgccaggccaaacatctccaaagaagcaggaagaggcaaggcgagaatatccgctgtcgccagatggccatctccataggcagaagaatgaaccaattcacctcgatgttgtggagcagcctccacaacggtccgactttccgctcgccgctccagagaacgccagcaccggacccgctcacgttagaggaagaacggcagtggaaaccgacctgacatttggtctgacaccgaatcggcctagcctcagcgcttgtagctcagaagcacctgaggagcgcagcggtagaaggttggcggatagcgagtccctaggccacggagcccagagaaacacagatttggagagggaggattctatctcccgcggcagaaggtctccttcaaaaccggatttcctgtacaaaaagtcggcactgtag

SEQ ID NO: 110065 - DNA, 2121 bp, synthetic construct
  misc_feature 1..2121: note = Description of Artificial Sequence: Synthetic coding sequence
  source 1..2121: mol_type = other DNA
atgtataccgacgtggtcgacctctctgtcctgcattgcagtccttctgttgggagcctctctgaagtacaggctctcgtggcaggaaagccgaatatgacacgcgccgaggaggcaatggagctataccacatagctctcttcctcgaattcaatatgttggcgcaagagcctaatctgctgtctggcacggcccactcagttaataaaagaggggtgaagagacgcgacctagatatggaggagctcagagagattcttagcagcctattaccatttgtgcgcatcgagcacatcctgcctataaatagcgaggtgttgtcggacgccatgaaacgtggcctcatttcaacaccaccctcagatatgctgcccactactgaaggtggtaagtccaacgcctggttacgacaaaaaaacgccggcatctacgtccgccctaggctgttctccccctacgtggaagaagcaaaatctgtgcttgatgaaatgatggtggagcagactgatctcgtacgactcaggatggtgaggatgtccaacgttccagataccctgtacatggtcaataatgcagtaccccagtgctgtcacatgatctcacaccagcagatcagttctaatcagagctctcccccgagtgtcgtggccaacgaaatccccgtgcccagactcctgatcatgaaggacatggtgcggcgcctacaggagcttcgtcacaccgagcaagttcagcgcgcatacgctctcaattgtggggagggtgcaactgtgagctatgaaatccagatccgggtactccgcgagtttgggctcgctgatgcagccgctgagctcctgcaaaacccccataagttctttccagatgagcgtttcggcgacgagagtcctctgctaactatgaggcaacccgggcgatgtagagtgaatagcactcctcctgctgaaacgatgttcactgacctggactcattcgttgccttccacccccctcttccccccccgcccccaccttaccatccaccagcaactcccatccacaaccagctgaaagccggctggaaacaaagacccccaagccagcatccttcccgctccttctcctacccgtgtaatcactctctctttcattcccggaccgctcccaaggctggaccgccacccgtgtatcttccatctgtgaaggcagccccaccagactgtacaagcacggctggtttgggccggcagaccgtggccgcagccgctgctacaacaaccagcacggctaccgctgccgcagctgcagcctcagaaaagcaggtgcgcacccagccggttctgaacgacctgatgcccgacatcgcggtcggtgtgtcaaccttgagtctgaaggatagacgccttcccgaactcgccgttgatacagagctcagccaaagtgtgagtgaagccgggcctgggccgccccagcatctgagttgcattccgcaaaggcacacccatacttcacgcaagaagcatacactggaacagaagacagatacaagggagaacccacaggagtatccagatttttacgatttttccaatgcggcttgtcgcccctccaccccagcgttgtctcgacggacaccgagccctagccaaggagggtacttcggcccggatttgtacagtcataacaaagcgtccccaagcggcctgaaaagcgcctaccttccggggcagacatctcccaaaaaacaggaggaggcacgaagggaataccctctgtcacctgacggccatctacataggcaaaaaaatgagcccatacatctcgacgtggtggaacagcccccacaacgctctgattttccactggccgccccagagaatgcttcaaccgggcctgcccatgtacgcggtagaactgcagtcgaaacagaccttacctttggcctaacaccgaaccgcccatctctttcagcctgctcatcggaggcacctgaggaaaggagtgggagacgcttagccgactccgaatcactagggcacggagcccagagaaacaccgatttggagagggaagactccatatctcggggccggcgctctccaagtaagccagacttcctgtacaagaagtctgccctttag

SEQ ID NO: 110066 - DNA, 2346 bp, synthetic construct
  misc_feature 1..2346: note = Description of Artificial Sequence: Synthetic coding sequence
  source 1..2346: mol_type = other DNA
atggctggaggtgccggcgcaggggcggacggaggagctgggggcggaggcggcggtggggacggctccggtccttctggtagctcttccggcggccggagtctccggggctgcgaggacattatagccgagagcatctcactggacactctgatcgctatactgaagtggtctagtcacccttacgggtcaaagtgggtccacaggcaagccctgcactttctttgtgaggaattctcccaggtcatgacctctgacgtgttttatgagctgagtaaggaccacctccttaccgcaattcagagtgattaccttcaggccagcgagcaggacatcctgaagtatttgatcaagtggggggaacatcagttaatgaagcgcattgccgaccgtgagcccaatctgctgtctggcactgcgcatagcgtgaacaaacggggcgtgaaacggcgggacctcgacatggaggagttaagagagatcctctcctccctcctgcctttcgtgcggattgagcacatactcccaatcaacagcgaagtgctttccgatgccatgaaacggggtctgatttctaccccgccttctgatatgctgcctacaaccgagggaggcaagtctaacgcttggttacgtcagaaaaatgcgggcatctacgtaaggcccagactgttttcaccctatgtggaggaagctaagtccgtcctggacgagatgatggtcgagcaaactgacttagtgagactcaggatggtccgtatgagtaacgtgcccgacacgctgtatatggtgaataacgcagtcccccagtgctgccatatgatctcacaccaacagatcagcagcaaccaatctagtcccccctccgtagtggctaatgaaattcccgtgcctcgactccttattatgaaagatatggtgagacgactgcaggagctgagacatactgaacaggtgcagagagcatacgccctcaactgtggtgaaggggccaccgtctcttatgagatccagatccgggtactgagggaattcgggctcgctgacgctgccgctgagctattgcaaaacccccataagttttttcctgacgagaggttcggagacgaaagcccactgctgaccatgcgacagccaggccggtgccgcgtgaacagtaccccaccggctgagacaatgttcactgacctggattccttcgtggctttccatccaccactgccaccacccccgcccccataccacccgcccgcgacaccgatacacaaccagctaaaggcaggatggaaacaaagacccccatcccagcatccctcccgcagcttctcatatccttgcaatcacagcctgtttcacagtcgcactgcccccaaggcaggtccaccgcctgtgtatcttccctctgtcaaagcagctccgcccgactgcacctctactgctggtcttggcaggcaaacagtggccgcagctgccgcgacgaccaccagcaccgccaccgccgccgcagctgcagctagtgagaagcaggttcgtacccagccagtgttgaatgacctcatgcccgacatcgccgtgggggtcagtactctaagcctgaaggaccgcaggctccctgagctggctgtggacactgagctatcgcagtcggtgagtgaggctggaccaggaccgccccagcacctgtcttgcatccctcagaggcatacccacacatccaggaagaaacacactctcgagcagaagacagacacaagggagaacccgcaagagtacccagacttttacgacttctccaacgccgcttgccgcccgagtacacccgccctgtcgaggaggacgccttcaccatctcagggaggctactttggaccagacttgtatagccacaacaaagccagccctagcggattgaaaagcgcctacctgcctggtcagacaagtccaaagaaacaggaggaagccaggcgggaatatcctttgtccccagacggccacctgcatagacagaagaatgaaccgattcatctggatgtggttgagcagcccccccagcgatcggacttccctctggcagcacctgaaaatgcctcaactggccctgcacatgtgcgcgggaggaccgccgtcgagaccgatctgacattcgggctcacccccaataggcccagcctatctgcgtgtagttcagaggctcctgaggagcgcagcggaagacgtctggccgacagcgaatctcttggccacggggctcaacggaacactgaccttgagagagaggactccatctcacgcggaagaaggtccccatcaaaaccggactttctttataagaaatccgctctgtag

SEQ ID NO: 110067 - DNA, 168 bp, synthetic construct
  misc_feature 1..168: note = Description of Artificial Sequence: Synthetic coding sequence
  source 1..168: mol_type = other DNA
atgggtgcaaatgctagtaactatcctcactcctgtagtccaagagttggggggaattcacaagctcagcagacatttatcggcacgagtagttattcccagcagggatacggctgcgagagcaagctttactcattagaccatggccatgagaaaccgcaagattag

SEQ ID NO: 110068 - DNA, 1635 bp, synthetic construct
  misc_feature 1..1635: note = Description of Artificial Sequence: Synthetic coding sequence
  source 1..1635: mol_type = other DNA
atgagggagtctcagccagaagcagagataccactacaggacacaacagccgaggccttcaccatgctgctgaaatacatctatacaggccgggccaccctgacagatgagaaagaagaggtgctcctggactttctgtcattggcccacaaatacggctttcctgagctcgaggacagcacttcggaatacctgtgcaccattttgaacattcagaacgtttgtatgaccttcgacgtggcttccctgtactctctgccaaaactgacctgcatgtgctgtatgttcatggatcgcaacgcgcaggaggtcctgtcatcagagggtttcctcagcttatccaaaaccgccttgctcaatatagttctgcgcgactcatttgccgcccccgaaaaggacatatttctggcccttctcaattggtgtaaacacaatagtaaggagaatcacgccgagataatgcaggctgtcagattacccctcatgagtctgactgagctcctgaacgtcgtccgaccgtccggcctcctgagcccggacgcaattttagacgctattaaggtcaggagtgagagtcgggacatggatctgaactaccgggggatgcttatccccgaggagaatatcgcaaccatgaaatacggcgcacaagttgttaaaggcgaactcaagtcagccctgttggacggcgacacacagaactacgatctggaccacggatttagccggcacccaatcgacgatgactgtcgctcagggattgagattaaattgggacagcccagtataatcaaccacatccgaattcttttatgggatcgggacagtagaagctactcctatttcatcgaagtcagtatggacgaactagattgggttcgggtaatcgatcatagccagtacttatgcagaagttggcagaagctttatttccccgctagggtgtgtcggtatatccgtatagtaggaacccacaatactgtcaataaaatctttcacattgtcgccttcgaatgtatgttcacgaataagacatttaccctcgagaaagggctgattgtaccaatggagaacgtagccacaatcgcggattgcgcttcagtgattgaaggcgtctcccggtctaggaatgccctgctgaacggagatactaaaaactatgattgggatagtggctacacgtgtcaccagctggggtcaggagccatcgtggtgcagctcgcgcagccttacatgatcgggagtattaggctactgctgtgggattgtgacgacagaagttactcgtactatgttgaggtaagtacaaaccagcaacaatggaccatggtggccgaccgtaccaaggttagttgcaagtcctggcagtcagtaacatttgaaagacaaccagcttcattcattagaatcgtagggacgcataacacagcgaacgaggtgttccactgtgtccatttcgagtgcccagagcaacagtcgtctcagaaggaggagaactcggaggaatctggaaccggcgacacgtcactggcaggacagcagctcgattctcacgctctgcgcgcccccagtggatcgagtctgccatccagtccaggatctaacagtaggagtccaaaccgccagcaccagtag

SEQ ID NO: 110069 - DNA, 1839 bp, synthetic construct
  misc_feature 1..1839: note = Description of Artificial Sequence: Synthetic coding sequence
  source 1..1839: mol_type = other DNA
atgagtaatagccacccacttaggcccttcacagccgttggggaaatcgatcacgtccacatcctgtcagagcatattggcgctctactcatcggagaagagtatggggacgtgacttttgtggtggaaaagaagagatttcctgcccatcgtgttatcttagctgctcgatgccagtatttccgtgctctcctgtatggggggatgagggagagccagcccgaggccgagattcccctgcaggataccaccgccgaggcatttactatgctgcttaaatacatttatacgggccgagcaacacttaccgacgagaaggaagaggtacttttggactttcttagcctagcccacaaatacggttttcccgagctagaagacagcacttctgagtacctctgcaccattctcaacattcagaatgtgtgcatgaccttcgacgtggcttctctttatagcctgccaaaattgacttgtatgtgctgcatgtttatggataggaacgctcaggaggttctgtctagcgagggcttcttgtccctgtccaaaactgcactgctgaacatagttctccgggatagttttgccgcccccgagaaggacatatttttggctctgctcaattggtgtaagcataacagtaaggaaaaccacgctgaaatcatgcaggcagtgagattacctctgatgtctctgactgaacttttgaatgttgtcagaccttccggcttactgagcccagacgctatattggacgctattaaagtgcgcagcgaaagccgagatatggacctgaattaccgcggaatgttaattcctgaggagaacatcgcaaccatgaagtatggagcccaggtcgtaaagggtgagcttaaatcagcactgttggacggagacacgcagaactacgatctagatcatgggttcagcaggcacccaatcgacgacgactgccgtagtggcatcgagatcaagttaggacaaccgagcataataaaccatatcagaatacttctgtgggatcgtgactctagatcctatagttattttatcgaggtgtctatggacgagctcgactgggtgcgggtgatcgatcacagccagtacctctgtcgcagctggcagaagctctactttcctgcaagagtctgccgatacatccgcatagtcggcacccacaatactgtgaataagattttccatatcgtggctttcgagtgcatgttcaccaataagaccttcacacttgaaaagggtctaatcgtcccaatggaaaatgtggccactatcgccgactgcgcctcagttatcgagggggtgagccggtctcgaaacgcattgctgaacggtgataccaagaattatgattgggactcgggctacacgtgtcatcagctgggaagcggcgcaattgtagtgcagctggctcagccttatatgattggatcaattagactcttgctgtgggactgcgatgacagatcatactcctactacgtggaagtttccacgaatcagcagcaatggactatggtggccgacaggacaaaagtgagttgtaaaagctggcagtctgtgacctttgaacgccagccagcttcatttatccggatcgtgggcacgcataataccgccaatgaagtgttccattgtgtgcatttcgaatgccctgagcagcagtcctctcaaaaagaagaaaactccgaggagtccggtactggggataccagtcttgccggccagcagctcgacagtcacgccctgagggccccctcaggcagctcactgccaagttcccctggatcaaactcccgatccccgaacagacagcatcagtag

SEQ ID NO: 110070 - DNA, 1635 bp, synthetic construct
  misc_feature 1..1635: note = Description of Artificial Sequence: Synthetic coding sequence
  source 1..1635: mol_type = other DNA
atgcgcgagagtcagcctgaagcggagatccctctgcaggacactacggccgaagcctttactatgttgctgaaatatatctacaccgggcgcgccacgctcactgatgaaaaggaagaggtccttcttgattttttgtccctggcacataaatatggtttccctgaactggaagactcaacaagcgagtatctctgcaccattctgaatatacagaatgtgtgcatgacatttgatgtggccagcctctacagcttacccaagctgacctgtatgtgctgtatgttcatggaccgaaacgcacaggaggttctctcttctgaagggtttctatcgttaagtaagacagcactgctgaacattgtgctcagggattcgttcgccgcccccgaaaaggatatctttctcgctctcctgaattggtgcaagcacaacagcaaagaaaaccatgccgagattatgcaggcagttcgcttacctctcatgagcttgacagagctattaaacgttgtgagaccctctggcttactgagtcccgatgcaattctagacgccattaaggtgcgcagtgagtctagagacatggatctgaattaccgcggtatgctgattcctgaagaaaatatcgcgactatgaagtacggggcacaggtggtgaagggggagctaaaaagcgcgttgctcgatggggatacacagaactatgatttggaccacggctttagccgccacccaatcgacgatgattgtcggagtgggattgaaatcaaattggggcagccttcaattataaatcatattcgcattctactttgggatagggattctcggtcatacagttacttcatcgaagttagtatggacgaactcgattgggttagggtaattgaccacagccagtatctgtgccgttcatggcagaaactgtattttcctgctagagtatgtaggtatattcggatcgtcggcactcataatacagtgaataaaatttttcatatcgttgcttttgagtgcatgttcacaaacaaaaccttcaccttagaaaagggtctaattgtaccaatggagaatgtggcaactattgctgactgtgcttctgtcattgagggagtgtcacgatctcggaacgccctgttgaacggagacactaaaaactacgactgggacagcggatatacctgtcaccagctagggagcggggctatagtggtgcagctcgcacaaccctacatgataggctctatcaggttactgctatgggattgtgatgacagatcgtattcctactatgtcgaggtttccaccaatcagcagcaatggacgatggttgccgaccgcacaaaagtgagctgcaaatcatggcagtcggtgacattcgagcggcagcccgcatccttcataagaatagtaggaactcataatactgccaacgaggtttttcactgtgttcactttgaatgccctgagcaacagtcaagccagaaagaggaaaatagcgaggaaagtgggaccggtgataccagcttagctggacagcagcttgacagccatgcattacgcgccccaagcggtagttccttgccaagctccccagggagcaactcaagatcgcccaatcgacagcaccaatag

SEQ ID NO: 110071 - DNA, 1839 bp, synthetic construct
  misc_feature 1..1839: note = Description of Artificial Sequence: Synthetic coding sequence
  source 1..1839: mol_type = other DNA
atgagcaattcacatcctctcaggccttttacagcagtaggcgaaatcgatcacgtgcacatcctaagtgagcatattggtgcactgttgattggcgaggagtacggcgatgtgacatttgtggtggagaagaaacggttccccgcccaccgcgtaattctggccgcacgctgtcagtattttcgcgccctgctctacggaggaatgcgcgaaagtcagcctgaagcagagatcccccttcaagataccaccgcggaggcctttacaatgctgctgaagtacatatataccggaagggcaacactcactgatgaaaaagaggaagttctgctcgattttttatcactggcccacaagtacggatttccggaattggaagactccacaagtgagtacctgtgtactatcctgaacattcagaatgtttgtatgacctttgacgtggccagcctgtattctctgccgaaacttacgtgcatgtgttgcatgtttatggacagaaatgcacaggaggtattgtcaagtgagggtttcctctctctcagcaagactgccctgctgaatatagtactgagggatagtttcgcggctcccgaaaaggacattttcctggccttactgaattggtgcaagcataactcgaaagaaaaccacgctgagatcatgcaggcagtacggctgcccttgatgtctctcacagagcttctcaatgttgttaggccctctgggctgctctccccagacgcaatcctggacgcaatcaaggtgagatcagagtctagagacatggatcttaattatagagggatgctaatacccgaggagaatatagccactatgaagtacggggcacaggtcgtcaagggagagctaaaaagcgcgctgctcgatggcgacactcaaaactatgacttggatcacgggttctcaaggcatcccatagacgatgattgccgaagcgggattgagataaagctgggtcagccaagcatcattaaccacatccgcatcctgttgtgggatagggattcacgctcctacagttactttattgaggtgtctatggacgaactggattgggtgagggtaattgaccactcccagtacctttgccgatcctggcaaaaactgtattttcccgcacgggtgtgcagatatatcagaattgttggcacccacaataccgtgaataagatcttccacatagtggccttcgaatgtatgtttactaacaagacatttacactagagaagggtctcatcgtgccgatggaaaatgtggctacaatcgcagactgtgcttccgtcattgaaggcgtgtccaggagcagaaacgcactgttgaatggtgataccaaaaactacgactgggacagcggctatacgtgccatcagctgggcagcggagcaattgtggttcagctcgctcagccttacatgatcggctcgatcagattgctcctgtgggattgcgacgatcggtcctactcctactatgtcgaggtgagcacaaatcagcagcagtggaccatggtggccgataggaccaaggtttcgtgcaaatcctggcaatccgtgacttttgaaagacaaccagcctcttttataaggatcgttgggacacacaataccgctaacgaggtttttcattgcgtgcacttcgagtgtcccgagcagcagagcagtcagaaagaggaaaatagcgaagaatcaggcaccggagacaccagtctggccgggcagcagctggacagtcacgctttacgcgcaccttcagggtcctccctgccaagctccccaggctccaactcccggagtccaaatagacagcaccaatag

SEQ ID NO: 110072 - DNA, 279 bp, synthetic construct
  misc_feature 1..279: note = Description of Artificial Sequence: Synthetic coding sequence
  source 1..279: mol_type = other DNA
atgagcaactcccacccgctgaggccattcaccgccgtgggggagatcgatcatgttcacatattatctgagcatattggcgcgttgctgattggcgaagagtatggggatgtgacgttcgtagttgagaaaaagagatttcctgcccaccgggtgatcctggccgccagatgtcagtatttcagagccctcctgtacggaggaatgagggaaagccagcctgaggcagagatccccctccaggacaccaccgctgaagcatttactatgctgctctag

SEQ ID NO: 110073 - DNA, 1749 bp, synthetic construct
  misc_feature 1..1749: note = Description of Artificial Sequence: Synthetic coding sequence
  source 1..1749: mol_type = other DNA
atgtgcagagctctcctgtatgggggcatgcgtgaatcccaaccagaagcagaaattccgctccaggacaccactgccgaagcattcaccatgttgctgaagtatatctatactggaagagctacgcttacagatgagaaggaggaagtgctgcttgatttcctcagtctcgcacacaaatatggctttcccgagctggaagactccaccagtgagtatttatgcactattctgaacatccagaatgtttgcatgaccttcgatgtagcctctttgtattcactgcctaagctgacttgtatgtgctgtatgtttatggaccggaatgcacaggaagtcttgtcttccgaaggattcctgtcactgtcaaaaaccgcactgctgaacattgtactgcgtgattcttttgcggctcctgaaaaggacatttttcttgccctgctgaactggtgcaaacacaactcaaaagagaatcacgccgagatcatgcaggcagtgagactgccactgatgagccttacagagcttctcaacgtcgtccggcctagcggtctgctgagcccagatgctattctcgacgccattaaggtgaggtcagagagccgcgatatggatcttaactacagaggcatgcttatcccggaggagaatattgcaaccatgaaatatggcgcccaggtggtcaagggcgaactgaagtctgccctgctcgacggcgatactcaaaactacgatctggaccacgggttttcaagacacccaatagacgatgattgccgcagtggcatcgaaatcaagctgggccagccctcaattataaaccatattcgaatattgctgtgggacagggactcccggtcctacagttattttattgaggtcagtatggacgaactcgactgggttcgagttattgaccactctcagtacctgtgccgctcctggcaaaaactgtattttccagctcgtgtgtgtagtggggatggtgtgagtctgtggtgcccgctatggtctcgaaccccggaattgaaacaaagcagcctgttaggcttgcccaagtgccggtacatccgaattgtggggacacacaacacagtgaacaagatttttcatatcgtagcctttgagtgcatgttcacaaacaagacgtttacccttgaaaagggactgatcgtccccatggagaacgtcgccactattgccgattgcgcgtccgtgatcgagggggtaagccgttccagaaacgccctgcttaatggtgacacaaaaaattatgactgggattccggctatacttgccatcagctgggctcgggcgctatagtggtgcagctggcccagccttacatgatcggttctatcaggcttctgctttgggattgtgacgaccggtcctacagctactacgtggaagtgagtactaaccagcaacagtggacaatggtggcggaccgcaccaaagtgtcatgcaagtcttggcagtccgttaccttcgaaagacagcccgcctcgttcatacgtatagtggggacccacaataccgcaaacgaggttttccattgtgtacactttgagtgccccgaacagcagagttctcagaaggaagagaacagtgaagagtccgggaccggcgacaccagtcttgcaggccagcagctggattcccacgcccttcgcgctccctcagggtctagtctcccttcctcccctggttccaatagcagatcacccaacaggcagcaccagtag

SEQ ID NO: 110074 - DNA, 2211 bp, synthetic construct
  misc_feature 1..2211: note = Description of Artificial Sequence: Synthetic coding sequence
  source 1..2211: mol_type = other DNA
atgtctttatcagagaactccgtgtttgcctacgagtccagcgtacattccacaaatgtgcttctgtcacttaacgaccagcgcaagaaggacgtgctgtgtgacgtgaccatttttgtggaaggacagcggttccgggcgcatcgcagtgtgctcgccgcatgctctagttatttccactcacggattgtgggccaggctgatggagagctcaacattactcttccagaggaggtgacagtcaaagggttcgaacctctgattcagtttgcctatactgccaagctcatcttatccaaagagaacgtagacgaggtgtgtaagtgcgtagaatttcttagcgtccataatatcgaggagtcttgctttcagtttttgaaatttaaattcctagatagtaccgccgaccagcaggagtgtcctagaaagaaatgtttctcttcgcactgccaaaaaacagatctcaagctttccctattagaccaaagggacctagagaccgatgaagttgaagaattcttggagaataagaatgtccagacaccccagtgcaagctccgacggtatcagggaaacgcgaaggcttcccctcccctacaggacagtgcgtctcagacgtatgagagcatgtgtttagagaaggacgcagctctggccctgccgtccctctgcccaaaataccgaaagttccagaaggccttcggcactgaccgcgtgcgtacaggtgaaagtagcgtgaaagatatccacgcatcagtccaacctaatgaacgtagcgagaacgaatgtctgggcggagtaccggagtgcagagacttacaggtgatgctcaagtgcgacgagagtaagctcgccatggagccagaagaaactaagaaggaccctgctagtcagtgtccaacagaaaaatctgaggttactccattcccccacaattcttctatcgacccccacggattatattctctgtctctcctccacacatacgaccagtatggagatctcaatttcgccggcatgcaaaacacaactgtgctaactgagaagccgctgtccggaaccgatgttcaagagaagacctttggcgagtctcaagacctccccttgaaaagcgaccttggcacccgggaggacagttctgtcgcctcaagcgaccgaagttcagtggagcgcgaagtagccgagcaccttgccaagggattttggtccgatatatgtagcacggacaccccatgtcagatgcagctgtcccctgcggtagcaaaggatgggtctgagcagatctcccaaaaaaggagtgagtgtccctggttgggcatccggatctccgagtcacccgaaccgggtcagaggaccttcacaacactctcatccgtcaactgtccctttatttctacactaagcactgaagggtgctcgtccaatctggagataggcaatgacgactatgtgtccgaacctcagcaagaaccgtgtccttacgcctgcgtaatatctctgggggacgactcagaaacagacacggaaggcgatagcgaaagctgcagtgctcgggagcaggagtgcgaagtgaaacttccatttaacgcccagagaataatctccttgtcacggaacgactttcagtcacttctgaagatgcacaaattaactccagagcaattggattgcattcatgatattcggagacggtctaagaatcggattgctgctcaacgatgtcgcaagcgcaagctggattgtattcagaacttagaatccgagatcgaaaagctgcagagtgagaaagagagcctcctcaaggagagggaccacatcctttcaaccctcggggaaacaaagcagaatctgactggtctgtgccaaaaagtgtgtaaggaagccgcgctgtctcaggagcagatacagatcctggcaaagtattctgccgccgattgtcctttgtcattcctaatctcagaaaaggacaaaagcacgcccgacggagagctcgctctgccaagcatcttcagcttaagcgaccgaccacctgccgtgctgcccccatgtgcccgggggaatagcgaaccaggctatgcccgggggcaggagtcccagcagatgtccacggccactagtgagcaggccggacccgctgaacaatgtcgccagagcggcgggatcagcgatttttgtcagcaaatgaccgacaaatgtacgacggacgagtag

SEQ ID NO: 110075 - DNA, 2211 bp, synthetic construct
  misc_feature 1..2211: note = Description of Artificial Sequence: Synthetic coding sequence
  source 1..2211: mol_type = other DNA
atgtcgctgagtgaaaactctgtgttcgcgtatgagagctctgtccattcaaccaatgtgctcttatcccttaacgaccaacggaaaaaggacgtgttgtgcgacgtgactatctttgttgagggacagcgcttccgggcgcacagatcagttcttgctgcctgctcctcttattttcactcccgaatcgtgggccaggctgatggtgaactcaatattacgctccccgaggaagtgaccgttaaaggattcgagcccctcatccaatttgcctacacggcaaagctgattttaagcaaagagaatgtggacgaggtctgcaaatgtgtggagtttctgtctgttcataacattgaagagagttgttttcaatttcttaagttcaagtttttggattctacagccgatcagcaggaatgccctaggaagaaatgtttctcttcccattgtcaaaagacagacctgaagctcagtctgcttgaccagcgcgatctggagactgacgaagtcgaagagtttctcgaaaacaagaatgtgcaaactccacaatgtaagctgcgccggtaccagggcaatgccaaggccagccctccacttcaggattctgccagccagacatatgagtccatgtgtctcgaaaaggatgccgcgctggctctgccatcgctctgccccaaatatcggaagttccagaaggccttcggcaccgacagggttcgcacaggagagtcgtccgtaaaggacatccatgccagcgtacaacccaatgagcggtccgaaaatgaatgtttagggggcgtcccagaatgcagagatctccaagtgatgttgaagtgcgacgagagtaaattggctatggagccagaagaaacaaagaaggatccggcttcccagtgccccaccgaaaagtctgaggttaccccttttccacacaacagcagcatcgacccacatggattatattctctctctctgcttcacacctacgaccagtatggcgatctgaacttcgccggaatgcaaaacaccaccgtgctgactgaaaagcctctatccggaacagacgtgcaggagaagacgttcggagaaagccaagatctgccattgaaaagtgacttgggaacccgcgaagactctagtgtcgccagctcagaccgatcttcagtggagagagaggtggcggagcacctcgctaagggattctggtcggatatatgttccaccgatacgccatgtcagatgcaactgtctcctgccgttgccaaggacggcagcgaacagattagccagaaacgcagcgagtgtccctggctggggattaggataagcgagtctccagaacccggtcagagaacctttacgacgctttccagcgttaattgccccttcatctctaccctgtctacggaggggtgctcctccaacctggagattggaaacgatgactacgtgagcgagccacagcaggaaccgtgcccctacgcatgcgtgatctctctcggtgacgatagcgagactgacaccgaaggggatagcgagtcctgttccgcacgagaacaggagtgtgaagttaagttgccatttaacgcacaacgcattatttcactgtctcgcaacgactttcagtccttgctgaaaatgcacaaactcacccctgaacagctcgattgcatccacgacattagaagacgttccaaaaaccgtattgccgcacagcggtgcaggaagcgaaagttagattgtattcagaatctggaatcagagatcgaaaaactgcaatctgagaaggaatctctgctcaaggaaagggaccatatcctctctactttaggagaaacaaaacagaatcttacgggcctctgccagaaggtgtgcaaagaagctgcactgtcccaagagcagatacagattctggctaagtactctgcagccgactgtcccctgtcttttctcatttctgagaaagataagtccacacctgacggggagctggcgctacctagcatcttctctctctccgaccgcccccctgctgtgttacctccatgcgcacggggaaattccgaaccggggtacgcaagggggcaggagagccagcagatgagcactgccacctcagagcaggcagggcccgctgaacagtgtagacagtcaggcgggatatctgatttctgccagcagatgaccgataaatgtactacggatgaatag

SEQ ID NO: 110076 - DNA, 513 bp, synthetic construct
  misc_feature 1..513: note = Description of Artificial Sequence: Synthetic coding sequence
  source 1..513: mol_type = other DNA
atgagtctctctgagaactctgtgttcgcctatgaatcatctgttcactcaactaacgtcctgctgtcactcaatgaccagcggaagaaggacgtgttgtgtgacgtgacaatcttcgtggaggggcagcggttcagggcccatcggtctgtgctcgcagcctgtagcagctattttcactcacgcatcgtcggacaagcagatggggaactaaatattacgctgcccgaggaagtgacagtaaaaggcttcgagcctctgatccaatttgcatacacggccaaactgatcctgtctaaggagaacgtggatgaggtgtgcaagtgtgtagagttcctgtcagttcacaacattgaggaatcctgcttccaattcctgaaattcaaattcctggacagtactgcggaccagcaggaatgtcctcggaaaaaatgtttttcttcccactgccagaagaccgatttaaaattgagcctattggatcagcgagacttggaaactgacgaagtgtag

SEQ ID NO: 110077 - DNA, 663 bp, synthetic construct
  misc_feature 1..663: note = Description of Artificial Sequence: Synthetic coding sequence
  source 1..663: mol_type = other DNA
atgtccctgtcagaaaattctgtatttgcatacgaatccagtgttcactctactaatgtcctcctgtcacttaatgaccagaggaagaaggatgtgttatgcgatgtgaccatcttcgtcgagggccagcgctttcgggctcacaggagtgtcctggctgcgtgcagctcttattttcattcccgaatcgttgggcaggctgacggagaactaaatattaccctccctgaagaggtcaccgtgaagggcttcgagcccctgatccagtttgcatatacagctaagctgatcctgtccaaagagaatgtggatgaggtgtgcaaatgcgttgaatttttgagcgtgcacaacattgaagaaagctgcttccagtttttgaaattcaagtttctcgacagcactgcagaccagcaggagtgcccccgaaagaagtgcttctcatctcactgtcaaaagacagacctcaagctctcccttctggaccagcgagaccttgagactgatgaggtggaggaattcctggagaataaaaatgtccaaacacctcagtgtaagcttcggcgctatcagggtaatgctaaggccagcccacctctgcaagactccgcaagccaaacttacgagagcatgtgtctggaaaaggatgctgcattggctctgtag

SEQ ID NO: 110078 - DNA, 678 bp, synthetic construct
  misc_feature 1..678: note = Description of Artificial Sequence: Synthetic coding sequence
  source 1..678: mol_type = other DNA
atgtctctctccgaaaattctgttttcgcctatgaaagctcagtacactccaccaacgtgctcctatcactgaacgatcagagaaagaaggacgtgctttgtgatgtcacgattttcgtagagggccagcgctttcgcgctcatcggagcgtgctcgctgcatgcagctcttatttccactcccgcatcgttggacaggctgacggcgaactcaatattacattaccagaggaggtgaccgtgaagggtttcgaaccattaatacagttcgcatacaccgccaagctcatcctgtcgaaggagaacgtggatgaggtttgcaagtgtgtggagttcctgtcggtccacaacattgaagagtcctgttttcagttcctcaaattcaaattcctcgacagtacagccgatcagcaggagtgccctagaaagaagtgcttttccagtcactgccagaaaaccgatctgaaactgtcattgctggaccagcgggacctagaaaccgacgaggtggaagagttccttgaaaataagaacgtgcaaacccctcagtgcaagctgcggcgataccaggggaatgctaaggccagccccccactccaggactctgctagccagacttatgagagcatgtgcctggagaaggacgcagctctagcccttccatcactgtgcccctag

SEQ ID NO: 110079 - DNA, 78 bp, synthetic construct
  misc_feature 1..78: note = Description of Artificial Sequence: Synthetic coding sequence
  source 1..78: mol_type = other DNA
atgagcctttctgagaattcagtgttcgcctacgagtcatctgtccactcaaccaacgtgctcctgtcactgaattag

SEQ ID NO: 110080 - DNA, 78 bp, synthetic construct
  misc_feature 1..78: note = Description of Artificial Sequence: Synthetic coding sequence
  source 1..78: mol_type = other DNA
atgagtctgagcgaaaactcggtgtttgcttacgaaagtagcgtgcattccactaacgtgttgttgtcactgaactag

SEQ ID NO: 110081 - DNA, 78 bp, synthetic construct
  misc_feature 1..78: note = Description of Artificial Sequence: Synthetic coding sequence
  source 1..78: mol_type = other DNA
atgtccctgagcgagaacagcgtgtttgcctacgagtcttccgtacatagtacgaatgtcctactgagtttaaactag

SEQ ID NO: 110082 - DNA, 78 bp, synthetic construct
  misc_feature 1..78: note = Description of Artificial Sequence: Synthetic coding sequence
  source 1..78: mol_type = other DNA
atgtcacttagcgagaactctgtcttcgcgtatgagtcctctgtacattccaccaacgtcttgctttccttaaattag

SEQ ID NO: 110083 - DNA, 78 bp, synthetic construct
  misc_feature 1..78: note = Description of Artificial Sequence: Synthetic coding sequence
  source 1..78: mol_type = other DNA
atgtcactatcagaaaactcagtcttcgcttacgagagttcagtccatagcacaaatgtccttctcagcctcaactag

SEQ ID NO: 110084 - DNA, 2526 bp, synthetic construct
  misc_feature 1..2526: note = Description of Artificial Sequence: Synthetic coding sequence
  source 1..2526: mol_type = other DNA
atgagtgtggatgaaaaacctgatagtcccatgtacgtgtacgagtctacagtccattgcactaacatactgctgggcctcaatgatcagcgcaaaaaggatatactctgcgacgtgacgctgattgtagagcggaaagagtttagggcccaccgggctgttttagccgcatgctcagagtacttctggcaagcactcgtggggcagaccaaaaacgaccttgtagtgtctctgcccgaagaggtcacagctcgcggattcggaccacttttgcagtttgcctatacagccaagctccttctctctagggaaaacatccgggaggtcatccgttgtgctgagttcctcaggatgcataacctggaggattcctgcttttcctttctgcagacacaattgcttaattccgaggacggcttattcgtctgtaggaaggacgccgcatgccagcggcctcatgaggactgtgaaaactctgctggggaggaggaagatgaggaagaggaaacaatggatagtgagacggctaaaatggcttgccctagagaccagatgctgcctgaacccatctcctttgaagcagcagccattcccgttgctgaaaaggaggaggctttgttgcctgaaccagatgttcctacagatacaaaggagtcctccgaaaaggatgcactgacacagtaccctagatataaaaaataccaactggcctgtacaaagaacgtttacaacgcgtcatctcacagtacaagcgggttcgctagcacatttagagaagacaactcatcaaattcattaaagcctggattggccagaggccagatcaaatcagagccaccatccgaggaaaatgaagaggaaagtataactctgtgtctgtccggggacgaaccagatgcgaaggacagagcgggcgatgtggaaatggataggaagcaaccaagccctgctcctacccccaccgctcccgccggggcggcctgccttgaacggagccgttccgtggcctccccctcatgcctgcgttcgttgttctcgattaccaagtcagtggaactgtccggattgccaagcacttctcagcaacacttcgcacggagccctgcatgtccttttgataaagggatcacccaaggcgacctcaaaacggattatactccattcacgggaaactacggtcagccacacgtgggccagaaggaagtgagtaactttaccatggggtctccgctgcgtggaccagggctcgaagccctctgtaagcaagagggagagctggataggagatctgtgattttctcttcaagtgcctgtgatcaagttagcacgtctgtgcactcctatagcggagtctccagcctcgataaggacctgagcgagccagtccctaagggcctctgggtcggcgcaggtcagtctctgccgtcttctcaggcctacagccatggaggcctgatggccgatcacctgcccggacgaatgcgccccaataccagctgcccagttcctattaaggtgtgtccccgcagcccgccgctcgagactaggacacggacttccagcagctgctcctcctacagttacgctgaggatgggagcggcggctcgccctgttcacttcccttgtgcgagttttcttcatctccatgtagtcaaggcgcgcggtttctggccactgaacaccaagagcctgggttgatgggcgatggcatgtataaccaggtcaggccacagatcaaatgtgaacagtcatatgggaccaattcttctgatgagtccggatcgttctcggaggcagacagcgaaagctgccccgtccaggacagagggcaggaggttaaactaccattcccagtggaccagattaccgacctgcctcgcaacgatttccagatgatgattaaaatgcataaattaacgagcgagcagctggagtttatacacgacgtgagacggcgcagtaagaacaggatcgccgcacaaagatgccggaagcgaaagctggattgtatccaaaacctcgaatgtgaaatccggaagctggtctgcgagaaggagaagcttctgtcagagcgcaaccagctgaaggcctgcatgggagagctgcttgataacttctcgtgcttgtcccaggaggtatgtagggacatacagagtccagaacagatccaagccttacatcgctactgtcctgtgctccggcctatggatttgccaacagccagctccataaatcccgcccccctgggcgctgaacagaacatcgccgcttctcaatgtgcagttggagaaaatgtgccttgttgcttggagccaggtgctgcgccaccaggccctccgtgggcccccagtaacacatcagagaactgcacaagtggcaggcgactggagggaacagatccaggcacattctcggaaagaggcccccctctggaaccccgcagccagacagtgactgtcgatttctgtcaagagatgactgacaagtgcacaacagatgaacaacccaggaaagactacacatag

SEQ ID NO: 110085 - DNA, 2526 bp, synthetic construct
  misc_feature 1..2526: note = Description of Artificial Sequence: Synthetic coding sequence
  source 1..2526: mol_type = other DNA
atgtctgtggacgagaagccagactccccaatgtacgtgtacgagagcaccgtacactgcacaaatattctgctcggcctgaatgaccagcgcaaaaaagatatcctatgcgacgtaactctcatcgtggaacgcaaggagttccgcgcacacagggccgtgttggcagcctgcagcgaatatttctggcaggcccttgtggggcagacgaaaaatgatttggttgtgtccttgcccgaggaagtcaccgctcgaggcttcggaccgctgcttcagtttgcctataccgccaaattacttttaagtcgtgaaaatatccgggaggttattcgttgtgcagaatttctcagaatgcacaatctcgaagatagttgttttagtttcctgcagactcagctgctcaattctgaggacggtctgttcgtttgtcgcaaggacgctgcctgtcagagaccacacgaagactgtgagaactcggcaggagaagaggaggacgaggaggaagagaccatggacagtgagaccgcaaaaatggcctgtccgagggatcaaatgttacccgagcccataagtttcgaagcggctgccatccccgtggcggagaaggaggaggcattgctgcccgagcctgatgtcccgaccgacacaaaggagtcctccgaaaaagacgcattgacgcagtaccccaggtataagaagtaccagctcgcctgtactaagaatgtgtataatgctagttcccattctactagcggctttgcatcaaccttccgagaagacaactccagcaattccctgaagccaggactggcgcgaggccagattaaatccgagccgccaagcgaagaaaacgaggaggagtccatcacgctttgcctgtccggcgacgagcctgatgctaaagacagggctggcgatgtcgagatggataggaaacaacccagccccgcgccaacgcctacagctcctgcaggagctgcatgcctcgaacgctctcgtagcgtcgcaagcccatcctgtttgcgctcattgttttcaattaccaagtctgtcgagctgtcgggcctcccgtctacgtcccagcagcactttgcgagaagccccgcttgtcccttcgataagggaattacccaaggtgacctgaaaacggactataccccatttactggcaactatgggcagccacacgtgggtcaaaaagaggtctccaactttactatgggcagcccattacgagggccaggattggaagcactctgcaaacaagagggcgagcttgatagaagatctgtcatttttagttcaagtgcctgcgatcaagtctctacatccgtacactcatacagtggcgtatcatccctggacaaagacctcagcgaacccgttcctaaaggattatgggttggcgccggccagtccctgccttcgtcgcaagcttattctcatggaggcctgatggccgaccacttgcctggcaggatgcggcctaatacatcttgccctgtacccatcaaagtgtgccctagatccccacctctggaaactcgaacacggacatcttcctcctgctcttcctattcatacgctgaggacgggagcgggggttccccttgcagcttgccgctgtgcgaattctcatcctcaccttgtagccagggagctagattcctggcaactgagcatcaggagcctggcctcatgggcgacggcatgtacaaccaggttcgcccacagataaagtgtgaacaaagctacggtacaaatagctctgatgaatccggctcattttcggaggcagatagcgagtcatgcccggttcaggacagaggccaggaggtcaaacttccatttccagtggaccagattacggatctgccacggaacgatttccagatgatgatcaagatgcataagctcacgagcgagcaattggaattcatccatgatgtgcgccgcaggtccaagaataggatagcggcacaaagatgccgaaagagaaagttggattgcatccagaatttggagtgcgagatcaggaaactggtctgtgagaaggaaaaactgctgagcgaacgcaaccaactcaaagcatgcatgggagaacttctcgataacttctcctgtctgtctcaagaggtttgccgcgacatccagagccctgaacagatccaagccctccataggtactgccctgtcctgcggcccatggatctccccacagccagctcaatcaacccagcacctctcggtgccgaacaaaacatcgccgcgagccagtgtgcagtgggggaaaacgtgccttgttgtctcgagccaggggctgcgccccctggaccaccctgggccccgtccaatacctctgagaattgtacttctggccggcgcctggaaggtaccgacccgggtacgtttagcgaacgcggcccgcctctggagcctcgcagccagaccgtgacagtagacttttgtcaagagatgaccgataagtgtaccacagatgagcagcctcgcaaggattacacctag

SEQ ID NO: 110086 - DNA, 246 bp, synthetic construct
  misc_feature 1..246: note = Description of Artificial Sequence: Synthetic coding sequence
  source 1..246: mol_type = other DNA
atgagcgtggacgagaagccagactcccccatgtatgtgtatgagtctaccgttcattgcaccaacatactgctcggtctgaatgatcagagaaagaaggatattttgtgcgatgtgaccctaatagtggaacggaaggaatttcgcgcgcaccgggcggttcttgcagcatgttcagaatacttctggcaggctctggtaggccagactaaaaacgatttagtcgtctccctgccagaagagtag

SEQ ID NO: 110087 - DNA, 246 bp, synthetic construct
  misc_feature 1..246: note = Description of Artificial Sequence: Synthetic coding sequence
  source 1..246: mol_type = other DNA
atgtcagtggatgagaaacctgactcaccaatgtatgtttatgagagcacagttcactgtacaaacattttgctcgggcttaatgatcagcggaagaaggacattctgtgcgacgtgactctaattgtggaacgcaaagaattccgcgcccacagggccgttctggctgcttgtagtgagtacttttggcaggctctcgttggccagactaaaaatgatttagtggtctctctacctgaggaatag

SEQ ID NO: 110088 - DNA, 2526 bp, synthetic construct
  misc_feature 1..2526: note = Description of Artificial Sequence: Synthetic coding sequence
  source 1..2526: mol_type = other DNA
atgtcagtggatgaaaaaccggattctcccatgtatgtgtacgaatctacagtccattgcacaaatatactcctgggtttgaacgatcaacggaaaaaggacatcctgtgtgatgtcaccctgatagttgagcgaaaggagtttcgggcgcaccgggcggtcctggccgcctgctccgagtacttctggcaggccttggtcgggcaaaccaaaaacgacctggtggtctcactgcctgaagaagtaaccgcccggggctttggacccctgttacaatttgcatacactgccaaacttttactgtctcgagagaacatcagagaagtcatacgatgtgctgagttcttaaggatgcacaacctagaagattcatgcttcagcttcttacagactcagctgctgaactcagaagacggtttgtttgtgtgtcgcaaggacgctgcctgccaaagaccacatgaagattgcgaaaacagtgccggagaggaagaggatgaagaagaggaaacgatggactcagagaccgccaagatggcctgtcctcgagaccagatgcttcctgaacccatttcctttgaagcggccgccatccccgtggccgagaaagaagaggcactcctgcctgagcctgatgtcccgacagacacaaaagagtcatctgaaaaagacgctctgacacagtatcctcgctacaaaaagtaccaactggcctgcaccaagaacgtctacaatgcctcttctcattcgaccagtgggtttgcctcgacctttcgggaagacaacagcagtaactctttgaaaccaggcttggcccgaggccagataaagtcagaacccccatccgaggagaatgaagaggagtctattaccctgtgcctaagcggcgatgaacctgatgccaaagaccgcgccggcgatgttgagatggatcgcaagcagccttcacccgcgccgacgcccacggcgcctgctggggcagcttgcttagaaagatccaggagcgtcgcatcaccctcctgtctcagaagcttgttctctatcacaaaatcggtagaactgtctggcctccctagtacgagtcaacagcatttcgcccgctctcctgcgtgcccttttgacaaaggaattactcagggagatctgaagacggattacaccccctttacagggaattatgggcagccccatgtcggacagaaagaggtctcaaacttcacaatgggctcgccactgagaggccctgggctggaagcgctatgtaagcaagagggtgagttggaccgaagatccgtcatattctctagttctgcatgtgaccaggtctctacctctgtccacagctactctggcgtgtcttctttggacaaggacctcagcgagccagtccccaaagggctgtgggtgggcgctgggcagagcttgccatccagccaggcctactcccacggcggcctgatggccgatcatctacctgggcgtatgagacccaacacctcttgcccggtccctattaaggtgtgccctcggagtccccctctagaaacaagaaccagaacatcctcctcatgctcatcctatagttatgcagaagatggctcgggcggttccccttgttcactgcctctgtgtgagttttcatcctcaccatgtagccagggggcccgattcttagcaactgaacaccaggaacccggtctcatgggggacggcatgtataaccaggtgcggccacaaatcaaatgcgagcagagttacgggacgaatagttcagatgaatcaggatccttctctgaggcggactcagaaagttgtccggttcaggaccggggacaggaggtcaagctgccctttcctgtcgaccagatcaccgacctcccccgtaacgacttccagatgatgataaagatgcacaaactgacctccgagcagcttgaattcatccacgacgtgcgccggcgctctaagaataggatagccgcccagcgatgccggaaacgcaagttggattgcatacagaatcttgagtgcgagattcgcaaactggtttgtgagaaagaaaagcttctcagcgaacgcaaccagcttaaagcatgtatgggggaattactggacaatttttcttgcctgagccaagaagtgtgccgggacatccagtcaccagaacagatccaggccctgcaccggtactgtcctgtgttgaggcccatggacctgccaaccgcgtcaagcataaacccagcccccttaggcgctgagcaaaacattgccgcctcccagtgcgcagttggcgaaaacgtgccctgctgtttagaaccaggcgcagcacctccaggacctccatgggccccaagtaacacatcggagaattgtacctccggacgacgcctggaagggactgatccaggcacattttctgaacgtggtccccctctggaaccacgaagtcagacagtaactgtagacttctgccaggagatgacggataaatgcaccactgatgaacagccccggaaggattacacctag

SEQ ID NO: 110089 - DNA, 477 bp, synthetic construct
  misc_feature 1..477: note = Description of Artificial Sequence: Synthetic coding sequence
  source 1..477: mol_type = other DNA
atgtctcatggtaagggaaccgacatgcttcccgagatcgccgcagcagtcggctttctgtcttccctgttgcgaactcgaggctgcgtgtcagagcagcgtctcaaggtattcagcggggcactccaagaagccctgacagagcactacaagcaccactggttccccgagaagccttcaaaagggtcaggttaccgctgtattcggatcaatcacaaaatggatcctatcatcagtcgggtcgccagtcaaatcggactctctcagccacagctgcaccagctgctcccaagcgagttgacactgtgggtcgatccgtatgaggtgtcctatcgcatcggcgaagatggttcaatctgcgtcctgtacgaggaggcaccactggccgcctcttgtggactcctgacatgtaagaatcaggtactgttgggcagatcctctcccagcaaaaactatgtaatggccgtgtcctcgtag

SEQ ID NO: 110090 - DNA, 3258 bp, synthetic construct
  misc_feature 1..3258: note = Description of Artificial Sequence: Synthetic coding sequence
  source 1..3258: mol_type = other DNA
atggatacccccgagaacgtacttcagatgctagaggctcatatgcagagctataagggcaacgacccactgggtgagtgggagcggtatatccagtgggttgaggagaacttccccgaaaacaaagaatatctcatcaccctactggagcacctaatgaaagagtttctcgacaagaagaaataccacaatgatcctaggtttatttcctattgtctcaagtttgcagagtacaatagtgatctgcatcagttttttgagtttctctacaaccatgggattggcaccctgagctcccccttgtacattgcctgggccggtcacctagaagcccagggtgagcttcagcacgccagcgccgtgttacagagagggatccagaaccaggcagagccgcgagagttcctgcaacagcaataccgcctctttcagacccggcttaccgagacacatctgcctgcacaagcaagaacaagtgagcctctccacaacgtacaggttctgaaccaaatgattacttccaaaagcaatcctggtaacaacatggcctgcattagcaaaaaccaagggtcagagttatcaggggtcatcagctccgcatgtgataaggaatcaaacatggagagaagggtgattacaattagtaagagtgaatatagcgtccattcatccctagcttcgaaagtggacgtggagcaggtggttatgtactgcaaagaaaaactcattcgcggagaatctgagttttccttcgaagagctgagggctcagaaatataatcagaggcggaagcacgaacagtgggtgaacgaagatcgtcactacatgaaaaggaaggaagccaacgcgttcgaagaacagctgctgaagcagaagatggatgagctacataagaagctgcatcaagtagttgaaacctcacatgaggatctaccagcctcacaagaaaggtcagaggtgaaccccgctaggatgggcccaagtgtggggtcccagcaggagctgcgcgcaccatgtctgcctgtgacatatcagcagactccagtcaatatggaaaaaaacccacgcgaggctccacccgtcgtaccccccctcgctaacgccatttctgccgcactggtgtcaccagctacatcacagagtattgcccctcccgttcccctgaaggcccagactgtcacagacagcatgtttgcggtggctagcaaggatgccggctgtgttaacaagagtacacacgaatttaagccacagtctggcgccgaaatcaaggagggatgcgagacccataaggtggcgaacactagctcttttcataccaccccaaacaccagtctggggatggtgcaggcaactcctagcaaggtacagccttcccccacagtgcatactaaggaggcactcgggttcatcatgaatatgttccaggcccccactctccctgatatatcagatgacaaggacgagtggcaaagtctggatcagaatgaggacgcctttgaggcacagtttcaaaaaaatgtgaggtctagcggggcttggggcgtcaacaaaatcatcagttcattaagttccgctttccacgtgttcgaggatggcaataaggagaattacgggcttcctcagcccaaaaacaagcccaccggcgcccgaaccttcggagaacggtctgtctcgagactgccctctaaaccgaaagaggaagtgccacatgccgaggaatttctcgacgacagcacagtgtggggcatccgctgtaacaagacactggccccctcccctaagtccccaggagacttcacatcagctgcccaactggccagtacaccctttcacaagctaccggttgaaagcgtgcatatattagaagataaagaaaacgtcgtggctaaacagtgtacacaggcaaccttggactcctgcgaggaaaatatggtggtcccctctcgggatggtaaattttcgccaatacaggagaaatctcccaagcaggccctttctagccatatgtactccgcctcgctcctccggctctcccagcccgctgccggtggtgtcctgacttgtgaagcggagctaggtgtggaagcgtgccgcctcaccgataccgacgctgccatagctgaagatcccccagatgcaattgcgggccttcaggccgagtggatgcagatgagcagtcttggcacagtggatgctcctaactttatcgtggggaacccttgggacgacaagctcatattcaaactattatccggactctcaaaaccggtatcttcttaccctaacacctttgaatggcagtgcaagctgccagccatcaaacctaaaactgaattccagctcggtagcaaactggtatatgtccatcacttgcttggtgaaggagcctttgcccaagtttatgaggctacacagggtgacctgaatgacgccaagaacaaacagaagtttgtcctgaaagtacaaaagccagccaatccttgggagttctacattggcacgcagctgatggagagacttaagccctctatgcaacacatgttcatgaagttttacagcgcccatctcttccagaacggaagcgtgctggtaggagaactgtactcctacgggacgctcctcaatgccattaacctgtacaaaaacaccccagagaaagtgatgccacaaggattggttatcagctttgcaatgcggatgctgtacatgatcgaacaggttcatgactgtgaaattatccacggggacatcaagcctgataattttatactgggcaatggctttctcgagcaggatgatgaagacgatctgtccgcaggactagctctcattgatctgggacagagtattgatatgaaactgttccctaaaggcaccattttcacagctaaatgcgagacatctgggttccagtgtgtcgaaatgctgtccaacaaaccatggaactaccagattgactactttggagttgctgcgactgtgtactgcatgttatttgggacctacatgaaggttaaaaatgaggggggtgagtgcaaacctgagggcttattccgcagactgccacatctcgatatgtggaacgagttcttccatgtgatgttgaacattcccgactgtcaccacctgccttctctcgacctactgagacagaagctaaagaaggtgttccagcagcactacactaacaaaattcgggccttgagaaacagactgatagttctgctgctggaatgcaaaaggtcacgcaagtag

SEQ ID NO: 110091 - DNA, 3087 bp, synthetic construct
  misc_feature 1..3087: note = Description of Artificial Sequence: Synthetic coding sequence
  source 1..3087: mol_type = other DNA
atggacactcccgaaaacgtgttgcagatgttagaagctcatatgcagagttataaaggcaatgacccactgggcgagtgggagagatatattcagtgggtcgaagagaattttcctgagaataaggaatacctgatcacactgctcgagcaccttatgaaagagtttctggacaagaagaaatatcataatgacccccgtttcatctcctactgtctgaagttcgccgagtacaactctgatctccatcagttttttgaatttctctataaccacggaatcggcacactttccagtccactgtatattgcctgggcggggcacctggaggcccaaggagagctgcaacacgcctctgcagtgcttcaacgaggtatccagaaccaggccgaacccagggaattcctgcagcagcaatatagactcttccagacccgactgaccgaaactcatctcccagcacaggcgaggacttcagagccgctccacaatgtccaggttctcaatcagatgatcacaagcaagagcaatcccggcaacaatatggcttgcataagcaaaaaccaagggagtgagctgtcaggtgtcatttccagcgcctgcgataaggagtcaaacatggagcggcgtgtgattactatctccaaaagcgaatacagtgtccactcgtcactggcttccaaggtggacgttgagcaggtggttatgtattgtaaggaaaagctgatcagaggcgaaagcgagttttcctttgaggaacttagagctcagaaatacaatcagcgccggaagcacgaacaatgggtaaacgaggaccggcattacatgaagaggaaagaagccaacgcattcgaggaacagttgttgaagcagaagatggacgagctacacaaaaaactgcaccaggtcgtcgagacatctcatgaggaccttcctgcctctcaggagcggtccgaagtaaaccccgccagaatgggccccagcgtaggaagccagcaggagctcagggccccatgcctgccagtgacctaccagcaaacccctgtgaatatggagaagaatccacgggaagctcccccggtagtccctccattggccaatgccatttccgccgcactcgtaagccccgccacatctcagagtattgccccccctgtaccactaaaggcccagacagtcaccgactctatgttcgcagttgcttccaaggacgccggttgtgtgaacaagtctacacatgaattcaagcctcagtctggcgcggagatcaaggaaggctgcgagacccataaagttgcaaacacttccagctttcacacgacccctaatacgtcccttgggatggtgcaggccaccccaagtaaggtgcaaccctcccctacagttcatacaaaggaggctcttggtttcatcatgaatatgttccaggcgcccacgctgcccgacatcagtgacgacaaagacgaatggcagtctttggatcaaaatgaggacgcatttgaagcacagttccaaaagaatgtacggtcgagtggggcgtggggagtaaacaagataatttccagtctgagctctgcctttcacgttttcgaagacggcaacaaggaaaattatggcctgccgcagcccaagaacaagccaactggggcgaggacttttggggagcggagtgttagtcgtttgccctccaagcccaaggaggaggtgccccacgccgaagagtttcttgacgactcgacagtatggggaattaggtgtaacaagactttagcaccctctccaaaaagccccggtgatttcacctctgccgctcagctcgcttctaccccttttcataaactgccagtggagagcgtccacattcttgaagacaaggagaacgtggtcgccaagcagtgcacacaggcaaccctcgatagctgcgaggaaaatatggtagtccctagtagagatggaaaattttcccccatccaagaaaaaagccccaaacaggcattatcctctcatatgtacagcgccagcctcctgcggctttcccaacccgccgctgggggcgtcctgacctgtgaggccgagctgggcgtggaagcgtgtcggctcacggacactgatgctgccatcgcagaggaccccccagatgcaattgcaggcctccaagccgaatggatgcaaatgtcctccttagggaccgttgatgcgcccaactttattgtggggaacccctgggacgacaagctgatcttcaagttgctcagcggtctgtcaaagcccgtttcttcttatcccaacacttttgagtggcaatgcaaacttccagctattaagccgaagacagagttccagctgggctcaaagctggtatatgtgcatcacttgcttggggagggggcattcgcacaagtgtacgaggccacccaaggagatctcaatgatgccaagaataagcagaagttcgtcctgaaggtgcagaaacctgcaaatccttgggagttctatattggtacccagcttatggagcgcctcaagcccagcatgcagcatatgtttatgaagttctatagcgcacacctatttcagaatggctccgtgctggtcggcgagctgtactcttacggaactctgctggacgacgaagatgatctgtccgccggcctcgctttgatcgacttgggtcagtcaatcgacatgaagttatttccaaaaggcactatctttactgcgaaatgcgagaccagcggcttccagtgtgtggaaatgctgtccaataagccatggaactatcagatcgactattttggcgtggcagcgaccgtctactgtatgttgttcggtacgtacatgaaggtcaagaacgaaggtggagagtgtaaacccgagggcctgtttcgcagactgccacatttggatatgtggaatgaattctttcacgtgatgctgaatatccctgattgtcaccacctgccgtccctggacctgctgcgtcagaagctcaaaaaagtgtttcagcagcactataccaacaagatccgtgctttaagaaataggctgattgtcctgcttctggagtgcaagcgatccaggaagtag

SEQ ID NO: 110092 - DNA, 3198 bp, synthetic construct
  misc_feature 1..3198: note = Description of Artificial Sequence: Synthetic coding sequence
  source 1..3198: mol_type = other DNA
atggatacgcctgaaaacgtgctgcagtacattcaatgggtagaagagaattttcctgagaacaaggaatatctgatcacactgcttgagcacttgatgaaagagtttctggataagaagaaataccataacgaccctcgatttattagttattgcctaaagttcgctgagtacaactcagatttgcaccagttcttcgagtttctgtataaccacgggatcgggactttaagctcgcccctctatatcgcgtgggctgggcacctggaggctcagggagagctgcagcacgcaagtgcagtgctccagaggggtatacagaatcaggcggagccgagagagttcttgcaacagcagtatcgcctttttcagacacgcctcaccgagacccacctccccgcccaggctcgcacctcagagcccttacacaatgtgcaggtgctgaatcagatgattaccagcaaaagcaacccgggaaacaatatggcctgtatatccaaaaaccagggatcggaattgtctggtgtgatctccagtgcttgcgataaagaatctaatatggagagaagggttatcactattagtaagagcgagtacagcgtacattctagtcttgcgtccaaggtggatgtcgagcaggtcgttatgtactgcaaagagaaacttattcgcggagaatccgagttctcgttcgaggagctgcgcgcgcagaaatataaccagcggcggaagcacgaacagtgggtgaacgaagaccgccattacatgaagcggaaggaagccaatgcttttgaggaacagttgcttaaacagaagatggacgaactgcacaagaagctgcatcaagtcgttgaaacgtcacacgaggatttacccgccagccaggagcggtccgaggtgaacccagcccgcatgggtcctagcgttgggtcacagcaggaacttcgagccccctgtcttccagtgacgtatcagcagacgcctgtgaacatggaaaaaaatccccgcgaggctccccccgtggtgcctccccttgcaaacgccatttctgcagccctggtgtctcccgccacgagccaatccattgccccaccagtgcctctgaaagcccagactgtaaccgatagcatgtttgccgttgcctccaaagatgctggttgcgtgaataagtcgactcacgaattcaagcctcagtccggagcggaaattaaagaaggctgcgaaacacacaaggtggctaatacttcaagctttcacacgacccccaacacctccctgggcatggtgcaagcgactcccagcaaggtgcagcccagtccgaccgtgcataccaaggaggccctgggattcatcatgaacatgtttcaggctccgactctgccagacatttcagacgataaagacgagtggcagagtttggatcaaaacgaggatgcttttgaggcccagttccaaaaaaacgttcgtagtagtggtgcttggggggtcaataagatcatcagcagcctctcctccgccttccatgtctttgaagacgggaacaaagagaattatggtctgccccagccaaaaaacaaaccaacaggagctcggacctttggtgagcggtctgtgtcccggctgccttcaaaacctaaagaagaggtgcctcatgccgaggagtttctggatgattctacagtctggggcattcgctgcaacaaaaccctggcgcccagccctaaaagtcctggcgatttcacgtctgctgctcagctggcctctaccccctttcataagctgcccgtcgaaagcgtgcatatcttggaggacaaagagaatgtcgtcgcgaagcagtgtacccaggctacccttgattcttgtgaggagaatatggtggtgccttctcgcgatggtaaattctccccaattcaggagaagagccctaaacaggcgctgagctctcacatgtattctgcatccctgttgcgactgagtcagccggccgctggcggcgtcctgacatgtgaggccgaattgggcgttgaggcgtgtcggcttaccgacactgacgccgccattgccgaagatcccccagacgctatcgccgggctccaagctgagtggatgcagatgtcatctctcggaacagtggatgccccaaattttattgtgggaaacccatgggatgacaaactcatctttaagctcctcagtgggctgtccaagccagtgtcttcctaccctaacacattcgagtggcaatgtaaactcccagctatcaagccaaagactgaatttcaacttggttccaagctggtatatgttcatcacctcctgggtgagggggcttttgcccaggtttacgaagcgacccaaggtgatctgaacgatgccaaaaacaaacaaaagttcgtgcttaaagtgcagaagcctgccaacccttgggaattctatatcggcacacagctcatggagcggcttaagccaagcatgcaacacatgttcatgaaattttactcggcccatctgtttcagaatggatcagtgctggtgggcgaactctactcatatggaaccctactaaatgcaataaatctgtacaaaaatacgccagagaaggtgatgccccaagggctcgtaattagcttcgctatgcgcatgttgtatatgatagaacaggttcacgactgcgaaattatccatggagatataaagcccgataacttcatactcggaaacggctttcttgaacaggacgatgaggatgacttgtctgccggcctggcattgatcgatctgggccaaagcatcgacatgaagctctttcctaaagggaccatatttaccgcgaaatgcgagacatctgggttccaatgcgttgaaatgcttagtaacaagccatggaattatcagattgattattttggggttgccgccactgtctactgcatgctctttggtacctacatgaaagtgaaaaatgaaggtggcgagtgtaaacccgagggactgttcagaaggctccctcacctagacatgtggaacgaattttttcacgtcatgctcaatattccggactgtcatcatctaccgtctctcgacctcctgagacaaaagcttaaaaaagtctttcaacagcattacaccaataaaattcgtgctttacggaataggctgatagtgctactgctggaatgtaaacggtctaggaaatag

SEQ ID NO: 110093 - DNA, 2475 bp, synthetic construct
  misc_feature 1..2475: note = Description of Artificial Sequence: Synthetic coding sequence
  source 1..2475: mol_type = other DNA
atggatacccctgagaatgtacttcaaatgctggaggcacatatgcagagttataagggcaacgatccgttgggcgagtgggagcgctatatccaatgggtagaagagaatttccccgagaataaggagtacctaatcactttgttggagcacttaatgaaagaatttcttgataagaagaagtatcataacgatcctagatttatttcttattgcctgaagtttgccgagtacaactcagacctgcatcaattcttcgaatttttatacaatcatgggattggcacactaagtagcccgctctacatcgcctgggctggtcatctcgaagcgcagggggagcttcagcatgcctcagccgtgctgcagagaggcatccagaaccaggcggagcccagagaatttttacagcaacagtataggctgttccagacacgtctgacagaaacccatcttcctgcacaggccagaacaagtgaacctctgcacaacgttcaagtcctcaatcagatgattacttccaaatcgaacccaggtaacaatatggcttgtatcagtaagaaccaggggtccgagctctcaggagttatatcgtctgcttgcgacaaggaatccaacatggagaggcgtgttatcacaattagtaagagtgaatattccgttcatagctctctggcctcaaaagtggacgttgaacaggttgtgatgtattgcaaggagaaactcatcagaggggagagcgagttctctttcgaagagttgcgggcacaaaagtataatcaaagacgaaagcacgagcagtgggtgaacgaagatcggcactacatgaagagaaaggaagcaaacgcctttgaagaacaactcttgaagcagaagatggatgagttacataaaaagctgcatcaggtggtggaaaccagccatgaagacttgcccgcaagccaggaacggtccgaagtgaaccctgcaaggatgggcccaagcgttggttctcagcaggaactccgggcaccttgtctacccgtgacatatcaacagactccagtgaatatggagaaaaaccctcgggaagcgcctccagttgtgccgccactggctaatgccataagcgccgcgctggtcagccctgcgacctcccagtcaatcgcgccacctgtgcccttgaaggcccagactgtgacggattctatgttcgcagttgcatccaaagacgccggctgcgtgaacaagtctacccacgagtttaagccacagtctggggccgaaatcaaagagggttgcgaaacccacaaggtcgcgaataccagttctttccacacaacacccaacacaagcctgggtatggttcaggccactccaagcaaggtacagccctcgcccactgtgcacactaaagaggccctcgggtttatcatgaacatgtttcaggcgcctaccctcccagacatttccgacgataaagacgagtggcagtccctggatcagaatgaggacgcgtttgaagctcaattccagaagaatgtgcggagtagtggcgcatggggtgttaacaaaattatttcttcactgtcttccgcgttccatgtctttgaagatggtaacaaggagaattatggtctcccgcaaccgaaaaataagcccactggtgctagaacatttggggaaaggtccgtcagtcgcctaccgtcaaaacccaaagaggaagtcccacacgcagaagagtttctggatgactccaccgtctgggggatcagatgcaacaaaactcttgctccctcacctaagtcccctggggactttacttccgccgcccagctagcttccacaccatttcacaagctgcctgtggaaagcgtccacattctagaagacaaggaaaacgtcgtagccaagcagtgtacccaggcgacattggacagctgtgaggaaaatatggtggtgccatcccgcgacggaaaattctctccaattcaggaaaaatcacctaagcaggcactgagtagccacatgtacagtgcaagcctgctgcgactgtcccagcctgccgccggcggagtgttgacgtgtgaagcagagttgggagtggaagcctgccggctcacagacacggacgccgcaatagccgaagacccccccgacgccattgcaggcctgcaggccgaatggatgcaaatgagcagtctggggacagtggacgcgccgaactttatcgtggggaacccttgggacgataagctgatcttcaagctcctcagcggcttgtccaagccagtgagttcctatcccaatacatttgagtggcagtgcaaacttccagctattaagcccaaaactgagtttcagctcggcagcaaactggtttacgttcaccatctgctgggggagggggcatttgcacaagtttacgaagccacccagggagaccttaacgatgcgaagaataagcaaaagtttgttctgaaggtaaaaagttag

SEQ ID NO: 110094 - DNA, 981 bp, synthetic construct
  misc_feature 1..981: note = Description of Artificial Sequence: Synthetic coding sequence
  source 1..981: mol_type = other DNA
atgacaggaagtaacgagtttaaacttaatcagccccctgaggatgggatctctagtgtcaagttttcccccaatacttcacagttccttcttgtgagttcctgggatacttcggtgcggctgtacgacgttcctgcaaattccatgagattgaagtatcagcacaccggcgcagtgctggattgtgccttttacgatcccacacatgcttggtccggcggccttgatcaccagctcaagatgcatgatctgaatacagatcaggagaatcttgtgggcacacatgacgccccaatacggtgtgtggaatattgcccagaggtgaacgtgatggtaactggaagctgggaccagaccgtgaagttatgggatccaagaaccccatgcaatgcgggtacatttagtcagccagaaaaggtatacaccctgtcagtttccggcgataggctgatcgtgggcaccgcagggcggcgggtgttagtatgggatctgagaaatatggggtacgtgcagcaacggcgagaatcgtccctgaagtaccagacgcggtgtattcgggcttttcccaacaagcagggctatgtgttatctagtatagagggaagagtggcagtggaatacctggaccctagccccgaagtacaaaagaaaaaatatgcttttaaatgccatcgtctcaaagaaaataacatcgaacagatctacccggtcaacgcgatatcttttcataacatccataacacgttcgcgaccggcggatccgacgggtttgtaaacatctgggacccatttaacaaaaagcgcctgtgccagttccaccgctacccaacatctattgcctctcttgctttctccaatgacgggaccaccctggccatcgcttctagctacatgtacgaaatggatgacacggagcacccagaggatggaatcttcattcggcaggtcaccgacgccgaaaccaaaccgaaatctacttag

SEQ ID NO: 110095 - DNA, 987 bp, synthetic construct
  misc_feature 1..987: note = Description of Artificial Sequence: Synthetic coding sequence
  source 1..987: mol_type = other DNA
atgaccggaagcaatgaatttaagctaaatcaacctcctgaggatggtatttctagtgtcaagttttccccgaatacaagtcagtttctgctggtctcatcatgggatacttctgtgaggctgtatgatgtgcccgccaattccatgcggttaaaataccagcatacaggagccgtgctggactgtgccttctacgatccaactcacgcgtggagtggcggcctcgaccatcaactgaagatgcacgacctcaacacagaccaggaaaacctcgtggggacccacgacgctcccattagatgcgtggaatactgtcccgaggtcaatgtgatggtgacgggtagctgggatcagactgtcaagttatgggaccctaggaccccatgcaatgcaggcacgtttagccagcctgagaaagtctatactctaagcgtgtcgggcgataggctcatcgtaggtactgctgggcgacgcgtgctggtctgggaccttaggaacatggggtatgtccagcagcgtcgcgagagttctctcaaataccagaccagatgtatacgcgcttttccaaataagcaggggtatgtactgtcttcaatcgagggtcgcgtggccgtggagtaccttgatccatcacccgaagtccagaagaaaaaatacgcattcaagtgccatcgcctgaaagaaaacaatatagagcaaatatacccagtgaatgccattagtttccataatatacacaatacattcgctactggaggttcagatggattcgtaaatatttgggacccatttaataaaaagcgactttgtcaatttcatcgataccccacatctattgcttccctggcattttctaacgatggcactaccctcgcaatcgccagcagttacatgtatgaaatggatgacacagaacaccccgaggacggcatcttcatccgtcaggtgaccgatgcagaaacaaagccaaagtctccatgtacctag

SEQ ID NO: 110096 - DNA, 747 bp, synthetic construct
  misc_feature 1..747: note = Description of Artificial Sequence: Synthetic coding sequence
  source 1..747: mol_type = other DNA
atgcacgacctgaacactgatcaggaaaacctcgtgggcacccatgacgcacccattcgctgtgttgagtactgccccgaagtcaacgttatggtgacgggaagctgggaccagaccgtgaagctatgggacccccgcaccccctgtaatgcgggtacgttttcacaaccagaaaaagtgtacactctctccgtatctggggatcgactgatagtggggactgccggaaggagagttctagtgtgggatctgagaaatatgggatacgttcagcagaggcgcgagtctagcctcaaataccagactcgatgtatcagggctttcccgaataaacagggctatgtgttatcatcgatcgaaggacgagtcgctgtagagtacttagatccctcaccagaggtgcagaagaaaaagtacgcctttaaatgtcaccgcttgaaggagaacaacatcgaacagatctaccctgtaaacgcaatctcttttcacaacatacacaacacgtttgcgaccggtggcagcgatggttttgtgaacatttgggatccgttcaacaaaaagcgcctctgccagttccatcgctaccccaccagcatcgcgagcctggccttttctaatgacggaacgaccttggctatcgccagttcatacatgtatgaaatggacgatactgagcacccagaggacggcatttttattcgccaggtgacggatgctgaaactaaacccaaatctccttgcacttag

SEQ ID NO: 110097 - DNA, 1164 bp, synthetic construct
  misc_feature 1..1164: note = Description of Artificial Sequence: Synthetic coding sequence
  source 1..1164: mol_type = other DNA
atggcctgcaccatccaaaaagccgaagctctcgatggagcccatttgatgcagatcctgtggtacgatgaagaggagtcgctgtatcccgctgtctggttgcgagacaactgcccctgtagcgactgttatctagatagtgcaaaggctcgcaagttgctagtcgaagccctagacgtaaacatcggcatcaaaggactgatctttgacagaaagaaggtgtacatcacctggcctgacgaacactatagcgaatttcaggctgattggctgaaaaaacgatgttttagcaagcaggctagagcaaagctccagagggaactctttttcccagagtgccaatactggggctccgaacttcaactgcccactttggacttcgaagatgtcctcaggtacgacgaacacgcgtataaatggctcagtacacttaagaaagtcggaatagtgcggctaaccggcgccagcgacaaacccggagaagtaagcaagttaggcaaaaggatgggcttcttgtatcttaccttctatgggcatacatggcaggtgcaggataagatagacgccaacaatgtagcttacacaaccggaaaactctccttccacacagattatccggctctgcatcaccctccaggagtccagctcctccactgtataaagcaaacagtgaccggcggcgactccgaaatcgtcgatggtttcaatgtctgccagaaactcaagaagaacaaccctcaggctttccaaatcctttcaagcactttcgtggactttaccgatattggagtcgactattgcgatttttcagtgcagtccaaacataagatcattgagcttgacgacaaagggcaggtggtaaggataaatttcaacaatgcaacaagggacaccatctttgacgttccagttgagagagtacagccgttttatgccgccctgaaggagttcgttgacttgatgaactcaaaggagtctaaatttacattcaaaatgaatcctggggatgttataacgttcgacaattggaggttgctgcatggccgaaggtcatacgaggccggtaccgagatctctagacatctggaaggcgcttatgccgactgggacgtagtgatgagccgcctgagaattttaaggcagcgcgtggagaacggtaattag

SEQ ID NO: 110098 - DNA, 1164 bp, synthetic construct
  misc_feature 1..1164: note = Description of Artificial Sequence: Synthetic coding sequence
  source 1..1164: mol_type = other DNA
atggcctgtaccattcagaaagcagaggcattggatggcgcacatctcatgcagattctttggtacgatgaagaagaatccctgtatcccgccgtttggctccgggataattgtccatgcagcgattgctacctggatagcgctaaggctcggaaactgctggtggaagcccttgacgtcaatataggcataaagggcctcatctttgatcgaaagaaggtgtatataacatggccagacgagcactactccgagtttcaagcagattggctgaagaaaagatgtttttccaagcaagcaagagccaaattacagcgcgagctattttttccagagtgccaatattgggggtctgagcttcagctgcctaccctggacttcgaagatgtgctgcggtacgacgaacacgcgtataagtggttgtcgaccctgaagaaagtcggcatcgtgcggcttacgggagcctcagataaacctggggaagtttctaaacttggaaagaggatgggatttctgtacctgacgttttacgggcacacctggcaggtgcaggacaagatcgacgccaataacgtggcctatacaaccgggaagctgtcatttcataccgattatccagccctgcatcaccccccaggcgttcaattgctgcactgtattaaacagactgtaactggcggcgattccgagattgttgacggcttcaacgtttgtcagaagttgaagaagaacaatccgcaggctttccagattctgagtagtaccttcgtggactttacggacatcggcgtggactactgcgacttcagtgtgcagagcaagcacaaaatcatcgagcttgatgacaagggacaggtggtgcgaattaacttcaacaatgctacacgagacactatttttgatgtgcccgtcgagcgcgttcagcccttttacgcagctttgaaagaatttgttgacctgatgaactcgaaggagtcaaagtttactttcaagatgaacccaggtgatgttatcacttttgataactggcgccttctgcacgggaggcgctcctacgaggcaggcactgagatcagccgtcatctcgaaggagcctatgccgactgggatgtggtgatgtctaggctacgtatcttgcgtcagagagtggaaaacggcaattag

SEQ ID NO: 110099 - DNA, 1164 bp, synthetic construct
  misc_feature 1..1164: note = Description of Artificial Sequence: Synthetic coding sequence
  source 1..1164: mol_type = other DNA
atggcatgtacgattcagaaggctgaggccctcgacggcgcgcatttaatgcagatcctatggtatgacgaagaagagagtctgtaccccgccgtgtggctcagagacaactgtccctgctccgattgttacctcgactcagcaaaagccagaaaacttcttgtggaggctctagatgtgaacattggaatcaagggactgattttcgacaggaaaaaggtgtacatcacatggcccgatgaacactacagtgaattccaggcggattggctcaaaaagcgctgtttctccaaacaggccagagcaaaattgcagagagaactgttctttcccgaatgccaatattggggttcagagctccagctccctacactggatttcgaagatgtactcagatacgatgagcatgcgtataaatggttgagcacactgaagaaggtgggaatcgtgcggctcactggggcttcagacaaacccggcgaggtgtcaaagctgggaaagcgaatgggttttctgtacctcaccttttacggccacacttggcaagtgcaggataaaattgacgccaacaatgtcgcatatactacggggaagctctcctttcatactgattatcccgctctgcatcacccacctggagtgcagttgcttcattgcatcaaacagaccgttacaggaggcgacagcgagattgtagacggcttcaacgtttgtcagaaacttaaaaagaataacccccaggccttccagatcctttcttccacttttgtggactttactgacatcggcgtggactattgtgacttcagcgttcagtctaagcacaaaatcattgagttggatgataaggggcaggtagtacgcattaatttcaacaacgctactagggacaccatctttgacgtgcctgtggagcgggtacaaccattttacgccgcacttaaagagtttgttgacttgatgaattctaaggagtccaagttcacattcaagatgaacccgggagacgtcattactttcgacaattggaggcttttgcatgggcggcgtagttatgaggcagggacagaaatctcccgccatctggaaggcgcctacgctgactgggatgttgtgatgagtaggctgcgtattctgcgtcagcgggtggaaaatgggaattag

SEQ ID NO: 110100 - DNA, 1164 bp, synthetic construct
  misc_feature 1..1164: note = Description of Artificial Sequence: Synthetic coding sequence
  source 1..1164: mol_type = other DNA
atggcctgcactattcagaaggccgaggcccttgatggtgcccatctgatgcagatactttggtatgatgaggaagaatcactttatccggctgtgtggctgcgagataattgtccctgttccgactgctacctcgattctgcaaaagcacggaaactcctggtggaggcactggacgttaacattggtataaaggggttgatctttgatcgcaaaaaggtctatattacctggccggatgagcactatagtgagttccaagctgattggctgaagaagcgatgtttttcaaagcaagcccgagcaaagctgcagcgcgagttgttttttcccgagtgtcaatattgggggtcagaactgcaattgcctaccctagacttcgaagacgtgctgcgctacgatgagcatgcgtataaatggctcagcacactgaaaaaagttggaatcgtcaggctgacaggcgcttccgacaagcccggcgaggtcagtaagctgggcaaaagaatgggtttcctctatctgaccttctacggtcatacgtggcaggtacaagacaaaatcgacgccaataacgtcgcttataccacgggaaaactgagtttccataccgactaccccgcactacatcatcccccaggcgtgcaacttctccattgtattaaacagacagttaccgggggggacagcgagattgtggacggattcaatgtctgccagaagctgaagaaaaataaccctcaggcattccagattctcagctcaaccttcgtcgacttcactgatataggagtcgactactgcgactttagcgtgcagtcaaagcataagatcatcgaattggacgataagggccaagttgtaagaatcaacttcaacaatgctacacgtgatacgatctttgacgttcccgttgagcgagtgcaaccattctacgctgcactcaaagagttcgtcgacctgatgaactccaaggagagtaagttcactttcaagatgaaccccggggatgtgattacattcgataattggcgtcttttgcacgggcgccgctcctatgaggccgggaccgaaatatcaagacatctcgagggcgcatatgctgattgggatgtggtgatgtcaaggctgcggatcctacgccagagagtggagaacggcaattag

SEQ ID NO: 110101 - DNA, 207 bp, synthetic construct
  misc_feature 1..207: note = Description of Artificial Sequence: Synthetic coding sequence
  source 1..207: mol_type = other DNA
atggcttgcaccatacaaaaggctgaagccctagatggcgcacacctgatgcaaattttatggtatgatgaggaggagtcactgtatcccgcagtttggctgcgggataattgcccatgctccgactgttatttagactctgccaaggcccgtaaattgctggtcgaggctctggatgtcaacatcggcattaaaggactgatctag

SEQ ID NO: 110102 - DNA, 771 bp, synthetic construct
  misc_feature 1..771: note = Description of Artificial Sequence: Synthetic coding sequence
  source 1..771: mol_type = other DNA
atggagccagctgctgccctccacttcagcctcccagctagcttgctgttgctcttgttgctacttcttttgagcctttgcgcactggtctcagctcagtttactgttgtgggacccgccaacccaatcttagccatggtcggcgaaaatacaacattgcgttgccacttgagccctgagaaaaacgccgaagacatggaggtgaggtggttcaggtcgcagttttcccctgccgttttcgtatataagggcggacgcgaaaggacagaggaacaaatggaggagtataggggccgcattacatttgttagcaaagacatcaataggggctccgtcgccttggtcatacataacgtcactgctcaggagaacggaatataccgatgctactttcaggaaggaagaagctatgacgaagcaatcctgaggctcgtggttgctgagtcctttatgccgtccgcttctccttggatggtggcactggctgtcatcctcactgcatccccgtggatggtctcaatgacggttatcctggctgtattcatcatctttatggccgtgtcgatctgctgcatcaagaagctccaacgcgagaaaaaaatcctttcgggcgaaaagaaggtcgagcaggaagagaaagaaatcgctcagcaacttcaggaggaattgagatggaggagaacattcctccatgccggctacgagctccccgggatccgggggcctagctggaagaggcccctgcacggagagcctccttccgcgttctag

SEQ ID NO: 110103 - DNA, 942 bp, synthetic construct
  misc_feature 1..942: note = Description of Artificial Sequence: Synthetic coding sequence
  source 1..942: mol_type = other DNA
atggagcccgctgcggctttgcacttctctctgcctgcgtcccttctactgctgctcctcctcctccttttgagcctctgtgctctggtaagcgagtccttcatgcccagcgccagcccatggatggtcgcactcgctgtgattctcacagccagtccttggatggtatcaatgacagtgatactggccgtgttcataattttcatggccgtttctatctgctgtataaagaagcttcaacgggaaaaaaagatcctctccggcgagaagaaggtggagcaggaggaaaaggagatcgcccagcaactccaagaggaactgcgttggcgaagaacttttctccatgccgccgatgtggtcctggaccctgatacggcacacccggagctctttttaagtgaagaccgacgctcggtgagacgaggaccctacaggcagcgcgtacctgataaccctgagcgattcgactctcagccttgcgttctagggtgggagtctttcgcttccggtaagcactactgggaagtggaggtggaaaacgtcatggtgtggaccgtgggagtgtgcagacactccgtggaaaggaaaggggaggtcctgctgattccacaaaatggattttggaccctggaaatgttcggcaaccagtacagagccctgtcttccccggaaagaatcctgcccttgaaggagagtctgtgtagagtcggcgtgtttctcgactacgaagccggcgatgtgtccttctacaacatgcgcgacagatcccatatctacacgtgccccagatctgccttcacggttcccgtacggccctttttcagactgggaagtgatgatagcccgattttcatatgtcccgcactcactggcgcctcaggagtcatggtgcctgaggagggtctgaagctccatagagtgggaacacaccaatccctgtag

SEQ ID NO: 110104 - DNA, 1608 bp, synthetic construct
  misc_feature 1..1608: note = Description of Artificial Sequence: Synthetic coding sequence
  source 1..1608: mol_type = other DNA
atggttggtgaagacgctgatctgccctgtcaccttttccccacgatgagcgctgagaccatggaattgaggtgggtgtcttcttcacttcgccaagtagttaacgtttatgcagacggcaaagaggtcgaggaccgacagagcgctccctacaggggccggacatccatcctccgggatggaatcactgccgggaaggcagccctgcgcatccacaacgtcaccgccagcgactccggtaagtacctgtgctatttccaggatggagatttctacgagaaggcccttgtggaactgaaagtggcggcactcggatctgacctccacatcgaggtcaaaggctatgaagacgggggaatccacctagagtgccggtcaacggggtggtacccacagcctcagatcaagtggtcagatactaagggcgagaacattcctgccgtggaggccccggtggtggcagacggcgtagggctgtatgcagtagccgccagtgtcattatgaggggcagttctggggggggtgtttcttgcataattaggaattccctgctgggcttggagaaaacagcaagcatttcaatagcagacccattcttccggagcgctcagccatggatcgccgcactggccggaaccctgccaatctcacttcttttactcgctggtgcctcctacttcctctggcgtcagcagaaggagaagattgcactgtctcgagagacagaacgtgagagagaaatgaaggaaatggggtacgccgcaaccgagcaggaaatcagcctgcgagagtggcgcaagattcagtacatggcacgaggtgagaagtccctggcgtaccatgagtggaagatggccctgtttaaaccagcagacgtgatcctggaccccgacacggcgaacgccatcctgctggtaagtgaagaccagagatctgtacagagagctgaagagcccagggacctcccagacaacccagaacgctttgaatggcgttattgcgtgctgggatgcgagaactttacgagcggcaggcactactgggaggttgaggtgggggaccggaaagaatggcacattggcgtatgctccaagaacgtcgaaaggaagaagggctgggtgaagatgacgcctgagaacggctattggaccatgggactgaccgatggcaataaatacagggctctgacggagcctcgcactaatcttaaactgcccgagccaccccggaaggtggggatctttctggattatgaaaccggggaaatctccttttacaacgccaccgacgggtcccacatatacactttcccacacgccagtttcagcgagcccctttaccccgtatttaggatattgacactggaacctactgccctcacaatctgccccatcccaaaggaggtcgagtccagccccgaccccgatctagttcctgaccatagcttggagacacccctgacccctggcctcgctaatgagagtggtgagcctcaggccgaagttacttcattgctgttacctgcgcatcccggcgctgaggtctcaccgagcgctacaaccaaccagaaccataaacttcaagcgagaaccgaggccctgtattag

SEQ ID NO: 110105 - DNA, 1581 bp, synthetic construct
  misc_feature 1..1581: note = Description of Artificial Sequence: Synthetic coding sequence
  source 1..1581: mol_type = other DNA
atggcggtgtttccttcctcgggccttccacgatgcctgctgacactgattctcctgcagctgcccaaactcgattcagcaccattcgatgtgatcggaccccccgagcccatcctagctgtggtgggcgaggatgcagagctcccatgcaggctttcgccaaacgcatctgcggagcatctggagctcaggtggttccgaaagaaggtgtccccagccgtcttggtacaccgcgatggaagggaacaggaggccgagcagatgccagaatacaggggcagggccactctggtgcaagatggcatcgctaaggggcgtgtggccttgaggatccgtggcgtcagagtctctgacgatggtgagtatacttgtttcttccgcgaggatggttcctatgaggaggccctcgtgcatctcaaagtggccgctctggggtccgatccacatatatccatgcaggtgcaggagaacggcgaaatttgtctcgagtgcacaagtgtcgggtggtatcccgagcctcaagtgcaatggcgcacaagcaagggcgagaagtttccctccacatctgagtctagaaatcccgacgaagagggcttatttaccgttgctgcatccgttattattagagacacctcagctaaaaacgtttcgtgttatatccagaacctcctgctggggcaggaaaagaaagtggagatttccattcctgcctcctctctgccccggctgacgccgtggattgtggcggtggctgttattctgatggtgcttggtctactgaccattgggtccatcttttttacctggcggctgtataatgagagacccagagagcgccgcaacgaatttagcagtaaggaacgactgctggaagagctgaagtggaagaaagccaccctacacgcagttgacgtcactctcgatcccgacactgcccaccctcacctcttcttatacgaagattctaaatctgtcaggctggaagatagtcgacagaagttgcccgagaagaccgagcggtttgactcttggccctgcgtgctcgggcgggaaacattcacatcgggccgccattattgggaggtggaggtgggggataggactgattgggccatcggtgtgtgtagagagaacgtgatgaagaaaggttttgacccaatgacccccgaaaatggattttgggctgtggagctgtatggcaatggctattgggctttgacacctctccgcacccccctcccactggcaggccccccccgaagagtcgggatatttttggactacgaatcaggtgatatcagtttttataatatgaacgacgggtctgacatttatacattcagtaatgtcacattttctggacctttgaggcctttcttttgtctttggagtagcggcaaaaaaccgctgacgatatgccctatagccgatggtcccgagcgcgtgacggtgatcgctaacgcacaagatctgagcaaagaaatccccctgtccccaatgggtgaggatagcgccccaagagacgcggataccctccactcaaagttgatcccaacccagccttcgcagggcgccccatag

SEQ ID NO: 110106 - DNA, 1485 bp, synthetic construct
  misc_feature 1..1485: note = Description of Artificial Sequence: Synthetic coding sequence
  source 1..1485: mol_type = other DNA
atggctgtgttccccagctccggtctcccccggtgcctgctcacattaattctgctgcaactgcctaagctggatagcgcaccatttgacgtcatcggtccacccgaacctatcctagctgtggtcggcgaggacgctgagctgccctgccggttgtccccaaatgcaagcgccgagcacctagaacttaggtggttccgaaagaaagtgagccccgctgtccttgtgcaccgggatgggagggaacaggaagcagagcagatgcctgaatacaggggtcgcgccaccctagtgcaagacggcatagctaaaggccgagtggcactcaggattagaggggtcagggtgagtgatgatggagagtacacctgcttcttccgggaagacggttcctatgaagaagcattggtccacttgaaggtggcggcactgggcagtgatccacatatctcgatgcaggtccaggagaacggggaaatttgcctcgaatgcacctctgtgggatggtacccggagcctcaagtgcagtggcgaacctcaaaaggtgagaagttcccaagtacatctgaatccagaaatcctgatgaggaaggcctcttcaccgtggcagcgtcagtcataattagggacaccagcgccaagaacgtgtcttgttacattcagaacctgttgcttgggcaggaaaaaaaagtggagattagtatccccgcatcctccctgccacggctgacaccctggatcgtagccgtggctgtgatcctgatggtactgggtctgctgacgattggcagcatttttttcacctggaggctgtacaatgagagacctagagaacgccgcaatgaattctcttctaaggagcgactattagaggagttaaagtggaagaaggctaccctgcacgctgtagacgtaactctagatcccgacaccgcacatcctcacttatttctgtacgaagattccaagtctgtgcgactagaggattcgcggcaaaagttacctgaaaagacagagagatttgattcatggccctgtgttctgggcagggaaacattcacatctggcagacattattgggaggtagaggtcggagacagaacagactgggctatcggcgtgtgtcgtgaaaatgttatgaaaaagggctttgaccccatgactccagagaatggtttctgggccgtggagctgtacggaaatggatactgggccctaacacccctccggaccccgctgcccctcgctggcccaccccgaagagtgggcatcttccttgactatgaaagcggcgatatatccttttacaacatgaatgacggctcagatatatacacctttagcaacgtcaccgtgatcgcaaacgcacaggacctttcaaaggagatcccactatcacccatgggcgaagactcggcaccgagggatgctgataccctccactcaaagctgattcccactcagcctagccagggcgccccatag

SEQ ID NO: 110107 - DNA, 1590 bp, synthetic construct
  misc_feature 1..1590: note = Description of Artificial Sequence: Synthetic coding sequence
  source 1..1590: mol_type = other DNA
atggagtctgccgcagctctccattttagcagacccgccagccttctcttgctcctgctgagcttgtgtgctctggtgagtgcgcagttcatagtcgtcggaccaactgacccgatcctggcgactgtgggcgaaaacaccacactgagatgtcatctttctcctgaaaaaaacgccgaggacatggaggtccgatggttcaggagtcaattcagccctgccgtgtttgtgtacaaaggggggcgggagcgtacagaagaacaaatggaggagtacaggggcaggactacctttgtttctaaagatatatcacgagggtccgtggctctggtcatccacaacattaccgcgcaggagaacgggacctatcgatgctacttccaggaggggagaagctatgacgaggcgatcctccacctagtcgtggctgggcttgggtcgaaacctctaatctcaatgcgcggccacgaggatggtgggattcgtcttgaatgcatatcgcgcgggtggtaccccaagccactgacggtgtggcgggacccttatggcggggtagcacccgccctgaaggaggtgtccatgccagacgctgatggcctcttcatggtgacaacggccgtcatcatacgggataaaagcgtgcgcaacatgtcctgcagcattaacaacactctgctcggccaaaaaaaggagtctgttatctttataccggagagttttatgccgtccgtgagccctccgatcgccgtgtgcatttactggataaacaaactccaaaaggagaaaaaaatcctgtcaggcgagaaagaatttgaaagagagacccgtgagatagctttaaaggaactggaaaaagagagagtgcagaaggaagaagagcttcaggtgaaagagaagctgcaggaagaacttagatggcgtagaacctttttacacgccgtcgacgtagtgctggacccggataccgctcaccccgatttgtttctctctgaagaccggcgaagtgtcaggcgctgtcctttcaggcaccttggtgaatcagtgccagataacccagagagatttgacagccagccttgcgtcctggggcgagagtcattcgcttccgggaagcattattgggaagtcgaagtggaaaatgtgatagagtggaccgtcggcgtttgtagagacagcgtggagaggaaaggcgaggttctgctgatccctcagaatgggttttggacactggagatgcacaaagggcagtatagggctgtttcttcacccgaccgcattctaccccttaaagagtcactgtgccgtgttggggtatttctcgattatgaagcaggggacgtgagtttttataatatgcgagacagatcccatatctacacttgtccacgttctgccttcagcggacccgacacttctcagtccggggacccccctgaacccattgagagtatcccatggagtcattctcatgttgataagccttggagttctcaacagccaccccacaatactcacctccccgcagctagtttcacccctacgactgatttgtcacctagttttttactgctcacaaggctgtgtttttag

SEQ ID NO: 110108 - DNA, 1584 bp, synthetic construct
  misc_feature 1..1584: note = Description of Artificial Sequence: Synthetic coding sequence
  source 1..1584: mol_type = other DNA
atggagtctgctgctgctctgcacttttcgcgccctgctagtcttttactgcttttgctgagcctttgcgccctcgtatcagcccaattcattgtcgtcggccccaccgatcctatccttgcgacagtgggcgagaatacgacattgagatgtcacctcagccctgagaaaaacgctgaagatatggaggtacgctggtttaggagccagttctccccggcagtctttgtctacaagggaggaagggaacggacggaggaacagatggaagaatatcgaggaagaaccacctttgtaagcaaggatatcagtagagggtcggtagctcttgtaatccacaacattaccgctcaggagaacggcacgtatagatgctactttcaagaaggccgaagttacgacgaagcaatcctgcatctggttgtagcgggactgggcagcaaacccctcatcagtatgagaggccatgaggacggcgggattcgactagaatgtatcagccgcgggtggtatcctaagcctcttactgtctggcgggatccctacgggggagtggcacccgcgctgaaagaggtgtctatgccagacgctgatggcctgttcatggtaacgaccgcggttatcataagagacaagtctgttaggaatatgagttgtagcatcaacaacacgctgttaggtcagaagaaggaaagcgtcatctttattcctgagagctttatgcctagtgtatccccctgcgccgtggccttaccgatcatagtcgtcatactgatgataccaattgctgtatgcatttattggataaacaaactacagaaggaaaaaaagattctgtctggggagaaagagtttgagagggagactagagaaattgctttaaaagagttggagaaggaacgcgtgcagaaggaagaggagcttcaggtcaaggagaaactgcaagaggaattaagatggaggaggacctttctgcacgctgtggacgtggtgttggacccagatactgctcaccccgacctctttcttagtgaagaccgtcggtccgtcaggaggtgccctttcagacacctgggcgaaagtgtgccagataacccggagaggttcgattcccagccctgtgtgctaggcagagaatcctttgcaagcggcaaacactattgggaagtcgaggttgaaaatgtgatcgagtggaccgttggcgtctgtagagatagcgtggagcgtaagggcgaagttctgctcatcccgcaaaacggattctggacactggagatgcataagggacagtacagggctgtgtcatcacccgatcgaatcctcccccttaaggagagcctctgccgggtcggggtctttctcgattatgaggcgggagacgtgtccttctacaacatgcgagatcggtcccatatctatacctgcccaagatcagccttcagcgtgccggttaggcccttttttaggcttggctgtgaggattctcccatttttatctgtccagcactaacaggagccaatggggtcaccgtccctgaggagggcctgaccctgcacagagtcggcacccatcagagcctgtag

SEQ ID NO: 110109 - DNA, 1005 bp, synthetic construct
  misc_feature 1..1005: note = Description of Artificial Sequence: Synthetic coding sequence
  source 1..1005: mol_type = other DNA
atggagtcagcagccgctctgcatttttcaagaccggcctctcttcttttgctactgttgtcattgtgtgccctcgtttcagcacagtttattgtggtgggcccaacagatccaatccttgctaccgtgggagagaataccactctacgctgccacctgtcccctgaaaagaacgctgaggacatggaagtgcggtggtttcgaagtcagttttcccccgctgtctttgtttacaaggggggaagggagcggaccgaggagcagatggaggagtaccgtggaaggacaacattcgtctcaaaggatattagtcggggttccgtcgctttggttatacataatatcaccgcgcaggagaatgggacctaccggtgctacttccaagagggacggagctatgacgaggcaattctccacctggtggtcgccggactgggctcaaaaccactgatttcgatgagggggcacgaggatggaggcatcaggctggagtgcatcagccggggctggtacccaaaaccattgaccgtatggcgcgacccttacgggggcgtggcccccgccctgaaggaggtgtccatgccggatgcagacggtctcttcatggttactactgccgtgatcatcagggacaaatcagttcgtaacatgtcttgttctatcaacaatactttgttgggccaaaagaaggagtcagtgatctttatacctgaatctttcatgcccagcgtgtctccatgcgccgtggcactccccataattgtggtaatcttaatgattcctattgcagtttgcatctactggattaataaactgcaaaaggaaaagaaaatcctgtcaggcgaaaaagagttcgagcgcgagacacgtgagattgccctgaaggagctcgaaaaggagcgagttcagaaggaggaggagctgcaggtcaaggagaagctacaagaggagttacgatggaggcgcacctttcttcacgccgaacttcagttctttagtaattag

SEQ ID NO: 110110 - DNA, 993 bp, synthetic construct
  misc_feature 1..993: note = Description of Artificial Sequence: Synthetic coding sequence
  source 1..993: mol_type = other DNA
atggagtctgccgctgcacttcacttttctcggcccgcttccctcctgctgttgttgctttcactctgcgcactcgtatcagcacagttcattgtcgtgggtccaactgaccccatcctggcgaccgttggggaaaacaccacactcaggtgccatcttagccctgaaaaaaacgccgaggatatggaggtccgctggtttaggagccagttcagtcccgcagtgttcgtttataagggagggagggaaaggaccgaagaacagatggaggaatatagggggcgaacaactttcgtctcaaaagatatctccaggggctctgtggcactcgttattcacaacatcacagcccaggaaaatggcacctacaggtgttatttccaggagggccggtcctacgacgaggcaatcctgcacttggtagtcgcaggacttggctctaagcccctgatctccatgcgagggcatgaggacggcggaatccggcttgagtgcatttctcggggatggtatcccaagcccttaacagtgtggcgggacccctatggcggggtggcccccgccctgaaggaggtcagcatgcccgatgcagatggtttgtttatggtaacaaccgctgtgataattagggataaatcagtgcgaaacatgagctgttcaatcaacaataccctgctgggacagaaaaaggaaagtgtcatcttcatcccagagagtttcatgccctcagtatcgccttgtgccgttgcattacccattatcgttgttattctaatgattccaatcgcagtttgcatatattggatcaataaattacagaaggagaaaaagattttgagcggtgaaaaagagtttgagcgagagacaagagagattgccctgaaagagctggaaaaagaacgtgtgcagaaggaagaggaactgcaagtgaaggaaaaactacaagaggagctccgatggcgccggactttcctgcacgccggcccggtgtag

SEQ ID NO: 110111 - DNA, 1401 bp, synthetic construct
  misc_feature 1..1401: note = Description of Artificial Sequence: Synthetic coding sequence
  source 1..1401: mol_type = other DNA
atggaagtgcggtggttccggtcgcagttctctccagcagtgttcgtgtataaagggggacgcgagagaaccgaagagcagatggaggaatacagggggcgcaccaccttcgttagcaaggatatttccagggggtctgtggccctggtcatccacaatataacagcacaggagaatggcacgtatcgctgttatttccaggaaggccgatcttacgatgaagccatcctccatctagttgtcgccggtcttgggtctaagccccttattagcatgagagggcatgaggacggagggattcggttggaatgtatttcacgcggctggtaccccaagcctctgaccgtctggagagacccttacgggggtgtagcacctgccctgaaagaagtgagtatgcctgatgctgacgggctgtttatggtgacaaccgccgtcatcatccgtgacaaatcagtacggaacatgtcgtgctccataaataatacgcttttaggccagaaaaaggagagtgtcatatttatacctgaaagctttatgccaagcgttagtccatgtgccgtggcattgccaatcattgtcgtgatcctgatgattccaatagctgtttgtatctactggattaacaaacttcagaaggagaagaagatactatctggggagaaggaattcgaacgcgagacgagagaaatcgctttgaaggagctcgagaaagagcgcgtgcagaaggaggaggaacttcaggttaaggagaaacttcaggaggagttgcggtggaggcgtactttcctgcatgccgtagacgtagtgctagatcccgatactgcccacccagatctgttcctatctgaagacagaaggagcgttcgacgctgtccattccgccatctgggagaaagtgtgcctgataacccagagcggtttgatagccagccttgtgtcctcggccgtgagagttttgcaagcgggaagcattactgggaggtcgaagttgaaaatgtcatcgagtggacggtgggcgtttgcagagattctgttgaacgcaagggagaagttctgcttatccctcaaaatggcttctggacactagagatgcataagggccagtatcgagcagtgagctcacccgacaggatcctccctctgaaggaaagcctatgtcgggtaggcgtcttcttggactacgaagctggcgatgtttccttctacaacatgcgcgatagaagtcacatctacacttgtcctcgcagtgcttttagcgtgccggtgcggccctttttccggttgggatgcgaggactcacctattttcatctgcccagccctcactggggccaatggggtcactgtccccgaggaaggactcaccctacatagagtgggcacccaccagagtttgtag

SEQ ID NO: 110112 - DNA, 1224 bp, synthetic construct
  misc_feature 1..1224: note = Description of Artificial Sequence: Synthetic coding sequence
  source 1..1224: mol_type = other DNA
atggaacctgccgccgctctccacttctctttaccagcgagtctgctcctgctgttgttgctgctcctgctgtctttgtgcgccctggtctctggcctcggcagcaagcctctcatcgagatcaaagctcaggaagacggtagcatttggctggaatgtatcagcggaggctggtacccagagcctctgaccgtgtggagggacccatacggggaagtcgttccagcactgaaggaggtctccattgccgatgccgacggactgtttatggtgacaacggctgtgattattcgagataaatacgttcggaatgtgtcgtgcagcgtgaacaacacgcttctgggccaggagaaggagactgtgatatttatccccgagtcgtttatgccctcagcatcaccatggatggtagcactggctgtcatcctgacagcatctccctggatggtctctatgactgttatccttgccgtttttatcatcttcatggcggtttcaatttgctgtattaagaagcttcagagggagaagaagattctgagtggcgaaaagaaagtcgaacaggaggaaaaggaaatagctcagcaactgcaagaagaactgcgctggaggcgaacctttctccacgctgccgacgtggtccttgacccagacacggctcaccccgaattgttcttgagcgaggaccggagatccgtgcggaggggcccctaccgccagagggtccccgataatcccgaacggttcgactcccagccctgtgtcctgggatgggaatcctttgctagcggcaaacactactgggaggttgaagtggagaatgtcatggtgtggaccgtgggggtgtgccgtcattctgtagagcggaagggcgaggtgctcctgatcccacagaacggcttctggacccttgagatgttcggcaaccagtaccgggccctaagctcccccgaaagaattcttccactgaaggagtccctatgcagggtgggggtcttcctggactatgaagccggggatgtatccttctacaatatgcgggacaggtcccatatctacacctgcccacggtccgccttcacagtccccgtcaggccgttctttaggctcggtagcgacgactcacccatctttatttgccccgccctcactggtgcaagcggggtgatggttccggaagaaggactgaagttacatagagtgggcactcaccagtctttatag

SEQ ID NO: 110113 - DNA, 1572 bp, synthetic construct
  misc_feature 1..1572: note = Description of Artificial Sequence: Synthetic coding sequence
  source 1..1572: mol_type = other DNA
atggagcccgccgccgcactgcacttctctctgcccgccagtttgctactactcttgctcctgctgctcctctccctttgcgctttggttagtgcgcagttcactgtcgtaggacctgccaatcccattctggccatggtaggggagaataccacactgcgatgccacctatcgcccgaaaagaatgctgaggatatggaagtgagatggttcagaagccagtttagtcccgctgttttcgtctacaagggaggtcgagaacgcactgaggaacagatggaagagtacagagggcgcatcacttttgttagtaaggatatcaatcgcgggtctgtggccctcgtgatccacaatgtcactgctcaagagaatggcatttacagatgctacttccaggagggccgatcctatgatgaggcgatcctaaggttagtggtggccggcctggggtctaaacccctcatcgagattaaggctcaagaagacggttccatctggctggagtgcattagcggcggctggtaccccgaacccctgactgtgtggcgcgacccatacggggaggttgtacctgcgctgaaagaggtgagcattgcggatgccgatgggctctttatggtgaccaccgccgtgattatacgcgataaatatgtgcgaaacgtgagctgctccgtgaataatacactcctaggtcaggaaaaggaaactgtgatcttcatccccgaaagttttatgcctagcgctagtccgtggatggtcgccctcgccgtcatcctgaccgcgagcccgtggatggtgtccatgacagtgatccttgccgtatttattatatttatggccgtgtccatctgttgtatcaaaaagctccagagggaaaaaaagatcctctccggagagaagaaggtcgaacaggaagaaaaagaaattgcacagcagctccaggaagaactgcggtggcggagaaccttcctgcacgctgctgacgtggtccttgatcccgacactgcgcatcctgagctttttctgtcagaggaccggcgttccgttcgccggggaccttaccgccagagggtcccagataaccccgaacggttcgactcccagccttgtgtcctgggctgggaatcattcgcatctggcaaacactattgggaagtcgaagtagagaacgtcatggtgtggaccgttggggtgtgccgtcacagtgtcgagcggaagggcgaggtactgctcatcccccaaaatggattttggactctggaaatgttcggtaaccaatacagggcactgtcaagtcctgaaaggattctgccattgaaggagtcactgtgccgcgttggggtattcctggactacgaggctggagacgtctctttttataacatgagggaccggtcccatatctatacatgtcctagatctgccttcaccgtgccagttagaccattcttcaggcttggatccgacgattcacctatctttatttgtcccgctctgaccggagcgtcaggagtaatggttcccgaagaggggctgaagctgcacagggtcggcacacatcagagcctgtag

SEQ ID NO: 110114 - DNA, 1572 bp, synthetic construct
  misc_feature 1..1572: note = Description of Artificial Sequence: Synthetic coding sequence
  source 1..1572: mol_type = other DNA
atggagccagctgctgccctgcacttctctttgccagctagcctactactgttactgctcctactcttgctatccctctgcgctttagtgtccgcccagttcaccgtggtcggaccagcaaatcccattcttgctatggttggcgaaaatacaacgttgcgatgtcatctgtctcccgaaaaaaacgcagaagatatggaagttcgctggttccgtagccagtttagtccagccgtcttcgtgtataaaggtggaagggagcgtacagaggagcagatggaggagtatcgaggccgcattaccttcgtcagcaaagatatcaaccgagggtcggtggccctggtgatccataacgtgacagcccaggagaatggaatctaccgctgctatttccaggaagggagaagctatgatgaagcaatactgcgtctggtagtggccggactcggtagcaaaccattgatagaaatcaaagctcaagaggacggcagtatctggttagagtgcatcagcggaggctggtacccggagcctctgacagtatggcgtgatccatatggcgaggtcgttcccgctctgaaggaggtgtcaattgctgacgccgacggtcttttcatggtgactaccgccgtgatcatacgggataagtatgtcagaaatgttagttgtagcgtgaacaacactctgctgggtcaggaaaaggagactgtcatctttatccccgagtcctttatgccttccgccagcccgtggatggtggcactggctgtgattttgacagcatcaccctggatggtgtcgatgacggtaattctggccgtgtttattatcttcatggcagtatctatatgctgcattaagaagctgcagagggagaaaaaaattctgtccggggaaaagaaagtcgagcaggaagagaaagaaattgcacagcaactgcaggaagagctgcgctggcgtagaaccttcctgcatgctgctgatgttgttctggatcctgatacagctcaccctgagttattcctttctgaggaccggagatcagtgcgtcggggcccataccggcaacgggttcctgataatcccgagagatttgactctcagccctgtgttcttgggtgggaatcgttcgcaagtggtaagcattattgggaggtagaggttgagaatgttatggtttggaccgtgggcgtgtgtagacactctgttgagcgaaagggcgaagtgctcctcatcccacagaatggtttttggaccctggaaatgttcggcaatcagtaccgcgccttgtcgtctccagagagaatccttcctctgaaagaaagtctgtgtagagtcggggtcttcctggattatgaagccggcgacgtgagtttctacaatatgcgtgatcggagtcacatttatacatgtcctagaagcgcctttactgtccccgtgagaccattctttagactgggcagtgatgatagtcccatctttatatgccctgcactgacaggagcctccggtgtcatggttcctgaagaaggcctcaagctgcacagagttggcacacatcagagcctgtag

SEQ ID NO: 110115 - DNA, 1011 bp, synthetic construct
  misc_feature 1..1011: note = Description of Artificial Sequence: Synthetic coding sequence
  source 1..1011: mol_type = other DNA
atggaacctgcggccgcgctgcactttagtcttcctgcgtccttgctgctgctgctgctgctcctcctcttgtctttgtgcgcactcgtgtcggcccagtttacggtagtggggcccgcgaacccaattctagctatggtgggagaaaacacaaccttgcgttgtcatttaagccctgaaaaaaacgcagaggatatggaagtgcgctggtttcggagtcagttttccccagccgtatttgtctacaagggggggcgggagaggaccgaggagcagatggaagaatatagagggcgcatcacgttcgtgtctaaggacatcaataggggtagtgttgccctggtgatccataacgtgacagcacaggaaaatggcatctaccgatgctatttccaagaaggtagaagctatgatgaggccattttgcgcttggttgtcgctggcctcgggagcaaaccactgattgagatcaaggctcaggaggatggcagcatttggctggagtgtatatccgggggatggtacccagagccactgaccgtctggagagacccttatggggaagtggtgccagcacttaaagaagtgtctatcgctgacgcagatggcttgttcatggtgacaacagctgtgatcatccgggacaaatatgttagaaacgtgtcatgttcagtcaataacacactgctgggccaggagaaggaaaccgttattttcattcccgagtcctttatgccatctgcaagcccctggatggttgccctggcagtgattttgaccgcgtccccctggatggtctccatgacagttattctggccgtttttattattttcatggctgtgtccatctgctgcattaagaagctgcagcgagaaaagaaaattctgtccggcgagaagaaagtggaacaagaggagaaggaaatcgcccaacagttacaggaagagttacggtggcggaggaccttcctgcatgccgatgttaacctcaccggcctgcgcaacacctag

SEQ ID NO: 110116 - DNA, 333 bp, synthetic construct
  misc_feature 1..333: note = Description of Artificial Sequence: Synthetic coding sequence
  source 1..333: mol_type = other DNA
atggagcctgcggcagccctgcatttctccctgccagcatctctcctcctcctcctcctgctcctgctcctgtctttgtgcgccctggtgtccggtctgggctctaagccactgatagagatcaaggcccaggaagatggttcaatctggctggaatgcattagtggtggatggtaccctgaaccgctgaccgtttggagagacccttacggagaagttgtacctgctctcaaggaagttagcatagcagatgcagatgggcttttcatggttactactgctgtgatcatacgggataagtatgtccgcaatgtgagctgctcagtaaactag

SEQ ID NO: 110117 - DNA, 555 bp, synthetic construct
  misc_feature 1..555: note = Description of Artificial Sequence: Synthetic coding sequence
  source 1..555: mol_type = other DNA
atggaacccgccgccgcactacattttagcctccccgctagtctgctgctgctcctacttttgctgctgctctccctgtgtgcactggtttcagggctgggctctaaacctctcatcgagattaaagctcaggaggatggctctatctggttggaatgtatttccggtggatggtaccccgaacctctcactgtgtggagggacccctacggagaagtagtgccagctcttaaggaagttagtatcgctgacgcagatggccttttcatggtgacaactgctgtgatcattagagacaagtacgtacggaacgtttcttgtagcgtgaataataccttacttggacaggagaaagagactgttatttttatccctgagtcattcatgccttctgcttctccttggatggtcgccctcgctgttatcttgacggccagcccctggatggtttctatgacagttatactcgcagtgttcattatatttatggcggtgagcatttgttgtatcaaaaagcttcaacgggaaaaaaaaattctgtctggggagaagtag

SEQ ID NO: 110118 - DNA, 720 bp, synthetic construct
  misc_feature 1..720: note = Description of Artificial Sequence: Synthetic coding sequence
  source 1..720: mol_type = other DNA
atggaacccgccgccgcactccatttttccctgcccgccagcctccttcttttgcttctcctgttgctgctcagtctttgcgccttagtgtcagcccaatttactgtcgtgggtcctgccaatccgatcctcgctatggttggtgagaatactactctccggtgccacttaagccctgagaagaatgcagaggatatggaggttaggtggtttcgctctcaattcagccccgcggtgtttgtgtataagggcggcagagagagaacagaggaacagatggaagaatatagaggccgaattacatttgttagcaaggacatcaaccgggggagcgtggccctggtaatccataatgtcaccgcccaggaaaacgggatttaccggtgctacttccaggagggaaggagttacgatgaagccattctccgactagtagttgcaggactaggttcgaagcccctaatcgaaatcaaggctcaggaggacggatcgatctggctggaatgcatttcgggtggctggtatcccgagcccttaacagtgtggcgcgatccatatggggaagttgttcccgcgttgaaagaagtgtcaattgctgacgccgatggcctcttcatggtgactacagcggtcatcattcgagataagtatgtaaggaacgttagttgcagcgtgaataatacgctgctaggacaggaaaaagagaccgtgatcttttag

SEQ ID NO: 110119 - DNA, 291 bp, synthetic construct
  misc_feature 1..291: note = Description of Artificial Sequence: Synthetic coding sequence
  source 1..291: mol_type = other DNA
atggagcccgccgccgccctgcacttcagccttcccgccagcctcctgttgctgctgctattgcttctgctctctctgtgcgctctggtttcagcccagttcactgtggttgggcccgccaatcctattctagccatggttggtgaaaatacaacactgcgctgtcatttgtctccagagaagaatgccgaagatatggaagtccggtggtttaggagccagtttagcccggccgtctttgtgtacaagggaggacgggagcgtacagaggaacagatggaggaatattag

SEQ ID NO: 110120 - DNA, 1542 bp, synthetic construct
  misc_feature 1..1542: note = Description of Artificial Sequence: Synthetic coding sequence
  source 1..1542: mol_type = other DNA
atgaaaatggcctcctttttggcatttcttcttctgaacttccgcgtgtgcctcctgctgctccaattgctgatgccccatagcgcccagttcagcgtactgggaccatcaggcccaatccttgcaatggtgggggaggatgccgacctaccctgccacctgtttcccactatgtcagcagaaaccatggagctgaaatgggtctccagttctctgcgccaagtggtgaacgtctatgctgacggtaaagaggtggaggacaggcaaagcgccccatacagagggcgcacctctatactgagggatggcataaccgcaggaaaggctgctctgcggattcataatgtgacagctagtgactctggtaaatatctctgttatttccaggatggggacttctatgagaaggccctcgtagaacttaaggtggctgccctgggcagcgacctgcacgtcgatgtaaagggttataaagatggtggtatacacctcgagtgccgaagcacaggctggtaccctcagccacagattcagtggtccaataacaagggggaaaacatcccaaccgtcgaagcgcctgtagtggccgacggcgtggggctctatgccgtcgctgcctccgtgatcatgagaggaagcagtggtgagggtgtgtcatgtaccattcggtcctcgctcttaggactggagaaaaccgcctctatttctattgccgacccattcttccgcagtgctcagcggtggattgccgccctggccgggacactccctgtgctgctcctcctcttaggaggcgcgggctatttcctgtggcaacagcaggaggagaagaaaacgcagtttaggaaaaagaagagggagcaagagctccgggagatggcttggtcaaccatgaaacaggaacaaagtacacgagtaaagttgctggaagagctgaggtggagatcaatccagtacgctagtcgaggcgaaaggcacagcgcctacaacgagtggaaaaaggctctgttcaaaccagccgacgtgattttagatccgaagactgccaaccccattcttctggtcagcgaggatcagaggtctgtgcaaagagccaaagaaccccaggatttgcccgacaatcccgaacgcttcaattggcactactgtgtcctcggttgcgaaagttttatatccgggcgacattattgggaagtcgaggtcggcgaccgtaaggaatggcatattggtgtgtgttcaaaaaacgtccagcggaaagggtgggtgaagatgaccccggagaacggattttggactatgggtctaaccgatggtaataaatatagaacactcacggaacctcgcactaacctcaagttaccaaaacctcccaagaaggtaggagtcttcctggactacgagaccggagatatttctttttacaacgccgtggatggatcccacatccatactttcctcgatgtgtctttttcagaagctctttatccggtgtttcggattctcaccctggagcccactgctctgactatctgcccggcttag

SEQ ID NO: 110121 - DNA, 1386 bp, synthetic construct
  misc_feature 1..1386: note = Description of Artificial Sequence: Synthetic coding sequence
  source 1..1386: mol_type = other DNA
atgaagatggcatcgtttcttgctttccttttgctcaatttcagggtgtgtttgttactcctgcagctgctgatgccccacagtgcgcagttttctgttcttggaccgtctggccccattcttgccatggtgggggaggacgccgatctcccttgccatttattcccaactatgagcgccgagaccatggaactgaaatgggtctccagcagcttacggcaggtcgttaacgtttacgccgacgggaaggaggtggaggacagacagagtgccccatatcgcggtagaaccagtatcctgagagatgggattacagcagggaaggcggctcttcgaatccacaacgtgactgcttccgatagcggcaaatacctgtgctatttccaggacggagacttttacgaaaaggcgctggtggagctgaaagtggctgacggggttgggctttacgcagtagcagctagcgtgatcatgaggggaagtagcggggagggtgtgtcatgcacaatcaggagctctttgttaggccttgaaaagaccgcctctatctccatcgccgacccattctttcgcagcgcccagcgctggatagcagctcttgcaggcactctgcccgtgctattactgctgctcggcggtgctggatatttcctatggcagcaacaggaagagaagaaaacgcagtttcgtaagaagaagagggagcaggaactaagggagatggcttggagtacgatgaagcaggaacagtcaacacgcgtgaaactcctggaagagctgaggtggagatcaatccagtacgcgtccaggggcgaacggcatagcgcttacaatgagtggaaaaaggctctgtttaagccagccgatgtcatactcgaccccaaaactgccaaccctatcctgttagtgtccgaggaccagcgctccgtgcaacgggcaaaagaaccccaagatttgcctgacaaccccgagcgttttaattggcactattgtgtgttgggctgtgagtcctttatttccggcaggcattactgggaggtcgaggtcggcgaccggaaagaatggcacatcggggtttgcagtaaaaacgttcaacggaaaggatgggtgaagatgactcccgaaaacggattctggaccatgggcctgacagacggcaataaataccgcacgcttactgagccaaggactaatctgaagctgcctaagcctccgaagaaggtgggtgtcttcctcgattacgagaccggagatatttccttttacaatgctgtagacggcagccatatccacacctttcttgatgtcagtttcagtgaggccctctacccggtttttcgcatacttaccctggagcccacagctctgactatatgcccagcatag

SEQ ID NO: 110122 - DNA, 1137 bp, synthetic construct
  misc_feature 1..1137: note = Description of Artificial Sequence: Synthetic coding sequence
  source 1..1137: mol_type = other DNA
atgaagatggcgtcctttctggcgttcctgctcctgaattttagggtatgtttgctgttgttgcaacttctgatgcctcactctgcccaattctccgttctcggccccagcggacccatcttagccatggtaggtgaggacgccgatctcccctgccatctctttcccacaatgtccgctgagaccatggaactgaaatgggtaagctcttccttgcggcaggtagttaacgtctacgccgacgggaaggaagtagaggaccggcaaagcgcaccttatagaggacggacaagcatcctcagggacggcatcacagcaggcaaggcagccttacgcatccataacgtaactgccagcgactctggtaagtacctatgttatttccaggacggagatttttatgaaaaggccctggtcgagctgaaggtcgcggctctaggaagcgacctgcatgtggacgtgaaggggtacaaggacgggggcattcatcttgaatgcagatctaccgggtggtacccgcagcctcaaatacagtggagcaataataagggcgagaatattccgaccgtggaagcaccggtggtggccgatggtgttgggttgtacgcggtggccgcatccgtcattatgcggggctcgagtggcgagggggtgtcctgcacaatccggagctcactgcttgggctggagaaaacggcctcgatttcgatcgcagatccatttttcagaagcgctcagcggtggatagctgccctggctgggacgcttccggttcttctactgttgctgggcggagcggggtatttcctttggcaacagcaggaggagaaaaagactcagttccgcaaaaaaaagcgtgaacaggaacttcgggagatggcttggagcaccatgaagcaggaacaatccacccgcgtgaagctgctcgaggaacttcgctggcgaagcatccaatatgcctcgcggggtgaacgccatagcgcctataacgagtggaagaaagcattgtttaagccggggcctcctataggccaaactcaacaacagacgcgcggccagggatcccccgtcgccctgagccaggagtctgcacaacgcaccgactcttggggcccggaggaaggtggggagtcttag

SEQ ID NO: 110123 - DNA, 132 bp, synthetic construct
  misc_feature 1..132: note = Description of Artificial Sequence: Synthetic coding sequence
  source 1..132: mol_type = other DNA
atgaaaatggcttcttttcttgctttcctcctgcttaatttccgggtttgtctgctgctgctgcaactcctgatgccacacagcgcccagttctcagtgctgggaccatcaggtccaatcctggccatgtag

SEQ ID NO: 110124 - DNA, 360 bp, synthetic construct
  misc_feature 1..360: note = Description of Artificial Sequence: Synthetic coding sequence
  source 1..360: mol_type = other DNA
atgaaaatggccagcttcctagcatttctcctgcttaacttccgcgtgtgcctgctgctgctccagctgctgatgccccactctgcccagttcagtgtgctcggaccctcaggccctattttggctatggtcggggaagacgccgatctgccatgccacctcttccccaccatgagcgctgagacaatggaactgaagtgggtcagctcctctttgaggcaggttgtgaatgtatatgccgatggaaaggaggtggaagaccggcagtcagcgccatacagaggacggacctcaatattaagggacgggattacagccgggaaagccgccctgagaattcataacgtgaccgccagctag

SEQ ID NO: 110125 - DNA, 1059 bp, synthetic construct
  misc_feature 1..1059: note = Description of Artificial Sequence: Synthetic coding sequence
  source 1..1059: mol_type = other DNA
atgaagatggctagtttccttgcctttctcctgttaaatttccgtgtgtgcctgttgctcttgcagttactgatgccgcactccgcacagttctctgtcctgggtcccagcggcccgattcttgctatggttggagaagatgccgaccttccctgccatctgtttcctactatgtcagccgagacaatggaactcaagtgggtgtcttccagcctgcgccaagtagtcaatgtttatgccgatgggaaggaggtcgaggacaggcaaagcgctccctaccgcggcaggacatcgattcttagagacggcataaccgccggcaaagccgccctaaggatccacaacgttacggcatccgacagcggcaagtacctctgctactttcaggatggcgacttctatgagaaggccttggtcgagcttaaagtggccgctttagggtctgacctccacgttgacgtcaaaggctacaaggatggcggaattcacctcgaatgcaggtctaccggatggtatccacagccccaaatccaatggtcaaataacaagggggagaacatccccactgtcgaagccccagtagtggccgacggagtcggactctatgcagtggccgcctccgtcataatgaggggaagttctggcgaaggggtgtcgtgcactattcgttccagccttttaggcttggaaaagacagccagtatttctatcgcagatcccttttttcgttctgcccaacggtggatcgccgcccttgcaggcaccctacccgtgcttctgttgctcttaggaggcgcagggtacttcctctggcagcagcaagaggagaaaaagacccagttccggaaaaagaaacgggagcaagagctcagggagatggcctggtctactatgaaacaagaacagtcaactagagtgaagctgctcgaagaactcaggtggcgctctattcaatatgctagtcggggcgaacgtcattctgcgtacaatgagtggaaaaaagctctttttaagcctggtgaggagatgctgcagatgcggctgcactttgtcaagtag

SEQ ID NO: 110126 - DNA, 279 bp, synthetic construct
  misc_feature 1..279: note = Description of Artificial Sequence: Synthetic coding sequence
  source 1..279: mol_type = other DNA
atgaaaatggctagcttcttagcattccttctcctgaattttagagtgtgcttactgctccttcagttactgatgccgcacagcgctcagtttagcgtgttaggaccctccggaccaatcctcgctatggtcggtgaagacgccgaccttccgtgccatcttttcccgaccatgtcggccgagaccatggagcttaagtgggtctcctcatcccttaggcaagttgtcaatgtttacgcagacggcaaggaggtggaagatcggcagagtgctccttag

SEQ ID NO: 110127 - DNA, 1005 bp, synthetic construct
  misc_feature 1..1005: note = Description of Artificial Sequence: Synthetic coding sequence
  source 1..1005: mol_type = other DNA
atgaaaatggccagcagcctcgccttcctcctgctgaattttcacgtgtcactgctgctggtgcagctgttaacaccatgctccgcccaattctccgttttgggtccatccgggcctatccttgccatggtcggtgaggacgctgatttgccatgtcacctgttcccaaccatgagcgctgaaaccatggagctgaaatgggtgtcgtcttcactgagacaagtagtgaatgtctacgccgacggcaaagaagtggaggatagacagtccgcaccctacagaggtcgaacatcaatattgagggacggcatcactgctggaaaggcagcacttcgaatccataacgtcaccgccagtgatagcggtaaatatttgtgttattttcaggatggcgatttctatgaaaaagcactggtcgagctcaaggtagctgctttgggctccaatctgcatgtcgaggtcaaaggctacgaagacgggggcattcatttagagtgtcgctcgactggctggtacccccagccccaaatccagtggtcaaacgctaaaggtgagaacattcccgcggtggaagcccctgtggtggcggacggagttggattgtatgaggtggctgcttctgtcatcatgagagggggtagcggagagggcgtatcctgcatcatcaggaacagcctcctgggactggagaaaaccgccagtatttctattgccgaccctttctttagaagcgcccagccttggatcgccgccctggctgggacgctcccaattctgctgcttttattggccggcgcttcttacttcctgtggcgacaacagaaggagataacagccctgtccagcgaaattgagtccgagcaggaaatgaaggaaatggggtacgctgctacagagcgtgaaattagtctgagggagtccctccaggaggaacttaaacggaagaaaattcagtatctaacaaggggagaggagagtagcagtgataccaacaaaagcgcctag

SEQ ID NO: 110128 - DNA, 1005 bp, synthetic construct
  misc_feature 1..1005: note = Description of Artificial Sequence: Synthetic coding sequence
  source 1..1005: mol_type = other DNA
atgaaaatggcatcctccctggcgtttttacttttgaactttcatgtgagcttactcctggtgcagctacttacgccttgcagtgcacaatttagtgtgctggggccaagcggcccaattctcgcgatggtgggcgaagatgccgacttgccatgtcacctttttcccacgatgagtgctgagaccatggagcttaagtgggtgtcatctagtctccggcaggtagttaacgtttacgcggacggaaaagaagtggaggaccggcagtctgcgccttatcgcgggcgaactagcattctgagagacggaataaccgcaggcaaagcagcacttcgcatccacaacgtgacagcttcagacagcggtaagtatctgtgctattttcaagacggggacttttacgagaaagctttggttgagctgaaagtggcagcactgggatcgaacttgcatgtcgaagtaaagggatacgaggatggtggaattcaccttgaatgcagaagcactggatggtacccccagccccagatccaatggtcaaatgcaaagggcgagaacatccccgctgtcgaggcgccagtggtggctgacggcgtgggtctgtatgaagtcgccgcgtccgttattatgaggggaggttcaggagagggcgtttcatgcatcattcgcaattctctgcttggattagaaaagacagccagcattagcattgccgacccattcttccgatccgctcagccatggatcgccgctcttgccgggactctaccgatcctgctgctgctgctcgcaggtgctagctatttcctgtggcgacagcaaaaggagatcaccgcattgagctcagaaattgaatctgaacaggagatgaaagagatgggctacgcagccactgaaagagagatatctcttcgggaaagcttgcaagaggagttaaagcgcaagaagatccagtacttgactcgcggagaggagtccagcagtgacaccaataagagtgcctag

SEQ ID NO: 110129 - DNA, 936 bp, synthetic construct
  misc_feature 1..936: note = Description of Artificial Sequence: Synthetic coding sequence
  source 1..936: mol_type = other DNA
atgggcatacctagggctcagttttccgttctgggcccaagcgggcccatccttgctatggtaggggaggatgccgacctcccctgccacttgttcccaaccatgagcgccgagaccatggagttaaaatgggtgagctctagccttagacaggtggtcaacgtctatgcagacggaaaggaggtggaagaccgccagtctgctccatatagagggcggacaagtatcttacgggacggcatcaccgcggggaaagccgccttgcggatccataacgtcactgccagcgattctggcaagtatctgtgttatttccaagatggcgatttttacgaaaaggcactagtggaactgaaagtagcagccctcggatccaacctgcatgtggaagtcaagggctacgaagatggcggaatccaccttgaatgccgttccactggctggtatccacaaccgcagattcagtggagtaatgctaaaggtgagaatattcctgccgtggaggctccagtagtggcagacggagtgggcctctatgaggtggcggccagcgtgattatgcgaggggggtcaggagaaggagtctcatgtatcataagaaatagccttctgggcctggagaagacggcctccatcagcatcgccgacccgttctttagatcagcccagccttggatcgccgcgctggccgggacgcttcccattctgctgctgcttctagccggcgcaagctacttcctatggcggcaacagaaagaaatcaccgctctgtcctcagagatcgaatctgaacaggagatgaaggagatgggatatgctgctaccgaaagggagattagcctgagggagagcctacaggaagaacttaagagaaaaaaaattcagtaccttacaaggggcgaagagagctcatcagatacgaacaaatccgcctag

SEQ ID NO: 110130 - DNA, 1005 bp, synthetic construct
  misc_feature 1..1005: note = Description of Artificial Sequence: Synthetic coding sequence
  source 1..1005: mol_type = other DNA
atgaaaatggcatcttcactggcgtttctactcttgaattttcatgtgtcactgctactcgtccagctcctgacaccttgcagcgcacagttctcggtgctgggacccagtggaccaattttagcaatggtaggagaggacgcggatcttccttgtcatctgttccctacaatgagtgctgaaactatggagctgaagtgggtgtcgtcttctcttaggcaggtggtgaacgtttatgccgacggtaaggaggtggaagacagacagagtgccccttatagggggcggacaagcattttgagagatggcattaccgccggaaaagcagccctgagaatccataatgtaacagcctcagattctggaaagtatctctgctatttccaagacggcgatttctacgaaaaagccctggtggagcttaaggtcgccgccctgggctctaacctccacgttgaagtcaagggctatgaggatggcgggattcatctggaatgccggtccacggggtggtatccccagccacagatccagtggtctaacgccaagggggagaatattcccgcagtcgaagcaccagtggtggccgacggggtgggcctttacgaagttgcagcatccgtgatcatgagagggggctccggcgagggagtctcatgtattatccgaaactctctgctcggactggagaagactgcttcaatttcgatcgccgacccgttctttcggtctgcacagccctggatcgctgccctagccgggacccttccaattctgctactgttgctggcgggagcgtcctattttctatggagacagcagaaggagattacagcactgagttctgagatcgaatccgagcaggagatgaaagagatgggatatgccgccactgaaagggaaatttccctcagggaatcccttcaggaagagctgaagcgcaagaaaatccagtatttgactcgcggtgaagaatcatcttccgacaccaataaatccgcatag

SEQ ID NO: 110131 - DNA, 879 bp, synthetic construct
  misc_feature 1..879: note = Description of Artificial Sequence: Synthetic coding sequence
  source 1..879: mol_type = other DNA
atggtgggggaggacgcagaccttccctgccacctcttcccaacgatgagcgcggaaaccatggaactgaaatgggtttcctctagtctccgccaggtggtaaacgtgtatgccgatgggaaagaggtggaagaccgccagtctgcaccttacagagggcggacctctattctgagagacggcattacagcagggaaagctgcgctgaggattcataacgtcacggctagtgactccggcaagtacctgtgttacttccaagacggcgacttttacgaaaaagcattggtggaattgaaggtcgcagccctgggctccaacctccatgtggaagttaagggttatgaggacggagggatccacctcgaatgtcggtccacaggctggtacccccagccacagattcagtggtccaacgcaaagggcgagaacattcctgctgttgaggccccagtggttgcggatggagtgggcctgtacgaagtcgccgcctcggtaattatgagggggggctcaggtgagggtgtttcatgcataattaggaactctcttttgggactagaaaagaccgcctctatatctattgcggaccccttcttcagatctgcacagccctggattgcagccttggccgggaccttgcccatcttgcttctgctgttagccggagcctcttattttctgtggagacagcagaaggagattactgcgctgtcgtctgagatcgagagtgaacaggaaatgaaggagatggggtacgctgctactgaacgagaaatctcactacgcgagagtctccaggaggaactgaaacgaaagaagatccagtacctgacacgcggggaggaatcgagttccgacactaataaatctgcatag

SEQ ID NO: 110132 - DNA, 1005 bp, synthetic construct
  misc_feature 1..1005: note = Description of Artificial Sequence: Synthetic coding sequence
  source 1..1005: mol_type = other DNA
atgaaaatggcctctagcctggccttcctcttgctgaatttccacgtgtcactcctgctggtacagctactgaccccttgcagcgctcagttttcggtgctgggcccttccggccctatcctggctatggtcggggaggatgctgacctcccctgtcacctctttccaacaatgtcggccgagaccatggagctgaagtgggtatcctcctctctgcgccaggtggtaaacgtctacgcggacggtaaagaggtcgaggaccggcagtcagctccttatcgggggcgtacaagtattctgcgggacggcataactgccggaaaagcagcactgcgcatccataatgttacagcaagcgacagcggcaagtacctatgttatttccaagatggggacttctatgagaaggctttggttgagctaaaggtggccgccttgggctctaatctgcatgttgaagtaaaaggttatgaggacggtgggattcacctcgaatgccggtcaacgggatggtacccgcagccccaaattcagtggtctaatgccaagggcgaaaatatccctgcggtagaggcaccagtagtggctgatggagtgggactctatgaagtcgccgcctccgtgatcatgcggggcgggtctggggagggtgtgagctgcatcatccggaactcactgctcggcttagaaaaaaccgccagcatttctatcgcggacccatttttcagatcagctcagccctggattgctgctctggcagggacactgccaattctgttgctgttgttggcgggggcatcctatttcctgtggagacaacagaaggagatcaccgcactatcttccgaaatcgaaagtgaacaggagatgaaagagatgggatacgccgcaaccgagagggagatatccctccgcgagtcattacaggaagagctcaaacggaaaaagatacagtatctgacaagaggcgaggaaagttcctctgatacaaacaaatctgcatag

SEQ ID NO: 110133 - DNA, 960 bp, synthetic construct
  misc_feature 1..960: note = Description of Artificial Sequence: Synthetic coding sequence
  source 1..960: mol_type = other DNA
atgaaaatggcaagtagcctcgcgttcttattactcaacttccacgtttccctgttgctggtgcagctgctgaccccctgcagcgcacaattctccgtcctcggaccatcaggacctatcctggcgatggtcggggaagacgccgatttgccttgtcatctcttcccaacaatgagcgcagagactatggagctcaagtgggtgtcgtcttcacttcggcaggttgtgaacgtgtacgccgacgggaaggaggtcgaggaccggcagtctgcaccttacagggggcgaacaagtatcttgcgggacggaatcacagccggcaaggccgctctgcgaattcacaatgtcaccgcatcagattccgggaaatacttatgctactttcaggacggagacttctatgaaaaggctttggtggaacttaaggtggctgcacttggaagcaacctacacgtagaggtgaaaggctatgaggacggcggcattcacctggaatgccggagcaccgggtggtaccctcagcctcagattcaatggtcaaacgccaagggagagaatatccccgcagtggaggctccagtcgtcgcagatggcgtgggattatacgaggttgcggcatctgtcattatgagagggggttccggtgaaggggtttcatgcattataagaaattccttgctgggactagagaaaaccgctagcatttccatcgctgaccccttctttagatccgcacagccatggatcgctgccctggctggtaccttgccaattctgctgcttctgctagccggggcttcttacttcttgtggcggcagcagaaggagatcacggccctttcttctgagatcgaatcagagcaagagatgaaagaaatgggctacgccgccacggaacgcgaaatttcgttgagggagtctctgcaggaggagctgaagcgaaaaaaatctagtacatag

SEQ ID NO: 110134 - DNA, 1755 bp, synthetic construct
  misc_feature 1..1755: note = Description of Artificial Sequence: Synthetic coding sequence
  source 1..1755: mol_type = other DNA
atgaagatggcgtcttctcttgcattcctgcttttgaatttccacgtgtcattatttctggtgcagctgctgacaccctgctctgcccagttcagcgtgttgggaccgtccggacctatccttgccatggtgggagaggacgctgatctgccttgtcaccttttcccaaccatgtccgccgaaactatggagctacgatgggtctctagcagtttgcgtcaagttgttaatgtgtacgcagatggaaaggaggtggaggatcgtcagagtgccccttatcgcggacggacctccattctgcgggacgggatcacagccggtaaggccgcactacggatccacaacgttaccgcctcggattccggtaagtatctgtgttatttccaggatggggacttttatgagaaggccctggtggagttaaaagtggccgccctggggagcgacctgcatattgaggtgaaaggatacgaggatggcggaatccacctcgaatgcagatcaactggatggtacccccagccacagatcaagtggagcgacaccaaaggtgagaacattcccgccgtggaagctcctgttgttgccgacggcgttgggttgtacgcagttgccgcaagcgtgattatgcggggttccagtggaggcggggtgtcctgtatcatcaggaactctctgctcggtttggagaagactgcttctatctcaatcgccgacccctttttccgatccgcccagccctggatcgctgccctcgccggtacccttcccatcagccttctgctgctcgccggcgcgtcatacttcctgtggagacagcagaaagagaaaattgccctgtctcgggagaccgagcgagagagggagatgaaagaaatgggttatgcagccaccgagcaggagataagcctgcgagagaagttgcaggaggaactgaagtggcgcaaaattcagtatatggcaagaggtgaaaagtccctcgcttaccacgagtggaaaatggccctgtttaaacctgcggatgttatcctggatcctgacaccgcaaatgcgattcttctggtgagcgaagatcagcgttctgtacaacgcgcggaggagcctagggatcttccagacaatccggagaggtttgagtggcggtactgcgtgctgggatgtgagaatttcacatcagggagacactattgggaggtcgaagtgggtgaccggaaggagtggcacattggcgtgtgttcgaagaacgttgagagaaagaaagggtgggtgaaaatgactccggagaatggctactggacaatgggcttgacggatggcaataaatatcgtgccctcaccgagcctcgaacaaatttaaagctaccagagccgccgcggaaagtgggtattttccttgattatgagactggtgaaattagtttttacaatgccactgacggtagtcacatctacacatttccccatgcctctttttcagaacctctctatcctgtatttcgcatcctgaccttagaaccgaccgcactgactatctgtcccataccaaaagaggtggagtccagccctgatcctgatttggtgccagatcattctctggaaacccccctgacccctggtctggcgaacgaatctggggaaccgcaagcagaggtaacctcccttctactgcccgcacatcccggagccgaggtgtctccctctgctacaactaatcagaaccataaactgcaagctcggacagaggccctctactag

SEQ ID NO: 110135 - DNA, 1629 bp, synthetic construct
  misc_feature 1..1629: note = Description of Artificial Sequence: Synthetic coding sequence
  source 1..1629: mol_type = other DNA
atggttggcgaggacgctgatcttccctgtcatctgttcccaaccatgtccgctgagaccatggagcttcgttgggtatcctcctcacttcggcaggtcgtgaatgtgtatgccgacggtaaggaagtggaagaccgacagagtgctccatatcgagggcgcacaagcatcctaagagacggtattacggcaggtaaagccgcactgagaattcataatgtgacagctagcgattcaggcaagtatctgtgttattttcaggatggggatttctacgaaaaggctctagttgagttgaaagtcgccgccctgggctcagacttgcacatagaggtcaaaggatatgaagatggcggaattcacttggagtgtcggagcactggctggtacccacagccacaaatcaagtggagcgataccaaaggcgaaaacatacctgcggttgaggcgcctgttgtggctgatggagtgggcctgtacgcggtagcagcctccgtgattatgcggggatcctctggagggggagtgtcatgtattatcagaaattccttactaggtctagaaaaaacggccagtatttccatagccgatcccttcttccggagcgcccaaccttggatcgccgctctagctggtacattgccaattagtcttctactgctggccggagcgtcctactttctctggaggcaacagaaggaaaaaatcgctctctccagggagacggagcgcgagcgggagatgaaagaaatggggtacgccgctacagaacaggagatctcactaagggagaagttacaagaagagctcaagtggcgcaagatccagtacatggcacgaggggaaaaatccttagcttatcatgagtggaagatggctctgttcaagcccgccgacgtgattctagatcccgacaccgccaacgcaatattactagtctccgaagaccagaggagcgtccagcgcgctgaggagccaagagatttgccagacaatccagaaaggttcgaatggcggtactgcgtcctcggatgcgaaaattttacatcagggaggcattactgggaggtcgaagtgggggatcgcaaggagtggcacataggggtctgctccaagaacgtcgagcgaaagaaaggatgggttaagatgacccctgaaaatggctactggacaatgggtttgactgacggtaataaatacagggccctgacagagcccaggacaaacttgaagctgcccgagcccccgcggaaggtgggaatcttcctggactatgagactggagagatctccttctacaatgccactgacggctcccacatctataccttcccccacgctagtttctccgagcccttataccctgtgttccggatcctgaccttagagccaaccgctttgacaatttgtccaataccaaaggaggtggagtcatccccagaccctgacctcgtgcccgaccacagtctcgagactccactaactcctgggctcgccaacgagtctggcgaacctcaagctgaggtaacaagtttactgttgccagcccatcctggggccgaagtctccccctctgccactacgaaccaaaatcataagctgcaggcacgtacagaagccctctattag

SEQ ID NO: 110136 - DNA, 417 bp, synthetic construct
  misc_feature 1..417: note = Description of Artificial Sequence: Synthetic coding sequence
  source 1..417: mol_type = other DNA
atgaaaatggccagcagcctcgcctttctgttactgaattttcatgtgagtctctttctggtccaactgcttaccccttgcagcgcgcagttcagtgtgcttgggccgtctggaccgatcctggctatggtcggcgaagatgctgacctgccttgccatctgtttcccacaatgagtgctgagacgatggaactgaggtgggtgtcttccagtctacggcaagttgtcaatgtctacgccgatggaaaagaggttgaggaccggcaaagcgccccctaccgcgggcgcaccagcatcctccgcgatggcatcacagccggaaaagctgcgctgcgcatccataacgtcacagcttccgattccgggaagtatctttgctatttccaggacggagacttttatgagaaggcactttag

SEQ ID NO: 110137 - DNA, 717 bp, synthetic construct
  misc_feature 1..717: note = Description of Artificial Sequence: Synthetic coding sequence
  source 1..717: mol_type = other DNA
atgaagatggccagctccctcgcgtttctgctgttgaatttccacgtgtcactgtttctcgttcagctactcactccctgttctgcccagtttagcgttctgggaccaagtggcccaattctggcaatggttggggaagacgccgacctgccttgccaccttttccccacaatgagcgctgagactatggaattgcggtgggtctcttctagtctgcgacaagttgtgaatgtgtacgctgatggaaaggaggtggaagacagacagtccgctccctaccgcggaaggacaagtatcctcagagatggtatcacagctggcaaggcagcattgcggatccacaacgtgaccgcatccgattcggggaagtatctttgctactttcaagacggggatttttacgagaaggctttagtcgagcttaaggtcgcagccttgggatcagacctgcacatcgaagtgaaagggtacgaagacggcggaatccaccttgagtgtaggagcactggctggtacccacagccacagataaagtggagcgataccaaaggagagaatattccggctgtagaggctccagtggtggctgacggggtgggcttgtacgccgtcgctgcatcggtgataatgcgcggttcgagtggggggggcgtgagctgcataattcgcaactctctgctgggattagagaaaacggcctctattagcattgcttag

SEQ ID NO: 110138 - DNA, 1368 bp, synthetic construct
  misc_feature 1..1368: note = Description of Artificial Sequence: Synthetic coding sequence
  source 1..1368: mol_type = other DNA
atggttgattttcctggttataatctttccggagctgttgcatcatttctctttatcctactgaccatgaagcagtctgaagacttcagagtgatcggccccgcccaccccatactggccggagtcggcgaggacgccctcctcacctgtcaactgctccctaaacgaactactatgcacgtcgaggtgagatggtaccggtcagagccctcgacccccgttttcgtgcaccgggatggagtggaagtgactgagatgcaaatggaggaataccggggctgggtggagtggatcgaaaacggcattgcgaaaggcaacgttgccctcaaaattcataacatccagcccagcgacaatgggcagtattggtgccactttcaggacggcaattattgcggtgaaacgagcttacttctgaaggtagcggggttgggaagtgcccccagtatacatatggagggacccggggagtctggggttcagctggtgtgcacagcccgcgggtggttcccggagccacaggtgtattgggaggatatccgcggggaaaaactgctagccgtcagcgaacatcggattcaggataaggacggtctcttttacgcagaggcgacattggtagttcggaatgcctccgcggaatctgtgagttgcttagtgcataaccccgtgttaacagaggagaagggctccgtgatttcactgccagagaagttgcagaccgagcttgcttccctgaaagtcaacggaccctctcaacctattctcgtacgcgttggtgaggatatacagctgacctgttacctctcacctaaagccaacgctcaatccatggaggtgcggtgggacagatcacaccggtatccagctgttcacgtgtacatggacggtgaccatgtggcaggggaacagatggccgagtacagagggaggaccgtattagtgagcgacgctatcgatgagggccggctgaccctgcagattctgtcagcccggccatccgatgacgggcaatacagatgtcttttcgagaaggacgatgtttatcaggaggcttctctggatttgaaagttgtcagtctgggtagttcgccactcattaccgtggaagggcaggaggatggggagatgcagcctatgtgctcctctgatggctggtttccccagccccacgtaccatggcgggacatggagggaaagactatcccaagctcaagccaggccctgactcagggaagccatggactctttcacgtccagaccctcctgagggtcaccaatattagtgccgtagatgtgacttgttctatttctatcccctttcttggggaagaaaagatcgctactttctcccttagcggatggtag

SEQ ID NO: 110139 - DNA, 1167 bp, synthetic construct
  misc_feature 1..1167: note = Description of Artificial Sequence: Synthetic coding sequence
  source 1..1167: mol_type = other DNA
atggtggactttcctggttataaccttagcggggccgtagcgagcttcttgtttatcctgctgacgatgaagcaaagcgaggacttcagagtcatcggcccagcacacccaatcctggcgggtgtaggcgaggacgccctcctgacctgtcagctcttgcccaagaggaccaccatgcatgttgaagtacgctggtatcggtcagaaccaagtactcctgtcttcgttcaccgcgatggcgtggaggtaacagaaatgcaaatggaggagtacagaggctgggttgaatggattgagaacggcatagccaagggtaatgttgcccttaaaattcataatattcagccaagtgacaacgggcaatactggtgccatttccaagacgggaactactgtggcgagacctcgctgctgttgaaagtggcggaaaagttgcttgcagtactaagctccttgaaggtgaacggaccttcgcagccaatcctggtgcgggtaggggaggacatccaactgacatgttatctgtctcctaaggccaatgcacagagcatggaggtgcgttgggaccgatcgcaccgttaccccgctgtccatgtctatatggacggcgaccacgtggctggagagcaaatggcagagtacagaggaagaacagttttagtgtctgatgctattgacgagggacggcttacgcttcagatcttgtcagcacgcccttctgatgacggtcagtaccgatgcctttttgagaaggacgatgtctatcaagaagccagcctggacctgaaagtggtttctttgggctcgagtcctctcattacagttgaaggccaagaggacggcgagatgcagccaatgtgtagttctgacggctggttccctcagcctcacgtcccctggagggatatggaagggaagaccataccgagcagcagccaggccctgacccaggggagtcatggattgtttcacgtacagactctgttgcgtgtgacaaatatttctgccgtcgacgttacatgttctatcagtatccctttcctgggggaggagaagatcgctactttttctcttagcgagagcagaatgacttttctgtggaagacccttcttgtctggggtctgcttcttgcagtagcagttggccttcctcggaagcgatcctag

SEQ ID NO: 110140 - DNA, 738 bp, synthetic construct
  misc_feature 1..738: note = Description of Artificial Sequence: Synthetic coding sequence
  source 1..738: mol_type = other DNA
atggtggattttccgggctataatctgagtggagccgtagcttcttttctttttatcttgctcactatgaagcaatcagagaaactgcagacggagctggcatcattgaaagtcaacggccctagtcagcccatattagtgagagtcggtgaggacattcaactcacctgctacctttcacccaaagcaaacgctcagagcatggaagtgcgctgggaccgatcccataggtatccagcagttcatgtttacatggatggcgaccatgtagccggggagcagatggctgagtaccgcgggaggaccgttctagtaagcgatgcgatcgacgagggtcgactgacactgcagatcctgagtgctagaccatcagatgatggccagtaccgctgcttatttgaaaaggatgacgtttatcaggaagcctccttggacctcaaagtggtttcattggggagctcccctcttattacagttgagggacaagaggacggagaaatgcaaccgatgtgttccagtgatggttggtttccccagccgcacgtcccatggagggacatggaaggcaaaaccattccgagcagttcccaggcattaacccaaggatcccacgggttgtttcatgttcagaccctgttgagagtgacgaacatttctgccgtcgatgtcacatgttcaataagcatccccttcttgggcgaagaaaaaattgcaaccttcagtctctcaggatggtag

SEQ ID NO: 110141 - DNA, 327 bp, synthetic construct
  misc_feature 1..327: note = Description of Artificial Sequence: Synthetic coding sequence
  source 1..327: mol_type = other DNA
atggtagatttccctggctacaatctcagtggtgctgtcgcgtccttcctgtttatactcctaacaatgaaacagtccgactttagggtcatcggccccgcacaccccatactcgcaggcgtgggagaggatgctctgctgacttgccagctgcttcccaagaggaccacgatgcacgtggaagtgcgctggtatagaagcgaaccgagcacacctgtgttcgtgcatcgggatggagtggaggtcaccgaaatgcaaatggaagagtatagaggatgggtggagtggattgagaacggaattgcgaaaggcaacgtggccctgtag

SEQ ID NO: 110142 - DNA, 780 bp, synthetic construct
  misc_feature 1..780: note = Description of Artificial Sequence: Synthetic coding sequence
  source 1..780: mol_type = other DNA
atggtggattttccaggttataatctgtcaggcgcagtggcttcttttcttttcatcctcttgaccatgaagcaatccgaggattttagggtgatcggtcccgcccaccctatcctcgccggcgtaggagaagatgccctcctgacttgtcagctactccctaaacgcaccaccatgcatgtggaggtgcgctggtataggtccgagccatccactcccgtgtttgtgcacagagatggggtggaagtcacggagatgcagatggaggagtataggggctgggtggagtggatcgaaaatggtattgccaaaggtaatgttgcgttaaagattcacaacatacagccctccgataacgggcagtactggtgccatttccaggatggcaactattgcggcgaaacttcgctgctgcttaaagtcgccggattggggtccgccccgtccatccacatggaaggtcccggtgagtcaggggtgcagctggtgtgcaccgctcggggctggttccccgagccccaggtctactgggaggacatcagaggagaaaagctcttggctgtatcagaacatcgcatccaggacgaagacggtctgttctatgctgaggctactctggtggtccgcaacgcatcagccgaaagcgtgtcatgcttggtgcacaatccagttctcacggaggagaaggggagtgtgatctcattgcctgaaaagctgcagacagaacttggcaaatacgaagttttggcacatacctgcggggggagtctgtgtccctag

SEQ ID NO: 110143 - DNA, 780 bp, synthetic construct
  misc_feature 1..780: note = Description of Artificial Sequence: Synthetic coding sequence
  source 1..780: mol_type = other DNA
atggtcgatttccccggatacaatctgagtggcgctgtcgccagtttcctgtttatcctgctgacgatgaaacagagcgaagattttcgggtaattgggccagcacaccccatattggccggagtaggagaagatgccctacttacatgtcagctcctcccaaaacgcacaacaatgcacgttgaggttcggtggtacagaagcgaaccaagcacccccgtgtttgtccaccgggacggcgtggaagtgaccgagatgcagatggaagaatatcggggttgggtcgaatggatcgagaatggcatcgcaaaaggaaacgtcgcgctgaaaatacataacatccaacccagcgataacggacaatactggtgccatttccaggacggcaattactgtggagaaaccagtctcttgcttaaagtcgctggactcggctccgcaccttcgattcacatggagggaccaggcgagagcggtgtgcagctggtgtgcacagcacgcgggtggttcccagaacctcaggtgtactgggaggatatcagaggcgagaagctccttgccgtcagtgagcaccgaattcaagataaggatggcctcttctatgccgaggcaacactcgtcgttagaaacgcgtccgcagaatcagtttcttgcctcgtgcataaccctgtactgacagaagagaagggcagcgtgattagtctccccgagaagctccagaccgaactggggaagtacgaagttttagcacatacctgcggaggtagtctgtgcccctag

SEQ ID NO: 110144 - DNA, 636 bp, synthetic construct
  misc_feature 1..636: note = Description of Artificial Sequence: Synthetic coding sequence
  source 1..636: mol_type = other DNA
aaggccaacgcccaatccatggaggtgaggtgggaccgctcacacagatacccagcagtgcatgtatatatggacggagatcatgtggctggagagcagatggccgagtacagagggagaacggttttggtttctgatgctatcgacgagggacgtctgactcttcagattctgagtgctagaccttctgatgacgggcaatatcgatgtctgttcgaaaaggacgacgtctatcaggaagcttcactcgacctgaaggttgtgtctttgggatcctctcctttgatcacagtggaaggacaagaagatggggaaatgcagcccatgtgctcctctgatggttggttcccgcagccacacgtgccttggagagatatggagggtaagacgatcccaagctcctcccaggccttaactcagggtagtcatggcttgttccacgtgcagactttactgcgggtgacaaacatctctgcagtagatgtgacctgtagcatctccatccccttccttggagaggaaaagatcgctaccttcagcctgagcgagtccagaatgactttcctgtggaagacattactggtctgggggcttctgctggccgtggcagtgggacttccccgcaagcggtcatag

SEQ ID NO: 110145 - DNA, 780 bp, synthetic construct
  misc_feature 1..780: note = Description of Artificial Sequence: Synthetic coding sequence
  source 1..780: mol_type = other DNA
atggtggatttcccaggctataaccttagcggggccgtcgcatcattcctgttcatccttcttactatgaaacagagcgaagattttcgtgtgatagggccagctcaccccatcctggccggcgtgggcgaggacgccttgcttacttgtcagcttttacccaaaagaactaccatgcatgtggaggtgcggtggtaccgctcagaaccttccacccctgtatttgttcaccgggatggagttgaagtcaccgaaatgcaaatggaggaatacaggggatgggtagaatggatagaaaacgggattgccaaggggaatgtggccctcaagattcacaacatccagccaagtgacaacggacaatattggtgtcactttcaagacggcaactactgcggggagacttcattactgctcaaggtggcggggctcgggtcggctccgtcgatacacatggagggccccggcgaatccggagtacagcttgtttgtaccgctagaggatggtttcctgagcctcaggtttattgggaagacatccgcggcgagaaactcttagcagtgagcgagcacagaattcaggataaagatggcctgttttacgccgaggccacactcgttgtgaggaacgcttccgccgagtccgtcagttgtctcgttcacaatccagtgctcactgaggagaagggtagcgttatctctctgcctgagaagctgcagactgagcttggaaagtatgaagtgctcgctcacacgtgcggtgggagcctgtgcccttag

SEQ ID NO: 110146 - DNA, 327 bp, synthetic construct
  misc_feature 1..327: note = Description of Artificial Sequence: Synthetic coding sequence
  source 1..327: mol_type = other DNA
atggtggactttcccggttacaatctgagtggcgctgtggcatcttttttatttatcctactgaccatgaaacagagcgatttccgagtgattggacctgcccaccctatcttagctggcgtgggggaggacgcacttttaacatgccagttactgcctaaaagaactactatgcacgtggaagttaggtggtataggtcagagccctctacccccgtctttgtccatcgcgacggagtggaagtgaccgaaatgcaaatggaagaatatcgaggttgggtggaatggattgagaacggcattgcaaaaggcaacgtcgccctatag

SEQ ID NO: 110147 - DNA, 327 bp, synthetic construct
  misc_feature 1..327: note = Description of Artificial Sequence: Synthetic coding sequence
  source 1..327: mol_type = other DNA
atggtcgattttcccggatataatctgtcaggggctgtggcatcattccttttcatactgctaaccatgaaacagtccgactttagagttatcggccccgcacacccaatcctcgccggtgtcggtgaagacgccctgcttacctgccagctcctgcctaaacgcactacgatgcacgttgaggtgcgctggtatagatcagagccctccacgcccgtgttcgtgcacagggacggggtggaagtgaccgagatgcagatggaggaatatcgcggatgggtcgagtggattgaaaacggaatcgccaagggaaatgtggccctctag

SEQ ID NO: 110148 - DNA, 636 bp, synthetic construct
  misc_feature 1..636: note = Description of Artificial Sequence: Synthetic coding sequence
  source 1..636: mol_type = other DNA
aaggctaatgcacagtctatggaggtgcggtgggataggtcccaccgctacccggcagttcacgtatacatggatggggaccacgtagctggggaacagatggccgagtatcgtggacgtaccgtgctggtctccgatgccatagatgaaggccggctgactctccagattctgtccgcgcgcccttctgacgatggacagtacaggtgtctgttcgagaaggatgacgtatatcaggaagcgtctctcgacctgaaggttgtcggattaggaagcagtccactaattaccgtggaaggacaagaagatggggagatgcagcccatgtgttcaagcgacggatggtttccgcagccccatgtaccatggagagacatggaagggaaaaccatcccaagcagtagtcaagcgctgacccaggggtctcacggcttgttccatgttcaaacattgctcagagtgacaaacatttctgcagtggatgtcacctgtagcatcagcatcccttttcttggggaagagaaaatcgccactttctccctgtcagagagccggatgactttcctgtggaagacactgttagtctggggtctgctgctggctgtcgctgttggcttgcctcgaaagagaagctag

SEQ ID NO: 110149 - DNA, 816 bp, synthetic construct
  misc_feature 1..816: note = Description of Artificial Sequence: Synthetic coding sequence
  source 1..816: mol_type = other DNA
atggtggactttccaggctataacctctcgggggcggtggcgtcttttctttttatcctgctcacaatgaagcagtccgaggattttagagtcatcggccctgctcatcctatcttggctggtgttggtgaagacgcactgctgacttgtcagctgctgcccaagagaacaacgatgcatgtggaagtgcgatggtataggtctgaaccctcaacaccagtgtttgtgcatcgggacggagtggaggtgacagagatgcagatggaggaataccgaggatgggtggagtggatcgagaacgggatcgcgaagggcaatgttgcactcaaaattcataatattcagcctagtgacaatggccaatactggtgccactttcaggacggcaactactgtggtgagacctccctccttctgaaagtagccgccgtgctccgggatgacatcatcgcttcattaaaagttaatggcccctcccagcctatcttggtgagggtgggcgaggacattcagctcacttgctacttaagccctaaagccaacgctcagtctatggaagttcgctgggacagatcacatcgctatcccgcagtgcatgtgtatatggacggcgaccatgtagcaggcgaacagatggctgaatatcgggggcggaccgtgcttgtgagcgatgctatcgatgaaggccgcttaacattgcagattctgtcagctcgaccttcggatgacggccagtatcgctgtctgtttgagaaagacgacgtctaccaagaggcctccctggatctgaaggtcgtgtgggtgctgcctcattag

SEQ ID NO: 110150 - DNA, 327 bp, synthetic construct
  misc_feature 1..327: note = Description of Artificial Sequence: Synthetic coding sequence
  source 1..327: mol_type = other DNA
atggtggattttcccggatataacctaagcggcgcggtggccagcttccttttcatcttgttaaccatgaaacagagtgattttcgggtgatcgggcctgcccatccaattttggcgggcgttggggaagatgcgctgctgacatgtcagctattgcctaaaagaacaaccatgcatgttgaagtcagatggtataggtcagagccatcaacaccagtttttgtccaccgggacggcgtagaagtgactgaaatgcaaatggaggaataccgcgggtgggtggaatggatagagaacggcatcgctaagggaaacgtcgctttgtag

SEQ ID NO: 110151 - DNA, 780 bp, synthetic construct
  misc_feature 1..780: note = Description of Artificial Sequence: Synthetic coding sequence
  source 1..780: mol_type = other DNA
atggtggacttccctggctacaacctatctggggcagtcgcttcctttctttttatcctgcttactatgaagcaatcggaggactttcgggtgatcggccctgcccaccccattttggccggcgtgggagaggacgctctactaacatgccaactcctcccaaagaggaccaccatgcatgttgaagtgcgttggtatcggagcgagccttctaccccagtgttcgtccatagggatggtgtggaagttacggaaatgcagatggaggaatatcgcggctgggttgagtggattgagaacgggattgccaaagggaacgtggccctgaaaattcacaacatccagccgtccgacaatgggcagtactggtgtcatttccaggacggtaattattgcggggagacctccctacttctcaaggtggcaggcctcggttctgcaccttcaattcacatggaaggaccaggggaatctggggtgcagctagtgtgcactgctcgaggatggtttcctgagcctcaagtgtattgggaggacatcagaggcgagaaacttctcgcagttagcgaacataggatccaggatgaagatggactgttctatgccgaggcaactttagttgttcggaacgcttcagccgagagcgtcagctgcctagtccataaccctgtgcttaccgaagagaaaggcagcgttatctcactgccagaaaaacttcagacagagcttggcaaatacgaagtactcgcccacacttgtggtgggtcactgtgtccctag

SEQ ID NO: 110152 - DNA, 327 bp, synthetic construct
  misc_feature 1..327: note = Description of Artificial Sequence: Synthetic coding sequence
  source 1..327: mol_type = other DNA
atggtggactttcccggatacaacctgagtggcgcagttgcttccttcctcttcatactgttgacaatgaagcagagtgacttccgagtgatcggtccagcccaccccattctcgctggtgtaggggaagacgcactgttaacatgtcagttgctgccaaagcggactacaatgcacgtcgaagtgcgttggtaccgaagtgaaccgtctacccccgtctttgtccacagggacggggtagaagtgaccgaaatgcagatggaggaatacagaggttgggtggaatggatcgagaacggcattgcaaaagggaatgtcgccttgtag

SEQ ID NO: 110153 - DNA, 636 bp, synthetic construct
  misc_feature 1..636: note = Description of Artificial Sequence: Synthetic coding sequence
  source 1..636: mol_type = other DNA
aaggctaacgctcagtcaatggaagtgcggtgggatcgctcacaccgttacccagccgtgcacgtgtacatggacggggatcacgtggcaggcgagcagatggctgagtacaggggccggactgtcctcgtctcggacgcaatcgatgagggacgattgacactgcagattctgtctgcccgtcctagtgacgacggacagtatcggtgtctgtttgagaaagacgatgtctatcaggaggccagcctggacctgaaggttgtcgggcttggcagctccccgctgatcacggtggaaggccaggaagatggcgaaatgcagcccatgtgttctagcgatggctggttcccacaacctcacgtgccctggagagacatggagggcaaaacaatcccatcctcctctcaagcccttactcagggtagccatggcctcttccatgtccaaaccttgctgcgcgtgactaatatcagtgccgtcgacgtgacatgtagtatttccatcccgttcctgggggaagagaagatcgctacattcagcctgagcgaatcccggatgacatttctatggaaaactttgttagtgtggggacttctcttggccgtggcagtgggcttacctaggaaacggagctag

SEQ ID NO: 110154 - DNA, 780 bp, synthetic construct
  misc_feature 1..780: note = Description of Artificial Sequence: Synthetic coding sequence
  source 1..780: mol_type = other DNA
atggtggatttccccggttataacctctctggggctgtggctagctttctgtttattcttctaaccatgaagcagtctgaagattttagagtcataggacccgcccatccaatcctggccggggttggagaggatgccctgctgacctgtcagctccttcctaaaaggacaacaatgcatgtggaggtgcgttggtacagaagcgagccctctactccagtcttcgtccaccgcgatggtgtagaggtgaccgagatgcagatggaggaatatcgagggtgggtagaatggatcgagaacggaattgccaaggggaatgtagccctgaagatccataacatacaacccagcgataacggacagtactggtgtcattttcaagacgggaactattgcggagagacgtccctgctgctgaaggttgcaggcttggggtccgcgccaagtatccatatggagggcccaggagagtctggcgtccagttagtctgtacagcccgaggctggttccccgaacctcaggtgtactgggaagacataagaggggagaaactgctggctgtcagtgagcatcgcatccaagatgaagatgggcttttctatgcggaagcaacgctcgttgtgagaaacgcctccgccgagtctgtgtcatgcctcgtacataatcctgtgttaaccgaagagaagggctctgttatttcccttccagagaagctccagactgaactggggaagtacgaagttctggctcacacctgtggggggtcactctgcccgtag

SEQ ID NO: 110155 - DNA, 780 bp, synthetic construct
  misc_feature 1..780: note = Description of Artificial Sequence: Synthetic coding sequence
  source 1..780: mol_type = other DNA
atggtcgattttccaggttacaatctatccggagccgtcgcgtcattcttgtttattcttctcacaatgaaacagagtgaagacttcagagtcatcggccctgctcatcccatcctagccggcgtgggcgaggacgccctcctgacatgccagctgctgccaaagagaacaaccatgcacgtggaggtgcgttggtatcgaagcgagcccagcactcccgttttcgttcaccgggatggggtcgaggtgactgagatgcagatggaggaataccgcggctgggtcgagtggattgagaatggtatagctaagggtaacgttgccctcaaaatacacaatatacagccctccgacaacggccagtactggtgtcactttcaggatgggaactactgcggcgaaacttctcttctgctgaaagtggctggactgggatctgcacccagcatccatatggaagggccaggggagagtggtgtgcagctggtgtgcacggcccgaggttggtttccggagccccaggtctactgggaagatatccgcggagaaaaactgcttgcagtcagcgaacacagaatacaagacaaggacggccttttttacgctgaggcaacattagtggtgcgcaatgcttcagccgagtcagtatcatgcctggttcacaacccggttttaaccgaagagaaaggatccgttatatctttacccgaaaaacttcaaactgaactgggcaaatatgaggtgctcgcccatacgtgcggcgggagtttgtgcccatag

SEQ ID NO: 110156 - DNA, 327 bp, synthetic construct
  misc_feature 1..327: note = Description of Artificial Sequence: Synthetic coding sequence
  source 1..327: mol_type = other DNA
atggtggactttcccggctacaacctgtctggagcggtagcttccttcttgtttattttgttgaccatgaaacagtctgactttcgagtaataggacccgcacatcctattcttgctggggtgggggaggacgccctgttaacctgccaactcttgccaaagcgcacaaccatgcacgtcgaggtgcgttggtaccggtctgagcccagtaccccggtcttcgtgcaccgggacggcgtggaagtgaccgagatgcagatggaggagtacaggggatgggtggaatggatcgagaatggaatcgccaaaggaaacgtggcgctatag

SEQ ID NO: 110157 - DNA, 780 bp, synthetic construct
  misc_feature 1..780: note = Description of Artificial Sequence: Synthetic coding sequence
  source 1..780: mol_type = other DNA
atggtagacttcccaggctacaatctgtctggggctgtcgcgtcattcctatttattctgctgacaatgaagcaatctgaggatttccgggttattggacccgctcatccgattctggcaggcgtgggggaagacgcactgctgacctgtcagctgctccctaaacgaaccacaatgcacgtggaagtcaggtggtatcgctctgagccatccactcctgtgttcgtccatcgcgatggcgtggaagtcaccgagatgcagatggaggagtaccgcgggtgggtggaatggatagagaacggaattgccaaaggaaacgtggcccttaagatacataatatacagccgagcgacaatggccagtattggtgccactttcaggacgggaattactgcggtgagacatctcttctcctgaaagtggccggactgggcagcgccccatccattcatatggaggggcctggcgaatctggcgtccaactggtgtgtacggcccgcggctggttccccgaaccacaggtatattgggaagatataagaggtgaaaaactactggcggtcagcgaacaccgaatccaggataaggatggcttgttctatgccgaggcgactctggtggtgagaaacgcatcagctgaaagtgtgtcctgcctggttcacaaccccgtactgaccgaagaaaaaggttccgtgatcagtcttcccgagaaactgcagaccgagctcggtaaatacgaagttctggctcacacatgtggcggatcattgtgtccctag

SEQ ID NO: 110158 - DNA, 636 bp, synthetic construct
  misc_feature 1..636: note = Description of Artificial Sequence: Synthetic coding sequence
  source 1..636: mol_type = other DNA
aaggctaatgcacaaagcatggaagtacgctgggaccgcagtcaccgttacccggccgtgcacgtgtacatggatggcgatcacgtagcaggcgaacaaatggcagagtaccggggtcgcacggtgttggtatctgatgcaatcgacgagggcaggctcaccctgcagatcctgtctgccaggccgtccgatgatggccagtatagatgcttattcgaaaaagatgatgtgtaccaggaggctagcctcgacctaaaagtggtaggattgggcagctcgcccctcatcacggtggagggtcaggaggatggcgaaatgcagccaatgtgctcttccgacgggtggttcccccagccccacgtcccctggcgggatatggagggcaaaacgatccccagttcctcgcaggctctgacccaagggtctcacggcctgtttcatgtgcagactttgttgcgggttactaacattagtgcagttgatgtgacatgctctatcagtatcccctttttaggagaggaaaagattgccacctttagtctatctgaatcccggatgacgtttttgtggaagacgctactggtgtggggcctgctgttggccgtcgcagtgggcctaccccgcaaaaggtcctag

SEQ ID NO: 110159 - DNA, 636 bp, synthetic construct
  misc_feature 1..636: note = Description of Artificial Sequence: Synthetic coding sequence
  source 1..636: mol_type = other DNA
aaagccaacgcacagtcaatggaggttaggtgggacagaagccacaggtaccccgcagtgcatgtgtatatggacggggaccatgtggcaggggagcagatggcggagtatcgcggaagaacagtgctggttagcgacgctatcgatgaaggccggcttacactccagatactttcagcccgcccgtctgatgacggacagtatcgttgtctctttgagaaagatgacgtataccaggaggcgtccttggatctcaaggttgtttctcttgggtcttccccgcttattaccgtggagggacaggaggacggtgagatgcagcccatgtgctcttcagacggttggttcccccagcctcacgtgccgtggcgcgacatggagggcaagactattccaagttcatcacaggccctgacccaggggtcccatgggcttttccatgtgcagaccctgctgcgcgtgactaacatcagcgcggttgatgttacttgttcaatatcgattccattcctaggagaggaaaaaattgccaccttttctctgtctgaaagccgcatgacatttctttggaaaaccctgctggtgtggggtctacttctggccgtcgcggtcgggctgcctcgaaagagaagctag

SEQ ID NO: 110160 - DNA, 636 bp, synthetic construct
  misc_feature 1..636: note = Description of Artificial Sequence: Synthetic coding sequence
  source 1..636: mol_type = other DNA
aaggccaacgcccagagtatggaggttaggtgggatcggtcccaccgctatccagccgtccatgtgtacatggatggcgaccacgtcgccggagagcagatggccgaatatcgtggcaggactgtgttggtgagcgacgcaattgatgagggtcgactgacactccaaatcctgagtgctaggccatccgacgacggacaatatagatgcctatttgagaaggatgatgtgtaccaggaagcatcgctggacttgaaggtcgtgtctctgggcagttctccactcattacagtggaagggcaggaggacggggaaatgcagcctatgtgcagtagcgatggctggttcccgcagccccatgtcccatggagggacatggaaggtaagaccatcccctcctccagtcaggccctgacgcagggttcacacggcctattccacgtccagacactcctccgcgtcactaatatctctgcggtcgatgtgacctgctcaatttccatcccattccttggggaagaaaaaattgcaacgttctctctatccgaatcccggatgacctttctgtggaaaacactgctggtgtggggcttactcttggccgtggcggtagggctcccaagaaagcgctcatag

SEQ ID NO: 110161 - DNA, 327 bp, synthetic construct
  misc_feature 1..327: note = Description of Artificial Sequence: Synthetic coding sequence
  source 1..327: mol_type = other DNA
atggttgactttccggggtataacctgagtggcgccgtagccagcttcctgttcattctgctcacaatgaagcagagcgattttcgagtgatcggcccagctcaccccatcctcgccggcgtgggcgaagacgccctcctgacatgtcagctactgcccaaaaggaccacaatgcatgtggaggtacggtggtataggtctgaaccctctacgcccgtgttcgtccatagggacggagtggaggtgacagagatgcaaatggaggagtacagaggatgggttgagtggatcgagaatggcatcgccaaggggaacgtggctctgtag

SEQ ID NO: 110162 - DNA, 636 bp, synthetic construct
  misc_feature 1..636: note = Description of Artificial Sequence: Synthetic coding sequence
  source 1..636: mol_type = other DNA
aaagctaatgctcagagtatggaggtgcgatgggataggtcacacagataccccgccgtacacgtgtacatggacggggaccatgtcgccggggagcagatggccgaatacagaggccgaactgtgctcgtgagcgacgccatcgatgagggacgcctcactctgcaaatactttccgcccgccctagcgatgatgggcagtataggtgcttattcgaaaaggatgacgtgtaccaggaagcaagtctagatctcaaggtggtttctctagggagctcccctctaatcacagtggaagggcaggaggacggggaaatgcagcctatgtgctcatccgacggctggttccctcaaccacacgttccctggagggatatggaaggcaagaccatcccaagtagtagtcaagcgctcacacagggctctcatgggctgtttcacgtgcagactctgctgagggtgactaacatcagcgcagtcgacgtgacttgctctatatcaatacccttcctgggggaagaaaaaatcgcgaccttctccctctcagaaagtcggatgacattcctttggaagacactgctggtgtgggggctgctcttggcagttgcagtgggtttgccaaggaaaaggtcatag

SEQ ID NO: 110163 - DNA, 1449 bp, synthetic construct
  misc_feature 1..1449: note = Description of Artificial Sequence: Synthetic coding sequence
  source 1..1449: mol_type = other DNA
atggtcgattttcctggatataatctgagcggggccgtggcctccttcttgtttattctgcttacgatgaaacagtcagaagattttagagtaatagggcccgcccatcctatactcgccggggtgggagaggatgcactactgacatgccagcttttgcccaagcggaccactatgcacgttgaggtgagatggtatcggtccgagcccagtacaccagtgttcgtacaccgagatggcgtggaggtgactgagatgcagatggaagagtacagaggatgggtagagtggatcgagaacgggattgcgaaagggaatgtggctttgaagatccacaacatacaacctagtgacaatggtcagtactggtgtcattttcaggacggcaattattgcggagaaaccagtctgttgctgaaagtggccggactggggagcgcaccctctattcatatggaagggcctggcgaaagcggagtacaactggtttgtaccgctcgcgggtggttccccgaacctcaggtgtactgggaagatatcaggggtgaaaaactgcttgcagtctccgagcacagaatacaggataaagacggtctattttacgctgaagcgactctcgtagtgcgcaacgcatctgctgaaagcgtaagctgtctcgttcataacccggtgttgaccgaggagaaaggctcagtcatttccctgcccgagaagctgcagacagaattagcaagtctgaaggtgaacggacctagtcagcctatactggtgagggtgggcgaggatatccaattgacttgctaccttagtccaaaagctaacgcacaaagcatggaagtgcggtgggacagaagtcatcgatatccagcggtgcatgtctatatggacggcgaccacgtcgctggcgagcagatggccgagtataggggcagaaccgttttggtgagcgacgcgatagatgagggtaggttaacacttcaaattctgagcgcccgccccagtgatgacggccagtatcgctgtctcttcgaaaaggacgatgtgtaccaagaagccagcctcgatctgaaagttgtgtcactgggctcatccccgttgatcactgtagaaggccaggaggatggcgaaatgcagccaatgtgctccagtgatgggtggttccctcagcctcacgtaccatggagagatatggaaggtaaaacaataccctcctcttcacaggcgctgacccagggatcccacggtctattccatgttcaaaccctcctgagagttacaaatatttcagccgttgacgtcacttgctccatttccataccatttcttggcgaggagaaaatagcaacattctcactaagcgaaagtaggatgacctttttgtggaaaacactgctcgtttgggggctgctgctggccgtggcggtgggactccctcgaaagcgctcatag

SEQ ID NO: 110164 - DNA, 738 bp, synthetic construct
  misc_feature 1..738: note = Description of Artificial Sequence: Synthetic coding sequence
  source 1..738: mol_type = other DNA
atggtggatttccccggctacaatctttcaggagctgtggcttcatttctgtttattctccttacaatgaaacaatccgaccgtctggatacgccaaaggcctcgctcaaggtgaacggccctagccagccaatcctggtgcgcgtgggagaggacattcagctgacatgctacctaagccctaaggctaatgcccagtctatggaagtccgatgggatcgcagccaccgctacccagccgtgcatgtctacatggacggggaccacgtagccggcgagcaaatggctgaataccgagggcggactgttcttgtgtcagacgccatcgatgaaggccggctgactctgcagattttatccgccagaccttcagacgacgggcaataccgctgcctgttcgaaaaggatgacgtgtaccaggaagcttctctggatttaaaagtggtaagtctcggatctagccccttgatcactgtcgagggccaggaggacggtgaaatgcagcctatgtgcagctccgatggctggtttcctcagcctcacgtcccctggagggatatggaaggaaagactataccgagtagtagtcaggctcttacacaaggttcacacgggcttttccacgtgcaaactttacttagggtgacaaatatcagcgccgtagatgtcacttgttcaatcagtattccattcctgggcgaggaaaagattgccacattttcgctgagtggttggtag

SEQ ID NO: 110165 - DNA, 537 bp, synthetic construct
  misc_feature 1..537: note = Description of Artificial Sequence: Synthetic coding sequence
  source 1..537: mol_type = other DNA
atggaggttagatgggatcggtcacatagataccccgcagtgcatgtttatatggacggcgatcatgtcgctggagagcagatggcagagtaccgcgggagaaccgtcctggtcagtgacgccatcgatgagggacgattgacactccaaatcttgtctgctcggccctccgacgacggacagtaccggtgcttgtttgagaaggacgatgtttaccaggaagcctctctggacttaaaagtggtctccctgggctcttcacccttgattaccgtcgaagggcaggaagatggtgagatgcagcccatgtgcagctctgacggatggttccctcagcctcatgtcccctggcgcgacatggaaggtaagacaattccttcgtcctcgcaggctctgacccaaggctcacatggtctttttcacgttcaaacactactgcgcgttaccaatatttccgccgtggatgtcacttgtagtatctcaattccatttctcggcgaggagaagatcgcgacctttagtttaagcggatggtag

SEQ ID NO: 110166 - DNA, 1167 bp, synthetic construct
  misc_feature 1..1167: note = Description of Artificial Sequence: Synthetic coding sequence
  source 1..1167: mol_type = other DNA
atggtcgacttcccaggctacaacctctctggcgccgtggcatcctttctattcatcttgctgaccatgaaacagagcgaagacttcagagtgatcggccctgctcacccaatcctcgccggtgttggcgaggatgccctattgacgtgccagcttttaccaaaaagaaccacgatgcatgttgaggtcaggtggtatcggtccgaacccagtactcctgtgtttgtgcacagagatggagtggaggtcactgaaatgcagatggaagaataccgaggatgggtggagtggattgagaacggaatcgccaaaggtaacgttgctctcaagattcacaacattcagccttcagacaacggacagtactggtgtcacttccaggatggcaattattgcggggagacttcgttactactaaaggttgcagaaaaattactggccgtgctgagttccctcaaagtaaatggccccagtcagccaatccttgtgagggtcggggaagatattcagctgacatgttacttgtctccaaaggccaatgcccaaagtatggaagtccgctgggatagatcacaccgctacccggccgtgcacgtctatatggatggcgatcatgtagcgggtgaacaaatggctgagtatcgcgggcgcacagtcctggtttcagatgcgatcgacgagggccgattaaccttgcagattttatctgcgcggcccagcgacgatggtcagtatcggtgcctgttcgaaaaggacgacgtctatcaggaagcttcgttagatctcaaagtcgtatctttgggcagctccccgttaattacagtcgagggccaggaagatggagaaatgcagccaatgtgctcaagtgacggttggttccctcaaccccacgtgccatggagggacatggagggaaagacaatcccaagttcctcccaggcattgactcagggaagtcatggccttttccatgtgcagactctgctgcgggtcacaaacatcagcgcggtggatgtgacttgtagtatatccattccatttctgggcgaagagaaaattgcaacattttccctctccgaatctcgcatgactttcctctggaaaacactcctggtttggggactgttattagcagtagctgtgggactgcccaggaaaagatcttag

SEQ ID NO: 110167 - DNA, 1167 bp, synthetic construct
  misc_feature 1..1167: note = Description of Artificial Sequence: Synthetic coding sequence
  source 1..1167: mol_type = other DNA
atggtggatttcccaggctacaacctgtctggcgccgtcgcgtccttcctgttcattctcttgacaatgaagcaatcagaagactttagggtcatcgggcccgctcacccaatccttgccggagtgggcgaagacgccttgcttacatgccagctcctcccaaaaaggacaaccatgcacgtcgaagtgcgatggtaccgctcagaaccctctactcccgtgttcgtccatcgagatggggtggaggtgacggaaatgcagatggaggagtataggggttgggtggagtggattgagaatggcatcgcaaagggcaatgtagcccttaagatacacaatattcaaccgtctgataatggacagtattggtgtcattttcaagatggaaactactgcggggagacgtcgctcctcctgaaggttgctgagaaactgttagccgtactatcaagcctcaaagtcaatgggccttcacagcccattctggtccgcgtcggggaagacatacagctgacatgctacctttctccaaaagctaacgcccaatctatggaggtgcgctgggacagatcacacaggtatcctgccgtccatgtctacatggatggggaccacgtggccggagagcagatggctgagtaccggggcaggacggtgctggtgtccgacgctatcgacgaaggacgcctaactctgcagatcttatccgccagaccctctgacgacggccagtatagatgcttgtttgaaaaggatgacgtgtaccaagaggcatccttggatttgaaagtggttggccttggctcttcgcccttgataacagtggagggccaagaggacggcgaaatgcagccaatgtgttcatctgatggctggtttccacagcctcacgttccctggcgcgatatggaaggcaagacaatcccttcttccagtcaggcactgacccagggttcacatggccttttccacgtgcaaaccctgcttcgagttactaacatctcggcagtcgatgttacctgttcaatcagtattccctttttaggcgaggaaaagatcgcaacattcagtttatctgagtcaagaatgacgttcttatggaaaacattactcgtgtggggtctcctcctggccgttgccgtgggcttgcctagaaaacgctcctag

SEQ ID NO: 110168 - DNA, 1167 bp, synthetic construct
  misc_feature 1..1167: note = Description of Artificial Sequence: Synthetic coding sequence
  source 1..1167: mol_type = other DNA
atggtcgactttcccggctataatctcagcggggcagtcgcctcctttttgttcattttgctgaccatgaagcagtctgaagacttccgggtaatcggtccagcccatccaatccttgccggtgtgggagaggacgccctcttaacttgccagcttctgcctaagaggactaccatgcacgtggaggtgaggtggtatagatcggaaccttctactcccgtgttcgtgcacagagacggagtggaagtaacggaaatgcagatggaggaatacaggggttgggtcgaatggatcgagaacggaatagctaaaggcaatgtcgccctcaaaattcacaatatacaaccctcagataatggacagtactggtgtcatttccaagacggcaattactgtggggagaccagtctgttgctcaaagtggccgaaaagctgcttgcagtgctcagctccctgaaggtgaacgggccaagccagcctatcttggtccgggtgggcgaggatatacagctgacctgttacctttctcctaaagctaacgcccagagcatggaggtccgttgggaccggtctcacagatacccagccgtgcacgtctatatggacggggaccatgtggccggcgaacaaatggcagaatataggggtagaactgtgttggtgtcagacgcaatcgacgagggccggctcaccctccagatcttaagcgccaggccctcagatgacggccaatatcgttgcctcttcgagaaagacgacgtctaccaggaagcatccttagatctgaaggtggtgagtctggggtcctcacccctgattacggtcgagggacaggaggacggggagatgcagccaatgtgttctagcgatggctggtttccccagccacatgttccatggagagatatggaggggaaaaccattccgagtagttctcaggccttgacacaggggtctcacggactgtttcacgtacagacactgctccgggtgaccaatatctctgctgtcgatgtgacttgttccatctcaattccttttcttggagaggagaaaattgctaccttttcattatcagagagcaggatgacatttctgtggaaaactttgttagtgtggggccttctactggccgtggcagtcggcctcccccgcaagcgaagctag

SEQ ID NO: 110169 - DNA, 738 bp, synthetic construct
  misc_feature 1..738: note = Description of Artificial Sequence: Synthetic coding sequence
  source 1..738: mol_type = other DNA
atggttgacttccccgggtataacctgtcaggcgccgtcgcgtcattcttatttatccttctcacgatgaaacagtccgaccggttagatactcctaaggcctcactcaaggtcaacggacccagtcagcctattttggtgcgtgtaggcgaagacattcagctcacctgctacctgtcacccaaggctaacgctcagagtatggaggtacgctgggatagatctcacaggtacccagctgtgcacgtatacatggacggagaccatgtggccggagagcagatggccgaataccgcggccggaccgttctcgtctccgacgcaattgacgaggggcgtctaacactgcagatactctctgccaggccatcagacgatgggcagtatcgctgcctcttcgaaaaagacgacgtgtatcaagaagcaagcctggatctgaaagttgtggggcttgggtcatcccctctgatcacagtcgagggccaggaggacggcgagatgcagcctatgtgtagcagcgacggttggtttccgcagccacatgtcccctggcgggatatggaagggaaaaccattcctagcagctcgcaggccttgacccaaggttcccatggcttgttccacgtccagacactgttgcgcgtaacaaatatctctgccgtcgacgtcacttgttcaatttctataccctttctgggtgaagaaaagatcgctacgttcagcctatcgggatggtag

SEQ ID NO: 110170 - DNA, 738 bp, synthetic construct
  misc_feature 1..738: note = Description of Artificial Sequence: Synthetic coding sequence
  source 1..738: mol_type = other DNA
atggtggacttcccaggctataacctctccggcgccgtggcttctttcttgttcatcttactaacgatgaaacagagtgatagactagataccccgaaggcaagcttgaaggtcaatggcccgagccagcccatactagttagagtgggtgaggacatccagctcacctgctatctcagcccaaaggccaacgcacagtccatggaagtgcggtgggacaggagtcatcggtaccctgccgtccacgtgtacatggacggcgaccatgtggccggtgaacagatggctgaatataggggaagaacggttctcgtctcagacgctattgatgaaggtaggctaacgcttcagatactgtccgcaagaccaagcgacgatggccagtataggtgtctcttcgagaaagacgatgtttatcaggaagcatccctcgacctgaaggtggtcagtctcggaagctctcctctgattacagttgagggccaagaagacggtgagatgcagccaatgtgctcaagcgatggatggttcccgcaaccgcacgttccttggcgggatatggagggaaaaactatcccttccagctcccaagcattaacacaggggtcccacggactgtttcatgttcagaccttgctgagagtcactaacatcagcgctgtggatgtcacatgttctatctctattccttttctgggtgaggaaaagatagccactttctcactcagcggctggtag

SEQ ID NO: 110171 - DNA, 1167 bp, synthetic construct
  misc_feature 1..1167: note = Description of Artificial Sequence: Synthetic coding sequence
  source 1..1167: mol_type = other DNA
atggttgatttcccagggtacaacctctccggggccgtagcctccttcttgttcatccttctcaccatgaagcagagcgaggattttcgtgtcatcggcccggcccatccgatcctcgccggggtgggcgaagacgccctcctcacatgccaactcctgcccaagagaaccaccatgcatgttgaggtccgctggtatagaagtgagcctagcactcccgtgttcgtgcatcgcgacggcgtggaggtgacagaaatgcagatggaagagtacagaggctgggtcgagtggattgagaacggaatagcaaaaggcaacgttgcactgaaaatccacaatattcagccatctgacaatggccaatactggtgccacttccaggacggaaactactgtggcgagacgtccttactcctcaaggtcgcggagaagctcctggcagtcctttccagcctgaaagttaatggtccttctcagcctattctggtgcgggtgggcgaagacatacaattgacctgttatctgagcccgaaagccaacgcccaaagtatggaggtaaggtgggacagatcccataggtatcccgccgtacacgtctatatggacggggatcatgtcgcaggtgaacagatggcagagtataggggccggaccgtcctggtttccgatgcaatcgatgaaggccggttgacactgcagatcctgtcagcccgccctagcgatgatggacagtatcgttgtcttttcgagaaggacgacgtctaccaggaagcttcgctggacctgaaagtagttagtctgggtagctctcccctgattacagttgaaggacaggaagatggcgagatgcaacccatgtgctcttctgacggctggtttcctcagccgcacgtgccttggcgcgacatggagggcaagactattccaagctcatcccaggcccttacccagggatcccacgggctttttcacgtacagacattacttcgcgtgacaaatataagcgcggtggacgttacatgcagcatttccatccccttcctgggggaggagaagattgccacattttcactctcagaaagtaggatgacatttctctggaaaactttgttggtgtggggcctgcttcttgctgttgccgttggtctaccacggaaacgcagttag

SEQ ID NO: 110172 - DNA, 816 bp, synthetic construct
  misc_feature 1..816: note = Description of Artificial Sequence: Synthetic coding sequence
  source 1..816: mol_type = other DNA
atggtggatttccccggttacaacttgagcggcgcggtggcgagctttttattcatactgcttacaatgaaacagtccgaggatttcagggtaatcggacctgcccacccaatcctcgcaggggtgggggaagacgctctactgacatgtcaactccttcctaaacgcaccaccatgcacgttgaggtccgctggtataggagtgaaccgagcacacctgtgtttgtgcacagggatggagtcgaggtgactgagatgcaaatggaggagtaccgggggtgggtagagtggatcgagaacggcattgccaagggaaacgtggccctgaagattcacaacattcaaccttccgataacggccagtattggtgtcactttcaggatggcaactattgcggcgaaacctcactgctgctcaaggtggctgcagtgttgcgggacgacataattgcctcgttaaaggtgaatggacctagccagcctattctggtgagagttggtgaggatatccagctcacatgctacctgagccccaaagcgaatgcccaatctatggaggttcggtgggataggtctcataggtatccagccgtgcatgtgtacatggacggcgaccacgtggccggagagcagatggccgaataccggggcaggacagttctggtgagtgatgccatcgacgaggggcgcctgacactgcagattctgagtgcccggccctccgacgacgggcagtacagatgtctgttcgagaaagatgatgtgtaccaagaggcttctctcgatttaaaagtcgtgtgggtgctgcctcactag

SEQ ID NO: 110173 - DNA, 738 bp, synthetic construct
  misc_feature 1..738: note = Description of Artificial Sequence: Synthetic coding sequence
  source 1..738: mol_type = other DNA
atggtggactttccaggttacaacctttctggcgccgtcgcatcattcctttttatcctcctgaccatgaaacaaagcgagaagcttcagacggaattggcttcactcaaggttaacgggccctcacaacctatactcgttcgggtgggcgaggacatccaactgacgtgttacctgtctcccaaggctaacgctcagtctatggaagtgagatgggatcgctcccacagatacccggcagtgcacgtctatatggacggagaccatgtggccggtgagcaaatggccgagtatcgagggaggacggtgttggtgtctgatgccatcgatgaaggcaggttgacactgcagatcctgagcgctaggccaagcgatgacgggcagtacaggtgccttttcgagaaggatgacgtgtatcaggaggcaagcttagatttgaaagttgtgggcctcggctcaagcccattaattacagtggaggggcaagaggacggcgaaatgcagccgatgtgttcatcagatggctggtttccccagccccacgtgccctggcgggacatggaggggaagaccattccaagcagctctcaggccctgacccaaggatcccatgggctatttcacgtgcagaccctgcttcgagttacgaacatcagtgcagtggatgtcacgtgttccatttccattccgttcctcggcgaagaaaagatcgccacctttagcttaagcggctggtag

SEQ ID NO: 110174 - DNA, 537 bp, synthetic construct
  misc_feature 1..537: note = Description of Artificial Sequence: Synthetic coding sequence
  source 1..537: mol_type = other DNA
atggaagtccgatgggacaggtcgcataggtaccccgccgtgcatgtgtacatggacggagaccatgtggccggagaacagatggcggaatacaggggccggacggtgctcgtcagcgacgctatagacgaggggcgcctcactttgcagattcttagcgcaagaccctcagacgacggccaatatagatgtctgtttgaaaaggacgacgtttatcaggaggccagcctcgatttaaaagtcgtgggcctgggctcatcacccttaatcaccgtggagggtcaggaggacggcgaaatgcagcctatgtgttcctcagatggatggtttccgcagccccacgttccttggcgcgatatggaggggaaaaccataccttcaagtagtcaggccctgactcagggcagccacgggttattccatgtgcaaactctcctgcgggtgacaaacatcagcgcagtcgacgttacgtgttcgatttccattccatttctgggcgaagagaagattgccacgttctccctcagtggatggtag

SEQ ID NO: 110175 - DNA, 738 bp, synthetic construct
  misc_feature 1..738: note = Description of Artificial Sequence: Synthetic coding sequence
  source 1..738: mol_type = other DNA
atggtggatttccctggctacaacctgtccggggccgtggccagtttcctttttatattgctgacgatgaaacagtctgaccgactggatactccaaaagcgtcgctgaaagttaacggtccctcacagcccatcttagtccgggttggagaggatatccagctcacttgctacctctcacctaaagcaaatgctcagtcaatggaggtcagatgggataggtctcatcgttatcccgcagtgcatgtctatatggatggcgatcacgtggctggcgagcagatggcagagtaccgaggccggactgtgctggtaagtgatgccatcgatgaggggaggctgaccctgcagatcctgagcgctaggcccagcgacgatgggcagtatagatgtctgttcgaaaaagatgacgtgtatcaggaggcatctctagatcttaaagtggtcagcctaggctcatctccactgatcacagttgaaggccaggaagatggcgagatgcaacctatgtgcagtagcgacggttggtttccccagccccacgtgccatggcgggacatggagggcaaaactatcccatcgtcatcacaagccctcactcaggggagtcatggactgttccacgtgcagactctcctacgagtcacaaacatttccgctgttgacgtgacgtgctcaatatcaattcccttcctgggagaggagaagatcgctactttctcgctgtccggctggtag

SEQ ID NO: 110176 - DNA, 1368 bp, synthetic construct
  misc_feature 1..1368: note = Description of Artificial Sequence: Synthetic coding sequence
  source 1..1368: mol_type = other DNA
atggtggatttccctggttacaatttgtcgggcgcggttgcttcatttctttttattctgctgactatgaaacagtccgaagacttccgggtaattggccccgcccatccaatccttgccggagtaggtgaagacgcactgctgacatgtcagctgctaccaaaacgaacgactatgcacgtggaggtgagatggtacagaagcgagcccagtacgccagtgttcgtccatcgggacggtgtggaagtcaccgaaatgcagatggaggaatatcgcgggtgggtcgaatggattgagaacggaatcgccaaggggaatgtggcactcaagattcacaatattcagccgagcgacaacggacagtactggtgccattttcaggatggcaactattgcggcgaaaccagtctgctgctcaaagtggccgggttgggaagtgctccttctattcacatggagggacccggtgaatcaggcgttcaacttgtgtgtacagcgcgtgggtggtttcctgagccccaagtttactgggaggacatccgcggcgagaagctgctcgccgtgtctgagcacagaatccaggatgaagacggactgttctatgccgaagctacgctggtcgtacgtaatgcgtcagcagaatccgtctcctgtctggtccacaatcccgtcttgaccgaggaaaaggggtccgtgattagcctgccggagaaactacagactgaactcgcttcccttaaagtgaatggcccctcccagcctattctggtcagagtgggagaagatatccaactgacttgctatcttagccccaaagctaacgctcagagcatggaagtccggtgggataggtctcatagatatcccgctgtgcacgtgtacatggacggggaccatgtggccggagaacagatggcggagtaccgtggacggaccgtcctagtgtccgacgctatcgacgagggtcgactgactctgcaaattctttcagcgcggccatctgatgatggccagtataggtgtctgttcgagaaagatgacgtctatcaagaagcctcgctggatctgaaagtggtcggattggggtcaagcccgcttataaccgtcgaaggccaggaggatggcgagatgcagccgatgtgctcaagtgatggttggttcccccagccccatgtgccctggagagacatggagggcaagacgataccttcatcttcgcaggccctcacccaggggtcccatgggctgttccacgtgcagactttgctgcgggtgaccaacatttccgctgtggatgtgacgtgcagtatctcaattccattcctcggagaagaaaaaatcgctaccttctccctctcaggctggtag

SEQ ID NO: 110177 - DNA, 816 bp, synthetic construct
  misc_feature 1..816: note = Description of Artificial Sequence: Synthetic coding sequence
  source 1..816: mol_type = other DNA
atggtagattttcctggctacaacctgtctggggctgtggcaagcttccttttcatcctcctgactatgaagcagagcgaggacttcagagttatcggacccgcacatcctatcctggccggagtcggggaggatgccttgctcacatgtcagcttctgcctaagcgaacaaccatgcacgtggaggttcgttggtaccgctcggagccttccactccggtgttcgtccatcgcgacggagtcgaggtgaccgaaatgcaaatggaagagtaccggggctgggttgaatggatcgaaaacggaatcgctaaggggaatgtagccctaaagatccacaacatacagccgtccgacaacggccagtattggtgtcattttcaagacggaaactattgcggcgagacaagcctattacttaaagtagccgcagtcttgagagatgacataatagcctccctaaaagtcaatggcccatcacagccaatcttagtgagagtaggtgaggacatacagctgacctgttacctgagtccaaaggccaacgcgcaaagcatggaagtgcgctgggaccgcagtcaccgataccctgcagtgcatgtgtatatggacggcgatcatgtagccggcgaacagatggccgagtataggggccgtacggtcctggtctctgatgcgatcgacgaaggacggctcaccctgcagatcttgtcagcacggccaagcgatgacggccagtacagatgtctgttcgaaaaggacgatgtgtaccaagaggcctcactagacctcaaggttgtctgggtattgccacattag

SEQ ID NO: 110178 - DNA, 816 bp, synthetic construct
  misc_feature 1..816: note = Description of Artificial Sequence: Synthetic coding sequence
  source 1..816: mol_type = other DNA
atggtggactttcccgggtataacctgagcggtgcagtggcttcatttctcttcattctgctcactatgaagcagtcggaggactttagagtgataggcccagctcaccctatcctggcgggcgttggcgaggacgctctgctgacatgccaactgctgcctaagcgcactactatgcacgtggaagttcggtggtacagatctgagccttctactcctgtgttcgttcacagagatggagtggaagtgactgaaatgcagatggaagagtatcggggctgggtcgaatggatcgaaaacgggatcgccaaagggaatgtcgctttgaaaattcacaacattcagccctcggacaacggacagtactggtgccacttccaggatggtaattattgtggggaaacttccttgttgctcaaagtcgccgcggtactcagggacgatatcatagcgagcctgaaagttaacggtcccagtcagcccatacttgtcagggttggggaggacatccagctgacttgctatttaagccccaaagccaacgcccaaagcatggaagtacggtgggacagaagccacagataccctgctgtccacgtctacatggatggcgaccatgtcgcaggcgagcagatggccgagtatcgcggacgaactgtgctggtgtctgacgctattgacgagggccggctgactctgcagattttgtcggcacgcccctcagacgacggacagtaccggtgcctgttcgaaaaggatgacgtgtatcaggaggcctcgctggacttgaaggttgtctgggtgctcccccactag

SEQ ID NO: 110179 - DNA, 738 bp, synthetic construct
  misc_feature 1..738: note = Description of Artificial Sequence: Synthetic coding sequence
  source 1..738: mol_type = other DNA
atggtggatttcccaggctacaacctgtctggtgctgtagcttcatttctgttcattttactaaccatgaagcagagcgatcgcctggatacacctaaggcctccttgaaagtgaacggaccatcacagcctatcctggtacgggtgggggaagacattcagctgacctgctacctgtcccctaaagcaaacgcacaatctatggaggtgcgatgggaccgctcccatagataccccgcggtgcacgtgtacatggatggggaccacgtggctggagaacagatggcagagtatcgggggcggacagtcctcgtttccgatgcaattgacgagggcagactgacactgcaaattctgagcgcccggccatccgatgacggacagtaccggtgcctgttcgaaaaggatgatgtgtatcaggaggcatccttagatcttaaagtcgtaagcttgggtagctctcctcttatcacagtcgagggacaggaggacggcgaaatgcaaccaatgtgcagttctgacggatggttccctcagccgcacgtcccatggcgtgatatggaggggaagacaataccaagctcatcgcaagctctgactcaggggtctcacgggctgttccatgtccagacacttttgcgagtcactaacattagcgctgtggacgtaacgtgttccatctccattcccttcctgggcgaggagaagatcgctactttcagcctgagtggctggtag

SEQ ID NO: 110180 - DNA, 816 bp, synthetic construct
  misc_feature 1..816: note = Description of Artificial Sequence: Synthetic coding sequence
  source 1..816: mol_type = other DNA
atggtcgattttcctggatacaatctgtcaggcgcagttgctagtttcctcttcatattgctgacaatgaagcagtcggaagactttcgggtaattgggcctgcccacccaatcttagcgggggtcggcgaagatgctttactgacatgccagctcctgccaaagcggacaacaatgcatgtcgaggtgcgctggtatcgtagtgagccctctacccctgtgtttgtgcatcgggacggcgtggaggtcactgagatgcagatggaagagtaccgtgggtgggtcgagtggattgagaatggaattgccaaaggtaacgtcgccctgaagatccacaacattcagccatctgacaacgggcaatattggtgtcatttccaggatggcaattactgtggagagacttcattgttgctaaaagtcgctgctgtactgcgagatgacatcatcgccagccttaaagtgaacggacccagccaacccatcctcgttcgtgtgggggaagatatccaactgacatgttacctgtcccctaaagctaacgctcaatcgatggaagtgcgctgggacagatctcaccgttacccagcggtccatgtgtacatggacggagatcacgttgccggggaacagatggctgagtatagaggaagaacagtcctggtgagcgatgccattgacgaaggacgccttacgctgcagattctgtccgccagaccatctgacgacggccagtatcggtgcctgttcgagaaagatgacgtgtaccaggaagcgtctcttgacctgaaggtggtgtgggtgttaccacactag

SEQ ID NO: 110181 - DNA, 738 bp, synthetic construct
  misc_feature 1..738: note = Description of Artificial Sequence: Synthetic coding sequence
  source 1..738: mol_type = other DNA
atggtagactttcccgggtataacctgtccggagccgtggctagtttcctgtttatccttctcactatgaagcagtcggacagactggacacccccaaggccagcctgaaagtcaacgggccctcgcagccaatcctcgtgcgagtaggtgaagacatacagctcacatgctacctgagccctaaagccaacgctcagtctatggaagtcagatgggataggtctcaccgctaccccgctgttcatgtgtatatggatggcgatcatgttgcaggggagcaaatggctgagtatcgcggcaggacagtgcttgtctcagacgcgatcgatgagggccggttgaccctgcaaattcttagcgcccgcccctccgatgatggccagtacaggtgcctattcgaaaaggacgatgtctaccaggaagccagcttggatttgaaggttgtaggactgggctcaagccctttgattaccgtggagggccaggaggacggtgagatgcagccaatgtgctctagtgatggttggttcccacagccccacgtgccctggagagatatggagggcaaaacaatcccatccagctcacaggcgctcacgcagggatcccacgggctgtttcatgtgcagaccttgctgcgcgtgactaacatcagcgcggtagatgttacctgctcaatttcaattccatttctaggggaagaaaagattgccacgttcagcctcagtggctggtag
